United States Patent Application Publication US 2025/0215492 A1 - sequence listing, part 7

SEQ ID NO: 102331 - DNA, 120 bp, synthetic construct
  source 1..120: mol_type = other DNA
catcttgcattagcatggtgcagcggttatagttaagcagccaagaaaatcataatgaatgtgtctaggtacagtggctcccacctgtaattccagcactttgggaggccgaggcaggag

SEQ ID NO: 102332 - DNA, 120 bp, synthetic construct
  source 1..120: mol_type = other DNA
tgcctgagcctcccaaagtgctgggattacaggtgtgagccatcacacccagccgtaaaaggttaaatatttaaaataaattataataaaccctctttgaatgtgtaaaaccagttaaaa

SEQ ID NO: 102333 - DNA, 120 bp, synthetic construct
  source 1..120: mol_type = other DNA
aggctcaagtgatccacctgccttggcttcccaaacttctgggattacaggcgtgagccacctacaaattataataaaatttctgttgagtgggaataaggacagattattactgatgta

SEQ ID NO: 102334 - DNA, 120 bp, synthetic construct
  source 1..120: mol_type = other DNA
aggaagaaacctgtttgcagactgatgttaaatctcactactctttaaacagatgccaacccaacattattatgcaagggagttgctaaagaagaatatgagtaagtagcaagtttatat

SEQ ID NO: 102335 - DNA, 120 bp, synthetic construct
  source 1..120: mol_type = other DNA
taggaaccaaccctgctgatgacttactccagacttctggcctccagaactacaaggaaataaacttctgttgtctaagccaccaagttgtggcatcctgggaaactaataggccttcaa

SEQ ID NO: 102336 - DNA, 120 bp, synthetic construct
  source 1..120: mol_type = other DNA
gaattgaataagattgcagaagaccttcaaatgttcattctaccatacacattttaaaaacacctgcaaatacagcaaacaactggacaagtatgtttcagagataagcactacagtcat

SEQ ID NO: 102337 - DNA, 120 bp, synthetic construct
  source 1..120: mol_type = other DNA
aagccgagattgcgccactgcactccagcctgggcgacagagcgagtcttcatttcaaaacaaacaaacaaacattttagtgtgggctgggcgcggtggcttacggctgtaatcccagca

SEQ ID NO: 102338 - DNA, 120 bp, synthetic construct
  source 1..120: mol_type = other DNA
gccctgttccaggatccgttcctcagcttcatgcttaattttgtaaccatcagtcttctagggacttggtgattcaagtgaaataaatcagtaagtgatgaggaaactgaaatatcaatt

SEQ ID NO: 102339 - DNA, 120 bp, synthetic construct
  source 1..120: mol_type = other DNA
tgttactcccttcagcactttctgtgctcccttttgtgggaggacagcgacaccagcatcactaaaggagctgaattaaatgcagtgcttttgactttggacttacatgcagagagaaag

SEQ ID NO: 102340 - DNA, 120 bp, synthetic construct
  source 1..120: mol_type = other DNA
aggagctacctgcggcactctaagactgggcagatggaagaaagacagttggggttgacgcagtatcttctacaataacgcctgaaataacttaaactttgttttcagaaattattattt

SEQ ID NO: 102341 - DNA, 120 bp, synthetic construct
  source 1..120: mol_type = other DNA
tggctaagtttcatatttttggtagagacaggctttcgctatgttggtcaggctggtctcgaacttctgacctcaggtgatccaccttacctccaactcagacacccccgctccagtgac

SEQ ID NO: 102342 - DNA, 120 bp, synthetic construct
  source 1..120: mol_type = other DNA
atcacaatggcttttctgcaaactccttgccgaccactgatcacttggcactgggctctcagccccagtctcctcacctttacactggaacaaaagagcctcaaaggggccatgtggatc

SEQ ID NO: 102343 - DNA, 120 bp, synthetic construct
  source 1..120: mol_type = other DNA
ggctaacaagaatatgaaaaaaagctcaacactactgctcattagagaaatgcaaatcaaaacccttgattctctaatgatgttgctgcaccttcaacaccactgggaactctgcctgct

SEQ ID NO: 102344 - DNA, 120 bp, synthetic construct
  source 1..120: mol_type = other DNA
taggaagacgtaatagcatatacaaagacagaggtcccaaagaacatggcatgtttgaaaaatgatgtagccgtatcttagcctgaaacagctggagtctagcactcatgggatatggct

SEQ ID NO: 102345 - DNA, 120 bp, synthetic construct
  source 1..120: mol_type = other DNA
aataagcaaagaagaggaatgtgacagtcaaaagtatatggaagagaaaaaattaaactcataagttggctgggtgcggtggctcatggctgtaatcctagtactttgagaggcaaagat

SEQ ID NO: 102346 - DNA, 120 bp, synthetic construct
  source 1..120: mol_type = other DNA
ttttcccctttccatgctttttgcatttggttttgtgtgtgggggcaaatgtgtacacgggcgagaaaatgcacacactcttctaaataagggggcagtaaaagagttattaggaaagaa

SEQ ID NO: 102347 - DNA, 120 bp, synthetic construct
  source 1..120: mol_type = other DNA
atcgcgccactgtactctagcctgggtgacagagcgagactccgtctcaaaaataaaaaataaaaataaaaataaaaataaataaataaatcagaaaacctaaacatttccagttccacg

SEQ ID NO: 102348 - DNA, 120 bp, synthetic construct
  source 1..120: mol_type = other DNA
ctcccaaaggcctgggattaccggcaagagctaccttgcccagcctagatttcttaatcaacagaagaatacttgcatttctaagataaaccttacttgaccacaatatattcggctttt

SEQ ID NO: 102349 - DNA, 120 bp, synthetic construct
  source 1..120: mol_type = other DNA
gcgtgaaccaccatgcccggccggtgtgctttgatcaacgttacttttaaagatctctgcatttatagttaagaagcttctcttctttctaaagctttgcattttctcccattttttcct

SEQ ID NO: 102350 - DNA, 120 bp, synthetic construct
  source 1..120: mol_type = other DNA
actatatgtggcatacatacctgtgtccacatggggcaaagtctgacagtgcagaagaacagaatcgctggaatcactttaaatttttgctcggtttcttcttgtcttcctagtcatcat

SEQ ID NO: 102351 - DNA, 120 bp, synthetic construct
  source 1..120: mol_type = other DNA
tctgtggctagggggttggggacccctgctctagtggatatcatgcccatgttatttaatccacatataatcctcctggctaggtactattattatttccaagttacatatgaagaaacc

SEQ ID NO: 102352 - DNA, 120 bp, synthetic construct
  source 1..120: mol_type = other DNA
gcagcatattaaacagattaaaaagtgactaaaatttagccaaaaggttcccagactagttcccttcccccaaaatcgctcttcccttttcatatcagagatgaacctggctctgttccc

SEQ ID NO: 102353 - DNA, 120 bp, synthetic construct
  source 1..120: mol_type = other DNA
ctacaggcaaaggaaaagtaccggaggctttagaaatgaaagcgatgggattagaaatatgtttgaaggaaatatctccaacagcagcatggcaaattaattggagggggcagagcaggt

SEQ ID NO: 102354 - DNA, 120 bp, synthetic construct
  source 1..120: mol_type = other DNA
acagggatttcatacaattgtaactactcataatccagaaacaataagtctcttatctacgaggagtgtgtgaactcagcagggaagggtagagtttggaaagcagataatcacccgagc

SEQ ID NO: 102355 - DNA, 120 bp, synthetic construct
  source 1..120: mol_type = other DNA
ctcactgaaagacaatgctttctttccctcctacgaaaagtggcccctacttttacctattttgatcactgtaggtgaggctgaccagttttgctagaaacaagcaagattggctgggtg

SEQ ID NO: 102356 - DNA, 120 bp, synthetic construct
  source 1..120: mol_type = other DNA
gaatgcggaccgctctaaagaggctgcagacttcatgaagtggtaccagagtagagcaggtttattaatcacggataaaactgctgaataattacctacttcaaaaagcattcatgagtt

SEQ ID NO: 102357 - DNA, 120 bp, synthetic construct
  source 1..120: mol_type = other DNA
tttcttgctacaagggcaaattgagtggttgtgacagaaactgagaccataacacccgcaaaggctaaaatatttactatctgaccctttacagaaaaagttggccggcccatgtcctgt

SEQ ID NO: 102358 - DNA, 120 bp, synthetic construct
  source 1..120: mol_type = other DNA
ttctttcttccagctcagctcagcctcaaagtcactgtttaacattctgcctccttaagaatctagaaaagtttgacagggttattcgtgggattcggtgtgctttaaaggaatgacagc

SEQ ID NO: 102359 - DNA, 120 bp, synthetic construct
  source 1..120: mol_type = other DNA
atgtttgtgaaatgctgcagtgaatctcaaagataacaggcacccggctaattctattgggttaacacgtccatgctggctgtgcaggcttatttaagtaattgcctgactgtgaatgaa

SEQ ID NO: 102360 - DNA, 120 bp, synthetic construct
  source 1..120: mol_type = other DNA
actcaccttcgtcctcgaactccagcttctccagcatgccggcttccgcgggtcccagggccgccgccagcgccgcctgagggggaggaggaggacagcgatcagcatgagctgcgacgc

SEQ ID NO: 102361 - DNA, 120 bp, synthetic construct
  source 1..120: mol_type = other DNA
ccgggcctgaaagaggaagtcctgaaaatgcctctcgtttagctttgtcatcttacttgcgccaatccctaagtcttaaacctcttaaaaaaagaaaaggggtggggagagaaaaagaaa

SEQ ID NO: 102362 - DNA, 120 bp, synthetic construct
  source 1..120: mol_type = other DNA
ccatgcaaacatggcaaaccaatttttgatggaggtgtaaaagcaatagaactggagtaattggatatcaaaaggtaaaaagacaaaaacaaaccccaacctaagccttgcgttttacac

SEQ ID NO: 102363 - DNA, 120 bp, synthetic construct
  source 1..120: mol_type = other DNA
agtgctgggattacaggcgtgagccactgtgcctggtcaggaaccaccactcttaaaaacaatttggcagttttttataaaactaaacatgcaactaccatgtaacacatcagttacact

SEQ ID NO: 102364 - DNA, 120 bp, synthetic construct
  source 1..120: mol_type = other DNA
cagcccagtgatttttggaatattcagaattgtgcaactatctaagtttacattttcatcatcccaaagagacagcttgtacccattagcagtcacgtcccattacctgctcaaccctca

SEQ ID NO: 102365 - DNA, 120 bp, synthetic construct
  source 1..120: mol_type = other DNA
accagcaatgtatgaggattcaagtttctcctgtactgtttagttttgcaagatgttaccactgcggggaactaggtaaagggtgcacaggatctctctgcattatttcttacaactata

SEQ ID NO: 102366 - DNA, 120 bp, synthetic construct
  source 1..120: mol_type = other DNA
caatgttttcttaaagtctcaacagacttatgccagacttaattttagctgtttcaggcaggcagggaaagccgggagaagaggcgaagggaggggaagggcgtgggcaatgtcatgcaa

SEQ ID NO: 102367 - DNA, 120 bp, synthetic construct
  source 1..120: mol_type = other DNA
tcctgcaagaaataaatcaacctcaaatactgggtaaggagctcctgaataatttagcatacagaactcttagtttctgtgcatcctgctgtcttccttgagctccactctgctctgcaa

SEQ ID NO: 102368 - DNA, 120 bp, synthetic construct
  source 1..120: mol_type = other DNA
cttctcagcctccataatcccatgaggcaattcccccaataaatcccctctcatccatctatcagtcagtcaatcaatcaatcaatcaatcatctattatctatctacctacctccatcc

SEQ ID NO: 102369 - DNA, 120 bp, synthetic construct
  source 1..120: mol_type = other DNA
cactggcttgggatttacttttctgtttcctctgagtcccacattgctctctgaagggaacgaatgactcatcatccttgtattgcctgtgtgtgacacatagtaggcattcaaaaaata

SEQ ID NO: 102370 - DNA, 120 bp, synthetic construct
  source 1..120: mol_type = other DNA
tcaagtgatcctcttgcctcagcctcccaaagcactgggattataggcatgagtgacatcacctggccaattttagtttctgttaagggaagacaattgatttttaaaagtagtgtagaa

SEQ ID NO: 102371 - DNA, 120 bp, synthetic construct
  source 1..120: mol_type = other DNA
aatatgggctatgtgcccagaaccagggtagttggttaataaaatatctgttgaacgaacatgtgctagcatgactagaaattggcatagaagatatgaagaaggagctcaaggaacatg

SEQ ID NO: 102372 - DNA, 120 bp, synthetic construct
  source 1..120: mol_type = other DNA
catttgcaatgacctggataagactagagactattattccaagtgaagtaattcaggaatggaaaacgaaacattgtgtgttctcactgatatgtgggagctaagctatgaggacgcaaa

SEQ ID NO: 102373 - DNA, 120 bp, synthetic construct
  source 1..120: mol_type = other DNA
atttatttattagagtttttgttcttattgagttgtatgaatatggcaagcagactctgagatggcccccaatgcatgatccccacctcctggcattcatgtacttgtgtatccctcttc

SEQ ID NO: 102374 - DNA, 120 bp, synthetic construct
  source 1..120: mol_type = other DNA
tggcaagggttgaggttcatattttccatactgaaatccaattgttccacattgcttgttgaaaagattttgctgcctcactggattcccttggtacctttatttaaaatcaattgacca

SEQ ID NO: 102375 - DNA, 120 bp, synthetic construct
  source 1..120: mol_type = other DNA
gtaatattacagattacctatgtcatattacacatggatagatggatatctgctgctttcagctcacgtgcacaacctcagtagtggtatccaccatttgacgtgtgcacactggagcca

SEQ ID NO: 102376 - DNA, 120 bp, synthetic construct
  source 1..120: mol_type = other DNA
ggattgcatgtaagaagtgaatgtagataatctcaaatcgtttttggcaatataaaaaaatcctaatatctgcatacagtagagagggttggctgcaggagagcctggagtcagcgggga

SEQ ID NO: 102377 - DNA, 120 bp, synthetic construct
  source 1..120: mol_type = other DNA
catgaaatcaattatgagtcaagtactgtaaaataatagtttactttaaaatgaaatgtaatagagggctgggtgcagtggtccatgtctgtagtcccagctacgtgggagggtgaggca

SEQ ID NO: 102378 - DNA, 120 bp, synthetic construct
  source 1..120: mol_type = other DNA
tggtaggaggtgattggatcatgggggcggtttctcatgaatggtttagcacaatcccctcagtgctgtcctcgtgatagtcagtgaattttcatgagagctggttgttcaaaagcatgc

SEQ ID NO: 102379 - DNA, 120 bp, synthetic construct
  source 1..120: mol_type = other DNA
taaatcctaccaaactcagcagttcctgtcgctgtgttcctaaagatctgtggatgacagtaatgcttgacaacagtgacatatgctgacacgctatactagcagtttgaaaactggcca

SEQ ID NO: 102380 - DNA, 120 bp, synthetic construct
  source 1..120: mol_type = other DNA
ctaaaaatacaaaaattagctgggcttggtggcgagtgcctgtaatcccagctgttcgagaggctgaggtaggagaatctcttgaacccgggaggtggaggttgcagtgagctgagattg

SEQ ID NO: 102381 - DNA, 120 bp, synthetic construct
  source 1..120: mol_type = other DNA
ccaaaacaacatatggcaacagaccgggtgctgaagcagatctgagaattccaccgaattcttctaacccagacatgaaaaagctttgcagcaatgtaaaaggagttctttttcacaaag

SEQ ID NO: 102382 - DNA, 120 bp, synthetic construct
  source 1..120: mol_type = other DNA
cgatacgacaacctggataacctcaggctactagaatccaaatcatgggttggaaatgcaacagagaagcaaacaggaatgggttgaaaattcttttttaacatgttacagacttggggc

SEQ ID NO: 102383 - DNA, 120 bp, synthetic construct
  source 1..120: mol_type = other DNA
accccagacacaatcacagcattgctagcttcccctccttaactcatatggctcactgatgttagtcatttctattttttctctatgcctatcaagactacctctcacaaatgcaccttg

SEQ ID NO: 102384 - DNA, 120 bp, synthetic construct
  source 1..120: mol_type = other DNA
gccattcaaaggtatttggcccaaaagtactctgtgcggcattgctttttccattttcctcttcaaaatagcctattagatatgagctgatcgctcctaagaatcgtgagccctccttaa

SEQ ID NO: 102385 - DNA, 120 bp, synthetic construct
  source 1..120: mol_type = other DNA
aaataaccaacaattttaaaaggatgacaatacaaactacgtttcacgacaataagaaaacccagaatttggccgggcatggtggcttatgcctgtgatcccagcaatttgggaggttga

SEQ ID NO: 102386 - DNA, 120 bp, synthetic construct
  source 1..120: mol_type = other DNA
attctcaaagtcaaattgtgtgaccatagtgtatataaaatgaagacagcaaacatcgcctatggaagaagacataggttgggctcaaagcttgcacctttcctctctcggtagttctgg

SEQ ID NO: 102387 - DNA, 120 bp, synthetic construct
  source 1..120: mol_type = other DNA
aaataaataaataaataaataaataaataaataagaataatagggctgggtgcagtggctcatgcatgtaatcccagcactttgggaggctgaggcgggcggatcatgaggtcaggagtt

SEQ ID NO: 102388 - DNA, 120 bp, synthetic construct
  source 1..120: mol_type = other DNA
ttgagaagtgaggggatctggtgcctgagcaatcaaccatgattcatagtaacttgctacagtgctgtttgaacagaaataaaatttgacctttttctatgcacccaagccactcaacaa

SEQ ID NO: 102389 - DNA, 120 bp, synthetic construct
  source 1..120: mol_type = other DNA
catgccactgtactccagcctgggtgacagagtgagaccctgtctccaaaaaaagttatttccacaattcattcctacattccggaaaagaataaaccatattaataccacatcccaatg

SEQ ID NO: 102390 - DNA, 120 bp, synthetic construct
  source 1..120: mol_type = other DNA
gtttgagttgtggtgtaatacacatagcatagtttgccatcttaaccatttttcagtagacagtcagtagcattaagcatgctcacactgtggtgtaaccaatctccagaacttcttcat

SEQ ID NO: 102391 - DNA, 120 bp, synthetic construct
  source 1..120: mol_type = other DNA
tcacagttgtaccaaggatacctcgccagctaaagttaatgcttttctaagtgcttatgaattaggggacagtcccggttctgagctgaaggaattctcatctaaatgcaaatcaagaca

SEQ ID NO: 102392 - DNA, 120 bp, synthetic construct
  source 1..120: mol_type = other DNA
agagggagaatctatctctaaaaacaaacaaatacataaaacacaagtctgggcttggcacagtggctcacacttgtaatccctttggatttgggattactttgggaatctttgggaggc

SEQ ID NO: 102393 - DNA, 120 bp, synthetic construct
  source 1..120: mol_type = other DNA
caacaagcaactggctagcagtataaagggaagctctggcacagattagtcacagattggcaaactttctgaaaaaagcccagatagaaatatttcggctttgtgagccatatagtctct

SEQ ID NO: 102394 - DNA, 120 bp, synthetic construct
  source 1..120: mol_type = other DNA
aatacacatatttaaggtctactgcatacctaggtgatgtcctttattgacattgccagcccaagttagggaaaaagataatcacggtgcactctgcctcccaatagaggtgctatatgt

SEQ ID NO: 102395 - DNA, 120 bp, synthetic construct
  source 1..120: mol_type = other DNA
tgtgagtcacagactatagagctgctagtttaccatttctgggcagacagctttaacatcaagacctgatgaggttgtaagggtatttaaaatggcagtcaggaatataagagcaaagtg

SEQ ID NO: 102396 - DNA, 120 bp, synthetic construct
  source 1..120: mol_type = other DNA
gctgttggcaaggggccgtagttcctccctgcctgggcctaatgaaacttcttcattcagtcctaaccaaccatcctgcagccttccctttagtttagttatatattaaatatataataa

SEQ ID NO: 102397 - DNA, 120 bp, synthetic construct
  source 1..120: mol_type = other DNA
taggtgaccaaagatgtagtatgaataagcacagtcaagaccagaagaatgcccacccaaattgctgacccacagaattgtgagttaagtaaatggtggttatgttaagttttggggagg

SEQ ID NO: 102398 - DNA, 120 bp, synthetic construct
  source 1..120: mol_type = other DNA
tgcttccaataaatcaaaagtgaattcctaggagaaaaagatggggagcatgggagtgactgctgtggaaggaaattggaaaagcgctgatcatcctaacacctttgcagtagaagtttt

SEQ ID NO: 102399 - DNA, 120 bp, synthetic construct
  source 1..120: mol_type = other DNA
tgtgcacacacctgcatgcatacatacttgcacacacagttgcatgcacacacacctgcatgcacatacctgcatgcacacacacctgtgcacacacttgcatgtacaacttgtcacaca

SEQ ID NO: 102400 - DNA, 120 bp, synthetic construct
  source 1..120: mol_type = other DNA
gcagggctcacatatttgtcatcctattacccatgctagcagttttaggcacataagttgcttaataggtatttgctgaataaatacatgataaaatgagtgctgttggccgcgcgtggt

SEQ ID NO: 102401 - DNA, 120 bp, synthetic construct
  source 1..120: mol_type = other DNA
accatcaggtaaccaatggggacattctcttccattccttgaaatacaccctttcaaaatgtaagtggggagccttgggccatcagcctgattttcagaagctcaaatgacataaaaatt

SEQ ID NO: 102402 - DNA, 120 bp, synthetic construct
  source 1..120: mol_type = other DNA
tggggtataaacagttgggttataaggagataagaacaccactttcctgttacactcgcggggaggaagctgacagcaaacccagagcactccctgtattctcttttctttcaactggga

SEQ ID NO: 102403 - DNA, 120 bp, synthetic construct
  source 1..120: mol_type = other DNA
acggttctcatgcctcagtctcctgactagttgggattacaggtgcccaccaccacgccaagataattttttgtatttttagtaaagacagggtttcaccatgctggccaggctggtctg

SEQ ID NO: 102404 - DNA, 120 bp, synthetic construct
  source 1..120: mol_type = other DNA
ggggaaaaaaacctcctcctggtcatgtcccagatgttaccatttttcattttgtttctttttttcttttttttttcagacagagtctgctctgttacataggggctggagtgcggtgtc

SEQ ID NO: 102405 - DNA, 120 bp, synthetic construct
  source 1..120: mol_type = other DNA
agagggaggctctcaccattcctggtgcccaaaacctcaaatggcaagaagccaaattattctgaatgttgaggaaaagctttaaaaaccaatttctagtctcttagaatcagctgtttc

SEQ ID NO: 102406 - DNA, 120 bp, synthetic construct
  source 1..120: mol_type = other DNA
atgtgaccttatttggaaacagggtcttttcagatcaaccaagtctagatgagattttgctggactagggtgggccctaatgcaatgtgactggtgtccttataagaagaggaaaagaga

SEQ ID NO: 102407 - DNA, 120 bp, synthetic construct
  source 1..120: mol_type = other DNA
tacatgtagcctagagctgcctccttaaatattttaagtttggcctaaagggttttctgtacattgtgaactgtaacagaccatagcctacattcgtgccagccagagttttggcaatca

SEQ ID NO: 102408 - DNA, 120 bp, synthetic construct
  source 1..120: mol_type = other DNA
tcatgcctataatctcagcatttcaggaggctgaagtgggtggaccacctgaggttaggagttcaagaccagactggccaacatggcaaaaccccatctctactaaaaatacaaatatta

SEQ ID NO: 102409 - DNA, 120 bp, synthetic construct
  source 1..120: mol_type = other DNA
atgacctgtgacagccctgcagagaaacccctctggggggctggggtcttcgtgtgtaaaggaaggggccagccacagagatctctaaagcctcctccatggacaatgctgaaaagtagc

SEQ ID NO: 102410 - DNA, 120 bp, synthetic construct
  source 1..120: mol_type = other DNA
actttctatcatgagaatggattatccattcagaaaattacttcttttcagccactgctttgcttttgagccaagaggctggcgaaggccatatttaagcactgacctgcttcctgccct

SEQ ID NO: 102411 - DNA, 120 bp, synthetic construct
  source 1..120: mol_type = other DNA
gactctataacccagacactttctgccacaatcaaactggggtatcaccgagagaaagaacatgaagacttaaaattacattttagctgtatgaattactctcccagaagtggggcttca

SEQ ID NO: 102412 - DNA, 120 bp, synthetic construct
  source 1..120: mol_type = other DNA
tgttgaggaaggaggtgctaagatggattagagcaagtccctgtagtctgtaggagaaatggggacaaaaccaaaaaatcagccccaacaccaccatgcaataaagtcgagaaccaggaa

SEQ ID NO: 102413 - DNA, 120 bp, synthetic construct
  source 1..120: mol_type = other DNA
gaacgacaagaaggaagtaatgtattctgctgactgttgttacaagagccatgaagtgagaagagcaacatttccattgacactggagggaggctttgcttatacagggttttgaaacct

SEQ ID NO: 102414 - DNA, 120 bp, synthetic construct
  source 1..120: mol_type = other DNA
agctcagaggcttgcttcattctttgaacatctgagctgcccgtgggctttgtgtgatgagtaagaggtaagaagcaaagcaccctaggacactgaatgataaggcccgtattcagtatg

SEQ ID NO: 102415 - DNA, 120 bp, synthetic construct
  source 1..120: mol_type = other DNA
accccaccaacacccctatcccatgctcagcttctctttgagaactgctgtggtagacaaatatttcagcttcagcacccctttacactcttgaaaaatagggtgtttaacatataatga

SEQ ID NO: 102416 - DNA, 120 bp, synthetic construct
  source 1..120: mol_type = other DNA
tttaatccaatctccctatttcacagataggaaacttctaaagtaattgttagttcccattctttatggtcatgtggtccgagtgcctccatcctgtctcacagctcccttctatggaag

SEQ ID NO: 102417 - DNA, 120 bp, synthetic construct
  source 1..120: mol_type = other DNA
aaagcagtcctggggaggcacaggggaggcccctctgctgctttgtgagagagagaaattctgccacagaacttttcccatatacaatggtttcggaaaaacaatttgctaataatttgt

SEQ ID NO: 102418 - DNA, 120 bp, synthetic construct
  source 1..120: mol_type = other DNA
tgagtcagcatggtgactactgtcatttcctagaaggaaataagggaaggacaccaattcaataggagacctgggggactttcatactctcagctgatgccagggtgcccagtgagcagg

SEQ ID NO: 102419 - DNA, 120 bp, synthetic construct
  source 1..120: mol_type = other DNA
aaatcagtgtgataaccaaatcaagatcacgcctcgctgggaccctgtcacactaaagcttccagagcatagtcgtttttaaaatctgtaatagtacctggagttttttcctgtgctttc

SEQ ID NO: 102420 - DNA, 120 bp, synthetic construct
  source 1..120: mol_type = other DNA
gtggaaacaaaagtattggttgcatcctttcaaagacgatctggaatctcaaacctagggtttacctctgcccctcgatggcaacaacaattctgggagttcagggccatgataaaaaat

SEQ ID NO: 102421 - DNA, 120 bp, synthetic construct
  source 1..120: mol_type = other DNA
attgattccagaacccctctcaggcaccaaagtctaggatgtgcaagtccccgatataaaatggtgtaatacgtgcatatgacctatacacaccctcctgtatactttaaattatctctg

SEQ ID NO: 102422 - DNA, 120 bp, synthetic construct
  source 1..120: mol_type = other DNA
acttaagtctgggagttcaaggctgcagtgagtcatgactgcgccacagcactacagcctgggcgacaaagtgagaccctgtctcaaaacaacaaaaaaacaaaaaaaaatgaaaaacaa

SEQ ID NO: 102423 - DNA, 120 bp, synthetic construct
  source 1..120: mol_type = other DNA
gacaggggtctttggtatatctctgcatatccctgaaaggtgtggacaggtcaatgagtcttctctacagcggctcttggcacaggtccgaacatgcagaaagcctgatgatgtcctgct

SEQ ID NO: 102424 - DNA, 120 bp, synthetic construct
  source 1..120: mol_type = other DNA
cgtgagccacagtgcccagccacaatttctgttctttataagccacccagtctatggtatgattacggcagcctaaacagacgaagacgctgagttagctaatttgttgatccaaacagt

SEQ ID NO: 102425 - DNA, 120 bp, synthetic construct
  source 1..120: mol_type = other DNA
acaacgccagacattcctgccttcctgcagccaagtttccgatgtgctgttggaggaatcctgccaagggtaatgtgacatttacatgatgcctggtggggctgcccagtgacataacag

SEQ ID NO: 102426 - DNA, 120 bp, synthetic construct
  source 1..120: mol_type = other DNA
ttgttctatttcaccccaaccaaatacctcctcctcctcccttctccttattcgttaaaattcagcgcatgatactggcaagcttcagccgcagctcacagcactttcagaggaaaacgt

SEQ ID NO: 102427 - DNA, 120 bp, synthetic construct
  source 1..120: mol_type = other DNA
agagagctggagccagttcccttaggacacatgataactggcagaggaagagcagctgctggggaacggggggtggtgtgtagggagctgcacaccctggggtggtcaaggcagaatggg

SEQ ID NO: 102428 - DNA, 120 bp, synthetic construct
  source 1..120: mol_type = other DNA
tgcatttttgtgctgttttcctctgtgccagccccctgggaagcaggcactgttgatgccctgtccctaggtctcacttctgagttcgcctgcagctgggaggcagttcctgtgggcact

SEQ ID NO: 102429 - DNA, 120 bp, synthetic construct
  source 1..120: mol_type = other DNA
tctttggaccactccaagccaccctgagatgccacgtggaaccctaggaaaacccacctctgcaagaaggtcctgaaatcaggtaacttctcgctacagtgtaaatgactgataggctca

SEQ ID NO: 102430 - DNA, 120 bp, synthetic construct
  source 1..120: mol_type = other DNA
agttccactgaaatctggtgatggagttctcggcaatgtggtttttgtcctgtcatctcataggaaacaggtctttgaataagtcattgcatcattgcaaaatgatgtttcctccccaac

SEQ ID NO: 102431 - DNA, 120 bp, synthetic construct
  source 1..120: mol_type = other DNA
aaatccgagcagggatcacacaggatgtcccaggcatttccacacaggcgagaccacagagcattatgcagccttgatgtgccaactgagtcatgcaatgtgctgcacacacgagcaccc

SEQ ID NO: 102432 - DNA, 120 bp, synthetic construct
  source 1..120: mol_type = other DNA
aaaaaaaaaaaaaaaagaataaggattgccgagaactgccagaggccaggaggcaggtggggagcaggttctccttcagggcctgcagtagaaaccaaccttcccacaccttgacttcag

SEQ ID NO: 102433 - DNA, 120 bp, synthetic construct
  source 1..120: mol_type = other DNA
ttaaaatactctcaggagaaacaccaagtcctgttattggataataagactctagcatgaattaatgatcagagtgaaggcctggggggcacagcccctaggatagcaaagttttggttg

SEQ ID NO: 102434 - DNA, 120 bp, synthetic construct
  source 1..120: mol_type = other DNA
cctcctcagataatcatcatcattctttttctatttaaaaaaatttttttggctgggcgcggtggcttatgcctgtaatcccagcactttgggaggctgaggtgagtggatcacaaggtc

SEQ ID NO: 102435 - DNA, 120 bp, synthetic construct
  source 1..120: mol_type = other DNA
atatgttccccagaattgctgcttgcttttagttaatgtatttattcagcacagaagacattatagagagatgaggaaaggggaggggcccaagtctgagcatttgtggaacacctacaa

SEQ ID NO: 102436 - DNA, 120 bp, synthetic construct
  source 1..120: mol_type = other DNA
ctacgtcttttcagagagaaagagacgtgagaggtaagcacagttttcccaaaggcccataaagaaagcaattctatttgtccaggatcagctcactaaggtcctcctagagcagggtgt

SEQ ID NO: 102437 - DNA, 120 bp, synthetic construct
  source 1..120: mol_type = other DNA
ccctgacctgcctcctgctttgagcaggtgtgcactggaaatgcaaatgatggtttttatagaatttcaagctgaaatcttctgactttcttccaaggaatgtattcaaaggaaagatgc

SEQ ID NO: 102438 - DNA, 120 bp, synthetic construct
  source 1..120: mol_type = other DNA
ctgatgtcaccacctcatctccagaaggagtcctgagggagaactgggtcctcaccactgctgcagtggcaaacaaaggacacaaaaataattgagtggctggtcaagaaccaagttaaa

SEQ ID NO: 102439 - DNA, 120 bp, synthetic construct
  source 1..120: mol_type = other DNA
ttcctgtcgtaccccgtgttagccatgtaatgtgggcagtgaccagaggggatgacaaaggtaaaatgtccagcaattcacagggaacttgagcacagcaaagtcactgggtaagtgcag

SEQ ID NO: 102440 - DNA, 120 bp, synthetic construct
  source 1..120: mol_type = other DNA
acactgacaagtgacattgcgtgacactgagtgaagtgtgagacattgtgatattggatgtttcttacactgtgacacggagtgatgtgaagtgatatgtgtaacattgacagtgatgtg

SEQ ID NO: 102441 - DNA, 120 bp, synthetic construct
  source 1..120: mol_type = other DNA
tttgccacatgctcattcagcttcatttttctctcttcacttgtcactatccgcccagatacacacatggagatgtcatgacatctaacacactctgcttgcccctacaagcaaataggc

SEQ ID NO: 102442 - DNA, 120 bp, synthetic construct
  source 1..120: mol_type = other DNA
ctccatccaccaaggaggacagcaatattatccccattttatggatggtgaaactgaggcacaggaaagttaagcaacctgtagatatttatcaaatgtgttgaaggaacgaggaagaga

SEQ ID NO: 102443 - DNA, 120 bp, synthetic construct
  source 1..120: mol_type = other DNA
tggtaaccacagggacagccctgcaggggccttgctctggcccactgtgaaagggaaagtccccttcctccactgatgtaacaaaacaaatctgctcttgttggccctgatgagctgaca

SEQ ID NO: 102444 - DNA, 120 bp, synthetic construct
  source 1..120: mol_type = other DNA
gtaggacgcaccccggcttgcaagccaggctgtgaatcagcggtttttgaaaaggatatggtaccacagctcacacatgtatgtaatgcagtattttctttttttacttttttagtatgg

SEQ ID NO: 102445 - DNA, 120 bp, synthetic construct
  source 1..120: mol_type = other DNA
tccacaccctgccacctctccctggtggccttgcccttcgtgtatctgttcagggccattggtgaacagagaaaaaaactactctagtaaaaagcaagtttcctttcattataaagaaaa

SEQ ID NO: 102446 - DNA, 120 bp, synthetic construct
  source 1..120: mol_type = other DNA
aaaaaattattattattttttttgagacagagttcctgtctgttgcccaggctggagtgcagtggcacaatctcagctcactgcaacctccacttccaattctcctgtctcagcaattct

SEQ ID NO: 102447 - DNA, 120 bp, synthetic construct
  source 1..120: mol_type = other DNA
aagtgttgattatgacatgtcaggcaaatgtttgccaagtgaatggatagagacctccatcgggtgaaaatgctttgtgttcaagccccctttgtgaccctgggcacctgttagagaagc

SEQ ID NO: 102448 - DNA, 120 bp, synthetic construct
  source 1..120: mol_type = other DNA
gttgcagtgagctgagatcgtgacattgcattccagcctgggcaacagaccgagaccccatgtcaaaaagaaaaaaaaaaaaaaagaaggaaagaggttgccttcataaagctgtaaaat

SEQ ID NO: 102449 - DNA, 120 bp, synthetic construct
  source 1..120: mol_type = other DNA
tcttcctcttcttgtaaggccacagtcctatcagcttacagccccacccttatgactttatttacccttaattacctcctcaaagccctatctccaaataagccacatcgagggtcaggg

SEQ ID NO: 102450 - DNA, 120 bp, synthetic construct
  source 1..120: mol_type = other DNA
cttatcatacaagttcttgggcaagtgggactttatgaaggaggtagtcacagagacccaccgctcaggcctcctgctgggggagctgggctataacttccgcttcccccttcacacaga

SEQ ID NO: 102451 - DNA, 120 bp, synthetic construct; identical to SEQ ID NO: 30307
  source 1..120: mol_type = other DNA

SEQ ID NO: 102452 - DNA, 120 bp, synthetic construct; identical to SEQ ID NO: 30308
  source 1..120: mol_type = other DNA

SEQ ID NO: 102453 - DNA, 120 bp, synthetic construct
  source 1..120: mol_type = other DNA
cctcgtggagctcatctctcactgaggaaagaagggctcggctttgataaaggaatgctagactttagcaggtgagtggcgggggtaggatcctgtctattctccagaaatgccatgaga

SEQ ID NO: 102454 - DNA, 120 bp, synthetic construct
  source 1..120: mol_type = other DNA
tttggtgattgtttccacttggcccctgccatgctgggacccagatactcccacttcatttaggatccctggtcagtggcagtaggtccccctgtgatttccaacctacagggagctctt

SEQ ID NO: 102455 - DNA, 120 bp, synthetic construct
  source 1..120: mol_type = other DNA
ccacgctccctcctgctagggctccaagtgccgacttgcagaggcctcgggagtgacagtggaacagagggtggcaccggcaccagaaagcaccccccgagcctagatttctaccttcag

SEQ ID NO: 102456 - DNA, 120 bp, synthetic construct
  source 1..120: mol_type = other DNA
ctaggcaaaaatacaattatttataatttgtattcaattatatacagacagttcataccagacaggagaagacagataagacttgaagtgtggggaagacctcagcacccggggccccca

SEQ ID NO: 102457 - DNA, 120 bp, synthetic construct
  source 1..120: mol_type = other DNA
gaaatggagttgatgaacttcaacgccgcacgcaggcacggctgcatctcacaaagtgcaagtgaaagaagccagaccaaaaaaaaatcgtgtaaattcaaaaccagacgatgccaatct

SEQ ID NO: 102458 - DNA, 120 bp, synthetic construct
  source 1..120: mol_type = other DNA
ttttctgtgctgccaactggacatccctcctcagggtcactggccacagctgctcagaggtcactccagactgcagccactccctttccatcagccttagctgttctgtgatcaaaacag

SEQ ID NO: 102459 - DNA, 120 bp, synthetic construct
  source 1..120: mol_type = other DNA
ttttaaaaatacacccccttttgaatctcctttctccctgcttcattatttaccccttcaggctctgaaatctttccctttcgtcttcggacactttcagacgctgcagtcctggaattg

SEQ ID NO: 102460 - DNA, 120 bp, synthetic construct
  source 1..120: mol_type = other DNA
acttgggcaggccagtccttagcccatcggtgctcaagacccccgagggccttcatctcaagcaggtgtgatccagagccctcccacggtccacaagaggggcatacactggctgctgtg

SEQ ID NO: 102461 - DNA, 120 bp, synthetic construct
  source 1..120: mol_type = other DNA
taaaataaaaagaaaatttctattggaaaaaggcaaacatatatattgggaaatttcagggcaaaaccaatagtgataccagcagccaggccagcagatgggcgccagaggcagtgtgag

SEQ ID NO: 102462 - DNA, 120 bp, synthetic construct
  source 1..120: mol_type = other DNA
ggtacatgacatgtgtgtgcgagtgtgtatctcttgacccggggaactgcagggaagcccccagataaacagtgtgcaccttgtccctggggaagcagctccatgctgagttaaggcaga

SEQ ID NO: 102463 - DNA, 120 bp, synthetic construct
  source 1..120: mol_type = other DNA
gattctatctccgggaataactgtatgaaggagagggcgttgctgagagggaatttaaaacacaaaaccctgaagcaatccttcttggagaacagggagcaaccctgggctggaacgttt

SEQ ID NO: 102464 - DNA, 120 bp, synthetic construct
  source 1..120: mol_type = other DNA
gccaaccgttaaacacaaggcgggaagccactgtctggcacataataggctcttaataatgggcctgtccatccccattagcaaaaccagatttttagttaataataggttctggtttaa

SEQ ID NO: 102465 - DNA, 120 bp, synthetic construct
  source 1..120: mol_type = other DNA
ttcaggaataacctatgccatgcaagcagtaacgctggcaatgcgctgactctgatttgtttttttagatagggtctagctttgtcacccaggctggagtgtagtggcccaatcacaact

SEQ ID NO: 102466 - DNA, 120 bp, synthetic construct
  source 1..120: mol_type = other DNA
agacctctctcttcctgacctccaatagtttcctctaaactgcatgtttcatttttaacagctgaaaacaacagtgcccatccactcttacttttcccctgagccacagtttttgcataa

SEQ ID NO: 102467 - DNA, 120 bp, synthetic construct
  source 1..120: mol_type = other DNA
ctcactgatactctccagggctttttttttttttttttttctccttaaaattaaaaaaaggagggaagaccagataggcaaaggaggcacaagcctgcaagtcatgtgcagccgtgcatg

SEQ ID NO: 102468 - DNA, 120 bp, synthetic construct; identical to SEQ ID NO: 30309
  source 1..120: mol_type = other DNA

SEQ ID NO: 102469 - DNA, 120 bp, synthetic construct; identical to SEQ ID NO: 30310
  source 1..120: mol_type = other DNA

SEQ ID NO: 102470 - DNA, 120 bp, synthetic construct
  source 1..120: mol_type = other DNA
ctatggtctcaacttttctcatgcaatttctaccaaattgactgagtaacaactgtctacttggtgctgtgctgaatgttgtaaggtcagggagtcctataaggcatgacccagccttta

SEQ ID NO: 102471 - DNA, 120 bp, synthetic construct
  source 1..120: mol_type = other DNA
gagttgaggctttcatagctccctacatccctgcagggttgctctggccttgctgtgtcatctcccaagggaagaattcagctcctctcagagaaaccctccctcagacctctgtcttgg

SEQ ID NO: 102472 - DNA, 120 bp, synthetic construct
  source 1..120: mol_type = other DNA
gtccaggctctagtgagccatgatcctgccactgcacatcagcctgggcaactgagtgagaccctgtctcaaaaaataaaataaaacaaaataaaataaaagtaacaaagcaaaacatct

SEQ ID NO: 102473 - DNA, 120 bp, synthetic construct
  source 1..120: mol_type = other DNA
gccattcaataccctagcctgaatcccataggactccagaggaccgctgtggactgaagggatttggaaaagaatttctctctacatcctgatttttcattttaggctgggaaatttaaa

SEQ ID NO: 102474 - DNA, 120 bp, synthetic construct
  source 1..120: mol_type = other DNA
tgaccctgctcagagttccttctaacagaatgcttttcacactcagaattcttttttaaagggaggggctgaaaaaggaaggaaagaatggctcccaaataggaaccgtattttctaatg

SEQ ID NO: 102475 - DNA, 120 bp, synthetic construct
  source 1..120: mol_type = other DNA
gaccacccttccacaagagacacaatggcgctcctgtggctctgatatgtaacccccacccccagactccggtgacccaaaacatgcgagtaaaccctttaattgctggaggttctcagc

SEQ ID NO: 102476 - DNA, 120 bp, synthetic construct
  source 1..120: mol_type = other DNA
attcagttcaagaaataacatttttcaaaaacccagaagttcagaggtgctcagtgatttgcccaggatccgtgggcagcttgtgggattgtgggggtcgacactggctctgctggttcc

SEQ ID NO: 102477 - DNA, 120 bp, synthetic construct
  source 1..120: mol_type = other DNA
gcaatggcttctgaaaaccagattctgaaactctgcaggccagccatttgggttttctgtttaattctctttaagtgatttaattctcttacaagtgctgaagtgagctgggaatgcacc

SEQ ID NO: 102478 - DNA, 120 bp, synthetic construct
  source 1..120: mol_type = other DNA
ggaatgaagggattttctcagtaacaatttactctttttaaccacacatactaagaaaactttattcgcagcaaattgtgatggggcgggggagagggtaggtaccattcaaggcaggaa

SEQ ID NO: 102479 - DNA, 120 bp, synthetic construct
  source 1..120: mol_type = other DNA
gggcaaaaaaacttactttttttttttttttttttttgggacaaggtctcactctattgcccggggttgagtgctgtggcacaatctcagctcactgtaactgccacctcccagactcag

SEQ ID NO: 102480 - DNA, 120 bp, synthetic construct
  source 1..120: mol_type = other DNA
ccgcagccagagagatgagctgggcactttcacccaacctgcccccagtgacgacagtgagagtatttgctaatcattcgccaaaattttaaaacacagttttctgggctttaggcaaca

SEQ ID NO: 102481 - DNA, 120 bp, synthetic construct
  source 1..120: mol_type = other DNA
aggctgaggcaggagaattgcttgaacctgggaagcagaggttgtagtgagccgagatggtgccactgcattccagcttgggtgacacagcaagactccatctcaaaaaaaaaaaaaaaa

SEQ ID NO: 102482 - DNA, 120 bp, synthetic construct
  source 1..120: mol_type = other DNA
agaggttgcagtgagccaagatggcaccactacactccagcctgggacagagcaagaccctgtctccaaaaaaaaaaaaaatttgttaaggtgctaaattacatattatatgcattttac

SEQ ID NO: 102483 - DNA, 120 bp, synthetic construct
  source 1..120: mol_type = other DNA
aactactctcttctatgtgggtgtttaggttgtctctaatacatctgctgagaaggcctagaagcaatgacaccccaggagtgacatgcacacgtaaacactatttgccactaaaagtga

SEQ ID NO: 102484 - DNA, 120 bp, synthetic construct
  source 1..120: mol_type = other DNA
tacatatcaatcctaaaactagcaagtgaaagtttgatgagaaagaagacatttacacaatcccaaagtaggtccccctgaagccctgactggtgacaagggggaaagtaagccctttat

SEQ ID NO: 102485 - DNA, 120 bp, synthetic construct
  source 1..120: mol_type = other DNA
tcccaaagtgctggaattacaagcgtgagccacctcgcccagccctaaagtgttattttaaaaaaggaattaagaaatacaggctgagcagtggcttgtgcctatgatcccagcactttg

SEQ ID NO: 102486 - DNA, 120 bp, synthetic construct
  source 1..120: mol_type = other DNA
ttaggggcagacttgggcaagccagagtcaatcttttttgtcgggtacagggtaaagctcacagtaattctggatcatggcaacatctggggacagacccagggccctttgtacaactca

SEQ ID NO: 102487 - DNA, 120 bp, synthetic construct
  source 1..120: mol_type = other DNA
ggttgaacaggggatgacatgatgggatttatgttttaaaaacaggagttggcaaattactacccaatggcccaatcctgctggccacctgcttttataaatacttattggaacacagct

SEQ ID NO: 102488 - DNA, 120 bp, synthetic construct
  source 1..120: mol_type = other DNA
tgcctctgaggcaccaaaggtttcctgtccttgcaatgctgggagggaccctagatggatttgtgggtgcatctcgggcaccccgctcagcacatggctcaggcacacgcaacgactcag

SEQ ID NO: 102489 - DNA, 120 bp, synthetic construct
  source 1..120: mol_type = other DNA
gaaaggacctgaagttttacaagttaaataaacttctctgaaagactcattcgaatttcaaacagctcccagcacagatcctctgaaaaagatccccagatgcagcaggatgagacacag

SEQ ID NO: 102490 - DNA, 120 bp, synthetic construct
  source 1..120: mol_type = other DNA
tctcactccctaaaagctaccactgcatgattttagggttctgggaagacagtcgcttccaaaaagagaatctgtggcatctggttttgatgctaggaattctttctttgttatgagata

SEQ ID NO: 102491 - DNA, 120 bp, synthetic construct
  source 1..120: mol_type = other DNA
tctcctttgactgttgttcctcttggcacttgggacacatgacacttttccacctgtggtaccgattgtccctagaatggtatccccacgagggcagggatgggctcattcactgctgcg

SEQ ID NO: 102492 - DNA, 120 bp, synthetic construct
  source 1..120: mol_type = other DNA
gctttgcttccttacttctttgagagagagctgggtgtttgtttattgtttttgaaacagagtcttgctctgttcccaggctagagtgcaatggcaggatctcggctcactgcaacctct

SEQ ID NO: 102493 - DNA, 120 bp, synthetic construct
  source 1..120: mol_type = other DNA
aactacatacagtttaaagcaaggatgatactagcccttccccaaactaaaacaccattgcaaaactaatgagaggccgcaaggttaggattgagagaggcctgaattctgctaagatgt

SEQ ID NO: 102494 - DNA, 120 bp, synthetic construct
  source 1..120: mol_type = other DNA
ttaaaccaggttctgctatgaagaaacaagaggcagccactgtccgatgggttagcacagtctgctgcgcacctcagcgaggaacaaactgtgcacatggacaaatgtgatggacttagc

SEQ ID NO: 102495 - DNA, 120 bp, synthetic construct
  source 1..120: mol_type = other DNA
ttacaaagaaccaactgaaaacgtccattaaactgaatccatcccctcgctaccagctcgccttaattgtcgggtgggctcggaagtgccacagtaagaattaagcgccagaatctaagc

SEQ ID NO: 102496 - DNA, 120 bp, synthetic construct
  source 1..120: mol_type = other DNA
attggggggtgaggttggccctgatctggcaagcagtttgagttttctgaagtctctagcaagggaatgacataataaaagtggtgatggaaacatctgtgcagcagccgctttgacaga

SEQ ID NO: 102497 - DNA, 120 bp, synthetic construct
  source 1..120: mol_type = other DNA
actccaaggtaacacacctgccctctgcctcactgaaaacaacagaagatcatggctgagaggccgagcatcctgtctgctgtgtggccatagctttcctggacatttgctgtgtctgtt

SEQ ID NO: 102498 - DNA, 120 bp, synthetic construct
  source 1..120: mol_type = other DNA
ctatttccaagtcaggtcacattctgaggtcctgggggtcaggacttccacaaaccatttttgccgggaacatcatacaacccttaacagttactataggattaaatgaaatcctacagt

SEQ ID NO: 102499 - DNA, 120 bp, synthetic construct
  source 1..120: mol_type = other DNA
gttccattcagcacatcaatcgtggagaaggcaggacatatccattccttgatagtcctatgtcatgggttgaattgtgtccctccaaaagtcacatgttgaaatcctaactcacagcac

SEQ ID NO: 102500 - DNA, 120 bp, synthetic construct
  source 1..120: mol_type = other DNA
ccagctaattgttaaatcctgtggcaagtcactctgtgacgtgagtcattactcactgacttttttgaaaccaaatgtttctgtcttagacctgctcaaaggaagaactggccaaaagct

SEQ ID NO: 102501 - DNA, 120 bp, synthetic construct
  source 1..120: mol_type = other DNA
gaaacagcgactctgtagccttgctctttcttcccatcctgggccactgtgtcatgattcttacccactcctaatccaatccccacttgcaagacctcaacagacttggagttctaatgc

SEQ ID NO: 102502 - DNA, 120 bp, synthetic construct
  source 1..120: mol_type = other DNA
ttcagtaccttttgagaaataaagctaaaattctaagcccctaaccaactgaaagaaccccctcttggccacggggaccccagaaaaaccttaaaactgagttcccggccataatgggat

SEQ ID NO: 102503 - DNA, 120 bp, synthetic construct
  source 1..120: mol_type = other DNA
gattcttatggagtgacctacaaatagcacatgtattgaaaacacatcaaccagtctcagagcagccctgtctcttgggttttaggagttcgacctggagctgtaggggggtgagataga

SEQ ID NO: 102504 - DNA, 120 bp, synthetic construct
  source 1..120: mol_type = other DNA
tttatattgttgttttgtttcattttctatttggagtgggaagctgtatggaagtggtcatcttgatgtcatcaatgataattgcctctgtcccttcacagtttctggacccggtcgggc

SEQ ID NO: 102505 - DNA, 120 bp, synthetic construct; identical to SEQ ID NO: 30311
  source 1..120: mol_type = other DNA

SEQ ID NO: 102506 - DNA, 120 bp, synthetic construct; identical to SEQ ID NO: 30312
  source 1..120: mol_type = other DNA

SEQ ID NO: 102507 - DNA, 120 bp, synthetic construct
  source 1..120: mol_type = other DNA
acagtggctcacacctgtaatcccagcactttgggaggctgaggcagatggatcacttgatgtgaggagtttgagaccagcctggccaacatggcgaaaccctgtctctactaaaaatac

SEQ ID NO: 102508 - DNA, 120 bp, synthetic construct
  source 1..120: mol_type = other DNA
gagtcctgagggttcagctctttttggaattccgtaaatgcccccaaatccttccaacacattgtttgcttgttaaaaaagtggtcgtgtgaatataaaagaagagggacgaaaactgga

SEQ ID NO: 102509 - DNA, 120 bp, synthetic construct
  source 1..120: mol_type = other DNA
taacaggctctgccttctccatagtacctgacaagccagaagagtgaacctggggattttctaccaaggacattgaagggccttggaaatactcaacagaaaaaggcagccgaaaggagc

SEQ ID NO: 102510 - DNA, 120 bp, synthetic construct
  source 1..120: mol_type = other DNA
cgttccctcactgtgagcacagtgtctgctgggacccgctgagatccagaggggctgggagtcttggatccacctctgatagaggttgagtgtttcttccccgctctcaggttgaaattg

SEQ ID NO: 102511 - DNA, 120 bp, synthetic construct
  source 1..120: mol_type = other DNA
ttgtccataaaaaccctaagctctgagcctttggggagactgatttgagtgatagctccatctcccatgtggctggcctcacattaaacattttactacaataccaagatctcggtgaat

SEQ ID NO: 102512 - DNA, 120 bp, synthetic construct
  source 1..120: mol_type = other DNA
aagaaattgatatggtttcaaaaagagatttttccagacccagtttctaaaagaacagctcatttcccaggctgaacagtggacagcaccaaacctcccaccaaatgctgtactgagctg

SEQ ID NO: 102513 - DNA, 120 bp, synthetic construct
  source 1..120: mol_type = other DNA
gcagatataaagcgttgctctaacacacagtattgccagtctttctgagtaaaagtcagcctggagagaaaggtgaactatcccaggcctctgatggtcaaggacaaatttgttttccac

SEQ ID NO: 102514 - DNA, 120 bp, synthetic construct
  source 1..120: mol_type = other DNA
gctgtccacctgcagaaaaacagacgaatggatgcagtcactccacgctctggacacgctgcctcctgccctgtatgaaacttatcattgtcctctctcacatgcgggccccccatagta

SEQ ID NO: 102515 - DNA, 120 bp, synthetic construct
  source 1..120: mol_type = other DNA
gaaggaaggaaggaaggaaggaaggaaggaaggaaagaaagaaggaaagaaggaagttaacaaagccccaaacctctgagactcacttcaccaatgatttaaaattctagtcatggctta

SEQ ID NO: 102516 - DNA, 120 bp, synthetic construct
  source 1..120: mol_type = other DNA
aagaagagtgtggtgctataggaccttgtaactcaagctaagttttgagtttttctttttttgtgtagttctgttttttgtttttgagacagggtctccctctgtcgctcaaggctgcag

SEQ ID NO: 102517 - DNA, 120 bp, synthetic construct
  source 1..120: mol_type = other DNA
gccaatgcaaatgtccagtcctacagggaaacagagacacataggggagcggggccccaggagagcttgcagagtgcccacaaggccgaagcaccataagcaccatgcagatggataaat

SEQ ID NO: 102518 - DNA, 120 bp, synthetic construct
  source 1..120: mol_type = other DNA
gtgtctctcccacactctcagatcttccgtgcaaggttttcactggaaagaagggttttgcagagtcaaacaggaggaagacgacccagtgcccgcggggctggtcccacagccttgcac

SEQ ID NO: 102519 - DNA, 120 bp, synthetic construct
  source 1..120: mol_type = other DNA
gtgaccgataccttccaccgggcttagctcactgctcatcttcctccactgcctctgcccatgttaggggggtctagtgggccacagtcagtgccacgtgaggagaagaaaaaggggtga

SEQ ID NO: 102520 - DNA, 120 bp, synthetic construct
  source 1..120: mol_type = other DNA
ttgtggtaaaatacacataacataaaatttgccatctcaaccattttaagtgtgcggtttggtggcatgaagcacattgacactgctgtgtagccgtcaccactgtcatctctagaacct

SEQ ID NO: 102521 - DNA, 120 bp, synthetic construct
  source 1..120: mol_type = other DNA
gcctagcaaaccaatataataggtgtacgaatatctcttcaggaccctgctttcaattctttccagttatccccagaagtggaactgctggacatcaggtcatcctactgtcaatttttt

SEQ ID NO: 102522 - DNA, 120 bp, synthetic construct
  source 1..120: mol_type = other DNA
atagactaattgttctgtttttggaaaaaaatgccactgggattttgatagggattgcactgaatctatagaccactttgggtagtcctgacctcttaacaatatcgcctcccaatccat

SEQ ID NO: 102523 - DNA, 120 bp, synthetic construct
  source 1..120: mol_type = other DNA
tcattttccaaacacagctatgcatccatggacatcccacctggaatgctgtcttaactcctcagacacttctgttcatggctaccatccacccctcctgtgaactgctctcattttgct

SEQ ID NO: 102524 - DNA, 120 bp, synthetic construct
  source 1..120: mol_type = other DNA
tcctcacttgctcctcatgcaaccctaagcagcatcctgctctaacaactgaggccgaggaggttcaaagggactcacgtcaagatggtgtaaaagagctgagggccggatgtgaggcct

SEQ ID NO: 102525 - DNA, 120 bp, synthetic construct
  source 1..120: mol_type = other DNA
gtgaagtattaacgacagagccaacattaatctgacattagtatgtccttctgaaatctcccaactgttgcctcatttggtccttacagcaacccacacaagtaggaaagacaagtggta

SEQ ID NO: 102526 - DNA, 120 bp, synthetic construct
  source 1..120: mol_type = other DNA
atgcagttccgaccttccagcgtttctgatgttttgtcttacagagctcctttgttgatgcagctgggataccccagaaagaagacagacaagagtgcaaatacaggacaaatagaaagg

SEQ ID NO: 102527 - DNA, 120 bp, synthetic construct
  source 1..120: mol_type = other DNA
caagtggtgacggccttggcaggcccctctgctgggaggcacgggggaggtgcctctggacaggccggccttgcgcaatccccaaaaccaccaaacgggcaattcttggtactgatgggc

SEQ ID NO: 102528 - DNA, 120 bp, synthetic construct
  source 1..120: mol_type = other DNA
aggcttctgcaaagacactggctgtcccccttataattagagagctgtctttatcccgttcccaaggtgaaagccaagatgattcatgacttgtgcacggcagttctaaagaggatcaca

SEQ ID NO: 102529 - DNA, 120 bp, synthetic construct
  source 1..120: mol_type = other DNA
tagcacccactgattcaatcaaataccaagcaggtggctgccgtgggcgtatttgcagacgtggatgacatctacagtcagtgacttgaagtgaagcagatcatgctgaatgatgtgggt

SEQ ID NO: 102530 - DNA, 120 bp, synthetic construct
  source 1..120: mol_type = other DNA
tgactgtcagggaacattcacagtacgtgaagggcaatcacaggtttagaaaagcaccacgatcacctcctagcctcgtctctgagccttggcagcagagtggggcaatcctcttgcctt

SEQ ID NO: 102531 - DNA, 120 bp, synthetic construct
  source 1..120: mol_type = other DNA
ttttggttagtgcttgaagacaaactgcaggagggacaccatgaactacaataaaattgggcaccctggggacatttttgtaaggtcaccgagttgctggctggctctgagacacaccct

SEQ ID NO: 102532 - DNA, 120 bp, synthetic construct
  source 1..120: mol_type = other DNA
caaactcctgacctcatgatccacctactttggcctcccaaagtgttgtgattagaggtgtgagctaccgtgtccggcctgtttttttgtttgttcgttttttgttttttgagatggagt

SEQ ID NO: 102533 - DNA, 120 bp, synthetic construct
  source 1..120: mol_type = other DNA
attcaagcaagttgctcagagccacatggtagagccgtgactcagccagaaccaaatcctggtcttgcaacttctaaccaaggtcccttttgatcatgtcatgctcttatagctgcttct

SEQ ID NO: 102534 - DNA, 120 bp, synthetic construct
  source 1..120: mol_type = other DNA
tggtgaaaccctgtctctactaaaaaatacaaaaaattagccaggtgtggtggcgggcacctgtagtccaagctactcgggaggctgaggcaggagaatggcgtgaacccgggaggcgga

SEQ ID NO: 102535 - DNA, 120 bp, synthetic construct
  source 1..120: mol_type = other DNA
aggtgcatgccatgctcccaggctcagggtcagaagattagtgggatccagtctgaggctcagcgctcagaccaagaagataaatgagaccagagacactcagagattaaataccttgct

SEQ ID NO: 102536 - DNA, 120 bp, synthetic construct
  source 1..120: mol_type = other DNA
gtcacctacacctgtcagaagggtttgggatctttctttctcatggagaaagtgcagaagattctgggtcaggccctgtgggacatccctagagccagaggaccgtcccctttgtgtagt

SEQ ID NO: 102537 - DNA, 120 bp, synthetic construct
  source 1..120: mol_type = other DNA
agatggggtttcaccatgttggccaggttggtctcgaactcctgacctcaagggatctgcctgcctcagccttccaaagttctgggattatggatgtgagccactgtgcctgacctagat

SEQ ID NO: 102538 - DNA, 120 bp, synthetic construct
  source 1..120: mol_type = other DNA
atttgaacctgggaggcagaggttgcagtgagttgagatcgcgccactgcactccagactgggcagcagtgcgagactatgtctcaaaaaaaaaaaaaaaaaaagtaaattaataggatt

SEQ ID NO: 102539 - DNA, 120 bp, synthetic construct
  source 1..120: mol_type = other DNA
taggacataggtcataaaatccactcaggacacacaggttttgttgcggctgctgttcatagaacaaaaccagagctccaggagttttctgggatgtctatatccaataggtcatgatgt

SEQ ID NO: 102540 - DNA, 120 bp, synthetic construct
  source 1..120: mol_type = other DNA
aaagaggcagattccaccttaccttcaggtttgccaagatccttccccaacgtacaagtgaaagggagctcaggaaggcagaatgaagggacacatcaaatccttggtgacaaagtttag

SEQ ID NO: 102541 - DNA, 120 bp, synthetic construct
  source 1..120: mol_type = other DNA
ggctgagccacgagaatcgcttgaacctgggagatggaggttgaagtgagccaagatcgcaccattgcactccagcctggggaaaaaaaaaagccaggcctcctaatgtactcatttaaa

SEQ ID NO: 102542 - DNA, 120 bp, synthetic construct
  source 1..120: mol_type = other DNA
cttggcgggttattggattagctactctcagaagacccaaaaggcataggggagagaagagataaatctggatgcggtggagacaacggccaaacagaaaaaccgcttggagaataaaag

SEQ ID NO: 102543 - DNA, 120 bp, synthetic construct
  source 1..120: mol_type = other DNA
atggttctcatagatcaagtcgggctttgagaaggaaggtgaacaggagaaaaaaaaaaatagaggcctcagaaagcccctccctcccaagtctctcctcacaggcgaaccacgacagat

SEQ ID NO: 102544 - DNA, 120 bp, synthetic construct
  source 1..120: mol_type = other DNA
ccagaaagctcatctttgaagagctacccatttcctgccaaagttgtggcgggaaggccttaggtactagaaaaccttggggaatggcaattaaaggattatcattcttacttatttgtt

SEQ ID NO: 102545 - DNA, 120 bp, synthetic construct
  source 1..120: mol_type = other DNA
ctccctaaaagcagacattaaacaataaaatgccaccacataccttgcccacaaaataaaatcaaaacaaacacctaagtctggctttgcttttcttctgctctctccctacctcccctg

SEQ ID NO: 102546 - DNA, 120 bp, synthetic construct
  source 1..120: mol_type = other DNA
gacattcaccatgtggctcataagtacagttggagggacaactttggagttgtccgagggcccgagtttgagctctagtttgccatttactggttatgcaatctcagtaaattattcaaa

SEQ ID NO: 102547 - DNA, 120 bp, synthetic construct
  source 1..120: mol_type = other DNA
cactcccagcttcaaaagaacaggctggaccgcaggacacctggcttctctttccagctgaatccctttgtgactttaggcaaagaagattaaatattttagattttcaattatgttcac

SEQ ID NO: 102548 - DNA, 120 bp, synthetic construct
  source 1..120: mol_type = other DNA
gatacccttcaatgtatatggggtcaagagagtccccagaaaactgtgggccatccccaaagcccccacatcatccccagtcttttctgtttgggccaaaggtaataagtgatgactcag

SEQ ID NO: 102549 - DNA, 120 bp, synthetic construct
  source 1..120: mol_type = other DNA
tgctcaaaatgcaggcagagctcgggcagattcccccattgacgggactgcagcaaactgtcattcccacctgtgtcaggcgctgctggggaggaaactccttaccacacagcaagccag

SEQ ID NO: 102550 - DNA, 120 bp, synthetic construct
  source 1..120: mol_type = other DNA
aatgaacttgaattgttaggagaaaatgagggtccccatttcagaaccccgccgtgtccctcattaaataaaacttgctcaggacttgaacttctcagcagtggaggaattgcttccaaa

SEQ ID NO: 102551 - DNA, 120 bp, synthetic construct
  source 1..120: mol_type = other DNA
ttttctgtgtgctttattccaaagcatacatacgagcctgaggaaaaaagcctaattggttttccttggaaaagctggaaatgtcagagaaatgggctccgtcgtctaaaggattcagag

SEQ ID NO: 102552 - DNA, 120 bp, synthetic construct
  source 1..120: mol_type = other DNA
caacctgcacaaaatactgtccattttatcgataaggaaattgaggcccagagaagtggagtcacaaaggttacagaacacacaagctgcaaatccaggattcgatcaaagtgatgttcc

SEQ ID NO: 102553 - DNA, 120 bp, synthetic construct
  source 1..120: mol_type = other DNA
acgctgaccaataaagcccatattctaccccccttttatgtgccaatgctgtccctgccctcactgtcctgcaagatctgtgcaggggaaagccagaggccagggcagctgaaagaagag

SEQ ID NO: 102554 - DNA, 120 bp, synthetic construct; identical to SEQ ID NO: 30313
  source 1..120: mol_type = other DNA

SEQ ID NO: 102555 - DNA, 120 bp, synthetic construct; identical to SEQ ID NO: 30314
  source 1..120: mol_type = other DNA

SEQ ID NO: 102556 - DNA, 120 bp, synthetic construct; identical to SEQ ID NO: 30315
  source 1..120: mol_type = other DNA

SEQ ID NO: 102557 - DNA, 120 bp, synthetic construct; identical to SEQ ID NO: 30316
  source 1..120: mol_type = other DNA

SEQ ID NO: 102558 - DNA, 120 bp, synthetic construct
  source 1..120: mol_type = other DNA
cccctctcagcacagccgcctggggacactctctatgaagctcaggaagaacaggaaaaatgtgtatccagttttgttggctacagggattttgtatcaacatttttttttccaaaaatt

SEQ ID NO: 102559 - DNA, 120 bp, synthetic construct
  source 1..120: mol_type = other DNA
ttaaagtaaactgagaggcaattccttggacttcagggactcaagggcatgccgtaaatcgcccttggttcagaatattcataatattctatgacttggaaagcttcttagctggaagct

SEQ ID NO: 102560 - DNA, 120 bp, synthetic construct
  source 1..120: mol_type = other DNA
gacagagccagactctgtctccaaaaaaaacagaaggtcatttgttggcttctttgccctggcattgctatttgaatcaaattcgaattaaagggcctttgagaatgtagtcctaaaccc

SEQ ID NO: 102561 - DNA, 120 bp, synthetic construct
  source 1..120: mol_type = other DNA
gccctaaacacccccacccatccattctctctttctccatctctcctgacttccagttccacttttttttttgttgttgtttttttttgacagagtcttgctctgtcgcctaggctggag

SEQ ID NO: 102562 - DNA, 120 bp, synthetic construct
  source 1..120: mol_type = other DNA
tctacaagccagtgaaaatcaggtttggagaaaatttaacatggaaggctggaaccagagaacacagctgtgtaggatggaacactacagataagtcatatatttgggtccagacttcct

SEQ ID NO: 102563 - DNA, 120 bp, synthetic construct
  source 1..120: mol_type = other DNA
aatttcttgaggtggccttaggtaaaaaaaaaaaaaaaaaaaaaaaaaaaaactgccttgctgtagcctgtcgtggtatgacttccaatgccagagcctacgtgcctccaagggcagccc

SEQ ID NO: 102564 - DNA, 120 bp, synthetic construct
  source 1..120: mol_type = other DNA
tttacaaaaaaaaaaaaaactttaaaagtcagtggggcatggtggctactgaggaggctgaggtggaaggatcacttaagctcaggagtttgaggctgcagtgagctatgatcacaccaa

SEQ ID NO: 102565 - DNA, 120 bp, synthetic construct
  source 1..120: mol_type = other DNA
ggactgatacatggtacaacatggatgaaacttaaaaacatttcgttacgtgaaagaagtcataaaagaccaaatatcatacaattccttccggggaccctgcagcgggggagggcataa

SEQ ID NO: 102566 - DNA, 120 bp, synthetic construct
  source 1..120: mol_type = other DNA
tgaggtaacacacggagctggaaggactgggggacggaaactctgagccctgaaaggcccctacagtgtgacctgagaagatctctcagagaagcttccagaaatccatctgtgcctccc

SEQ ID NO: 102567 - DNA, 120 bp, synthetic construct
  source 1..120: mol_type = other DNA
gttacgtgaaagaagtcataaaagacttcttttaggtgaaggagtttccctcacttaattctcccaagaggtggcccattaaagtggtttctggtcatcacaccttagtgagttaatggc

SEQ ID NO: 102568 - DNA, 120 bp, synthetic construct
  source 1..120: mol_type = other DNA
gcagaagctccgacttctgggcagtgttcacagtgccttcccaggcagccagcagaccctccatagacacctgcccactgtgggaggcgtgggaggctgtcagaggttaggtccacgaga

SEQ ID NO: 102569 - DNA, 120 bp, synthetic construct
  source 1..120: mol_type = other DNA
tgtctgtctcggctcttaagccgatggacgctccagaaacccatctggtccccagccccagcaccagccaagatccttctaactccagcgggcttttcagttgttccaggggtgggggat

SEQ ID NO: 102570 - DNA, 120 bp, synthetic construct
  source 1..120: mol_type = other DNA
gcaaatgctgagccattgttttcaggggaggtgcagggttagcttcctgggagcctctggccacgtttttgtcaaccaatcagtacatcacgttgtttgatgtgggtttctgtttaaata

SEQ ID NO: 102571 - DNA, 120 bp, synthetic construct
  source 1..120: mol_type = other DNA
attttttattatttttattatttttaattttttgtagagacgggtctccctatgttgcccaggctggtctcgaactccttggctcaagtgatcctcccacctcggccccacaaagtgctg

SEQ ID NO: 102572 - DNA, 120 bp, synthetic construct
  source 1..120: mol_type = other DNA
ttccctgatcaccgcagtgacgctcctgctcaagctgggagaaccagggtcaagtcccttcactcagtcaccaaaacaagaaacaaaaacaacaacaacaacaaaggcaaggtggaccca

SEQ ID NO: 102573 - DNA, 120 bp, synthetic construct
  source 1..120: mol_type = other DNA
tcttcaaatagtatcagaaatattttgaaatgaccctcaattccacattggggtcaattatgggggagggaaagggggaaagtggacaggaagataaggtggaagaagagggagagaaag

SEQ ID NO: 102574 - DNA, 120 bp, synthetic construct
  source 1..120: mol_type = other DNA
ctggaaaggacaggagaggctgggcccacatttaatctctgttccctctccctccacagtggtgcctttatttctagaagcaacgaaggaaacacagtagactcagagccagaagaggaa

SEQ ID NO: 102575 - DNA, 120 bp, synthetic construct
  source 1..120: mol_type = other DNA
cttcctagaaaaccacatcttttctgctaagaatcagaaaagtcgtgatattctcagacatcagccaactacagactggcctgcagaaggaaggaaagtagaaggaggaagtcaagtgat

SEQ ID NO: 102576 - DNA, 120 bp, synthetic construct
  source 1..120: mol_type = other DNA
gtgcgccagtccttgagggcattacattttacattacgtttgtaatcagaaaagtagactttcaaaagaagacatcatctaagttacttgttaggagtggcagattcatctccccggagc

SEQ ID NO: 102577 - DNA, 120 bp, synthetic construct
  source 1..120: mol_type = other DNA
acaccaagctaatttttttattttttgtagagacagggtttccctatgttgccatggctggtctcggactgctgggcttaagtgatcctcccatctcagcctcccaaagttctgggatta

SEQ ID NO: 102578 - DNA, 120 bp, synthetic construct
  source 1..120: mol_type = other DNA
ggtggggatggtagtgatggtaggtggggatggtagtgatggtaggtagtgatgatggtagcgatggtaggtagggatggtagggatggtagtgatggtaggtagtgatgatggtagtga

SEQ ID NO: 102579 - DNA, 120 bp, synthetic construct
  source 1..120: mol_type = other DNA
tgacaagctgaagacaggctgcaccatcacgcggctacagctgttgttctgaatttcaaatctggtggcttcattgttgttttcccaaaagtttcatgaattatgtcaccaaaaaactca

SEQ ID NO: 102580 - DNA, 120 bp, synthetic construct
  source 1..120: mol_type = other DNA
tgtactcttctgtaaaatgggaagatcatactgggtgacctcatccctaacacctcgtctctagctctcaacttctaccactccgcgaagtcgtgtgggctggaagtcagagcggcttcc

SEQ ID NO: 102581 - DNA, 120 bp, synthetic construct
  source 1..120: mol_type = other DNA
ctcctcgtctgtggcctgcttgagccaggatgggactcatttccttctcaggtgaagacgttgttagtggagaaaatgaatcttgggctaatgagctgatcagaaccttgagctgcaaga

SEQ ID NO: 102582 - DNA, 120 bp, synthetic construct
  source 1..120: mol_type = other DNA
gctcgcccctacttgcggtgtgtgagctgacacgatttaccctgatgggcagctgtttatttttacaatttatggtgaaccatgttagaagttttccatttcttctagtcttagaaagtt

SEQ ID NO: 102583 - DNA, 120 bp, synthetic construct
  source 1..120: mol_type = other DNA
aacacgcacagctgggaatgagatccagttttgcaaagggatttgtgttttaatgacacaaatgtgagtcctcatctgcttcttaaactgtcagcaagatcaccaaggctgttactaatg

SEQ ID NO: 102584 - DNA, 120 bp, synthetic construct
  source 1..120: mol_type = other DNA
ccccagctccattaactgaggccatgtggaaatcttccatggtgggaacatttacaccacagcagtcaggaaacactatgaatcagagctgcttttctaaagagtcagttgctaaagagt

SEQ ID NO: 102585 - DNA, 120 bp, synthetic construct
  source 1..120: mol_type = other DNA
gataataaggataataaataactttaaaaattaaattggacttccgtcagcagacatcatctcatttgatcttcacagcccgcaggtgaggagagttggggaggccagccaccgagccgt

SEQ ID NO: 102586 - DNA, 120 bp, synthetic construct
  source 1..120: mol_type = other DNA
taggatgacctcatcttcgctaagtacatctgccagagacgccatatccacacaaggtcacatttacaggtgctgggggttaggacctctctatatattttgggggacataattcaatcc

SEQ ID NO: 102587 - DNA, 120 bp, synthetic construct
  source 1..120: mol_type = other DNA
caaatcagttcagctcagtgagttttaattcagtgtctactttgatgctgaagatctagtccctccccccacagtcactgatggtgtcactgaaagccgagtctgacaacacggaataag

SEQ ID NO: 102588 - DNA, 120 bp, synthetic construct
  source 1..120: mol_type = other DNA
cacagctcacgtccaaaatgccttactctgtatcatcatcgtctatgaaatgtgcacgtcctcactcccatcactgctaaaacactgctcagactcaacttccccaggggagttcacagg

SEQ ID NO: 102589 - DNA, 120 bp, synthetic construct
  source 1..120: mol_type = other DNA
ggtcaggagggaagaatacctgctctttcatatgtgacccacctggcagggccgcagctcaacgggcaaccccaggactggctgttgcagcttggactaaatttaatttcaccctccaaa

SEQ ID NO: 102590 - DNA, 120 bp, synthetic construct; identical to SEQ ID NO: 30320
  source 1..120: mol_type = other DNA

SEQ ID NO: 102591 - DNA, 120 bp, synthetic construct; identical to SEQ ID NO: 30321
  source 1..120: mol_type = other DNA

SEQ ID NO: 102592 - DNA, 120 bp, synthetic construct; identical to SEQ ID NO: 30322
  source 1..120: mol_type = other DNA

SEQ ID NO: 102593 - DNA, 120 bp, synthetic construct
  source 1..120: mol_type = other DNA
aaaacggtgacaaaagaaactactggactgcagcccaaagtctactgctttcagctttgtgtaaaaggtggtatcttttagggctccagagacactaaccagtgtaatttttgcaggcaa

SEQ ID NO: 102594 - DNA, 120 bp, synthetic construct
  source 1..120: mol_type = other DNA
cagaaggcgggcatacaatttctaacaccttctatacaatcccaaacggtgatttcctgtcactaggaaggaatggggcataggagacaaagaattgcgggttttactcctttggctgct

SEQ ID NO: 102595 - DNA, 120 bp, synthetic construct
  source 1..120: mol_type = other DNA
tgagcccccaatccaaagatgctttgctggtagctaggaggtattcagcaagcacctgctatgcagaatgcacagtgtggagcacttggagggaccataaagatgaacggaacacgaatt

SEQ ID NO: 102596 - DNA, 120 bp, synthetic construct
  source 1..120: mol_type = other DNA
ttaaggcaccgaggatgtatctccatctctgtccagtgccaagcagttgaatgatctggtaaacagctgtccctcactcccatttaggcagtagtcatctcagggtatcagctggaaatc

SEQ ID NO: 102597 - DNA, 120 bp, synthetic construct
  source 1..120: mol_type = other DNA
gtgcaaagtccccatgagttccccattagacagcaaatgccccaaggagaagaggacaaaaagcatattaacctgatgaactgattcccaaggatgcctgctgtgccctacctctcctag

SEQ ID NO: 102598 - DNA, 120 bp, synthetic construct
  source 1..120: mol_type = other DNA
aaaaaaaaaaaaaaaagaatcacctccattgaaaagaataaaattatctgaagctggggacatccccagaaaacctgggatgggatggtggccacagctacattcttagggtcggtcctc

SEQ ID NO: 102599 - DNA, 120 bp, synthetic construct
  source 1..120: mol_type = other DNA
tttctaaattgggtcgtcgagttaactaagcatttccattctcaaagacggcccccattttctttctttccccctctgttagttaagcttctgcatgtcctcaccatcatcatcatcatt

SEQ ID NO: 102600 - DNA, 120 bp, synthetic construct
  source 1..120: mol_type = other DNA
ctttgcctcaatctgggacaactctgaagggtcatcccagttccagaatgctccaaggggtcagctgaggcctttggtgtgaatgcttcatcgcccttcccctctgctcagtccagcttg

SEQ ID NO: 102601 - DNA, 120 bp, synthetic construct
  source 1..120: mol_type = other DNA
ttccccagaccaggttggtatcgctgcccagcatttccctctgtctttgaaaatactctattacctatgccccaaggtcatgtcagaaatctcaaaatacacctaacatgcaaagcagag

SEQ ID NO: 102602 - DNA, 120 bp, synthetic construct
  source 1..120: mol_type = other DNA
acaggtgacagaggcgccaggcagggcttcctgattccgagtgtagtgttcattctaatctccattatttaagaagcaaaaacaacaaactgagaaagaagaaccagagactggaaccta

SEQ ID NO: 102603 - DNA, 120 bp, synthetic construct
  source 1..120: mol_type = other DNA
gcacacgtctggcatataacaagtgcttcagcaatattagctcaatctgttgaaaaccatgccaccccagatggtatctgatacaatcaagaatattgatcggtcatcagcaccatgaat

SEQ ID NO: 102604 - DNA, 120 bp, synthetic construct
  source 1..120: mol_type = other DNA
tcatcctaatctatatgttaatcacatctgcaaaaaccccatctcaaagaaggtcccattcacaggtatggggtgcagagggtgtgggacttcgaccttttttttggagaatccaattcc

SEQ ID NO: 102605 - DNA, 120 bp, synthetic construct
  source 1..120: mol_type = other DNA
cggtaaccttagcagcccccataaatgtaaaaaggtgcctagaaacagaaagacactggccatgagctgaatacaccaaaatcagctcttataggaaaacagggagagcaaaagaaaata

SEQ ID NO: 102606 - DNA, 120 bp, synthetic construct
  source 1..120: mol_type = other DNA
cgcactattcccccatgtgagctgctctgtgggtgtccctgcgccctctgtgtggtagagtctttgaggaagtgatcacgcatcactgtctagctgcccgttccctccaggaccagcact

SEQ ID NO: 102607 - DNA, 120 bp, synthetic construct
  source 1..120: mol_type = other DNA
attctaaacaaacactgggagcttctacataagctagtccatgaaccacactttgttaaacattgccctaaaccctaatccagcaaatcttgctcaggatggtacaaactggccaaggtc

SEQ ID NO: 102608 - DNA, 120 bp, synthetic construct
  source 1..120: mol_type = other DNA
acgcacagctacgcttccagtgagttacttcctaaaaccattcccatcaccttcataatcagccatgccttacaagaggcatggaggctcagagcagggagccaaggcgggatgccaaca

SEQ ID NO: 102609 - DNA, 120 bp, synthetic construct
  source 1..120: mol_type = other DNA
ctctgtacacttttccaggctgattcccatggaatgctgttttctttacctttaatggcttcttagttcaggtccccccagaaaagacactcagacaggaacttaggttcaggagtttat

SEQ ID NO: 102610 - DNA, 120 bp, synthetic construct; identical to SEQ ID NO: 30323
  source 1..120: mol_type = other DNA

SEQ ID NO: 102611 - DNA, 120 bp, synthetic construct
  source 1..120: mol_type = other DNA
gtatatgatgtatatgtatatgatgtatatgtatatgtatatgatgtatatgtatatgtatatgtatatgtataagccatacatttataggacactttacacttgtcaagagttttcccg

SEQ ID NO: 102612 - DNA, 120 bp, synthetic construct; identical to SEQ ID NO: 30324
  source 1..120: mol_type = other DNA

SEQ ID NO: 102613 - DNA, 120 bp, synthetic construct
  source 1..120: mol_type = other DNA
cccagccctggctgcacgcgggcagagagagagattgagccccggctccgccagcccagctcgggccctgtccctctaccctttccccaagccgcccgaagtgacaggaggggcacgcac

SEQ ID NO: 102614 - DNA, 120 bp, synthetic construct; identical to SEQ ID NO: 28673
  source 1..120: mol_type = other DNA

SEQ ID NO: 102615 - DNA, 120 bp, synthetic construct; identical to SEQ ID NO: 28674
  source 1..120: mol_type = other DNA

SEQ ID NO: 102616 - DNA, 120 bp, synthetic construct
  source 1..120: mol_type = other DNA
ccatgccacaggtccccaccccaacaaatccaaatacctactctcccctccatggcacaggtccccaccccaacgggtccaaatacctactctcccctccatagcacaggtccccacccc

SEQ ID NO: 102617 - DNA, 120 bp, synthetic construct; identical to SEQ ID NO: 28675
  source 1..120: mol_type = other DNA

SEQ ID NO: 102618 - DNA, 120 bp, synthetic construct
  source 1..120: mol_type = other DNA
attatcaaaatggagccagtcctatttcatttcacctccacccacttcacacagacacacacacacacacacacacacacagaggatggaagcaaatctcagatacagcatttcatttta

SEQ ID NO: 102619 - DNA, 120 bp, synthetic construct; identical to SEQ ID NO: 28677
  source 1..120: mol_type = other DNA

SEQ ID NO: 102620 - DNA, 120 bp, synthetic construct; identical to SEQ ID NO: 28656
  source 1..120: mol_type = other DNA

SEQ ID NO: 102621 - DNA, 120 bp, synthetic construct; identical to SEQ ID NO: 28657
  source 1..120: mol_type = other DNA

SEQ ID NO: 102622 - DNA, 120 bp, synthetic construct
  source 1..120: mol_type = other DNA
gtttgaaacagagtaaaagctaaaaaagtgttagtcaccaccgctgccacctttatcattaccattaccatcatcactatcaccatcatcaccataaccacaaccaccatggccatcttc

SEQ ID NO: 102623 - DNA, 120 bp, synthetic construct
  source 1..120: mol_type = other DNA
ctagaatgaaacattctggagaacatggatgggaaccgccacacagcaaaatgacctactgaatgccagctgaactgtacccctaaaaatggtcatgaaggataatttccacgttatctg

SEQ ID NO: 102624 - DNA, 120 bp, synthetic construct; identical to SEQ ID NO: 28660
  source 1..120: mol_type = other DNA

SEQ ID NO: 102625 - DNA, 120 bp, synthetic construct; identical to SEQ ID NO: 28661
  source 1..120: mol_type = other DNA

SEQ ID NO: 102626 - DNA, 120 bp, synthetic construct; identical to SEQ ID NO: 28662
  source 1..120: mol_type = other DNA

SEQ ID NO: 102627 - DNA, 120 bp, synthetic construct; identical to SEQ ID NO: 28663
  source 1..120: mol_type = other DNA

SEQ ID NO: 102628 - DNA, 120 bp, synthetic construct; identical to SEQ ID NO: 28664
  source 1..120: mol_type = other DNA

SEQ ID NO: 102629 - DNA, 120 bp, synthetic construct; identical to SEQ ID NO: 28665
  source 1..120: mol_type = other DNA

SEQ ID NO: 102630 - DNA, 120 bp, synthetic construct; identical to SEQ ID NO: 28666
  source 1..120: mol_type = other DNA

SEQ ID NO: 102631 - DNA, 120 bp, synthetic construct; identical to SEQ ID NO: 28667
  source 1..120: mol_type = other DNA

SEQ ID NO: 102632 - DNA, 120 bp, synthetic construct; identical to SEQ ID NO: 28668
  source 1..120: mol_type = other DNA

SEQ ID NO: 102633 - DNA, 120 bp, synthetic construct; identical to SEQ ID NO: 28669
  source 1..120: mol_type = other DNA

SEQ ID NO: 102634 - DNA, 120 bp, synthetic construct; identical to SEQ ID NO: 28670
  source 1..120: mol_type = other DNA

SEQ ID NO: 102635 - DNA, 120 bp, synthetic construct
  source 1..120: mol_type = other DNA
ccaaatcacagctccgacacttactagctggatgatttcagcaggccacttaatcgccaggcctcagtttccccatctgtgaaacagagctacggacagcaggttcacgaagcattgtaa

SEQ ID NO: 102636 - DNA, 120 bp, synthetic construct
  source 1..120: mol_type = other DNA
tgggtgaggaatgggtatcacacgccaaactccctgctatcaagagcagctcccaggtgtctgcaacttcctcaacaactgtgaccccgcaaaccacggcgagtgggaaagaacggccgt

SEQ ID NO: 102637 - DNA, 120 bp, synthetic construct; identical to SEQ ID NO: 28671
  source 1..120: mol_type = other DNA

SEQ ID NO: 102638 - DNA, 120 bp, synthetic construct; identical to SEQ ID NO: 28672
  source 1..120: mol_type = other DNA

SEQ ID NO: 102639 - DNA, 120 bp, synthetic construct
  source 1..120: mol_type = other DNA
gcgtagctgggactacaggcgcccgccaccatgcccggctatatttttgtattttttaagagatgggttttttgtttttgttttgttttgttttgttttgagacggagtctcgctctgtc

SEQ ID NO: 102640 - DNA, 120 bp, synthetic construct; identical to SEQ ID NO: 24292
  source 1..120: mol_type = other DNA

SEQ ID NO: 102641 - DNA, 120 bp, synthetic construct
  source 1..120: mol_type = other DNA
aacttccaacactatgttgaataggagtggtgagaaagggcatccctgtcttgtgccaggtttcaaagggaatgcttccagtttttgcccattcagtatgatattggctgtgggtttgtc

SEQ ID NO: 102642 - DNA, 120 bp, synthetic construct
  source 1..120: mol_type = other DNA
gtctatcaattttgttgatcctttcaaaaaaccagctcctggattcattaattttttgaagggttttttgtgtctctatttccttccaaggtaatttatagattcaatgccatccccatc

SEQ ID NO: 102643 - DNA, 120 bp, synthetic construct
  source 1..120: mol_type = other DNA
acatttatgcagccaaaagacaaatgaaaaaatgctcatcatcactggccatcagagaaatgcaaatcaaaaccacaatgagataccatctcacaccagttagaatggcaatcattaaaa

SEQ ID NO: 102644 - DNA, 120 bp, synthetic construct; identical to SEQ ID NO: 24293
  source 1..120: mol_type = other DNA

SEQ ID NO: 102645 - DNA, 120 bp, synthetic construct; identical to SEQ ID NO: 29921
  source 1..120: mol_type = other DNA

SEQ ID NO: 102646 - DNA, 120 bp, synthetic construct
  source 1..120: mol_type = other DNA
atggctgggtcaaatggtatttctggttctagatccttgaggaatcgccacactgtcttccacaacagttgaactagtttacagtcccaccaacagtgtaaaagtgttcctatttcttca

SEQ ID NO: 102647 - DNA, 120 bp, synthetic construct; identical to SEQ ID NO: 18467
  source 1..120: mol_type = other DNA

SEQ ID NO: 102648 - DNA, 120 bp, synthetic construct
  source 1..120: mol_type = other DNA
atcattgttggacatttgggttggttccaagtctttgctattgtgaatagtgccgcaataaacatacgtgtgcatgtgtctttatagcagcatgatttatagtcctttgggtatataccc

SEQ ID NO: 102649 - DNA, 120 bp, synthetic construct
  source 1..120: mol_type = other DNA
gtcaaagatcagatagttgtagatacgcagcattatttctgagggctctgttctgttccattgatctatatctctgttttggtaccagtaccatgctgttttggttactgtagccttgta

SEQ ID NO: 102650 - DNA, 120 bp, synthetic construct
  source 1..120: mol_type = other DNA
atgtgctgctggattcggtttgccagtattttattgaggatttttgcatcaatgttcatcaaggatattggtctaaaattctcttttttggttgtgtctctgcccggctttggtatcaga

SEQ ID NO: 102651 - DNA, 120 bp, synthetic construct
  source 1..120: mol_type = other DNA
tatattctgttgatttggggtggagagttctgtagatgtctattaagtctgcttggtgcagagctgagttcaattcctgggtatccttgttgactttctgtctcgttgatctgtctaatg

SEQ ID NO: 102652 - DNA, 120 bp, synthetic construct; identical to SEQ ID NO: 70452
  source 1..120: mol_type = other DNA

SEQ ID NO: 102653 - DNA, 120 bp, synthetic construct
  source 1..120: mol_type = other DNA
gcgcccctcccccagcctcgttgccgccttgcagtttgatctcagactgctgtgctagcaatcagcgagattccgtgggcgtaggaccctctgagccaggtgtgggatatagtctcgtgg

SEQ ID NO: 102654 - DNA, 120 bp, synthetic construct
  source 1..120: mol_type = other DNA
tacttggaatagtcagaaatcatggcaagtataatgatggctgctagaggctacagggaaggaggaatgttaatgggtatagagtttcagttgtggaagatgaaagagttgttgaggtgg

SEQ ID NO: 102655 - DNA, 120 bp, synthetic construct; identical to SEQ ID NO: 18468
  source 1..120: mol_type = other DNA

SEQ ID NO: 102656 - DNA, 120 bp, synthetic construct; identical to SEQ ID NO: 18469
  source 1..120: mol_type = other DNA

SEQ ID NO: 102657 - DNA, 120 bp, synthetic construct
  source 1..120: mol_type = other DNA
gtggtgatggtgacggtggtggtggtggtggtggtggtggtggtgacggtggtggtggtggtggtggtggtggtggtgatggtggtggtggtggtggtgatggtggtggtggtgatggtg

SEQ ID NO: 102658 - DNA, 120 bp, synthetic construct; identical to SEQ ID NO: 16353
  source 1..120: mol_type = other DNA

SEQ ID NO: 102659 - DNA, 120 bp, synthetic construct
  source 1..120: mol_type = other DNA
tctgcattaatttgcttaggataatggcctccagctgcatccatgttgctgcaaaggacacaatccaaataagcacaatcagaaatgaccaagctgacattatgactgatcccacagaaa

SEQ ID NO: 102660 - DNA, 120 bp, synthetic construct; identical to SEQ ID NO: 16354
  source 1..120: mol_type = other DNA

SEQ ID NO: 102661 - DNA, 120 bp, synthetic construct
  source 1..120: mol_type = other DNA
ggcctcccaaagtgctgggattacaggcgtgagccactgcaccctggcccattcccgttttttaaaaaaatattttattccttttagactatttagccacagttttccattctattcctt

SEQ ID NO: 102662 - DNA, 120 bp, synthetic construct
  source 1..120: mol_type = other DNA
caaactcctggcctcaagtgatcctcccacctcagcctctcaaggtgaagggatgagcctcccaaagtgaaggcgtgagccattgctcctgggatgactggtttatttcacttagtgtaa

SEQ ID NO: 102663 - DNA, 120 bp, synthetic construct; identical to SEQ ID NO: 16355
  source 1..120: mol_type = other DNA

SEQ ID NO: 102664 - DNA, 120 bp, synthetic construct
  source 1..120: mol_type = other DNA
gagtctcttccctccctcctataaggacccctgtgatcacactgggctcatccagataatctagtataaccccctttctcaagatccttaatttaatcacatctgcaaaatcaattttgt

SEQ ID NO: 102665 - DNA, 120 bp, synthetic construct
  source 1..120: mol_type = other DNA
ttcgcttctgcttcccttccccttctcttctcttttcttttttttctggagtcagggtctcattctgttgcccaggctggagtgcagtggtgctaacacagctcactacagccttgattt

SEQ ID NO: 102666 - DNA, 120 bp, synthetic construct; identical to SEQ ID NO: 16358
  source 1..120: mol_type = other DNA

SEQ ID NO: 102667 - DNA, 120 bp, synthetic construct; identical to SEQ ID NO: 16359
  source 1..120: mol_type = other DNA

SEQ ID NO: 102668 - DNA, 120 bp, synthetic construct
  source 1..120: mol_type = other DNA
acctcccagacggggtggtggccgggcagaggggctcctcacttcccagtaggggcggccgggcagaggcgcccctcactccccagtaggggcagccgggcagaggcgcccctcacctcc

SEQ ID NO: 102669 - DNA, 120 bp, synthetic construct
  source 1..120: mol_type = other DNA
cagtcaggcgtggcggcacgagtctgcaatcgcaggcactcggcaggctgagtcaggagagtcaggcagggaggttgcagtgagccgagatggcagcagtacagtccagcttcggctcag

SEQ ID NO: 102670 - DNA, 120 bp, synthetic construct; identical to SEQ ID NO: 20510
  source 1..120: mol_type = other DNA

SEQ ID NO: 102671 - DNA, 120 bp, synthetic construct; identical to SEQ ID NO: 20511
  source 1..120: mol_type = other DNA

SEQ ID NO: 102672 - DNA, 120 bp, synthetic construct; identical to SEQ ID NO: 20512
  source 1..120: mol_type = other DNA

SEQ ID NO: 102673 - DNA, 120 bp, synthetic construct; identical to SEQ ID NO: 19964
  source 1..120: mol_type = other DNA

SEQ ID NO: 102674 - DNA, 120 bp, synthetic construct; identical to SEQ ID NO: 19965
  source 1..120: mol_type = other DNA

SEQ ID NO: 102675 - DNA, 120 bp, synthetic construct; identical to SEQ ID NO: 19966
  source 1..120: mol_type = other DNA

SEQ ID NO: 102676 - DNA, 120 bp, synthetic construct
  source 1..120: mol_type = other DNA
attcattgctcccctgtttctgtgtttttccaatgcttactgatgtgtttttaagtttctttttgtatctttcctcatccctcaacctagtaaatattggtgttccccaggtgggagggg

SEQ ID NO: 102677 - DNA, 120 bp, synthetic construct
  source 1..120: mol_type = other DNA
gggagtcagaggttgcagtgagccaatattgtgccactgcactccagcctggtgacagagcgaaactctgtctcaaaaaaaaagaaaaaaagaaaaaagaaagaatctagctgtcttttt

SEQ ID NO: 102678 - DNA, 120 bp, synthetic construct; identical to SEQ ID NO: 24867
  source 1..120: mol_type = other DNA

SEQ ID NO: 102679 - DNA, 120 bp, synthetic construct; identical to SEQ ID NO: 24868
  source 1..120: mol_type = other DNA

SEQ ID NO: 102680 - DNA, 120 bp, synthetic construct; identical to SEQ ID NO: 24869
  source 1..120: mol_type = other DNA

SEQ ID NO: 102681 - DNA, 120 bp, synthetic construct
  source 1..120: mol_type = other DNA
tcatgatccacccgcctcagcctaccaaagtgctgggattacaggtgtgagccactgcacctggccaaaaccaagatttttaaaaagtcatttaatctcattattttgatgaagcataga

SEQ ID NO: 102682 - DNA, 120 bp, synthetic construct
  source 1..120: mol_type = other DNA
taacagctgatctctcggcagaaactctacaagccagaagacagtggggaccaatattcaacattcttaaagaaaagaattttcaacccacaatttcatatccagccaaactaagcttca

SEQ ID NO: 102683 - DNA, 120 bp, synthetic construct
  source 1..120: mol_type = other DNA
gctctcctcagcaaatgtaaaagaacagaaattataacaaactgtctctcagaccacagtgcaatcaaactagaactcaggattaagaaactcactcaaaactgctcaactgtgtggaaa

SEQ ID NO: 102684 - DNA, 120 bp, synthetic construct
  source 1..120: mol_type = other DNA
aggaggaactggtaccattccttctgaaactattccactaaatagaaaaaaagggaatcctccttaactcatttgatgaggccagcatcatcctgataccaaagccaggcagagacacaa

SEQ ID NO: 102685 - DNA, 120 bp, synthetic construct
  source 1..120: mol_type = other DNA
agattcaatgccatccccatcaagctaccaatgactttcttcacagaattggaaaaaactacttcaaagttcatatggaaccaaaaaagaacccgcatcaccaagtcaatcctaagccaa

SEQ ID NO: 102686 - DNA, 120 bp, synthetic construct
  source 1..120: mol_type = other DNA
attaaaaagtcaggaaacaacagatgctggagaggatgtggagaaataggaacacttttacactgttggtgggactgccaactagttcaaccattgtggaagtcagtgtggcgattcctc

SEQ ID NO: 102687 - DNA, 120 bp, synthetic construct; identical to SEQ ID NO: 10041
  source 1..120: mol_type = other DNA

SEQ ID NO: 102688 - DNA, 120 bp, synthetic construct
  source 1..120: mol_type = other DNA
cattctgtatgatattggctgtgggtctgtcatagatagctcttattattttgagatacgtcccatcaatacctaatttattgagagtttttagcatgaagcgttgttgaattttgtcaa

SEQ ID NO: 102689 - DNA, 120 bp, synthetic construct
  source 1..120: mol_type = other DNA
ccttccttacaccttatacaaaaattaattcaagatggattaaagacttcaacgttagacctaaaaccataaaaaccctagaagaaaacctaggcattaccattcaggacataggcatgg

SEQ ID NO: 102690 - DNA, 120 bp, synthetic construct
  source 1..120: mol_type = other DNA
aaatcatcattctcagtaaactatggcaagaacaaaaaaccaaacactgcatgttctcactcataggtgggaattgaacaatgagaacacatggacataggaaggggaacatcacactct

SEQ ID NO: 102691 - DNA, 120 bp, synthetic construct; identical to SEQ ID NO: 6898
  source 1..120: mol_type = other DNA

SEQ ID NO: 102692 - DNA, 120 bp, synthetic construct; identical to SEQ ID NO: 6899
  source 1..120: mol_type = other DNA

SEQ ID NO: 102693 - DNA, 120 bp, synthetic construct; identical to SEQ ID NO: 6900
  source 1..120: mol_type = other DNA

SEQ ID NO: 102694 - DNA, 120 bp, synthetic construct; identical to SEQ ID NO: 6901
  source 1..120: mol_type = other DNA

SEQ ID NO: 102695 - DNA, 120 bp, synthetic construct; identical to SEQ ID NO: 6902
  source 1..120: mol_type = other DNA

SEQ ID NO: 102696 - DNA, 120 bp, synthetic construct; identical to SEQ ID NO: 6903
  source 1..120: mol_type = other DNA

SEQ ID NO: 102697 - DNA, 120 bp, synthetic construct; identical to SEQ ID NO: 6904
  source 1..120: mol_type = other DNA

SEQ ID NO: 102698 - DNA, 120 bp, synthetic construct
  source 1..120: mol_type = other DNA
tttcagtcacttcattttttacttttagaatttccatttgattctttttttttttttttttgcccaggatggcaatggcacgctctcggctcactgcaacctccgcctcccaggttcaag

SEQ ID NO: 102699 - DNA, 120 bp, synthetic construct; identical to SEQ ID NO: 6905
  source 1..120: mol_type = other DNA

SEQ ID NO: 102700 - DNA, 120 bp, synthetic construct; identical to SEQ ID NO: 6906
  source 1..120: mol_type = other DNA

SEQ ID NO: 102701 - DNA, 120 bp, synthetic construct; identical to SEQ ID NO: 6907
  source 1..120: mol_type = other DNA

SEQ ID NO: 102702 - DNA, 120 bp, synthetic construct; identical to SEQ ID NO: 6908
  source 1..120: mol_type = other DNA

SEQ ID NO: 102703 - DNA, 120 bp, synthetic construct; identical to SEQ ID NO: 6909
  source 1..120: mol_type = other DNA

SEQ ID NO: 102704 - DNA, 120 bp, synthetic construct; identical to SEQ ID NO: 6910
  source 1..120: mol_type = other DNA

SEQ ID NO: 102705 - DNA, 120 bp, synthetic construct; identical to SEQ ID NO: 6911
  source 1..120: mol_type = other DNA

SEQ ID NO: 102706 - DNA, 120 bp, synthetic construct; identical to SEQ ID NO: 6912
  source 1..120: mol_type = other DNA

SEQ ID NO: 102707 - DNA, 120 bp, synthetic construct; identical to SEQ ID NO: 14257
  source 1..120: mol_type = other DNA

SEQ ID NO: 102708 - DNA, 120 bp, synthetic construct
  source 1..120: mol_type = other DNA
gattcctcagggatctagaagtagaaataccatttgacccagccatcccattactgggtgtataaccaaaggactataaatcatgctgctataaagacacatgcacatgtatgtttattg

SEQ ID NO: 102709 - DNA, 120 bp, synthetic construct
  source 1..120: mol_type = other DNA
tgcacacgtacgtttattgtggcactagtcacaatagcaaagacttggaacgaacccaaatgtccatcaatgatagactggattaagaaaatgtggcacatatacaccatggaatactat

SEQ ID NO: 102710 - DNA, 120 bp, synthetic construct; identical to SEQ ID NO: 14259
  source 1..120: mol_type = other DNA

SEQ ID NO: 102711 - DNA, 120 bp, synthetic construct
  source 1..120: mol_type = other DNA
tcaaccatcgtggaagacagtgtggtgatttctcaaggatctagaactagaaataccatttgacccagccatcccattactgggtatatacccaaaggattataaatcatgctgctataa

SEQ ID NO: 102712 - DNA, 120 bp, synthetic construct; identical to SEQ ID NO: 14261
  source 1..120: mol_type = other DNA

SEQ ID NO: 102713 - DNA, 120 bp, synthetic construct; identical to SEQ ID NO: 10728
  source 1..120: mol_type = other DNA

SEQ ID NO: 102714 - DNA, 120 bp, synthetic construct
  source 1..120: mol_type = other DNA
cccactttttgatggggttgtttgtttttttcttgtaaatttgtttgagttcattgtagattctggatattagcccccatctcatgtgcagagacacacataggctcaaaataaaaggat

SEQ ID NO: 102715 - DNA, 120 bp, synthetic construct
  source 1..120: mol_type = other DNA
aaagaaccaagatcagagcagaactgaaggaaatagagacacaaaaaacccttcaaaaaatcaatgaatccaggagctggttttttgaaaggatcaacaaaattgatagaccgctagcaa

SEQ ID NO: 102716 - DNA, 120 bp, synthetic construct; identical to SEQ ID NO: 10729
  source 1..120: mol_type = other DNA

SEQ ID NO: 102717 - DNA, 120 bp, synthetic construct
  source 1..120: mol_type = other DNA
ccagtaatgggatggctgggtcaaatggtatttctagttctagatccttcaggaattgccacactgtcttccacaattgttgaactagtttacagtcccaccaacagtgtaaaagtgttc

SEQ ID NO: 102718 - DNA, 120 bp, synthetic construct; identical to SEQ ID NO: 10730
  source 1..120: mol_type = other DNA

SEQ ID NO: 102719 - DNA, 120 bp, synthetic construct; identical to SEQ ID NO: 10731
  source 1..120: mol_type = other DNA

SEQ ID NO: 102720 - DNA, 120 bp, synthetic construct; identical to SEQ ID NO: 10732
  source 1..120: mol_type = other DNA

SEQ ID NO: 102721 - DNA, 120 bp, synthetic construct; identical to SEQ ID NO: 10733
  source 1..120: mol_type = other DNA

SEQ ID NO: 102722 - DNA, 120 bp, synthetic construct; identical to SEQ ID NO: 10734
  source 1..120: mol_type = other DNA

SEQ ID NO: 102723 - DNA, 120 bp, synthetic construct
  source 1..120: mol_type = other DNA
taattggatggctgggtcaaatgttatttctagttctagatccttgaggaatcgccacactctcttccacaatggttgaactagtttacagtcccaccaacagtgtaaaagtattcctat

SEQ ID NO: 102724 - DNA, 120 bp, synthetic construct
  source 1..120: mol_type = other DNA
tgaggaatcgccacacggacttccacaagggttgaactagtttacagtcccaccaacagtgtaaaagtgttcctatttctccacaacctctccagcacctgttgtttcctgactttttaa

SEQ ID NO: 102725 - DNA, 120 bp, synthetic construct
  source 1..120: mol_type = other DNA
tttggttccatatgaatttgaaagtagttttttccaattctgtgaagcaagtcattggtagcttgatggggatggcattgaatctataaattaccttgggcagtatggccattttcacga

SEQ ID NO: 102726 - DNA, 120 bp, synthetic construct
  source 1..120: mol_type = other DNA
ttgaaccagccttgcttcccagggatgaagcccacttgatcatggtggataagcttcttgaggtgctgctggattctgtttgccagtattttattgaggatttttgcctcaatgttcatc

SEQ ID NO: 102727 - DNA, 120 bp, synthetic construct
  source 1..120: mol_type = other DNA
gtctttgttctcattggtttcaaagaacatctttatttctgccttcatttcgttttgtatccagcagtcattcaggagcaggttgttcagtttccatgtagttgagtggttttgagtgag

SEQ ID NO: 102728 - DNA, 120 bp, synthetic construct
  source 1..120: mol_type = other DNA
cgctgttagtctgatgggcttctctttgtgggtaacccgacctttctctctggctgcccttaacattttttccttcatttcaactttggtgaatctgacaattatgtgtcttggagttgc

SEQ ID NO: 102729 - DNA, 120 bp, synthetic construct; identical to SEQ ID NO: 10735
  source 1..120: mol_type = other DNA

SEQ ID NO: 102730 - DNA, 120 bp, synthetic construct
  source 1..120: mol_type = other DNA
agtgtaaacaagagcagggcatgtatgagtagttgagaatggtgaataggagtatgactagacagaagatagtagggatgacaagttttttgcggcacagtgtaagttggtctggtgtct

SEQ ID NO: 102731 - DNA, 120 bp, synthetic construct
  source 1..120: mol_type = other DNA
gggccaggaacaacggtaattgtgggagactcaacaaagagtgggtacagctgaaggagccggggagcagaaagtatgtgcgtcaggtatgaggaagaaaatagattttggaagttatga

SEQ ID NO: 102732 - DNA, 120 bp, synthetic construct
  source 1..120: mol_type = other DNA
attaggttttaatgagatggtaacgggtgcatgattggtcgccaaggagggagtagaggtatcttatacttgtgggttaaggtggggggatacaagaggaggacgcaaaggaggctttgg

SEQ ID NO: 102733 - DNA, 120 bp, synthetic construct
  source 1..120: mol_type = other DNA
ttttatatttgatgaaaaagagcctaaacgctatctgatttgggataaagaaaaaggagcattaaagttgactatgcctttggctccagccacctttttaagagtaaattgctgggcagg

SEQ ID NO: 102734 - DNA, 120 bp, synthetic construct
  source 1..120: mol_type = other DNA
acagaaataaggggtaggggcacggaaataaggggtcgagcatggaaataagggattggggcacagagatataagaggttggggcgcggaaataagggattggggcacagagatacgagg

SEQ ID NO: 102735 - DNA, 120 bp, synthetic construct
  source 1..120: mol_type = other DNA
cgtacatgtgcaaatcacaggggatgcgatggcttggcttgggctcagaggcctgacagtaaacatattgaaatgctactgtaccagttagtacgtatcctctgctagtaaccctctgac

SEQ ID NO: 102736 - DNA, 120 bp, synthetic construct
  source 1..120: mol_type = other DNA
gtgcaatatctgatatattatgtgcaaagtaaagagaagcatacatctaaagatttaaagaaagaggccagtgcagtggctcatgtctgtaatcccagcattttgggaggctgaggcggg

SEQ ID NO: 102737 - DNA, 120 bp, synthetic construct
  source 1..120: mol_type = other DNA
gaactcaatgttcagctcccacttataagtgaaaacatgtgtatttggctttctgtttctgcattaactggtttaggataatggcctccagctgcatcctatgttgctgcaatggacatc

SEQ ID NO: 102738 - DNA, 120 bp, synthetic construct; identical to SEQ ID NO: 10737
  source 1..120: mol_type = other DNA

SEQ ID NO: 102739 - DNA, 120 bp, synthetic construct
  source 1..120: mol_type = other DNA
ctgggacatgagaacacagctgctcagtcagtttgaggtcaagctgcattaatctgttttgtgttgctgtgaaggaatacttgagactgggtaatttataatgaaaagaggtttatttgg

SEQ ID NO: 102740 - DNA, 120 bp, synthetic construct
  source 1..120: mol_type = other DNA
tgttttttggctgcataaatgtcttcttttgagaagtgtctgttcatgtccttcgcccactttttgatggggttgtttgtttttttcttgtaaatttgtttgagttcactgtagattctg

SEQ ID NO: 102741 - DNA, 120 bp, synthetic construct; identical to SEQ ID NO: 10738
  source 1..120: mol_type = other DNA

SEQ ID NO: 102742 - DNA, 120 bp, synthetic construct
  source 1..120: mol_type = other DNA
aagatggggaaaaaaacagaacagaaaaactggaaactctaaaacgcagagtgtctctcctcctccaaaggaacgcagttcctcaccagcaacggaacaaagctggatggagaatgactt

SEQ ID NO: 102743 - DNA, 120 bp, synthetic construct
  source 1..120: mol_type = other DNA
atggaaaggaacaaccggtaccagccgctgcaaaatcatgccaaaatgtaaagaccgtcgagactaggaagaaactgcatcaactaacgagcaaaataaccagcaaacatcataatgaca

SEQ ID NO: 102744 - DNA, 120 bp, synthetic construct
  source 1..120: mol_type = other DNA
gcagtgtgtagagggaaatttatagcactaaatgcccacaagagaaagcaggaaagatccaaaattgacaccctaacatcacaattaaaagaactagaaaagcaagaacaaacacattca

SEQ ID NO: 102745 - DNA, 120 bp, synthetic construct
  source 1..120: mol_type = other DNA
ttatctcaatagctgcagaaaaaagcctttgacaaaattcaacaacccttcatgctaaaaactctcaataaattaggtattgatgggacgtatttcaaaataataagagctatctatgac

SEQ ID NO: 102746 - DNA, 120 bp, synthetic construct
  source 1..120: mol_type = other DNA
gaaataacgccacatacctacaactatctgatctttgacaaacctgagaaaaacaagcaatggggaaaggattccctatttaataaatggtgctgggaaaactggctagccatatgtaga

SEQ ID NO: 102747 - DNA, 120 bp, synthetic construct
  source 1..120: mol_type = other DNA
tgactataaatcatgctgctataaagacacatgcacacatatgtttattgcggcactattcacaatagcaaagacttggaaccaacccaaatgtccaacaatgatagactggattaagaa

SEQ ID NO: 102748 - DNA, 120 bp, synthetic construct
  source 1..120: mol_type = other DNA
ttgcctttctcttcttttccttcctttcctttctcttttctttcctttcttttcttttccttcttttcctttcctttcctttttttctccctttccttcccccttcccccttccccacgc

SEQ ID NO: 102749 - DNA, 120 bp, synthetic construct
  source 1..120: mol_type = other DNA
gacacaggaaggggaacatcacacactggggactgttgtggggtggggggagggggaagggaaagcattaggagatatacctaatactaaatgacaagttaatgggtgcagcacaccaac

SEQ ID NO: 102750 - DNA, 120 bp, synthetic construct
  source 1..120: mol_type = other DNA
attggggtacaggtcatatttggttacgagtaagttctttagtggtgatttgtgagattttggtgtacccatcacgcaagcagtatgtactgcaccatatttgtagtcttctatccctca

SEQ ID NO: 102751 - DNA, 120 bp, synthetic construct
  source 1..120: mol_type = other DNA
atatgcggtgtttggttttttgttcttgcgatagtttactgagaaatgatttccaatttcatccacgtccctacaaaggacatgaactcatcatttttatggctgcatagtattccatgg

SEQ ID NO: 102752 - DNA, 120 bp, synthetic construct
  source 1..120: mol_type = other DNA
ctgttttggtaccagtaccatgctgttttggttactctagccttgtagtatagatgcagaaaaggcctctgacaaaatttaacaacccttcatgctaaaaactctcaataaattaggtat

SEQ ID NO: 102753 - DNA, 120 bp, synthetic construct; identical to SEQ ID NO: 10721
  source 1..120: mol_type = other DNA

SEQ ID NO: 102754 - DNA, 120 bp, synthetic construct
  source 1..120: mol_type = other DNA
tagaaggcaaactaacaaacagaaaggacatccacaccaaaaacccatctgtacatcaccatcatcaaagaccaaaagtagataaaaccacaaagatggggaaaaaacagagcagaaaaa

SEQ ID NO: 102755 - DNA, 120 bp, synthetic construct
  source 1..120: mol_type = other DNA
accagccactgcaaaatcatgccaaattgtaaagaccatcgaggctaggaagaaactgcaactaacaagcaaaataaccagctaacatcataatgacaggatcaaattcacacataacaa

SEQ ID NO: 102756 - DNA, 120 bp, synthetic construct
  source 1..120: mol_type = other DNA
catggataggaagaatcaatatcgtgaaaatggccatactgcccaaggtaatttatagattcaatgccatccccatcaagctaacaatgactttcttcacagaatttaaaaaactacttt

SEQ ID NO: 102757 - DNA, 120 bp, synthetic construct; identical to SEQ ID NO: 10723
  source 1..120: mol_type = other DNA

SEQ ID NO: 102758 - DNA, 120 bp, synthetic construct
  source 1..120: mol_type = other DNA
gcctcccaaagtgctgggattacagacatgagccaccgtgcccggacaaaatattttaaaacattgtaaatgatcattgggtttcagtggtccaaatcagaattttctttggaagaaaaa

SEQ ID NO: 102759 - DNA, 120 bp, synthetic construct; identical to SEQ ID NO: 10724
  source 1..120: mol_type = other DNA

SEQ ID NO: 102760 - DNA, 120 bp, synthetic construct; identical to SEQ ID NO: 10725
  source 1..120: mol_type = other DNA

SEQ ID NO: 102761 - DNA, 120 bp, synthetic construct
  source 1..120: mol_type = other DNA
atttctcaatcttttccccacctttcccccctttctattccacaaaaccgccattgtcatcatggcgcgttctcaatgagctgttgggtacacctcccagacggggtggtggctgggcag

SEQ ID NO: 102762 - DNA, 120 bp, synthetic construct; identical to SEQ ID NO: 10726
  source 1..120: mol_type = other DNA

SEQ ID NO: 102763 - DNA, 120 bp, synthetic construct; identical to SEQ ID NO: 10727
  source 1..120: mol_type = other DNA

SEQ ID NO: 102764 - DNA, 120 bp, synthetic construct
  source 1..120: mol_type = other DNA
gcttagggttgacttggcaatgcaagctcttttttggttccatatgaactttaaagtagttttttccaattctgtgaagaaagtcattggtagcttgatggggatggcattgaatctata

SEQ ID NO: 102765 - DNA, 120 bp, synthetic construct
  source 1..120: mol_type = other DNA
taagctttttgatgtgctgctggatttggtttgccaatattttattgaggatttttgcatcgatgttcatcaaggatattggtctaaaattctctttttttgttgtgtctctgctaggct

SEQ ID NO: 102766 - DNA, 120 bp, synthetic construct
  source 1..120: mol_type = other DNA
gtggggggaggggggaggtatggcatttggtgatatacctaatgttaaatgacgagttactgagtgcagcacaccaacatggcacatgtatacatatgtaactaacatgcacgttgtgca

SEQ ID NO: 102767 - DNA, 120 bp, synthetic construct
  source 1..120: mol_type = other DNA
ccctttcctagtcaaagaaaggggtgatggacagcacctggaaaatcgggtcactctcacccgaatatcgcgcttttgggacggccttaaaaaaacggcgcaccacgagattatatcccc

SEQ ID NO: 102768 - DNA, 120 bp, synthetic construct
  source 1..120: mol_type = other DNA
atcaaattactctgagctacgggaggacatttaaaccaaaggcaaagaagttgaaaactttgaaaaaaatttagaagaatgtataggccgggcgcggtggctcacgcctgtaatcccagc

SEQ ID NO: 102769 - DNA, 120 bp, synthetic construct
  source 1..120: mol_type = other DNA
cattcttaaagaaaagaattttcaacccagaatttcatatccagccaaactaagcttcataagtgaaggagaaataaaatcctttacagacaagcaaatgctgagagatttcatcaccac

SEQ ID NO: 102770 - DNA, 120 bp, synthetic construct
  source 1..120: mol_type = other DNA
aacagaaattataacaaactatctctcagaccacagtgcaatcaaactagaactcaggattaagaatctcactcaaaaccgccaactacatggaaactgaacaacctgctcctgaatgac

SEQ ID NO: 102771 - DNA, 120 bp, synthetic construct
  source 1..120: mol_type = other DNA
tgcaaggctggttcaatatacacaaatcaatagatgtaatccagcatataaacagaaccaaagacaaaaaccacatgattatctcaatagatgcagaaaaggcctttgacaaaattcaac

SEQ ID NO: 102772 - DNA, 120 bp, synthetic construct
  source 1..120: mol_type = other DNA
acagatttggaaaaaactactttaaacttcatatggaaccaaaaaagagcccgcatcaccaagtcaatcctgagccaaaagaacaaagctggaggcatcacactacctgacttcaaacta

SEQ ID NO: 102773 - DNA, 120 bp, synthetic construct
  source 1..120: mol_type = other DNA
acacatgcacacgtatgtttattgtggcactattcacaatagcaaagacttagaaccaacccaaatgtccaacaatgatagactggattaagaaaatgtggcacatatacaccatggaat

SEQ ID NO: 102774 - DNA, 120 bp, synthetic construct
  source 1..120: mol_type = other DNA
cgcaaaccccatcgtctcagcccaaaatcaccttaagctgataagcaacttcatcaaatctcaggatcctaaatcaatgtgcaaaaatcacaagcattcctatacaccaataacagacaa

SEQ ID NO: 102775 - DNA, 120 bp, synthetic construct
  source 1..120: mol_type = other DNA
tgtagggacatggatgaaattggaaaccatcattctcagtaaactatcgcaagaacaaaaaacgaaacaccgcatattctcactcataggtgggaattgaacaatgagatcacatggaca

SEQ ID NO: 102776 - DNA, 120 bp, synthetic construct
  source 1..120: mol_type = other DNA
acctgcacgttgtgcacatgtaccctaaaacttaaagtataataagaataataataaaaagaaaaaaaacagacagagagccaaatcatgagtgaactcccattcacaattgctacaaag

SEQ ID NO: 102777 - DNA, 120 bp, synthetic construct; identical to SEQ ID NO: 28519
  source 1..120: mol_type = other DNA

SEQ ID NO: 102778 - DNA, 120 bp, synthetic construct; identical to SEQ ID NO: 28520
  source 1..120: mol_type = other DNA

SEQ ID NO: 102779 - DNA, 120 bp, synthetic construct; identical to SEQ ID NO: 28521
  source 1..120: mol_type = other DNA

SEQ ID NO: 102780 - DNA, 120 bp, synthetic construct; identical to SEQ ID NO: 28522
  source 1..120: mol_type = other DNA

SEQ ID NO: 102781 - DNA, 120 bp, synthetic construct
  source 1..120: mol_type = other DNA
ctacaacatgggagaaaattttcgcaacctactcatctgacaaagggctaatatccagaatctataatgaactcaaacaaatttacaagaaaaaaacaaacaaccccatcaaaaagtggg

SEQ ID NO: 102782 - DNA, 120 bp, synthetic construct; identical to SEQ ID NO: 28523
  source 1..120: mol_type = other DNA

SEQ ID NO: 102783 - DNA, 120 bp, synthetic construct
  source 1..120: mol_type = other DNA
aacaatgtctcttgtttgcctttgctgcagatgtcacttcctctggctcgtgttagcacagggagacccctcgcagaatcaatcaatttgctttggaacaaatttctgatatatatatta

SEQ ID NO: 102784 - DNA, 120 bp, synthetic construct
  source 1..120: mol_type = other DNA
acattttaaaatttaggaatgccatgacaaacaagaatagctctctttgaattttctgttaaaatatgtaatgggcccggcgcggtggctcatgcctgtaatcccagcactttgggaagc

SEQ ID NO: 102785 - DNA, 120 bp, synthetic construct; identical to SEQ ID NO: 28525
  source 1..120: mol_type = other DNA

SEQ ID NO: 102786 - DNA, 120 bp, synthetic construct
  source 1..120: mol_type = other DNA
ttgggcagtatggccattttcacgatattgattcttcctacccatgagcatggaatgttcttccatttgtttgtatcctcttttatttccttgagcagtggtttgtagttctcctcgaag

SEQ ID NO: 102787 - DNA, 120 bp, synthetic construct
  source 1..120: mol_type = other DNA
ttcatgtcctttgtagggacatggatgaaactggaaatcatcattctcagtaaactatcgcaagaacaaaaaaccaaacaccgcatattcttactcataggtgggaattgaataatgaga

SEQ ID NO: 102788 - DNA, 120 bp, synthetic construct
  source 1..120: mol_type = other DNA
cattataaaaatatgaactatggtctatatcttgcatctcttgcaccatatataaaaatgaacttgattcacaatagcaaagacttggaaccaacccaaatgtccaacaatgatagactg

SEQ ID NO: 102789 - DNA, 120 bp, synthetic construct; identical to SEQ ID NO: 28526
  source 1..120: mol_type = other DNA

SEQ ID NO: 102790 - DNA, 120 bp, synthetic construct; identical to SEQ ID NO: 28527
  source 1..120: mol_type = other DNA

SEQ ID NO: 102791 - DNA, 120 bp, synthetic construct
  source 1..120: mol_type = other DNA
cgtctgagaagtgaggagcctctccgcccggcagccaccccatctgggaagtgaggagcgtctccgcccggcagccaccccgtccgggagggaggtggtgggggtcagccccccgcccgg

SEQ ID NO: 102792 - DNA, 120 bp, synthetic construct; identical to SEQ ID NO: 28528
  source 1..120: mol_type = other DNA

SEQ ID NO: 102793 - DNA, 120 bp, synthetic construct; identical to SEQ ID NO: 28529
  source 1..120: mol_type = other DNA

SEQ ID NO: 102794 - DNA, 120 bp, synthetic construct; identical to SEQ ID NO: 28530
  source 1..120: mol_type = other DNA

SEQ ID NO: 102795 - DNA, 120 bp, synthetic construct
  source 1..120: mol_type = other DNA
aagtctgccagttgaggcgtttgattgtagaaggcaggccactgtgataagcatttgactctcgtcaaaaaaaattcctgtttcccttgaaatctttgccctatttcccctactattaac

SEQ ID NO: 102796 - DNA, 120 bp, synthetic construct; identical to SEQ ID NO: 28531
  source 1..120: mol_type = other DNA

SEQ ID NO: 102797 - DNA, 120 bp, synthetic construct
  source 1..120: mol_type = other DNA
tcccaaagtgctgggattacaggtgtgagccaccgcgcccggccccaaacttttattttatatatatatatcttagtagaagttgaacaaatatttccgaagctgttcagaacaaggtag

SEQ ID NO: 102798 - DNA, 120 bp, synthetic construct
  source 1..120: mol_type = other DNA
tcaaagttcttcaaattaacttttcaagaccaattcaacaaatacctttctgggtttctttcttttctttctcttttcttttcctctcctctcctctcccctcccctcccctcccctccc

SEQ ID NO: 102799 - DNA, 120 bp, synthetic construct; identical to SEQ ID NO: 28532
  source 1..120: mol_type = other DNA

SEQ ID NO: 102800 - DNA, 120 bp, synthetic construct; identical to SEQ ID NO: 28533
  source 1..120: mol_type = other DNA

SEQ ID NO: 102801 - DNA, 120 bp, synthetic construct
  source 1..120: mol_type = other DNA
aaccagcacgctagcctagacatcactttctgagcgaataatcacaagcaatacaagggcagagagaaacttaactgaggggaaaaacttcataaagcacaatagggcagctctaaagtg

SEQ ID NO: 102802 - DNA, 120 bp, synthetic construct
  source 1..120: mol_type = other DNA
gtgtgtgcagtgttatgtatctgtgtgtggtgtgtgttctgtgtgtatgtgtgttgtgtatatgcgtatgctgtatgtgcagtgtgtgtggtgtgtatgtatgtgtgtgtggtatatgtg

SEQ ID NO: 102803 - DNA, 120 bp, synthetic construct; identical to SEQ ID NO: 28511
  source 1..120: mol_type = other DNA

SEQ ID NO: 102804 - DNA, 120 bp, synthetic construct; identical to SEQ ID NO: 28512
  source 1..120: mol_type = other DNA

SEQ ID NO: 102805 - DNA, 120 bp, synthetic construct; identical to SEQ ID NO: 28513
  source 1..120: mol_type = other DNA

SEQ ID NO: 102806 - DNA, 120 bp, synthetic construct; identical to SEQ ID NO: 28514
  source 1..120: mol_type = other DNA

SEQ ID NO: 102807 - DNA, 120 bp, synthetic construct; identical to SEQ ID NO: 28515
  source 1..120: mol_type = other DNA

SEQ ID NO: 102808 - DNA, 120 bp, synthetic construct
  source 1..120: mol_type = other DNA
tgcatgtgtctttatagcagcatgatttatagtcctttgggtgtatatccagtaatgggatggctgggtcaaatggtatttctagttctagatccctgaggaatcgccacactgacttcc

SEQ ID NO: 102809 - DNA, 120 bp, synthetic construct
  source 1..120: mol_type = other DNA
acccacgagcatggaatgttcttccatttgtttgtatcctctttaatttcattgagcagtggtttgtagttctccttgaagaggtccttcacatcccttgtaaggtggattcctaggtat

SEQ ID NO: 102810 - DNA, 120 bp, synthetic construct
  source 1..120: mol_type = other DNA
atttatagctcagtttatatctagacacattgaagacatattgtcttaaaaataatttcattcggccaggtgcggtggttcacgcctgtaatcccagcactttgggaggcagaggcaggc

SEQ ID NO: 102811 - DNA, 120 bp, synthetic construct; identical to SEQ ID NO: 28517
  source 1..120: mol_type = other DNA

SEQ ID NO: 102812 - DNA, 120 bp, synthetic construct; identical to SEQ ID NO: 28518
  source 1..120: mol_type = other DNA

SEQ ID NO: 102813 - DNA, 120 bp, synthetic construct
  source 1..120: mol_type = other DNA
gctcacccctgtaatcccagcacaggagtttgagaccagcctgggcaacacagcaagacctcagctccacttttttaaaaaatgaaataaaaaaaaaggtatatattaaggtgaggtcat

SEQ ID NO: 102814 - DNA, 120 bp, synthetic construct
  source 1..120: mol_type = other DNA
agccgccccaaacatgggagaagacagaagtcttcaaaggagccgagatgaaaaaccaagttcaaattgtaaactaggctgggcagggtggctcacgcttgtaagtccagcactttggga

SEQ ID NO: 102815 - DNA, 120 bp, synthetic construct
  source 1..120: mol_type = other DNA
tcaataaacttgctttcactttactctatggatttgccttgaattttttcttgcacaagatccaagaaccctctcttggtgtctggatatggacccctttctgttaacagctctgttccc

SEQ ID NO: 102816 - DNA, 120 bp, synthetic construct
  source 1..120: mol_type = other DNA
ggacagttttatgtcctcctctcttctcttctctccaccttatgagagaatgagctgggcatggtggtgtgtccctgtagtcccagctacttgggagactgaggcaggaggatcacttga

SEQ ID NO: 102817 - DNA, 120 bp, synthetic construct; identical to SEQ ID NO: 33393
  source 1..120: mol_type = other DNA

SEQ ID NO: 102818 - DNA, 120 bp, synthetic construct
  source 1..120: mol_type = other DNA
gatcgcaccactgaactccagcctgggcaacggagcaagacttcgtctcaaaaaaaaaaaaaaaaaaaaaaaaaaaaaaaaaaaaatgaggaagctagccaggtatgtagacaggtctcc

SEQ ID NO: 102819 - DNA, 120 bp, synthetic construct; identical to SEQ ID NO: 6489
  source 1..120: mol_type = other DNA

SEQ ID NO: 102820 - DNA, 120 bp, synthetic construct
  source 1..120: mol_type = other DNA
aatttcactagaatttcatcccaccttgacttcttcctcaaaaatccttgtcccgataccttcagattaaaaactaaaatttaggccaggcgtggtggctcacacctgtaatctcagcac

SEQ ID NO: 102821 - DNA, 120 bp, synthetic construct
  source 1..120: mol_type = other DNA
ttagatgatagataaggataaatggataaacagatacatacatacttacaaaataggtagaccatagagatagacagggataggtgtgtgggtgggtgggtgggtggatggatggatgga

SEQ ID NO: 102822 - DNA, 120 bp, synthetic construct; identical to SEQ ID NO: 33388
  source 1..120: mol_type = other DNA

SEQ ID NO: 102823 - DNA, 120 bp, synthetic construct; identical to SEQ ID NO: 33389
  source 1..120: mol_type = other DNA

SEQ ID NO: 102824 - DNA, 120 bp, synthetic construct
  source 1..120: mol_type = other DNA
ccagcctgggcgacagagcgagactcctctccaaaaaaaaaaaaaaaaaaaagagagaaaaatgagaaacagacttctttctgggatatgttcaaaaatgttattcaaggccgggcacgg

SEQ ID NO: 102825 - DNA, 120 bp, synthetic construct; identical to SEQ ID NO: 33390
  source 1..120: mol_type = other DNA

SEQ ID NO: 102826 - DNA, 120 bp, synthetic construct; identical to SEQ ID NO: 33391
  source 1..120: mol_type = other DNA

SEQ ID NO: 102827 - DNA, 120 bp, synthetic construct; identical to SEQ ID NO: 33392
  source 1..120: mol_type = other DNA

SEQ ID NO: 102828 - DNA, 120 bp, synthetic construct
  source 1..120: mol_type = other DNA
ttttgttttttttgttttctgtttttttttttttgagacagagtcttactctgttgcccaggatagagtgcagcgacacaatctcagctcactgcaatctccgcctcctgggttgaagtg

SEQ ID NO: 102829 - DNA, 120 bp, synthetic construct; identical to SEQ ID NO: 11195
  source 1..120: mol_type = other DNA

SEQ ID NO: 102830 - DNA, 120 bp, synthetic construct; identical to SEQ ID NO: 26494
  source 1..120: mol_type = other DNA

SEQ ID NO: 102831 - DNA, 120 bp, synthetic construct
  source 1..120: mol_type = other DNA
aaaaactgccttagggctggaggtgggacctgcgggcagcaatactgctttgtaaagcattgagatgtttatgtgtatgcatatctaaaagcacagcacttaatcctttacagtgtctat

SEQ ID NO: 102832 - DNA, 120 bp, synthetic construct; identical to SEQ ID NO: 26495
  source 1..120: mol_type = other DNA

SEQ ID NO: 102833 - DNA, 120 bp, synthetic construct
  source 1..120: mol_type = other DNA
tccagcctgggtgacagagcaagattccgtctcaaaaaaaaaagagttgaagagtaaacagcatagtgagtcatctgttcttgacgggagggtatttactctcctgaggattcattgata

SEQ ID NO: 102834 - DNA, 120 bp, synthetic construct; identical to SEQ ID NO: 3236
  source 1..120: mol_type = other DNA

SEQ ID NO: 102835 - DNA, 120 bp, synthetic construct; identical to SEQ ID NO: 12610
  source 1..120: mol_type = other DNA

SEQ ID NO: 102836 - DNA, 120 bp, synthetic construct
  source 1..120: mol_type = other DNA
tcttcatgtgttttttggctgcataaatgtcttcttttgagaagtgtctgttcatgtccttcgcccactttttgatggggttgtttgtttttttcttgtaaatttgtttgagttcattgt

SEQ ID NO: 102837 - DNA, 120 bp, synthetic construct
  source 1..120: mol_type = other DNA
tcctaggtattttattctctttgaagcaattgtgaatgggagttcacccatgatttggctctctgtttgtctgttgttggtgtataagaatgcttgtgatttttgtacattgattttgta

SEQ ID NO: 102838 - DNA, 120 bp, synthetic construct
  source 1..120: mol_type = other DNA
tcagagcctgttattggtctattcagagattcaacttcttcctggtttagtcttgggagagtgtatgtgtcgaggaatgtatccatttcttctagattttctagtttatttgcgtagagg

SEQ ID NO: 102839 - DNA, 120 bp, synthetic construct
  source 1..120: mol_type = other DNA
gttggtttaaagtctgttttatcagagactaggattgcaacccctgcctttttttgttttccatttgcttggtagatcttcctccatcctgttattttgagcctatgtgtgtctctgcac

SEQ ID NO: 102840 - DNA, 120 bp, synthetic construct
  source 1..120: mol_type = other DNA
atacattcttctaaatttttttcaaagttttcaacttctttgcctttggtttgaatgtcctcccgtagctcagagtaatttgatcgtctgaagccttcttctctcagctcgtcaaaatca

SEQ ID NO: 102841 - DNA, 120 bp, synthetic construct
  source 1..120: mol_type = other DNA
tggcctgcgcccactgtctggcactccctagtgagatgaacccggtacctcagatggaaatgcagaaatcacccgtcttctgcgttgctcacgctgggagctgtagaccggagctgttcc

SEQ ID NO: 102842 - DNA, 120 bp, synthetic construct
  source 1..120: mol_type = other DNA
tcttctattcagttgtattatccatgttcctctgatagccatgcaggttccaaatcctcacatttttcaacttctttaaaagattttttttgtgctatcctgataagcgttaagtgttat

SEQ ID NO: 102843 - DNA, 120 bp, synthetic construct
  source 1..120: mol_type = other DNA
ccattcctcctccaggtcacaaagacatttcccaatattttcctcttctagcgccaaacttgtacctttcacatgtaagtcttggatccatctagagttcacttttgtatgtagttaggg

SEQ ID NO: 102844 - DNA, 120 bp, synthetic construct
  source 1..120: mol_type = other DNA
tattgaccattaccatatacttaataggatatcttgaaatatgccagaggactaggccactacttgactggtgacagagagtatcttagatgtataggcccccagacatgccagtgtcct

SEQ ID NO: 102845 - DNA, 120 bp, synthetic construct
  source 1..120: mol_type = other DNA
gaagtgatggaagcaccgaataagatggtcatgttggaaaaattgagaagctgaggtgcttagcattgattttcaaggtagagctactgagatttgctgatagatccaatgtatgctggg

SEQ ID NO: 102846 - DNA, 120 bp, synthetic construct
  source 1..120: mol_type = other DNA
gagaaaaacaattgcagatcatcccagcactgaggacaagactaacttcagtgttccagtatatgccattataggttttacggcacacagtgatgatttggagcctatgatttgacctag

SEQ ID NO: 102847 - DNA, 120 bp, synthetic construct
  source 1..120: mol_type = other DNA
cccatcatacatttcggcagtgactatgaggaccgttactatcgtgaaaacatgcaccgttaccccaaccaagtgtactacaggcccatggatgagtacagcaaccagaacaactttgtg

SEQ ID NO: 102848 - DNA, 120 bp, synthetic construct
  source 1..120: mol_type = other DNA
gagaactggggtgatgttttacttttcacagtatgggctacacagcagctgttcaacaagagtaaatattgtcacaacactgaacctctggctagaggacatattcacagtgaacataac

SEQ ID NO: 102849 - DNA, 120 bp, synthetic construct
  source 1..120: mol_type = other DNA
ataaaaaaattgtaaatgtttaatatctgactgaaattaaacgagcgaagatgagcaccacctcccgtgtctgcagttgtatttcctggtgcttgccctgtgttggggactgttttgggg

SEQ ID NO: 102850 - DNA, 120 bp, synthetic construct
  source 1..120: mol_type = other DNA
ttgttaaaacaatgaggaaggaaaagtatatttactattcactgactggaagtggatcatcataaagatcttcatctcatcttcctcacattgaggaaggctgaggaggaaggggagggg

SEQ ID NO: 102851 - DNA, 120 bp, synthetic construct
  source 1..120: mol_type = other DNA
actggcacctggttacctggacagggtgcccactgcctatttgtaggatgtcaaggtatcaggaaaatatgaagtttttaaaaatttacaatataatgccaacctcctacggtgatcaga

SEQ ID NO: 102852 - DNA, 120 bp, synthetic construct
  source 1..120: mol_type = other DNA
ctgatctaagcattctgcgcttcattttcaccccagaaaggtgacttcctcctggctggggggctcctcccctaggactcagctcatcctgaactaataaccgcgttatgtccatccttt

SEQ ID NO: 102853 - DNA, 120 bp, synthetic construct
  source 1..120: mol_type = other DNA
cataccaattttgcagggttgttgggcggactcaattcacatatgtcaaagatacttatgtgccataaagttctatataaacgaatggggtgattgcggccttgagaaaggggtcccctc

SEQ ID NO: 102854 - DNA, 120 bp, synthetic construct
  source 1..120: mol_type = other DNA
ggtcagctcctcctcctgttttccacagcacggcaagtactcaaaatttgttaaatgaacaaaagaatgaatgaatgactttaagcacttcctggaaactcctgcaaccactgtttctct

SEQ ID NO: 102855 - DNA, 120 bp, synthetic construct; identical to SEQ ID NO: 14295
  source 1..120: mol_type = other DNA

SEQ ID NO: 102856 - DNA, 120 bp, synthetic construct; identical to SEQ ID NO: 14296
  source 1..120: mol_type = other DNA

SEQ ID NO: 102857 - DNA, 120 bp, synthetic construct
  source 1..120: mol_type = other DNA
ataaatgtcttcttttgagaagtgtctgttcatgtcctttgcccactttttgatggggttgttttttttcttgtaaatttgttagagttctttgtagattctggatattagccctttgtc

SEQ ID NO: 102858 - DNA, 120 bp, synthetic construct
  source 1..120: mol_type = other DNA
gaagctgcttatcagcttaaggagattttgggctgagacaatggggttttctaaatatacgatcatgtcatctgcaaacagggacaatttgacttcttcttttcctaattgaataccctt

SEQ ID NO: 102859 - DNA, 120 bp, synthetic construct
  source 1..120: mol_type = other DNA
tcttttcaaaaaaccagctcctagattcattgatttttttgaagggttttttgtgtctctgtctctttcagttctgctctgatcttagttatttcttgccttctgctagcttttgaatgt

SEQ ID NO: 102860 - DNA, 120 bp, synthetic construct
  source 1..120: mol_type = other DNA
tgcctgcacctaggtgattaaaaagctttattgctcacacaaagcctgtttggtagtcacttcacacagatgagtgtgacagtaaaataatcagactgggcccaataaacattcattgca

SEQ ID NO: 102861 - DNA, 120 bp, synthetic construct
  source 1..120: mol_type = other DNA
cccttcaaaaaaatcaatgaatctaggagctggttttttgaaaaggtcaacaaaattgatagaataataaagaagattgcaagactaataaagaagaaaagagagaagaatcaaatagac

SEQ ID NO: 102862 - DNA, 120 bp, synthetic construct; identical to SEQ ID NO: 9344
  source 1..120: mol_type = other DNA

SEQ ID NO: 102863 - DNA, 120 bp, synthetic construct; identical to SEQ ID NO: 9345
  source 1..120: mol_type = other DNA

SEQ ID NO: 102864 - DNA, 120 bp, synthetic construct; identical to SEQ ID NO: 14029
  source 1..120: mol_type = other DNA

SEQ ID NO: 102865 - DNA, 120 bp, synthetic construct; identical to SEQ ID NO: 14030
  source 1..120: mol_type = other DNA

SEQ ID NO: 102866 - DNA, 120 bp, synthetic construct; identical to SEQ ID NO: 14031
  source 1..120: mol_type = other DNA

SEQ ID NO: 102867 - DNA, 120 bp, synthetic construct; identical to SEQ ID NO: 11932
  source 1..120: mol_type = other DNA

SEQ ID NO: 102868 - DNA, 120 bp, synthetic construct; identical to SEQ ID NO: 11933
  source 1..120: mol_type = other DNA

SEQ ID NO: 102869 - DNA, 120 bp, synthetic construct; identical to SEQ ID NO: 19970
  source 1..120: mol_type = other DNA

SEQ ID NO: 102870 - DNA, 120 bp, synthetic construct; identical to SEQ ID NO: 27452
  source 1..120: mol_type = other DNA

SEQ ID NO: 102871 - DNA, 120 bp, synthetic construct; identical to SEQ ID NO: 27453
  source 1..120: mol_type = other DNA

SEQ ID NO: 102872 - DNA, 120 bp, synthetic construct; identical to SEQ ID NO: 27454
  source 1..120: mol_type = other DNA

SEQ ID NO: 102873 - DNA, 120 bp, synthetic construct; identical to SEQ ID NO: 22742
  source 1..120: mol_type = other DNA

SEQ ID NO: 102874 - DNA, 120 bp, synthetic construct; identical to SEQ ID NO: 22743
  source 1..120: mol_type = other DNA

SEQ ID NO: 102875 - DNA, 120 bp, synthetic construct; identical to SEQ ID NO: 27766
  source 1..120: mol_type = other DNA

SEQ ID NO: 102876 - DNA, 120 bp, synthetic construct
  source 1..120: mol_type = other DNA
cttggtatttgatgacaaattcagcagaagacccggcttgctccagtgtagctttctacatcccacatcaggtatattagagcttatccgaactggggaaagacggattgagattaactg

SEQ ID NO: 102877 - DNA, 120 bp, synthetic construct
  source 1..120: mol_type = other DNA
ctaaaataaaataaaaagaaatacatttggctgggcgtggtggctcacacctataatcccagcactttgggaggctgaagcacgcagatcacctgaggtcaggagtttgagatcagcctg

SEQ ID NO: 102878 - DNA, 120 bp, synthetic construct
  source 1..120: mol_type = other DNA
agcattctggggaaattccttgtcttgatcttccctggtttgttcttaaagttgtgtttattctgctgttaagccagccagctactgggtttctttagaccataataacttcttccccct

SEQ ID NO: 102879 - DNA, 120 bp, synthetic construct
  source 1..120: mol_type = other DNA
gactgccagcaaaaataatgaaagtgcccaaatggaaatatattttactgccttacttcctgagagtgttggataaattaggctttcctgtagatacagctgagccatgtgattatgccg

SEQ ID NO: 102880 - DNA, 120 bp, synthetic construct
  source 1..120: mol_type = other DNA
agctgtgtttataccactgcactccagcctgctgggtaacagagcaagactccatctcaaaaagaaaagaaaaaatgctttgctacataatgaggccaggcaaaaaaaaaaagtcctgtg

SEQ ID NO: 102881 - DNA, 120 bp, synthetic construct; identical to SEQ ID NO: 18319
  source 1..120: mol_type = other DNA

SEQ ID NO: 102882 - DNA, 120 bp, synthetic construct
  source 1..120: mol_type = other DNA
tacttgggaggctgaggcaggacaatcacttgaacccaggaggcagagatttcagtgagctgaaatcacgtcactgtactccaccctaggcgaaactctatctaaaaaaaaaaaaaggcc

SEQ ID NO: 102883 - DNA, 120 bp, synthetic construct; identical to SEQ ID NO: 19900
  source 1..120: mol_type = other DNA

SEQ ID NO: 102884 - DNA, 120 bp, synthetic construct; identical to SEQ ID NO: 19901
  source 1..120: mol_type = other DNA

SEQ ID NO: 102885 - DNA, 120 bp, synthetic construct; identical to SEQ ID NO: 19902
  source 1..120: mol_type = other DNA

SEQ ID NO: 102886 - DNA, 120 bp, synthetic construct; identical to SEQ ID NO: 19903
  source 1..120: mol_type = other DNA

SEQ ID NO: 102887 - DNA, 120 bp, synthetic construct
  source 1..120: mol_type = other DNA
cgtgtgataatttaggatggtttaatccattcctgtatgctcactgctgaaggaaacccttgcttttgtttaggtacagtctgttcaagactcctgaccttcttagggaagcaagggata

SEQ ID NO: 102888 - DNA, 120 bp, synthetic construct
  source 1..120: mol_type = other DNA
agcatgatttataatcctttgggtatatacccagtaaagggattgctgggtcaaatggtagttctagttctagatccctgaagaatcgccacactgacttccacagtggttgaactagtt

SEQ ID NO: 102889 - DNA, 120 bp, synthetic construct
  source 1..120: mol_type = other DNA
ggtagcttgatagggatggcattgaatctataaattaccttgggcagtatggccattttgacgatattgattcttcctacccatgagcatggaatgttcttccatttgtttgcatcctgt

SEQ ID NO: 102890 - DNA, 120 bp, synthetic construct
  source 1..120: mol_type = other DNA
ctttattagccttgctagcggtctatcaattttgttgatcgtttcaaaaaaccagctcctggattcattgattttttgaagggttttttgtgtctctatttccttcagttctgctctgat

SEQ ID NO: 102891 - DNA, 120 bp, synthetic construct
  source 1..120: mol_type = other DNA
cactcaagtaggagttacacttctttagggaaaacctgtttgcataataatccagctgttggaggcagtgattttttttttattatactttaagttttagggtacatgtgcacaatgtgc

SEQ ID NO: 102892 - DNA, 120 bp, synthetic construct; identical to SEQ ID NO: 26980
  source 1..120: mol_type = other DNA

SEQ ID NO: 102893 - DNA, 120 bp, synthetic construct
  source 1..120: mol_type = other DNA
atacactggaatctactttaggatggagggcgagaggagggagagaaacagaaaaaataactattgggtactaggcttaatacctgggtcatggaataatctgtacaacaaaccctcaag

SEQ ID NO: 102894 - DNA, 120 bp, synthetic construct
  source 1..120: mol_type = other DNA
gcccgccactacgcccggctaattttttgtatttttagtagagacggggtttcaccgttttagccgggatggtctcaatctcctgacctcgtgatccgcccgcctcggcctcccaaagtg

SEQ ID NO: 102895 - DNA, 120 bp, synthetic construct
  source 1..120: mol_type = other DNA
atagcagcatgatttatagtcctttgggtatatacccagtaaagggattgctgggtcaaatggtatttctagttctagatccctgaggaatcgccacactgacttccacaatggttgaac

SEQ ID NO: 102896 - DNA, 120 bp, synthetic construct; identical to SEQ ID NO: 102895
  source 1..120: mol_type = other DNA

SEQ ID NO: 102897 - DNA, 120 bp, synthetic construct
  source 1..120: mol_type = other DNA
ttgttcttttggcttaggattgacttggcaatgtgggctcttttttggttccatgtgaactttaaagtagttttttccaattctgtgaagaaagtcattggtagcttgatggggatggca

SEQ ID NO: 102898 - DNA, 120 bp, synthetic construct
  source 1..120: mol_type = other DNA
gataagctttttgatgtgctgctggattcagtttgccagtattttattgaggatttttgcatcaatgttcatcaaggatattggtctaaaattctcttttttggttgtgtctctgcccag

SEQ ID NO: 102899 - DNA, 120 bp, synthetic construct
  source 1..120: mol_type = other DNA
tgagttctagtttgattgcactgtggtctgagagaccgtttgttataatctctgttcttttacatttgctgaggagagctttacttccaactatgtgtcagttttggaataggtgtggtg

SEQ ID NO: 102900 - DNA, 120 bp, synthetic construct
  source 1..120: mol_type = other DNA
atttctccttcacttatgaaggttagtttggctggatatgaaattctaggttgaaaattcttttctttaagaatgttgaatattggcccccactctcttctggcttgtagagtttctgcc

SEQ ID NO: 102901 - DNA, 120 bp, synthetic construct; identical to SEQ ID NO: 31177
  source 1..120: mol_type = other DNA

SEQ ID NO: 102902 - DNA, 120 bp, synthetic construct; identical to SEQ ID NO: 31178
  source 1..120: mol_type = other DNA

SEQ ID NO: 102903 - DNA, 120 bp, synthetic construct; identical to SEQ ID NO: 31179
  source 1..120: mol_type = other DNA

SEQ ID NO: 102904 - DNA, 120 bp, synthetic construct; identical to SEQ ID NO: 31180
  source 1..120: mol_type = other DNA

SEQ ID NO: 102905 - DNA, 120 bp, synthetic construct; identical to SEQ ID NO: 31181
  source 1..120: mol_type = other DNA

SEQ ID NO: 102906 - DNA, 120 bp, synthetic construct; identical to SEQ ID NO: 31182
  source 1..120: mol_type = other DNA

SEQ ID NO: 102907 - DNA, 120 bp, synthetic construct; identical to SEQ ID NO: 31183
  source 1..120: mol_type = other DNA

SEQ ID NO: 102908 - DNA, 120 bp, synthetic construct; identical to SEQ ID NO: 31184
  source 1..120: mol_type = other DNA

SEQ ID NO: 102909 - DNA, 120 bp, synthetic construct; identical to SEQ ID NO: 31185
  source 1..120: mol_type = other DNA

SEQ ID NO: 102910 - DNA, 120 bp, synthetic construct; identical to SEQ ID NO: 31186
  source 1..120: mol_type = other DNA

SEQ ID NO: 102911 - DNA, 120 bp, synthetic construct; identical to SEQ ID NO: 31187
  source 1..120: mol_type = other DNA

SEQ ID NO: 102912 - DNA, 120 bp, synthetic construct; identical to SEQ ID NO: 31188
  source 1..120: mol_type = other DNA

SEQ ID NO: 102913 - DNA, 120 bp, synthetic construct; identical to SEQ ID NO: 31189
  source 1..120: mol_type = other DNA

SEQ ID NO: 102914 - DNA, 120 bp, synthetic construct
  source 1..120: mol_type = other DNA
gaatggagagagcctgtgcatgatgggatatccccgcctagatctttcagtgagtctctacctcagcaactcttaggatcagggggagaaccatggtgtcagacatccggaaagaagacg

SEQ ID NO: 102915 - DNA, 120 bp, synthetic construct; identical to SEQ ID NO: 15752
  source 1..120: mol_type = other DNA

SEQ ID NO: 102916 - DNA, 120 bp, synthetic construct; identical to SEQ ID NO: 19512
  source 1..120: mol_type = other DNA

SEQ ID NO: 102917 - DNA, 120 bp, synthetic construct; identical to SEQ ID NO: 19513
  source 1..120: mol_type = other DNA

SEQ ID NO: 102918 - DNA, 120 bp, synthetic construct; identical to SEQ ID NO: 11845
  source 1..120: mol_type = other DNA

SEQ ID NO: 102919 - DNA, 120 bp, synthetic construct; identical to SEQ ID NO: 11846
  source 1..120: mol_type = other DNA

SEQ ID NO: 102920 - DNA, 120 bp, synthetic construct
  source 1..120: mol_type = other DNA
tcccactagcagtgtaaaaaaattgttcccttttgactgcatccccgccaacatctattatttttttatatttttgattatggccattcttgcaggggtaaggtggtatggtattgtggt

SEQ ID NO: 102921 - DNA, 120 bp, synthetic construct
  source 1..120: mol_type = other DNA
atttctattttttattttattttattttattttattattattatacttttagtgtacgtgtgcacaatgtgcaggttagttacatatgtatacatgtgccatgctggtgtgctgcaccca

SEQ ID NO: 102922 - DNA, 120 bp, synthetic construct
  source 1..120: mol_type = other DNA
ctggatattagccctttgtcagatgagtaggttgtgaaaattttctcccattttgtaggttgcctgttcactctgatggtagtttcttttgctgtgcagaagctgtttagtttaattaga

SEQ ID NO: 102923 - DNA, 120 bp, synthetic construct; identical to SEQ ID NO: 27294
  source 1..120: mol_type = other DNA

SEQ ID NO: 102924 - DNA, 120 bp, synthetic construct; identical to SEQ ID NO: 27295
  source 1..120: mol_type = other DNA

SEQ ID NO: 102925 - DNA, 120 bp, synthetic construct
  source 1..120: mol_type = other DNA
attctggatattagccctttgttagatgaatatgttgcgaaaattttctcccattttgtaggttgcctgttcactctgatggtaataggagtggtgagagagggcatccctgtcctgtgc

SEQ ID NO: 102926 - DNA, 120 bp, synthetic construct
  source 1..120: mol_type = other DNA
atcccctttatcattttttattgcgtctatttgattcttctctctttttttctttattagtcttgctagcggtctatcaattttgttgatcctttcaaaaaaaccagctcctggattcat

SEQ ID NO: 102927 - DNA, 120 bp, synthetic construct
  source 1..120: mol_type = other DNA
ctgcacgtgagatgggtttcctgaatacagcacactgatgggtcttgactctttatccaatttgccagtctgtgtcttttaattggagcatttagtccacttacatttaaagttaatatt

SEQ ID NO: 102928 - DNA, 120 bp, synthetic construct
  source 1..120: mol_type = other DNA
gctttcagcttcatcagctcctttaagcacttctctgtattggttattctagttatacattcgtctaaatttttttcaaagttttcaacttctttgcctttggtttgaatttccttctgt

SEQ ID NO: 102929 - DNA, 120 bp, synthetic construct
  source 1..120: mol_type = other DNA
cactattcccaatagcaaagacttggaaccaatccaaatgtccaacaatgatagactggattaagaaaatgtggtacatatacaccatggaatactatgcagccataaaaatgatgagtt

SEQ ID NO: 102930 - DNA, 120 bp, synthetic construct; identical to SEQ ID NO: 33033
  source 1..120: mol_type = other DNA

SEQ ID NO: 102931 - DNA, 120 bp, synthetic construct; identical to SEQ ID NO: 33034
  source 1..120: mol_type = other DNA

SEQ ID NO: 102932 - DNA, 120 bp, synthetic construct; identical to SEQ ID NO: 9006
  source 1..120: mol_type = other DNA

SEQ ID NO: 102933 - DNA, 120 bp, synthetic construct; identical to SEQ ID NO: 33735
  source 1..120: mol_type = other DNA

SEQ ID NO: 102934 - DNA, 120 bp, synthetic construct
  source 1..120: mol_type = other DNA
gcaatggaacaaagctggacagagaatgactttgacgagttgagagaagacggcttcagacgatcaaactcctccgagctacagaaggaaattcaaaccaaagacaaagaagttaaaaac

SEQ ID NO: 102935 - DNA, 120 bp, synthetic construct
  source 1..120: mol_type = other DNA
tgctgagagattttgtcaccaccaggcctgccctaaaagagctcctgaaggaagcactcaacatggaaaggaacaaccagtaccagccactgcaaaatcatgccaaattgtaaagaccat

SEQ ID NO: 102936 - DNA, 120 bp, synthetic construct
  source 1..120: mol_type = other DNA
acactcaaaaccgctcaactacatggaaactgagcaacctgctcctgaatgactactgggtacataacgaaatgaaggcagaaataaagatgttctttgaaaccaacgagaacaaagaca

SEQ ID NO: 102937 - DNA, 120 bp, synthetic construct
  source 1..120: mol_type = other DNA
tgatgaacattgatgcaaaaatcctcaataaaatactggcaaaccaaatccagcagcacatcaaaaagcttttccaccatgatcaagtgggcttcatccctgggatgcaaggctggttca

SEQ ID NO: 102938 - DNA, 120 bp, synthetic construct
  source 1..120: mol_type = other DNA
tgatctttgacaaacctgacaaaaacaagcaatggggaaaggattccctatttaataagggctgggaaaactggctagcgataagtagaaagctgaaactggatcccttccttacacctt

SEQ ID NO: 102939 - DNA, 120 bp, synthetic construct
  source 1..120: mol_type = other DNA
atgaaattggaaatcatcattctcagtaaactatcgcaaggacagaaaaccaaacaccgcctgttctcactcataggtgggaattgaacagtgagaacacatggacacaggaaggggaac

SEQ ID NO: 102940 - DNA, 120 bp, synthetic construct
  source 1..120: mol_type = other DNA
ttctgtacctcataaagggtcataaagggaaccctttatgaggtacagaaggaaatactcattgaaggcctatcatggttttcaccctggtataagtgtcatctagctggtgtcaatttg

SEQ ID NO: 102941 - DNA, 120 bp, synthetic construct
  source 1..120: mol_type = other DNA
tctttcgtggctacatttttgctgtttttggacttctatgtgtgtgtgtgtgtgtgtgtgtgtgtgtatctatgtgtgcacgttgccttttctcattgcttatctgaaacaatagccggt

SEQ ID NO: 102942 - DNA, 120 bp, synthetic construct; identical to SEQ ID NO: 35506
  source 1..120: mol_type = other DNA

SEQ ID NO: 102943 - DNA, 120 bp, synthetic construct
  source 1..120: mol_type = other DNA
acgcttccccgccccccgaagtttgttttcctaagtttgtgcgtaagatttttcaaaattctgagtcagagcttcccctaagatgaggcctttggggcatgcgagaaacgccaaaatgtg

SEQ ID NO: 102944 - DNA, 120 bp, synthetic construct
  source 1..120: mol_type = other DNA
tttctatacctcctcatatgtgcataaatgcatgcacatgcacacatgaatgcactgaaaacaagaaccttttctgtcttcttcgttgctgcttccaaatagcctagaagaactcttgga

SEQ ID NO: 102945 - DNA, 120 bp, synthetic construct
  source 1..120: mol_type = other DNA
tttatcaccaaacctagcttgtgagcctcagtctagagctagcataatttagaaaaataaatgcatacatcatatattaaactctgagtatcatgaaacagatcctagatgttacaataa

SEQ ID NO: 102946 - DNA, 120 bp, synthetic construct
  source 1..120: mol_type = other DNA
ctagtatgatctctgctttccttagacaagtaaccctggagaagacacttgacctctgagctttagattgttcatctgtaaaaaggagagaacaatatctgctgcctaccacctcagtga

SEQ ID NO: 102947 - DNA, 120 bp, synthetic construct
  source 1..120: mol_type = other DNA
ttatcctctaaggcaggtgttctgtgaagaccccatgacaagggacaaaatgaaacaacatgttcagggacaacaaaggaaaagcccattttatcaatgctccaaaacctggctacctca

SEQ ID NO: 102948 - DNA, 120 bp, synthetic construct
  source 1..120: mol_type = other DNA
tccatttccacactgctctggccaggttgtgcctcagtcaattacacaactgtgtcttagtagccttggtagggcccaaatcaggatattctctaggaagattcactttgtactgagcca

SEQ ID NO: 102949 - DNA, 120 bp, synthetic construct
  source 1..120: mol_type = other DNA
ccaaccacccccccgttcctggccgacaaatgcccttccattcttaccacctctcctcttttgactgtgctctgatattccgtttcctccatctggcatatctccttcccatcctccttg

SEQ ID NO: 102950 - DNA, 120 bp, synthetic construct
  source 1..120: mol_type = other DNA
ccccctttgatgatgatgacaagatcgttgggggctacaactgtgaggagaattctgtcccctaccaggtgtccctgaattctggctaccacttctgtggtggctccctcatcaacgaac

SEQ ID NO: 102951 - DNA, 120 bp, synthetic construct
  source 1..120: mol_type = other DNA
cacagtgctagtgactgtggagattgtgggaaagagtctggggaggcaggttgaggagcagcctctggtgggatccctttgactcttccccaccccactaccaccaacctctggagcaga

SEQ ID NO: 102952 - DNA, 120 bp, synthetic construct
  source 1..120: mol_type = other DNA
actaaaagccagagtctcttgccaggacttatgttctggagtcctctccaggggctgtgttcctcttcagttttccatccaagattattgtctccttctctggcctgacccacatttcta

SEQ ID NO: 102953 - DNA, 120 bp, synthetic construct
  source 1..120: mol_type = other DNA
tcaggttagacacgactgtcccctttaaaggtaagcagagcccccatctcccaaaatgtgttccatggtacactagattagcacatacaaacagatggaatccaaaaataagaagaagct

SEQ ID NO: 102954 - DNA, 120 bp, synthetic construct
  source 1..120: mol_type = other DNA
agggaacagagcacaggcctccaagtgtccacagagcagcgtgcaaattgcagggatgagtagaggaaaacctctacatggagcacagcgttcctggcaaacacaggggactgcagtcca

SEQ ID NO: 102955 - DNA, 120 bp, synthetic construct
  source 1..120: mol_type = other DNA
accaacactaccatcaccaaaaacacaaaacaagcaaaaacatgcttattcaaaatcctagacaaaatactgtgtgagagccaggccacggggttgccttttcacaggccacacagcttt

SEQ ID NO: 102956 - DNA, 120 bp, synthetic construct
  source 1..120: mol_type = other DNA
catagtattccatggtgtatatgtaccacatttcctttatccaatctaccgttgatggccacctagattgattccatggctttgttattgtgaatagtgctgtgacggacatgcaagagc

SEQ ID NO: 102957 - DNA, 120 bp, synthetic construct
  source 1..120: mol_type = other DNA
agcatgcattcatcttgtcacctggaatttgagagatcaagaagccccatagcaacctaccatgcaactgcccatcagtgctgatcctttcaagggattatctcaattctgactctgcag

SEQ ID NO: 102958 - DNA, 120 bp, synthetic construct
  source 1..120: mol_type = other DNA
agctgacctcagactatactgtgatcgcttaaggaagagcacaaaatactggagaaggctagtcttcaagctctagatacagaaaatcctcaattcttgggtgttacctttcagaaaaag

SEQ ID NO: 102959 - DNA, 120 bp, synthetic construct; identical to SEQ ID NO: 27549
  source 1..120: mol_type = other DNA

SEQ ID NO: 102960 - DNA, 120 bp, synthetic construct
  source 1..120: mol_type = other DNA
ggccagtgtggttttgaactcctgacctcaagtgatccagagtgctaggattacaggtgtgagccacagcttctggcccaggccccattttttaaaaaataatttcaaattttattttag

SEQ ID NO: 102961 - DNA, 120 bp, synthetic construct
  source 1..120: mol_type = other DNA
tgaactgatttacactctggccaacagtgtacaagcattccctttccactgcagcctcatgagcatcttctattctgtggacattttaataataaccacactgcagccaagctctttcaa

SEQ ID NO: 102962 - DNA, 120 bp, synthetic construct
  source 1..120: mol_type = other DNA
tggaacatggaagagtcacttcaccttcagaaagctcatttgctcatctgtaaagtgggcaattccataggtggttgtgatgataaaatgaaaaaaaagttcttaacttatatgagtgac

SEQ ID NO: 102963 - DNA, 120 bp, synthetic construct
  source 1..120: mol_type = other DNA
cctctgtcttgatcctcaataaatctccttttagatacctcctcttagatgaaattcccacacttcacaatgctctccatggcttctgttggccttatggtcagctctgccaagatctgt

SEQ ID NO: 102964 - DNA, 120 bp, synthetic construct
  source 1..120: mol_type = other DNA
attctctagaaagattcacttagtactgagccaagtataatctcactacatctaaaatagaaaattctagacccacccctccacatctttgttattgaacccaatatgtcacccatttac

SEQ ID NO: 102965 - DNA, 120 bp, synthetic construct
  source 1..120: mol_type = other DNA
tctccccatcctcgggaggtataaagacgggttctccaccagcaatcaggcacactctaccaccatgaatctacttctgatccttacctttgttgcagctgctggtgagtttcacgccct

SEQ ID NO: 102966 - DNA, 120 bp, synthetic construct
  source 1..120: mol_type = other DNA
agacacagagacttgggagccacatccagtgatgatcaccagggctggcagcgctcccccccttgcctagcctcactgagcttgttaaggttttctaattagcaggaagcagccacaggc

SEQ ID NO: 102967 - DNA, 120 bp, synthetic construct
  source 1..120: mol_type = other DNA
tccccactccactaccaccaacctctgaagcagaaaggtcctgggtttcacacctgcactgacccacattgctctcctgcccatgcaatatggccacacaccccaccccatgcctccaga

SEQ ID NO: 102968 - DNA, 120 bp, synthetic construct
  source 1..120: mol_type = other DNA
ttgtctctttctctggcctaacccacatttctttctttgttctcttcctgatcctcacagccgactacccagacgagctgcagtgcctggatgctcctgtgctgagccaggctgagtgtg

SEQ ID NO: 102969 - DNA, 120 bp, synthetic construct
  source 1..120: mol_type = other DNA
aaatacaataataatgacaaatcctgttggtgatgacgtgcctctcccaggaatgtgtcggcaccaaaccctcgaccaagccctcccttctcattcacctggaaaatcagatgcaaataa

SEQ ID NO: 102970 - DNA, 120 bp, synthetic construct
  source 1..120: mol_type = other DNA
tttgtgtgaggagacggctaccactcactatcttcagaggaaaacagggctcagggcttgcacacaatggacagatacacatgggtcacccaaaacgtcactgcatacaaacatcacttt

SEQ ID NO: 102971 - DNA, 120 bp, synthetic construct
  source 1..120: mol_type = other DNA
gatctctgctcactacaacctctgcctccagggttcaagtgattcagcctcccaagtagctggaattacaggcacccaccactgtgcccagctaatttattttttattttatttatttat

SEQ ID NO: 102972 - DNA, 120 bp, synthetic construct
  source 1..120: mol_type = other DNA
atttacactctgaccaacagtgtataggtgttccatttcctctgcagcctcaccagcatcttctgttttttgacattttaataatagccactctgcagccaagctctttcaaggccaatg

SEQ ID NO: 102973 - DNA, 120 bp, synthetic construct
  source 1..120: mol_type = other DNA
gcacacatggtatcttctctttgcttggggcgaagggggcggggaggggcggggatagtctgccatgctcagagttgtaatcattcagcagctgctccatatattctaaatccttgcaca

SEQ ID NO: 102974 - DNA, 120 bp, synthetic construct; identical to SEQ ID NO: 15913
  source 1..120: mol_type = other DNA

SEQ ID NO: 102975 - DNA, 120 bp, synthetic construct; identical to SEQ ID NO: 15914
  source 1..120: mol_type = other DNA

SEQ ID NO: 102976 - DNA, 120 bp, synthetic construct; identical to SEQ ID NO: 15915
  source 1..120: mol_type = other DNA

SEQ ID NO: 102977 - DNA, 120 bp, synthetic construct; identical to SEQ ID NO: 9428
  source 1..120: mol_type = other DNA

SEQ ID NO: 102978 - DNA, 120 bp, synthetic construct
  source 1..120: mol_type = other DNA
ttttaggggtctagattctttcatataacatagtgtctccaaggttcattttgtgggatgtatcaataaggggtttcactatgttggctaggctggtctcgaactcctgacctcaggtga

SEQ ID NO: 102979 - DNA, 120 bp, synthetic construct
  source 1..120: mol_type = other DNA
ctgaccccccccacctccctcccggacggggtggctgccgggcggagatgctcctcacttcccagatggggtggctgccgggcggagaggctcctcacttctcagacggagtggttgcca

SEQ ID NO: 102980 - DNA, 120 bp, synthetic construct; identical to SEQ ID NO: 15916
  source 1..120: mol_type = other DNA

SEQ ID NO: 102981 - DNA, 120 bp, synthetic construct
  source 1..120: mol_type = other DNA
ttattaatccagagaccctggaatatcctggttcattcttgttcattaatttttcagaaatttgacttcatgtttgtaaatttaagagtggaaggggccgggcgcggtggctcacgcctg

SEQ ID NO: 102982 - DNA, 120 bp, synthetic construct; identical to SEQ ID NO: 32648
  source 1..120: mol_type = other DNA

SEQ ID NO: 102983 - DNA, 120 bp, synthetic construct
  source 1..120: mol_type = other DNA
aagtagataaaaaccacaaagatggggaaaaaacagaacagaaaaactggaaactctaaaaagcagagcgcctctcctcctccaaaggaacacagctcctcacctgcaacggaataaagc

SEQ ID NO: 102984 - DNA, 120 bp, synthetic construct
  source 1..120: mol_type = other DNA
ccagtagcagccactgtaaaatcatgccaaaatgtaaagaccatcgagactaggaagaaactgcatcaactaacgagcaaaataaccagctaacatcataatgacaggatcaaattcaca

SEQ ID NO: 102985 - DNA, 120 bp, synthetic construct
  source 1..120: mol_type = other DNA
gcaagagcaaacacattcaaaggctagcagaaggcaaaaaataactaaaatcagagcagaactgaaggaaatagagatacaaaaaacccttccaaaaattaacgaatccaggagctggtt

SEQ ID NO: 102986 - DNA, 120 bp, synthetic construct
  source 1..120: mol_type = other DNA
cccactgtctcagcccaaaatctccttaagctgataagcaacttcagcaaagtctcaggatacaaaatcaatgtacaaaaatctcaagcattcttatacaccaacaacagacaaacagag

SEQ ID NO: 102987 - DNA, 120 bp, synthetic construct
  source 1..120: mol_type = other DNA
ttgacaaatgggatctaattaaactaaagagcttctgcacagcaaaagaaactaccatcagagtgaacaggcaacctacaaaatgggtgaaaattttcgcaacttactcatctgacaaag

SEQ ID NO: 102988 - DNA, 120 bp, synthetic construct; identical to SEQ ID NO: 32649
  source 1..120: mol_type = other DNA

SEQ ID NO: 102989 - DNA, 120 bp, synthetic construct; identical to SEQ ID NO: 32650
  source 1..120: mol_type = other DNA

SEQ ID NO: 102990 - DNA, 120 bp, synthetic construct; identical to SEQ ID NO: 32651
  source 1..120: mol_type = other DNA

SEQ ID NO: 102991 - DNA, 120 bp, synthetic construct; identical to SEQ ID NO: 32652
  source 1..120: mol_type = other DNA

SEQ ID NO: 102992 - DNA, 120 bp, synthetic construct; identical to SEQ ID NO: 6365
  source 1..120: mol_type = other DNA

SEQ ID NO: 102993 - DNA, 120 bp, synthetic construct
  source 1..120: mol_type = other DNA
cggaagttagttaacagccattagggaattctgtaggatagaaccctcccctctcccctaatatttacacaatcacatgtacatgatcattcacagcagtgtctctaagacaaaggactt

SEQ ID NO: 102994 - DNA, 120 bp, synthetic construct
  source 1..120: mol_type = other DNA
ggaaactgcccttctgtctccatttttgaaacaggctgtgtgcaataatctggtcccataagaattggaatatgatctgttgtgttgttgagggttctttgggtgatacaatcatacctg

SEQ ID NO: 102995 - DNA, 120 bp, synthetic construct
  source 1..120: mol_type = other DNA
agtgatgttgcaaaaccttatacacccctcacgagattttgtccttaaagctatctgactttattcctgctcatactctatgtcccaggatgaaatcaaaagatgatggagagtgccccc

SEQ ID NO: 102996 - DNA, 120 bp, synthetic construct
  source 1..120: mol_type = other DNA
tctctcaaccacatctgcatccgagaaaggccagtttgaggtgtgaaaacaatgctttatctgggacttgcttttgttgtggttcctgtatttcccagagaggaacaaatacttgctttt

SEQ ID NO: 102997 - DNA, 120 bp, synthetic construct
  source 1..120: mol_type = other DNA
gaagtcactgtgatgagatctttaaagtgctggaataagaagataaagtcaatcataaactcaatatctggccaaacaaaaatttaactttatgagcaaataaggcatttccaagcaaac

SEQ ID NO: 102998 - DNA, 120 bp, synthetic construct
  source 1..120: mol_type = other DNA
agcagcatgatttataaccctttgggtatatactcagtaatgggattgctgggtcaaatggtaattctaattttaaatccttgcggaattaccacactgtcttccacaatggttgaacta

SEQ ID NO: 102999 - DNA, 120 bp, synthetic construct
  source 1..120: mol_type = other DNA
atacaagcaatgccattcccatcaagccaccagtgactttcttcagagatttggaaaaaaaaaggtacagttcatatggagcccaaaaataggccatattgctaagataatcctaagaag

SEQ ID NO: 103000 - DNA, 120 bp, synthetic construct
  source 1..120: mol_type = other DNA
ttgtgtgtctctgccaggccttggtatcaggatgaagttgtcctcataaaatgagttggggaggattctctcttttttttattgattggaatagtttcagaaggaatggtaccagtccct

SEQ ID NO: 103001 - DNA, 120 bp, synthetic construct
  source 1..120: mol_type = other DNA
ttagacacccacacaataataatgggagacttcaacaccccacagtcaatgttgtctcattaatcaacagatcaatgagacagaaggttaacaaggatatccagcacttaaactcagctc

SEQ ID NO: 103002 - DNA, 120 bp, synthetic construct
  source 1..120: mol_type = other DNA
tcagtagctgattcaatcaagtggaagaaagggtatcagtgattgaagatctcattaataaaataaactgagaagacaaggttagagaaaaaagagtaaaaagaaacaaaatctctgaga

SEQ ID NO: 103003 - DNA, 120 bp, synthetic construct
  source 1..120: mol_type = other DNA
gtagaaaggcgttcacaattgctaagtcttgagcaggtaaacaaagcacccaggaagctaaaactgggtggagcccaccacagctcaacaaggcctactgcctgtagactacacctctgt

SEQ ID NO: 103004 - DNA, 120 bp, synthetic construct
  source 1..120: mol_type = other DNA
ataaaacatcttggctcctcctgaaacccactcccacccatttcagtcatgataagttgaagatcttaagtagtttagacacatgcctttgctcaaggaaattcacagaaaccaccagtg

SEQ ID NO: 103005 - DNA, 120 bp, synthetic construct
  source 1..120: mol_type = other DNA
tagaacagatccacagcaggccagcctccagttttcttattcttaaatgatcctcctcatcaagtaaagatcacagagtgcagggaggctgctcaaaaaagtactgatatgtagcagaaa

SEQ ID NO: 103006 - DNA, 120 bp, synthetic construct
  source 1..120: mol_type = other DNA
tccacatctaattaaacaccacagattccagcagaaaatcctagctctacccacacttccactccctcaaacaagactcaagtaatcaccacatccagctcaaaaactcaagatctgtcc

SEQ ID NO: 103007 - DNA, 120 bp, synthetic construct
  source 1..120: mol_type = other DNA
ccttcttccttctggcctcaagacctctgttcaaggaaagttcagaacacatgctccccgtagtctcagagaagtataaaatattgcatccctgaaaaataacaaaatttaggaagataa

SEQ ID NO: 103008 - DNA, 120 bp, synthetic construct
  source 1..120: mol_type = other DNA
tacctgtaattctataaaatacccacaagtttttagtgaaagaagcagatctgtggtcctagggtggccagggagtgatcgttattgatgggaggaagatgtgttttcatgaccttcatc

SEQ ID NO: 103009 - DNA, 120 bp, synthetic construct
  source 1..120: mol_type = other DNA
catgggttgttccatttcaataaagggaaattaacattttctgatcacaagtgcatgcaggtgtcttactcaggtgaactcacagcaactctgcaaagtatgggtagtcccacatgtaga

SEQ ID NO: 103010 - DNA, 120 bp, synthetic construct
  source 1..120: mol_type = other DNA
ggtctttagcaatatcaattcttgcctcctcaggtgaaagaattcaactggtgggcataaagaaggaagaaggaagaaaatgccatggcaagtttcacagcaggagtggacgtttattaa

SEQ ID NO: 103011 - DNA, 120 bp, synthetic construct
  source 1..120: mol_type = other DNA
cttcaaagggcactatcaggatggtcaatagaaaaccaacagcataggacaaaatattttcaagtcatatataagggtaagggcctagtatccaggatataggagaaattcttacaactc

SEQ ID NO: 103012 - DNA, 120 bp, synthetic construct
  source 1..120: mol_type = other DNA
tatgacattatagaaatgtctacagagaaggtaagcagacctgtgatgtacagtggtttgtaggggaaagagagtgagttgaataggggaataggatgttggaaagggggtacaaatggg

SEQ ID NO: 103013 - DNA, 120 bp, synthetic construct
  source 1..120: mol_type = other DNA
tgagcctatgtgtgtcttcacccatgatatcagtctcctgaatacagcacaccaaagggtcttgattctatccaatttgtcagtctgtgcactttaattggcaaatttagttcacttaca

SEQ ID NO: 103014 - DNA, 120 bp, synthetic construct
  source 1..120: mol_type = other DNA
gcgaagatgtggagaaaaaggaatgctctatgctgctggtgggagtataaattagttcaatcactgtggaagacagtgtggtgattcctcaaggatctataaccagaaataccatttgac

SEQ ID NO: 103015 - DNA, 120 bp, synthetic construct
  source 1..120: mol_type = other DNA
catcactaaggaagatacagagatggaaaacaggcagacacaccaaacactgcttgcggaaagcctgctgcttctgctgaaggctgactctaagccgtcccatggggagcagcagtggct

SEQ ID NO: 103016 - DNA, 120 bp, synthetic construct
  source 1..120: mol_type = other DNA
aataataaatgtgcttctccagaacaagaaacatctatttatttactttgtgaggagttgtgtcacccaggttggtgtgcggtggcatgatctcagctcacagattctcccacttcaacg

SEQ ID NO: 103017 - DNA, 120 bp, synthetic construct
  source 1..120: mol_type = other DNA
caagcccagatcatctgcaaaccacactttggtagctgtgacaatgcgtggtcactgcctcactcaagggacacttttgtaaggtcagaattggaggccagggctgggaagtaaggccca

SEQ ID NO: 103018 - DNA, 120 bp, synthetic construct
  source 1..120: mol_type = other DNA
aaagttcaaaagggaatagtatgtaatgaagcatgtgtgtccctctttcttgtcaggaagtgaagcaattttggaatgctcttgatcaaaaggaggggtccattcagatggctgtggttg

SEQ ID NO: 103019 - DNA, 120 bp, synthetic construct
  source 1..120: mol_type = other DNA
attttagagagacctgagacatcaatcaaacacatgtaagatgtacattggtttggtccaggaaggatggacaacttgaaaatagtgatggtgtggggctgggctttcaagttacaggta

SEQ ID NO: 103020 - DNA, 120 bp, synthetic construct
  source 1..120: mol_type = other DNA
ttgagttttgtatattgaccgtcttctttgcttccttttatctccattctagatatgggaaggttggctgtatctcacttccacttcgtgagatgaccgcctggattaacccaccccaaa

SEQ ID NO: 103021 - DNA, 120 bp, synthetic construct
  source 1..120: mol_type = other DNA
acggataatatgaactttattgaaagttgaaatgtctactctgtaaaacactctgttaccattgggcatggcagttcaagcttgtaatctcagcacttttggaggtcgaagcggccagat

SEQ ID NO: 103022 - DNA, 120 bp, synthetic construct
  source 1..120: mol_type = other DNA
gaagctggatactttatttctcggctttccttaaagttctggaagctgccaagtatccttaagttggaagttttatttttttcctaagcaccttgaggcactgagaagcattaggagagt

SEQ ID NO: 103023 - DNA, 120 bp, synthetic construct
  source 1..120: mol_type = other DNA
ccagcatctgtggtttcctgactttttaatggtcaccattctgaccgatgtgagacagtatctcattgtggttttgatgtgcatttctctaatgctcagtgatgctgagctttttttata

SEQ ID NO: 103024 - DNA, 120 bp, synthetic construct
  source 1..120: mol_type = other DNA
tttgctactttttttagtgatgaatactggttttgttttgtgttgttttgttttctgagacagagtctcgctttattggccagtatggagtgcagtgctgcgatgtcagctcactgcaag

SEQ ID NO: 103025 - DNA, 120 bp, synthetic construct; identical to SEQ ID NO: 103012
  source 1..120: mol_type = other DNA

SEQ ID NO: 103026 - DNA, 120 bp, synthetic construct; identical to SEQ ID NO: 103011
  source 1..120: mol_type = other DNA

SEQ ID NO: 103027 - DNA, 120 bp, synthetic construct
  source 1..120: mol_type = other DNA
gggtagtagttccttaataggtaggggatttacttcagtaaaaaatatcctatccccagtattccaacagcaggctgagctctcattccatggtgtccccttaacctggggttcaagtcc

SEQ ID NO: 103028 - DNA, 120 bp, synthetic construct; identical to SEQ ID NO: 103009
  source 1..120: mol_type = other DNA

SEQ ID NO: 103029 - DNA, 120 bp, synthetic construct; identical to SEQ ID NO: 103008
  source 1..120: mol_type = other DNA

SEQ ID NO: 103030 - DNA, 120 bp, synthetic construct
  source 1..120: mol_type = other DNA
gagaaatgagtctttaagatccttcttccttctggcctcaagacctctgttcaaggaaagttcagaacacatgctccccgtagtctcagagaagtataaaatattgcatccctgaaaaat

SEQ ID NO: 103031 - DNA, 120 bp, synthetic construct
  source 1..120: mol_type = other DNA
ccaggtgttaacaggtaattcaggggactagggttaggtgcacatggtggcagttccttctgagttacccttgcctcatctctgtatttttcagtcatgtgcatatatttttattttcaa

SEQ ID NO: 103032 - DNA, 120 bp, synthetic construct
  source 1..120: mol_type = other DNA
gaaaacaattatcaagagcttaatagttatgggattaaatgatggttgatcctcaagaactattaggcagcacttgataataaagcattggtatttcatgaatgctcactgtgtctcaat

SEQ ID NO: 103033 - DNA, 120 bp, synthetic construct
  source 1..120: mol_type = other DNA
caatattctttgttcatctctggccctatctttggtctaaaccaacaacccataattactaactgtgggaaacaaagtttctggggtgccaattaagttggtctcccctgtatgagacac

SEQ ID NO: 103034 - DNA, 120 bp, synthetic construct
  source 1..120: mol_type = other DNA
agaccccatctcaaaaaaaaaaaaaaaaaaaaacctttaaaaatgcatcctatttttttctgagggtgttccaagatggccaaataggaacagctccagtctgcagctcccagcatgatc

SEQ ID NO: 103035 - DNA, 120 bp, synthetic construct
  source 1..120: mol_type = other DNA
ggcaaacacaatctgcagtggactacaccaaatcccaaaagtcctgcagctgagggacctaagtgttagaaggaaaactaacaaatagaaaggaagagcatcaacataagcaaaaagttc

SEQ ID NO: 103036 - DNA, 120 bp, synthetic construct
  source 1..120: mol_type = other DNA
ttgagttacccacaaagggaagcccatcagactaacattggatctcttagcagaaaccctacaagccagaagagagtgggggcgaatattcaacattcttaaagaaaagaattttcagca

SEQ ID NO: 103037 - DNA, 120 bp, synthetic construct
  source 1..120: mol_type = other DNA
tcacaacaaagtgtctctcagaccacagtgtaatcaaattagaactcagcattaagaaactcactcaaaactgcacaactacaggggaacttaacaacttgctcctgaatgattgctggg

SEQ ID NO: 103038 - DNA, 120 bp, synthetic construct
  source 1..120: mol_type = other DNA
ttttatgaggacaacttcatcctgataccaaggcctggcagagacacacaagcaaaaagagaagtttagaccaatagcccagataaacatccatgcgaacatcctcaataaaatactggc

SEQ ID NO: 103039 - DNA, 120 bp, synthetic construct
  source 1..120: mol_type = other DNA
gaggcctcttttctgttccattggtcaatacatctcttttggtacaagtaccatactgttttgtttactgtaggcttgtagtatagtttgaagtcaggtagcatgatgtctccagctttt

SEQ ID NO: 103040 - DNA, 120 bp, synthetic construct; identical to SEQ ID NO: 102998
  source 1..120: mol_type = other DNA

SEQ ID NO: 103041 - DNA, 120 bp, synthetic construct; identical to SEQ ID NO: 102997
  source 1..120: mol_type = other DNA

SEQ ID NO: 103042 - DNA, 120 bp, synthetic construct; identical to SEQ ID NO: 102996
  source 1..120: mol_type = other DNA

SEQ ID NO: 103043 - DNA, 120 bp, synthetic construct; identical to SEQ ID NO: 102995
  source 1..120: mol_type = other DNA

SEQ ID NO: 103044 - DNA, 120 bp, synthetic construct
  source 1..120: mol_type = other DNA
gagaagtcctgcagatgtttttccctgtgtttaagcaagctgacatcctaagcagagaaaaataatacaggcagagtaggcctgttgttgataaaaaaggctgtgtttgaaaaccctctg

SEQ ID NO: 103045 - DNA, 120 bp, synthetic construct; identical to SEQ ID NO: 32664
  source 1..120: mol_type = other DNA

SEQ ID NO: 103046 - DNA, 120 bp, synthetic construct
  source 1..120: mol_type = other DNA
cctccctgaatgccctgtcattggcacccaaatgctcccaatggaaaggaacttgtattgaaaagtctccatcccattactgggtatatacccaaatgagtataaatcatgctgctataa

SEQ ID NO: 103047 - DNA, 120 bp, synthetic construct
  source 1..120: mol_type = other DNA
ctgtctctacataaaattcaaaaaaataaaaaaaaaaaaaataagttagccaggcatggtggtgtactcctgtagtcccagctactcaggaggctggggtggaaggactgcattagccca

SEQ ID NO: 103048 - DNA, 120 bp, synthetic construct; identical to SEQ ID NO: 31382
  source 1..120: mol_type = other DNA

SEQ ID NO: 103049 - DNA, 120 bp, synthetic construct; identical to SEQ ID NO: 31374
  source 1..120: mol_type = other DNA

SEQ ID NO: 103050 - DNA, 120 bp, synthetic construct
  source 1..120: mol_type = other DNA
gtcccaccaacagtgtaaaagtgttcctatttctccacatcctctccagcacctgttgtttcctgactttttaatgattgccattctaactggtgtgagatggtatctcaatgtagaaaa

SEQ ID NO: 103051 - DNA, 120 bp, synthetic construct
  source 1..120: mol_type = other DNA
catgggcaaggacttcatgtctaaaacaccaaaagcaatggcaacaaaacacaaaattgacaaatgggatctaattaaactaaagagcttctgcacagcaaaagaaactaccatcagagt

SEQ ID NO: 103052 - DNA, 120 bp, synthetic construct
  source 1..120: mol_type = other DNA
ctcagcataaatgatccagggccagaagtgactgtgatgatatgttcaaggtgctcaaaaaaacaaacaaacaaacaaacaaacaaaaacacttgccacacaagcatattacatccagca

SEQ ID NO: 103053 - DNA, 120 bp, synthetic construct
  source 1..120: mol_type = other DNA
ttataaatcatgctgctataaagacacatgctcacgtacgtttattgcagcactactcacaatagcaaagacttggaacgaacccaaatgtccatcagtgatagactggattaagaaaat

SEQ ID NO: 103054 - DNA, 120 bp, synthetic construct
  source 1..120: mol_type = other DNA
aagtataaagctcaatagcaaaagtaaacagagacaggacttggtatccgtgggagatttgttctaggacccctgatggacaccaaaatccatggatgctcaagtcacttacataacatg

SEQ ID NO: 103055 - DNA, 120 bp, synthetic construct; identical to SEQ ID NO: 31375
  source 1..120: mol_type = other DNA

SEQ ID NO: 103056 - DNA, 120 bp, synthetic construct; identical to SEQ ID NO: 54905
  source 1..120: mol_type = other DNA

SEQ ID NO: 103057 - DNA, 120 bp, synthetic construct; identical to SEQ ID NO: 31376
  source 1..120: mol_type = other DNA

SEQ ID NO: 103058 - DNA, 120 bp, synthetic construct; identical to SEQ ID NO: 31377
  source 1..120: mol_type = other DNA

SEQ ID NO: 103059 - DNA, 120 bp, synthetic construct
  source 1..120: mol_type = other DNA
gtacaccctccgcagccgctggcccgggtgctaagcccctcactgaaacgatccttacaagatcaccctgtgaagttgttccagtttcttttttgccacataatattttgctcaaaagac

SEQ ID NO: 103060 - DNA, 120 bp, synthetic construct
  source 1..120: mol_type = other DNA
tgtgtcaggagaatcacttgaacccaggaggcggaggttgcagtgagcaaccatctgaatatctgatcataggtatagctcctctctctcaaaaaataaaaaattatgcatatacttaca

SEQ ID NO: 103061 - DNA, 120 bp, synthetic construct
  source 1..120: mol_type = other DNA
ctcttcctccatggatactgttgctaccaggtttccatgaccttctcttggaaagaactcacctactctaggcaacagttgatgctctttttttagctacacttaaataccacccataag

SEQ ID NO: 103062 - DNA, 120 bp, synthetic construct
  source 1..120: mol_type = other DNA
gaggtcaggagttcaagaccagccttgccaacatggtaaaaccctgtctctaccaaaaatacaaaaaaaaaaaaaaaattagctgggcgtggtggtggatgcctgtaatcccagctactc

SEQ ID NO: 103063 - DNA, 120 bp, synthetic construct; identical to SEQ ID NO: 31380
  source 1..120: mol_type = other DNA

SEQ ID NO: 103064 - DNA, 120 bp, synthetic construct
  source 1..120: mol_type = other DNA
agaggtatccacagggaagatattatcctgcaggacgatgagaggatagcctgcaaatgtacttaacagctgccagttacaatagtgatcattacagatgcagagagttcttgaggatat

SEQ ID NO: 103065 - DNA, 120 bp, synthetic construct
  source 1..120: mol_type = other DNA
gacacccgtaaagggtctgtgctgaggaggattagtaaaagaggaaggaatgtctcttgcagttgagacaagaggaaggcatctgtctcctgcctgtccctgggcaatggaatgtctcgg

SEQ ID NO: 103066 - DNA, 120 bp, synthetic construct; identical to SEQ ID NO: 31381
  source 1..120: mol_type = other DNA

SEQ ID NO: 103067 - DNA, 120 bp, synthetic construct
  source 1..120: mol_type = other DNA
aaatttaggctaaagttgaagtatttggagggaaatgtacagatgttctcagcttaccttttttgtttttttgagatggagtctcgctctgttgctcaggctggagtgcaatggtgcgat

SEQ ID NO: 103068 - DNA, 120 bp, synthetic construct
  source 1..120: mol_type = other DNA
gacggggtcgcggccgggcagaggtgctcctcacatcccagacggggcggcggggcagaggcgctccccacatctcagacgatgggcggccgggcagagacgctcctcacttcctagatg

SEQ ID NO: 103069 - DNA, 120 bp, synthetic construct
  source 1..120: mol_type = other DNA
ctgccgtggcctcccaaagtgctgggattacaggcatgagtcactgcgcccgatctctcagtttactttgatatgtattaataataacaaagactaatggatgaggagctagacagaaat

SEQ ID NO: 103070 - DNA, 120 bp, synthetic construct; identical to SEQ ID NO: 19799
  source 1..120: mol_type = other DNA

SEQ ID NO: 103071 - DNA, 120 bp, synthetic construct
  source 1..120: mol_type = other DNA
ttcaggttcagtgatgggggttaagatctgagggggaggcctggacatattttttgcactgactctgacggttgaggcagttgatttagttctggagtgcagactaatcagctgaccatt

SEQ ID NO: 103072 - DNA, 120 bp, synthetic construct; identical to SEQ ID NO: 19800
  source 1..120: mol_type = other DNA

SEQ ID NO: 103073 - DNA, 120 bp, synthetic construct; identical to SEQ ID NO: 19796
  source 1..120: mol_type = other DNA

SEQ ID NO: 103074 - DNA, 120 bp, synthetic construct
  source 1..120: mol_type = other DNA
attcacctgtttctcccatcacaagctgtggacgctgagtctcccatgacaggagcagcctcttttctcctattgttgatcaagcctaggcctactctggtttgcctggggcagaaagtc

SEQ ID NO: 103075 - DNA, 120 bp, synthetic construct; identical to SEQ ID NO: 19808
  source 1..120: mol_type = other DNA

SEQ ID NO: 103076 - DNA, 120 bp, synthetic construct
  source 1..120: mol_type = other DNA
gcaacactgaagtcccagccaaatccctgctgtgttcactgatctggagcctgagacagtcacctgttttgcccatcacaagctgtggacgctgagtctcccatgacaggagcagcctct

SEQ ID NO: 103077 - DNA, 120 bp, synthetic construct; identical to SEQ ID NO: 19806
  source 1..120: mol_type = other DNA

SEQ ID NO: 103078 - DNA, 120 bp, synthetic construct
  source 1..120: mol_type = other DNA
cccaaagtgctggcttcttttattttttagaaccccatcctctccaggagacccaatccagtcactcttcttcctcctcctgtcctctcccaggaagttctctcctcacctgtgagcagg

SEQ ID NO: 103079 - DNA, 120 bp, synthetic construct; identical to SEQ ID NO: 19801
  source 1..120: mol_type = other DNA

SEQ ID NO: 103080 - DNA, 120 bp, synthetic construct
  source 1..120: mol_type = other DNA
taccaggcactatgatcctcttgattatgagatttgttccatcagtggctgagttatggatgaaacagacctaaacccctctatatgttttagtgatttgggggataaagcacacttgtg

SEQ ID NO: 103081 - DNA, 120 bp, synthetic construct; identical to SEQ ID NO: 19802
  source 1..120: mol_type = other DNA

SEQ ID NO: 103082 - DNA, 120 bp, synthetic construct; identical to SEQ ID NO: 19803
  source 1..120: mol_type = other DNA

SEQ ID NO: 103083 - DNA, 120 bp, synthetic construct; identical to SEQ ID NO: 19804
  source 1..120: mol_type = other DNA

SEQ ID NO: 103084 - DNA, 120 bp, synthetic construct; identical to SEQ ID NO: 19805
  source 1..120: mol_type = other DNA

SEQ ID NO: 103085 - DNA, 120 bp, synthetic construct; identical to SEQ ID NO: 19797
  source 1..120: mol_type = other DNA

SEQ ID NO: 103086 - DNA, 120 bp, synthetic construct; identical to SEQ ID NO: 19798
  source 1..120: mol_type = other DNA

SEQ ID NO: 103087 - DNA, 120 bp, synthetic construct
  source 1..120: mol_type = other DNA
atggcagcctggctcacagaggaacagaggatactcacggaggagattcagggtgactgggtcactgcggctggcactcactgggttccgtatttcacattcatagggtcctgcaatata

SEQ ID NO: 103088 - DNA, 120 bp, synthetic construct; identical to SEQ ID NO: 19807
  source 1..120: mol_type = other DNA

SEQ ID NO: 103089 - DNA, 120 bp, synthetic construct; identical to SEQ ID NO: 19808
  source 1..120: mol_type = other DNA

SEQ ID NO: 103090 - DNA, 120 bp, synthetic construct
  source 1..120: mol_type = other DNA
gcaaagagaataatgtcataggtggtattgtcagagggaagggaaaatcctggtctgtggaagggccacagtgaccctgtgagccaagttgcaacactgaagtcccagccaaatccctgc

SEQ ID NO: 103091 - DNA, 120 bp, synthetic construct; identical to SEQ ID NO: 31639
  source 1..120: mol_type = other DNA

SEQ ID NO: 103092 - DNA, 120 bp, synthetic construct; identical to SEQ ID NO: 18917
  source 1..120: mol_type = other DNA

SEQ ID NO: 103093 - DNA, 120 bp, synthetic construct; identical to SEQ ID NO: 18918
  source 1..120: mol_type = other DNA

SEQ ID NO: 103094 - DNA, 120 bp, synthetic construct
  source 1..120: mol_type = other DNA
aatacttcaaataaaccatgtgtggccttatactttttactacataaaaagaatgaagatgtgccgggtgtggtggctcaagccggtaatcccagcactttgggaggctgaggtgggtga

SEQ ID NO: 103095 - DNA, 120 bp, synthetic construct; identical to SEQ ID NO: 18919
  source 1..120: mol_type = other DNA

SEQ ID NO: 103096 - DNA, 120 bp, synthetic construct; identical to SEQ ID NO: 7439
  source 1..120: mol_type = other DNA

SEQ ID NO: 103097 - DNA, 120 bp, synthetic construct
  source 1..120: mol_type = other DNA
gacccatgcacatgtatgtttattgcggcactattcacaatagcaaagacttggaaccaacccaaatgtccattaataggctggatgaagaaaatgtggcacatatacaccatggaatac

SEQ ID NO: 103098 - DNA, 120 bp, synthetic construct; identical to SEQ ID NO: 21736
  source 1..120: mol_type = other DNA

SEQ ID NO: 103099 - DNA, 120 bp, synthetic construct; identical to SEQ ID NO: 21737
  source 1..120: mol_type = other DNA

SEQ ID NO: 103100 - DNA, 120 bp, synthetic construct; identical to SEQ ID NO: 21738
  source 1..120: mol_type = other DNA

SEQ ID NO: 103101 - DNA, 120 bp, synthetic construct; identical to SEQ ID NO: 16507
  source 1..120: mol_type = other DNA

SEQ ID NO: 103102 - DNA, 120 bp, synthetic construct
  source 1..120: mol_type = other DNA
atggcagaagaacataaattgtgaagatttcatggacatttattagttccccaaattaatacttttataatttattatgcctgtctttactgcaatctctgaacataaattgtgaagact

SEQ ID NO: 103103 - DNA, 120 bp, synthetic construct
  source 1..120: mol_type = other DNA
cgacacttagggaaaatagaaaagaacctatgtgaaatattgggggtgaatttcccccaatactggcaatgtatgtctaccctcctacctcaaagatatactggcaaacatatgaaatgt

SEQ ID NO: 103104 - DNA, 120 bp, synthetic construct
  source 1..120: mol_type = other DNA
tcaaacacattttctgagcttaagctttcatgcaccatagtaacatccctttcaaaagagtctattctattcaagcaattctcctgcctcagcctcccaagtagctggaattacaggtac

SEQ ID NO: 103105 - DNA, 120 bp, synthetic construct; identical to SEQ ID NO: 13536
  source 1..120: mol_type = other DNA

SEQ ID NO: 103106 - DNA, 120 bp, synthetic construct; identical to SEQ ID NO: 13537
  source 1..120: mol_type = other DNA

SEQ ID NO: 103107 - DNA, 120 bp, synthetic construct
  source 1..120: mol_type = other DNA
gcagcaagccaagatcgtgccatgcacaccagcctcggcaatagtgcgagactctctgtctcaaaaaaaaaaaaaactatctgtaacacatcaacatatgatgtcacaaaattttcttct

SEQ ID NO: 103108 - DNA, 120 bp, synthetic construct
  source 1..120: mol_type = other DNA
caggaagtcgaggtttcagcaagccaagtttgtgccactgtactccagcctgggcaacagagtgaggtcctgcctcaaaaaaaaaaaaaaaaaaaaagccaaatagaaggcataaaattt

SEQ ID NO: 103109 - DNA, 120 bp, synthetic construct
  source 1..120: mol_type = other DNA
aatattataattcattcatgtatttgtattcatctactcaagcattattccatccagggactatagatagcccacacaagcaattactgaaagctcgacataacattgctttcctttaac

SEQ ID NO: 103110 - DNA, 120 bp, synthetic construct; identical to SEQ ID NO: 13541
  source 1..120: mol_type = other DNA

SEQ ID NO: 103111 - DNA, 120 bp, synthetic construct; identical to SEQ ID NO: 13542
  source 1..120: mol_type = other DNA

SEQ ID NO: 103112 - DNA, 120 bp, synthetic construct; identical to SEQ ID NO: 13543
  source 1..120: mol_type = other DNA

SEQ ID NO: 103113 - DNA, 120 bp, synthetic construct
  source 1..120: mol_type = other DNA
aattttttaaaaaagaaaaaaattaataaaaataccgtaccatgtaattacaattttctctacatattaagacctctccctctccccctccccctccccctccccctccccctccctctc

SEQ ID NO: 103114 - DNA, 120 bp, synthetic construct
  source 1..120: mol_type = other DNA
tggcaaccgccccgtctgagaagtgaggagcccctccgcccggcagctgccccgtctgagaagtgaggagcctctccgcccggcagccaccccatctgggaagtgaggagcgtctccgcc

SEQ ID NO: 103115 - DNA, 120 bp, synthetic construct
  source 1..120: mol_type = other DNA
atcaataaaaaaataaattaaaaagattttgtatcgtccagacagagaacccaattttgaaaatcaaagttccaggccggacacagtggctcaccctgtaatcccagcactttgggaggc

SEQ ID NO: 103116 - DNA, 120 bp, synthetic construct; identical to SEQ ID NO: 29167
  source 1..120: mol_type = other DNA

SEQ ID NO: 103117 - DNA, 120 bp, synthetic construct; identical to SEQ ID NO: 11256
  source 1..120: mol_type = other DNA

SEQ ID NO: 103118 - DNA, 120 bp, synthetic construct; identical to SEQ ID NO: 11257
  source 1..120: mol_type = other DNA

SEQ ID NO: 103119 - DNA, 120 bp, synthetic construct; identical to SEQ ID NO: 18980
  source 1..120: mol_type = other DNA

SEQ ID NO: 103120 - DNA, 120 bp, synthetic construct; identical to SEQ ID NO: 18981
  source 1..120: mol_type = other DNA

SEQ ID NO: 103121 - DNA, 120 bp, synthetic construct; identical to SEQ ID NO: 18982
  source 1..120: mol_type = other DNA

SEQ ID NO: 103122 - DNA, 120 bp, synthetic construct; identical to SEQ ID NO: 18983
  source 1..120: mol_type = other DNA

SEQ ID NO: 103123 - DNA, 120 bp, synthetic construct; identical to SEQ ID NO: 18984
  source 1..120: mol_type = other DNA

SEQ ID NO: 103124 - DNA, 120 bp, synthetic construct
  source 1..120: mol_type = other DNA
actagttcaacccttgtggaagtcagtgtggcgattcctcagggatctagaactagaaataccatttgacccagccatcccattactgggtatatacccaaaggactatataaatcatgc

SEQ ID NO: 103125 - DNA, 120 bp, synthetic construct
  source 1..120: mol_type = other DNA
tgtagcaggggcctagatgtgggatttgatgtgtgtgtgtgtgtgtgtgtgtgtgtgtgtgtgtgtgtgtgtagcttggactttaacagatttacattttagaaagaatttttgttccat

SEQ ID NO: 103126 - DNA, 120 bp, synthetic construct
  source 1..120: mol_type = other DNA
atggcccgttctcaatgagctgttgggtacacctcccagacggggtggtggccgggcagaggggctcctcacttcccagtaggggcggccgggcagaggcgcccctcactccccagtagg

SEQ ID NO: 103127 - DNA, 120 bp, synthetic construct
  source 1..120: mol_type = other DNA
gaggctgcaatctcggcactttgggaggccaaggcaggcggctgggaggtggaggttgtaacgagccgagatcacgccactgcactccagcctgggcaccattgagcactgagtgaacca

SEQ ID NO: 103128 - DNA, 120 bp, synthetic construct; identical to SEQ ID NO: 7813
  source 1..120: mol_type = other DNA

SEQ ID NO: 103129 - DNA, 120 bp, synthetic construct
  source 1..120: mol_type = other DNA
agaggtcacagtgagtgaatgcagcaccacactgaagcctgagtaacagagtaaaatcctttctgaaaagaaaagaagagaagagaagagaagagaagagaagagaagagaagagaagag

SEQ ID NO: 103130 - DNA, 120 bp, synthetic construct
  source 1..120: mol_type = other DNA
agcagaggttgcagtgagccgagatagtgccacttcactccatcctggacaaagagcaaaattctgtctccaaaaacaaacaaaaaacaacaacaacaaaaaattaagccttagggcaca

SEQ ID NO: 103131 - DNA, 120 bp, synthetic construct
  source 1..120: mol_type = other DNA
aaaccccatctctactaaaaatacaaaaattattgggtgtggtattgcatgcccacagtcccagctactcaggaggctgaagtgggagaatcacttgaacccagagatcgaggttgcagt

SEQ ID NO: 103132 - DNA, 120 bp, synthetic construct
  source 1..120: mol_type = other DNA
aggagcgcctcttcccggccgccatcccatctaggaagtgaggagcatctctgcccggccgcccatcgtctgagatgtggggagcgcctctgccccgccgccccgtctgggatgtgagga

SEQ ID NO: 103133 - DNA, 120 bp, synthetic construct
  source 1..120: mol_type = other DNA
tcctatgaccctgccaaatctccctctgcaagaaacacccaagaatgatcaataaaaaaaaaaaaaaaattggccgggcgcggtggctcacgcctgtaatactagcattttgggagagca

SEQ ID NO: 103134 - DNA, 120 bp, synthetic construct; identical to SEQ ID NO: 32839
  source 1..120: mol_type = other DNA

SEQ ID NO: 103135 - DNA, 120 bp, synthetic construct; identical to SEQ ID NO: 33590
  source 1..120: mol_type = other DNA

SEQ ID NO: 103136 - DNA, 120 bp, synthetic construct; identical to SEQ ID NO: 33591
  source 1..120: mol_type = other DNA

SEQ ID NO: 103137 - DNA, 120 bp, synthetic construct; identical to SEQ ID NO: 33592
  source 1..120: mol_type = other DNA

SEQ ID NO: 103138 - DNA, 120 bp, synthetic construct; identical to SEQ ID NO: 33593
  source 1..120: mol_type = other DNA

SEQ ID NO: 103139 - DNA, 120 bp, synthetic construct; identical to SEQ ID NO: 33594
  source 1..120: mol_type = other DNA

SEQ ID NO: 103140 - DNA, 120 bp, synthetic construct
  source 1..120: mol_type = other DNA
cagagtttgcattcagtcattttgacaatttattttgtagttttttgtttgtttgtttgtttttgtttttgttttattattattatactttaagttttagggtacatgtgcacattgtgc

SEQ ID NO: 103141 - DNA, 120 bp, synthetic construct
  source 1..120: mol_type = other DNA
cttacaccttatactaaaatcaattcaagatggattaaagacttaaatgttagacctaaaaccataaaaaccctagaagaaaacctaggcattaccattcaagacataggcatgggcaag

SEQ ID NO: 103142 - DNA, 120 bp, synthetic construct; identical to SEQ ID NO: 27805
  source 1..120: mol_type = other DNA

SEQ ID NO: 103143 - DNA, 120 bp, synthetic construct
  source 1..120: mol_type = other DNA
tcccattcacaattgcttcaaaagaataaaatacctaggaatccaacttacaaggggcatgaaggacctcttcaaggggaactacaaacgactgctcaatgaaataaaagagtatacaaa

SEQ ID NO: 103144 - DNA, 120 bp, synthetic construct
  source 1..120: mol_type = other DNA
gccaaaaaacacatgaaaaaatgttcatcatcactggccatcagagaaatacaaatcaaaaccacaatgcgataccatctcacaccagttagaatggagatcattaaaaagtcaggaaac

SEQ ID NO: 103145 - DNA, 120 bp, synthetic construct
  source 1..120: mol_type = other DNA
catgcctataatcccagcactttgggaggcccaggcatgaggatctcttgagcgctgaagttcaagaccagctaggacaacatagtgaaaccctatttctacaaaaaataaaaaataaat

SEQ ID NO: 103146 - DNA, 120 bp, synthetic construct; identical to SEQ ID NO: 11525
  source 1..120: mol_type = other DNA

SEQ ID NO: 103147 - DNA, 120 bp, synthetic construct; identical to SEQ ID NO: 11526
  source 1..120: mol_type = other DNA

SEQ ID NO: 103148 - DNA, 120 bp, synthetic construct; identical to SEQ ID NO: 11527
  source 1..120: mol_type = other DNA

SEQ ID NO: 103149 - DNA, 120 bp, synthetic construct; identical to SEQ ID NO: 11528
  source 1..120: mol_type = other DNA

SEQ ID NO: 103150 - DNA, 120 bp, synthetic construct; identical to SEQ ID NO: 11529
  source 1..120: mol_type = other DNA

SEQ ID NO: 103151 - DNA, 120 bp, synthetic construct; identical to SEQ ID NO: 11530
  source 1..120: mol_type = other DNA

SEQ ID NO: 103152 - DNA, 120 bp, synthetic construct; identical to SEQ ID NO: 11531
  source 1..120: mol_type = other DNA

SEQ ID NO: 103153 - DNA, 120 bp, synthetic construct; identical to SEQ ID NO: 11532
  source 1..120: mol_type = other DNA

SEQ ID NO: 103154 - DNA, 120 bp, synthetic construct; identical to SEQ ID NO: 11533
  source 1..120: mol_type = other DNA

SEQ ID NO: 103155 - DNA, 120 bp, synthetic construct; identical to SEQ ID NO: 11534
  source 1..120: mol_type = other DNA

SEQ ID NO: 103156 - DNA, 120 bp, synthetic construct; identical to SEQ ID NO: 11013
  source 1..120: mol_type = other DNA

SEQ ID NO: 103157 - DNA, 120 bp, synthetic construct; identical to SEQ ID NO: 11014
  source 1..120: mol_type = other DNA

SEQ ID NO: 103158 - DNA, 120 bp, synthetic construct
  source 1..120: mol_type = other DNA
ttgtctaaaagttaggccttcgggcttcaaaagttagtggtcatcgaaaagcattaatctttgcagtttcaggtacaacacattggttttgattagggatggggatggggccctcttttt

SEQ ID NO: 103159 - DNA, 120 bp, synthetic construct
  source 1..120: mol_type = other DNA
gtgagctgtgacatgactggcattttctttgatttcagcgtatgttggtctctacacatgaaatttgtgtgacttaaaactttctctaaaactgtacttttagttatgatatgcatagaa

SEQ ID NO: 103160 - DNA, 120 bp, synthetic construct
  source 1..120: mol_type = other DNA
atagtgcttattcaagtgtaaagcacaactgaaaggagtaatgtacagtttatatgaggaaaaaggaattttattgctgccagtgtaaaagtttgcacagcagtatagtcatcaatgcag

SEQ ID NO: 103161 - DNA, 120 bp, synthetic construct
  source 1..120: mol_type = other DNA
gattttcacagtcagcattgaagaattcatcttgtggcctgaattcattaagaaaagatgttaggatttgttctgaagatagtgacttaggaaatttgtgagactggggtcagtcagttc

SEQ ID NO: 103162 - DNA, 120 bp, synthetic construct
  source 1..120: mol_type = other DNA
ggcgtgagccactgcgcctggccagtgttgagaatattgagagatggatattgtagctgtacctgccatcaaaagaattttcttgacctccacatagtgtgaaaaagaagactgtttaca

SEQ ID NO: 103163 - DNA, 120 bp, synthetic construct
  source 1..120: mol_type = other DNA
aagggtattcctttaggaagtctgggtatgacatgtctgtgattttgctggttcatcacaaatgggaaataaatctctgctaactcaaactgttgaccaaagtaaaattaattatgccaa

SEQ ID NO: 103164 - DNA, 120 bp, synthetic construct
  source 1..120: mol_type = other DNA
aggatgtaattatttaaggtattatgaaatgcattgtgatttgaattagatactctttggagatggagttttgctgttgttgcccaggctggagtgcaatggtgtgatctcggctcacca

SEQ ID NO: 103165 - DNA, 120 bp, synthetic construct
  source 1..120: mol_type = other DNA
ggaattgtagctccagtggaatcagtatcttgttaatggctagtgaaagactgagtctgaagaaggatgcaggacttttttggcacttggtgcagtatttttcccattatgttacatgag

SEQ ID NO: 103166 - DNA, 120 bp, synthetic construct
  source 1..120: mol_type = other DNA
tttgttaaaagtacaggtgaggtttttttcagagtattggttgccatctgagagtgatcccctttcacctcctctaggacttttagcattttctggagacattttggtggtcacagctgg

SEQ ID NO: 103167 - DNA, 120 bp, synthetic construct
  source 1..120: mol_type = other DNA
tccaacgagctatacaaacttaaatatttctaagtaaagaaaatagggctgactctaaggttctttgatccatgtgttgcattcttttctaggccctaaatttgctatgccagcctgttg

SEQ ID NO: 103168 - DNA, 120 bp, synthetic construct
  source 1..120: mol_type = other DNA
cctaaacattagagaggattttcatggttttgattcatgaaatcataatgttatacaaacctaactgaagtgttagagccttgaagatttttcccccgaattacatatagtaactctact

SEQ ID NO: 103169 - DNA, 120 bp, synthetic construct
  source 1..120: mol_type = other DNA
tatgctaacgtgctgcttaataatactatttggattttttttaatactgaaaaggtcacacagattgtgattattgtgtagtgtccaagaactaaggcctaccatctgttactcaaatgt

SEQ ID NO: 103170 - DNA, 120 bp, synthetic construct
  source 1..120: mol_type = other DNA
tttttttttttttttttacgagaaacatcttgccaattttcagattaatctgtgaggaaagtagattggtttactagactcagtttgtagactttggtgagaactgaattggaggctatg

SEQ ID NO: 103171 - DNA, 120 bp, synthetic construct
  source 1..120: mol_type = other DNA
ttctcttttaaatattcagattaagaggacgttgaaaggtaaatttttttttttttttgagacggagtctagctctgtcacccaggctggagtgcactggcacgatttcggcttactgca

SEQ ID NO: 103172 - DNA, 120 bp, synthetic construct
  source 1..120: mol_type = other DNA
aaagctgataggtaagttatatctattttgtttcattcgtcattagtgatcggtcttagatgtttttagcgagagcaaaactgtagaggaatgtgtgtctgtgtgtgtatatgtgtgtgt

SEQ ID NO: 103173 - DNA, 120 bp, synthetic construct
  source 1..120: mol_type = other DNA
tcacaaatacactttttatttgtcgccaggtacttatttttaaagctatagaggtaatatttcatcaggtgagggtaactaccatggtttgtttgctatactgtgttagggttattttcg

SEQ ID NO: 103174 - DNA, 120 bp, synthetic construct
  source 1..120: mol_type = other DNA
gcccagagattgagtgatttacctgaggttataggctttagattgcatagctggaagtagaaccttgttcttctatattaaatgacaatattcattaagtacttagcacaggatttggta

SEQ ID NO: 103175 - DNA, 120 bp, synthetic construct
  source 1..120: mol_type = other DNA
gcatttctctgatggccagtgatgatgagcattttttcatgtgtctgttcgctgcataaatgtattcttttgagtagtgtctgttcatatccttcgcccactttttgatggggttgtttg

SEQ ID NO: 103176 - DNA, 120 bp, synthetic construct
  source 1..120: mol_type = other DNA
gtgtacatgtcaggaacacagtcttatgaaataaggtttagggagctatttttagttactatatcctacttgaaaattgtagttaaatttctagcatataccctattaatttagatgcaa

SEQ ID NO: 103177 - DNA, 120 bp, synthetic construct
  source 1..120: mol_type = other DNA
aaaaattgtgaactagttaaatgtccaatagtagtaaaatggttcattaaccatggtacacccatcaatataatgttatattgtcatttaaaattgtattcccaagtttcgtatcaggaa

SEQ ID NO: 103178 - DNA, 120 bp, synthetic construct
  source 1..120: mol_type = other DNA
aagctggggttccaattctagcaagttggttctagagtgtatgttattaaccattatgccgtagtgcctgcaagtagatctctagatgtcagaaatactcatcttcctctggttacctgg

SEQ ID NO: 103179 - DNA, 120 bp, synthetic construct
  source 1..120: mol_type = other DNA
attaaattgaattcgctgccgtggcatccttaaagctggaccttactttgtcagtcctgccttctccatgttgctttgtgtgtaagcttcactggactgtttgctttttgctgattattt

SEQ ID NO: 103180 - DNA, 120 bp, synthetic construct
  source 1..120: mol_type = other DNA
aagatccttgccagatgctgatgccatgctcttggacttcccagtctccagaaccgtgagccaaatacatttctgttcattctaaactacctgttttgtggtattctagtaaagcaacat

SEQ ID NO: 103181 - DNA, 120 bp, synthetic construct
  source 1..120: mol_type = other DNA
cttaggctactgctgagtactcaaatggtaaaccttggcagcgtctatatggtgctaattctgcaggctcacaggatgaaagagctgtgggagacatggctaccaccaccaggatttcaa

SEQ ID NO: 103182 - DNA, 120 bp, synthetic construct
  source 1..120: mol_type = other DNA
gccctggttagaatgaccacatttcaagggaggggctttgtacttctgtgcatatctgtaaggataaaaatcttaatactattctcactgaaattaatggtttaggttaggtaaggttgt

SEQ ID NO: 103183 - DNA, 120 bp, synthetic construct
  source 1..120: mol_type = other DNA
catctcagtaacttttcatcttgtgtaatgcccggatcacattaaaatgtttccaattagctcaaaaatgtcctttatggctggtttggctaaaacagtatccaggccagcattgcacct

SEQ ID NO: 103184 - DNA, 120 bp, synthetic construct
  source 1..120: mol_type = other DNA
tgataaataaaaagggtatttttagttgtttcaactttttttttttttttgagatggggtcttactctgttgcccaggctggtgtgctgtggtgcaatcatggtacaccgaagcctcagt

SEQ ID NO: 103185 - DNA, 120 bp, synthetic construct
  source 1..120: mol_type = other DNA
tttgcttatttctacaacataaagaaaatagtcctggtgcggtggctcacactgtaatcccagcactttgggagattgaggcaggtggattgcttgagctcaggagttcaagaccaacct

SEQ ID NO: 103186 - DNA, 120 bp, synthetic construct
  source 1..120: mol_type = other DNA
catgtgaaagctgcagaaagaaaaagacctagaaaaagggcattggattaggtcaactttgaattttatttggaagataaatgagtccagaagtgagtgggcagagattattggagttgg

SEQ ID NO: 103187 - DNA, 120 bp, synthetic construct
  source 1..120: mol_type = other DNA
ctcttaaatctgacttccagattttcactgtgtcttcttttttctgtaacgtgttgccttttttagccatgaaaaattagaagttgaactcttgtcttttcaggcaggtgtcaattttgg

SEQ ID NO: 103188 - DNA, 120 bp, synthetic construct
  source 1..120: mol_type = other DNA
ggttggtacaagagatatagaaaggaatcgctgggtgtaccaaggctaatcagttttataattttgcataattttctaactgcgattatcatttagtttagaacaatttatttctcaagg

SEQ ID NO: 103189 - DNA, 120 bp, synthetic construct
  source 1..120: mol_type = other DNA
acatagggatgccagaaggactgtttaagaagctgaaaatagagaaatgaatttatcttctcatagttaggcagggcacagtagaaggatgcttaacattgcaagctgatgggaacagca

SEQ ID NO: 103190 - DNA, 120 bp, synthetic construct
  source 1..120: mol_type = other DNA
gctgtccttgtttccttttgtctcattcttttttgattgggggataattggccaataaagctttgatagcctctattgcccaggcccctcctcttcttttatgagagaaaggatgaacag

SEQ ID NO: 103191 - DNA, 120 bp, synthetic construct
  source 1..120: mol_type = other DNA
gtgagccgccacgcctggctaaattgatcagtattatttaactttgagggatatgatttgttatggaatgcgaagttttatacttgaggtactcagagtccttttgagacaaatatttaa

SEQ ID NO: 103192 - DNA, 120 bp, synthetic construct
  source 1..120: mol_type = other DNA
cacaatggttgaactagtttacagtcccaccaacagtgtaaaaatgttcctgttcctccacatcctctccagcacctgttgtttcctgactttttaatgatcgccattctaactggtgtg

SEQ ID NO: 103193 - DNA, 120 bp, synthetic construct
  source 1..120: mol_type = other DNA
tagtatagtttgaagtcaggtagtgtgatgcctccagcttttttctttctgcttaggattgtcttggcagtgcgggctcttttttggctccatatgaactttaaagtagttttttccaat

SEQ ID NO: 103194 - DNA, 120 bp, synthetic construct
  source 1..120: mol_type = other DNA
aggccttttctgcatctattgagataatcatgtggttttttgtctttggttctctttatgtgatggattatgtttattgatttgcgtatgttgaaccagccttgcatcacagggatgaag

SEQ ID NO: 103195 - DNA, 120 bp, synthetic construct
  source 1..120: mol_type = other DNA
ttcaggagcaggttgatcagtttccatgtagttgtgcagttttgagtgagtttcttaatcctgagttctaatttgattttactgtggtctgagagacagtttgttgtgatttttattctt

SEQ ID NO: 103196 - DNA, 120 bp, synthetic construct
  source 1..120: mol_type = other DNA
ttatgaagcttagtttggctggatatgaaattctgggttgaaaattcttttctttaagaatgtagactattggcccccactctcttctggcttgtagagtttcagcggagagatctgctg

SEQ ID NO: 103197 - DNA, 120 bp, synthetic construct
  source 1..120: mol_type = other DNA
ttgttaatgttgatgctattcctttctgtttgttagttttccttctaacagtcaggtccctcagctgtaggtctgttggagtttgctggaggtccactccagacactgtctggatatcac

SEQ ID NO: 103198 - DNA, 120 bp, synthetic construct
  source 1..120: mol_type = other DNA
gccacctttttttttttttttttttttttaaggcagtttcttgctctgtcacccaggctggggtgcagaggcatgatcacggctcactgcaacctctgccttctgggctcaagtgatcct

SEQ ID NO: 103199 - DNA, 120 bp, synthetic construct
  source 1..120: mol_type = other DNA
ccacctgtctcagcctcccaaagtgctgggattacaggcgtgagcctccactcccagtctcaaatattcttttgaaatatttgaaatatgttgatctctcagtctttcaaccttagttgt

SEQ ID NO: 103200 - DNA, 120 bp, synthetic construct
  source 1..120: mol_type = other DNA
ttccccaagcattacttttagtaagtagtgagactgaaggttgagttctggtctgtcagattccgaagttgtttccttaggaaccatattatcttgtgtacaactcttgggctaatcttg

SEQ ID NO: 103201 - DNA, 120 bp, synthetic construct
  source 1..120: mol_type = other DNA
tcccactcagaagcaacaaagaagaaagtcccaggatgacagctgtgacacaagctgaaaagttaccagttttgcttggagcaggagattagaacttccgggaaaataatcaaattgata

SEQ ID NO: 103202 - DNA, 120 bp, synthetic construct
  source 1..120: mol_type = other DNA
tctaggtacctcgtataagcggaatcacgtgatatctttttgtaactggcttatttcactaactatcttcgaggttcatccatgttgtagcagttgttagcatttccttccttttaaaag

SEQ ID NO: 103203 - DNA, 120 bp, synthetic construct
  source 1..120: mol_type = other DNA
tttgctgtgcaggagctatttagcttgaaaaaatccaacttgtctgttttcttttgttgcctgtacctttggtgtcacattcaagaaataattgccaaattcataccatgaaactttccc

SEQ ID NO: 103204 - DNA, 120 bp, synthetic construct
  source 1..120: mol_type = other DNA
atttcatcacccaggtattaagcctagtacccattagttatttttcctgagctcgcctcctcccacctggatttttttttttatttctaccagaaacattgttgggattttggtagggat

SEQ ID NO: 103205 - DNA, 120 bp, synthetic construct
  source 1..120: mol_type = other DNA
tcccaggaataaattttacttggtcttcgtgtataatccatttaataagctgtggaattcagtttgttggttctgtgttgaggactttatatcaatgttcctaagggctactggtctata

SEQ ID NO: 103206 - DNA, 120 bp, synthetic construct
  source 1..120: mol_type = other DNA
tattgattttcagtggcatcctgttgtgatagaagatactttatttggttccctgttttttttttaaaacagagtgttgctctgtcacccaggctggagtgcagtggtgcgatcttggct

SEQ ID NO: 103207 - DNA, 120 bp, synthetic construct
  source 1..120: mol_type = other DNA
ggttgccattgggggtcacatttaatgccctaaagttataacactgcaatttcaatttataccaatttactttcaatagcatacaaaaattcagctcataagattcagtccctgctccct

SEQ ID NO: 103208 - DNA, 120 bp, synthetic construct
  source 1..120: mol_type = other DNA
tgtatgtgttggtccacttgatgatggtgttccacaggtgtcttaggctcttgtcttcaattttccttcagttttttttttctgttcctcagacacgtggtattttcagctgttctgcct

SEQ ID NO: 103209 - DNA, 120 bp, synthetic construct
  source 1..120: mol_type = other DNA
gtagccgcgacggcacaaagagctgaaattgactcaaactaactgatttaccattcaagtctttccttagaaactgaaaacctgaatagactccagagttccagaatcacagattctgct

SEQ ID NO: 103210 - DNA, 120 bp, synthetic construct
  source 1..120: mol_type = other DNA
cagttcttaatccccaagaccgccagacttcacaaagacataccgaggtctgtgctgtcagtgccccactactacactcccttaagtagccccacattcttgtgcttgtttcttttttct

SEQ ID NO: 103211 - DNA, 120 bp, synthetic construct
  source 1..120: mol_type = other DNA
tctgactctcctgtaccttgtcctcactaggattcggtatccacggcaaaaagatctattaatagttggtatcaggcctgtacatgtgttaagagaaagatgaggaaagaagtatctgct

SEQ ID NO: 103212 - DNA, 120 bp, synthetic construct
  source 1..120: mol_type = other DNA
gctttcaataaagagaactgtcatgtacccactactccttacttactgaatcatcttcttttggatagagaagataaaagtgaaaagggaatttaagagttcctgcctttttccttgtct

SEQ ID NO: 103213 - DNA, 120 bp, synthetic construct
  source 1..120: mol_type = other DNA
ttactgatctgtatcatatctaactacgccagtatttccttccttgtctgacgtgaactctaaaattatgtgaacactttctccctgtttcctggcatttccactcaaacttgttcctca

SEQ ID NO: 103214 - DNA, 120 bp, synthetic construct
  source 1..120: mol_type = other DNA
accaagatttagaacactcgctttatgaaaagtttccctcatgcccatttgtagtcagtccccaaacctggtttcaggcaatctctgatctgctttctatatgctttgcctatactagga

SEQ ID NO: 103215 - DNA, 120 bp, synthetic construct
  source 1..120: mol_type = other DNA
aatgtataatatatacataaagatgctcttacaacttcataatgagaaaataaccccataaagagaagggcaggccgggtgcagtggctcatgcctataatgccagcacttttggaggct

SEQ ID NO: 103216 - DNA, 120 bp, synthetic construct
  source 1..120: mol_type = other DNA
acaggtgtgagccactgcgcctggcctggcactgtttatttcttttccctccagttttatacctatttagagagattagattttcttgagtactaggaatcactatttttgagcagaatt

SEQ ID NO: 103217 - DNA, 120 bp, synthetic construct
  source 1..120: mol_type = other DNA
agctgtccaatgtccttaggctgttttccaaatgagataccaaaagctagttctccatcgggtttctcaggctgctagaagcattcattattatggttgtcattacttcgagttctgttg

SEQ ID NO: 103218 - DNA, 120 bp, synthetic construct
  source 1..120: mol_type = other DNA
agaagagccaccatgctgaaagcaaggggcactatgtttctttgttcttaaggatggtagcctatctgcaacaactgtagtgtgatataaaaatatataatttatgttgctgacagttac

SEQ ID NO: 103219 - DNA, 120 bp, synthetic construct
  source 1..120: mol_type = other DNA
catctgttttgccaggtactcatgcaactttccagtttgaaaactcacatccttcacttttgagtatttttcttgagttatgtcttcggtttcttctcagtgttctctgtttctggaact

SEQ ID NO: 103220 - DNA, 120 bp, synthetic construct
  source 1..120: mol_type = other DNA
gaatgacatgattactactctaaacccatagaaggggtatttgttggattatttattttcacttaaatggtatttgagattaggaaaaagaaaatctgtcttttggtttttcttgatagt

SEQ ID NO: 103221 - DNA, 120 bp, synthetic construct
  source 1..120: mol_type = other DNA
ctttctagtgtgataaaacgtcagaagtactgagagtggagtggacattgatattgttactctcagtaagttttcactgatttttctcagagtcatgaaggaacaaacgtttgttaagtc

SEQ ID NO: 103222 - DNA, 120 bp, synthetic construct
  source 1..120: mol_type = other DNA
gtgtgtagtgacttcctgctttaagaacttaggacttcagctgtactatcagtattgtaggtcacttaacattattatggttaaagttggcattggagagagcctaggaacctaactgcc

SEQ ID NO: 103223 - DNA, 120 bp, synthetic construct
  source 1..120: mol_type = other DNA
cctttagctttactaattttcatctattaagttttcttttgtaagatggtgatagcttcatcaaagagagtaaagaagagacctgcctacctagctgattctatggcaaatctcacttct

SEQ ID NO: 103224 - DNA, 120 bp, synthetic construct
  source 1..120: mol_type = other DNA
cttaaggagtgttcgtcaaaccacatgttctgggatcctgagaaagtaggggaagtttagagaactgaagctgcacaaaactaatgtttattttctgttgtgttgtcctgagaccagctt

SEQ ID NO: 103225 - DNA, 120 bp, synthetic construct
  source 1..120: mol_type = other DNA
actctcatactgtaattaaaacttgcaatctgagagactgttgaaaaaggtgatcgttggcttttcaacagggagtaaggtctggtttaaaaaaaaattagtaagcatttggccaagtag

SEQ ID NO: 103226 - DNA, 120 bp, synthetic construct
  source 1..120: mol_type = other DNA
gttctcatggcttaacactttaaaccatgagaaaactgaagagttgagaagcttggcagatgctgctgtgatagtcaaaaagaaagtgggtgccatgagctactattgatgtatttgcca

SEQ ID NO: 103227 - DNA, 120 bp, synthetic construct
  source 1..120: mol_type = other DNA
atgctgcagtccattgagcatagattcccagaatgtattctcctgcagaaaatggaggaaaataatacttggcttccctaatgattacatgtgtatacaacactaacatttgcaagacca

SEQ ID NO: 103228 - DNA, 120 bp, synthetic construct
  source 1..120: mol_type = other DNA
ctacaagctacaattttcaattatacaatgttattattaactatagtcactatgctgtccagtagagcttcagatcttgttcatcttgtgttcctccctccccaccctcagtccctggaa

SEQ ID NO: 103229 - DNA, 120 bp, synthetic construct
  source 1..120: mol_type = other DNA
ggatctaaagatttttactttgatttatcccattatcatctgcagggaaacaattgcttttactgattaaaaatgcaggctgggcacagcggctcacgcctgtaatcccagtactttggg

SEQ ID NO: 103230 - DNA, 120 bp, synthetic construct
  source 1..120: mol_type = other DNA
ctattgcctgatgaaagtagacgtgtcaagaaataagaattctccaaggctcttcagataaattcatgtttcatcattttctttgccttcaagttactgagatcatttttggcaagatct

SEQ ID NO: 103231 - DNA, 120 bp, synthetic construct
  source 1..120: mol_type = other DNA
tttaattggaacaaatagtttttgtaatggtctaggcttttccaacttaactgtgctctcacatgtggtctctttttctccctctttcctccttcttatacactctcacccacacacata

SEQ ID NO: 103232 - DNA, 120 bp, synthetic construct
  source 1..120: mol_type = other DNA
ttccaggaatgtttcttatagatgatcaaacaggcacaggaaggggaagtgttgtgatcaatattatccagttaatattagcattcagaggaaaatttgagtcctctgatacactgttaa

SEQ ID NO: 103233 - DNA, 120 bp, synthetic construct
  source 1..120: mol_type = other DNA
ggctcagagtcttgacatatcctcagcagacatggtgcaaattagatggcagagtggtgggtacaagttgaccataaaataacgcattaggttagtaatgcccaaataatactttgggtt

SEQ ID NO: 103234 - DNA, 120 bp, synthetic construct
  source 1..120: mol_type = other DNA
atccgcccacctcggcctcccaaagtgctgagattacaggcatgagtcactgtgcctggcctcttattttttctttggttaaacttttagggaaaaagtttgagctgcttttaattttct

SEQ ID NO: 103235 - DNA, 120 bp, synthetic construct
  source 1..120: mol_type = other DNA
cagttttaaataagaaaaacccaactcaaagtagcttaaataaaaggagacattttttgacttacataacctaaaagctctggcctggatctaggtgctcaacagatctcaagagtatct

SEQ ID NO: 103236 - DNA, 120 bp, synthetic construct
  source 1..120: mol_type = other DNA
gctttcctgtagtaatcttattgtgatcatcctgaaacatagatttccgagcttcaagcaaacactattatgttgaaaaatctacattatttctaagtttagcagtgccagtggaaagtt

SEQ ID NO: 103237 - DNA, 120 bp, synthetic construct
  source 1..120: mol_type = other DNA
ctataaaataatctttaggcagatcctacaggaggtattccagataaaggcattattgtcataggagatggcagctccatggatgttattgccccttaagaccttccagtgggacaagat

SEQ ID NO: 103238 - DNA, 120 bp, synthetic construct
  source 1..120: mol_type = other DNA
tgtcattgacaaaacaattaccagtcttactaattagatcaactgcaaaacaaaatctcactcaaaaataaaaatatgtaagtcccattccttgattacaattcattagaactggagatt

SEQ ID NO: 103239 - DNA, 120 bp, synthetic construct
  source 1..120: mol_type = other DNA
gctatggcaaaattgcaggaagaaactgaaataggccacagaaaactgaaactgacattttgagtagtatttcagaatcaagatctggattttggcaactgaatagatgcgtaggaatca

SEQ ID NO: 103240 - DNA, 120 bp, synthetic construct
  source 1..120: mol_type = other DNA
gtaactaaggtcttggaacagcttacaggtcagaaccaggtgttttccaaagctagatatactgttagcgcctttggcaacagaagaaatgaaaagactgttgtctgctgcacagttcga

SEQ ID NO: 103241 - DNA, 120 bp, synthetic construct
  source 1..120: mol_type = other DNA
ctggattaaggagtaagagcgtctcaagatttgctgtttatagagagggaggctaatagtttgagagagatacagaatctagggagagtgtgggtttttggtctttcagttgtttgccag

SEQ ID NO: 103242 - DNA, 120 bp, synthetic construct
  source 1..120: mol_type = other DNA
atgtctatgacttctttctttgaaagcgcttccatcatcactgttggcacttcatatgggtctcatggtgttaaggtttacggcattgcactagacacaatgaaaactacacaagagggc

SEQ ID NO: 103243 - DNA, 120 bp, synthetic construct
  source 1..120: mol_type = other DNA
gtggacccacacatttcaaacctgtgttcaagggtcagctgtgtaaataattttcctcaaaattaaagtggaaaaggagagttactactagtagaaagtagaactgtacccttgggcagg

SEQ ID NO: 103244 - DNA, 120 bp, synthetic construct
  source 1..120: mol_type = other DNA
atctttttattattgcacacaaacttatgccaaaaatggagataaagagaaaaatgtcatccactaaaccccaacaaataatgttgacaatgtggtctactcgtagactcgcattgactt

SEQ ID NO: 103245 - DNA, 120 bp, synthetic construct
  source 1..120: mol_type = other DNA
aactgcaccttgaatacaggtacagaattgctaaaaccgtgtaccattttgtagttttagcatgcttttgtgtaactgcatctggtgtttgatcctcatgagagccctgttaaggaaggg

SEQ ID NO: 103246 - DNA, 120 bp, synthetic construct
  source 1..120: mol_type = other DNA
agtcacatgtctaataaaaaaaacccttaaatacctcatttattcgtcttcgttagtgaatgcattgttgtacatattagatttttctctttagataactcagcttcccctattaagtgc

SEQ ID NO: 103247 - DNA, 120 bp, synthetic construct
  source 1..120: mol_type = other DNA
tgttgtttcacaagatgatgtttgaaactattccaatgttcagtggcggaacttgcagtaagtgcttgaaattctcatccttccatgtattggaacagttttcttaaccatatctagaag

SEQ ID NO: 103248 - DNA, 120 bp, synthetic construct
  source 1..120: mol_type = other DNA
tgcaaggtactgagctgttggaagtgactgacagatgaatgtaacagattcatagagaaggaaaaaggaagaaaaactcatgctcttcctatagtattgatatcagtgtaagagccaaga

SEQ ID NO: 103249 - DNA, 120 bp, synthetic construct
  source 1..120: mol_type = other DNA
actactgaaagaagtattacaggcaatgggaaatagcttgagtggaagtgcagcagaaggaaaaagctggacaagaatgtagtgtcagagaataggtatggaacgtgtgagtgactgtta

SEQ ID NO: 103250 - DNA, 120 bp, synthetic construct
  source 1..120: mol_type = other DNA
tgcatagagtgtatagtttcaagtcagggcttttaggttgtccatcatctgaataatatacattgtacccattaagtaatttctcatcttctactcaccgtttcaagtctccactattta

SEQ ID NO: 103251 - DNA, 120 bp, synthetic construct
  source 1..120: mol_type = other DNA
atcacagctttggaatcctactttgtttatttgcttcttgaagttagatttcccagtgaaatttcagtatcacataaagtcttatgaaatggctcattgcactttgaactttgagtcaag

SEQ ID NO: 103252 - DNA, 120 bp, synthetic construct
  source 1..120: mol_type = other DNA
tgaaaatgaggtgttttggaggaaaggaaggttgtgctgcagtttttacttgaaatctgttacatttctttacagaaatttcaaatctcttgtttcctgttatgatggtggcattatata

SEQ ID NO: 103253 - DNA, 120 bp, synthetic construct
  source 1..120: mol_type = other DNA
gatctgcaggtgttttgcttactctggcattggtgagacattataagggtaaataatcctgtttgaaggaaaaggccttatggcattgtaacatgagaggaatttttcttaacaaggatg

SEQ ID NO: 103254 - DNA, 120 bp, synthetic construct
  source 1..120: mol_type = other DNA
gaacccgagaggcggaggttgcagtaagccaagaatgcaccattgtactccagcctgggcaacaagagtgaaactccatctcaaaaaaaaagaaaaaaaaaacaacaactatcttcattt

SEQ ID NO: 103255 - DNA, 120 bp, synthetic construct
  source 1..120: mol_type = other DNA
aggtaccaggtaccagataagatgtcacaaggctgtatatcattaattgccaaatgatttatacaggccagatttctttgttggtcaatagaggtttaaagtgatgaacttctgttgtgt

SEQ ID NO: 103256 - DNA, 120 bp, synthetic construct
  source 1..120: mol_type = other DNA
gcagtatagagcgtgcagataatgacaaggaatatctagtacttactttaacaaaaaatgatcttgacaaagcaaataaagacaaagccaaccgatacttttctccaaattttaaggtca

SEQ ID NO: 103257 - DNA, 120 bp, synthetic construct
  source 1..120: mol_type = other DNA
tcaatttttataacatgtaataaatctaactgtagcgtctgagtattaagaatattgctagtaatacttcacctgtaatcccagcactttgggaggctaaggcaggcggatcacttgagg

SEQ ID NO: 103258 - DNA, 120 bp, synthetic construct
  source 1..120: mol_type = other DNA
atcctcccctcccactccctttcccggcctctaataaccacactcttatgagctcaacttttttagcttccatatatgagtgagaacatacggtatttatctttctgtacctgacttatt

SEQ ID NO: 103259 - DNA, 120 bp, synthetic construct
  source 1..120: mol_type = other DNA
ctaacctttctgggccttagctacctccccttggaaatggaaatacctaacatgtaaggttgttttgacagttattttcactaggcatgtaaaggcacttgactctctgttatagaccac

SEQ ID NO: 103260 - DNA, 120 bp, synthetic construct
  source 1..120: mol_type = other DNA
agtgagccaagatcatgccactgcactccagcttggcaacagagcaagactcttgtctccagaaataaaaataaataaattgtattaacatcctgatagtttatctgtttagtacctagc

SEQ ID NO: 103261 - DNA, 120 bp, synthetic construct
  source 1..120: mol_type = other DNA
gggaatggagggaatgctcagaaaggaaataattttatgctggactctggaccatataccatctccagctatttacacacacctttctttagcatgctacagttattaatctggacattc

SEQ ID NO: 103262 - DNA, 120 bp, synthetic construct
  source 1..120: mol_type = other DNA
ttcttcatagtgctcccccgagttgggactagggcttcaatttcacttcttaaaaaaaatcatcatatatttgatatgcccagactgcatacgattttaagcggagtacaactactattg

SEQ ID NO: 103263 - DNA, 120 bp, synthetic construct
  source 1..120: mol_type = other DNA
atattttcttagactttttggatgtgcagcagcttacatgtctgaagttacttgaaggcatcacttttaagaaagcttacagttgggccctgtaccatcccaagtcctttgtagctcctc

SEQ ID NO: 103264 - DNA, 120 bp, synthetic construct
  source 1..120: mol_type = other DNA
gataattccccagaatggatttgatactttagatttcaattttgtggcttttgtctattattctgtactctgccatcagcatatggaaagcttcatttactcatcatgacttgtgccata

SEQ ID NO: 103265 - DNA, 120 bp, synthetic construct
  source 1..120: mol_type = other DNA
gacaggaaaggacaaaatagtttgctttggtggtagtactctggttgttaagctaggtattttgagactacttccccatcacaacaacaataaaataatcactcataatcctatcacctg

SEQ ID NO: 103266 - DNA, 120 bp, synthetic construct
  source 1..120: mol_type = other DNA
ctctgttgcatgaggattctcatctgtgcttataatggttagagattttatttgtgtggaatgaagtgaggcttgtagtcatggttctagtgtttcagtttgccaagtctgtttactgca

SEQ ID NO: 103267 - DNA, 120 bp, synthetic construct
  source 1..120: mol_type = other DNA
ttgaactactgatctcaggtgatccacctgcctcaacctcccagtgtgctgggattccagtcatgagccaccgtgcccggctgaaaaaaatacttgattcttttatttatttatttattt

SEQ ID NO: 103268 - DNA, 120 bp, synthetic construct; identical to SEQ ID NO: 2824
  source 1..120: mol_type = other DNA

SEQ ID NO: 103269 - DNA, 120 bp, synthetic construct; identical to SEQ ID NO: 26535
  source 1..120: mol_type = other DNA

SEQ ID NO: 103270 - DNA, 120 bp, synthetic construct; identical to SEQ ID NO: 18017
  source 1..120: mol_type = other DNA

SEQ ID NO: 103271 - DNA, 120 bp, synthetic construct
  source 1..120: mol_type = other DNA
tgagaagtgaggagcctctccgcccggcagccaccccatctgggaagtgaggagcgtctctgcccagcagccaccccatccgggagggaggtgggggggggtcagccccccgcccggcca

SEQ ID NO: 103272 - DNA, 120 bp, synthetic construct; identical to SEQ ID NO: 18018
  source 1..120: mol_type = other DNA

SEQ ID NO: 103273 - DNA, 120 bp, synthetic construct
  source 1..120: mol_type = other DNA
tctcagaccacactgcaatcagactagaactcaggttaagaaactcactcaaaatcgctcaactacatggaaactgaacaacctgctcctgaatgactactgggtacataatgaaatgaa

SEQ ID NO: 103274 - DNA, 120 bp, synthetic construct
  source 1..120: mol_type = other DNA
ctaccaaggtacaaggaggagctggtaccattccttctgaaagtattccaatcaatagaaaaagagggaatcctccctaactcattttatgaggccagcatcatcctgataccaaagcct

SEQ ID NO: 103275 - DNA, 120 bp, synthetic construct
  source 1..120: mol_type = other DNA
ctgaacaaattaacgaagcatccacagatccctcaaaacattttaaaaggtcagtcttatggcacattcaggctaatgagacaatattctttgtgggctagcacataggcctatcctaag

SEQ ID NO: 103276 - DNA, 120 bp, synthetic construct
  source 1..120: mol_type = other DNA
ggactgctaaattaaactgtacaacagaaaatctgagaaaacatatcattattcaagcacagcttggtacttcattaacctcatagcaaaatctgagtaccaggcctgcagtgcacaagg

SEQ ID NO: 103277 - DNA, 120 bp, synthetic construct
  source 1..120: mol_type = other DNA
ctctggtttataaaacagaataaaaactgttttccaaacttaacagcaacagcaaaatctttagagtagtgacataaaagtcttcacaagtatgactcctttctccgcaacaggagtact

SEQ ID NO: 103278 - DNA, 120 bp, synthetic construct
  source 1..120: mol_type = other DNA
tgagccgagatggcgccactgcactccagcctgggtgacagagggcggctccatctcgaaaagaaaaccaaaaacaacaaaaacaaacaaacaaacaaaaaacgaagaagtttagaaact

SEQ ID NO: 103279 - DNA, 120 bp, synthetic construct
  source 1..120: mol_type = other DNA
caggcagaaggggatgccagtgatagagggtgttaaattcagcagcaatacgattttggtactggaattgtttgttgaaaagtagttctgggtcaaatttcagtttgaagtgatagccac

SEQ ID NO: 103280 - DNA, 120 bp, synthetic construct
  source 1..120: mol_type = other DNA
cttaatagtcaaaggaagcatacctgatatttcatttttccatccttgaaaaggcgcagtttacgctgtctagccagagtttcaccgtaaatatgatttaagtccacctagaaaatgatg

SEQ ID NO: 103281 - DNA, 120 bp, synthetic construct
  source 1..120: mol_type = other DNA
gatctgtcttgaaaaactgatgcgtgaagtgctgggcaaagaatgcaaacatcatgtttgagccctggggatcagggatgaactttcttcttagaagcaatttttccacaatctcatttg

SEQ ID NO: 103282 - DNA, 120 bp, synthetic construct
  source 1..120: mol_type = other DNA
cttgctgatccaaatccaaatttattttaatgggtgctacatgttcagaacaattctgtggcccatgggcattcaataaacagctggaccatgctacctccacaaactgaccaaacagta

SEQ ID NO: 103283 - DNA, 120 bp, synthetic construct
  source 1..120: mol_type = other DNA
cagcttacttttaagacattttgcttatcttaaaacataatccgggctttcctgggagcaggaaagaactgactagaatatttaaaacaacttcttccactcaataaaaaggttccaaat

SEQ ID NO: 103284 - DNA, 120 bp, synthetic construct; identical to SEQ ID NO: 12781
  source 1..120: mol_type = other DNA

SEQ ID NO: 103285 - DNA, 120 bp, synthetic construct
  source 1..120: mol_type = other DNA
taggatggattcaatgacctctaccaagcagacaatgaagaaacagaggtgtatatttcatgttatttaaaaatctacttaggtcgggtgcggtggctcatgcctgtaatcccagcactt

SEQ ID NO: 103286 - DNA, 120 bp, synthetic construct; identical to SEQ ID NO: 31852
  source 1..120: mol_type = other DNA

SEQ ID NO: 103287 - DNA, 120 bp, synthetic construct; identical to SEQ ID NO: 31853
  source 1..120: mol_type = other DNA

SEQ ID NO: 103288 - DNA, 120 bp, synthetic construct; identical to SEQ ID NO: 31854
  source 1..120: mol_type = other DNA

SEQ ID NO: 103289 - DNA, 120 bp, synthetic construct; identical to SEQ ID NO: 31855
  source 1..120: mol_type = other DNA

SEQ ID NO: 103290 - DNA, 120 bp, synthetic construct
  source 1..120: mol_type = other DNA
ctacagcctggagtgagaacttatggtgctttttccgggcctgcccatggcccaatcagtacgcacttcctcccttctgagcccataaaaaccccagactcagagagatgttagcactac

SEQ ID NO: 103291 - DNA, 120 bp, synthetic construct
  source 1..120: mol_type = other DNA
aatgaactcaaacaaatttacaagaaaaaaatcaaatgaccccatcaacaagtgggcaaaggatatgaacagacacttctcaaaagaagacatttatgcagccaagagacacatgaaaaa

SEQ ID NO: 103292 - DNA, 120 bp, synthetic construct
  source 1..120: mol_type = other DNA
ttgcttgaacccgggaggcaaaggttgcagtgagccgagatcacaccagtgcattccagcctgggggacagagaaagtctccgtctcaaaaaaaaaaaaaaaatatatatatatatatat

SEQ ID NO: 103293 - DNA, 120 bp, synthetic construct; identical to SEQ ID NO: 31425
  source 1..120: mol_type = other DNA

SEQ ID NO: 103294 - DNA, 120 bp, synthetic construct; identical to SEQ ID NO: 31426
  source 1..120: mol_type = other DNA

SEQ ID NO: 103295 - DNA, 120 bp, synthetic construct
  source 1..120: mol_type = other DNA
ccagagctgcctgcacacacccatgtgtgacgcacgctcacacacacacagtcacaaacccccacacatgcgcacagttcacccgcacacctgaacacacacgcgcatgtgtgctcactt

SEQ ID NO: 103296 - DNA, 120 bp, synthetic construct
  source 1..120: mol_type = other DNA
ctgcccgacggcctctttacagcctcccctgcttgttgcttgggtcccccgggagctaaccctacacagcctgtgactcacgcacacacacagtgggtgcccaatcactgatgagaaacg

SEQ ID NO: 103297 - DNA, 120 bp, synthetic construct; identical to SEQ ID NO: 22071
  source 1..120: mol_type = other DNA

SEQ ID NO: 103298 - DNA, 120 bp, synthetic construct; identical to SEQ ID NO: 22072
  source 1..120: mol_type = other DNA

SEQ ID NO: 103299 - DNA, 120 bp, synthetic construct
  source 1..120: mol_type = other DNA
gaacagagccctcagaaataacaccacatatctataactatctgatctttgacaaacctgagaaaaacaagcaatggggaaaggattccctatttaataaatggtgctgggaaaactggc

SEQ ID NO: 103300 - DNA, 120 bp, synthetic construct
  source 1..120: mol_type = other DNA
gcaaatatataccatggaatactatgcagccataaaaaatgatgagttcatgtcctttgtagggacatggatgaaattggaaatcatcattctcagtaaactatcgcaaggacaaaaaac

SEQ ID NO: 103301 - DNA, 120 bp, synthetic construct
  source 1..120: mol_type = other DNA
taaaaacaaaacaaaaggctcttggctactttgcctagtattagatagggttttgaagaaactaacatgaacaccctttcatcagtaaagactaaaaaccacctggaaaatatatatata

SEQ ID NO: 103302 - DNA, 120 bp, synthetic construct; identical to SEQ ID NO: 31860
  source 1..120: mol_type = other DNA

SEQ ID NO: 103303 - DNA, 120 bp, synthetic construct; identical to SEQ ID NO: 31861
  source 1..120: mol_type = other DNA

SEQ ID NO: 103304 - DNA, 120 bp, synthetic construct
  source 1..120: mol_type = other DNA
gtccgggcccttctgtgtgggcaggtggaagtggtggggatgcagtgaggctccctccagcgcggcaaggaacgggccctgggaccctcttcccagcctgcagcaggcagtggggagaca

SEQ ID NO: 103305 - DNA, 120 bp, synthetic construct
  source 1..120: mol_type = other DNA
tgtagcatcacagagcttgatgggaactttcactctgagaccccttttatggataagaaaactgaggctggggggcaggagcagcttaccccagaggtcctctctcccagagggctaggg

SEQ ID NO: 103306 - DNA, 120 bp, synthetic construct; identical to SEQ ID NO: 31859
  source 1..120: mol_type = other DNA

SEQ ID NO: 103307 - DNA, 120 bp, synthetic construct
  source 1..120: mol_type = other DNA
gtaatctcattgttcaattcccacctatgagtgagaatatgcggtgtttgctttttgttcttgcgatagtttactgagaatgatgatttccaatttcatccatgtccctacaaaggacat

SEQ ID NO: 103308 - DNA, 120 bp, synthetic construct
  source 1..120: mol_type = other DNA
agctgtagatatgtggcgttatttctgagggctctggtctgttccattgatctatatctctgttttggtaccagtaccatgctgttttggttactgtagccttgtagtatagtttgaagt

SEQ ID NO: 103309 - DNA, 120 bp, synthetic construct
  source 1..120: mol_type = other DNA
gtggtttttgtctttggctctgtttatatgctggattacatttattgatttgcgtatattgaaccagccttgcatcccagggatgaagcccagttgatcatggtggataagctttttgat

SEQ ID NO: 103310 - DNA, 120 bp, synthetic construct
  source 1..120: mol_type = other DNA
tgtgtttgctcctgcttttctagttcttttaattgtgatgttaggttgtcaattttggatctttcctgctttctcttgtgggcatttagtgctataaatttccctctacacactgctttg

SEQ ID NO: 103311 - DNA, 120 bp, synthetic construct
  source 1..120: mol_type = other DNA
acgtgagatgggtttcctgaatacagcacactgatgggtcttgactctttattcaatttgccagtctgtgtcttttaattggagcatttagtccatttacatttaaagataatattgtta

SEQ ID NO: 103312 - DNA, 120 bp, synthetic construct
  source 1..120: mol_type = other DNA
taagcacttctctgtattggttattctagtaatacattctcctaaatttttttcaaagttttcaactgctttgcctttggtttgaatgtcctcccgtagctcagagtaatttgatcatct

SEQ ID NO: 103313 - DNA, 120 bp, synthetic construct
  source 1..120: mol_type = other DNA
ttttgatggggttttttttcttgtaaatttgtttgaattctttgtagattctggatattagccctttgtcagatgagtagattgcaaaaattttctcccattctgtaggttgcctgttca

SEQ ID NO: 103314 - DNA, 120 bp, synthetic construct
  source 1..120: mol_type = other DNA
gtttgtctgttattgatgtataagaatacttgtgatttttgtacattgattttgtatcctgagactttgctgaagttgcttatcagcttaaggagattttgggctgagacaatggggttt

SEQ ID NO: 103315 - DNA, 120 bp, synthetic construct; identical to SEQ ID NO: 25588
  source 1..120: mol_type = other DNA

SEQ ID NO: 103316 - DNA, 120 bp, synthetic construct
  source 1..120: mol_type = other DNA
actcaagagcttctgcacagcaaaagaaactaccatcagagcgaacaggcaacctacaacatgggagaaaattttcgcaacctactcatctgacaaagggctaatatccagaatctacaa

SEQ ID NO: 103317 - DNA, 120 bp, synthetic construct; identical to SEQ ID NO: 25589
  source 1..120: mol_type = other DNA

SEQ ID NO: 103318 - DNA, 120 bp, synthetic construct
  source 1..120: mol_type = other DNA
tgtaatccagcatataaacagaaccaaagacaaaaaccacatgattatctcaatagaggcagaaaaggcctttgacaaaattcaacaacccttcatgctaaaaactctcaataaattagg

SEQ ID NO: 103319 - DNA, 120 bp, synthetic construct
  source 1..120: mol_type = other DNA
cagtaaccaaaacagcatggtactggtaccacaacagagatatagatgaatggaactgaacagagccctcagaaataatgccacatatctacaactatctgatctttgacaaacctgaca

SEQ ID NO: 103320 - DNA, 120 bp, synthetic construct
  source 1..120: mol_type = other DNA
gcactattcacaatagcaaagacttggaaccaagccaaatgtccaacaatgatagactggattaagaaaatgtggcacatatacaccatggaatactatgcagccataaaaaaatgatga

SEQ ID NO: 103321 - DNA, 120 bp, synthetic construct; identical to SEQ ID NO: 25590
  source 1..120: mol_type = other DNA

SEQ ID NO: 103322 - DNA, 120 bp, synthetic construct; identical to SEQ ID NO: 9346
  source 1..120: mol_type = other DNA

SEQ ID NO: 103323 - DNA, 120 bp, synthetic construct
  source 1..120: mol_type = other DNA
ttagaattcacagttatatttgtgttcctttaagaaacacaaattgtggctcacacctgtaatctcaatactttgggaggccaaggctggcagatcatttgagggcagaagttcacgacc

SEQ ID NO: 103324 - DNA, 120 bp, synthetic construct; identical to SEQ ID NO: 18814
  source 1..120: mol_type = other DNA

SEQ ID NO: 103325 - DNA, 120 bp, synthetic construct
  source 1..120: mol_type = other DNA
tggaggttgcagtgagccaagatcgtgccactgcactccagcctggttgacagagtaagactccgtctcaagaaaaaaaaaaaaaagcctctccctctccctctgcctcctctccctctc

SEQ ID NO: 103326 - DNA, 120 bp, synthetic construct
  source 1..120: mol_type = other DNA
cctactgggaagtgaggagcccctctgcccggccaccaccctgtctgggaggtgtgcccaacagctcattgagaacaggccatgatgacaatggtggttttgtggaatagaaagcaggga

SEQ ID NO: 103327 - DNA, 120 bp, synthetic construct
  source 1..120: mol_type = other DNA
tacctttattcatggcacaaattacataaacagattggtagccctggatgggccgaggaatggtcttgtaagtagctgggcagaggcaacatcactgggcatgggtttgtactcagagat

SEQ ID NO: 103328 - DNA, 120 bp, synthetic construct
  source 1..120: mol_type = other DNA
atagttttctacctccactgggatttttactggcattgaaatctccacagtttatttttatagagtcttttatgtgaagtgtctcaaagcagggcagagagaaacacacagagaggcccc

SEQ ID NO: 103329 - DNA, 120 bp, synthetic construct
  source 1..120: mol_type = other DNA
gacaaccaagcgacttcccagccctgttggaaagtggatctggagggatggactaaaagaggcagaactgaggcctgggctggaggacctgagagtgaaactgggcctgcactggggagt

SEQ ID NO: 103330 - DNA, 120 bp, synthetic construct; identical to SEQ ID NO: 381
  source 1..120: mol_type = other DNA

SEQ ID NO: 103331 - DNA, 120 bp, synthetic construct; identical to SEQ ID NO: 382
  source 1..120: mol_type = other DNA

SEQ ID NO: 103332 - DNA, 120 bp, synthetic construct
  source 1..120: mol_type = other DNA
cctagaaagaaagaacatgaattcatcaatccattcagcagctattttgaacgcctcctgtgtgccagatgctgttctagaagctcagaatatctatgaacgcgataggcaatgccccca

SEQ ID NO: 103333 - DNA, 120 bp, synthetic construct
  source 1..120: mol_type = other DNA
aaagtgagcgtactagagaaatagagttggattcccaggcagtgctcagggcccatttgagacgtgtagtcttacatttaaagtgatataaaccagtgtggttgtttcatgttcaacttt

SEQ ID NO: 103334 - DNA, 120 bp, synthetic construct
  source 1..120: mol_type = other DNA
tgcagtggagtacttaagatgttggactccaaagccagattgcctggtttcagaaaactgccacttagtagctatgggactttgggtaaatcatctaacttctgtgtgcctttgtttctt

SEQ ID NO: 103335 - DNA, 120 bp, synthetic construct
  source 1..120: mol_type = other DNA
tcggtagggttctggaatcaatcaacttttttaagagctccccaagtgactgtgatgtgcagttagcatggcatatcgttagtacaaatcagtgcttttaagccctgactgtgttttaca

SEQ ID NO: 103336 - DNA, 120 bp, synthetic construct
  source 1..120: mol_type = other DNA
caaagctctccagctaattctaatgtgcagctgaaattgggaatcatgcattacaacatgcagcttcctggtggtctaaattaattttctcttaacgctcctctgtagatggctgtgact

SEQ ID NO: 103337 - DNA, 120 bp, synthetic construct
  source 1..120: mol_type = other DNA
gtacataatatgagtatggggtgaagttcataattctgtatgtggatgtctcattttcccacacacttgttgaaagcactatcctatccccattatattatcttggcacctttcccctcc

SEQ ID NO: 103338 - DNA, 120 bp, synthetic construct
  source 1..120: mol_type = other DNA
gtataggattgttattcgtccttaaaggtttggtagagttcaacagggaggtatctgggcctagagtttccttgtgttagttttataccatggactcaagtttttaaaactatatatggc

SEQ ID NO: 103339 - DNA, 120 bp, synthetic construct
  source 1..120: mol_type = other DNA
ccagaatatggactatccttgtgaatgttccgtgtccactttaatacttattttgttgttggctgggatgccctataaaagttaggccaaattgcttcataatgttgttcaggttttctg

SEQ ID NO: 103340 - DNA, 120 bp, synthetic construct
  source 1..120: mol_type = other DNA
gaaagttaccctataccccctcagccccatggttttccctgttattaatatgttgtgtttgtttggtacatttgctatagttaataagccaatatctatagattagtattaactgaagtc

SEQ ID NO: 103341 - DNA, 120 bp, synthetic construct
  source 1..120: mol_type = other DNA
tatgttccataggggatcttggccgcctctactgtattatatagtttgccagggaagtcagggatagccagtagcaagaggcctgactcaactcccatgcagttggcaagcccgcatatc

SEQ ID NO: 103342 - DNA, 120 bp, synthetic construct
  source 1..120: mol_type = other DNA
cccaagagaatattttgaagtcctaaccccagatacctgtgagtccaaccttacttagaaataggatctttgcaaatgttaaacaagttaagctgaggtcctaatgcaatgactggtgtc

SEQ ID NO: 103343 - DNA, 120 bp, synthetic construct
  source 1..120: mol_type = other DNA
ccactttttccttccagtttctcccttttggaaggtgactgtctgtcctatgcctgttgtattttggaagcagataacttgttttgtggatttcagtgtccataggagagaaactttgcc

SEQ ID NO: 103344 - DNA, 120 bp, synthetic construct; identical to SEQ ID NO: 383
  source 1..120: mol_type = other DNA

SEQ ID NO: 103345 - DNA, 120 bp, synthetic construct; identical to SEQ ID NO: 384
  source 1..120: mol_type = other DNA

SEQ ID NO: 103346 - DNA, 120 bp, synthetic construct
  source 1..120: mol_type = other DNA
cctgcaaaagatccatattgcccatagcccttttctaaatcttttattttatagattgagtgactaaagattaaggacaaggttggcctttaggcatatgtggacccatgggtatataat

SEQ ID NO: 103347 - DNA, 120 bp, synthetic construct
  source 1..120: mol_type = other DNA
agagtttagggtttttatcaggggttagtcatgagcacagactgtcagtgtgactgatagcagtcactgaaattccagatacctagaaggaaaacagatgttttaggagaagtgagctac

SEQ ID NO: 103348 - DNA, 120 bp, synthetic construct
  source 1..120: mol_type = other DNA
gaactcttttgcttggtaacagtgattggaggtacaggaattgtgtcttctgaaataaagcaccctcttataattactgatacacttccacaagagagggagaggaacgtaggaaggagg

SEQ ID NO: 103349 - DNA, 120 bp, synthetic construct
  source 1..120: mol_type = other DNA
agcttgtactgagaatttagtcacaggaaatacagatttcagaggaaggaactcatatccctggggtgcctacaggtagggcaagagtaagtcactattgaacatttgagacttctttca

SEQ ID NO: 103350 - DNA, 120 bp, synthetic construct
  source 1..120: mol_type = other DNA
taggggaagcacttgcaggggcttacttagccaagcttgaggggaggtgggaaatatggtaaaagcttgcactatattttctgaaaggttttcttctgcaaatgaagattttgtttttat

SEQ ID NO: 103351 - DNA, 120 bp, synthetic construct
  source 1..120: mol_type = other DNA
gaaatctgttacctcactgccagtcacaagaacactgccatccttttgtttttgtttttaattgagacagagtcttgctctgttgcataggctggagtacagtggcacaatcatagctta

SEQ ID NO: 103352 - DNA, 120 bp, synthetic construct
  source 1..120: mol_type = other DNA
aaactcctgagctcaagcgatcctcctgccttggcctcccaaagtgctaggattgtaggcatgagccactacacctagtcttaaataattttttaacacctatatctcaaagtttttaaa

SEQ ID NO: 103353 - DNA, 120 bp, synthetic construct
  source 1..120: mol_type = other DNA
ggtgcatcatctacttttgtgggtatgggatcaggaggagctacaggagtgcctctcagactgtagatttgcatagggaccacctgtggattattatcctgcatattctgatcctctggg

SEQ ID NO: 103354 - DNA, 120 bp, synthetic construct
  source 1..120: mol_type = other DNA
ggataggagtctaagtttattctgcataggaatatccagttttttccaggaccatttatagaagagactttcttgtccccaatatatgttctttgtgccttgtcataaaagagttggcta

SEQ ID NO: 103355 - DNA, 120 bp, synthetic construct
  source 1..120: mol_type = other DNA
ggatgccttttgtttgtttctcttgcctaattgctctggcaaggacttcctgtatggtatagtttggatgtttatctcttctaatcatgttgaaaggtaatccccaacctggtgggagat

SEQ ID NO: 103356 - DNA, 120 bp, synthetic construct
  source 1..120: mol_type = other DNA
tttttttttattgttgttgttgttgtttttgtttgagacagagtctcgctctgtcagccaggtggagtgcagtggcacgatctcggctcactgcaacctccatctcccaggctcaagcaa

SEQ ID NO: 103357 - DNA, 120 bp, synthetic construct
  source 1..120: mol_type = other DNA
atagggaggagtccctcttcctaattatttgaaatagtttcagtaggattggtaccacctcttgtttatacatctggtagaatttgactgtgaatccttctggcccgggctctttctgat

SEQ ID NO: 103358 - DNA, 120 bp, synthetic construct
  source 1..120: mol_type = other DNA
tgttctttcaatactttaaaatgtctcaccattatcttctagcatgcatgatttctgatgagaaatccatcattcttatctttgtttttctatatttaatgtgtctgttttctctggcat

SEQ ID NO: 103359 - DNA, 120 bp, synthetic construct
  source 1..120: mol_type = other DNA
tctcataggctggagtgcagtggtgcaatcttggctcactgcaaccttctgcctcctgggttcaagtgattctcctgcctcagcctcctgagtagctgggattgcaggtgcgcaccacca

SEQ ID NO: 103360 - DNA, 120 bp, synthetic construct
  source 1..120: mol_type = other DNA
ttctagcacttgaagctccttcctaggtttgcggaatttcctattttcagaaccgtttgcatgagagatttttttcattgaaagtctgataaaatcccatctggaaacctgtttgggccc

SEQ ID NO: 103361 - DNA, 120 bp, synthetic construct
  source 1..120: mol_type = other DNA
ataaataatacaagaagttacagtgcgacatttgtaacacagtattctttattcaagaaatagactctgaaacacagaagactgtattctgtagatcccaatgcataggttctgcaggtt

SEQ ID NO: 103362 - DNA, 120 bp, synthetic construct
  source 1..120: mol_type = other DNA
tgaagtatgaagcacctttagatgtattgattgtggactttttcattgtttgagacagcatgattgggtgtctccgaactatggaaaagtagagggctgtgaaaagtctgtgacaaaaac

SEQ ID NO: 103363 - DNA, 120 bp, synthetic construct
  source 1..120: mol_type = other DNA
tagatttggagcataaagaaattttttttttgagacaggctaatttattttttggatttttggtagagacagggtttcaccacgttggccaggctggtcttgagctcctggcctcaggtg

SEQ ID NO: 103364 - DNA, 120 bp, synthetic construct
  source 1..120: mol_type = other DNA
tgtggtttgtggattgagcagtgtgtatcaaataaaaggtctgctctatgacattacatttacaattgtgccacttaaggtgtttaggagtaaatctaagaaaaggtatacattgtcttt

SEQ ID NO: 103365 - DNA, 120 bp, synthetic construct
  source 1..120: mol_type = other DNA
gaggatgtttttgaagagccttcagaaaggtataactaatatgcttatttagtgggttttctgtttatgctacttatattcatagctagccctctgcatggagacagtgaataatggccc

SEQ ID NO: 103366 - DNA, 120 bp, synthetic construct
  source 1..120: mol_type = other DNA
aatttaggatttaattaaatagaaacctagcaggtgaaaaagagaagaacatttcaggcaagagggagaagtttgagcgagggtaaggagttgtgaaaatatcttaggggtaatggggag

SEQ ID NO: 103367 - DNA, 120 bp, synthetic construct
  source 1..120: mol_type = other DNA
ctaagtcagagagagtattaaaataaggactataacaagatggtggcttggaatttgctgccatggaagagtggtacaggaaaccaaccagggacatgctggtattttccaaacggctct

SEQ ID NO: 103368 - DNA, 120 bp, synthetic construct
  source 1..120: mol_type = other DNA
tatatatatttataaaatttgtgtttgtaaacttgggggatcacatgcacacctcaaaaaccttggagttggagaggatcttagaggtcatccataaccaacatcccatcaaatgttgga

SEQ ID NO: 103369 - DNA, 120 bp, synthetic construct
  source 1..120: mol_type = other DNA
tacagattccgtctctgttgttaatgcgttttgtttgcatttttcatagagcttaacatgttaatgatagttatttaaaattccctggtggataactctgacagatgggttgttgctgat

SEQ ID NO: 103370 - DNA, 120 bp, synthetic construct
  source 1..120: mol_type = other DNA
acagtggagaaggtttcctccccttcacttagtgtagtggtaggagttttgtaataataatggcattaaatcctgggcttaggactgttttctgcaccttctccaggaatagatggattt

SEQ ID NO: 103371 - DNA, 120 bp, synthetic construct
  source 1..120: mol_type = other DNA
agtaccctccttttcagtttcagtttaggactatggttaggctcctcctagggtctgttactgaggtctatgctcacaaaggattaatgcctagaaaatataagaaactgcatattagta

SEQ ID NO: 103372 - DNA, 120 bp, synthetic construct; identical to SEQ ID NO: 385
  source 1..120: mol_type = other DNA

SEQ ID NO: 103373 - DNA, 120 bp, synthetic construct; identical to SEQ ID NO: 386
  source 1..120: mol_type = other DNA

SEQ ID NO: 103374 - DNA, 120 bp, synthetic construct
  source 1..120: mol_type = other DNA
ctgccgtcttacacctgtctggtattctctttcagctcagcaaacatcccatttggttgtggttccttgtctgatagggtgacccacacattcattcctcaagatctaagtcattagtag

SEQ ID NO: 103375 - DNA, 120 bp, synthetic construct
  source 1..120: mol_type = other DNA
aatattgtttttatgttttacgatttgatttgctagtattttcctgaagactttttttgtgtttatgttcatgacagatattcatctgtaattttctttttttgtgatatctttttccgg

SEQ ID NO: 103376 - DNA, 120 bp, synthetic construct
  source 1..120: mol_type = other DNA
ctttgttctgtgtttcttgatcagtttggctagagactgtatcaattctattgatattttccaagaactagcttttagtttcccttactttctcattgatttcaatttcattgatttctg

SEQ ID NO: 103377 - DNA, 120 bp, synthetic construct
  source 1..120: mol_type = other DNA
gtgggttgcacatattgactttctttcaaagagtacagtatggccagaggagtacaaagaataactgcatagtagagaaacctaataaacactactgcagccatgtgatcaaggtcacca

SEQ ID NO: 103378 - DNA, 120 bp, synthetic construct; identical to SEQ ID NO: 387
  source 1..120: mol_type = other DNA

SEQ ID NO: 103379 - DNA, 120 bp, synthetic construct
  source 1..120: mol_type = other DNA
aggctgaggctgaggcagagcaggagagtcacttgaacccaggaggcagaggttgcagtgatctgggatcacaccactgtacttcagcctgcgcaacagtgaaactctgtctcaaaaaga

SEQ ID NO: 103380 - DNA, 120 bp, synthetic construct
  source 1..120: mol_type = other DNA
cttctttttgtaattccttacgttgtaaagctagtttgtttattcgaggccttgtttctttcatgtaagcatttatagctataaatttcccccttaaccctgcttttgctgtgtcccata

SEQ ID NO: 103381 - DNA, 120 bp, synthetic construct
  source 1..120: mol_type = other DNA
catgggcattatatttaacatcctaaacttatcactctaatttgaatttatgccagcctaattcagtaaaatacaaaaaaaaaaaaactgtggacctttgacagttttgaccccatctct

SEQ ID NO: 103382 - DNA, 120 bp, synthetic construct
  source 1..120: mol_type = other DNA
atgttaagtggacaattccagatataaacaataagttttaaattgcacactgttctgagtagtgtgatgaaacctcacactgtcctgctctgtcctgcctgggagtgaatcattcctttg

SEQ ID NO: 103383 - DNA, 120 bp, synthetic construct
  source 1..120: mol_type = other DNA
tctctcttccctacccccaatgttaatgagtcttcatttgtgccttgaggatgacagagtttcatgcgttttctcaggttcttatgcttttggtccattagggaaatagggaaaagcatt

SEQ ID NO: 103384 - DNA, 120 bp, synthetic construct
  source 1..120: mol_type = other DNA
caatatcagtcacacccttctcctagtgtaccttcctgtatggcccaggcagaaaaatgaaaaattacattttcaagacttcctggtagcttatttgggctttgccgatcatatgcactt

SEQ ID NO: 103385 - DNA, 120 bp, synthetic construct
  source 1..120: mol_type = other DNA
ctctcttcattctcccagcttttgtactagcaaaggtggaacacaatgggaagatctaagggtttttctgttgggcatcaaagatgatcaaaatggcttctacgcttgtgggaattttat

SEQ ID NO: 103386 - DNA, 120 bp, synthetic construct
  source 1..120: mol_type = other DNA
gtttatggcactgaacagttttctccaagggcagtggattttgtataatttcaaggtgtaaatagccatgatttttccaaaggaagcctctttcaaagtagtagactcttcacccgtgga

SEQ ID NO: 103387 - DNA, 120 bp, synthetic construct
  source 1..120: mol_type = other DNA
caattctttgccccattttcctttttttttttttcttattggttactctttttttttttgagatgagtcttgctcttgtcccccaggctggagtgcagtggtgcgatctcggctcactgc

SEQ ID NO: 103388 - DNA, 120 bp, synthetic construct
  source 1..120: mol_type = other DNA
gttccccatggcagcggttgctaggttggctacacaagagttacccaagagctttgaaaatgtatagattttcaggctttctccacaaatattctaataaagtatgactagctacctcct

SEQ ID NO: 103389 - DNA, 120 bp, synthetic construct
  source 1..120: mol_type = other DNA
tggcatgtgaaacttgagatattttatatagcactttttaaatgaggatctagcttcacttatcatacaacacattaaatagcaggtcatgtcatatagggatttaaggatcatgagcac

SEQ ID NO: 103390 - DNA, 120 bp, synthetic construct
  source 1..120: mol_type = other DNA
tcccactgctgctgacttagactgagcccattttacctctcagctggttacgttcttctttactgcctccctttctgatcattcacaaaagctactgagattttcttaaaatgcaagtca

SEQ ID NO: 103391 - DNA, 120 bp, synthetic construct
  source 1..120: mol_type = other DNA
tgcatgtgcagtttgccctcaaggagactaaaagcaaacatgccttaaaaattagcctctcgggattgtaagaagctcattttacaatagaaggtacacataatatttgatctgacttga

SEQ ID NO: 103392 - DNA, 120 bp, synthetic construct; identical to SEQ ID NO: 388
  source 1..120: mol_type = other DNA

SEQ ID NO: 103393 - DNA, 120 bp, synthetic construct; identical to SEQ ID NO: 389
  source 1..120: mol_type = other DNA

SEQ ID NO: 103394 - DNA, 120 bp, synthetic construct
  source 1..120: mol_type = other DNA
atgttcatatcagatttacttataatagccaaaaactggaaacagtgcaaatgcccatcaacggaagagtgaataaacaaattgtggtatgtctacataatagaatgcaactaggcaata

SEQ ID NO: 103395 - DNA, 120 bp, synthetic construct
  source 1..120: mol_type = other DNA
aaggtacaatggtggtacaggcactgggtaaatgtttccattccaaaaaggaaaaattggtcaaaagaaagggataataggccccatgcaagtccaaaacacagcagggcacactttaaa

SEQ ID NO: 103396 - DNA, 120 bp, synthetic construct
  source 1..120: mol_type = other DNA
ttccacacacttccaacctccgctcatcgcccagttccaaaactgcttccacattttcaggtatctttatagcaacaccccaattctcagtaccaattttctgtcttattccattttgta

SEQ ID NO: 103397 - DNA, 120 bp, synthetic construct; identical to SEQ ID NO: 390
  source 1..120: mol_type = other DNA

SEQ ID NO: 103398 - DNA, 120 bp, synthetic construct
  source 1..120: mol_type = other DNA
taggctggtctcaaactcttggcttcaagtgatccttctgtctcagcctcccaagtagctggaatgcctggctctcgtcattcttcttatagatatgaaactatgttttgtagtatttgt

SEQ ID NO: 103399 - DNA, 120 bp, synthetic construct
  source 1..120: mol_type = other DNA
ttccctggggtctaacctgctggcctgccctgcagatattgacttgccagtccccacaatcatgagtcagttctttaaaataaatctttctcactgtatatatacagcctattgattcta

SEQ ID NO: 103400 - DNA, 120 bp, synthetic construct
  source 1..120: mol_type = other DNA
gggtgtgggacaatggtggaaggaacttagtgtttgatcaggctgaatttattgaaatgggaccacaaagaagagattctggacttaatatgtggattagggagttagaaagagctctta

SEQ ID NO: 103401 - DNA, 120 bp, synthetic construct
  source 1..120: mol_type = other DNA
ctcagtaggtccctaaaaccatcttgtgattattttccaagccctggaatgaataattggaataaacatactcagaaactggtagaatccccacattgcttctctgacctgtggagtgag

SEQ ID NO: 103402 - DNA, 120 bp, synthetic construct
  source 1..120: mol_type = other DNA
ttttggaggaaacattccttattttgatgtgctactctggtccatttactaagtgatgtgaaaagctgctagttttgagtggggcccaaaacaagagaaggctctgaaacaggatcagtc

SEQ ID NO: 103403 - DNA, 120 bp, synthetic construct
  source 1..120: mol_type = other DNA
gaacatggttggaaaaattggtgacaataaggtctggggaagaggcacgtgaatagatcttgctagataggcacaaacacaaagatatttgtatcccatgtgaatgctcaccaaaggttg

SEQ ID NO: 103404 - DNA, 120 bp, synthetic construct
  source 1..120: mol_type = other DNA
ggggtcttagtggctctcttcattaatgttgtctgacacttaggcctttctgtctgcaaacttgagtcttccttgatggacaacagagcatggaattatttttggaccagagtctagatt

SEQ ID NO: 103405 - DNA, 120 bp, synthetic construct
  source 1..120: mol_type = other DNA
ctccctttttgaaataccgggtatctttatatatctagctttttttttttttttttttttgtttgagatggagtctcactcattctgtcacccaggctgaagtacagtggcgcggtctca

SEQ ID NO: 103406 - DNA, 120 bp, synthetic construct
  source 1..120: mol_type = other DNA
caggtttcagatttgcaggataatatcactcatttactcccacaaagagtttctcctctgttgtgttcagttgcaaactataggatacttcccttgacttaaccttgcccatgccacttc

SEQ ID NO: 103407 - DNA, 120 bp, synthetic construct
  source 1..120: mol_type = other DNA
tacgtattgagtccttaaagtatgctaatcactgggccaggcactatcagtacttaccgaatagtggagaggttggttacactcactgatagatacctaacttaccgtgttcagtgataa

SEQ ID NO: 103408 - DNA, 120 bp, synthetic construct
  source 1..120: mol_type = other DNA
ggaatggtttataggagaaagcaatgagttagattgctctagtggattcagttggcaggtaggtgatacatgtgttaacacgagtgaagggaataggagttgaacaggaaacttgcagag

SEQ ID NO: 103409 - DNA, 120 bp, synthetic construct
  source 1..120: mol_type = other DNA
caatagtgggacccacaatctactctcatggtcattgactaccctgtcttcatcgctggaagagatcggtgcctctcttgtcagacacctatatgtcttaattaaatttcatatgtcatt

SEQ ID NO: 103410 - DNA, 120 bp, synthetic construct
  source 1..120: mol_type = other DNA
ggacaggggtgttcctatgtgtggatgtcgtgttctgtgccatcgtaaagaactgttcagtaagtgtgtgaatcaagcagatacactgatgctgttggtgtttacacactacatttaata

SEQ ID NO: 103411 - DNA, 120 bp, synthetic construct
  source 1..120: mol_type = other DNA
tttatgattatttttattctcaagttttatctgttaaaatgattccatctatgttgtttttccttttatttttagttgacatgtaataattgtacatatttgtggggtacagagagtggt

SEQ ID NO: 103412 - DNA, 120 bp, synthetic construct
  source 1..120: mol_type = other DNA
ctaggacatccaacattatactgaataagagtggtaaaagtgggcattcttgacctgttttccagttcttagaagaaaggctttgagcttttccccattcagtatgatcttagctgtgtg

SEQ ID NO: 103413 - DNA, 120 bp, synthetic construct
  source 1..120: mol_type = other DNA
tactaaaaatacaaaaattagccaggtgtgatggcatgcacctgcagtcccagctacttgggaagctgagacaggagaattgcttgaacccaagaggcagaggttgcagtgagctgagat

SEQ ID NO: 103414 - DNA, 120 bp, synthetic construct
  source 1..120: mol_type = other DNA
gagcctgtgggtgttcttacatgtgagatgggtctcttgaagacagaatatggttgggccttatttttttaatccattttgccatcctaagccttttaagttgggtatttagaccatttg

SEQ ID NO: 103415 - DNA, 120 bp, synthetic construct
  source 1..120: mol_type = other DNA
tagttacagataggtcttacctcctttttttccttcagtttttgctgttgttcttctgggcaacagagtgagcctgggcaacagagtgagaatctacctcaaaaaaaaaaaaaaaaaaaa

SEQ ID NO: 103416 - DNA, 120 bp, synthetic construct
  source 1..120: mol_type = other DNA
ccactgcactccagcctggcaacagagcgagactgtgctcaaaagacaaacaaataaacaaaaaacagaaaataaaaagtgttggccaggatgtagagaaattggaatccttgtgtactg

SEQ ID NO: 103417 - DNA, 120 bp, synthetic construct; identical to SEQ ID NO: 32906
  source 1..120: mol_type = other DNA

SEQ ID NO: 103418 - DNA, 120 bp, synthetic construct; identical to SEQ ID NO: 32907
  source 1..120: mol_type = other DNA

SEQ ID NO: 103419 - DNA, 120 bp, synthetic construct
  source 1..120: mol_type = other DNA
tgtttgaggctgcagtgagccgtgattgtgccaccatgctccagcctaggcagcagagggagactctgtttaaaaaaaaaaaaaaaaaaaaaaaaaaagcgttgcttctaaatccagtgt

SEQ ID NO: 103420 - DNA, 120 bp, synthetic construct; identical to SEQ ID NO: 32908
  source 1..120: mol_type = other DNA

SEQ ID NO: 103421 - DNA, 120 bp, synthetic construct
  source 1..120: mol_type = other DNA
gcggcccaatggtaacatcttctctaactgtggtacaatattaaagtcccattagttgacattggtaccatctacagatcttttatagctatcaccagtttttacatgctgtcatttgtg

SEQ ID NO: 103422 - DNA, 120 bp, synthetic construct
  source 1..120: mol_type = other DNA
ggcggagacgctcctcactttccagactgggcagccaggcagaggggctcctcacatcccagacgatgggcggccaggcagagacactcctcacttcccagacggtgtggcagccgggca

SEQ ID NO: 103423 - DNA, 120 bp, synthetic construct
  source 1..120: mol_type = other DNA
cttcttgagttaatacgtgtagtttgagtctttctggcaatttgtccatttcatctacattatctatcggcatacatttgttcataatgttccttaacatctcttttttccccttgtaac

SEQ ID NO: 103424 - DNA, 120 bp, synthetic construct
  source 1..120: mol_type = other DNA
gaacaggtcttagatgggacctgagcataggcatgcacaagttcccccaaatgattctaatatatagccaaggctacatattagccaaagctttaatgcttgagtagccttaatgtgatg

SEQ ID NO: 103425 - DNA, 120 bp, synthetic construct
  source 1..120: mol_type = other DNA
ttttttttctttttttgagatagagtctcactctgtcgcctaggctggagtgcagtggcgcgatctcggctcattgcaagctctgcctcccaggttcacgccattctcctgccttggcct

SEQ ID NO: 103426 - DNA, 120 bp, synthetic construct
  source 1..120: mol_type = other DNA
tctcttcttgttgagcagaaaatgaggagtgaaatggccagctcaaaccctcacttcaataaatggtgctgggacaagtagatatctacatgcataaaaatcaagctgactccttcctca

SEQ ID NO: 103427 - DNA, 120 bp, synthetic construct
  source 1..120: mol_type = other DNA
cgagggcaaggagcagccgcctgccttggcctcccaaagtgccgagattgcagcctctgcccggctgccaccccgtctgggaagtgaggagtgtctctgcctggccgcccatcgtctggg

SEQ ID NO: 103428 - DNA, 120 bp, synthetic construct
  source 1..120: mol_type = other DNA
caggccgggcgcggtggctcacgcctgtaatcccagcactttgggaggccgaggcgggcggatgacgaggtcaggagatcgagaccatcctggctaacacggtgaaaccccgtctctact

SEQ ID NO: 103429 - DNA, 120 bp, synthetic construct
  source 1..120: mol_type = other DNA
agttactttagaaaacagtctggttgttcctgaaaagattaaacagttaccatatgacccagcaattccactccttagcaaaataacataggtgcatacaaaaacttatacataaatatc

SEQ ID NO: 103430 - DNA, 120 bp, synthetic construct; identical to SEQ ID NO: 15499
  source 1..120: mol_type = other DNA

SEQ ID NO: 103431 - DNA, 120 bp, synthetic construct
  source 1..120: mol_type = other DNA
tgcccagccgcccctactgggaagtgaggagcccctctgcctggccagccaccccgtccgggagggaggtgggggagtcagcccccaacccggccagccgccccatccgggagggaggtg

SEQ ID NO: 103432 - DNA, 120 bp, synthetic construct; identical to SEQ ID NO: 15500
  source 1..120: mol_type = other DNA

SEQ ID NO: 103433 - DNA, 120 bp, synthetic construct
  source 1..120: mol_type = other DNA
aggttgcagtgagccaagactgcaccactgcactccagcctgggtgacaagagtgagactctccctctccctctccccctccccctctccccacggtctcccgatccctctcttgccacg

SEQ ID NO: 103434 - DNA, 120 bp, synthetic construct
  source 1..120: mol_type = other DNA
gtggggaaaagatagagaaatcagactgttgctgtgtctgtgtagaaagaagtagacatgggagactccattttgttctgtgctgggaggaattcttctgccttgggatgctgttgatct

SEQ ID NO: 103435 - DNA, 120 bp, synthetic construct; identical to SEQ ID NO: 15501
  source 1..120: mol_type = other DNA

SEQ ID NO: 103436 - DNA, 120 bp, synthetic construct; identical to SEQ ID NO: 15502
  source 1..120: mol_type = other DNA

SEQ ID NO: 103437 - DNA, 120 bp, synthetic construct
  source 1..120: mol_type = other DNA
cccgagactctatctcaaaaaaaaaaaatcagtgacaagtaaaaaggtagaatacctttttttttttctttgagacagtctcaccctgtcgcccagtctggagtgcaatggcgcagtctc

SEQ ID NO: 103438 - DNA, 120 bp, synthetic construct; identical to SEQ ID NO: 22307
  source 1..120: mol_type = other DNA

SEQ ID NO: 103439 - DNA, 120 bp, synthetic construct
  source 1..120: mol_type = other DNA
gccaggcagagggtctcctcacttctcagacggggcggccaggcagagatgctcctcacatcccggacggggcggcagggcagaggtgctccccacatctcagacgatgggcggccgggc

SEQ ID NO: 103440 - DNA, 120 bp, synthetic construct
  source 1..120: mol_type = other DNA
ctcccgggttcacaccattcttctgcctcagcctcccgagtaccacccgccaccacgcccagctaattttttgtgttttttttagtagagacggggtttcactgtgttaggcaggatggt

SEQ ID NO: 103441 - DNA, 120 bp, synthetic construct; identical to SEQ ID NO: 13053
  source 1..120: mol_type = other DNA

SEQ ID NO: 103442 - DNA, 120 bp, synthetic construct; identical to SEQ ID NO: 13054
  source 1..120: mol_type = other DNA

SEQ ID NO: 103443 - DNA, 120 bp, synthetic construct
  source 1..120: mol_type = other DNA
tctacagagataacaattattttgcttttcagaaggacgcatgctgtttcttagggacacggctgacttccagatatgaccatgtatttgtggcttaaactcttggcatttggctttgcc

SEQ ID NO: 103444 - DNA, 120 bp, synthetic construct
  source 1..120: mol_type = other DNA
tattacaattcactttgaagtctttttttgacttttaccgttcttctttcctctgaaagtcagggaagtagctacctcttgagcatgttacattgacaatttctatttggagaggaaaga

SEQ ID NO: 103445 - DNA, 120 bp, synthetic construct
  source 1..120: mol_type = other DNA
tttcattttaacgtgttaaaattagtttagtgcctacaggaaataataaacttttggggaacaaaatttatattgtatgctgtaaaggcataaagaaatagagccaaatgtagagagcca

SEQ ID NO: 103446 - DNA, 120 bp, synthetic construct
  source 1..120: mol_type = other DNA
ctttttctcttttgttctgtgtaagtaagtataggggcagagtagttagcttgaacttagttctttctttgttctggactatttgctatcctctcaccagtgacaattaaccagtataga

SEQ ID NO: 103447 - DNA, 120 bp, synthetic construct
  source 1..120: mol_type = other DNA
ttgattaaaagaaaacaaacaggaggtagttttaacacccacctctatactttctcaaggtgtttaaggttctgggcaaatcctacttcttctattatgttctcttatgtcacttttgcc

SEQ ID NO: 103448 - DNA, 120 bp, synthetic construct
  source 1..120: mol_type = other DNA
gagtaggtaaggggcagagatttgtactgaggttgattcattctcttggtaaatacacaatgttcacaaaggcaaggtttcatcttcagaccatgtgtgtatatgtcaccttggtgcaga

SEQ ID NO: 103449 - DNA, 120 bp, synthetic construct
  source 1..120: mol_type = other DNA
catacctggaagaaaaccatccaccctccaaaatagggatttgctaatgtaggagtagaaggcaaaagttgagggtaactcaggtaacacactcatacgtattaggatatgaacagctgg

SEQ ID NO: 103450 - DNA, 120 bp, synthetic construct
  source 1..120: mol_type = other DNA
gaactaatgtttagcagcatcactttcatttaatttttacaataactattagattcatgaatccattttacccatgtcaagttctactgaatatagcttatgcttggaattttcctttgt

SEQ ID NO: 103451 - DNA, 120 bp, synthetic construct
  source 1..120: mol_type = other DNA
ttactgtaaagatcatgtcctctagacagcccctatcccacttgtataacccttgctcttcagcccctttcacacctgcataggtattcttctgctgtgatgatcctttgaataattctc

SEQ ID NO: 103452 - DNA, 120 bp, synthetic construct
  source 1..120: mol_type = other DNA
cttcctccaggtccctgttacaaccagattttctttgcagacttttaaattatggaagttctggtgctgccactgagttgtgtagattattattagatattcaataaataaagttggtag

SEQ ID NO: 103453 - DNA, 120 bp, synthetic construct
  source 1..120: mol_type = other DNA
ttccaggaagtgtagacactagataatcttttcatagtcatccaaaaagcatattaagtgaaccaggtaaatccatcctacactttttattccagagacaagttggctaaactttgagga

SEQ ID NO: 103454 - DNA, 120 bp, synthetic construct
  source 1..120: mol_type = other DNA
ccttatgaagaagaatcattgagctacctgttggctgacaagaatatggggatccatgtgagggagactggcaagagtaaaggttatctggcaaaaccaaacaaattggtaggttcgagg

SEQ ID NO: 103455 - DNA, 120 bp, synthetic construct
  source 1..120: mol_type = other DNA
ggaggagctaggaaaagatagtgagaagaggtagccagtgaaaaaaagtagaactatactttgctttgaatgttgaaaagggttggcattatagtgagaattcagtaaattccacataaa

SEQ ID NO: 103456 - DNA, 120 bp, synthetic construct
  source 1..120: mol_type = other DNA
gaagtaacattgagtgtctcgtgtgcctggcactccatatgatgcttcaatgcacaccaggctattcagcctcagatttgtttctacattgcttctagttctacagattattcaacgaat

SEQ ID NO: 103457 - DNA, 120 bp, synthetic construct
  source 1..120: mol_type = other DNA
gtgttatgtcaagggcggctcgatggtgtggatgaaagaactattgggaatggctactgaaagatcaaaggcaagtggaacctcaaaattctggaagtagaacgagtcagatacaatata

SEQ ID NO: 103458 - DNA, 120 bp, synthetic construct
  source 1..120: mol_type = other DNA
cagaggtaacgcttcttaatgttattcagtgccataacttgccttttttctaggcctccattttatgaactgaacatctggatttgatggcaagaaaacatttccttccgctggcttttc

SEQ ID NO: 103459 - DNA, 120 bp, synthetic construct
  source 1..120: mol_type = other DNA
ctacagattcatgaatactaagggcaacttttatctcaggaaatatatcagtggactgaaaatgtcaaatcaattcaattaaatcagtaataacactttgctgtttatgtggctgttttt

SEQ ID NO: 103460 - DNA, 120 bp, synthetic construct
  source 1..120: mol_type = other DNA
tgaaataatttctttatggctcccagcagtaacactgtgctattctagaccagttggttaaactactggatgcttcatcagaaagcacccactaagcatcactcaccatgaagttcgttg

SEQ ID NO: 103461 - DNA, 120 bp, synthetic construct
  source 1..120: mol_type = other DNA
ttatgttctgccagatggagataaaactgtggcagccacatcctgtgactagaaattgtttaagtaggcagacctgttggaggactaaagaacattaggcaaggagattaaattagtgta

SEQ ID NO: 103462 - DNA, 120 bp, synthetic construct
  source 1..120: mol_type = other DNA
atctccacccatatggaaataccagaaatctgaaaccccattcttgctaaatattcttctcaggattgtatctctactgcaggtcttctatgacgttttacagctggcctctttccattc

SEQ ID NO: 103463 - DNA, 120 bp, synthetic construct
  source 1..120: mol_type = other DNA
tatttcttgtcctgaagtggtaactttggtgaagtcttttgcttgctcttttacagactaattaacaagttttctatgccggctctgtcctttcctctcctctcacccctgaaaagtggt

SEQ ID NO: 103464 - DNA, 120 bp, synthetic construct
  source 1..120: mol_type = other DNA
tcccaggttcaaagaattctcctgcctcggacttctgagtagctgggattacaggcatgcaccaccatgccttgctaattttgtatttttagtagagacagggattttctatgttgttca

SEQ ID NO: 103465 - DNA, 120 bp, synthetic construct
  source 1..120: mol_type = other DNA
tgtgtgtgtgtattctgtgttgaaataaatggtagaaccaggacaacaggtagaggttatgaggttgtcatctgtgacacagtctagaggagaaactgtgtgggcatctatcaacttacc

SEQ ID NO: 103466 - DNA, 120 bp, synthetic construct
  source 1..120: mol_type = other DNA
tagctggattctcatatatgctttaatattctctatctgttgtaatattatataccatatagtttctggaaacattaattttctactaatgagagaatgagagagaagaagaaaaataac

SEQ ID NO: 103467 - DNA, 120 bp, synthetic construct
  source 1..120: mol_type = other DNA
ttgagattacagagctaataagaggcagagccaatgtttgatctgaacaacttgattctaggatcattttggctgggaattttctgagagctgtgtgtgtgtgtgtgtgtgtgtgtgtgt

SEQ ID NO: 103468 - DNA, 120 bp, synthetic construct
  source 1..120: mol_type = other DNA
taaaagggcacaggtgcatttgtggaaatagaaggaagcaatcttgagcctgaatacattgaggtactggcaagcttctggaagtagttgaagaagacttcagttagaagcttggtcaaa

SEQ ID NO: 103469 - DNA, 120 bp, synthetic construct
  source 1..120: mol_type = other DNA
aagaagagacttaacgatgctatgtgggagaaaaactaagtccctactatctttctgagagcacgtctcagaggacatgatgtgatcctgtaagtttgtagcaatcttattgtgccccag

SEQ ID NO: 103470 - DNA, 120 bp, synthetic construct
  source 1..120: mol_type = other DNA
ggactacaggcgcccgccgccacgcctggctaatttttctttttttttttttgtattcttagtagagacggggtttcaccgccctgctgccttttaaagcaatttaatacatgagttaaa

SEQ ID NO: 103471 - DNA, 120 bp, synthetic construct
  source 1..120: mol_type = other DNA
ctgcactccagcattctagcctgggcaacagagcaagaccctgtctcaaaaaaaaaaaaaaaaaaaagagagatgtagggagcattgtggacatctattcatggagggttaaacaataga

SEQ ID NO: 103472 - DNA, 120 bp, synthetic construct
  source 1..120: mol_type = other DNA
aaccttccccagaagcttttgtctacacttattggccagaaatttaacatataaccattcattgctgtcagaggtgggaaggagtccctgagaaagaaattattcttgttttccagcctc

SEQ ID NO: 103473 - DNA, 120 bp, synthetic construct
  source 1..120: mol_type = other DNA
tcaaactcctgagctcctgtgattctcctgcctcagcctcctgagtatagtcacatgccaccatgcccagctaagttatatataaacataagcacagagtaacatggtagcaaaaaataa

SEQ ID NO: 103474 - DNA, 120 bp, synthetic construct
  source 1..120: mol_type = other DNA
ggtagatttgagagtatgtttggaaatgactaatgcttagtgttgtttaccctgtcaccacattcctgcataaggctctttatctctgactggtcatgctcacatctgttttctgccagc

SEQ ID NO: 103475 - DNA, 120 bp, synthetic construct
  source 1..120: mol_type = other DNA
aacatagacctggtatagcttgactggggcctactttacagatttgtccttaagtactgaatataaatgtttctgcttcttattttccttagcatttttaaagaaagtcctggaagccaa

SEQ ID NO: 103476 - DNA, 120 bp, synthetic construct
  source 1..120: mol_type = other DNA
aaaaaaatttttctagcctcccagtctacactctcacttttcactaacccatttactgctttcttgcttgttctcccagcacaccacaaaaacaacttccatgcatacaccagtatcacc

SEQ ID NO: 103477 - DNA, 120 bp, synthetic construct
  source 1..120: mol_type = other DNA
gagttttagggaagctttttcctcagtcttaaaaagagacaaaaggaaacaatacccctctcctgtctctggttcatatttgatgagaatgtggcacctagtctttttgagaccagtggg

SEQ ID NO: 103478 - DNA, 120 bp, synthetic construct
  source 1..120: mol_type = other DNA
gccaggaagaacaactttttctttctgaaatgtactagaatctcagtgttgggccacattgcttttttttttctaaaagactaatcgtcttcctttcccacctaactcaaacatatccct

SEQ ID NO: 103479 - DNA, 120 bp, synthetic construct
  source 1..120: mol_type = other DNA
cagatttatcttcttaaaatgaagacctttgttgtagttgcatttgttcctcatatgcagtagaatgacccagcctctttggcttagaggtagtgcctcctttttacgacacttggagcg

SEQ ID NO: 103480 - DNA, 120 bp, synthetic construct
  source 1..120: mol_type = other DNA
gcatctttagtcccctaggatttgtgacggttttctgtcttttttcttttgaagactgttcattgcctctgttagtttaatgatcctctgagatgttattcacagtaaaatagcatgtga

SEQ ID NO: 103481 - DNA, 120 bp, synthetic construct
  source 1..120: mol_type = other DNA
gtcaagccagttttatttaattcaatacatggagtattaatgcgctgtatgaatgccgaaggtagtattggacgccacaatctttaggaaccatgcttctgagttttaaaatggtgacta

SEQ ID NO: 103482 - DNA, 120 bp, synthetic construct
  source 1..120: mol_type = other DNA
tacccgtgggcctgctatccattttaaattctaaaagcactttacagcttgctaatacatagcctcatctccaaccttgcattcctaagttccactctgcattccacaaatgggattaat

SEQ ID NO: 103483 - DNA, 120 bp, synthetic construct
  source 1..120: mol_type = other DNA
actactgtgtaggatacaagggatgctgatttcaccagtgcctttaagaaggacaaatcaaattaaaaagtcaaaatgactgaaggtgataatccagatggtggtaacaataatgactac

SEQ ID NO: 103484 - DNA, 120 bp, synthetic construct
  source 1..120: mol_type = other DNA
ctacttcccagacagctgctcctgcagtttgggcacatagtcgtcccactcagcctggtaacgctttctggccactggggccacgagcacgagctcgtacttttttttttttttttttga

SEQ ID NO: 103485 - DNA, 120 bp, synthetic construct
  source 1..120: mol_type = other DNA
tcatttataggattttaaaaatattattaaaggcttcacaaactgtcttgtttaatagccacaacattgggaggccgaggcaggcggattacctaaggacggagttcgagaccagcctgg

SEQ ID NO: 103486 - DNA, 120 bp, synthetic construct
  source 1..120: mol_type = other DNA
gacaatgtatcaaatagtaggtattcggtaaatgttccttctttactaaagatagagaaaccattttctgatgtacaaagggatgaagagctggcccaatatgaattttcccaaagaagt

SEQ ID NO: 103487 - DNA, 120 bp, synthetic construct
  source 1..120: mol_type = other DNA
aaattcagcattttgtagcagttaaatgtatagtcaggcagcttcaacgtcaactagagaagttgtggttttaaccccgagatagggctgattatgctggtgctatggcaacctattgca

SEQ ID NO: 103488 - DNA, 120 bp, synthetic construct
  source 1..120: mol_type = other DNA
ctgaaggacagacaagttcatgctaccatttttgttaggcataggcctgttcacttttcttcccatttttctgaaaaataagaatctaccccttttgtagtcattgtccagcaatttaca

SEQ ID NO: 103489 - DNA, 120 bp, synthetic construct
  source 1..120: mol_type = other DNA
catcagagctttaagaaaataccagtgcacagatcacgttaccccacaaacctactaaatcagattttccagcgctggagcccagaaatagtcacctttaatctaattcccagtcaggat

SEQ ID NO: 103490 - DNA, 120 bp, synthetic construct
  source 1..120: mol_type = other DNA
tgaaagtttaaatagtaccataaggcctagagtaagtaagaacagtcttttgctcccacgactctcccctcccttgatattttgtgatttttaaatgttatcttttattgtagtgctgtt

SEQ ID NO: 103491 - DNA, 120 bp, synthetic construct
  source 1..120: mol_type = other DNA
cagtaaactgttgccatcattattatatttactgataagctaatggagggtagaaaagactgtttcctgtggttctctgaaatcataatacctggcttgtcgctgcccagagtgcttact

SEQ ID NO: 103492 - DNA, 120 bp, synthetic construct
  source 1..120: mol_type = other DNA
tgtgtttatagaatttgagagaaagctcaatgcagttcttactttgagaaatagtgatgccttctctttattgtcacacacctacacatgtgccctcttaatttccattgctatgtcaca

SEQ ID NO: 103493 - DNA, 120 bp, synthetic construct
  source 1..120: mol_type = other DNA
tataaaggcattctccaccaaagtatttgttagtgttctgctaacgttgatgtaaaaatcattagatgactgggggggcggggtgtggggaatgtcctttagatgttacgtaggtgtttt

SEQ ID NO: 103494 - DNA, 120 bp, synthetic construct
  source 1..120: mol_type = other DNA
tgcccattattctgtcctctagctccagaaacctcttaacatctaaacaaaaggtctgtaaattttaataattgtgcttgatattagtgtagtttggttgactttcctgtcaaaatagta

SEQ ID NO: 103495 - DNA, 120 bp, synthetic construct
  source 1..120: mol_type = other DNA
tcagaacaacagaatataggggtctgtggaattagtggtgcaggtaacattaagatttctcttttctctgtcatcaaatttgctttctgatttctcctctgtattaactgatccaatggc

SEQ ID NO: 103496 - DNA, 120 bp, synthetic construct
  source 1..120: mol_type = other DNA
tacctcttttgcaaatcaacacaattctaagactgtaatttacaaggaaataagaacaaataaggagagcggaatgctgttaatgggaacataaacataacaatagtttacatgaaacag

SEQ ID NO: 103497 - DNA, 120 bp, synthetic construct
  source 1..120: mol_type = other DNA
ctcacttgaaaggatttacaaagtcttggtgattcttgagtgtttcataggtccttttcccccaacctttcttttggggtatactcttcctacgtaggacatcatctctgtctgttttgc

SEQ ID NO: 103498 - DNA, 120 bp, synthetic construct
  source 1..120: mol_type = other DNA
agacttgaggtacatataaaaatctaatatatgtttacattaatatgaatgaaatttgaaattttctaagagatttttgtttcttctttgcagggcaaagcccaacaccttcccccactg

SEQ ID NO: 103499 - DNA, 120 bp, synthetic construct
  source 1..120: mol_type = other DNA
ttacagcgtttagcatggcagtgatgttttataaataaataaaagtcattcttgcatagtagattgtgattggtttatgccagctactcaaatgcaacttagtatctccaacttttacag

SEQ ID NO: 103500 - DNA, 120 bp, synthetic construct
  source 1..120: mol_type = other DNA
ttggggagggtctgcctcccccagtccactgactcaaatgttaatctcccttggcaatacgctcacaggcacacccaggaacaatactttgcatccttcaatccaatcaagttgacactc

SEQ ID NO: 103501 - DNA, 120 bp, synthetic construct
  source 1..120: mol_type = other DNA
ttgcaattttcattcttaactctttcctgtcctatcatttctactccttttctagtttctctcattctctccctttttccatatttgtgccattgtcttttgcccaatcttgttgaactg

SEQ ID NO: 103502 - DNA, 120 bp, synthetic construct
  source 1..120: mol_type = other DNA
accattatgcttcatccttctgaactcaattgctttggataggcgagaagctgctttcaatttcatttccccatttttatctttagctaatgttctgtagcttgttttagatctgtgtct

SEQ ID NO: 103503 - DNA, 120 bp, synthetic construct
  source 1..120: mol_type = other DNA
cccgccacctggacagatgagaatttccctagttcagagattatcagttctactctccttggaaggtgtcttaaatgggagtcttcccatttctttgtttcactctagattctctttatc

SEQ ID NO: 103504 - DNA, 120 bp, synthetic construct
  source 1..120: mol_type = other DNA
tgcaaggatgaaggtgctgatgactaggtggaacatctcatgctattttattattttgtttattgcctgagtagtgtcacattgagttttccttttgaaggttctgtatttcacgtcaca

SEQ ID NO: 103505 - DNA, 120 bp, synthetic construct
  source 1..120: mol_type = other DNA
ctttttaaccattgttgtatatcctccaggctctcaacatatgattttgtgagtatgcaagagaccgtgtatgtaagcatggacatgtgagattgtttccacatgttttcaaacactaga

SEQ ID NO: 103506 - DNA, 120 bp, synthetic construct
  source 1..120: mol_type = other DNA
catgacgactacctgtatttaagaatggtgtgaggaaatctaaccacttattcaatgtgcagctattgctagttgatgaatttggaatttcagtcactcttaggaatatgaaaccacaga

SEQ ID NO: 103507 - DNA, 120 bp, synthetic construct
  source 1..120: mol_type = other DNA
gattaatcaacctaattaaaattgtaaatgccgtccataaccaccactgagagtacctacataacaagggaaacgaagttttcaagtgaggaggagggaaggtaggaagtttcgggaggt

SEQ ID NO: 103508 - DNA, 120 bp, synthetic construct
  source 1..120: mol_type = other DNA
gggaagcctgaattgtgaaagtagaattgtaaccttcagctggaaaggaagaaaaagaaaacctttgagctcatgctgtggcccaggcaggatcccattcagctctattttaagaaaatt

SEQ ID NO: 103509 - DNA, 120 bp, synthetic construct
  source 1..120: mol_type = other DNA
ataggccttaatgtcatatagctctgggatcaaatccaatttcttcaacttcgtagctgattacagggcaaattactaatactttctgcatatcagatttgctttctgtaaaaatggaca

SEQ ID NO: 103510 - DNA, 120 bp, synthetic construct
  source 1..120: mol_type = other DNA
tggtatctgtgaatcagcaagtaagctgatcagagcttgcaagcccacaattctcctcaaattcttccaacccaaaatcaagatgagcagagatctcttagcttacacaaagcacatgtt

SEQ ID NO: 103511 - DNA, 120 bp, synthetic construct
  source 1..120: mol_type = other DNA
gacaagggttgggaaactacctatattgggaactgtgcctacttgctgggcgtcgaattcaattttactgcaaacctcagcatcctgcaatatacctttgtaacaaacttgcacatataa

SEQ ID NO: 103512 - DNA, 120 bp, synthetic construct
  source 1..120: mol_type = other DNA
ttacagatttgtaaacacatactgttccttcctgcctctgtggccactcctgctcttcctctacaattggaattctgctccaacctcatcccccaaaccccatgtctatttttctatttc

SEQ ID NO: 103513 - DNA, 120 bp, synthetic construct
  source 1..120: mol_type = other DNA
actgtggattacttatataacaaggaaactaaattatttacagcaaagctaaatgttaatgagaatgtggaatgtggaaacaatacttgcacaaacaatgaggtgcataaccttacagaa

SEQ ID NO: 103514 - DNA, 120 bp, synthetic construct
  source 1..120: mol_type = other DNA
cactaccaaaatatatggtgctaaaaataataaagtaaataataaaagaaacaaatccctagagttattagacttttcccatagcaatctcaatccttgccaaattctatgtcattagca

SEQ ID NO: 103515 - DNA, 120 bp, synthetic construct
  source 1..120: mol_type = other DNA
ataattgagatagtatttttaaagtgtatttgaatttaatgaggtgaactctcccaccctttgacttaaagccatctgccaggccatagctggcatgacagacagatgtgctcaggtgtg

SEQ ID NO: 103516 - DNA, 120 bp, synthetic construct
  source 1..120: mol_type = other DNA
aaaccttgaacccgaacatgagtataagtgtgactcagaaatactctataataaccacaagtttactaacgcaagtaaaattattaaaacagattttgggagtgagtatgttacttgcat

SEQ ID NO: 103517 - DNA, 120 bp, synthetic construct
  source 1..120: mol_type = other DNA
aagtttattcctggttataatgctgttgttttcttaatcacattttcaggtttgttactaatgtacaaaagtacaattgatttttctgtattgatcttgcagtctgtcacattactgaat

SEQ ID NO: 103518 - DNA, 120 bp, synthetic construct
  source 1..120: mol_type = other DNA
aatgtgtagctttagcaaagatttcctagggcacaaaagcaagaaacataaaacttttttgatgaattggagtgcataaaaattgaatattcctgctctttggatgaggccactaaggaa

SEQ ID NO: 103519 - DNA, 120 bp, synthetic construct
  source 1..120: mol_type = other DNA
tggaagcaatgacaagtgctactcaatgactgctaaatttattggtgctatgaatgccagatttttagcacagcaaaatctacaaattccaggatttttaggtagtatctgggcaagaat

SEQ ID NO: 103520 - DNA, 120 bp, synthetic construct
  source 1..120: mol_type = other DNA
taacatcagtggagtatctcagagcagcctcaatgcctgggatagccctttctctattcttttatccataggttaaaataggaatgaagtgaacctcatagaattctgtcactctgtgct

SEQ ID NO: 103521 - DNA, 120 bp, synthetic construct
  source 1..120: mol_type = other DNA
agccagctctactctaaacagcgtgctccgcttttgttttctccttcatctcaaacatatacctgtctcctctcccatgttacctaaggcaaagagagttgataggattatagtatcgtt

SEQ ID NO: 103522 - DNA, 120 bp, synthetic construct
  source 1..120: mol_type = other DNA
gcaagtgacagtgaagcttcttggtaattggggaattggggaagagatcttttgtgctttattggatttaaaggattatttttcaaaagttactgaaagcaataggcacctttcaagacc

SEQ ID NO: 103523 - DNA, 120 bp, synthetic construct
  source 1..120: mol_type = other DNA
agtttggaggttacatatcagaaaaggttttctaaaaaagaatcattctgaaacatgcaactcaagacttacagtatacactgggggctgtgttttctcagaaacaaaagagatcgtctt

SEQ ID NO: 103524 - DNA, 120 bp, synthetic construct
  source 1..120: mol_type = other DNA
tatgtcacattatccatttaaggtttcctttcaatggcatttggctcttgccactagtataatctctccatagtttccaggcccaaagttagatctgcttctggggcacatgttaacctc

SEQ ID NO: 103525 - DNA, 120 bp, synthetic construct
  source 1..120: mol_type = other DNA
cccatgaacgttaccatttggaagttgaagctggaaatactctggttagaaatgagtcgcataagaattgcgatttccgtgtaaaagatcttcaatattcaacagactacacttttaagg

SEQ ID NO: 103526 - DNA, 120 bp, synthetic construct
  source 1..120: mol_type = other DNA
atttaccaaattgccctggtgtatcagtgtatgaaatgactgcttcttgagaggctcaccaacactgaatacgcctttctttttctttatttggtggttgaaatatggtattgatatctt

SEQ ID NO: 103527 - DNA, 120 bp, synthetic construct
  source 1..120: mol_type = other DNA
atgatagatgatgccatagttgtgatgccctggtgtgattagtttaaatgatgcaaaaccattgtcacattctaagagaaaaacccctgctctgtcattgtgtgttattctctcagagta

SEQ ID NO: 103528 - DNA, 120 bp, synthetic construct
  source 1..120: mol_type = other DNA
ctccctccacgctcttcccacttcctagaatatgcctctcccactcttcaaatcgtataagttactatggaaaaatataggtgtacatcatattaaaatacaaccttaacgttcaaagta

SEQ ID NO: 103529 - DNA, 120 bp, synthetic construct
  source 1..120: mol_type = other DNA
gtcaaggattcttactgctcttttgctcttttcattttccctgtatatgtaaattgttttcacttcatttgtattacattttatgagacacaggtgtttatgcattatgcctatatagta

SEQ ID NO: 103530 - DNA, 120 bp, synthetic construct
  source 1..120: mol_type = other DNA
tttcgtgtactattttagattatctattttattctgtctcttcagcatatgtttagcagaagtgggccttagatacaagtctgtcttgatttacttaatggaagctaatataagcactcc

SEQ ID NO: 103531 - DNA, 120 bp, synthetic construct
  source 1..120: mol_type = other DNA
tgcacacagcaatccagctacttttcttatgacactctcaaagacaactgagatatgagagaatgagaccacatgtgtaggtgtaggagctgcattccaaaaggaatcagtatctcttat

SEQ ID NO: 103532 - DNA, 120 bp, synthetic construct
  source 1..120: mol_type = other DNA
atttaaaaattatttctgtcttattttcctgaatccaattttactttctaattccatcctgattctctctctctctctctctctctctctttttttggtctgttcccaagttttcctccc

SEQ ID NO: 103533 - DNA, 120 bp, synthetic construct
  source 1..120: mol_type = other DNA
tctccagaattaccctactccttgttgtgtggtaaagtgtgaaaaagtggttcttctcacagtaggacaggaagataggtgtccaactattgcatatgtggacaattacattgtcctcct

SEQ ID NO: 103534 - DNA, 120 bp, synthetic construct
  source 1..120: mol_type = other DNA
aaggaacactttgggtcattttaggagcctattgcaataagaacttcttccctaaaaatgttcactgcaatccacctatatattcacattcatgtatcccatccatttttatatatgccg

SEQ ID NO: 103535 - DNA, 120 bp, synthetic construct
  source 1..120: mol_type = other DNA
gctgagtttggcagatgaccaaaagccaaaaatattttttttgtgaatagtgaataattagtacttactacttcccagccaccgtgctacgtgtttactgtgaatcaacacctttagcca

SEQ ID NO: 103536 - DNA, 120 bp, synthetic construct
  source 1..120: mol_type = other DNA
ttctaaggcactgatagcatttctggcatttctgattattgtgacatcaatagccctgcttgttgttctctacaaaatctatgatctacataagaaaagatcctggtaagagttgatttt

SEQ ID NO: 103537 - DNA, 120 bp, synthetic construct
  source 1..120: mol_type = other DNA
tttatttatttatttatatttattttaagacagagtctcattctgtctcccaggctgaagtgtggtggtgcaatctctgcttattgcagcctccgcctccctgttgaagcaattctcatg

SEQ ID NO: 103538 - DNA, 120 bp, synthetic construct
  source 1..120: mol_type = other DNA
ctcatgcttaagacaggaataatttcagaactcctttgtctgtgttaatctgtgttggaagtgtttccctctggtaatagcaggtaccaggtctctatgcagaaactttagggctgaatc

SEQ ID NO: 103539 - DNA, 120 bp, synthetic construct
  source 1..120: mol_type = other DNA
aacttgtttcaccatttagtgtaaacagatgatcaaattaagctgagtcatgggtataagggtattaatcatattgtcttatttcatttgcatgtttacagtatttcacaagttgaaaat

SEQ ID NO: 103540 - DNA, 120 bp, synthetic construct
  source 1..120: mol_type = other DNA
ttacaggatatctcatttactcaaaacggtcattggtaagggggaaattatttttcctgaatctgctgtgatccaagaaatcgttgtttctttcagagcatcccgcgggtgttcagcaag

SEQ ID NO: 103541 - DNA, 120 bp, synthetic construct
  source 1..120: mol_type = other DNA
tttcccagtgtcctcacctaccagaaataactatattttctattcaaatatatatggtaattatggtatcaggttacttatgtttccccaatggaacttagagctccctgaaagcatgtg

SEQ ID NO: 103542 - DNA, 120 bp, synthetic construct
  source 1..120: mol_type = other DNA
agcttttatttgtttacctcctaggtcccagggatgaaactgttgatgatttctggaggatgatttgggaacagaaagccacagttattgtcatggtcactcgatgtgaagaaggaaaca

SEQ ID NO: 103543 - DNA, 120 bp, synthetic construct
  source 1..120: mol_type = other DNA
ctggccgtcaatggaagagggcactcgggcttttggagatgttgttgtaaagatcaaccagcacaaaagatgtccagattacatcattcagaaattgaacattgtaaatgtgagtttgct

SEQ ID NO: 103544 - DNA, 120 bp, synthetic construct
  source 1..120: mol_type = other DNA
aaccatcaccatttccacccctgccatacccttccaatcctttggtaaccatcattctactctgtatatccaagagttcagttattttaaattttggctcccacaaataagtaacaacat

SEQ ID NO: 103545 - DNA, 120 bp, synthetic construct
  source 1..120: mol_type = other DNA
tacagaagctttctaacttgatgtaattctacttgttcatttttgctatggttgcctgtgcttgtggggtattgttgaataaaactttgcacaaaccaatgccctggagagtttccccaa

SEQ ID NO: 103546 - DNA, 120 bp, synthetic construct
  source 1..120: mol_type = other DNA
atgtgcaaacaagtataattggacttcttcctttccaatttggatgccttgtgtttctttctcttgtctgatggctctagctgggacttccagttgaacaacagtggtgaaagtgggcat

SEQ ID NO: 103547 - DNA, 120 bp, synthetic construct
  source 1..120: mol_type = other DNA
acagaccaccagagaaaatcaccttcacttaaaggaagacaggaagaaaagaaagaaggaagaggaggccacaaaacaaccataaaagacataacaaaatggcaggagtaagtctttatt

SEQ ID NO: 103548 - DNA, 120 bp, synthetic construct
  source 1..120: mol_type = other DNA
aaatggaaacacaacaaaccaaatcctgtgtgatacagtgaaagcagtactaagagaaaagtttgtaagagtaagcacctacattaaaaaagaaaaatttcaaataaacaacataatgat

SEQ ID NO: 103549 - DNA, 120 bp, synthetic construct
  source 1..120: mol_type = other DNA
tctggccaaacacttgtttgactaagccacaaaggcacctgctccatagatatgaggatatatttctagattgatgcctatctggctacattctgtagtctgggtttactggtgttaatt

SEQ ID NO: 103550 - DNA, 120 bp, synthetic construct
  source 1..120: mol_type = other DNA
gatcctcacttgctcctcaaactgagaaggagagtgaatgccttcagcaatttcttcagtggtcccattgtggtgcactgcaggtaggaaaaacgaacaaaaaaaaaaaacaacaacaaa

SEQ ID NO: 103551 - DNA, 120 bp, synthetic construct
  source 1..120: mol_type = other DNA
gcacttaaacaagtccctggcccatgctatgcatttggtgattgtaagtgatggtaattactgaaaatgtctgtatttgacccagcaaaatcacatatatgcatatacccaagagaagca

SEQ ID NO: 103552 - DNA, 120 bp, synthetic construct
  source 1..120: mol_type = other DNA
tatgacttggaggactctagattatcagttaactatctgtatttgttcttgaaattgtaggcccagtacatcttgatccatcaggctttggtggaatacaatcagtttggagaaacagaa

SEQ ID NO: 103553 - DNA, 120 bp, synthetic construct
  source 1..120: mol_type = other DNA
ggaggtggagcatgcaataatgaccaagtgactcaatcccccagaagacctgtacttataatggaagaactagcagacacagggtagtctcaaacagagtagtgttttattgttgttttc

SEQ ID NO: 103554 - DNA, 120 bp, synthetic construct
  source 1..120: mol_type = other DNA
agaggtgatgtaatatttggaatgaaacctacaaaggtggaatgatgaaagtggatgactgggaagtggagggaaagtcatgggaggtgaagaagctaagaaatgaagagactagagtct

SEQ ID NO: 103555 - DNA, 120 bp, synthetic construct
  source 1..120: mol_type = other DNA
gactacactcacaagagcacaaggtgttgtaacagtttccaaaacatctggtccttcatgcagctcatggtggtgttcaagtggcctaaaattcagtgatgatattttctttcactcaat

SEQ ID NO: 103556 - DNA, 120 bp, synthetic construct
  source 1..120: mol_type = other DNA
aagcagctctgaagaaggagacatagtctgttacatatatatctttagtgcatactagccctgtcaaaaggactaaatgcctgagcaatttaaagaaaaaaaatcagaggcaaaccgaaa

SEQ ID NO: 103557 - DNA, 120 bp, synthetic construct
  source 1..120: mol_type = other DNA
ccaaataaatcagatcagtgcatggttgacctagttaattttcataggagtccttatgaatgtagtttaaaatatggaattgatggtgatatggttaatcaaatcatttgaccaagttat

SEQ ID NO: 103558 - DNA, 120 bp, synthetic construct
  source 1..120: mol_type = other DNA
tgtttatacatactcagatacccaaattgtaggcaatgacaaatttgtatatttgtatggttagaaacttttcattcagataaactgaattattaggtgagtctgtgtcatatcccccca

SEQ ID NO: 103559 - DNA, 120 bp, synthetic construct
  source 1..120: mol_type = other DNA
agattagccaggatgcagcaatgtcagcgtcacagcaaataacagctacattttcacgctgttttcctcattttctcaagataaaagccaagatctttttgtgatatccagcaccctgga

SEQ ID NO: 103560 - DNA, 120 bp, synthetic construct
  source 1..120: mol_type = other DNA
gggggtgtcccagtcacctcgattgtgctcagcttcccttttcttacacaaggaaacaccacatatttattaaatgggtcgccagcacttaaatagattctggatttttataagtaggtt

SEQ ID NO: 103561 - DNA, 120 bp, synthetic construct
  source 1..120: mol_type = other DNA
caagcatcacaagagtacacctctactcattcactgcaggtgcgtgggatttggtagaatgtgctctcaaaatcataatgcttgacttctcggttcacatgttgtcttatctagttatcc

SEQ ID NO: 103562 - DNA, 120 bp, synthetic construct
  source 1..120: mol_type = other DNA
tcagcatttatgtggaaagaaagctgaggaagggaagtttacactgtaaaactatatatgtttcttagaatatgatttatgtacaataactaaagtgtcctgctgataacatattgttta

SEQ ID NO: 103563 - DNA, 120 bp, synthetic construct
  source 1..120: mol_type = other DNA
tgtgacagttcatgaagagcctttccctaaatgctcatgaatttcttaattttctttccttcactcctgtatcgatttgtgttgtgtaacaaaccacccccaaatttgggagcctaaaca

SEQ ID NO: 103564 - DNA, 120 bp, synthetic construct
  source 1..120: mol_type = other DNA
tttaggaatcaagaaacgcttctcgaagcagtgattcctgccctgattcttaaataatgtgtaggcattagacaggaggataagtacaaaacgtggcatcatgagcaaaggcatggaaat

SEQ ID NO: 103565 - DNA, 120 bp, synthetic construct
  source 1..120: mol_type = other DNA
cttctttgtaatcgttatgtgtgtatatgtatgtgtgtatgggtgtgtgtttgtgtgagagacagagaaagagagagaattctttcaagtgaatctaaaagcttttgcttttcctttgtt

SEQ ID NO: 103566 - DNA, 120 bp, synthetic construct
  source 1..120: mol_type = other DNA
catttgcaggacacttttacaggccccaattatccaatagtctaataattgtttaagatctagaaaaaaaaaatcaagaatagtggtatttttcatgaagtaataaaaactcgttttggt

SEQ ID NO: 103567 - DNA, 120 bp, synthetic construct; identical to SEQ ID NO: 32069
  source 1..120: mol_type = other DNA

SEQ ID NO: 103568 - DNA, 120 bp, synthetic construct; identical to SEQ ID NO: 32070
  source 1..120: mol_type = other DNA

SEQ ID NO: 103569 - DNA, 120 bp, synthetic construct
  source 1..120: mol_type = other DNA
cctttttttgttttccgtttgcttggtagatcttcctccaaccctttattctgagcctatgtgtgtctctccatacgagatgggtttcctgaatacagcacactgatgggtcttgactct

SEQ ID NO: 103570 - DNA, 120 bp, synthetic construct
  source 1..120: mol_type = other DNA
tagttcttgtgccatggttttcagctccatcaggtcatttaaggacttctctacactggttattctagttagccattcatctaatcttttttcaatgtttttaacttctttccgatggtt

SEQ ID NO: 103571 - DNA, 120 bp, synthetic construct
  source 1..120: mol_type = other DNA
aagttgcttatctgcttaaggagattttgagctgagatgatggggttttctagatatacaatcatgtcatctgcaaacagggacaatttgacttcctcttttcctaattgaatacccttt

SEQ ID NO: 103572 - DNA, 120 bp, synthetic construct
  source 1..120: mol_type = other DNA
catttgctgaggattgctttgcttccaactatgtgatcaattttggaataagtgcagtgtggtgctgaaaagaatgtatattctgttgatttggggtggagagttctgtagatgtctatt

SEQ ID NO: 103573 - DNA, 120 bp, synthetic construct
  source 1..120: mol_type = other DNA
gctggaaaccatcattctgagcaaactatcacaaggacagaaaaccatacagtgcatgttctctctcataggtgggaactgaaaaatgagaacacttggacacaggatggggaacatcac

SEQ ID NO: 103574 - DNA, 120 bp, synthetic construct
  source 1..120: mol_type = other DNA
agggtaatcaccctagcacctggacccatttagattaagtaagtttactgagactccagaggaaggcctcaggactcagaccttagctatagattaaaataagttaatcatgctgctata

SEQ ID NO: 103575 - DNA, 120 bp, synthetic construct; identical to SEQ ID NO: 32072
  source 1..120: mol_type = other DNA

SEQ ID NO: 103576 - DNA, 120 bp, synthetic construct
  source 1..120: mol_type = other DNA
ttccagcatataaacagaaccaatgacaaaagccttatgattatctcaatagatgcagaaaaggcctttgacaaaattcaacaacacttcatgctaaaaactctcaataaattaggtatt

SEQ ID NO: 103577 - DNA, 120 bp, synthetic construct
  source 1..120: mol_type = other DNA
atgtcccccttcctgtgtccatgtgatctcattgttcagttcccacctatgagtgagaatatgcggtgtttggttttttgttcttgcgatagtttactgagaatgattatttccaatttc

SEQ ID NO: 103578 - DNA, 120 bp, synthetic construct
  source 1..120: mol_type = other DNA
ggtttgtcaaagatcagatagttgtagatatgcggcgttatttctgagggctctgttctgttccattgatctatatctctgttttggtaccagtaccatgctgttttgcttactatagcc

SEQ ID NO: 103579 - DNA, 120 bp, synthetic construct
  source 1..120: mol_type = other DNA
agagtatgatgttccccttcctgtgtccatgtgttctcattgctcaattcccaccaatgagtgagaacacacggtgtttggttttgtgtccttgcgatagtttactgagaatgatgattt

SEQ ID NO: 103580 - DNA, 120 bp, synthetic construct
  source 1..120: mol_type = other DNA
gatcagatagttgtagatatgcggcgttatttttgagggctctgtgctgttccattgatctatatctctgttttggtaccagtaccatgctgttttggttactgtagccttgtagtatag

SEQ ID NO: 103581 - DNA, 120 bp, synthetic construct; identical to SEQ ID NO: 32075
  source 1..120: mol_type = other DNA

SEQ ID NO: 103582 - DNA, 120 bp, synthetic construct; identical to SEQ ID NO: 32076
  source 1..120: mol_type = other DNA

SEQ ID NO: 103583 - DNA, 120 bp, synthetic construct; identical to SEQ ID NO: 32077
  source 1..120: mol_type = other DNA

SEQ ID NO: 103584 - DNA, 120 bp, synthetic construct
  source 1..120: mol_type = other DNA
ttttcctatagaaaaaaattgattgtaacaacaagttaaaaataaaaaaaagaattaaaaattactggggaggagccaagatggccgaataggaacagctccggtctacagctcccagcg

SEQ ID NO: 103585 - DNA, 120 bp, synthetic construct
  source 1..120: mol_type = other DNA
aagaacaaagctggatggagaataactttgacgagctgagagaagaaggcttcagacgatcaaattactctgagctacgggaggacattcaaaccaaaggcaaagaagttgaaaactttg

SEQ ID NO: 103586 - DNA, 120 bp, synthetic construct
  source 1..120: mol_type = other DNA
cacataacaatattaactttaaatgtaaatggagtacatgctccaattaaaagacacagactggcaaattggataaagagtcaagacccatcagtgtgctgtattcaggaaacccatctc

SEQ ID NO: 103587 - DNA, 120 bp, synthetic construct
  source 1..120: mol_type = other DNA
tagactgctagcaagactaataaagaagaaaagagagaagaatcaaatagatgcaataaaaaatgataaaggggatatcgccaccgatcccacagaaagacaaactaccatcagagaata

SEQ ID NO: 103588 - DNA, 120 bp, synthetic construct
  source 1..120: mol_type = other DNA
gaagacatgattgtatatctagaaaaccccatcatcgtctcagcccaaaatctccttaagctgataagcgacttcagcagtctcaggatacaaaatcaatgtacaaaaatcacaagcatt

SEQ ID NO: 103589 - DNA, 120 bp, synthetic construct
  source 1..120: mol_type = other DNA
aaacaaatttacaagaaaaaaacaacccaattaaaaagtgggcgaaggacatgaacagacacttctcaaaagaagacatttatgcagccaaaaaacacatgaaaaaatgctcaccatcac

SEQ ID NO: 103590 - DNA, 120 bp, synthetic construct
  source 1..120: mol_type = other DNA
acttggaagaactgaaaagttgacacgtccctttatcatgtattcctatatgtacaagaggcatattcagtacaatgagtagttcagctatacagatactctctcatttagttttcagta

SEQ ID NO: 103591 - DNA, 120 bp, synthetic construct; identical to SEQ ID NO: 32073
  source 1..120: mol_type = other DNA

SEQ ID NO: 103592 - DNA, 120 bp, synthetic construct; identical to SEQ ID NO: 32074
  source 1..120: mol_type = other DNA

SEQ ID NO: 103593 - DNA, 120 bp, synthetic construct
  source 1..120: mol_type = other DNA
acatgaaaaaatgctcaccatcactggccatcagagaaatgcaaatcaaaaccacagtgagataccatctcacatcagttagaatggcgatcattaaaaagtcaggaaaaaacaggggct

SEQ ID NO: 103594 - DNA, 120 bp, synthetic construct
  source 1..120: mol_type = other DNA
ttcctcattgcttgttttggtcaggtttgtcaaagatcagatagttgtagatatgcagcattatttctgagggctctgttctgttccattgatctatatctctgttttggtaccagtacc

SEQ ID NO: 103595 - DNA, 120 bp, synthetic construct
  source 1..120: mol_type = other DNA
tgtagcgattcctcagggatctagaacttgaaataccatttgacccagccatcccattacggggtacatacccaaaggattataaatcatgctgctataaagacacatgcacacgtatgt

SEQ ID NO: 103596 - DNA, 120 bp, synthetic construct; identical to SEQ ID NO: 32078
  source 1..120: mol_type = other DNA

SEQ ID NO: 103597 - DNA, 120 bp, synthetic construct
  source 1..120: mol_type = other DNA
ccaaatgagtataaatcatgctgctataaagacacatgcacacgtatgtttattgcggcactattcacaatagcaaagacttggaaccaacccaaatgtccaacaatgatagactggatt

SEQ ID NO: 103598 - DNA, 120 bp, synthetic construct
  source 1..120: mol_type = other DNA
agaatagtataaacacctctacgcaaataaactagaaaatctagaagaaatggataaatttctcgacacatacactctcccaagactaaaccaggaaggagttgaatctctgaatagacc

SEQ ID NO: 103599 - DNA, 120 bp, synthetic construct
  source 1..120: mol_type = other DNA
tgtatatctagaaaaccccattgtctcagcccaaaatctccttaagctgataagcaacttcagcaaagtctcaggatacaaaatcaatgtacaaaaatcacaagcactcttatacaacaa

SEQ ID NO: 103600 - DNA, 120 bp, synthetic construct
  source 1..120: mol_type = other DNA
aaatcaattcaagatggattaaagacttgaatgttagacctaaaaccataaaaaccctagaagaaaacctaggcattaccattcaggacataggcatgggcaaggacttcatgtctaaaa

SEQ ID NO: 103601 - DNA, 120 bp, synthetic construct
  source 1..120: mol_type = other DNA
gatgacgagttagtgggtgcagcgcaccggcatggcacatgtatacatatgtaactaatctgcacattgtgcacatgtatcctaaaacttaaagtataataataataaataaaataaaat

SEQ ID NO: 103602 - DNA, 120 bp, synthetic construct; identical to SEQ ID NO: 32079
  source 1..120: mol_type = other DNA

SEQ ID NO: 103603 - DNA, 120 bp, synthetic construct; identical to SEQ ID NO: 32080
  source 1..120: mol_type = other DNA

SEQ ID NO: 103604 - DNA, 120 bp, synthetic construct; identical to SEQ ID NO: 32081
  source 1..120: mol_type = other DNA

SEQ ID NO: 103605 - DNA, 120 bp, synthetic construct
  source 1..120: mol_type = other DNA
cacctttggtaggctgaataattgcatcacaaagaagtccacatgataattctaagtacccatgaatatcttacaggtgcatgccaccatccccagctaattttttgtatttttaataga

SEQ ID NO: 103606 - DNA, 120 bp, synthetic construct
  source 1..120: mol_type = other DNA
ttctctaatgaccagtgatagtgagcattttttcatatgtttgtctgccgcatcagtgtcttcttttgagaagtgtctgttcatatccttcgcccactttttgatgaggttgttgttttc

SEQ ID NO: 103607 - DNA, 120 bp, synthetic construct
  source 1..120: mol_type = other DNA
tgattcttcctatccgtgagcatggaatgttcttccatttgtgtcctctcttgtttcattgaacagtggtttgtagttctccttgaagaggtccttcacattccttgttaagttggactc

SEQ ID NO: 103608 - DNA, 120 bp, synthetic construct
  source 1..120: mol_type = other DNA
atgagttaggaaggagtccctctttttgtattgtttgcaatagtttcagaaggaatggtaccaattcctctttgtacctctggtagaattcgtctggtcctggactttttttggttgcta

SEQ ID NO: 103609 - DNA, 120 bp, synthetic construct
  source 1..120: mol_type = other DNA
tgggtggagagttctgtagatgtgtattattaggtctgcttggtccagagctgtgttcaagtcctgaatgtccttgctaatgttctatctcattgatctgtctaatattgacagtggggt

SEQ ID NO: 103610 - DNA, 120 bp, synthetic construct; identical to SEQ ID NO: 32082
  source 1..120: mol_type = other DNA

SEQ ID NO: 103611 - DNA, 120 bp, synthetic construct
  source 1..120: mol_type = other DNA
ggactgtaaactagttcaaccattgtggaagacagtgtggtgattccttagggatctagagctagaaataccatttgacccagccatccattactgggtatatacccaaaggactataaa

SEQ ID NO: 103612 - DNA, 120 bp, synthetic construct
  source 1..120: mol_type = other DNA
tgaggagcccctctgcccagccacccagtctgggaagtgaggagcgtctctgcccggccgccatcccgtctaagtgaggagggtctctgcccagccgcccatcgtctgagatgtggggag

SEQ ID NO: 103613 - DNA, 120 bp, synthetic construct; identical to SEQ ID NO: 32083
  source 1..120: mol_type = other DNA

SEQ ID NO: 103614 - DNA, 120 bp, synthetic construct; identical to SEQ ID NO: 32084
  source 1..120: mol_type = other DNA

SEQ ID NO: 103615 - DNA, 120 bp, synthetic construct
  source 1..120: mol_type = other DNA
tataaatagcaattaaggtaaaattttcacaccaataaacttataagaaaaaaagacttaaaaccttcttggccgggcgcggtggctcacgcctgtaatcccagcactttgggaggccga

SEQ ID NO: 103616 - DNA, 120 bp, synthetic construct
  source 1..120: mol_type = other DNA
acccgcctaggcctcccaaagtgctgagattacaggtgggaaccaccacacctggctaccatttctttaaaaactttttagacattctatagttgtgtaatggcatttcattttacgtta

SEQ ID NO: 103617 - DNA, 120 bp, synthetic construct; identical to SEQ ID NO: 32086
  source 1..120: mol_type = other DNA

SEQ ID NO: 103618 - DNA, 120 bp, synthetic construct
  source 1..120: mol_type = other DNA
tttaacaccccactgtcaatattagatcaatgacacagaatattagcaaggacattcaggacttgaagtcagctctggactaagcagacctaatagacatctacagaactctccacccca

SEQ ID NO: 103619 - DNA, 120 bp, synthetic construct
  source 1..120: mol_type = other DNA
tcagggatattggcctggaattttcttttttgttgtgtctctgccaggttttggtatcaggatgatgctggcctcataaaatgagttaggaaggagtccctctttttgtattgtttgcaa

SEQ ID NO: 103620 - DNA, 120 bp, synthetic construct
  source 1..120: mol_type = other DNA
tctttgacaaacctgagggaaaacaagaatggggaaaggctcctctatttaataaatggtgttgggaaaactggctggccatatgcagaaaactgagactggatcccttccttatacaaa

SEQ ID NO: 103621 - DNA, 120 bp, synthetic construct; identical to SEQ ID NO: 32066
  source 1..120: mol_type = other DNA

SEQ ID NO: 103622 - DNA, 120 bp, synthetic construct; identical to SEQ ID NO: 32067
  source 1..120: mol_type = other DNA

SEQ ID NO: 103623 - DNA, 120 bp, synthetic construct; identical to SEQ ID NO: 32068
  source 1..120: mol_type = other DNA

SEQ ID NO: 103624 - DNA, 120 bp, synthetic construct
  source 1..120: mol_type = other DNA
cattgctttttttggtcaggtttgtcaaagatcagatggttgtagatgtgtggcattatttctgaggcctctgttctggtccgttggtctatatctctgttttggtaccagttggttact

SEQ ID NO: 103625 - DNA, 120 bp, synthetic construct
  source 1..120: mol_type = other DNA
caatacctagtttattgagagtttttagcatgaagttgtgttgaattttatcaaaggccttttctgcatctatggagataatcatgtggttttggtcattggctctgtttatgtgatgga

SEQ ID NO: 103626 - DNA, 120 bp, synthetic construct
  source 1..120: mol_type = other DNA
ataatcctttgggtatatacccagtaatgggatggctgggtcaaatggtatttctagttctagatcccggaggaatcgccacactgtcttccacaatggttgaactagtttacagtccca

SEQ ID NO: 103627 - DNA, 120 bp, synthetic construct
  source 1..120: mol_type = other DNA
ctcctaaattcagttccaacttgaactaccgaaatcaagccctgcagacaccaggtgtagctggtacctacattccccttcccagctttatagaggtgtaattgacaaatactaattatg

SEQ ID NO: 103628 - DNA, 120 bp, synthetic construct; identical to SEQ ID NO: 11326
  source 1..120: mol_type = other DNA

SEQ ID NO: 103629 - DNA, 120 bp, synthetic construct; identical to SEQ ID NO: 11327
  source 1..120: mol_type = other DNA

SEQ ID NO: 103630 - DNA, 120 bp, synthetic construct
  source 1..120: mol_type = other DNA
cttaaaactattgtggaagttagtgtggtgattccttaaggatctagaactagaaataccatttgacccagccatcccattactgggtatatacccaaaggattataaatcatgctgcta

SEQ ID NO: 103631 - DNA, 120 bp, synthetic construct
  source 1..120: mol_type = other DNA
ctgctggctggctcgctccccgccgcccctcgccgcctccctccctctccaccgcaccttagccgcagcccgccccccccacccagcgcaaagtttcccgtttgcgttcttgctccccct

SEQ ID NO: 103632 - DNA, 120 bp, synthetic construct; identical to SEQ ID NO: 7523
  source 1..120: mol_type = other DNA

SEQ ID NO: 103633 - DNA, 120 bp, synthetic construct; identical to SEQ ID NO: 7524
  source 1..120: mol_type = other DNA

SEQ ID NO: 103634 - DNA, 120 bp, synthetic construct; identical to SEQ ID NO: 24372
  source 1..120: mol_type = other DNA

SEQ ID NO: 103635 - DNA, 120 bp, synthetic construct
  source 1..120: mol_type = other DNA
agaggcgcccctcacctcccggactgggcggctggatgggcggggggggctgatccccccacctccctcccggacgaggtggctgctgggcggagatgctcctcacttcccagacggggt

SEQ ID NO: 103636 - DNA, 120 bp, synthetic construct
  source 1..120: mol_type = other DNA
cctgcaatcctagcaccttgggaggccaaggcaggaggattcttgattggcccaggagtttgagaccagcctgtgtgacatggtgagactgtctctgcaaaatataaaaaattagctggg

SEQ ID NO: 103637 - DNA, 120 bp, synthetic construct
  source 1..120: mol_type = other DNA
ctgcccccaagagctagccactgtcggtgttttttttttaatttcttttcctatttgtacatatgcacattaattcacgtgaggactcgtgtatgtgcagtcttgctatcctacttcgtt

SEQ ID NO: 103638 - DNA, 120 bp, synthetic construct; identical to SEQ ID NO: 24373
  source 1..120: mol_type = other DNA

SEQ ID NO: 103639 - DNA, 120 bp, synthetic construct; identical to SEQ ID NO: 20041
  source 1..120: mol_type = other DNA

SEQ ID NO: 103640 - DNA, 120 bp, synthetic construct; identical to SEQ ID NO: 20042
  source 1..120: mol_type = other DNA

SEQ ID NO: 103641 - DNA, 120 bp, synthetic construct
  source 1..120: mol_type = other DNA
gaaggaggagggactgggggtctggacccctgagtctgagggaagaggggctgggggtctggactcctgagtctgagggaggaggggttgggggcctggactcttggtttgagggaggaa

SEQ ID NO: 103642 - DNA, 120 bp, synthetic construct; identical to SEQ ID NO: 11887
  source 1..120: mol_type = other DNA

SEQ ID NO: 103643 - DNA, 120 bp, synthetic construct; identical to SEQ ID NO: 11888
  source 1..120: mol_type = other DNA

SEQ ID NO: 103644 - DNA, 120 bp, synthetic construct; identical to SEQ ID NO: 11889
  source 1..120: mol_type = other DNA

SEQ ID NO: 103645 - DNA, 120 bp, synthetic construct; identical to SEQ ID NO: 11890
  source 1..120: mol_type = other DNA

SEQ ID NO: 103646 - DNA, 120 bp, synthetic construct; identical to SEQ ID NO: 28292
  source 1..120: mol_type = other DNA

SEQ ID NO: 103647 - DNA, 120 bp, synthetic construct; identical to SEQ ID NO: 28293
  source 1..120: mol_type = other DNA

SEQ ID NO: 103648 - DNA, 120 bp, synthetic construct; identical to SEQ ID NO: 28294
  source 1..120: mol_type = other DNA

SEQ ID NO: 103649 - DNA, 120 bp, synthetic construct; identical to SEQ ID NO: 28295
  source 1..120: mol_type = other DNA

SEQ ID NO: 103650 - DNA, 120 bp, synthetic construct; identical to SEQ ID NO: 28296
  source 1..120: mol_type = other DNA

SEQ ID NO: 103651 - DNA, 120 bp, synthetic construct
  source 1..120: mol_type = other DNA
gctagaaaccatcattctgactatcgcaaggatagaaaaccaaacactgcatgttctcactcataggtaggaattgaacaatgagaacacttggacacagggtggggaacagcacacact

SEQ ID NO: 103652 - DNA, 120 bp, synthetic construct; identical to SEQ ID NO: 28298
  source 1..120: mol_type = other DNA

SEQ ID NO: 103653 - DNA, 120 bp, synthetic construct
  source 1..120: mol_type = other DNA
agacggaaagttaacaaggatacccaggaattgaactcagctctgcactaggcagacctaacagacatctacagatctctccaccccaaatcaacagaatatacatttttttcagcacca

SEQ ID NO: 103654 - DNA, 120 bp, synthetic construct
  source 1..120: mol_type = other DNA
ataaactagaaaatctagaagaaacgtataaattccttgacacacactctccaaagactaaaacaggaagaagttgactctctgaatagaccaataacaggctctgaaattgtggcaata

SEQ ID NO: 103655 - DNA, 120 bp, synthetic construct
  source 1..120: mol_type = other DNA
gacgacatgattgtatacctagaaaaccccactgtctcagcccaaaatctcctcaagctgataagcaacttcagcgaagtctcaggatacaaaatcaatgtgcaaaaatcacaagcattc

SEQ ID NO: 103656 - DNA, 120 bp, synthetic construct
  source 1..120: mol_type = other DNA
aaacccaaaattgacaaatgggatctaattaaactaaagagcctctgcacagcaaaagaaactaccatcagagtgaacaggcaacctacaaaatgggagaaaattttcgcaacctactca

SEQ ID NO: 103657 - DNA, 120 bp, synthetic construct; identical to SEQ ID NO: 28299
  source 1..120: mol_type = other DNA

SEQ ID NO: 103658 - DNA, 120 bp, synthetic construct; identical to SEQ ID NO: 28300
  source 1..120: mol_type = other DNA

SEQ ID NO: 103659 - DNA, 120 bp, synthetic construct; identical to SEQ ID NO: 18779
  source 1..120: mol_type = other DNA

SEQ ID NO: 103660 - DNA, 120 bp, synthetic construct; identical to SEQ ID NO: 18780
  source 1..120: mol_type = other DNA

SEQ ID NO: 103661 - DNA, 120 bp, synthetic construct
  source 1..120: mol_type = other DNA
caatatttccttcttatccatctggacaagtgactgtaaacacatatttatagtcagcattgaaaccctttctagaaggaggagccaagatggccgaataggaacagctccggtctacag

SEQ ID NO: 103662 - DNA, 120 bp, synthetic construct
  source 1..120: mol_type = other DNA
aactctaaaacgcagagcgcctctcctcctccaaaggaacgcagttcctcaccagcaacggaacaaagctggatggagaatgactttgacgagctgagagaagaaggcttcagacgatca

SEQ ID NO: 103663 - DNA, 120 bp, synthetic construct
  source 1..120: mol_type = other DNA
aatgtaaagaccattgagactaggaagaaactgcatcaactaatgagcaaaatcaccagctaacatcataatgacaggatcaaattcacacataacaatattaactttaaatataaatgg

SEQ ID NO: 103664 - DNA, 120 bp, synthetic construct
  source 1..120: mol_type = other DNA
gaatccaggagcttgttttttgaaaggttcaacaaaattgatagaccgctagcaagactaataaagaaaaaaagagagaagaatcaaatagacacaataaaaaatgataaaggggatatc

SEQ ID NO: 103665 - DNA, 120 bp, synthetic construct
  source 1..120: mol_type = other DNA
atcacaatcattcttatacaccaacaacagacaaacagagagccaaatcatgagtgaactcccattcacaattgcttcaaagagaataaaatacctaggaatccaacttacaagggatgt

SEQ ID NO: 103666 - DNA, 120 bp, synthetic construct
  source 1..120: mol_type = other DNA
aagtgggcgaaggacatgaacagacacttctcaaaagaagacatttatgcagccaaaaaacacatgaaaaaatgctcatcatcactggccatcagagaaatgcaaatcaaaaccactatg

SEQ ID NO: 103667 - DNA, 120 bp, synthetic construct; identical to SEQ ID NO: 18783
  source 1..120: mol_type = other DNA

SEQ ID NO: 103668 - DNA, 120 bp, synthetic construct; identical to SEQ ID NO: 18784
  source 1..120: mol_type = other DNA

SEQ ID NO: 103669 - DNA, 120 bp, synthetic construct
  source 1..120: mol_type = other DNA
atttatagtcctttgggtatatacccagtaatgggatggctgggtcaaatggtatttctagttctagatccctgaggaatcgccacactgacttccacaatggttgaactagttgacagt

SEQ ID NO: 103670 - DNA, 120 bp, synthetic construct
  source 1..120: mol_type = other DNA
tttttggttccatatgaatttaaagtagttttttccaattctgtgacgaaagtcattggtagcttgatggggatggcattgaatctgtaaattaccttgggcagtatggccattttcacg

SEQ ID NO: 103671 - DNA, 120 bp, synthetic construct
  source 1..120: mol_type = other DNA
tggatttggtttgccagtattttattgaggatttttgcatcaatgttcatcaaggatattggtctaaaattctcttttttggttgtgtctctgcccggctttggtatcagaatgatgctg

SEQ ID NO: 103672 - DNA, 120 bp, synthetic construct
  source 1..120: mol_type = other DNA
ctgtagatgtctattaggtccacttggtgcagagatgagttcaattcctgggtatccttgttgactttctgtctcgttgatctgtctaatgttgacagtggggtgttaaagtctcccatt

SEQ ID NO: 103673 - DNA, 120 bp, synthetic construct
  source 1..120: mol_type = other DNA
ggtgaatctgacaattatgtgtcttggagttgctcttctcgaggagtatctttgtggcgttctctgtatttcctgaatctgaacgttggcctgccttgctagactggggaagttctcctg

SEQ ID NO: 103674 - DNA, 120 bp, synthetic construct
  source 1..120: mol_type = other DNA
agcagcctggaagctcgaactgggtggagcccaccacagctctaggaggcctgcctgcctctgtaggctccacctctgggggcagggcacagacaaacaaaaagacagcagtaacctctg

SEQ ID NO: 103675 - DNA, 120 bp, synthetic construct; identical to SEQ ID NO: 18778
  source 1..120: mol_type = other DNA

SEQ ID NO: 103676 - DNA, 120 bp, synthetic construct
  source 1..120: mol_type = other DNA
ctcaaacaaatttacaaggaaaaaacaaacaaccccatctaaaaatgggcgaaggacatggacacactcttctcaaaagaagacatttatgcagctaaaaaacacatgaaaaaatgctca

SEQ ID NO: 103677 - DNA, 120 bp, synthetic construct; identical to SEQ ID NO: 18781
  source 1..120: mol_type = other DNA

SEQ ID NO: 103678 - DNA, 120 bp, synthetic construct
  source 1..120: mol_type = other DNA
agggtgatgggggaggggtggtgtccttggcaattcaagactgtttttcccacctcttcagtgcctctttcagagataagttaaaaccagttactgtgtgtgctcacctgatttttggtt

SEQ ID NO: 103679 - DNA, 120 bp, synthetic construct; identical to SEQ ID NO: 30757
  source 1..120: mol_type = other DNA

SEQ ID NO: 103680 - DNA, 120 bp, synthetic construct; identical to SEQ ID NO: 30758
  source 1..120: mol_type = other DNA

SEQ ID NO: 103681 - DNA, 120 bp, synthetic construct; identical to SEQ ID NO: 30759
  source 1..120: mol_type = other DNA

SEQ ID NO: 103682 - DNA, 120 bp, synthetic construct; identical to SEQ ID NO: 30760
  source 1..120: mol_type = other DNA

SEQ ID NO: 103683 - DNA, 120 bp, synthetic construct; identical to SEQ ID NO: 30761
  source 1..120: mol_type = other DNA

SEQ ID NO: 103684 - DNA, 120 bp, synthetic construct; identical to SEQ ID NO: 30762
  source 1..120: mol_type = other DNA

SEQ ID NO: 103685 - DNA, 120 bp, synthetic construct; identical to SEQ ID NO: 30763
  source 1..120: mol_type = other DNA

SEQ ID NO: 103686 - DNA, 120 bp, synthetic construct; identical to SEQ ID NO: 30764
  source 1..120: mol_type = other DNA

SEQ ID NO: 103687 - DNA, 120 bp, synthetic construct; identical to SEQ ID NO: 30765
  source 1..120: mol_type = other DNA

SEQ ID NO: 103688 - DNA, 120 bp, synthetic construct; identical to SEQ ID NO: 30766
  source 1..120: mol_type = other DNA

SEQ ID NO: 103689 - DNA, 120 bp, synthetic construct; identical to SEQ ID NO: 30569
  source 1..120: mol_type = other DNA

SEQ ID NO: 103690 - DNA, 120 bp, synthetic construct; identical to SEQ ID NO: 30570
  source 1..120: mol_type = other DNA

SEQ ID NO: 103691 - DNA, 120 bp, synthetic construct; identical to SEQ ID NO: 30571
  source 1..120: mol_type = other DNA

SEQ ID NO: 103692 - DNA, 120 bp, synthetic construct; identical to SEQ ID NO: 30572
  source 1..120: mol_type = other DNA

SEQ ID NO: 103693 - DNA, 120 bp, synthetic construct; identical to SEQ ID NO: 30573
  source 1..120: mol_type = other DNA

SEQ ID NO: 103694 - DNA, 120 bp, synthetic construct
  source 1..120: mol_type = other DNA
ttctgcctcagctgggattacaggtatgcaccaccatgcctggctagtttctgtgtttttagtagagatggggtttcaccatattggccaggctggtcttaaacttctgaactcaagtga

SEQ ID NO: 103695 - DNA, 120 bp, synthetic construct
  source 1..120: mol_type = other DNA
tacagaaccctgagccaattcaacctcttttctttatgaattacccagcctcaggtatttctgtatagcagtgtgacaacagcctaacacacctgtctaatgaacccgggtctaattaac

SEQ ID NO: 103696 - DNA, 120 bp, synthetic construct
  source 1..120: mol_type = other DNA
aactcggtgggtcggacccatccagcgtgcactgaactcggtgggtcggacccattcgctgtgcactgaactcggtgggtcagacccatccagcgtgcactgaactcggtgggttggacc

SEQ ID NO: 103697 - DNA, 120 bp, synthetic construct
  source 1..120: mol_type = other DNA
gggtcggacccatccagtgtgcactgaactcggtgggttggacccatccagcgtgcactgaactcggtgggtcggacccattcactgtgcactgaactcggtggacgcgtaaatggctct

SEQ ID NO: 103698 - DNA, 120 bp, synthetic construct
  source 1..120: mol_type = other DNA
tgaactcggtgggttggacccattcactgtgcactgaactcggtgggtcggacccatccagcgtgcactgaacttggtgggtcggacccattcactgtgcactgaactcagtgggtcaga

SEQ ID NO: 103699 - DNA, 120 bp, synthetic construct; identical to SEQ ID NO: 30574
  source 1..120: mol_type = other DNA

SEQ ID NO: 103700 - DNA, 120 bp, synthetic construct; identical to SEQ ID NO: 30575
  source 1..120: mol_type = other DNA

SEQ ID NO: 103701 - DNA, 120 bp, synthetic construct; identical to SEQ ID NO: 30576
  source 1..120: mol_type = other DNA

SEQ ID NO: 103702 - DNA, 120 bp, synthetic construct; identical to SEQ ID NO: 30577
  source 1..120: mol_type = other DNA

SEQ ID NO: 103703 - DNA, 120 bp, synthetic construct
  source 1..120: mol_type = other DNA
acacacatacgccacacacacacaccacacacatcacacatatacacacacatacgccacacacacacaccacacacatcacatatacacacacatatgccacacacacaccacacacat

SEQ ID NO: 103704 - DNA, 120 bp, synthetic construct; identical to SEQ ID NO: 30578
  source 1..120: mol_type = other DNA

SEQ ID NO: 103705 - DNA, 120 bp, synthetic construct; identical to SEQ ID NO: 30579
  source 1..120: mol_type = other DNA

SEQ ID NO: 103706 - DNA, 120 bp, synthetic construct; identical to SEQ ID NO: 30580
  source 1..120: mol_type = other DNA

SEQ ID NO: 103707 - DNA, 120 bp, synthetic construct; identical to SEQ ID NO: 30581
  source 1..120: mol_type = other DNA

SEQ ID NO: 103708 - DNA, 120 bp, synthetic construct; identical to SEQ ID NO: 30582
  source 1..120: mol_type = other DNA

SEQ ID NO: 103709 - DNA, 120 bp, synthetic construct; identical to SEQ ID NO: 30583
  source 1..120: mol_type = other DNA

SEQ ID NO: 103710 - DNA, 120 bp, synthetic construct
  source 1..120: mol_type = other DNA
tctacccatgcatactgggtcttagtagagccctcaccatctacctatgcatactggatcttggcagagccctcaccgtctacccatgcatactgggtcttagcagagccctcaccgtct

SEQ ID NO: 103711 - DNA, 120 bp, synthetic construct; identical to SEQ ID NO: 30584
  source 1..120: mol_type = other DNA

SEQ ID NO: 103712 - DNA, 120 bp, synthetic construct; identical to SEQ ID NO: 30585
  source 1..120: mol_type = other DNA

SEQ ID NO: 103713 - DNA, 120 bp, synthetic construct; identical to SEQ ID NO: 30586
  source 1..120: mol_type = other DNA

SEQ ID NO: 103714 - DNA, 120 bp, synthetic construct; identical to SEQ ID NO: 30587
  source 1..120: mol_type = other DNA

SEQ ID NO: 103715 - DNA, 120 bp, synthetic construct; identical to SEQ ID NO: 30588
  source 1..120: mol_type = other DNA

SEQ ID NO: 103716 - DNA, 120 bp, synthetic construct; identical to SEQ ID NO: 30589
  source 1..120: mol_type = other DNA

SEQ ID NO: 103717 - DNA, 120 bp, synthetic construct; identical to SEQ ID NO: 30590
  source 1..120: mol_type = other DNA

SEQ ID NO: 103718 - DNA, 120 bp, synthetic construct; identical to SEQ ID NO: 30591
  source 1..120: mol_type = other DNA

SEQ ID NO: 103719 - DNA, 120 bp, synthetic construct; identical to SEQ ID NO: 30592
  source 1..120: mol_type = other DNA

SEQ ID NO: 103720 - DNA, 120 bp, synthetic construct; identical to SEQ ID NO: 30593
  source 1..120: mol_type = other DNA

SEQ ID NO: 103721 - DNA, 120 bp, synthetic construct; identical to SEQ ID NO: 30594
  source 1..120: mol_type = other DNA

SEQ ID NO: 103722 - DNA, 120 bp, synthetic construct
  source 1..120: mol_type = other DNA
cacgcccagcacagttacccttttccaccccacgcgcccagcacagttacccttttccgccccatgcgcccagcacagttacccttttccgccccatgcgcccagcacagttaccctttt

SEQ ID NO: 103723 - DNA, 120 bp, synthetic construct
  source 1..120: mol_type = other DNA
gcacagttactcttttccgtcccatgcgcccagcacagttactctttgccgtcccatgcgcccagcacagttactctttgccgtcccatgcgcccagcacagttaccctttcccgtccca

SEQ ID NO: 103724 - DNA, 120 bp, synthetic construct; identical to SEQ ID NO: 30595
  source 1..120: mol_type = other DNA

SEQ ID NO: 103725 - DNA, 120 bp, synthetic construct
  source 1..120: mol_type = other DNA
ctatacaccccacagtcttcacggggccctgagtatggagatcacgggactgccctgcacccacagtcctcagcagtttctagagcagaagatgcccattaaaggcagatctcttccgtt

SEQ ID NO: 103726 - DNA, 120 bp, synthetic construct
  source 1..120: mol_type = other DNA
gtgattctgaggcctgcgtccctgagctttgggctgtccgggtgattctgaggcctgcgtccctgagctgtggggtgtccgcgtgattctgaggcctgcgtccctgagctgtggggtgtg

SEQ ID NO: 103727 - DNA, 120 bp, synthetic construct
  source 1..120: mol_type = other DNA
tccgggtgattctgaggcctgcgtccctgagctgcggggtgtcagggtgattctgaggcctgtgtccctgagctgtgagctgcccgggtgattctgaggcctgcgtccctgagctgcggg

SEQ ID NO: 103728 - DNA, 120 bp, synthetic construct
  source 1..120: mol_type = other DNA
gagctgcggggtgtgtgggtgattctgaggcctgcgtccctcagctgtggggtgcctgggtgattttgaggcctgcgtccctgagctgtgggctgttgaggtgattctgaggcctgtgtc

SEQ ID NO: 103729 - DNA, 120 bp, synthetic construct
  source 1..120: mol_type = other DNA
ttgacttcctcttttcctaattaattgaataccctttatttccttctcctgcctaattgccctggccaagcattcttatacaccaacaacagacaaacagagagccaaatcatgagtgaa

SEQ ID NO: 103730 - DNA, 120 bp, synthetic construct
  source 1..120: mol_type = other DNA
ggagaaaatttttgcaacctactcatctgacaaagggctaatatccagaatctacaatgaactcaaacaaatttacaagaaaaaaaccccatcaaaaagtgggcgaagaacatgaacaga

SEQ ID NO: 103731 - DNA, 120 bp, synthetic construct
  source 1..120: mol_type = other DNA
cacatgtaccctaaaacttaaagtataataataaaaaaaaaagagaaaaaagaaaaaacttttcagagccaaaggagagaggtgggagcatggtggccccaggcaccgcatgcagggagg

SEQ ID NO: 103732 - DNA, 120 bp, synthetic construct; identical to SEQ ID NO: 30600
  source 1..120: mol_type = other DNA

SEQ ID NO: 103733 - DNA, 120 bp, synthetic construct; identical to SEQ ID NO: 30601
  source 1..120: mol_type = other DNA

SEQ ID NO: 103734 - DNA, 120 bp, synthetic construct
  source 1..120: mol_type = other DNA
atatggtatgtgtgtggtgtgtgtgtgatgtgtgtagtatgtggtatgtttgtgtgtgtagtatatgtggtgtgatgtgtatgtggtgtgtgtagtatgtgtgcaggtatgtgtgtggta

SEQ ID NO: 103735 - DNA, 120 bp, synthetic construct; identical to SEQ ID NO: 30602
  source 1..120: mol_type = other DNA

SEQ ID NO: 103736 - DNA, 120 bp, synthetic construct; identical to SEQ ID NO: 30603
  source 1..120: mol_type = other DNA

SEQ ID NO: 103737 - DNA, 120 bp, synthetic construct; identical to SEQ ID NO: 30604
  source 1..120: mol_type = other DNA

SEQ ID NO: 103738 - DNA, 120 bp, synthetic construct; identical to SEQ ID NO: 30605
  source 1..120: mol_type = other DNA

SEQ ID NO: 103739 - DNA, 120 bp, synthetic construct; identical to SEQ ID NO: 30609
  source 1..120: mol_type = other DNA

SEQ ID NO: 103740 - DNA, 120 bp, synthetic construct; identical to SEQ ID NO: 30610
  source 1..120: mol_type = other DNA

SEQ ID NO: 103741 - DNA, 120 bp, synthetic construct; identical to SEQ ID NO: 30611
  source 1..120: mol_type = other DNA

SEQ ID NO: 103742 - DNA, 120 bp, synthetic construct; identical to SEQ ID NO: 30606
  source 1..120: mol_type = other DNA

SEQ ID NO: 103743 - DNA, 120 bp, synthetic construct; identical to SEQ ID NO: 30607
  source 1..120: mol_type = other DNA

SEQ ID NO: 103744 - DNA, 120 bp, synthetic construct; identical to SEQ ID NO: 30608
  source 1..120: mol_type = other DNA

SEQ ID NO: 103745 - DNA, 120 bp, synthetic construct; identical to SEQ ID NO: 30612
  source 1..120: mol_type = other DNA

SEQ ID NO: 103746 - DNA, 120 bp, synthetic construct
  source 1..120: mol_type = other DNA
gtacacactcctgcagggagagccccggccaccacccacactcctgcagggagagccccagccactgtacacactcctgcagggagagcccccagctctgcagcacagaccccagagaca

SEQ ID NO: 103747 - DNA, 120 bp, synthetic construct; identical to SEQ ID NO: 30613
  source 1..120: mol_type = other DNA

SEQ ID NO: 103748 - DNA, 120 bp, synthetic construct; identical to SEQ ID NO: 30614
  source 1..120: mol_type = other DNA

SEQ ID NO: 103749 - DNA, 120 bp, synthetic construct; identical to SEQ ID NO: 30615
  source 1..120: mol_type = other DNA

SEQ ID NO: 103750 - DNA, 120 bp, synthetic construct; identical to SEQ ID NO: 30616
  source 1..120: mol_type = other DNA

SEQ ID NO: 103751 - DNA, 120 bp, synthetic construct; identical to SEQ ID NO: 30617
  source 1..120: mol_type = other DNA

SEQ ID NO: 103752 - DNA, 120 bp, synthetic construct; identical to SEQ ID NO: 30618
  source 1..120: mol_type = other DNA

SEQ ID NO: 103753 - DNA, 120 bp, synthetic construct
  source 1..120: mol_type = other DNA
tctgtctcgtcgtgggggccgggaggagaacgtactgtcctcaaggtctgtctcgtcgtgggggccgggaggagaacgtactgtcctcaagcagaatttcctgcgctggtctctgggatg

SEQ ID NO: 103754 - DNA, 120 bp, synthetic construct; identical to SEQ ID NO: 30621
  source 1..120: mol_type = other DNA

SEQ ID NO: 103755 - DNA, 120 bp, synthetic construct; identical to SEQ ID NO: 30622
  source 1..120: mol_type = other DNA

SEQ ID NO: 103756 - DNA, 120 bp, synthetic construct; identical to SEQ ID NO: 30623
  source 1..120: mol_type = other DNA

SEQ ID NO: 103757 - DNA, 120 bp, synthetic construct; identical to SEQ ID NO: 30624
  source 1..120: mol_type = other DNA

SEQ ID NO: 103758 - DNA, 120 bp, synthetic construct; identical to SEQ ID NO: 30625
  source 1..120: mol_type = other DNA

SEQ ID NO: 103759 - DNA, 120 bp, synthetic construct; identical to SEQ ID NO: 30626
  source 1..120: mol_type = other DNA

SEQ ID NO: 103760 - DNA, 120 bp, synthetic construct; identical to SEQ ID NO: 30627
  source 1..120: mol_type = other DNA

SEQ ID NO: 103761 - DNA, 120 bp, synthetic construct; identical to SEQ ID NO: 6115
  source 1..120: mol_type = other DNA

SEQ ID NO: 103762 - DNA, 120 bp, synthetic construct; identical to SEQ ID NO: 30641
  source 1..120: mol_type = other DNA

SEQ ID NO: 103763 - DNA, 120 bp, synthetic construct; identical to SEQ ID NO: 30642
  source 1..120: mol_type = other DNA

SEQ ID NO: 103764 - DNA, 120 bp, synthetic construct; identical to SEQ ID NO: 30643
  source 1..120: mol_type = other DNA

SEQ ID NO: 103765 - DNA, 120 bp, synthetic construct; identical to SEQ ID NO: 30644
  source 1..120: mol_type = other DNA

SEQ ID NO: 103766 - DNA, 120 bp, synthetic construct; identical to SEQ ID NO: 30629
  source 1..120: mol_type = other DNA

SEQ ID NO: 103767 - DNA, 120 bp, synthetic construct; identical to SEQ ID NO: 30630
  source 1..120: mol_type = other DNA

SEQ ID NO: 103768 - DNA, 120 bp, synthetic construct; identical to SEQ ID NO: 30631
  source 1..120: mol_type = other DNA

SEQ ID NO: 103769 - DNA, 120 bp, synthetic construct; identical to SEQ ID NO: 30632
  source 1..120: mol_type = other DNA

SEQ ID NO: 103770 - DNA, 120 bp, synthetic construct; identical to SEQ ID NO: 30633
  source 1..120: mol_type = other DNA

SEQ ID NO: 103771 - DNA, 120 bp, synthetic construct; identical to SEQ ID NO: 30634
  source 1..120: mol_type = other DNA

SEQ ID NO: 103772 - DNA, 120 bp, synthetic construct; identical to SEQ ID NO: 30635
  source 1..120: mol_type = other DNA

SEQ ID NO: 103773 - DNA, 120 bp, synthetic construct; identical to SEQ ID NO: 30636
  source 1..120: mol_type = other DNA

SEQ ID NO: 103774 - DNA, 120 bp, synthetic construct; identical to SEQ ID NO: 30637
  source 1..120: mol_type = other DNA

SEQ ID NO: 103775 - DNA, 120 bp, synthetic construct; identical to SEQ ID NO: 30638
  source 1..120: mol_type = other DNA

SEQ ID NO: 103776 - DNA, 120 bp, synthetic construct; identical to SEQ ID NO: 30639
  source 1..120: mol_type = other DNA

SEQ ID NO: 103777 - DNA, 120 bp, synthetic construct; identical to SEQ ID NO: 30640
  source 1..120: mol_type = other DNA

SEQ ID NO: 103778 - DNA, 120 bp, synthetic construct; identical to SEQ ID NO: 30645
  source 1..120: mol_type = other DNA

SEQ ID NO: 103779 - DNA, 120 bp, synthetic construct; identical to SEQ ID NO: 30646
  source 1..120: mol_type = other DNA

SEQ ID NO: 103780 - DNA, 120 bp, synthetic construct; identical to SEQ ID NO: 30648
  source 1..120: mol_type = other DNA

SEQ ID NO: 103781 - DNA, 120 bp, synthetic construct; identical to SEQ ID NO: 30649
  source 1..120: mol_type = other DNA

SEQ ID NO: 103782 - DNA, 120 bp, synthetic construct; identical to SEQ ID NO: 30650
  source 1..120: mol_type = other DNA

SEQ ID NO: 103783 - DNA, 120 bp, synthetic construct; identical to SEQ ID NO: 30651
  source 1..120: mol_type = other DNA

SEQ ID NO: 103784 - DNA, 120 bp, synthetic construct
  source 1..120: mol_type = other DNA
cctcccgaagtgctgggattacaggcatgagtcaccttgcccaacctagtttttatttttttaattaactgcttgcctcactaataaaacttctcttttgccaaaggatgcttctcaggt

SEQ ID NO: 103785 - DNA, 120 bp, synthetic construct; identical to SEQ ID NO: 30647
  source 1..120: mol_type = other DNA

SEQ ID NO: 103786 - DNA, 120 bp, synthetic construct; identical to SEQ ID NO: 30652
  source 1..120: mol_type = other DNA

SEQ ID NO: 103787 - DNA, 120 bp, synthetic construct; identical to SEQ ID NO: 30653
  source 1..120: mol_type = other DNA

SEQ ID NO: 103788 - DNA, 120 bp, synthetic construct; identical to SEQ ID NO: 30654
  source 1..120: mol_type = other DNA

SEQ ID NO: 103789 - DNA, 120 bp, synthetic construct; identical to SEQ ID NO: 30655
  source 1..120: mol_type = other DNA

SEQ ID NO: 103790 - DNA, 120 bp, synthetic construct; identical to SEQ ID NO: 30656
  source 1..120: mol_type = other DNA

SEQ ID NO: 103791 - DNA, 120 bp, synthetic construct; identical to SEQ ID NO: 30657
  source 1..120: mol_type = other DNA

SEQ ID NO: 103792 - DNA, 120 bp, synthetic construct; identical to SEQ ID NO: 30658
  source 1..120: mol_type = other DNA

SEQ ID NO: 103793 - DNA, 120 bp, synthetic construct; identical to SEQ ID NO: 30659
  source 1..120: mol_type = other DNA

SEQ ID NO: 103794 - DNA, 120 bp, synthetic construct; identical to SEQ ID NO: 30660
  source 1..120: mol_type = other DNA

SEQ ID NO: 103795 - DNA, 120 bp, synthetic construct
  source 1..120: mol_type = other DNA
aatgttcacacaaatccttcttcccctgacgaaagagggagtcttcacacacatccttcctcccctgatgaaagagggagtcttcacacaaacccttcctcccctgacgaaagagggagt

SEQ ID NO: 103796 - DNA, 120 bp, synthetic construct
  source 1..120: mol_type = other DNA
aagagggagtcttcacacaaaccttcctcccctgaggaaagagggagtcttcacacaaaccttcttcccctgatgaaggaaggagtcttcacacaaaccttcttcccctgatgaaagagg

SEQ ID NO: 103797 - DNA, 120 bp, synthetic construct; identical to SEQ ID NO: 30661
  source 1..120: mol_type = other DNA

SEQ ID NO: 103798 - DNA, 120 bp, synthetic construct; identical to SEQ ID NO: 30662
  source 1..120: mol_type = other DNA

SEQ ID NO: 103799 - DNA, 120 bp, synthetic construct; identical to SEQ ID NO: 30663
  source 1..120: mol_type = other DNA

SEQ ID NO: 103800 - DNA, 120 bp, synthetic construct; identical to SEQ ID NO: 30666
  source 1..120: mol_type = other DNA

SEQ ID NO: 103801 - DNA, 120 bp, synthetic construct; identical to SEQ ID NO: 30667
  source 1..120: mol_type = other DNA

SEQ ID NO: 103802 - DNA, 120 bp, synthetic construct; identical to SEQ ID NO: 30668
  source 1..120: mol_type = other DNA

SEQ ID NO: 103803 - DNA, 120 bp, synthetic construct; identical to SEQ ID NO: 30669
  source 1..120: mol_type = other DNA

SEQ ID NO: 103804 - DNA, 120 bp, synthetic construct; identical to SEQ ID NO: 30670
  source 1..120: mol_type = other DNA

SEQ ID NO: 103805 - DNA, 120 bp, synthetic construct; identical to SEQ ID NO: 30671
  source 1..120: mol_type = other DNA

SEQ ID NO: 103806 - DNA, 120 bp, synthetic construct; identical to SEQ ID NO: 30672
  source 1..120: mol_type = other DNA

SEQ ID NO: 103807 - DNA, 120 bp, synthetic construct; identical to SEQ ID NO: 30673
  source 1..120: mol_type = other DNA

SEQ ID NO: 103808 - DNA, 120 bp, synthetic construct; identical to SEQ ID NO: 30674
  source 1..120: mol_type = other DNA

SEQ ID NO: 103809 - DNA, 120 bp, synthetic construct; identical to SEQ ID NO: 30675
  source 1..120: mol_type = other DNA

SEQ ID NO: 103810 - DNA, 120 bp, synthetic construct; identical to SEQ ID NO: 30664
  source 1..120: mol_type = other DNA

SEQ ID NO: 103811 - DNA, 120 bp, synthetic construct; identical to SEQ ID NO: 30665
  source 1..120: mol_type = other DNA

SEQ ID NO: 103812 - DNA, 120 bp, synthetic construct; identical to SEQ ID NO: 30676
  source 1..120: mol_type = other DNA

SEQ ID NO: 103813 - DNA, 120 bp, synthetic construct; identical to SEQ ID NO: 30677
  source 1..120: mol_type = other DNA

SEQ ID NO: 103814 - DNA, 120 bp, synthetic construct; identical to SEQ ID NO: 30678
  source 1..120: mol_type = other DNA

SEQ ID NO: 103815 - DNA, 120 bp, synthetic construct; identical to SEQ ID NO: 30679
  source 1..120: mol_type = other DNA

SEQ ID NO: 103816 - DNA, 120 bp, synthetic construct; identical to SEQ ID NO: 30680
  source 1..120: mol_type = other DNA

SEQ ID NO: 103817 - DNA, 120 bp, synthetic construct; identical to SEQ ID NO: 30681
  source 1..120: mol_type = other DNA

SEQ ID NO: 103818 - DNA, 120 bp, synthetic construct; identical to SEQ ID NO: 30682
  source 1..120: mol_type = other DNA

SEQ ID NO: 103819 - DNA, 120 bp, synthetic construct; identical to SEQ ID NO: 30683
  source 1..120: mol_type = other DNA

SEQ ID NO: 103820 - DNA, 120 bp, synthetic construct; identical to SEQ ID NO: 30684
  source 1..120: mol_type = other DNA

SEQ ID NO: 103821 - DNA, 120 bp, synthetic construct; identical to SEQ ID NO: 30685
  source 1..120: mol_type = other DNA

SEQ ID NO: 103822 - DNA, 120 bp, synthetic construct
  source 1..120: mol_type = other DNA
tggtggaacccgtccccacccagccactctgttaccaggtagaacctgtccctgcccgaccactctgctgtggggaaaagcaagagagatcagattgttactgtgtctgtgtagaaagaa

SEQ ID NO: 103823 - DNA, 120 bp, synthetic construct
  source 1..120: mol_type = other DNA
tgtctcggtataaaacccgattgtatgctccatctactgagatagggaaaaaccgccttagggctggaggtgggacctgcgggcagcaatactgctttgtaaagcactgagatgtttatg

SEQ ID NO: 103824 - DNA, 120 bp, synthetic construct; identical to SEQ ID NO: 6120
  source 1..120: mol_type = other DNA

SEQ ID NO: 103825 - DNA, 120 bp, synthetic construct; identical to SEQ ID NO: 30687
  source 1..120: mol_type = other DNA

SEQ ID NO: 103826 - DNA, 120 bp, synthetic construct; identical to SEQ ID NO: 30688
  source 1..120: mol_type = other DNA

SEQ ID NO: 103827 - DNA, 120 bp, synthetic construct; identical to SEQ ID NO: 30691
  source 1..120: mol_type = other DNA

SEQ ID NO: 103828 - DNA, 120 bp, synthetic construct; identical to SEQ ID NO: 30692
  source 1..120: mol_type = other DNA

SEQ ID NO: 103829 - DNA, 120 bp, synthetic construct; identical to SEQ ID NO: 30693
  source 1..120: mol_type = other DNA

SEQ ID NO: 103830 - DNA, 120 bp, synthetic construct; identical to SEQ ID NO: 30694
  source 1..120: mol_type = other DNA

SEQ ID NO: 103831 - DNA, 120 bp, synthetic construct; identical to SEQ ID NO: 30695
  source 1..120: mol_type = other DNA

SEQ ID NO: 103832 - DNA, 120 bp, synthetic construct; identical to SEQ ID NO: 30696
  source 1..120: mol_type = other DNA

SEQ ID NO: 103833 - DNA, 120 bp, synthetic construct; identical to SEQ ID NO: 30689
  source 1..120: mol_type = other DNA

SEQ ID NO: 103834 - DNA, 120 bp, synthetic construct; identical to SEQ ID NO: 30690
  source 1..120: mol_type = other DNA

SEQ ID NO: 103835 - DNA, 120 bp, synthetic construct; identical to SEQ ID NO: 30697
  source 1..120: mol_type = other DNA

SEQ ID NO: 103836 - DNA, 120 bp, synthetic construct; identical to SEQ ID NO: 30698
  source 1..120: mol_type = other DNA

SEQ ID NO: 103837 - DNA, 120 bp, synthetic construct; identical to SEQ ID NO: 30699
  source 1..120: mol_type = other DNA

SEQ ID NO: 103838 - DNA, 120 bp, synthetic construct; identical to SEQ ID NO: 30700
  source 1..120: mol_type = other DNA

SEQ ID NO: 103839 - DNA, 120 bp, synthetic construct; identical to SEQ ID NO: 30701
  source 1..120: mol_type = other DNA

SEQ ID NO: 103840 - DNA, 120 bp, synthetic construct; identical to SEQ ID NO: 30702
  source 1..120: mol_type = other DNA

SEQ ID NO: 103841 - DNA, 120 bp, synthetic construct; identical to SEQ ID NO: 30703
  source 1..120: mol_type = other DNA

SEQ ID NO: 103842 - DNA, 120 bp, synthetic construct; identical to SEQ ID NO: 30704
  source 1..120: mol_type = other DNA

SEQ ID NO: 103843 - DNA, 120 bp, synthetic construct; identical to SEQ ID NO: 30705
  source 1..120: mol_type = other DNA

SEQ ID NO: 103844 - DNA, 120 bp, synthetic construct; identical to SEQ ID NO: 30706
  source 1..120: mol_type = other DNA

SEQ ID NO: 103845 - DNA, 120 bp, synthetic construct; identical to SEQ ID NO: 30707
  source 1..120: mol_type = other DNA

SEQ ID NO: 103846 - DNA, 120 bp, synthetic construct
  source 1..120: mol_type = other DNA
cgacacgtgcagacgtcactcacacccacactctcaccataagagctgacacccgcagacgtcactcacacccacactctcaccataagagctgacacccgcagacgtcactcacatcca

SEQ ID NO: 103847 - DNA, 120 bp, synthetic construct
  source 1..120: mol_type = other DNA
acatcactcacacccacactgtcaccctaagaggtgacacccgcagacgacactaacaaccagattctcaccataagagctgacacccgcagacgtcactcacacccacactctcaccat

SEQ ID NO: 103848 - DNA, 120 bp, synthetic construct
  source 1..120: mol_type = other DNA
accataagaggtgacacctgcagacgtcactcacacccacactgtcaccataagagctgaggcccacagaggacactcacacccatactctcaccataagaggtgacacctgcagatatc

SEQ ID NO: 103849 - DNA, 120 bp, synthetic construct
  source 1..120: mol_type = other DNA
caccataagagctgacacccgcagacgttactcacatccacactctcaccagaaggggtgtcacctgcagacgtcactcacacccacactctcaccataagagctgtcgcccgcagaggt

SEQ ID NO: 103850 - DNA, 120 bp, synthetic construct
  source 1..120: mol_type = other DNA
ctcacacccacactctcaccataattggtgacacctgcagacgtcactcacacccacactctcaccataagaggtgacacctgcagacgtcacacccacactctcaccataagaggtgat

SEQ ID NO: 103851 - DNA, 120 bp, synthetic construct
  source 1..120: mol_type = other DNA
taagaggtgacacatgcaaacgtcactcacacccacactctcaccataagaagtgacacctgcaaacgtcactcacacccacactctcaccataagaagtgaaacctgcagacatcactc

SEQ ID NO: 103852 - DNA, 120 bp, synthetic construct
  source 1..120: mol_type = other DNA
accataagaagtgacacctgcagacgtcactcacccacactctcaccataagagctgtcgcccgcacaggtcactcacacccacactctcaccataagatccgacgcccgcagacgtcac

SEQ ID NO: 103853 - DNA, 120 bp, synthetic construct
  source 1..120: mol_type = other DNA
ccataagaggagacacctgcagacgtcattcacacccacactctcaccataattggtgacacctgcagacgtcactcacacccacactctcaccataagagctgacgcccgcagacgtca

SEQ ID NO: 103854 - DNA, 120 bp, synthetic construct
  source 1..120: mol_type = other DNA
tgtcaccataagagctgatgcctgcagacgtcactcacacccacactctcaccataagaggtgacacctgcagacgtcactcacacccacactgtcaccataagagctgaggcccacaga

SEQ ID NO: 103855 - DNA, 120 bp, synthetic construct
  source 1..120: mol_type = other DNA
tctcaccataagaggtgacacctgcagacgtcactcacacccacactctcaccataagagctgacacctgcagacgtcactcacacccacactctcaccataagtgacacctgcaaatgt

SEQ ID NO: 103856 - DNA, 120 bp, synthetic construct
  source 1..120: mol_type = other DNA
cacattctcaccataagagctgtcgcccgcagaggtcactcacacccacaatctcaccataagagccgacgcccgcagacatcactcacacccacacacgtcactcgcactcacactcta

SEQ ID NO: 103857 - DNA, 120 bp, synthetic construct
  source 1..120: mol_type = other DNA
cccacactctcaccataagaggtaacacatgcagacgtcactcacacccacactctcaccataagagctgtcgcccgcagaggtcactcacacccacactctcaccatagagctgacgcc

SEQ ID NO: 103858 - DNA, 120 bp, synthetic construct; identical to SEQ ID NO: 30708
  source 1..120: mol_type = other DNA

SEQ ID NO: 103859 - DNA, 120 bp, synthetic construct; identical to SEQ ID NO: 30709
  source 1..120: mol_type = other DNA

SEQ ID NO: 103860 - DNA, 120 bp, synthetic construct; identical to SEQ ID NO: 30710
  source 1..120: mol_type = other DNA

SEQ ID NO: 103861 - DNA, 120 bp, synthetic construct; identical to SEQ ID NO: 30711
  source 1..120: mol_type = other DNA

SEQ ID NO: 103862 - DNA, 120 bp, synthetic construct; identical to SEQ ID NO: 30712
  source 1..120: mol_type = other DNA

SEQ ID NO: 103863 - DNA, 120 bp, synthetic construct; identical to SEQ ID NO: 30713
  source 1..120: mol_type = other DNA

SEQ ID NO: 103864 - DNA, 120 bp, synthetic construct; identical to SEQ ID NO: 30714
  source 1..120: mol_type = other DNA

SEQ ID NO: 103865 - DNA, 120 bp, synthetic construct; identical to SEQ ID NO: 30715
  source 1..120: mol_type = other DNA

SEQ ID NO: 103866 - DNA, 120 bp, synthetic construct; identical to SEQ ID NO: 30716
  source 1..120: mol_type = other DNA

SEQ ID NO: 103867 - DNA, 120 bp, synthetic construct; identical to SEQ ID NO: 30563
  source 1..120: mol_type = other DNA

SEQ ID NO: 103868 - DNA, 120 bp, synthetic construct; identical to SEQ ID NO: 30564
  source 1..120: mol_type = other DNA

SEQ ID NO: 103869 - DNA, 120 bp, synthetic construct; identical to SEQ ID NO: 30717
  source 1..120: mol_type = other DNA

SEQ ID NO: 103870 - DNA, 120 bp, synthetic construct; identical to SEQ ID NO: 30718
  source 1..120: mol_type = other DNA

SEQ ID NO: 103871 - DNA, 120 bp, synthetic construct; identical to SEQ ID NO: 30719
  source 1..120: mol_type = other DNA

SEQ ID NO: 103872 - DNA, 120 bp, synthetic construct; identical to SEQ ID NO: 30720
  source 1..120: mol_type = other DNA

SEQ ID NO: 103873 - DNA, 120 bp, synthetic construct; identical to SEQ ID NO: 30721
  source 1..120: mol_type = other DNA

SEQ ID NO: 103874 - DNA, 120 bp, synthetic construct; identical to SEQ ID NO: 30722
  source 1..120: mol_type = other DNA

SEQ ID NO: 103875 - DNA, 120 bp, synthetic construct; identical to SEQ ID NO: 30723
  source 1..120: mol_type = other DNA

SEQ ID NO: 103876 - DNA, 120 bp, synthetic construct
  source 1..120: mol_type = other DNA
gctgtaaaacttcggctcctctacctgcctgagtctttgccaagcacgagggacagtgactgacccctcgttcccgccagcctgagtaagtagccgcgttttcgcctgggtggtctgcaa

SEQ ID NO: 103877 - DNA, 120 bp, synthetic construct; identical to SEQ ID NO: 30724
  source 1..120: mol_type = other DNA

SEQ ID NO: 103878 - DNA, 120 bp, synthetic construct; identical to SEQ ID NO: 30725
  source 1..120: mol_type = other DNA

SEQ ID NO: 103879 - DNA, 120 bp, synthetic construct; identical to SEQ ID NO: 30726
  source 1..120: mol_type = other DNA

SEQ ID NO: 103880 - DNA, 120 bp, synthetic construct; identical to SEQ ID NO: 30727
  source 1..120: mol_type = other DNA

SEQ ID NO: 103881 - DNA, 120 bp, synthetic construct; identical to SEQ ID NO: 30728
  source 1..120: mol_type = other DNA

SEQ ID NO: 103882 - DNA, 120 bp, synthetic construct; identical to SEQ ID NO: 30729
  source 1..120: mol_type = other DNA

SEQ ID NO: 103883 - DNA, 120 bp, synthetic construct; identical to SEQ ID NO: 30730
  source 1..120: mol_type = other DNA

SEQ ID NO: 103884 - DNA, 120 bp, synthetic construct; identical to SEQ ID NO: 30731
  source 1..120: mol_type = other DNA

SEQ ID NO: 103885 - DNA, 120 bp, synthetic construct
  source 1..120: mol_type = other DNA
aagacgcggggtccgagaccagcctagctgaggcctgcacagcgccgggaaagacgcagagtccgagaccagcctagctgagtcctgcatacctaactccgccgaggacttacattctga

SEQ ID NO: 103886 - DNA, 120 bp, synthetic construct
  source 1..120: mol_type = other DNA
caccgccgggaaagacgcagagtccgagaccagcctagctgaggcctgcgcaccgccgggaaagacgcggggtccgagtccagcctagctgaggcctgcgcaccgccgggaaagacggag

SEQ ID NO: 103887 - DNA, 120 bp, synthetic construct
  source 1..120: mol_type = other DNA
ggggtccgagaccagcctagctgaggcctgcgcaccaccgggaaagacgcggggtccgagaccagcctagctgaggcctgcgcaccgccgggaaagacgcggggtccgagaccagcctag

SEQ ID NO: 103888 - DNA, 120 bp, synthetic construct; identical to SEQ ID NO: 30732
  source 1..120: mol_type = other DNA

SEQ ID NO: 103889 - DNA, 120 bp, synthetic construct; identical to SEQ ID NO: 30733
  source 1..120: mol_type = other DNA

SEQ ID NO: 103890 - DNA, 120 bp, synthetic construct; identical to SEQ ID NO: 30565
  source 1..120: mol_type = other DNA

SEQ ID NO: 103891 - DNA, 120 bp, synthetic construct; identical to SEQ ID NO: 30566
  source 1..120: mol_type = other DNA

SEQ ID NO: 103892 - DNA, 120 bp, synthetic construct; identical to SEQ ID NO: 30734
  source 1..120: mol_type = other DNA

SEQ ID NO: 103893 - DNA, 120 bp, synthetic construct; identical to SEQ ID NO: 30735
  source 1..120: mol_type = other DNA

SEQ ID NO: 103894 - DNA, 120 bp, synthetic construct; identical to SEQ ID NO: 30736
  source 1..120: mol_type = other DNA

SEQ ID NO: 103895 - DNA, 120 bp, synthetic construct; identical to SEQ ID NO: 30737
  source 1..120: mol_type = other DNA

SEQ ID NO: 103896 - DNA, 120 bp, synthetic construct; identical to SEQ ID NO: 30738
  source 1..120: mol_type = other DNA

SEQ ID NO: 103897 - DNA, 120 bp, synthetic construct; identical to SEQ ID NO: 30739
  source 1..120: mol_type = other DNA

SEQ ID NO: 103898 - DNA, 120 bp, synthetic construct; identical to SEQ ID NO: 30740
  source 1..120: mol_type = other DNA

SEQ ID NO: 103899 - DNA, 120 bp, synthetic construct; identical to SEQ ID NO: 30741
  source 1..120: mol_type = other DNA

SEQ ID NO: 103900 - DNA, 120 bp, synthetic construct; identical to SEQ ID NO: 30742
  source 1..120: mol_type = other DNA

SEQ ID NO: 103901 - DNA, 120 bp, synthetic construct; identical to SEQ ID NO: 30743
  source 1..120: mol_type = other DNA

SEQ ID NO: 103902 - DNA, 120 bp, synthetic construct; identical to SEQ ID NO: 30744
  source 1..120: mol_type = other DNA

SEQ ID NO: 103903 - DNA, 120 bp, synthetic construct; identical to SEQ ID NO: 30745
  source 1..120: mol_type = other DNA

SEQ ID NO: 103904 - DNA, 120 bp, synthetic construct; identical to SEQ ID NO: 30746
  source 1..120: mol_type = other DNA

SEQ ID NO: 103905 - DNA, 120 bp, synthetic construct; identical to SEQ ID NO: 30747
  source 1..120: mol_type = other DNA

SEQ ID NO: 103906 - DNA, 120 bp, synthetic construct; identical to SEQ ID NO: 30748
  source 1..120: mol_type = other DNA

SEQ ID NO: 103907 - DNA, 120 bp, synthetic construct; identical to SEQ ID NO: 30749
  source 1..120: mol_type = other DNA

SEQ ID NO: 103908 - DNA, 120 bp, synthetic construct; identical to SEQ ID NO: 30750
  source 1..120: mol_type = other DNA

SEQ ID NO: 103909 - DNA, 120 bp, synthetic construct; identical to SEQ ID NO: 30751
  source 1..120: mol_type = other DNA

SEQ ID NO: 103910 - DNA, 120 bp, synthetic construct; identical to SEQ ID NO: 30752
  source 1..120: mol_type = other DNA

SEQ ID NO: 103911 - DNA, 120 bp, synthetic construct; identical to SEQ ID NO: 30753
  source 1..120: mol_type = other DNA

SEQ ID NO: 103912 - DNA, 120 bp, synthetic construct; identical to SEQ ID NO: 30754
  source 1..120: mol_type = other DNA

SEQ ID NO: 103913 - DNA, 120 bp, synthetic construct; identical to SEQ ID NO: 30755
  source 1..120: mol_type = other DNA

SEQ ID NO: 103914 - DNA, 120 bp, synthetic construct; identical to SEQ ID NO: 30756
  source 1..120: mol_type = other DNA

SEQ ID NO: 103915 - DNA, 120 bp, synthetic construct; identical to SEQ ID NO: 30567
  source 1..120: mol_type = other DNA

SEQ ID NO: 103916 - DNA, 120 bp, synthetic construct; identical to SEQ ID NO: 30568
  source 1..120: mol_type = other DNA

SEQ ID NO: 103917 - DNA, 120 bp, synthetic construct; identical to SEQ ID NO: 12715
  source 1..120: mol_type = other DNA

SEQ ID NO: 103918 - DNA, 120 bp, synthetic construct
  source 1..120: mol_type = other DNA
ttctcagtaaactatcgcaaggacaaaaaaccaaacactctcatgttctcataggtgggaattgaccaatgagaacacatggacacaggaaggagaacatcacactctggggcctgtcat

SEQ ID NO: 103919 - DNA, 120 bp, synthetic construct; identical to SEQ ID NO: 12716
  source 1..120: mol_type = other DNA

SEQ ID NO: 103920 - DNA, 120 bp, synthetic construct
  source 1..120: mol_type = other DNA
aaccatcattctcagtaaactatcgcaagaacaaaaaaccaaacaccgcatattctcacacataggtgggaattgaacaatgagatcacatggacacaggaaggggaatatcacactctg

SEQ ID NO: 103921 - DNA, 120 bp, synthetic construct
  source 1..120: mol_type = other DNA
agtttgagaccagcctgaccaacataatgaaaccctgtctctactagaaacacaaaaataagctgagcatgatggcacacacatgtaattccagctacttgggtagctgaagcacaagaa

SEQ ID NO: 103922 - DNA, 120 bp, synthetic construct; identical to SEQ ID NO: 12718
  source 1..120: mol_type = other DNA

SEQ ID NO: 103923 - DNA, 120 bp, synthetic construct
  source 1..120: mol_type = other DNA
ttgtgtcatcagtgaacaaagatagtatgcttcctgttttccaatttggatgcctttttaaaattattgtactttaagttttagggtacatgtgcacaatgtgcaggttagttacatatg

SEQ ID NO: 103924 - DNA, 120 bp, synthetic construct
  source 1..120: mol_type = other DNA
ttcaagatagattaaagacttaaatgttagacctaaaaccataaaaaccctagaagtaaacctaggcattaccattcaggacataggcatgggcaaggacttcatgtctaaaacaccaaa

SEQ ID NO: 103925 - DNA, 120 bp, synthetic construct
  source 1..120: mol_type = other DNA
tgctgaagttgcctatcagcttaaggagattttgggctgagacgatggggttttctagatatacaatcatgtcatcttcaaacagggacaatttgacttcctcttttcctaattgaatac

SEQ ID NO: 103926 - DNA, 120 bp, synthetic construct
  source 1..120: mol_type = other DNA
agatgcaataaaaaatgataaaggggatattaccactgatcccacagaaatacaaactaccatcagagaatactacaaacacctctatgcaaataaactagaaaatctagaagaaatgga

SEQ ID NO: 103927 - DNA, 120 bp, synthetic construct
  source 1..120: mol_type = other DNA
gactaggattgcaacccctgcctttgtttgttttccatttgcttggtagatcttcctccatccttttattttgagcctatgtgtgtctctgcatgtgagatgggtttcctgaatacagca

SEQ ID NO: 103928 - DNA, 120 bp, synthetic construct
  source 1..120: mol_type = other DNA
tcgcatcggctcctgaggcttctgcattcttcacgtagttttcgagccttggctttcagctccatcagctcctttaagcacttctctatattcgttattctagttatacattcgtctaca

SEQ ID NO: 103929 - DNA, 120 bp, synthetic construct
  source 1..120: mol_type = other DNA
gctttgtttacctaagcaagcctgggcaatggcgggtgcccctcacccagcctcgctgccaccttgcagtttgatctcagactgctgtgctagcaatcaggcagactccgtgggggtaag

SEQ ID NO: 103930 - DNA, 120 bp, synthetic construct
  source 1..120: mol_type = other DNA
ttgaattataccattttcttcttacatactccttactttttatacaataaaaaaatgatttcggggggagccaagatggccgaataggaacagctccggtctacagctcccagcatgagc

SEQ ID NO: 103931 - DNA, 120 bp, synthetic construct
  source 1..120: mol_type = other DNA
ttggtgtggatgtcctttctgtttgttagttttcctcctaacagacaggaccctccgctgcaggtctgttggagtttgctagaggtctactccagaccctgttagcctgggtaccagcag

SEQ ID NO: 103932 - DNA, 120 bp, synthetic construct
  source 1..120: mol_type = other DNA
aacaactggtaccagccgctgcaaaatcatgccaaaatgtaaagaccatcgagactaagaagaaactgcatcaactaacgagcaaaataaaccagctaacatcatactgacaggttcaaa

SEQ ID NO: 103933 - DNA, 120 bp, synthetic construct
  source 1..120: mol_type = other DNA
gtagtttgtatttctgtgggatcagtggtaatatcccctttatcattttttattgcatctatttgattcttctctcttttcttctttattagtcttgctagcggtctgtcaattttgttg

SEQ ID NO: 103934 - DNA, 120 bp, synthetic construct
  source 1..120: mol_type = other DNA
atctagaaaaccccatcgtctcagcccaaaatctccttaagctgataagcaatttcagcaaagtctcaggatacaaaatcaatgtacaaaaatcataggcattcttatacaccaacaaca

SEQ ID NO: 103935 - DNA, 120 bp, synthetic construct
  source 1..120: mol_type = other DNA
aaattgacaaatgggatctaattaaactaaagagcgtctgcatagcaaaagaaactaccatcagagtgaacaggcaaccttcagaatgggagaaaattttcacaacctactcatctgaca

SEQ ID NO: 103936 - DNA, 120 bp, synthetic construct
  source 1..120: mol_type = other DNA
tgcagcaaaccaacatggcacatgtatacatatgtaactaacctgcacgttgtgcacatgtaccctaaaacttaaagtgtaataataataaaatttttaaaacaatgatttcataagggt

SEQ ID NO: 103937 - DNA, 120 bp, synthetic construct
  source 1..120: mol_type = other DNA
cctggctcggagggtcctacgcccacggagtctcgctgattgctagtacagcagtctgagatcaaactgcaaggcggcagcgaagctgggtgaggggcgcccgccattgcccaggcttgc

SEQ ID NO: 103938 - DNA, 120 bp, synthetic construct
  source 1..120: mol_type = other DNA
cgaagcgagaagggaagtttagagaaaaatgaataaaaagaaatgagcaaagcctccaagaaatatgggactatgtgaaaagaccaaatctacgtctgattggtgtacctgaaagtgacg

SEQ ID NO: 103939 - DNA, 120 bp, synthetic construct
  source 1..120: mol_type = other DNA
aacagactttaaaccaataaagatcaaaagagacaaagaaggccattacataatggtaaagggatcaattcaacaagaagagctagcctaaatatatatgcacccaatacaggagcaccc

SEQ ID NO: 103940 - DNA, 120 bp, synthetic construct
  source 1..120: mol_type = other DNA
aacacctctatgcaaataaactagaaaatctagaaggaatgaataaattcctcgacacatacactctcccaagactaaaccaggaagaagttgaatctctgaatagaccaataacaggct

SEQ ID NO: 103941 - DNA, 120 bp, synthetic construct
  source 1..120: mol_type = other DNA
taatctgataagcaacttcagcaaagtctcaggatacaaaaccaatgtacaaaaatcacaagcattcttatacaccaacaacagacaaacagagagccaaatcatgagtgaactcccatt

SEQ ID NO: 103942 - DNA, 120 bp, synthetic construct
  source 1..120: mol_type = other DNA
aaagcaatggcaacaaaagacaaaattgacaaatgggatctaattaaactaaagagcttctgtacagcaaaagaaactaccatcagagcgaacaggcaacctacaaaatgggagaaaatt

SEQ ID NO: 103943 - DNA, 120 bp, synthetic construct
  source 1..120: mol_type = other DNA
taaagacatttaatttaacaaaaatttattatactttcagttctggggtacatgtgcagaacgtataggtttgttacataggtatacatgtgtcatggtggtttactgcacccatcaaag

SEQ ID NO: 103944 - DNA, 120 bp, synthetic construct
  source 1..120: mol_type = other DNA
atgttgaattgtatctcccataatttccacatgttgttggagggactggtaggagataattgaatcctgtggcggtttcccccatactgttctcatagtagtgaataagtctcatcagac

SEQ ID NO: 103945 - DNA, 120 bp, synthetic construct
  source 1..120: mol_type = other DNA
cagaagtgtctgttcatatcctttgcccacgttttgatggggttgtttgtttttttcttgtaaattttgtttgagttctttgtagattctggatattagccctttgtcagatgagtagat

SEQ ID NO: 103946 - DNA, 120 bp, synthetic construct; identical to SEQ ID NO: 13089
  source 1..120: mol_type = other DNA

SEQ ID NO: 103947 - DNA, 120 bp, synthetic construct; identical to SEQ ID NO: 13090
  source 1..120: mol_type = other DNA

SEQ ID NO: 103948 - DNA, 120 bp, synthetic construct; identical to SEQ ID NO: 13091
  source 1..120: mol_type = other DNA

SEQ ID NO: 103949 - DNA, 120 bp, synthetic construct; identical to SEQ ID NO: 13092
  source 1..120: mol_type = other DNA

SEQ ID NO: 103950 - DNA, 120 bp, synthetic construct
  source 1..120: mol_type = other DNA
gccatcccattactgggtatatacccaaaggactataaatcatgctgctataaaggaatttagtatcttctaatcccttctctgattacctaatttaaattttcaatatccctgaaactc

SEQ ID NO: 103951 - DNA, 120 bp, synthetic construct
  source 1..120: mol_type = other DNA
ttcgcagttcacaaacatctggtgttctgcagccaccgctgctattacccaagaaaacagggtctggagtagacctctagaaaactccaacagacctgcagctgagggtcctgtctgtta

SEQ ID NO: 103952 - DNA, 120 bp, synthetic construct
  source 1..120: mol_type = other DNA
acgggaagcccatcagactaacagcggatctctcaacagaaactctacaagccagaagagagtgggggccaatattcaacattcttaaagaaaagaattttcaacccggaattttatatc

SEQ ID NO: 103953 - DNA, 120 bp, synthetic construct
  source 1..120: mol_type = other DNA
gctctcctcagcaaatgtaaaagaacagaaattgtaacaattgtctctcagaccacagtgcaatcaaagtagaactcaggattaagaaactcactcaaaaccactcaactacatggaaaa

SEQ ID NO: 103954 - DNA, 120 bp, synthetic construct
  source 1..120: mol_type = other DNA
tcctccctaactcattttatgaggccagcatcatcctgataccaaagccgggcagagatacaacaaaaaaagagaattttagaccaatatccttgatgaacattgatgcaaaaatcctca

SEQ ID NO: 103955 - DNA, 120 bp, synthetic construct
  source 1..120: mol_type = other DNA
caaaacagcatggtactggtaccaaaacagagatatagatcaatggaacagaacagagacctcagaaataacgccgcatatctacaactatctgatctttgacaaacctgacaaaaacaa

SEQ ID NO: 103956 - DNA, 120 bp, synthetic construct
  source 1..120: mol_type = other DNA
aaagacacatgcacacataggtttattgcggcacaattcacaatagcaaagacttggaaccacccaaatgtccaacaatgatagactggattaagaaaatgtggcacatatacaccacgg

SEQ ID NO: 103957 - DNA, 120 bp, synthetic construct; identical to SEQ ID NO: 13055
  source 1..120: mol_type = other DNA

SEQ ID NO: 103958 - DNA, 120 bp, synthetic construct; identical to SEQ ID NO: 13056
  source 1..120: mol_type = other DNA

SEQ ID NO: 103959 - DNA, 120 bp, synthetic construct
  source 1..120: mol_type = other DNA
aaaatactggcaaaacgaatccagcagcacatcaaaaagcttatccaccatgatcaagtgggcttcatccctgggatgcaaggctggttcaacacatgcaaatcaatagatgtaatacag

SEQ ID NO: 103960 - DNA, 120 bp, synthetic construct
  source 1..120: mol_type = other DNA
accaaaacagcattgtactggtaccaaaacagagatacagatcaatggaacagaacagagccctcagaaataatgccgcatatctacaaccatctgatctttgacaaacctgacaaaaac

SEQ ID NO: 103961 - DNA, 120 bp, synthetic construct
  source 1..120: mol_type = other DNA
tagaactagaaataccatttgacccagccatcccattactgggtatatacccaaaggattataaatcatgctgctataaagacacatgcacatgtatgttgattgcagcactattcacaa

SEQ ID NO: 103962 - DNA, 120 bp, synthetic construct
  source 1..120: mol_type = other DNA
taagaaataatgctgcatatctacaactatctgatctttgacaaacctgagaaaaacaagcaatggggaaaggattccctatttaacaaatggtgctgggaaaactggctagccatatgt

SEQ ID NO: 103963 - DNA, 120 bp, synthetic construct
  source 1..120: mol_type = other DNA
caaatcaaaaccacaatgagataccatctcacaccagttagaatggtgatcattaaaaagtcacgaaacagcaggtgctggagaggatgtggagaaataggaacacttttacactgttgg

SEQ ID NO: 103964 - DNA, 120 bp, synthetic construct
  source 1..120: mol_type = other DNA
ggggaggggggcggggaaacaaaagatgggaaagagaaaataaaaaagaagatgataacaaacaaaacagaaccaaaccaaagagaagtcgaacccaaaagaagtgggtgtcaaccaaag

SEQ ID NO: 103965 - DNA, 120 bp, synthetic construct
  source 1..120: mol_type = other DNA
gtggtcgcttcaaaccccgattcacatggaaaaacaactcaaaaaccgtcaaagcaaccaggagacgacccctcccccaggcaggaagaggcagaaacacaaaaaccaaaaaagggggtt

SEQ ID NO: 103966 - DNA, 120 bp, synthetic construct; identical to SEQ ID NO: 22515
  source 1..120: mol_type = other DNA

SEQ ID NO: 103967 - DNA, 120 bp, synthetic construct; identical to SEQ ID NO: 22516
  source 1..120: mol_type = other DNA

SEQ ID NO: 103968 - DNA, 120 bp, synthetic construct
  source 1..120: mol_type = other DNA
tgaattttggcttttgttgccattgcttttggtgttttggacatgaagtccttgcccatgcctatgtcctgaatggtaatgcctaggttttctcctagggtttttatggttttaggtcta

SEQ ID NO: 103969 - DNA, 120 bp, synthetic construct
  source 1..120: mol_type = other DNA
tgtcttgtgccagttttccaagggaatgcttccagtttttgcccattcagtatgatattggctgtgggtttgtcatagatagctcttattattttgaaatacctcccatcaatacctaat

SEQ ID NO: 103970 - DNA, 120 bp, synthetic construct
  source 1..120: mol_type = other DNA
ctttcaaaaaaccagctcctggattcattgattttttgaagggttttttgtatctctatttccttcagttctgctctgattttagttatttcttgccttctgctagcttttgaatgtgtt

SEQ ID NO: 103971 - DNA, 120 bp, synthetic construct
  source 1..120: mol_type = other DNA
tttagtccatttacatttaaagttagtatttttatatgtgaatttgatcctgtcattatgatgttagctggtgattttgctcgtaagttgatgcagtttcttcctagtctcgatggtctt

SEQ ID NO: 103972 - DNA, 120 bp, synthetic construct
  source 1..120: mol_type = other DNA
aactgcgttcctttggaggaggagaggcgctctgcgttttagaatttccagtttttctgttctgttttttccccatctttgtggttttatctacttttggtctttgatgatggtgatgta

SEQ ID NO: 103973 - DNA, 120 bp, synthetic construct
  source 1..120: mol_type = other DNA
tgggagctgtagaccggaggtgttcctattcggccatcttggctcctcccccgaaactttcgtttttaaaaccatcagatctcatgagacccattcactatcaggagaacagcatgggaa

SEQ ID NO: 103974 - DNA, 120 bp, synthetic construct
  source 1..120: mol_type = other DNA
gagaattgcttgtacctgggaggtggaggtcacagtgagctgtaattacaccactgccctccagcctgggcaacacagcaagactctgaaaatatatatatatatatatatatatatata

SEQ ID NO: 103975 - DNA, 120 bp, synthetic construct
  source 1..120: mol_type = other DNA
aagagaggttaagtaactttcccatcgtgccatagctagtaagtagtagagctgaaattagaacccagacaatctgcctagagaagtacattcttgatttcatactctaaacaggtgagc

SEQ ID NO: 103976 - DNA, 120 bp, synthetic construct; identical to SEQ ID NO: 22517
  source 1..120: mol_type = other DNA

SEQ ID NO: 103977 - DNA, 120 bp, synthetic construct; identical to SEQ ID NO: 22518
  source 1..120: mol_type = other DNA

SEQ ID NO: 103978 - DNA, 120 bp, synthetic construct
  source 1..120: mol_type = other DNA
gccaaaggatatgaacagacacttctcaaaagaagacgtttatgcagccaaaagacacatgaaaaaatgctcatcatcactggccatcagagaaatgcaaatcaaaaccacaatgagata

SEQ ID NO: 103979 - DNA, 120 bp, synthetic construct; identical to SEQ ID NO: 22519
  source 1..120: mol_type = other DNA

SEQ ID NO: 103980 - DNA, 120 bp, synthetic construct; identical to SEQ ID NO: 22520
  source 1..120: mol_type = other DNA

SEQ ID NO: 103981 - DNA, 120 bp, synthetic construct; identical to SEQ ID NO: 22521
  source 1..120: mol_type = other DNA

SEQ ID NO: 103982 - DNA, 120 bp, synthetic construct; identical to SEQ ID NO: 22522
  source 1..120: mol_type = other DNA

SEQ ID NO: 103983 - DNA, 120 bp, synthetic construct; identical to SEQ ID NO: 22523
  source 1..120: mol_type = other DNA

SEQ ID NO: 103984 - DNA, 120 bp, synthetic construct; identical to SEQ ID NO: 22524
  source 1..120: mol_type = other DNA

SEQ ID NO: 103985 - DNA, 120 bp, synthetic construct; identical to SEQ ID NO: 22525
  source 1..120: mol_type = other DNA

SEQ ID NO: 103986 - DNA, 120 bp, synthetic construct; identical to SEQ ID NO: 22526
  source 1..120: mol_type = other DNA

SEQ ID NO: 103987 - DNA, 120 bp, synthetic construct; identical to SEQ ID NO: 22527
  source 1..120: mol_type = other DNA

SEQ ID NO: 103988 - DNA, 120 bp, synthetic construct; identical to SEQ ID NO: 22528
  source 1..120: mol_type = other DNA

SEQ ID NO: 103989 - DNA, 120 bp, synthetic construct
  source 1..120: mol_type = other DNA
ttaaaattcctattatctgtaccttattaataaatcttaaatttcaagaacatctcttggagctgtgactgtgccactgcactccagccgggcaacagaacaagactccgggctctgact

SEQ ID NO: 103990 - DNA, 120 bp, synthetic construct; identical to SEQ ID NO: 4843
  source 1..120: mol_type = other DNA

SEQ ID NO: 103991 - DNA, 120 bp, synthetic construct; identical to SEQ ID NO: 22508
  source 1..120: mol_type = other DNA

SEQ ID NO: 103992 - DNA, 120 bp, synthetic construct
  source 1..120: mol_type = other DNA
gatggttgggtctctatggtcccaggggcagaatgaggaccaggttggcttgatacaacgaaggaatttctttttttttttttattatacttttagttttagggtacatgtgcacaacgt

SEQ ID NO: 103993 - DNA, 120 bp, synthetic construct
  source 1..120: mol_type = other DNA
cgaggctgggggaggggcacccgccattgcccaggcttgcttagataaacaaagcagcccggaagctcgaactgggtgaactgggcggagcccaccacagcacaaggaggcctgcctgcc

SEQ ID NO: 103994 - DNA, 120 bp, synthetic construct
  source 1..120: mol_type = other DNA
aaattctcctggataataccctgcagagtgttttccaacttggttccattctccccatcactttcaggtacaccaatcagacgtagatttggtcttttcacatagtcccatatttcttgg

SEQ ID NO: 103995 - DNA, 120 bp, synthetic construct
  source 1..120: mol_type = other DNA
gaaaacaaaaaaaaggcaggggttgcaatcctagtctctgataaaaccgactttaaaccaacaaagatcaaaagagacaaagaaggccattacataatggtaaagggatcaattcaacaa

SEQ ID NO: 103996 - DNA, 120 bp, synthetic construct
  source 1..120: mol_type = other DNA
taatgaatccaggagctggttttttgaaaggatctacaaaattgatagactgctagcaagactaataaagaaaaaaagagagaagaatctaatagacacaataaaaaatgataaagggga

SEQ ID NO: 103997 - DNA, 120 bp, synthetic construct
  source 1..120: mol_type = other DNA
ctctcaccactcctattcaacacagtgttggaagttctggccagggcaatgaggcaggagaaggaaataaagggtattcaattaggaaaagaggaagtcaaattgtccctgtttgcagat

SEQ ID NO: 103998 - DNA, 120 bp, synthetic construct
  source 1..120: mol_type = other DNA
aaacaccaaaagcaatggcaacaaaagacaaaattgacaaatgggatctaattaaactaaagagcttctgcacagcaaaagaaactaccatcagagtgaacgggcaacctacaaaatggg

SEQ ID NO: 103999 - DNA, 120 bp, synthetic construct
  source 1..120: mol_type = other DNA
ctgcacaatgtgcacatgtaccctaaaacttaaagtataaaaaaaaaaaaaagacaaaaaaaaaaaaagagttcaatgtgttgggaagtcacaaagtataagtaccatgctagtgctagg

SEQ ID NO: 104000 - DNA, 120 bp, synthetic construct; identical to SEQ ID NO: 22510
  source 1..120: mol_type = other DNA

SEQ ID NO: 104001 - DNA, 120 bp, synthetic construct
  source 1..120: mol_type = other DNA
ttctaataccatactagacacataatggtttttcaataggtatttcttaaaaaaaagaatttaaggtcgagcgcggtggctcacgcctgtaatcccagcactttgggaggccaaggcggg

SEQ ID NO: 104002 - DNA, 120 bp, synthetic construct
  source 1..120: mol_type = other DNA
acaatgaactcaaacaaatttacaagaaaaaaactaacaaccccatcaaaaagtgggcgaaggacatgaacagacacttctcaaaagaagacatttatgcagccaaaaaacacatgaaaa

SEQ ID NO: 104003 - DNA, 120 bp, synthetic construct; identical to SEQ ID NO: 22512
  source 1..120: mol_type = other DNA

SEQ ID NO: 104004 - DNA, 120 bp, synthetic construct; identical to SEQ ID NO: 22513
  source 1..120: mol_type = other DNA

SEQ ID NO: 104005 - DNA, 120 bp, synthetic construct; identical to SEQ ID NO: 22514
  source 1..120: mol_type = other DNA

SEQ ID NO: 104006 - DNA, 120 bp, synthetic construct
  source 1..120: mol_type = other DNA
acaaaaattttctcccattctgtaggttgcctgttcactctgatggtagtttcttttgctatgcagaagctctttagtttaattagatcccatttctcaattttggcttttgttgccgtt

SEQ ID NO: 104007 - DNA, 120 bp, synthetic construct
  source 1..120: mol_type = other DNA
aactaaaggagattttgggctgagacgatggggttttctagatatacaatcatgtcatctgcaaacagggacaatttgacttcctcttttcctaattgaataccctttatttccttctcc

SEQ ID NO: 104008 - DNA, 120 bp, synthetic construct
  source 1..120: mol_type = other DNA
ttccaagtctttgctattgtgagtagtgccacaataaacatgcatgtgcatgtgtttttatagcagcatgatttatattcctttgggtatatacccagtaatgggatggctgggtcaaat

SEQ ID NO: 104009 - DNA, 120 bp, synthetic construct
  source 1..120: mol_type = other DNA
tcaattttggcttttgttaccattgcttttggtgttttagacatcaagtccttgcccatgcctatgtcctgaatggtattgcctaggttttcttctagggtttttatggttttaggtcta

SEQ ID NO: 104010 - DNA, 120 bp, synthetic construct
  source 1..120: mol_type = other DNA
ggtgaaagcaaacctttataactattgtaagatcattttagaaaagaaaatattgggttgggcacagtagctcacaccagtaatcccaatactttgggaggccaaggcagggggattgct

SEQ ID NO: 104011 - DNA, 120 bp, synthetic construct; identical to SEQ ID NO: 23304
  source 1..120: mol_type = other DNA

SEQ ID NO: 104012 - DNA, 120 bp, synthetic construct; identical to SEQ ID NO: 29709
  source 1..120: mol_type = other DNA

SEQ ID NO: 104013 - DNA, 120 bp, synthetic construct
  source 1..120: mol_type = other DNA
accaagagattggtaaaatcaggcctcagtttgtggtaatttgttacagcagcaatagaaatagaaggcatttaagaaactttggctatcttgttgccaagtgcggtggctcacgcctgt

SEQ ID NO: 104014 - DNA, 120 bp, synthetic construct
  source 1..120: mol_type = other DNA
tcataacacagagacttaaaaaatatatagacagagtattatactctcttctggtcattattcttttgattacaaatggttcatattgtgccagtgggacccccccccccaaccccgccc

SEQ ID NO: 104015 - DNA, 120 bp, synthetic construct; identical to SEQ ID NO: 7416
  source 1..120: mol_type = other DNA

SEQ ID NO: 104016 - DNA, 120 bp, synthetic construct; identical to SEQ ID NO: 7417
  source 1..120: mol_type = other DNA

SEQ ID NO: 104017 - DNA, 120 bp, synthetic construct; identical to SEQ ID NO: 7418
  source 1..120: mol_type = other DNA

SEQ ID NO: 104018 - DNA, 120 bp, synthetic construct; identical to SEQ ID NO: 7419
  source 1..120: mol_type = other DNA

SEQ ID NO: 104019 - DNA, 120 bp, synthetic construct; identical to SEQ ID NO: 7420
  source 1..120: mol_type = other DNA

SEQ ID NO: 104020 - DNA, 120 bp, synthetic construct
  source 1..120: mol_type = other DNA
gatgatcacacaaataaatacagacttatccacaaagagcagttattaagaaatttatttgctaggtgcagtggttcacacctgtaacccagcactctgggaggccaaggtgggtggaac

SEQ ID NO: 104021 - DNA, 120 bp, synthetic construct
  source 1..120: mol_type = other DNA
aggtcaggagttcgagaccagcctggccaatgtggtgaaaccccgtctctactaaaaagacaaaaattagccaggcgtggtggtgggggcctgtaatcccagctacttgggaggctgagg

SEQ ID NO: 104022 - DNA, 120 bp, synthetic construct; identical to SEQ ID NO: 7421
  source 1..120: mol_type = other DNA

SEQ ID NO: 104023 - DNA, 120 bp, synthetic construct
  source 1..120: mol_type = other DNA
ctatatcctatttctagtataacttttcttactctaattattttctttattacactggaacagctcgtgccttcagtctcttgcctcggcacctgggtggcttaccgcccacaacccaac

SEQ ID NO: 104024 - DNA, 120 bp, synthetic construct
  source 1..120: mol_type = other DNA
tttcactcttgttgcccaggctggagtgcaatggcgtgatcttggctcaccgcaacctcacctcctgggttcgagccattctcctgcctcagcctcccgagtagctgggaatacaggcat

SEQ ID NO: 104025 - DNA, 120 bp, synthetic construct; identical to SEQ ID NO: 29908
  source 1..120: mol_type = other DNA

SEQ ID NO: 104026 - DNA, 120 bp, synthetic construct
  source 1..120: mol_type = other DNA
tttctctgtaaaagtaaaatatgatgacttggccaaaggtctgtaatagctcctcttattcaactgttagtccttaatagttattattgatgggctgggcgcggtggctcacgcctgtaa

SEQ ID NO: 104027 - DNA, 120 bp, synthetic construct
  source 1..120: mol_type = other DNA
atcgcgccactgtactccagcctgggtgacagagcgagactccatctcaaaaaaaagaaaagaaaagaaaagaaaagaaaacagaatctaaaagctgttggaatccccaaaacacttttt

SEQ ID NO: 104028 - DNA, 120 bp, synthetic construct; identical to SEQ ID NO: 12884
  source 1..120: mol_type = other DNA

SEQ ID NO: 104029 - DNA, 120 bp, synthetic construct; identical to SEQ ID NO: 13207
  source 1..120: mol_type = other DNA

SEQ ID NO: 104030 - DNA, 120 bp, synthetic construct
  source 1..120: mol_type = other DNA
tagcttgatggggatggcattgaatctacaaattaccttgggcagtatggctattttcacaatattgattcttcctatccatgagcatggaatgttcttccatttgtttgtgtcctcttt

SEQ ID NO: 104031 - DNA, 120 bp, synthetic construct
  source 1..120: mol_type = other DNA
gtttttgcccattcagtatgatattggctgtgggtttgtcataaatagctcttattattttgagatatgtctcatcaataccgaatttattgagagttttagcatgaagggctgttgaat

SEQ ID NO: 104032 - DNA, 120 bp, synthetic construct
  source 1..120: mol_type = other DNA
catccttgctgcctggacccctatctccttccctggatccccctcacgtctgccgtgaaccccatctcttgcctggacccccatctgcttccctggattccccacccccaaccgtgaaat

SEQ ID NO: 104033 - DNA, 120 bp, synthetic construct
  source 1..120: mol_type = other DNA
cccagcactgtttattaaatagggaatcgtttccccattgcttgtttttctcaggtttgtcaaagatcagatagttgtagatatgcggcattatttctgagggctctgttctgttccatt

SEQ ID NO: 104034 - DNA, 120 bp, synthetic construct
  source 1..120: mol_type = other DNA
tattttgagatacgtcccatcagtacctaatttattgagagtttttagcatgaagggttgttgaattttgtcaaaggccttttctgcatctattgagataatcatgtggtttttgtcttt

SEQ ID NO: 104035 - DNA, 120 bp, synthetic construct
  source 1..120: mol_type = other DNA
gagctgagttcaattcctgggtattgttaactttctgtctcattgatctgtctaatgttgagagtggggtgttaaagtctcccattattattgtgtgggagtctaagtctcttcgtaggt

SEQ ID NO: 104036 - DNA, 120 bp, synthetic construct; identical to SEQ ID NO: 35556
  source 1..120: mol_type = other DNA

SEQ ID NO: 104037 - DNA, 120 bp, synthetic construct; identical to SEQ ID NO: 35557
  source 1..120: mol_type = other DNA

SEQ ID NO: 104038 - DNA, 120 bp, synthetic construct; identical to SEQ ID NO: 35558
  source 1..120: mol_type = other DNA

SEQ ID NO: 104039 - DNA, 120 bp, synthetic construct; identical to SEQ ID NO: 35559
  source 1..120: mol_type = other DNA

SEQ ID NO: 104040 - DNA, 120 bp, synthetic construct; identical to SEQ ID NO: 35560
  source 1..120: mol_type = other DNA

SEQ ID NO: 104041 - DNA, 120 bp, synthetic construct; identical to SEQ ID NO: 35561
  source 1..120: mol_type = other DNA

SEQ ID NO: 104042 - DNA, 120 bp, synthetic construct; identical to SEQ ID NO: 35562
  source 1..120: mol_type = other DNA

SEQ ID NO: 104043 - DNA, 120 bp, synthetic construct; identical to SEQ ID NO: 35563
  source 1..120: mol_type = other DNA

SEQ ID NO: 104044 - DNA, 120 bp, synthetic construct; identical to SEQ ID NO: 35564
  source 1..120: mol_type = other DNA

SEQ ID NO: 104045 - DNA, 120 bp, synthetic construct
  source 1..120: mol_type = other DNA
aataacatgacaagactcacctgtcatgtttcctcattttatcaatctcgttgagcacatttcatttctctctctctctctctctctctcacacacacacacagagagagagagagagag

SEQ ID NO: 104046 - DNA, 120 bp, synthetic construct; identical to SEQ ID NO: 35565
  source 1..120: mol_type = other DNA

SEQ ID NO: 104047 - DNA, 120 bp, synthetic construct; identical to SEQ ID NO: 35566
  source 1..120: mol_type = other DNA

SEQ ID NO: 104048 - DNA, 120 bp, synthetic construct; identical to SEQ ID NO: 35567
  source 1..120: mol_type = other DNA

SEQ ID NO: 104049 - DNA, 120 bp, synthetic construct; identical to SEQ ID NO: 35568
  source 1..120: mol_type = other DNA

SEQ ID NO: 104050 - DNA, 120 bp, synthetic construct; identical to SEQ ID NO: 35569
  source 1..120: mol_type = other DNA

SEQ ID NO: 104051 - DNA, 120 bp, synthetic construct; identical to SEQ ID NO: 35570
  source 1..120: mol_type = other DNA

SEQ ID NO: 104052 - DNA, 120 bp, synthetic construct; identical to SEQ ID NO: 35571
  source 1..120: mol_type = other DNA

SEQ ID NO: 104053 - DNA, 120 bp, synthetic construct; identical to SEQ ID NO: 35572
  source 1..120: mol_type = other DNA

SEQ ID NO: 104054 - DNA, 120 bp, synthetic construct; identical to SEQ ID NO: 35573
  source 1..120: mol_type = other DNA

SEQ ID NO: 104055 - DNA, 120 bp, synthetic construct; identical to SEQ ID NO: 35574
  source 1..120: mol_type = other DNA

SEQ ID NO: 104056 - DNA, 120 bp, synthetic construct; identical to SEQ ID NO: 35575
  source 1..120: mol_type = other DNA

SEQ ID NO: 104057 - DNA, 120 bp, synthetic construct; identical to SEQ ID NO: 35576
  source 1..120: mol_type = other DNA

SEQ ID NO: 104058 - DNA, 120 bp, synthetic construct; identical to SEQ ID NO: 35577
  source 1..120: mol_type = other DNA

SEQ ID NO: 104059 - DNA, 120 bp, synthetic construct; identical to SEQ ID NO: 35578
  source 1..120: mol_type = other DNA

SEQ ID NO: 104060 - DNA, 120 bp, synthetic construct
  source 1..120: mol_type = other DNA
catcgtgaacactggattggtcagggttctccagagaaatggagaccacaggatgtgtgtacatgcgtgcattgtgtgtgtgtgtgtgtgtgtgtgtgtgtgtgtgtgtgtgaaagagag

SEQ ID NO: 104061 - DNA, 120 bp, synthetic construct; identical to SEQ ID NO: 4514
  source 1..120: mol_type = other DNA

SEQ ID NO: 104062 - DNA, 120 bp, synthetic construct
  source 1..120: mol_type = other DNA
aaagcaaaaacaagcaatggggaaaggattccctatttaataaatggtgctgggaaaactggctagccatatgtagaaagctgaaactggatcccttccttacaccttatacaaaaatta

SEQ ID NO: 104063 - DNA, 120 bp, synthetic construct
  source 1..120: mol_type = other DNA
tggatgaaattggaaatcatcattctcagtaaactatcgcaagaacaaaaaaccaaacaccgcatattctcactcataggtgggaatttaacaatgagaacacatggacacaggaagggg

SEQ ID NO: 104064 - DNA, 120 bp, synthetic construct; identical to SEQ ID NO: 20241
  source 1..120: mol_type = other DNA

SEQ ID NO: 104065 - DNA, 120 bp, synthetic construct; identical to SEQ ID NO: 20242
  source 1..120: mol_type = other DNA

SEQ ID NO: 104066 - DNA, 120 bp, synthetic construct; identical to SEQ ID NO: 20243
  source 1..120: mol_type = other DNA

SEQ ID NO: 104067 - DNA, 120 bp, synthetic construct; identical to SEQ ID NO: 20244
  source 1..120: mol_type = other DNA

SEQ ID NO: 104068 - DNA, 120 bp, synthetic construct; identical to SEQ ID NO: 20245
  source 1..120: mol_type = other DNA

SEQ ID NO: 104069 - DNA, 120 bp, synthetic construct; identical to SEQ ID NO: 20246
  source 1..120: mol_type = other DNA

SEQ ID NO: 104070 - DNA, 120 bp, synthetic construct
  source 1..120: mol_type = other DNA
tcgtattacaaaaccatcacacagggagatcctttcaccttaccaaaataaacagccgtgtatgtgcatgcatgtgtgtgtgtgtgtgtgtgtgtgtgtgtgtctataaatggtgtgttt

SEQ ID NO: 104071 - DNA, 120 bp, synthetic construct; identical to SEQ ID NO: 20247
  source 1..120: mol_type = other DNA

SEQ ID NO: 104072 - DNA, 120 bp, synthetic construct; identical to SEQ ID NO: 20248
  source 1..120: mol_type = other DNA

SEQ ID NO: 104073 - DNA, 120 bp, synthetic construct; identical to SEQ ID NO: 20249
  source 1..120: mol_type = other DNA

SEQ ID NO: 104074 - DNA, 120 bp, synthetic construct
  source 1..120: mol_type = other DNA
gaactcctgacctcaggtgatccacgcacctcggcctctcaaagtgcttggttttatacattttagggaggcacgagacatcaatcaatatatgtaagatgaatttagttcagtctagaa

SEQ ID NO: 104075 - DNA, 120 bp, synthetic construct
  source 1..120: mol_type = other DNA
aaggggggacagctccaggtgaaggggggcaactccaggtgaagggggggcaactccaggtgaaggagggcaactccaggtgaaggtgggggacaactccaggtgaagggagggcaactc

SEQ ID NO: 104076 - DNA, 120 bp, synthetic construct
  source 1..120: mol_type = other DNA
tgccttgagcagttcccagcttgactcttccctttaacttagtgatttgggggtcccaagacttactttcttttcatacaagtcttggggagcaaccattatcacatgacattaataaga

SEQ ID NO: 104077 - DNA, 120 bp, synthetic construct; identical to SEQ ID NO: 20252
  source 1..120: mol_type = other DNA

SEQ ID NO: 104078 - DNA, 120 bp, synthetic construct; identical to SEQ ID NO: 20253
  source 1..120: mol_type = other DNA

SEQ ID NO: 104079 - DNA, 120 bp, synthetic construct; identical to SEQ ID NO: 20254
  source 1..120: mol_type = other DNA

SEQ ID NO: 104080 - DNA, 120 bp, synthetic construct; identical to SEQ ID NO: 20255
  source 1..120: mol_type = other DNA

SEQ ID NO: 104081 - DNA, 120 bp, synthetic construct; identical to SEQ ID NO: 31523
  source 1..120: mol_type = other DNA

SEQ ID NO: 104082 - DNA, 120 bp, synthetic construct; identical to SEQ ID NO: 31524
  source 1..120: mol_type = other DNA

SEQ ID NO: 104083 - DNA, 120 bp, synthetic construct; identical to SEQ ID NO: 31525
  source 1..120: mol_type = other DNA

SEQ ID NO: 104084 - DNA, 120 bp, synthetic construct; identical to SEQ ID NO: 31526
  source 1..120: mol_type = other DNA

SEQ ID NO: 104085 - DNA, 120 bp, synthetic construct; identical to SEQ ID NO: 31520
  source 1..120: mol_type = other DNA

SEQ ID NO: 104086 - DNA, 120 bp, synthetic construct
  source 1..120: mol_type = other DNA
gatggtatctcattgtggttttgatttgcatttctctgatggcaagtgatggtgagcattttttcatgtgttttttggctacataaatgtcttcttttgagaagtgtctgttcgtgtcct

SEQ ID NO: 104087 - DNA, 120 bp, synthetic construct
  source 1..120: mol_type = other DNA
tctgtgaagaaagtcattggtagcttgatggggatggcgttgaatctataaattaccttgagcagtatggccattttcacgatattgattcttcctatccatgagcatggaatgttcttc

SEQ ID NO: 104088 - DNA, 120 bp, synthetic construct; identical to SEQ ID NO: 31517
  source 1..120: mol_type = other DNA

SEQ ID NO: 104089 - DNA, 120 bp, synthetic construct
  source 1..120: mol_type = other DNA
caaggcacaagaactacatgacgaatgcacaagcctcagtagccgatttgatcatgtggaagaaactgtatcagtgatggaagatcaaatgaatgaaatgaagcaagaagagaagtttag

SEQ ID NO: 104090 - DNA, 120 bp, synthetic construct
  source 1..120: mol_type = other DNA
agacacacataggctcaaaataaagggatggaagaagatctaccaagcaaatagaaaacaacaaaaggcaggggttgcaatcctagtctatgataaaacagactttaaaccaacaaagat

SEQ ID NO: 104091 - DNA, 120 bp, synthetic construct
  source 1..120: mol_type = other DNA
caatgaatccaggagctggtttttgaaaagatcaacaaaattgatagaccgctagcaagactaataaagaagaaaagagagaagaatcaaatagatgcaataaaaaatgataaaggggat

SEQ ID NO: 104092 - DNA, 120 bp, synthetic construct
  source 1..120: mol_type = other DNA
aacacatggacacaggaagggaaacatcacacaccggggcctgttgtggggtcgggggaggggggagggatagcattaggagatatacctaatgttaaataatgacttaatgggtgcagc

SEQ ID NO: 104093 - DNA, 120 bp, synthetic construct
  source 1..120: mol_type = other DNA
tattcatatgctgtttatttatttatatttatttacttttttattttttgaggcagagtcttgccctgtcacccaggctggagcacagtggcgcaatctcagctcactgcaacctctgcc

SEQ ID NO: 104094 - DNA, 120 bp, synthetic construct
  source 1..120: mol_type = other DNA
tccccgccgccatcccatctaggaagtgaggcgtgtctctgcccggccgcccatgtctgagatgtggggagcacctctgccccgccgccctgtctgggatgtgaggagcgcctctgctgg

SEQ ID NO: 104095 - DNA, 120 bp, synthetic construct
  source 1..120: mol_type = other DNA
cgagaaacacccaagaatgatcaataaaaaaataaataaataaataaataaaaataaagtttgagaagaactggtatggacttctcttttcttctttctttttctcctttctcccatctt

SEQ ID NO: 104096 - DNA, 120 bp, synthetic construct; identical to SEQ ID NO: 31521
  source 1..120: mol_type = other DNA

SEQ ID NO: 104097 - DNA, 120 bp, synthetic construct; identical to SEQ ID NO: 31522
  source 1..120: mol_type = other DNA

SEQ ID NO: 104098 - DNA, 120 bp, synthetic construct
  source 1..120: mol_type = other DNA
attaaaaaatgataaaggggatatcaccaccgatcccacagaaatacaaattaccatcagagaatactacaaacacctctatgcaaataaactagaaaatctagaagaaatggataaatt

SEQ ID NO: 104099 - DNA, 120 bp, synthetic construct
  source 1..120: mol_type = other DNA
tagatgcagataaggcctttgacaaaattcaacaacccttcatgctaaaaactctcaaaaaattaggtattgatgggacatatctcaaaataataagagctatctatgacaaacccacag

SEQ ID NO: 104100 - DNA, 120 bp, synthetic construct
  source 1..120: mol_type = other DNA
ccctagaacaaaacctaggcattaccattcaggacacaggcatgggcaaggacttcatgtctaaaacaccaaaggcaatggcaacaaaagccaaaattgacaaatgggatctaattaaac

SEQ ID NO: 104101 - DNA, 120 bp, synthetic construct
  source 1..120: mol_type = other DNA
taactaacccacacattgtgcacatgtaccctaaaacttaaagtataataatataaaataaagtgaaataaaataaaaaaatgcaaatcaataaacataatccagcatataaacagaacc

SEQ ID NO: 104102 - DNA, 120 bp, synthetic construct
  source 1..120: mol_type = other DNA
ccagagtgtgatgttccccttcctgtgtccaagtgttctcattgttcaattccatctgtgagtgagaacatgtggtgtttggttttttgtccttgcgatagtttactgagaatgatgatt

SEQ ID NO: 104103 - DNA, 120 bp, synthetic construct
  source 1..120: mol_type = other DNA
agagtgagactccatctcaaaaaaataaaataaaataaaaaataaaacaaactgggggcgcaggatattcagccaggcatactggcacatgcctgtagttccagctactcaggaggccaa

SEQ ID NO: 104104 - DNA, 120 bp, synthetic construct; identical to SEQ ID NO: 13489
  source 1..120: mol_type = other DNA

SEQ ID NO: 104105 - DNA, 120 bp, synthetic construct; identical to SEQ ID NO: 13490
  source 1..120: mol_type = other DNA

SEQ ID NO: 104106 - DNA, 120 bp, synthetic construct; identical to SEQ ID NO: 13491
  source 1..120: mol_type = other DNA

SEQ ID NO: 104107 - DNA, 120 bp, synthetic construct
  source 1..120: mol_type = other DNA
gcacacaacctagagtgctgcaccaggtcctgcccttgccagttagttagtgagctcccttgccagttagttagtgagcacccttgccagttagttagtgagctcccttgccagttagtg

SEQ ID NO: 104108 - DNA, 120 bp, synthetic construct; identical to SEQ ID NO: 13492
  source 1..120: mol_type = other DNA

SEQ ID NO: 104109 - DNA, 120 bp, synthetic construct; identical to SEQ ID NO: 13493
  source 1..120: mol_type = other DNA

SEQ ID NO: 104110 - DNA, 120 bp, synthetic construct; identical to SEQ ID NO: 13494
  source 1..120: mol_type = other DNA

SEQ ID NO: 104111 - DNA, 120 bp, synthetic construct; identical to SEQ ID NO: 22454
  source 1..120: mol_type = other DNA

SEQ ID NO: 104112 - DNA, 120 bp, synthetic construct; identical to SEQ ID NO: 22455
  source 1..120: mol_type = other DNA

SEQ ID NO: 104113 - DNA, 120 bp, synthetic construct
  source 1..120: mol_type = other DNA
taaaacttattttaaaatatatgtcaggaccagaagtggtgtggcttatgcctggaatcccagtactttgggaggctgaagtgggctgatcacttgagctcaggagtttgagaacagcct

SEQ ID NO: 104114 - DNA, 120 bp, synthetic construct
  source 1..120: mol_type = other DNA
ttctgatataaagcttaaaatacattagaagtaaagcttttggccaggcacagtggctcgcgcctgtaatcccagcactttgggaggcccagataggtggataggtggatcacttgagat

SEQ ID NO: 104115 - DNA, 120 bp, synthetic construct; identical to SEQ ID NO: 24767
  source 1..120: mol_type = other DNA

SEQ ID NO: 104116 - DNA, 120 bp, synthetic construct; identical to SEQ ID NO: 24768
  source 1..120: mol_type = other DNA

SEQ ID NO: 104117 - DNA, 120 bp, synthetic construct
  source 1..120: mol_type = other DNA
taatgacaggatcaaattcacatataacaatattaaccttaaatgtaaatgggcaaaatgctccattttgacttgactggataaagagtcaagacccatcagtgtgctgtattcaggaga

SEQ ID NO: 104118 - DNA, 120 bp, synthetic construct; identical to SEQ ID NO: 12007
  source 1..120: mol_type = other DNA

SEQ ID NO: 104119 - DNA, 120 bp, synthetic construct
  source 1..120: mol_type = other DNA
agagatatagaccaatggaacagaacagagccaacgcatgtacaaccatctgatctttgacaaacctgacaaaaacaagaaatggggaaaggattccctatttaataaatggtgctggga

SEQ ID NO: 104120 - DNA, 120 bp, synthetic construct
  source 1..120: mol_type = other DNA
cacattttcttaatccagtctatcattgatggacatttgggttggttccaagtctttgctattgtgaatagtgctgcagtaaacatacgtgtgcatgtgtctttatagcagcatgattta

SEQ ID NO: 104121 - DNA, 120 bp, synthetic construct
  source 1..120: mol_type = other DNA
catttcaagtcccatcagccagaaactatcattactattaacatcaataaagctgttaaagcttgttaatttaaaaaagagaggccgggcgcggtggctcacgtctgtaatcccagcact

SEQ ID NO: 104122 - DNA, 120 bp, synthetic construct; identical to SEQ ID NO: 15331
  source 1..120: mol_type = other DNA

SEQ ID NO: 104123 - DNA, 120 bp, synthetic construct; identical to SEQ ID NO: 8888
  source 1..120: mol_type = other DNA

SEQ ID NO: 104124 - DNA, 120 bp, synthetic construct
  source 1..120: mol_type = other DNA
tccctttccgagtcaaagaaaggggtgatcgacgcacctggaaaatcgggtcactcccacccgaatattgcgcttttcggaccggcttaaaaaatggcgcaccaggagattatatcctgc

SEQ ID NO: 104125 - DNA, 120 bp, synthetic construct
  source 1..120: mol_type = other DNA
aaagaagttgaaaactttgaaaaaaaattagaagaatgtataactagaataaccaatacagagaagtgcttaaaggagctgatggagctgaaaaccaaggctcgagaactacgtgaagaa

SEQ ID NO: 104126 - DNA, 120 bp, synthetic construct
  source 1..120: mol_type = other DNA
ctaggaagaaactgcatcaactaacgagcaaaatcaccagctaacatcataatgacaggatcaaattcatacataacaatattaactttaaatgtaaatggactaaatgctccaattaaa

SEQ ID NO: 104127 - DNA, 120 bp, synthetic construct
  source 1..120: mol_type = other DNA
agtgaaatgaaggcagaaataaagatgttctttgaaaccaacgagaacaaagacacaacataccagaatctctgggacgcattcaaagcagtgtgtagagggaaatttatagcactaaat

SEQ ID NO: 104128 - DNA, 120 bp, synthetic construct
  source 1..120: mol_type = other DNA
tcaataaattaggtactgatgggacgtatttcaaaataataagagctatctatgacaaacgcacagccaatatcatactgaatgggcaaaaactggaagcattccctttgaaaactggca

SEQ ID NO: 104129 - DNA, 120 bp, synthetic construct
  source 1..120: mol_type = other DNA
ctggaggcatcacactacctgacttcaaactatactacaaggctacagtaaccaaaacaacatggtactgttaccaaaacagagatatagatcaatggaacagaacagagcccgcagaaa

SEQ ID NO: 104130 - DNA, 120 bp, synthetic construct
  source 1..120: mol_type = other DNA
tgacccaggcatcccattactgggtatatacccaaaggactataaatcatgctgctataaagacacatgcacacgtatgtttattgcggcattattcacaatagcaaagacttggaacca

SEQ ID NO: 104131 - DNA, 120 bp, synthetic construct
  source 1..120: mol_type = other DNA
aatttggttgccgaccggaccctttagagagcaattatgcacccgcggttgatcaaaagttggccttaagaccacattagtaaacaagctatttagataaactactctaccttcctttgt

SEQ ID NO: 104132 - DNA, 120 bp, synthetic construct
  source 1..120: mol_type = other DNA
gtaatcccaacactttgagaggctgaggcgggcggatcatctgaggtcaggagttcgagagcagcctggctaatatgacaaaaccctgtctctactaaaaatacaaaaattagctgggcg

SEQ ID NO: 104133 - DNA, 120 bp, synthetic construct
  source 1..120: mol_type = other DNA
ttttgtttcatgaccagtaaaccacagagtggttatgttttattcctgccaattttctttctttttttttttttttttgaaacggagtctcgctctgttgcccaggctggagtgcagtgg

SEQ ID NO: 104134 - DNA, 120 bp, synthetic construct
  source 1..120: mol_type = other DNA
tctttagtgtaattagatcccatttgttaattttgacttttgttgccattgcttttggtgttttagacatgaagtccttgcccatgcctatgtcctgaatggtattgcctaggttttctt

SEQ ID NO: 104135 - DNA, 120 bp, synthetic construct
  source 1..120: mol_type = other DNA
tgattttgtatcctgagactttgctgaagttgcttatcagcttaagattttgggctgagctgatggggttttctagatatacaatcatgtcatctgcaaacagggacaatttgacttcct

SEQ ID NO: 104136 - DNA, 120 bp, synthetic construct
  source 1..120: mol_type = other DNA
actaagtggaagtcagtgtggggctcgttagtttaaagaaattccgtaggagaccgaaattatgctggcgtagccgacaaggaggactaagtgacggcgaaaagcacttttttccctttt

SEQ ID NO: 104137 - DNA, 120 bp, synthetic construct; identical to SEQ ID NO: 28542
  source 1..120: mol_type = other DNA

SEQ ID NO: 104138 - DNA, 120 bp, synthetic construct; identical to SEQ ID NO: 20468
  source 1..120: mol_type = other DNA

SEQ ID NO: 104139 - DNA, 120 bp, synthetic construct
  source 1..120: mol_type = other DNA
aatataactgattcctaaaaagctgtgggcggatcatgaggtcaggagatcgagactatcctggctaacacagtgaaacctcgtctctgctaaaaatacaaaaaaattggctaagcatgg

SEQ ID NO: 104140 - DNA, 120 bp, synthetic construct; identical to SEQ ID NO: 24295
  source 1..120: mol_type = other DNA

SEQ ID NO: 104141 - DNA, 120 bp, synthetic construct; identical to SEQ ID NO: 24296
  source 1..120: mol_type = other DNA

SEQ ID NO: 104142 - DNA, 120 bp, synthetic construct
  source 1..120: mol_type = other DNA
gaataatgccacaataaacatacatgtgcatgtgtctttatagcagcatgatttatagccctttgggtatatacccagtaatgggatggctgggtcaaatggtatttctagttctagatc

SEQ ID NO: 104143 - DNA, 120 bp, synthetic construct
  source 1..120: mol_type = other DNA
ccattttcacaatattgattcttcctacccatgagcatggaatgttcttccatttgtttgtatcctcttttatttcattgagcagcggtttgtagttctccttgaagaggtccttgacat

SEQ ID NO: 104144 - DNA, 120 bp, synthetic construct
  source 1..120: mol_type = other DNA
accagtttcctccttgtacctctggtagaattcggctgtgaatccatctggtcctggactctttttggttggtaagctattgattattgccacaatttcagatcctgttattggtctatt

SEQ ID NO: 104145 - DNA, 120 bp, synthetic construct
  source 1..120: mol_type = other DNA
tgttgactttctgtctcgttgatctgtctaatgttgacagtggggtgttaaattctcccattattaatgtgtgggagtctaagtctctttgtaggtcactcaggacttgctttatgaatc

SEQ ID NO: 104146 - DNA, 120 bp, synthetic construct; identical to SEQ ID NO: 103994
  source 1..120: mol_type = other DNA

SEQ ID NO: 104147 - DNA, 120 bp, synthetic construct
  source 1..120: mol_type = other DNA
gttcaagcttcccggctgctttgtttacctaagcaagcctgggcaatggtgggcgcccctaccccagcctcgctgccaccttgcagtttgatctcagactgctgtgctagcaatcagcga

SEQ ID NO: 104148 - DNA, 120 bp, synthetic construct
  source 1..120: mol_type = other DNA
catttacttgtctctctcttgtcaccagatagacagacaaaggcgctgcctctgagggttaaatgagcccccatccttccaacccccaggtccacagcccaaggcctctgggggttattt

SEQ ID NO: 104149 - DNA, 120 bp, synthetic construct; identical to SEQ ID NO: 33147
  source 1..120: mol_type = other DNA

SEQ ID NO: 104150 - DNA, 120 bp, synthetic construct; identical to SEQ ID NO: 33148
  source 1..120: mol_type = other DNA

SEQ ID NO: 104151 - DNA, 120 bp, synthetic construct; identical to SEQ ID NO: 19544
  source 1..120: mol_type = other DNA

SEQ ID NO: 104152 - DNA, 120 bp, synthetic construct; identical to SEQ ID NO: 19545
  source 1..120: mol_type = other DNA

SEQ ID NO: 104153 - DNA, 120 bp, synthetic construct; identical to SEQ ID NO: 11069
  source 1..120: mol_type = other DNA

SEQ ID NO: 104154 - DNA, 120 bp, synthetic construct
  source 1..120: mol_type = other DNA
cagccgccccgtctgagaagtgaggagcccctccacccggcagccgccccgtctgggaagtgaggagcgtctccgcccggcagccaccccgtccgggagggaggaggggggtcagcccct

SEQ ID NO: 104155 - DNA, 120 bp, synthetic construct; identical to SEQ ID NO: 11070
  source 1..120: mol_type = other DNA

SEQ ID NO: 104156 - DNA, 120 bp, synthetic construct
  source 1..120: mol_type = other DNA
tttgcatttctctgatggccagtgatgatgagcattttttcatgtgtcttttggctgcataaatgtcttcttttgagaagtgtctgttcatgtccttcgcccacttgttgatggggttgt

SEQ ID NO: 104157 - DNA, 120 bp, synthetic construct
  source 1..120: mol_type = other DNA
ccttcacatcccttgtaagttggattcctaggtattttattctttttgaagcaattgtgagtgggagttcactcattatttggctgtctgtttgtctgttactggtgtataagaatgctt

SEQ ID NO: 104158 - DNA, 120 bp, synthetic construct
  source 1..120: mol_type = other DNA
cacctctacgcaaataaactggaaaatctagaagaaatggataaattcctcgacacatacactctcccaagactaaaccaggaagaagttgaatctctgaatagaccaataacaggatct

SEQ ID NO: 104159 - DNA, 120 bp, synthetic construct; identical to SEQ ID NO: 21593
  source 1..120: mol_type = other DNA

SEQ ID NO: 104160 - DNA, 120 bp, synthetic construct; identical to SEQ ID NO: 21594
  source 1..120: mol_type = other DNA

SEQ ID NO: 104161 - DNA, 120 bp, synthetic construct
  source 1..120: mol_type = other DNA
ccaccactcggagaagaggccacacttactatcccattttacagaaggggaaactgaggcatggaagcatgaaataacctgcccaggtggcgccgtccgcacacggaggaggcaggaacg

SEQ ID NO: 104162 - DNA, 120 bp, synthetic construct
  source 1..120: mol_type = other DNA
acccgggaatggaggcgcggaccagtgcagtgggggggcggaccggggagtggggcgcggaccggggattagggggcggaccggggagtagggggcggaacaggtaaatggggacgtgga

SEQ ID NO: 104163 - DNA, 120 bp, synthetic construct
  source 1..120: mol_type = other DNA
tcattttgtctcctgggctcaagtgattgtcccacttcagcctcccaaagtgctgagattacaggtgtgagtccttgtgcctgtccttaaatttttttgtttgacttttctttttagaga

SEQ ID NO: 104164 - DNA, 120 bp, synthetic construct
  source 1..120: mol_type = other DNA
ccaagattgcgccactgcactctagcctgggtgacaaagcgagactccgtctccaaaaaaaaaaagagtcattaaggccaggtgaggtggttcacgcctgtaatcccagcactttgggag

SEQ ID NO: 104165 - DNA, 120 bp, synthetic construct
  source 1..120: mol_type = other DNA
caccttggcctcccaaagtgctgggattacaggcgtgagccaccacgcgtgacctgaaaacatatgtttaagaatcacttttacatttccttttctgtagtatttttgtttgtttattcc

SEQ ID NO: 104166 - DNA, 120 bp, synthetic construct; identical to SEQ ID NO: 15725
  source 1..120: mol_type = other DNA

SEQ ID NO: 104167 - DNA, 120 bp, synthetic construct
  source 1..120: mol_type = other DNA
cgtggtcaagacccgcttttcagccagatgtggtggctcacgcctggaatcccagcacattaggaggcctaggcgggcagatcacttgaggtcaggagtttgagatcagcctggccaaca

SEQ ID NO: 104168 - DNA, 120 bp, synthetic construct
  source 1..120: mol_type = other DNA
ttcctgtacccttcacttcctcctgtaccccctcacctcctcctgcaccccccttacctcctgtaccccctcacctcctcctgtaccgcctcacctcctcctataccccctcacctcctc

SEQ ID NO: 104169 - DNA, 120 bp, synthetic construct; identical to SEQ ID NO: 15728
  source 1..120: mol_type = other DNA

SEQ ID NO: 104170 - DNA, 120 bp, synthetic construct; identical to SEQ ID NO: 15729
  source 1..120: mol_type = other DNA

SEQ ID NO: 104171 - DNA, 120 bp, synthetic construct; identical to SEQ ID NO: 15718
  source 1..120: mol_type = other DNA

SEQ ID NO: 104172 - DNA, 120 bp, synthetic construct; identical to SEQ ID NO: 15719
  source 1..120: mol_type = other DNA

SEQ ID NO: 104173 - DNA, 120 bp, synthetic construct
  source 1..120: mol_type = other DNA
accccgccgggacgtgctgacgtcaggcccgacggggggcggggcctgggcggcggcggcgttagttctccgggtacctcaggcgcctcagcctccttagtctcctcatcctgcttcaca

SEQ ID NO: 104174 - DNA, 120 bp, synthetic construct
  source 1..120: mol_type = other DNA
ggcatacactgtaatgatcaagttggggtgtctgtcacctccatatttatctttttttttttttttttttttttgagacatagtctctgtctcttgcccaggctggagtgcagtggcgcg

SEQ ID NO: 104175 - DNA, 120 bp, synthetic construct
  source 1..120: mol_type = other DNA
cacaagcatgcaccaccatgcccagctctggctaattttttgtatttttggtagatatttttgtatttttgtttcactgtggtgcccaggtcagtttcgaactcctgacctcaagtgatc

SEQ ID NO: 104176 - DNA, 120 bp, synthetic construct
  source 1..120: mol_type = other DNA
gtacccttcagatgggtgattttgtggtatgtgaattttatttcaatgaagctgttaacagaaatagtacagagtccgtactgttgtgttttctggagcacctggagtcccctctgtccc

SEQ ID NO: 104177 - DNA, 120 bp, synthetic construct
  source 1..120: mol_type = other DNA
agcctgggtgatagagtgagactccatcttaaaaaaggaaacaaaaaaaagccacaaagaaggacttagaattgggtgctaagcaggcctcttcctactgataggtggacacatctattt

SEQ ID NO: 104178 - DNA, 120 bp, synthetic construct
  source 1..120: mol_type = other DNA
atttctttattttttaatttttttttattttttatttttgagacggagtctcgctctgttgcccaggctagagtgcagtgagcgatcttggctcactgcaagctccacctcccgggttca

SEQ ID NO: 104179 - DNA, 120 bp, synthetic construct; identical to SEQ ID NO: 15720
  source 1..120: mol_type = other DNA

SEQ ID NO: 104180 - DNA, 120 bp, synthetic construct; identical to SEQ ID NO: 15721
  source 1..120: mol_type = other DNA

SEQ ID NO: 104181 - DNA, 120 bp, synthetic construct
  source 1..120: mol_type = other DNA
ggcctcccaaagtgctgggattacagtcgtgagccattgcggccagctgttatatttatttttaattaattaatttttttgagatgggtctttatcactcaggttggagcacagtggtgt

SEQ ID NO: 104182 - DNA, 120 bp, synthetic construct; identical to SEQ ID NO: 15722
  source 1..120: mol_type = other DNA

SEQ ID NO: 104183 - DNA, 120 bp, synthetic construct; identical to SEQ ID NO: 15723
  source 1..120: mol_type = other DNA

SEQ ID NO: 104184 - DNA, 120 bp, synthetic construct
  source 1..120: mol_type = other DNA
gcagcctctaaatacatttcattttgtaggaactaagaagtgtgccttacctggaggtatattttcttttttcttttttttgagacagagtctcgctttgtgacccaggccggagtgcag

SEQ ID NO: 104185 - DNA, 120 bp, synthetic construct
  source 1..120: mol_type = other DNA
gtgagccgagatcatgccactgcactccagcctgggtgacacagtgagactccatcttaaaaaaaaaaacctgtattaaaatatacattattagtctccagtcgagaaaggagagccaca

SEQ ID NO: 104186 - DNA, 120 bp, synthetic construct; identical to SEQ ID NO: 17866
  source 1..120: mol_type = other DNA

SEQ ID NO: 104187 - DNA, 120 bp, synthetic construct
  source 1..120: mol_type = other DNA
gatcaagaacctggttgcagaattttctggggtttaaataccatctagaggtttcccattggttacttggtgtacaccctatgtaaatgaagtagtggcccacagtcagtttgattggtt

SEQ ID NO: 104188 - DNA, 120 bp, synthetic construct
  source 1..120: mol_type = other DNA
ttatcttgtctctgctctctctttcccagggcagcgaggtcacaggccccacctttgctgatggcgagctcatccccagggaacccggcttttttcccgaggacgaggaggaggctatga

SEQ ID NO: 104189 - DNA, 120 bp, synthetic construct
  source 1..120: mol_type = other DNA
gaattgtcactcctgccattcccaacaggttttttttggttgtgtttttttgtttttttgtttttttttgttttgagacggagtctcgttctgttgcccaggctggagtgcagtggcaca

SEQ ID NO: 104190 - DNA, 120 bp, synthetic construct
  source 1..120: mol_type = other DNA
aggcctaactcaaaaactatccccagagattccttcatggaactaagacaacattattattcacccacagtctccaaggaaatccctcatagatccttcccaactcagacaccagttcta

SEQ ID NO: 104191 - DNA, 120 bp, synthetic construct
  source 1..120: mol_type = other DNA
tattctttttttgtttgtttgttttgagacaagagtctcgctctgttgcccaggctggagtgcagtgaagcaatctcaggtcactgcagcctccacctcccaggttcaagcaattctcct

SEQ ID NO: 104192 - DNA, 120 bp, synthetic construct; identical to SEQ ID NO: 12012
  source 1..120: mol_type = other DNA

SEQ ID NO: 104193 - DNA, 120 bp, synthetic construct; identical to SEQ ID NO: 13942
  source 1..120: mol_type = other DNA

SEQ ID NO: 104194 - DNA, 120 bp, synthetic construct; identical to SEQ ID NO: 13943
  source 1..120: mol_type = other DNA

SEQ ID NO: 104195 - DNA, 120 bp, synthetic construct; identical to SEQ ID NO: 13944
  source 1..120: mol_type = other DNA

SEQ ID NO: 104196 - DNA, 120 bp, synthetic construct; identical to SEQ ID NO: 15328
  source 1..120: mol_type = other DNA

SEQ ID NO: 104197 - DNA, 120 bp, synthetic construct; identical to SEQ ID NO: 15329
  source 1..120: mol_type = other DNA

SEQ ID NO: 104198 - DNA, 120 bp, synthetic construct; identical to SEQ ID NO: 31548
  source 1..120: mol_type = other DNA

SEQ ID NO: 104199 - DNA, 120 bp, synthetic construct
  source 1..120: mol_type = other DNA
gacgaggtggctgccgggcagagacgctcctcacttctcagacagggtggctgccgggcagaggggctcctcacttctcagacagggcagttgccaggcagagggtctcctcacttctca

SEQ ID NO: 104200 - DNA, 120 bp, synthetic construct; identical to SEQ ID NO: 31549
  source 1..120: mol_type = other DNA

SEQ ID NO: 104201 - DNA, 120 bp, synthetic construct; identical to SEQ ID NO: 31550
  source 1..120: mol_type = other DNA

SEQ ID NO: 104202 - DNA, 120 bp, synthetic construct; identical to SEQ ID NO: 18793
  source 1..120: mol_type = other DNA

SEQ ID NO: 104203 - DNA, 120 bp, synthetic construct; identical to SEQ ID NO: 18794
  source 1..120: mol_type = other DNA

SEQ ID NO: 104204 - DNA, 120 bp, synthetic construct; identical to SEQ ID NO: 12338
  source 1..120: mol_type = other DNA

SEQ ID NO: 104205 - DNA, 120 bp, synthetic construct; identical to SEQ ID NO: 7620
  source 1..120: mol_type = other DNA

SEQ ID NO: 104206 - DNA, 120 bp, synthetic construct
  source 1..120: mol_type = other DNA
actcagctctctccaggtttctacaaaattccacttgctcttaaggatttcatgagtttagcagatttttagaagttattcagtgtcaggcagtgttctaggacaggtcctatcacaggg

SEQ ID NO: 104207 - DNA, 120 bp, synthetic construct
  source 1..120: mol_type = other DNA
tttatttggaaaaaatttaaattttatagataagttgcaaatataaaaagagtgtaaagaatacccatacacccttttcccagaaagacttattgttagcatttcacacaattggctttt

SEQ ID NO: 104208 - DNA, 120 bp, synthetic construct
  source 1..120: mol_type = other DNA
tctgattctagatccttgaggaatcaccacactgtcttcagcaatggttgaactaatttacactcccaccaacagtgtaaaagtgttcctgtttctccaccacctcaccagcatctattg

SEQ ID NO: 104209 - DNA, 120 bp, synthetic construct; identical to SEQ ID NO: 26583
  source 1..120: mol_type = other DNA

SEQ ID NO: 104210 - DNA, 120 bp, synthetic construct
  source 1..120: mol_type = other DNA
tattttaattactataaatttgttatacattctggtaggacaaatatccccccattatttccttcttcaatcactgggctatattagtcccctcccctcccctcccctcccctcccctcc

SEQ ID NO: 104211 - DNA, 120 bp, synthetic construct; identical to SEQ ID NO: 21584
  source 1..120: mol_type = other DNA

SEQ ID NO: 104212 - DNA, 120 bp, synthetic construct; identical to SEQ ID NO: 21585
  source 1..120: mol_type = other DNA

SEQ ID NO: 104213 - DNA, 120 bp, synthetic construct; identical to SEQ ID NO: 21586
  source 1..120: mol_type = other DNA

SEQ ID NO: 104214 - DNA, 120 bp, synthetic construct
  source 1..120: mol_type = other DNA
gcacaatgtgcaggattgttacatatgtatacatgtgccatattggtgcgctgcacccattaacctaatcatttagcattaggtatatctcctaatgctatccctcccccctccccccac

SEQ ID NO: 104215 - DNA, 120 bp, synthetic construct
  source 1..120: mol_type = other DNA
gttgaaaatcacctcattcacattgttactaagaaaaggtcaatgacctttttagctctgactgtcccttgcaagaattgagcaatgcacagtactgcccctgaggtaccatatggagag

SEQ ID NO: 104216 - DNA, 120 bp, synthetic construct
  source 1..120: mol_type = other DNA
ataggacacttttacactgttggtgggactgtaaactagttcaaccattgtggaagtcagtgtggcgattcctcagggatctagaactagaaataccatttgacccagccatcccattac

SEQ ID NO: 104217 - DNA, 120 bp, synthetic construct
  source 1..120: mol_type = other DNA
ccagcatggcacatgtatacatatgtaactaacctgcacgatgtgcacatgtataataaaaaataaataaataaaaagaagaaaaaaaaagtgggcaaagcacatgaacagatatttctc

SEQ ID NO: 104218 - DNA, 120 bp, synthetic construct; identical to SEQ ID NO: 9373
  source 1..120: mol_type = other DNA

SEQ ID NO: 104219 - DNA, 120 bp, synthetic construct; identical to SEQ ID NO: 9374
  source 1..120: mol_type = other DNA

SEQ ID NO: 104220 - DNA, 120 bp, synthetic construct; identical to SEQ ID NO: 13051
  source 1..120: mol_type = other DNA

SEQ ID NO: 104221 - DNA, 120 bp, synthetic construct
  source 1..120: mol_type = other DNA
agtcccaccaacagtgtaaaagtgttcctatttctccgcatcctctccagcacctgttgtttcctgactttttaatgattgccattctaactggtgtgagatgatatctcatagtggttt

SEQ ID NO: 104222 - DNA, 120 bp, synthetic construct
  source 1..120: mol_type = other DNA
aattctgtgaagaaagtcattggtagcttgatggggatggcattgaatctgtaaattaccttgggcagtatggccattttcatgatattgattcttcctacccatgagatggaatgttct

SEQ ID NO: 104223 - DNA, 120 bp, synthetic construct
  source 1..120: mol_type = other DNA
tttgattgtgtctctgcccggctttggtatcagaatgatggtggcctcataaaatgagttagggaggattccctctttttctattgattggaatagtttcagaaggaatggtaccagttc

SEQ ID NO: 104224 - DNA, 120 bp, synthetic construct
  source 1..120: mol_type = other DNA
aaagtctcccattattaatgtgtgggagtctaagtctctttgtaggtcactgaggacttgctttatgaatctgggtgctcctgtattgggtgcataaatatttaggatagttagctcctc

SEQ ID NO: 104225 - DNA, 120 bp, synthetic construct
  source 1..120: mol_type = other DNA
gacgtagatttggtcttttcacatagtcccatatttcttggaggctttgctcatttctttttattcttttttctctaaacttcccttctcccttcatttcattcatttcatcttccattg

SEQ ID NO: 104226 - DNA, 120 bp, synthetic construct
  source 1..120: mol_type = other DNA
cagaggtggagcctacagaggcaggcaggcctccttgagctgtggtgggctccacccagttcgagcttcccggctgctttgtttacctaagcaagcctgggcaatggcgggcgtccctcc

SEQ ID NO: 104227 - DNA, 120 bp, synthetic construct; identical to SEQ ID NO: 13050
  source 1..120: mol_type = other DNA

SEQ ID NO: 104228 - DNA, 120 bp, synthetic construct
  source 1..120: mol_type = other DNA
tgagctgttgggtacacctcccagacggggtggtggccgggcagaggagctcctcacttcccagaaggggcggccgggcagaggcgcctccgacctcccggacggggcggcggccgggcg

SEQ ID NO: 104229 - DNA, 120 bp, synthetic construct
  source 1..120: mol_type = other DNA
aaattacagcctttaaactagaatctttccttagaataccacttacctgctttggggtttatgtcctttttcttttctttctttttttttttttttttttttttaataaatttgcatctt

SEQ ID NO: 104230 - DNA, 120 bp, synthetic construct
  source 1..120: mol_type = other DNA
gcttttggtgttttagacatgaagtccttgcccatgcctatgtcctgaatggtattgcataggttttcttctagggtttttatggttttaggtctaacatttaagtctttaatccatctt

SEQ ID NO: 104231 - DNA, 120 bp, synthetic construct
  source 1..120: mol_type = other DNA
actagccctttgtcagatgagtaggttgcaaaaattttctcccattctgtaggttgcctgttcactctgatggtggtttcttttgttgtgcagaagctctttagtttaattagatcccat

SEQ ID NO: 104232 - DNA, 120 bp, synthetic construct
  source 1..120: mol_type = other DNA
agttgaatgccctttattcccttctcctgcctgattgccctggccagaacttccaacactatgttgaataggagtggtgagagagggcatccctgtcttgtgccagttttcaaagggaat

SEQ ID NO: 104233 - DNA, 120 bp, synthetic construct
  source 1..120: mol_type = other DNA
tctctgatggtagtttgtatttctgtgggagcagtggtgatatcccctttatcattttttattgcacctatttgattcttctctcttttcttctttattagtcttgctagcggtctatca

SEQ ID NO: 104234 - DNA, 120 bp, synthetic construct
  source 1..120: mol_type = other DNA
ttcctagatggggcggccgggcagaggtgctcacttcccagatggggcggctgggcagaggcgctcctcacctcccagatgatgggcagccaggcagaggcgctcctcacctcccagacg

SEQ ID NO: 104235 - DNA, 120 bp, synthetic construct
  source 1..120: mol_type = other DNA
gtttctgcacatgagatgggtttcctgaatacagcatactgatgggtcttgactctttatccaatttgccagtctgtgtcttttaattggagcatttagcccatttacatttaaggttaa

SEQ ID NO: 104236 - DNA, 120 bp, synthetic construct
  source 1..120: mol_type = other DNA
ccatatttcttgcaggctttgttcatttctttttattcttttttctctaaacttctcttcacgcttcatttcattcattttgtcttccatcactgataccctttcttccagttgattgca

SEQ ID NO: 104237 - DNA, 120 bp, synthetic construct
  source 1..120: mol_type = other DNA
gggaagattttgtaccatattccgctcctactctcgtggtgcacaaggagtgatcctggtctacgacattgcaaaccgctggtctttcgagggtatggatcgatggattaagaagattga

SEQ ID NO: 104238 - DNA, 120 bp, synthetic construct
  source 1..120: mol_type = other DNA
ctcaaatttcaaggaattgaagtttttaaaaatctctttggatccctcatcacccaatcagccacaggatctctctctctctctctctctctctctctctgtctctctgtctctctgtct

SEQ ID NO: 104239 - DNA, 120 bp, synthetic construct; identical to SEQ ID NO: 35055
  source 1..120: mol_type = other DNA

SEQ ID NO: 104240 - DNA, 120 bp, synthetic construct
  source 1..120: mol_type = other DNA
tgggtgggctctggggtgggcagacgatctccactttgcagaggctgctcttgtgagtggagctggtggtgagggagtaggagaggcctcgcatcatcctggcattcaggcccttagcca

SEQ ID NO: 104241 - DNA, 120 bp, synthetic construct; identical to SEQ ID NO: 18670
  source 1..120: mol_type = other DNA

SEQ ID NO: 104242 - DNA, 120 bp, synthetic construct; identical to SEQ ID NO: 18671
  source 1..120: mol_type = other DNA

SEQ ID NO: 104243 - DNA, 120 bp, synthetic construct; identical to SEQ ID NO: 18672
  source 1..120: mol_type = other DNA

SEQ ID NO: 104244 - DNA, 120 bp, synthetic construct; identical to SEQ ID NO: 18673
  source 1..120: mol_type = other DNA

SEQ ID NO: 104245 - DNA, 120 bp, synthetic construct; identical to SEQ ID NO: 18674
  source 1..120: mol_type = other DNA

SEQ ID NO: 104246 - DNA, 120 bp, synthetic construct; identical to SEQ ID NO: 18675
  source 1..120: mol_type = other DNA

SEQ ID NO: 104247 - DNA, 120 bp, synthetic construct; identical to SEQ ID NO: 18676
  source 1..120: mol_type = other DNA

SEQ ID NO: 104248 - DNA, 120 bp, synthetic construct; identical to SEQ ID NO: 15739
  source 1..120: mol_type = other DNA

SEQ ID NO: 104249 - DNA, 120 bp, synthetic construct
  source 1..120: mol_type = other DNA
acctgccgagtttaaaacattgttgttggacttttttaaagagctttggtgccggatgggcacggtggctcacgcctgtgatcccagcactttgggaggccgaggcgggcggatcacaag

SEQ ID NO: 104250 - DNA, 120 bp, synthetic construct; identical to SEQ ID NO: 15740
  source 1..120: mol_type = other DNA

SEQ ID NO: 104251 - DNA, 120 bp, synthetic construct; identical to SEQ ID NO: 15741
  source 1..120: mol_type = other DNA

SEQ ID NO: 104252 - DNA, 120 bp, synthetic construct; identical to SEQ ID NO: 15742
  source 1..120: mol_type = other DNA

SEQ ID NO: 104253 - DNA, 120 bp, synthetic construct; identical to SEQ ID NO: 15743
  source 1..120: mol_type = other DNA

SEQ ID NO: 104254 - DNA, 120 bp, synthetic construct; identical to SEQ ID NO: 15744
  source 1..120: mol_type = other DNA

SEQ ID NO: 104255 - DNA, 120 bp, synthetic construct; identical to SEQ ID NO: 15745
  source 1..120: mol_type = other DNA

SEQ ID NO: 104256 - DNA, 120 bp, synthetic construct; identical to SEQ ID NO: 15746
  source 1..120: mol_type = other DNA

SEQ ID NO: 104257 - DNA, 120 bp, synthetic construct
  source 1..120: mol_type = other DNA
gtcctgtcaaactcccaaggactttctttctttataaggatattctcacattggtttgtttatttgtttgttttgagacagagactcactctgtcacccaggctggagtacagtggcaca

SEQ ID NO: 104258 - DNA, 120 bp, synthetic construct
  source 1..120: mol_type = other DNA
ccagtagctgggagtacaggcgcagtgggtgtacttggagctgtgtgtgtgcacaggtgtagtgggtgcactcagggccatgtgtgtgtgcagccatgtgcacaggtctggcgggggcac

SEQ ID NO: 104259 - DNA, 120 bp, synthetic construct
  source 1..120: mol_type = other DNA
caacctgaccaacatggtgaaaccccatctctacgaaaaatacaaaaattagccgagcatggtggcgggcgcttataatcccagctacttaggaggctgaggcaggagaatcgcttgaac

SEQ ID NO: 104260 - DNA, 120 bp, synthetic construct; identical to SEQ ID NO: 24673
  source 1..120: mol_type = other DNA

SEQ ID NO: 104261 - DNA, 120 bp, synthetic construct; identical to SEQ ID NO: 24674
  source 1..120: mol_type = other DNA

SEQ ID NO: 104262 - DNA, 120 bp, synthetic construct; identical to SEQ ID NO: 24675
  source 1..120: mol_type = other DNA

SEQ ID NO: 104263 - DNA, 120 bp, synthetic construct; identical to SEQ ID NO: 24676
  source 1..120: mol_type = other DNA

SEQ ID NO: 104264 - DNA, 120 bp, synthetic construct
  source 1..120: mol_type = other DNA
actataaatggacacccctggcatggtcatctgtctttctttaaaaaaccttttttaggccgggtgcagtggctcacgcctgtaatcccaacactttgggaagctaaggcaggaagactg

SEQ ID NO: 104265 - DNA, 120 bp, synthetic construct; identical to SEQ ID NO: 9432
  source 1..120: mol_type = other DNA

SEQ ID NO: 104266 - DNA, 120 bp, synthetic construct; identical to SEQ ID NO: 9433
  source 1..120: mol_type = other DNA

SEQ ID NO: 104267 - DNA, 120 bp, synthetic construct; identical to SEQ ID NO: 12968
  source 1..120: mol_type = other DNA

SEQ ID NO: 104268 - DNA, 120 bp, synthetic construct; identical to SEQ ID NO: 12969
  source 1..120: mol_type = other DNA

SEQ ID NO: 104269 - DNA, 120 bp, synthetic construct; identical to SEQ ID NO: 12096
  source 1..120: mol_type = other DNA

SEQ ID NO: 104270 - DNA, 120 bp, synthetic construct; identical to SEQ ID NO: 12097
  source 1..120: mol_type = other DNA

SEQ ID NO: 104271 - DNA, 120 bp, synthetic construct
  source 1..120: mol_type = other DNA
aaaagtgtgtgtgtgggggggggggggggaggagggtagtggatgagaaatctaaggagtaaaactatttttcagaggctgtctttttatgaaatactgaatggaatgaaacacatttta

SEQ ID NO: 104272 - DNA, 120 bp, synthetic construct; identical to SEQ ID NO: 24732
  source 1..120: mol_type = other DNA

SEQ ID NO: 104273 - DNA, 120 bp, synthetic construct; identical to SEQ ID NO: 5183
  source 1..120: mol_type = other DNA

SEQ ID NO: 104274 - DNA, 120 bp, synthetic construct; identical to SEQ ID NO: 21442
  source 1..120: mol_type = other DNA

SEQ ID NO: 104275 - DNA, 120 bp, synthetic construct; identical to SEQ ID NO: 21443
  source 1..120: mol_type = other DNA

SEQ ID NO: 104276 - DNA, 120 bp, synthetic construct; identical to SEQ ID NO: 21552
  source 1..120: mol_type = other DNA

SEQ ID NO: 104277 - DNA, 120 bp, synthetic construct
  source 1..120: mol_type = other DNA
aattcaagctggtgttcctgggggagcaaagcgttgcaaagacatctttgatcaccagattcaggtatgacagttttgacaacacctatcaggcaataattggcattgactttttatcaa

SEQ ID NO: 104278 - DNA, 120 bp, synthetic construct; identical to SEQ ID NO: 24668
  source 1..120: mol_type = other DNA

SEQ ID NO: 104279 - DNA, 120 bp, synthetic construct; identical to SEQ ID NO: 24669
  source 1..120: mol_type = other DNA

SEQ ID NO: 104280 - DNA, 120 bp, synthetic construct; identical to SEQ ID NO: 9197
  source 1..120: mol_type = other DNA

SEQ ID NO: 104281 - DNA, 120 bp, synthetic construct; identical to SEQ ID NO: 9198
  source 1..120: mol_type = other DNA

SEQ ID NO: 104282 - DNA, 120 bp, synthetic construct; identical to SEQ ID NO: 33481
  source 1..120: mol_type = other DNA

SEQ ID NO: 104283 - DNA, 120 bp, synthetic construct; identical to SEQ ID NO: 16400
  source 1..120: mol_type = other DNA

SEQ ID NO: 104284 - DNA, 120 bp, synthetic construct; identical to SEQ ID NO: 32983
  source 1..120: mol_type = other DNA

SEQ ID NO: 104285 - DNA, 120 bp, synthetic construct
  source 1..120: mol_type = other DNA
cacatcccagacggggcggcagggcagaggcgctccccacatctcagacgatgggcggccgggcagagatgctcctcacttcctagatgggatggcggtcgggaagaggcgctcctcact

SEQ ID NO: 104286 - DNA, 120 bp, synthetic construct; identical to SEQ ID NO: 32984
  source 1..120: mol_type = other DNA

SEQ ID NO: 104287 - DNA, 120 bp, synthetic construct
  source 1..120: mol_type = other DNA
gtttacatatgtcatgccactgtctcctggcccataaggtttccacttagcttactgtctgacttagagctccattgtatgttatttgtttctcttctcttgctgcttttaggatacttt

SEQ ID NO: 104288 - DNA, 120 bp, synthetic construct
  source 1..120: mol_type = other DNA
caatctacccatctgacaaagggctaatatccagaatctacaaagaacttaaacaaatttacaagaaaaaatcaaacaaccccatcaaaaagtggacgaaggatatgaacagacacttct

SEQ ID NO: 104289 - DNA, 120 bp, synthetic construct; identical to SEQ ID NO: 2899
  source 1..120: mol_type = other DNA

SEQ ID NO: 104290 - DNA, 120 bp, synthetic construct
  source 1..120: mol_type = other DNA
aagtgctgggattacaggtgtgagccactgtgcctggccaaatgatctgttttaaaaagtacaatatgagtgtgatgttccccttcctgtgtccatgtgttctcattgttcaattcccac

SEQ ID NO: 104291 - DNA, 120 bp, synthetic construct
  source 1..120: mol_type = other DNA
ttccaattatactctttagatttatttatttatttattattttttgaaacagagtgtcactttgtcacccagactggagtgcagtggcacaatctcgactcactgcaacctccgcctcct

SEQ ID NO: 104292 - DNA, 120 bp, synthetic construct
  source 1..120: mol_type = other DNA
ttattatattttaagttttagggtacatgtggacaatgtgcaggttagttacatatgtatacatgtgccatgctggtgtgctgcacccattaactcgtcatttagcattaggtatatctc

SEQ ID NO: 104293 - DNA, 120 bp, synthetic construct
  source 1..120: mol_type = other DNA
ttgagaagtgtctgttcatgtcctttgcctattttttgatggggttgtttgtttttttcttgtaaatttgtttgagttcattgtagattctggatattagccctttgtcagatgagtagg

SEQ ID NO: 104294 - DNA, 120 bp, synthetic construct
  source 1..120: mol_type = other DNA
catgtgatttttatctttggttctgtttatatgctggattacatttattgatttgtgtatattgaaccagccttgcatcccagggatgaagcccacttgatcatggtggataagcttttt

SEQ ID NO: 104295 - DNA, 120 bp, synthetic construct
  source 1..120: mol_type = other DNA
tcagaccacagtgcaatcaaactagaactcaggattaagacactcactcaaaatcactcaactacatggaaactgaacaacctgctcctgaatgactgccaggtacataacgaaatgaag

SEQ ID NO: 104296 - DNA, 120 bp, synthetic construct
  source 1..120: mol_type = other DNA
cctttccatgtttagcgcttccttcaggagctcttttagggcaggcctggtggtgacaaaatctctcagcatttgcttgtctgtaaaggagtttatttctccttcacttatgaaacttag

SEQ ID NO: 104297 - DNA, 120 bp, synthetic construct
  source 1..120: mol_type = other DNA
gtatattctgttgatttggggtggagagttctgcagatggctgttaggtctgcttggtgcagagctgagttcaattcctggatatccttgttaactttctgtctcattgatctgtctaat

SEQ ID NO: 104298 - DNA, 120 bp, synthetic construct
  source 1..120: mol_type = other DNA
tttatagattcaatgccatccccatcaagctaccaatgactttcttcacagaactggagaaaactactttaaagttcatatggaaccaaaaatgaacctgcactgccaattcaatcctaa

SEQ ID NO: 104299 - DNA, 120 bp, synthetic construct
  source 1..120: mol_type = other DNA
ccacactgacttccacaatggttgaactagattacagtcccaccaacagtgtaaaagtattcctatttctccacatcctctccagcacctgttctttcctgactttttaatgatcaccat

SEQ ID NO: 104300 - DNA, 120 bp, synthetic construct
  source 1..120: mol_type = other DNA
ctcagcctcccaaagtgctgggattacaggcgtgagccatcgcgcctggccaggaaattttattaagtaaggacaaggtgattttattttcatttgattttgtcctttatttcttaaata

SEQ ID NO: 104301 - DNA, 120 bp, synthetic construct
  source 1..120: mol_type = other DNA
gttttttgtgtctctatttccttcagttgtgctctgattttagttatttcttgccttctgctagcttttgaatgtgtttgctcttgcttttctagttcttttaattgtgatgttagggtg

SEQ ID NO: 104302 - DNA, 120 bp, synthetic construct
  source 1..120: mol_type = other DNA
gagcctatgtatgtctctgcacgtgagatgggtttcctgaatacagcacactgatgggtcctgactctttatccaatttgccagtctgtgtcttttaattggagaatttagtccatttac

SEQ ID NO: 104303 - DNA, 120 bp, synthetic construct
  source 1..120: mol_type = other DNA
aacttcccttctcgcttcatttcattcatttcatcttccatcactgataccctttcttccagttgatcgcatcggctcctgaggcttctgcattcttcacgtagttctcgagccttggtt

SEQ ID NO: 104304 - DNA, 120 bp, synthetic construct
  source 1..120: mol_type = other DNA
ctaagccaaaagaacaaagctggaggcagcacactacctgacttcaaactatactacaaggctacagtaaccaaaacagcatggtagtggtaccaaaacagagatatagatcaatggaac

SEQ ID NO: 104305 - DNA, 120 bp, synthetic construct
  source 1..120: mol_type = other DNA
gaaaatgtggcacatatacaccatggaatactatgcagccataaaaaatgatgagttcatgtcctttgtagggacatggatgaaattggaaaccatcattctcagtaaactattgcaaga

SEQ ID NO: 104306 - DNA, 120 bp, synthetic construct; identical to SEQ ID NO: 9030
  source 1..120: mol_type = other DNA

SEQ ID NO: 104307 - DNA, 120 bp, synthetic construct; identical to SEQ ID NO: 9031
  source 1..120: mol_type = other DNA

SEQ ID NO: 104308 - DNA, 120 bp, synthetic construct
  source 1..120: mol_type = other DNA
cttgcatcccagggatggagcccacttgatcatggtggataagctttttgatgtgccacttgattcggtttgccagtattttattcaggatttttgcatcagtgttcaccaaggatattg

SEQ ID NO: 104309 - DNA, 120 bp, synthetic construct
  source 1..120: mol_type = other DNA
tcaaagaacatctttatttctgccttcatttcgttatgtacccagcagtcattcaggagcaggtttttcagtttccatgtagttgagtgattttgagtgagtttcttaatcctgagttct

SEQ ID NO: 104310 - DNA, 120 bp, synthetic construct; identical to SEQ ID NO: 9032
  source 1..120: mol_type = other DNA

SEQ ID NO: 104311 - DNA, 120 bp, synthetic construct
  source 1..120: mol_type = other DNA
gagaagtgtctgttcatgtccttcacccactttttgatggggttgtttgttttttacttgtaaatttgtttgagttcattgtagattctggatattagccctttgtcagatgagtaggtt

SEQ ID NO: 104312 - DNA, 120 bp, synthetic construct; identical to SEQ ID NO: 9033
  source 1..120: mol_type = other DNA

SEQ ID NO: 104313 - DNA, 120 bp, synthetic construct
  source 1..120: mol_type = other DNA
gtcccgtgctgttttggttgcagtagctctgtagtataatttgaagtcaggtaatgtgagttctccagttttgttctttttgtttaggatggcttaggctattccaggtctttcatgggt

SEQ ID NO: 104314 - DNA, 120 bp, synthetic construct; identical to SEQ ID NO: 102648
  source 1..120: mol_type = other DNA

SEQ ID NO: 104315 - DNA, 120 bp, synthetic construct
  source 1..120: mol_type = other DNA
gctctgttctgttccattgatctatatctctcttttggtaccagtaccatgctgttttggttactgtagccttgtagtatagtttgaagtcaggtagtgtgatgcctccagctttgttct

SEQ ID NO: 104316 - DNA, 120 bp, synthetic construct
  source 1..120: mol_type = other DNA
aatacgtcccatcaatacctaatttattgagagtttttagcatgaagggttgttgaattttgtcaaaggctttttctgcatctattgagataatcatgtggtttttgtctttggctctgt

SEQ ID NO: 104317 - DNA, 120 bp, synthetic construct; identical to SEQ ID NO: 67113
  source 1..120: mol_type = other DNA

SEQ ID NO: 104318 - DNA, 120 bp, synthetic construct
  source 1..120: mol_type = other DNA
ggtaccggttgttcctttccatgtttagcgcttccttcaggagctcttttagggcaggcctggtggtgacaaaatctctcagcatttgcttgtctataaagtattttatttctccttcac

SEQ ID NO: 104319 - DNA, 120 bp, synthetic construct
  source 1..120: mol_type = other DNA
tgatgatggtgatgtacagatgggttttcggtgtggatgtcctttctgtttgttagttttccttctaacagacaggaccctcagctgcaggtctgttggaataccctgcgatgtgaggtg

SEQ ID NO: 104320 - DNA, 120 bp, synthetic construct
  source 1..120: mol_type = other DNA
ttggttcctccctcctcttcagtttctttcatcagtgttttgtagttcttattgtacagatctttcacttctttggttaagttattcctagataatttatttgtagctgttgcaaattgg

SEQ ID NO: 104321 - DNA, 120 bp, synthetic construct
  source 1..120: mol_type = other DNA
tttttttctttttttattttttatttattattattatactttaagttttagggtacatgtgcacaatgtgcaggttagttacatatgtatacatgtgccatgctggtgcgctgcacccac

SEQ ID NO: 104322 - DNA, 120 bp, synthetic construct; identical to SEQ ID NO: 9034
  source 1..120: mol_type = other DNA

SEQ ID NO: 104323 - DNA, 120 bp, synthetic construct; identical to SEQ ID NO: 9035
  source 1..120: mol_type = other DNA

SEQ ID NO: 104324 - DNA, 120 bp, synthetic construct; identical to SEQ ID NO: 9036
  source 1..120: mol_type = other DNA

SEQ ID NO: 104325 - DNA, 120 bp, synthetic construct; identical to SEQ ID NO: 9037
  source 1..120: mol_type = other DNA

SEQ ID NO: 104326 - DNA, 120 bp, synthetic construct
  source 1..120: mol_type = other DNA
tggttgaactggtttacagtcccaccaacagtgtaaaagtgttcctatttctccacatcctctccagcacctgttgtttcctgactttttaatgatcgccattctaactggtgtgagatg

SEQ ID NO: 104327 - DNA, 120 bp, synthetic construct
  source 1..120: mol_type = other DNA
aggattgacttggcgatgcgggctcttttttggttccatatgaactttaaagtagttttttccaattctgtgaagaaagtcattggtagcttgatggggatggcattgaatctgtaaatt

SEQ ID NO: 104328 - DNA, 120 bp, synthetic construct
  source 1..120: mol_type = other DNA
ttttctattgattggaatagtttcagaaggaatggtaccagttcctccttgtacctctggtagaattcagctgtgaatccatctggtcctggactctttttggttggtaaactactgatt

SEQ ID NO: 104329 - DNA, 120 bp, synthetic construct
  source 1..120: mol_type = other DNA
ttacttccaactatgtggtcaattttggaataggtgtggtgtggtgctgaaaaaaatgtatattctgttgatttggggtggagagttctgtagatgtctgttaggtccgcttggtgcaga

SEQ ID NO: 104330 - DNA, 120 bp, synthetic construct
  source 1..120: mol_type = other DNA
tggagttgctcttctcgaggattatctttgtggcgttctctgtatttcctgagtctgaacgttggcctgccttgctagattggggaagttctcctgggtaatatcctgcagagtgttttc

SEQ ID NO: 104331 - DNA, 120 bp, synthetic construct
  source 1..120: mol_type = other DNA
ctgcccgttctcagatctccagctgcttgctgggagaaccactgctctcttcaaagctgtcagacagggacatttaagtctgcagaggttactgctgtctttttgtttgtctgtgccctg

SEQ ID NO: 104332 - DNA, 120 bp, synthetic construct; identical to SEQ ID NO: 9038
  source 1..120: mol_type = other DNA

SEQ ID NO: 104333 - DNA, 120 bp, synthetic construct
  source 1..120: mol_type = other DNA
gggatgtctgggtcaaatggtatttctagttctagatccttgaggaatcgcctcattgtcttccacagtgggtgaactagtttccagtcccaccaacaatgtaaaagtgttcctatttct

SEQ ID NO: 104334 - DNA, 120 bp, synthetic construct
  source 1..120: mol_type = other DNA
caggtagcatgatgcctccagctttgttcttttggcttaggattgacttggcgatgcaagctcttttttggttctgtatgaactttaaaatagttttttccaattctgtgaagaaagtca

SEQ ID NO: 104335 - DNA, 120 bp, synthetic construct
  source 1..120: mol_type = other DNA
ataagattaattttttttttttttttttttttttgtgagatggagccttgctctgttgcccaggctggagtgcagtggtatgatctcggctcactgcaacctccacctctgagttcaagc

SEQ ID NO: 104336 - DNA, 120 bp, synthetic construct
  source 1..120: mol_type = other DNA
cagcctcccaaagtgctaggattacaggcatgagccaccgtgcctgtcacatttcaggttattaatgagtatatttcccttgagctaaaagcatataacacagatttccatctataaata

SEQ ID NO: 104337 - DNA, 120 bp, synthetic construct; identical to SEQ ID NO: 9018
  source 1..120: mol_type = other DNA

SEQ ID NO: 104338 - DNA, 120 bp, synthetic construct; identical to SEQ ID NO: 9019
  source 1..120: mol_type = other DNA

SEQ ID NO: 104339 - DNA, 120 bp, synthetic construct
  source 1..120: mol_type = other DNA
catttctctgatggccagtgatggtgagcattttttaatgtggtttttggctgcataaatgccttcttttgagaagtgtctgttcatatccttcgcctactttttgatggggttgtttgt

SEQ ID NO: 104340 - DNA, 120 bp, synthetic construct; identical to SEQ ID NO: 9021
  source 1..120: mol_type = other DNA

SEQ ID NO: 104341 - DNA, 120 bp, synthetic construct
  source 1..120: mol_type = other DNA
tttaatgattgccattctgactggtgtgagatggtatctcatagtggttttgatttgcatttctctgatggccagtgatgatgagcattttttcatgtgttttttggctgcataaatgtc

SEQ ID NO: 104342 - DNA, 120 bp, synthetic construct
  source 1..120: mol_type = other DNA
attcttcctacccatgagcatggaatgttcttccatttgtttgtatcctcttttatttccttgagcagtggtttgtagttctccttgaggaggtccttcacatcccttgtaagttggatt

SEQ ID NO: 104343 - DNA, 120 bp, synthetic construct
  source 1..120: mol_type = other DNA
ggtaccagttcctccttgtacctctggtagaatttggctgtgaatccatctggtcctggactctttttggttggtaaactattgattattgccacaatttcagctcctgttattggtcta

SEQ ID NO: 104344 - DNA, 120 bp, synthetic construct
  source 1..120: mol_type = other DNA
acattagacagatcaacgagacagaaagtcaacaaggatacccaggaattgaactcagctctgcaccaagcagacctaatagacatctacagaactctccaccccaaatcaacagaatat

SEQ ID NO: 104345 - DNA, 120 bp, synthetic construct
  source 1..120: mol_type = other DNA
cagacgtagatttggtcttttcacgtagtcccatatttcttggaggctttgctcatttctttttattcttttttctctaaacttcccttctcacttcatttcattcatttcatcttccat

SEQ ID NO: 104346 - DNA, 120 bp, synthetic construct
  source 1..120: mol_type = other DNA
ctcactgccgccttgcagtttgatctcagactgctgtgctagcaatcagcgagattccgttggcgtaggaccctctgagccaggtgtgggatataatctcgtggtgcgccgttttttaag

SEQ ID NO: 104347 - DNA, 120 bp, synthetic construct; identical to SEQ ID NO: 9022
  source 1..120: mol_type = other DNA

SEQ ID NO: 104348 - DNA, 120 bp, synthetic construct; identical to SEQ ID NO: 9023
  source 1..120: mol_type = other DNA

SEQ ID NO: 104349 - DNA, 120 bp, synthetic construct
  source 1..120: mol_type = other DNA
gggctgaccccccccccacctccctcccggacggggtggctgccgggcggagacgctcctcacttcccagatggggtggctgccgggcggagaggctcctcacttctcagacggggcagc

SEQ ID NO: 104350 - DNA, 120 bp, synthetic construct; identical to SEQ ID NO: 9024
  source 1..120: mol_type = other DNA

SEQ ID NO: 104351 - DNA, 120 bp, synthetic construct
  source 1..120: mol_type = other DNA
attaaatagggactcctttcctcatttcttctttttgtcaggtttgtcaaagatcagatggttgtagataaggatgtggagaaataggaacacttttacactgttggtgggactgtaaac

SEQ ID NO: 104352 - DNA, 120 bp, synthetic construct; identical to SEQ ID NO: 9026
  source 1..120: mol_type = other DNA

SEQ ID NO: 104353 - DNA, 120 bp, synthetic construct
  source 1..120: mol_type = other DNA
gagatggtatctcattgtggttttgatttgcatttctctgatggccagtgatgatgagcattttttcatgtgttttttggctgcataaatgtcttctcttgagaagtgtctgttcatgtc

SEQ ID NO: 104354 - DNA, 120 bp, synthetic construct
  source 1..120: mol_type = other DNA
ctctctgtttgtctgttattggtgtataagaatgcttgtgatttttgtacattgattttgtatcctgagactttgctgaagttgcttatcagcttaaggagattttgggctgagacaatg

SEQ ID NO: 104355 - DNA, 120 bp, synthetic construct
  source 1..120: mol_type = other DNA
attcaacttcttcctggtttagtcttgggagagtgtatgtgtcaaggaatatatccatttcttctagattttctagtttatttgcgtagaggtgtttgtagtattctctgatggtagttt

SEQ ID NO: 104356 - DNA, 120 bp, synthetic construct
  source 1..120: mol_type = other DNA
atccttgttgactttctgtctctttgatctgtctaatgttgacagtggggtgttaaagtctcccattattaatgtgtgggagtctaagtctctttgtaggtcactcaggacttgctttat

SEQ ID NO: 104357 - DNA, 120 bp, synthetic construct
  source 1..120: mol_type = other DNA
ctcctggataatatcctgcagagtgttttccaacttggttccattgtccccatcactttcaggtacaccaatcagacgtagatttggtcttttcacatagtcccatatttcttggaggct

SEQ ID NO: 104358 - DNA, 120 bp, synthetic construct; identical to SEQ ID NO: 104346
  source 1..120: mol_type = other DNA

SEQ ID NO: 104359 - DNA, 120 bp, synthetic construct
  source 1..120: mol_type = other DNA
ggcttttgttgccattgcttttggtgttttagacatgaagtccttgtccatgcctatgcttgagatctcagaatgggcagactgcctcctcaagtgggtccctgacccctgagtagccta

SEQ ID NO: 104360 - DNA, 120 bp, synthetic construct
  source 1..120: mol_type = other DNA
agaacttccccaatctagcaaggcagaccaacattcaaattcaggaaatacagagaaaaccacaaagatactcctcgagaagagcaactccaagacacataattgtcagatttaccacag

SEQ ID NO: 104361 - DNA, 120 bp, synthetic construct; identical to SEQ ID NO: 29193
  source 1..120: mol_type = other DNA

SEQ ID NO: 104362 - DNA, 120 bp, synthetic construct; identical to SEQ ID NO: 29194
  source 1..120: mol_type = other DNA

SEQ ID NO: 104363 - DNA, 120 bp, synthetic construct; identical to SEQ ID NO: 29195
  source 1..120: mol_type = other DNA

SEQ ID NO: 104364 - DNA, 120 bp, synthetic construct; identical to SEQ ID NO: 9177
  source 1..120: mol_type = other DNA

SEQ ID NO: 104365 - DNA, 120 bp, synthetic construct
  source 1..120: mol_type = other DNA
cacagctatattagagctacctgtgttcccctgtcactgacattaaaacaaaaatgtccaatacgatccttcacagtgtgggagaggggaagatgaaggatggaaaggccaggcataaaa

SEQ ID NO: 104366 - DNA, 120 bp, synthetic construct
  source 1..120: mol_type = other DNA
aacttgaaatatttaacacttagccccttgcagaaaatatttgctgactcttgttttaaaagatctctgtttagaatgctacctattgccttctggatagaatcgcaactctttaccaca

SEQ ID NO: 104367 - DNA, 120 bp, synthetic construct; identical to SEQ ID NO: 2191
  source 1..120: mol_type = other DNA

SEQ ID NO: 104368 - DNA, 120 bp, synthetic construct
  source 1..120: mol_type = other DNA
gattgtggaaatgatataatcaacataaaaatgttttatagattggactaaagacctttgaggtctcttcacaggatcctatctggcggacccccaaatctgccaacacagaggtcatcc

SEQ ID NO: 104369 - DNA, 120 bp, synthetic construct
  source 1..120: mol_type = other DNA
ccatctattcaaagtcacccctctgctcactgagataggttaatatgtgatagcctcctttgcggaggctattcagaaacccgaaagaatacaacagtttgtctctcacctacctgtgac

SEQ ID NO: 104370 - DNA, 120 bp, synthetic construct
  source 1..120: mol_type = other DNA
tctttcgataaatgtttttggccaccaaccatgtccaggcatcgccaggctgcccgtcccgccccccacaacagcctcgcgaagccacctttccgtgcttcccccgacccggacgccctc

SEQ ID NO: 104371 - DNA, 120 bp, synthetic construct
  source 1..120: mol_type = other DNA
tttattccctaatctcccaacatacttggatttgcccactgcgctgtctcccaggcagatgatcttcacgttgtcatcagcatcatacttcccttggtccaactcactcggtttggtttt

SEQ ID NO: 104372 - DNA, 120 bp, synthetic construct
  source 1..120: mol_type = other DNA
ctgtctctctctctctctctcttccccaccacacaatcacacactgcagctctggtttagaattttttttttttttttgagacggagtctcgctctgtcccccaggctggagtgcagtga

SEQ ID NO: 104373 - DNA, 120 bp, synthetic construct
  source 1..120: mol_type = other DNA
gatttcttttgaccccaggtgatcatactgcttaataacaagacatggtgtttttttgtttttttggtttttttttgagacagagtcttgctctgtcacccaggctggagtacagtgggg

SEQ ID NO: 104374 - DNA, 120 bp, synthetic construct; identical to SEQ ID NO: 21360
  source 1..120: mol_type = other DNA

SEQ ID NO: 104375 - DNA, 120 bp, synthetic construct
  source 1..120: mol_type = other DNA
ttagatccaaaccatttgctgtttgccattctactgccctcttaatataaaacaatccaaatatgagtaaggtccaaaatatacagcactgattgtgcaatgccatgtgggtcaatcggc

SEQ ID NO: 104376 - DNA, 120 bp, synthetic construct
  source 1..120: mol_type = other DNA
atcaataaaaggggaggtaaggaaggagtggggagcaggggtgtttggtttgatgaaatggatcctctccctcctcttctctttggagttattgagattttaaatcaaatgaatgttgca

SEQ ID NO: 104377 - DNA, 120 bp, synthetic construct
  source 1..120: mol_type = other DNA
tttgaaacatccccgggtgaccctaagcccccctcccacaacacccagacttggttacaagggcccagggctgctaggcccctcacccctcaggccagacttgcccagtgcctttgtcca

SEQ ID NO: 104378 - DNA, 120 bp, synthetic construct
  source 1..120: mol_type = other DNA
agccttggagtcttcttagctgagacttcagacatggattcccgatccatcagaaaatggttgttttgtaccgccaagttttggggttttgtgttaaagcaagaccttgaatgctattcc

SEQ ID NO: 104379 - DNA, 120 bp, synthetic construct; identical to SEQ ID NO: 24029
  source 1..120: mol_type = other DNA

SEQ ID NO: 104380 - DNA, 120 bp, synthetic construct; identical to SEQ ID NO: 21361
  source 1..120: mol_type = other DNA

SEQ ID NO: 104381 - DNA, 120 bp, synthetic construct
  source 1..120: mol_type = other DNA
tctgtttacttctttgttctttctgctttttgttttttgagatagggtcttactctgtcagccaggctggagtgcagtggcagaatcttggcttactgctcctccaccccctgggctccg

SEQ ID NO: 104382 - DNA, 120 bp, synthetic construct
  source 1..120: mol_type = other DNA
ataggtgaataagattagatgacaagataacaaaaaaggaatacgttatttatttgtttatttcagacagagttttgctcttgttgcccaggctggagtgcaatggcatgatctgggctc

SEQ ID NO: 104383 - DNA, 120 bp, synthetic construct; identical to SEQ ID NO: 21362
  source 1..120: mol_type = other DNA

SEQ ID NO: 104384 - DNA, 120 bp, synthetic construct; identical to SEQ ID NO: 21363
  source 1..120: mol_type = other DNA

SEQ ID NO: 104385 - DNA, 120 bp, synthetic construct
  source 1..120: mol_type = other DNA
aattgaattcttttgaaaacactaaattccactgaaatggcctccaatatagtgaattgagagtaaacatgggctaccctgcaacaggtcaaggcagctacccctcattgataagggtga

SEQ ID NO: 104386 - DNA, 120 bp, synthetic construct; identical to SEQ ID NO: 21364
  source 1..120: mol_type = other DNA

SEQ ID NO: 104387 - DNA, 120 bp, synthetic construct; identical to SEQ ID NO: 21365
  source 1..120: mol_type = other DNA

SEQ ID NO: 104388 - DNA, 120 bp, synthetic construct
  source 1..120: mol_type = other DNA
ttatgttttgtgataaggacacttaacataagatctatttccagtaaatctttaagtatgtaatacagtgttgttaactatagtcactatgctgtacaggaggtctctaggactcatccc

SEQ ID NO: 104389 - DNA, 120 bp, synthetic construct; identical to SEQ ID NO: 21366
  source 1..120: mol_type = other DNA

SEQ ID NO: 104390 - DNA, 120 bp, synthetic construct
  source 1..120: mol_type = other DNA
gatcgcaccactgcactccagctcgggcgacagagtgagactccgtctcaaaaaaaaaaaaaaattaatgggcctgggcacggtggctcacgcctgtaatcccagcactttgggaagtca

SEQ ID NO: 104391 - DNA, 120 bp, synthetic construct
  source 1..120: mol_type = other DNA
gcctcggcctcccaaagtgctgggattacaggcgtgagccaccgcgcctggccccattaaataatttttaaatgtttaactgacactgcactcctgggataaactccactttagtcatgt

SEQ ID NO: 104392 - DNA, 120 bp, synthetic construct
  source 1..120: mol_type = other DNA
gtctgtaatctttctgttcagtaatctttctgtctctgtagatttgcctgttctggacatttcatattaatgaaatcgcacaacctgcggtgctttatacgtggcgtctttcattcaaca

SEQ ID NO: 104393 - DNA, 120 bp, synthetic construct; identical to SEQ ID NO: 24026
  source 1..120: mol_type = other DNA

SEQ ID NO: 104394 - DNA, 120 bp, synthetic construct; identical to SEQ ID NO: 24027
  source 1..120: mol_type = other DNA

SEQ ID NO: 104395 - DNA, 120 bp, synthetic construct
  source 1..120: mol_type = other DNA
ttcttaaagttcattccatccaggtagagctgctccatgtttctaactggtcaccagtcctgggggaatgtacaagagaagggtcaatgggaaaggacaaaccatagcccctgctattgt

SEQ ID NO: 104396 - DNA, 120 bp, synthetic construct
  source 1..120: mol_type = other DNA
ctgcaagaggagagctagcagatatgcctgttcacccctctctggtacttgtggcttgctagtatgtttttatgataatctcgggcattgtttgcattgtgtttattaatagggttttgt

SEQ ID NO: 104397 - DNA, 120 bp, synthetic construct
  source 1..120: mol_type = other DNA
gtggagcccttttaaaatacccttcccttcaacaactctccagctctgaatggagaaactctctaggccatcccctcttctacctcctgcaacccacccatcctattagcctcccacatt

SEQ ID NO: 104398 - DNA, 120 bp, synthetic construct; identical to SEQ ID NO: 21362
  source 1..120: mol_type = other DNA

SEQ ID NO: 104399 - DNA, 120 bp, synthetic construct; identical to SEQ ID NO: 104382
  source 1..120: mol_type = other DNA

SEQ ID NO: 104400 - DNA, 120 bp, synthetic construct; identical to SEQ ID NO: 104381
  source 1..120: mol_type = other DNA

SEQ ID NO: 104401 - DNA, 120 bp, synthetic construct; identical to SEQ ID NO: 24028
  source 1..120: mol_type = other DNA

SEQ ID NO: 104402 - DNA, 120 bp, synthetic construct; identical to SEQ ID NO: 24029
  source 1..120: mol_type = other DNA

SEQ ID NO: 104403 - DNA, 120 bp, synthetic construct
  source 1..120: mol_type = other DNA
gctagggttaataattcagaagactagtctattactttctgcattgttgatggctgatattcatgaaaatgtgggttttttttagatggagttttgctcttgttgcccaggctggagtgc

SEQ ID NO: 104404 - DNA, 120 bp, synthetic construct; identical to SEQ ID NO: 24030
  source 1..120: mol_type = other DNA

SEQ ID NO: 104405 - DNA, 120 bp, synthetic construct; identical to SEQ ID NO: 24031
  source 1..120: mol_type = other DNA

SEQ ID NO: 104406 - DNA, 120 bp, synthetic construct; identical to SEQ ID NO: 24032
  source 1..120: mol_type = other DNA

SEQ ID NO: 104407 - DNA, 120 bp, synthetic construct; identical to SEQ ID NO: 24033
  source 1..120: mol_type = other DNA

SEQ ID NO: 104408 - DNA, 120 bp, synthetic construct
  source 1..120: mol_type = other DNA
cagccaacaagacgtggctttctgattccatctttaagagtagttaggtccagatgtgttgtcttttttctttgatagctgtctaacttggcctttagggtcttccattaccgttaatga

SEQ ID NO: 104409 - DNA, 120 bp, synthetic construct; identical to SEQ ID NO: 24034
  source 1..120: mol_type = other DNA

SEQ ID NO: 104410 - DNA, 120 bp, synthetic construct; identical to SEQ ID NO: 24035
  source 1..120: mol_type = other DNA

SEQ ID NO: 104411 - DNA, 120 bp, synthetic construct; identical to SEQ ID NO: 24036
  source 1..120: mol_type = other DNA

SEQ ID NO: 104412 - DNA, 120 bp, synthetic construct; identical to SEQ ID NO: 24037
  source 1..120: mol_type = other DNA

SEQ ID NO: 104413 - DNA, 120 bp, synthetic construct; identical to SEQ ID NO: 104369
  source 1..120: mol_type = other DNA

SEQ ID NO: 104414 - DNA, 120 bp, synthetic construct; identical to SEQ ID NO: 104368
  source 1..120: mol_type = other DNA

SEQ ID NO: 104415 - DNA, 120 bp, synthetic construct; identical to SEQ ID NO: 2191
  source 1..120: mol_type = other DNA

SEQ ID NO: 104416 - DNA, 120 bp, synthetic construct
  source 1..120: mol_type = other DNA
gccaatacatgtgttacataatgtctctggctactttcacggtataatggaagagcagagtcattgagagagagaccatatggcttggaaaacttgaaatatttaacacttagccccttg

SEQ ID NO: 104417 - DNA, 120 bp, synthetic construct
  source 1..120: mol_type = other DNA
atcatggatgtaaatgtttgctgcaaaataaatacgtgctagaaacagaagcatctgggtcacagctatattagagctacctgtgttcccctgtcactgacattaaaacaaaaatgtcca

SEQ ID NO: 104418 - DNA, 120 bp, synthetic construct
  source 1..120: mol_type = other DNA
atttagaaagctgaaactggatcccttcctgacaccttatacaaaaattaattcaagatggattaaagacttaaatgttagacctaaaaccataaaaaccctagaagaaaacctaggcaa

SEQ ID NO: 104419 - DNA, 120 bp, synthetic construct; identical to SEQ ID NO: 24585
  source 1..120: mol_type = other DNA

SEQ ID NO: 104420 - DNA, 120 bp, synthetic construct
  source 1..120: mol_type = other DNA
tgggaaaactggctagccatatgtagaaagctgaaactggatcccttccttacaccttatacaaaaattaattcaagatggattaaagacttaaacgttagacctaaaaccataaaaacc

SEQ ID NO: 104421 - DNA, 120 bp, synthetic construct
  source 1..120: mol_type = other DNA
caaggacttgctttatgaatctgggtgctcctgtattgggtgcatatatgtttaggatagttagctgttcttgttgaattgatccctttaccattatgtaatggccttctttgtctcttt

SEQ ID NO: 104422 - DNA, 120 bp, synthetic construct
  source 1..120: mol_type = other DNA
cctgcagagtgttttccaacttggttccattctccctgtcactttcaggtacaccaatcagacatagatttggtatttgcacatagtcccatatttcttggagcctttgttcgttctttt

SEQ ID NO: 104423 - DNA, 120 bp, synthetic construct; identical to SEQ ID NO: 33170
  source 1..120: mol_type = other DNA

SEQ ID NO: 104424 - DNA, 120 bp, synthetic construct; identical to SEQ ID NO: 33171
  source 1..120: mol_type = other DNA

SEQ ID NO: 104425 - DNA, 120 bp, synthetic construct; identical to SEQ ID NO: 23788
  source 1..120: mol_type = other DNA

SEQ ID NO: 104426 - DNA, 120 bp, synthetic construct; identical to SEQ ID NO: 23789
  source 1..120: mol_type = other DNA

SEQ ID NO: 104427 - DNA, 120 bp, synthetic construct; identical to SEQ ID NO: 26641
  source 1..120: mol_type = other DNA

SEQ ID NO: 104428 - DNA, 120 bp, synthetic construct
  source 1..120: mol_type = other DNA
aagcttcgtaagtgaaggagaaataaaatactttacagacaagcaaatgctgggagattctgttaccaccaggcctgccctaaaagagctcctgaaggaagcactaaacgtggaaaggaa

SEQ ID NO: 104429 - DNA, 120 bp, synthetic construct
  source 1..120: mol_type = other DNA
cacaacataccagaatctctgggacacatttaaagcagtgtgtagggggaaatttatagcactaaatgcccacaagagaaagcaggaaagatctaaaattgacatcctaacatcacaatt

SEQ ID NO: 104430 - DNA, 120 bp, synthetic construct
  source 1..120: mol_type = other DNA
acgtacctcaaaataagaagagctatttatgacaaacccacagccaatatcatactgaatgggcaaaaactggaagcattccctttgaaaactggcacaagacagggatgccctctctca

SEQ ID NO: 104431 - DNA, 120 bp, synthetic construct
  source 1..120: mol_type = other DNA
cttataccttatacaaaaattaattcaagatggattaaagacttaaatgttagacctataaccataaaaaccctagaagaaaacctaggcaataccattcaggacataggcatgggcaag

SEQ ID NO: 104432 - DNA, 120 bp, synthetic construct
  source 1..120: mol_type = other DNA
ccaacccaaatgtccaacaatgatagactgggttaagaaaatgtggcacgtatataccatggaatactatgcagccataaaaaatgatgagttcatgtcctttgtagggacatggatgaa

SEQ ID NO: 104433 - DNA, 120 bp, synthetic construct; identical to SEQ ID NO: 22284
  source 1..120: mol_type = other DNA

SEQ ID NO: 104434 - DNA, 120 bp, synthetic construct; identical to SEQ ID NO: 22285
  source 1..120: mol_type = other DNA

SEQ ID NO: 104435 - DNA, 120 bp, synthetic construct; identical to SEQ ID NO: 22286
  source 1..120: mol_type = other DNA

SEQ ID NO: 104436 - DNA, 120 bp, synthetic construct
  source 1..120: mol_type = other DNA
atcatttagattaggtatagctcctaatgctatccctcccgctgtgtccaagtgttctcatttttcaattcccacctgtgagtgagaacatgcagtgtttggttttttgtccttgtgata

SEQ ID NO: 104437 - DNA, 120 bp, synthetic construct
  source 1..120: mol_type = other DNA
ttccgacgggcttaaaaaacagagcatcaggagattatatcccgcacctggctcagagggtcctacgcccatggagtctcactgattgctagcacagcagtctgagatcaaactgcaagg

SEQ ID NO: 104438 - DNA, 120 bp, synthetic construct
  source 1..120: mol_type = other DNA
ctacgggaggacattcaaaccaaaggcaaagaagttgaaaactttgaaaaaaatttagaagaatgtataactagaataaccaagacagggaagtgcttaaaggagctgatggagctgaaa

SEQ ID NO: 104439 - DNA, 120 bp, synthetic construct
  source 1..120: mol_type = other DNA
gtgctgtattcaggaaacccatctcacgtgcagagacacacataggctcaaaataaaaggttggaggaagatctaccaagcaaatggaaaacaaaaaaaggcaggggttgcaatccgaat

SEQ ID NO: 104440 - DNA, 120 bp, synthetic construct
  source 1..120: mol_type = other DNA
accgatcccacagaaatacaaactaccatcagagaatactacaaacacctctatgcaaataaactagaaaatctagaagaaatggataaacttctggacacatacactctcccaagacta

SEQ ID NO: 104441 - DNA, 120 bp, synthetic construct
  source 1..120: mol_type = other DNA
ttgtatatctagaaaaccccattgtctcagccgaaaatctccttaagctgataagcaacttcagcaaagtctcaggatacaaaatcaatgtacaaaaatcacaagcattcttatacacca

SEQ ID NO: 104442 - DNA, 120 bp, synthetic construct
  source 1..120: mol_type = other DNA
aaggacttcatgtctaaaacacttaaagcaatggcaacaaaagccaaaattgacaaatgggatctaattaaactaaagagcttctgcacagcaaaagaaactaccatcagagtgaacagg

SEQ ID NO: 104443 - DNA, 120 bp, synthetic construct; identical to SEQ ID NO: 14433
  source 1..120: mol_type = other DNA

SEQ ID NO: 104444 - DNA, 120 bp, synthetic construct
  source 1..120: mol_type = other DNA
acttttttttttctttagtatccataattgctgattgggaatttttaacacaagacaggaattgttaccctccctccccccctcccttccttccttccttcctccctcccttcctttatc

SEQ ID NO: 104445 - DNA, 120 bp, synthetic construct
  source 1..120: mol_type = other DNA
tttcagattattggaaactttctcatgttgcagcatttgctgctatcaattatgccagaaaagctttctgtgtactagcagtgttatgggatcgtgtgtgtgtgtgtgtgtgcgcgtgtg

SEQ ID NO: 104446 - DNA, 120 bp, synthetic construct
  source 1..120: mol_type = other DNA
agtcattggtagcttgatggggatggcattgaacgtataaattaccttgggcagtatggccattttcacaatattgagtcttcctatccatcagcatggaatgttcttccatttgtttgt

SEQ ID NO: 104447 - DNA, 120 bp, synthetic construct
  source 1..120: mol_type = other DNA
gatgatgctggcctcataaaatgagttagggaggattccctctttttctattgataggaatagtttcagaaggaatggtaccagttcctccttgtacctctggtagaattcggctgtgaa

SEQ ID NO: 104448 - DNA, 120 bp, synthetic construct; identical to SEQ ID NO: 14435
  source 1..120: mol_type = other DNA

SEQ ID NO: 104449 - DNA, 120 bp, synthetic construct; identical to SEQ ID NO: 14436
  source 1..120: mol_type = other DNA

SEQ ID NO: 104450 - DNA, 120 bp, synthetic construct; identical to SEQ ID NO: 14437
  source 1..120: mol_type = other DNA

SEQ ID NO: 104451 - DNA, 120 bp, synthetic construct
  source 1..120: mol_type = other DNA
ccatgtagctgagactataggcacgtgccaccgtactcaactaatttttccgatttttttgtagagacagggtctcaccatgttgtccaggctgcagttcttgatgttaatttctttttt

SEQ ID NO: 104452 - DNA, 120 bp, synthetic construct
  source 1..120: mol_type = other DNA
gctggtatctcattgtggttttgatttgcatttctctgatggccagtgatggtgagcgttttttcatgtgttttttggctgcataaatgtcttcttttgagaagtgtctgttcatgtcct

SEQ ID NO: 104453 - DNA, 120 bp, synthetic construct; identical to SEQ ID NO: 14439
  source 1..120: mol_type = other DNA

SEQ ID NO: 104454 - DNA, 120 bp, synthetic construct
  source 1..120: mol_type = other DNA
ttattgaggatttttgcatcgatgttcatcagggatattggtctaaaattctctttttttgttgtgtctctgccaggctttggtatgtggatgatgctggcctcataaaatgagttaggg

SEQ ID NO: 104455 - DNA, 120 bp, synthetic construct; identical to SEQ ID NO: 12560
  source 1..120: mol_type = other DNA

SEQ ID NO: 104456 - DNA, 120 bp, synthetic construct
  source 1..120: mol_type = other DNA
tcatgccgtctgcaaacagggaaaatttgacttactcttttcctaattgaataccctttatttccttctcctgcctaattgccctggccagaacttccaacactatgttgaataggagtg

SEQ ID NO: 104457 - DNA, 120 bp, synthetic construct
  source 1..120: mol_type = other DNA
agaaaaacaagcaatggggaaaggattccctatttaataaatgctgctgggaaaactggctagccatatgtagaaagctgaaactggatcccttccttacaccttatacaaaaatcaatt

SEQ ID NO: 104458 - DNA, 120 bp, synthetic construct
  source 1..120: mol_type = other DNA
ggaatgttgtgtggtggggcgaggggggagggatagcattaggagatatacctaatgctaaatgatgagttaatgggtgcagcacaccagcatggcacatgtatacatatgtaactaacc

SEQ ID NO: 104459 - DNA, 120 bp, synthetic construct; identical to SEQ ID NO: 24321
  source 1..120: mol_type = other DNA

SEQ ID NO: 104460 - DNA, 120 bp, synthetic construct; identical to SEQ ID NO: 24322
  source 1..120: mol_type = other DNA

SEQ ID NO: 104461 - DNA, 120 bp, synthetic construct; identical to SEQ ID NO: 24323
  source 1..120: mol_type = other DNA

SEQ ID NO: 104462 - DNA, 120 bp, synthetic construct
  source 1..120: mol_type = other DNA
tccccacatttcccccttttctattcgacaaaaccgccattgtcatcatggcccgttctcaatgagctgttgggtacacctcccagacggggtggtggatgggcagaggggctcctcact

SEQ ID NO: 104463 - DNA, 120 bp, synthetic construct; identical to SEQ ID NO: 28823
  source 1..120: mol_type = other DNA

SEQ ID NO: 104464 - DNA, 120 bp, synthetic construct; identical to SEQ ID NO: 28824
  source 1..120: mol_type = other DNA

SEQ ID NO: 104465 - DNA, 120 bp, synthetic construct; identical to SEQ ID NO: 28825
  source 1..120: mol_type = other DNA

SEQ ID NO: 104466 - DNA, 120 bp, synthetic construct; identical to SEQ ID NO: 28826
  source 1..120: mol_type = other DNA

SEQ ID NO: 104467 - DNA, 120 bp, synthetic construct; identical to SEQ ID NO: 28827
  source 1..120: mol_type = other DNA

SEQ ID NO: 104468 - DNA, 120 bp, synthetic construct; identical to SEQ ID NO: 28828
  source 1..120: mol_type = other DNA

SEQ ID NO: 104469 - DNA, 120 bp, synthetic construct
  source 1..120: mol_type = other DNA
gttttttttgtgtgtgtgggttttttttttttttttttttttttgacagagtctcattctgtttcccaggctggatcactggcgtgatctcggctcactgcaaccttcgcctcccgggtt

SEQ ID NO: 104470 - DNA, 120 bp, synthetic construct
  source 1..120: mol_type = other DNA
accaactggagatataggttgagtattcctaatccaaaaatccgaaatctgaaatgttccaaaacctgaaacttctttttttttttttgagacggagtctcgctctgtcgcccaggctgg

SEQ ID NO: 104471 - DNA, 120 bp, synthetic construct; identical to SEQ ID NO: 35101
  source 1..120: mol_type = other DNA

SEQ ID NO: 104472 - DNA, 120 bp, synthetic construct; identical to SEQ ID NO: 35102
  source 1..120: mol_type = other DNA

SEQ ID NO: 104473 - DNA, 120 bp, synthetic construct; identical to SEQ ID NO: 28408
  source 1..120: mol_type = other DNA

SEQ ID NO: 104474 - DNA, 120 bp, synthetic construct; identical to SEQ ID NO: 28409
  source 1..120: mol_type = other DNA

SEQ ID NO: 104475 - DNA, 120 bp, synthetic construct; identical to SEQ ID NO: 28410
  source 1..120: mol_type = other DNA

SEQ ID NO: 104476 - DNA, 120 bp, synthetic construct; identical to SEQ ID NO: 28411
  source 1..120: mol_type = other DNA

SEQ ID NO: 104477 - DNA, 120 bp, synthetic construct; identical to SEQ ID NO: 28412
  source 1..120: mol_type = other DNA

SEQ ID NO: 104478 - DNA, 120 bp, synthetic construct
  source 1..120: mol_type = other DNA
atgtgaataatactgacctgccaataaacatacaggctcctgtgtgctttttctttttctttttttttaagatggagtctcactctgttgcccaggctggagtgcagaggtgtaatggcg

SEQ ID NO: 104479 - DNA, 120 bp, synthetic construct; identical to SEQ ID NO: 24110
  source 1..120: mol_type = other DNA

SEQ ID NO: 104480 - DNA, 120 bp, synthetic construct
  source 1..120: mol_type = other DNA
acctgtagccccaactacttgggaggctgaagctggaagatcacttgatcccaggaattcaataccagcctggacaacacagttagacacctactctacaaaaaaaagtttttaaaaagt

SEQ ID NO: 104481 - DNA, 120 bp, synthetic construct
  source 1..120: mol_type = other DNA
ggtggggggagggaggagggatagcattaggagatacacctaaagtgaacaatgagttaactagttaactggtgcagcacaccaacatggcacatgtatacatatgtaacaaacctgcac

SEQ ID NO: 104482 - DNA, 120 bp, synthetic construct
  source 1..120: mol_type = other DNA
tttttcttttttttttttttcaagagacagcatcttgttctgttgcccaggctagagcaccatggcacaatcatagcttattgcagcctccaattcctggactcaaacaatcctctctcc

SEQ ID NO: 104483 - DNA, 120 bp, synthetic construct
  source 1..120: mol_type = other DNA
atggaggccaggagttcgagaccaacctggtaaacatagtgagaccccccccccgccatctctaaaatagtaaaaataataattttttaaaatgcaaaaagcctacaaccacttcacagt

SEQ ID NO: 104484 - DNA, 120 bp, synthetic construct
  source 1..120: mol_type = other DNA
ccaaagtccattttgtcattcttatgcctttgcatcctcatagcttagctcctacttatgggtaggaatgtacgatgtttggctttccattcctgagttacttcacttagaataataatc

SEQ ID NO: 104485 - DNA, 120 bp, synthetic construct
  source 1..120: mol_type = other DNA
ataacctgtgatcttattcacatttttggttgccatattgtccttttggttcatattgggtttattgctgattcttttctcccagtgttgcttgtaaagcctcccttccccacccctccc

SEQ ID NO: 104486 - DNA, 120 bp, synthetic construct; identical to SEQ ID NO: 26489
  source 1..120: mol_type = other DNA

SEQ ID NO: 104487 - DNA, 120 bp, synthetic construct; identical to SEQ ID NO: 26490
  source 1..120: mol_type = other DNA

SEQ ID NO: 104488 - DNA, 120 bp, synthetic construct; identical to SEQ ID NO: 26491
  source 1..120: mol_type = other DNA

SEQ ID NO: 104489 - DNA, 120 bp, synthetic construct
  source 1..120: mol_type = other DNA
tagcattaggcgatatacctaatgtaaatgacgagttaatgggtgcagcacaccaacgtggcacatgtatacatatgtaacaaaccttgtgcacatgtaccctagaacttaaagtataat

SEQ ID NO: 104490 - DNA, 120 bp, synthetic construct
  source 1..120: mol_type = other DNA
ttttgatttgcatttctctgatggccagtgatgagcattttttcatgtgttttttggctgcataaatgtcttcttttgagaagtgtctgttcatgtccttcgcccactttttgatggggt

SEQ ID NO: 104491 - DNA, 120 bp, synthetic construct; identical to SEQ ID NO: 4642
  source 1..120: mol_type = other DNA

SEQ ID NO: 104492 - DNA, 120 bp, synthetic construct
  source 1..120: mol_type = other DNA
gaactcaagtgatcctcccacctcagcctcccaagtggctaggactataggcgtgtatcactacacccagctaatttttttttattatactttaagttctagggtacatgtgcataacgt

SEQ ID NO: 104493 - DNA, 120 bp, synthetic construct; identical to SEQ ID NO: 18790
  source 1..120: mol_type = other DNA

SEQ ID NO: 104494 - DNA, 120 bp, synthetic construct; identical to SEQ ID NO: 18791
  source 1..120: mol_type = other DNA

SEQ ID NO: 104495 - DNA, 120 bp, synthetic construct; identical to SEQ ID NO: 14297
  source 1..120: mol_type = other DNA

SEQ ID NO: 104496 - DNA, 120 bp, synthetic construct; identical to SEQ ID NO: 14298
  source 1..120: mol_type = other DNA

SEQ ID NO: 104497 - DNA, 120 bp, synthetic construct
  source 1..120: mol_type = other DNA
aaactccatcctgtgtgtgtgtgtgtggggtgggggggggggggggaagggggtgaatttacagcctaagattatttcattgttaaataataaagtatgaaacaaagataaatagaaatc

SEQ ID NO: 104498 - DNA, 120 bp, synthetic construct; identical to SEQ ID NO: 14300
  source 1..120: mol_type = other DNA

SEQ ID NO: 104499 - DNA, 120 bp, synthetic construct; identical to SEQ ID NO: 14301
  source 1..120: mol_type = other DNA

SEQ ID NO: 104500 - DNA, 120 bp, synthetic construct
  source 1..120: mol_type = other DNA
gagctgtactaagctgtactaagaaagagaaggagagggagcaaggggctggcagtagagccctcattcaatatatatatatatagacctatatatatatacacacacacacctatatat

SEQ ID NO: 104501 - DNA, 120 bp, synthetic construct
  source 1..120: mol_type = other DNA
acccacttcagcctcccaaagtgctagggttacaagcatcgagccaccgcacccagcctggaatttgtctttagttcacatattactgcattaaattcatttgtttttatatcagattca

SEQ ID NO: 104502 - DNA, 120 bp, synthetic construct
  source 1..120: mol_type = other DNA
ccttactgtgtccaattaactggggccctgtccctcaaacacccaggggccaaacagatccctcttcccccttcacgcacacgggaaaggaactttcccagcaagaagcgaatgccaccg

SEQ ID NO: 104503 - DNA, 120 bp, synthetic construct
  source 1..120: mol_type = other DNA
gcttcccttccccaagaagacgcttttcctggcccttctttccgtgcttgctcaatctcccaagttcttttttttttttattatactttaagttttagggtacatgtgcacaatgtgcag

SEQ ID NO: 104504 - DNA, 120 bp, synthetic construct
  source 1..120: mol_type = other DNA
ttcgtgtaaatttgtctgagttcattgtagattctggatattagccctttgtcagatgagtaggttgtgaaaattttctcccattttgtaggttgcctgttcactctgatggtagtttct

SEQ ID NO: 104505 - DNA, 120 bp, synthetic construct
  source 1..120: mol_type = other DNA
aaaccaacgagaacaaagacacaacataccagaatctctgggacacattcaaagcagtgtgtagagggaaatttgtagcactaaatgcccacaagagaaagcaggaaagatccaaaattg

SEQ ID NO: 104506 - DNA, 120 bp, synthetic construct
  source 1..120: mol_type = other DNA
catgattatctcaatagatgcagaaaaggcctttgacaaaattcaacaacgcttcatgctaaaaactctcaataaattaggtattgatgggacgtatctcaaaataataagagctattta

SEQ ID NO: 104507 - DNA, 120 bp, synthetic construct; identical to SEQ ID NO: 33016
  source 1..120: mol_type = other DNA

SEQ ID NO: 104508 - DNA, 120 bp, synthetic construct
  source 1..120: mol_type = other DNA
caacagaacaaagctggatggagaatgactttgagagttgagagaagaaggcttcagatgatcaaactaccccgagctacaggaggaaatttgaaccaatggcaaagaagttaaaagctt

SEQ ID NO: 104509 - DNA, 120 bp, synthetic construct
  source 1..120: mol_type = other DNA
taaaagacacagactggcaaattggataaagagtcaagacccatcagtgtgctgtattcaggaaacccatctcatgtgcagagacacacataggctcaaaataaagggatagaggaagat

SEQ ID NO: 104510 - DNA, 120 bp, synthetic construct
  source 1..120: mol_type = other DNA
aacataccagaatctctgagacacattcaaagcagtgtgtagagggaaatttatagcactgaatggccacaagagaaagcaggaaagatctaaaattgacaccctgacatcacaattaaa

SEQ ID NO: 104511 - DNA, 120 bp, synthetic construct
  source 1..120: mol_type = other DNA
ccaaagacaaaaaccacatgattatctcaatagatgcagaaaaggcctttgacaaaattcaacaacgcttcatgctaaaaactctcaataaattagatattgatgggacgtatctcaaaa

SEQ ID NO: 104512 - DNA, 120 bp, synthetic construct
  source 1..120: mol_type = other DNA
caatgcaaatcaaaaccacaatgagataccatcccacaccagttagaatggcaatcattaaaaagtcaggaaacaacaggtgctggagaggatgtggagaaataggaacactttgacact

SEQ ID NO: 104513 - DNA, 120 bp, synthetic construct; identical to SEQ ID NO: 33017
  source 1..120: mol_type = other DNA

SEQ ID NO: 104514 - DNA, 120 bp, synthetic construct
  source 1..120: mol_type = other DNA
atcctctccagcacgaaaacctaggcattaccattcaggacataggcatgggcaaggacttcacgtccaaaacaccaaaagcaatggcaacaaaagccaaaattgacaaatgggatctaa

SEQ ID NO: 104515 - DNA, 120 bp, synthetic construct; identical to SEQ ID NO: 33018
  source 1..120: mol_type = other DNA

SEQ ID NO: 104516 - DNA, 120 bp, synthetic construct; identical to SEQ ID NO: 33019
  source 1..120: mol_type = other DNA

SEQ ID NO: 104517 - DNA, 120 bp, synthetic construct
  source 1..120: mol_type = other DNA
ggagatagagacacaaaaaacccttcaagaaaatccatgaatccaggagctggtgtttttttaaaagatcaacaaaatagaccactagcaagactatatatataataaagaaaagggagg

SEQ ID NO: 104518 - DNA, 120 bp, synthetic construct
  source 1..120: mol_type = other DNA
tcatactgaatgggcaaaaactggaagcattccctttgaaaactggcacaagacagggatgccctctctcaccactcctattcaacatagtgttggaagttctggccagggcaattagac

SEQ ID NO: 104519 - DNA, 120 bp, synthetic construct
  source 1..120: mol_type = other DNA
cctacagctatctgatctttgacaaacctgagaaaaacaagcaatggggaaaggattccctatttaataaatggtgctgggaaaactggctagccatatgtaggaagctgaaactggatc

SEQ ID NO: 104520 - DNA, 120 bp, synthetic construct
  source 1..120: mol_type = other DNA
aaatcatcattctcagtaaactatcgcaagatcaaaaaaccaaacaccacatattctcactcataggtgggaactgaacaatgagatcacatggacacaggaaggggaatatcacactct

SEQ ID NO: 104521 - DNA, 120 bp, synthetic construct; identical to SEQ ID NO: 9064
  source 1..120: mol_type = other DNA

SEQ ID NO: 104522 - DNA, 120 bp, synthetic construct
  source 1..120: mol_type = other DNA
taacaccgcatatctacaactatctgatctttgacaaacctgagaaaaacaagcaacggggaaaggattccctatttaataaatggtgctgggaaaactggctagccatatgtagaaagc

SEQ ID NO: 104523 - DNA, 120 bp, synthetic construct
  source 1..120: mol_type = other DNA
accaaacaccgcatattctcactcataggtgggaattgaacaatgagaaatacacatattttaacttttattttagtgattcgtatgttccctgtgcatcataggtatacttaatcctta

SEQ ID NO: 104524 - DNA, 120 bp, synthetic construct; identical to SEQ ID NO: 9065
  source 1..120: mol_type = other DNA

SEQ ID NO: 104525 - DNA, 120 bp, synthetic construct
  source 1..120: mol_type = other DNA
ggctgcataaatgtcttcttttgagaagtgtctgttcatgtccttcacccattttttgatggggttgtttgtttttttcttgtaaatttgtttgagttcattgtagattctggatattag

SEQ ID NO: 104526 - DNA, 120 bp, synthetic construct
  source 1..120: mol_type = other DNA
atcacaaacatctcagaatagccaaagcaatcttgagcaacaacaaagctagagacatcatactctctgattttttttttttttttttttgagacggagtctcgctctgtcgcccaggct

SEQ ID NO: 104527 - DNA, 120 bp, synthetic construct; identical to SEQ ID NO: 9068
  source 1..120: mol_type = other DNA

SEQ ID NO: 104528 - DNA, 120 bp, synthetic construct
  source 1..120: mol_type = other DNA
tatttccagttctagatccctgaggaatcgccacactgacttccacaatggttgaattagtttacagtcccaccaacaaatttacaagaaaaaaacaaacaaccccatcaaaaagtgggc

SEQ ID NO: 104529 - DNA, 120 bp, synthetic construct
  source 1..120: mol_type = other DNA
gcggtgtttggttttttgtccttgcgatagtttgctgagaatgatggttttcagcttcatccatgtccctacaaaggtcatgaactcatcttttttatggctgcatagtattccatggta

SEQ ID NO: 104530 - DNA, 120 bp, synthetic construct
  source 1..120: mol_type = other DNA
gatgtctccagctttgctctttttgcttaggattatcttggcaatgtgggctcattttgcttccatatgaacattaaagtagttttttccaattctgtgaagaaagttattggtagcttg

SEQ ID NO: 104531 - DNA, 120 bp, synthetic construct
  source 1..120: mol_type = other DNA
tgctgcaataaacatacatgtgcatgtgtctttatagcagcatgatttatcgtcctttgggtatatacccagtaatgggatggctgggtcaaatggtatttctagttctagatccctgag

SEQ ID NO: 104532 - DNA, 120 bp, synthetic construct
  source 1..120: mol_type = other DNA
tattaaatagggaatcctttccccattacttgtttttctcaggtttgtcaaagataagataattgtagatatgcagcattatttctgagggctctgttctgttccattgatctatatctc

SEQ ID NO: 104533 - DNA, 120 bp, synthetic construct
  source 1..120: mol_type = other DNA
aaattgttagaccgctagcaagactagtaaagaaaaaaagagagaagaatcaaatagacgcaataaaaaatgataaaggggatatcaccactgatcccacagaaatacaaactaccatca

SEQ ID NO: 104534 - DNA, 120 bp, synthetic construct
  source 1..120: mol_type = other DNA
acgacatgattgtatatctagaagaccccattgtctcagcccaaaaactcttcactatatttcattccacttaccatgaatgaggatctgtacaacgttctgagcagcaccatgggacat

SEQ ID NO: 104535 - DNA, 120 bp, synthetic construct; identical to SEQ ID NO: 31634
  source 1..120: mol_type = other DNA

SEQ ID NO: 104536 - DNA, 120 bp, synthetic construct; identical to SEQ ID NO: 31635
  source 1..120: mol_type = other DNA

SEQ ID NO: 104537 - DNA, 120 bp, synthetic construct
  source 1..120: mol_type = other DNA
gaatggaaccaagttggaaaacactctgcaggatattatccaggagaacttccccaatctagcaaggcaggccaacattcaaattcaggaaatacagagaacgccacaaagatgctactt

SEQ ID NO: 104538 - DNA, 120 bp, synthetic construct
  source 1..120: mol_type = other DNA
ttagacagatcaacgagacagaaagttaacaaggatatccaggacctgaactcagctctgcaccaagaggacctaatagacatctacagaactgtctaccccaaatcaacagaatataca

SEQ ID NO: 104539 - DNA, 120 bp, synthetic construct
  source 1..120: mol_type = other DNA
tagaaaatctagaagaaacggataaattcctcgacacatacaccctcccaagactaaaccaggaagaagttgaatctctgaatagaccaataacaggctctgaaattgaggcaataatta

SEQ ID NO: 104540 - DNA, 120 bp, synthetic construct
  source 1..120: mol_type = other DNA
gaagcaattgtgaatgggagttcactcatgatttggctctctgtttttctgttattggtgtataagagtgcttgtgatttttgtacattgattttgtatcctgagactttgctgaagttg

SEQ ID NO: 104541 - DNA, 120 bp, synthetic construct
  source 1..120: mol_type = other DNA
tgaatttcttatgagtcatcaaaggagtgagggagggagtgtgtgtgtgtgtgtgtgtgggggggggggttgtgtacgtgtatatgtaaaataatcatttgttaaccaactttaaatcag

SEQ ID NO: 104542 - DNA, 120 bp, synthetic construct
  source 1..120: mol_type = other DNA
agatccctgaggaatcgccacactgacttccacaatggttgaacagtttatagtcccaccaacagtgtaaaagtgtttctatttctccacatcctctccagcacctgttgtttcctgact

SEQ ID NO: 104543 - DNA, 120 bp, synthetic construct
  source 1..120: mol_type = other DNA
gcattaaatctataaattaccttgggcagtatggccactttcatgatattgattcttcctacccatgagcatggaatgttcttccatttgtttgtatcctcttttatttccttgagcagt

SEQ ID NO: 104544 - DNA, 120 bp, synthetic construct; identical to SEQ ID NO: 31627
  source 1..120: mol_type = other DNA

SEQ ID NO: 104545 - DNA, 120 bp, synthetic construct
  source 1..120: mol_type = other DNA
ctgttgtttcctgactttttaatgattgccattctaactggtgtgagatggtatttcatagtggttttgatttgcatttctctgatggccactgatgatgagcattttttcatgtgtttt

SEQ ID NO: 104546 - DNA, 120 bp, synthetic construct
  source 1..120: mol_type = other DNA
gaagaaagtcattggtagcttgatggggatggcattgaatctgtaaattaccttgggcagtatggccattttcacgatattgattcttcctacccatcagcatggaatgttcttccattt

SEQ ID NO: 104547 - DNA, 120 bp, synthetic construct
  source 1..120: mol_type = other DNA
ccttgtacctctggtagaattcggctgtgaatctatctggtcctggactctttttggttggtaaactattgattattgccacaatttcagctcctgttattggtctattcagagattcaa

SEQ ID NO: 104548 - DNA, 120 bp, synthetic construct
  source 1..120: mol_type = other DNA
gttgactttctgtctcgttgatctgtctaatgttgacagtggggtgttaaagtctcccgttattaatgtgtgggagtctaagtctctttgtaggtcactcaggacttgctttatgaatct

SEQ ID NO: 104549 - DNA, 120 bp, synthetic construct
  source 1..120: mol_type = other DNA
ctctggctgcccttaacattttttccttcatttcaactttggtgaatctgacaattatgtgtcttggagttgctcttcttgaggagtatctttgtggcgttctctctatttcctgaatct

SEQ ID NO: 104550 - DNA, 120 bp, synthetic construct
  source 1..120: mol_type = other DNA
gtctttttgtttgtctgtgccctgcccccagaggtggagcctacagaggcaggcagacctccttgagctgtggtgggctccacccagttcgagcttcctagctgctttgtttacctaagc

SEQ ID NO: 104551 - DNA, 120 bp, synthetic construct; identical to SEQ ID NO: 31628
  source 1..120: mol_type = other DNA

SEQ ID NO: 104552 - DNA, 120 bp, synthetic construct
  source 1..120: mol_type = other DNA
tttgatttgcatttctctgatggccagtgatgatgagcattttttcatgtgttttttggctgcataaatatcttcttttgagaagtgtctgttcatgtccttcgcccactttttgatggg

SEQ ID NO: 104553 - DNA, 120 bp, synthetic construct; identical to SEQ ID NO: 104546
  source 1..120: mol_type = other DNA

SEQ ID NO: 104554 - DNA, 120 bp, synthetic construct
  source 1..120: mol_type = other DNA
tctggtcctggactcttttggttggtaagctattgattattgccacaatttcagctcctgttattggtctattcagagattcaacttcttcctggtttagtcttgggagagtgtatgtgt

SEQ ID NO: 104555 - DNA, 120 bp, synthetic construct
  source 1..120: mol_type = other DNA
ttctgttgatttggggtggacagttctgtagatgtctattaggtccacttggtgctgagctgagttcaattcctgggtatccttgttgactttctgtctcgttgatctgtctaatgttga

SEQ ID NO: 104556 - DNA, 120 bp, synthetic construct
  source 1..120: mol_type = other DNA
gggaagttctcctggataatatcctgcagagtgttttccaacttggttccattctccccatcactttcaggtacaccaatcagacgtagatttggtcttttcacatagtcccgtatttcc

SEQ ID NO: 104557 - DNA, 120 bp, synthetic construct
  source 1..120: mol_type = other DNA
tgtttgtgccctgcccccagaggtggagcctacagaggaaagcaggcctccttgagctgtggtgggctccacccagttcgagcttcccagctgctttgtttacctaagcaagcctgggca

SEQ ID NO: 104558 - DNA, 120 bp, synthetic construct
  source 1..120: mol_type = other DNA
gacttattcatgagaacagcatggggaaaaaaaaacccactcccatgattcaattacctcccactgggtccctcccataatacatacagattattacaattcaaggtgagatttgggtgg

SEQ ID NO: 104559 - DNA, 120 bp, synthetic construct
  source 1..120: mol_type = other DNA
ggaaacaacaggtgctggagaggatgtggagaaataggaacacttttacactgttttttattttttatacaatgtaagtgtcttagtgactctatcatttagatggaaattcaagaccac

SEQ ID NO: 104560 - DNA, 120 bp, synthetic construct; identical to SEQ ID NO: 31629
  source 1..120: mol_type = other DNA

SEQ ID NO: 104561 - DNA, 120 bp, synthetic construct; identical to SEQ ID NO: 31630
  source 1..120: mol_type = other DNA

SEQ ID NO: 104562 - DNA, 120 bp, synthetic construct
  source 1..120: mol_type = other DNA
tttctctgatggccagtgatgatgagcattttttcatgtgttttttggctgcataaatgtcttcttttgagaagtgtctgttcatatcctttgcccacttgttgatggggttgttttttt

SEQ ID NO: 104563 - DNA, 120 bp, synthetic construct; identical to SEQ ID NO: 31631
  source 1..120: mol_type = other DNA

SEQ ID NO: 104564 - DNA, 120 bp, synthetic construct
  source 1..120: mol_type = other DNA
ttgtggttttgatttgcatttctctgatggccagtgatgatgaacattttttcatgtgttttttggctgcataaatgtcttcttttgagaagtgtctgttcatgtcctttgcccactttt

SEQ ID NO: 104565 - DNA, 120 bp, synthetic construct
  source 1..120: mol_type = other DNA
gttcttccatttgtttgtatcctcttttatttccttgagcagtggattgtagttctcctgcaagaggtccttcacatcccttgtaagttggattcctaggtattttattttctttgaagc

SEQ ID NO: 104566 - DNA, 120 bp, synthetic construct
  source 1..120: mol_type = other DNA
catttggtcctggactctttttggttggtaagctattgattattgccacaatttcagagtctgttattggtctattcagagattcaacttcttcctggtttagtcttgggagggtgtatg

SEQ ID NO: 104567 - DNA, 120 bp, synthetic construct
  source 1..120: mol_type = other DNA
ctctttgtaggtcactcaggacttgctttatgaatctgggtgctccgtgttgggtgcatatatatttaggatagttagctcttcttgttgaattgatccctttaccattatgtaatggcc

SEQ ID NO: 104568 - DNA, 120 bp, synthetic construct
  source 1..120: mol_type = other DNA
ctttttattactttttctctaaacttcccttctcgcttcatttcattcatttcatcttccattgctgataccctttcttccagttgatcgcatcggctcctgaggcttctgcattcttca

SEQ ID NO: 104569 - DNA, 120 bp, synthetic construct
  source 1..120: mol_type = other DNA
cgtgctagcaatcagggagactccgtgggcgtgggcgtaggactctctgagccaggtgcaggatataatctcgtggtctgccattttttaagcccgtcggaaaagcgcagtattcgggtg

SEQ ID NO: 104570 - DNA, 120 bp, synthetic construct; identical to SEQ ID NO: 31632
  source 1..120: mol_type = other DNA

SEQ ID NO: 104571 - DNA, 120 bp, synthetic construct
  source 1..120: mol_type = other DNA
ctgtttttctgttattggtgtataagagtgcttgtgatttttgtacattgattttgtatcctgagactttgctgaagttgcttatcagcttaaggagattttgggctgagacaatggggt

SEQ ID NO: 104572 - DNA, 120 bp, synthetic construct
  source 1..120: mol_type = other DNA
cagccataaaaatgatgagttcgtgtcctttgtagggacgtggatgaaattggaaatcatcattctcagtaaactatcacaagaacaaaaaaccaaacaccgcatattctcactcatagg

SEQ ID NO: 104573 - DNA, 120 bp, synthetic construct; identical to SEQ ID NO: 31633
  source 1..120: mol_type = other DNA

SEQ ID NO: 104574 - DNA, 120 bp, synthetic construct; identical to SEQ ID NO: 15588
  source 1..120: mol_type = other DNA

SEQ ID NO: 104575 - DNA, 120 bp, synthetic construct; identical to SEQ ID NO: 15589
  source 1..120: mol_type = other DNA

SEQ ID NO: 104576 - DNA, 120 bp, synthetic construct; identical to SEQ ID NO: 23529
  source 1..120: mol_type = other DNA

SEQ ID NO: 104577 - DNA, 120 bp, synthetic construct; identical to SEQ ID NO: 23530
  source 1..120: mol_type = other DNA

SEQ ID NO: 104578 - DNA, 120 bp, synthetic construct; identical to SEQ ID NO: 27194
  source 1..120: mol_type = other DNA

SEQ ID NO: 104579 - DNA, 120 bp, synthetic construct
  source 1..120: mol_type = other DNA
ttccttagagcttttttttttttttttgagatcaagtcttgctctgttgcccaggctggagtgcagtggtgcaatcttggctcactgcaacctctacctcccgggttcgagtgattcttc

SEQ ID NO: 104580 - DNA, 120 bp, synthetic construct
  source 1..120: mol_type = other DNA
ataggggaatgtttgaaaatattatggtgtattcatataatggaatgtttttttgttgttgttgttaattttattattattatactttaagttttagggtacatgtgcacaatgtgcagg

SEQ ID NO: 104581 - DNA, 120 bp, synthetic construct
  source 1..120: mol_type = other DNA
tcttcttttgagaagtatctgttcatgtcttttgcccactttttgatggggttgtttttttttttcttgtaaatttgtttgagttcattgtagattctggatattagccctttgtcagat

SEQ ID NO: 104582 - DNA, 120 bp, synthetic construct
  source 1..120: mol_type = other DNA
atccttgatgaacattgatgcaaaaatcctcaataaaatactggcaaacgaaatccagtaccacatcaaaaagcttatccaccatgatcaagtgggcttcatccctggaatgcaaggctg

SEQ ID NO: 104583 - DNA, 120 bp, synthetic construct
  source 1..120: mol_type = other DNA
ttcaaactgtactacaaggctacagtaaccaaaacagcatggtactggtatcaaaacagagatatagaccaatggaacagaacagagccctcagaaataatgccgcatatctacaactat

SEQ ID NO: 104584 - DNA, 120 bp, synthetic construct
  source 1..120: mol_type = other DNA
aaaccatcattctcagcaaactatcgcaaggacaaaaaaccaaacactccacgttctcactcataggtgggaattgaacaatgagaacacatggacacaggaaggggaacatcacacacc

SEQ ID NO: 104585 - DNA, 120 bp, synthetic construct
  source 1..120: mol_type = other DNA
cacctggtctcggccttgacacatggagattatggggattacaattggaggtgagatttgggtggggacacagagccaaaccatatcatatattttcatattgttggagatacatatttt

SEQ ID NO: 104586 - DNA, 120 bp, synthetic construct
  source 1..120: mol_type = other DNA
ggtatctcattgtggttttgatttgcatttctctgatggccagtgatgatgagcattttttcatgtgtcttttggctgcataaatgtcttcttttgagaagtgtctgttcatgtccttca

SEQ ID NO: 104587 - DNA, 120 bp, synthetic construct
  source 1..120: mol_type = other DNA
acgatattgattcttcctacccatgagcatggaatgttcttccatttgtttgtatcctcttttatttcattgagcagtggtttgtagttctccttgaagaggtccttcacgtcccttgta

SEQ ID NO: 104588 - DNA, 120 bp, synthetic construct
  source 1..120: mol_type = other DNA
tagtctattcagagattcagcttcttcctggtttagtcttgggagggtgtatgtgtcgaggaatttatccatttcttctagattttctagtttatttgcgtagaggtgtttagtattctc

SEQ ID NO: 104589 - DNA, 120 bp, synthetic construct
  source 1..120: mol_type = other DNA
ctattaggtccgcttggtgcagagctcagttcaaatcctgggtttccttgttaactttctctctcattgatctgtctaatgttgacagtggggtgttaaaatctcccattattaatgtgt

SEQ ID NO: 104590 - DNA, 120 bp, synthetic construct
  source 1..120: mol_type = other DNA
tttctagattggggaagttctcctggataatatcctgcagagtgttttccaacttgtttccattctccccgtcactttcaggtacaccaatcagacgtagatttggtcttttcacatagt

SEQ ID NO: 104591 - DNA, 120 bp, synthetic construct
  source 1..120: mol_type = other DNA
cctttcaccttttgccatgatcgtaaggcctccccagccacttggaactgtaagtccaataaacctcattcttttgtaaattgcccagttgtggttatgtcttttttttttttaattata

SEQ ID NO: 104592 - DNA, 120 bp, synthetic construct
  source 1..120: mol_type = other DNA
tcttgtaaatttgtttgagttcattgtagattctggatattagccctttgtcagatgagtaggttgcgaaaattttctcccattttgtaggttgcctgttcactctgatggtggtttctt

SEQ ID NO: 104593 - DNA, 120 bp, synthetic construct
  source 1..120: mol_type = other DNA
tgggctgagacaatggggttttctagatatacaatcatgtcatctgcaaacagggacaatttgacttcctcttttcctaattgaataccctttatttccttctcctgcctaattgccctg

SEQ ID NO: 104594 - DNA, 120 bp, synthetic construct
  source 1..120: mol_type = other DNA
tagtattctctgatggtagtttgtatttctgtgggatcggtggtgatatcccctttatcattttttattgtgtctatttgattcttctctctttttttcttcattagtcttgctagcggt

SEQ ID NO: 104595 - DNA, 120 bp, synthetic construct
  source 1..120: mol_type = other DNA
gatcttcctccatccttttattttgagcctatgtgtgtctctgcatgtgagatgggtttcctgaatacagcacactgatggatcttgactctttatccaatttgccagtctgtgtctttt

SEQ ID NO: 104596 - DNA, 120 bp, synthetic construct
  source 1..120: mol_type = other DNA
gttttcagctccatcagctcctttaagtacttctctttattggttattctagttatacattcatctaaatttttttcaaagttttcaacttctttgcctttggtttgaatgtcctcctgt

SEQ ID NO: 104597 - DNA, 120 bp, synthetic construct; identical to SEQ ID NO: 27195
  source 1..120: mol_type = other DNA

SEQ ID NO: 104598 - DNA, 120 bp, synthetic construct
  source 1..120: mol_type = other DNA
aactcctgacttcatgatccacccacttcagcctcccaaagtactgagattacaggcatgagccaccgcacctggccataatcatcttttctaagcagctaaagaaaggtaaaattttta

SEQ ID NO: 104599 - DNA, 120 bp, synthetic construct
  source 1..120: mol_type = other DNA
cagttgcataatcatagctcactgtaacgttgaactgggctcaagcttcccagagtgctgggattgtaggtgtgagctactatgcacagcctaaaattttttgatatgtagttttgggag

SEQ ID NO: 104600 - DNA, 120 bp, synthetic construct
  source 1..120: mol_type = other DNA
accaacatggtcaaaccccatctctactaaaaatacaaaaattagccacgcatggtggcgggtgcctgtaatcccagctacttgagaggccgagacaggagaattgcttgaaaccaggag

SEQ ID NO: 104601 - DNA, 120 bp, synthetic construct
  source 1..120: mol_type = other DNA
tgctacttcaagtaatttagcaatgattaacttgtgccatgaattcctgaaagaattgcagtatcaaagtatatctgtgcatttataatttttagagctgttgccaaatatctaacccta

SEQ ID NO: 104602 - DNA, 120 bp, synthetic construct
  source 1..120: mol_type = other DNA
ttaaaaaaaacattttttagagatagggtctcaccgtgttgttcaggctgttcttgaactctgggctcaagcgatccccccaccttggccttccaaagtgctgggattacaggtgtgagc

SEQ ID NO: 104603 - DNA, 120 bp, synthetic construct
  source 1..120: mol_type = other DNA
attggtttgccaaccatttaacaccagctgattctaaaaacactgctgtggggatataaagatgaagaagatacggatctgtcttaaagagctgagagcgtagggaggaagatagaagat

SEQ ID NO: 104604 - DNA, 120 bp, synthetic construct; identical to SEQ ID NO: 21143
  source 1..120: mol_type = other DNA

SEQ ID NO: 104605 - DNA, 120 bp, synthetic construct
  source 1..120: mol_type = other DNA
gctcactgtaacctctgcctcccaggttcaagtgattctgctgcctcagtctcccaagtagcgggattacaaatgcccgccatcacgcccggctaattttttgtatttttagtagagacg

SEQ ID NO: 104606 - DNA, 120 bp, synthetic construct; identical to SEQ ID NO: 21144
  source 1..120: mol_type = other DNA

SEQ ID NO: 104607 - DNA, 120 bp, synthetic construct; identical to SEQ ID NO: 21145
  source 1..120: mol_type = other DNA

SEQ ID NO: 104608 - DNA, 120 bp, synthetic construct; identical to SEQ ID NO: 21146
  source 1..120: mol_type = other DNA

SEQ ID NO: 104609 - DNA, 120 bp, synthetic construct; identical to SEQ ID NO: 21147
  source 1..120: mol_type = other DNA

SEQ ID NO: 104610 - DNA, 120 bp, synthetic construct; identical to SEQ ID NO: 21148
  source 1..120: mol_type = other DNA

SEQ ID NO: 104611 - DNA, 120 bp, synthetic construct; identical to SEQ ID NO: 21149
  source 1..120: mol_type = other DNA

SEQ ID NO: 104612 - DNA, 120 bp, synthetic construct; identical to SEQ ID NO: 21150
  source 1..120: mol_type = other DNA

SEQ ID NO: 104613 - DNA, 120 bp, synthetic construct; identical to SEQ ID NO: 21151
  source 1..120: mol_type = other DNA

SEQ ID NO: 104614 - DNA, 120 bp, synthetic construct; identical to SEQ ID NO: 21152
  source 1..120: mol_type = other DNA

SEQ ID NO: 104615 - DNA, 120 bp, synthetic construct; identical to SEQ ID NO: 21153
  source 1..120: mol_type = other DNA

SEQ ID NO: 104616 - DNA, 120 bp, synthetic construct; identical to SEQ ID NO: 21154
  source 1..120: mol_type = other DNA

SEQ ID NO: 104617 - DNA, 120 bp, synthetic construct; identical to SEQ ID NO: 21155
  source 1..120: mol_type = other DNA

SEQ ID NO: 104618 - DNA, 120 bp, synthetic construct; identical to SEQ ID NO: 21156
  source 1..120: mol_type = other DNA

SEQ ID NO: 104619 - DNA, 120 bp, synthetic construct; identical to SEQ ID NO: 21157
  source 1..120: mol_type = other DNA

SEQ ID NO: 104620 - DNA, 120 bp, synthetic construct; identical to SEQ ID NO: 21158
  source 1..120: mol_type = other DNA

SEQ ID NO: 104621 - DNA, 120 bp, synthetic construct
  source 1..120: mol_type = other DNA
tcaagcagaaatttgaggaatgccagcggcttctgttagacataccacttcaaactccccataaacttgtagatactggcagagctgccaagttaatacagagagctgaagaaatgaaga

SEQ ID NO: 104622 - DNA, 120 bp, synthetic construct
  source 1..120: mol_type = other DNA
acttcagaagttgaagtgtctagcacatctgaaacaacaccaaaagcagtggtttctcctccaaagtttgtatttggttcagagtctgttaaaagcatttttagtagtgaaaaatcaaaa

SEQ ID NO: 104623 - DNA, 120 bp, synthetic construct
  source 1..120: mol_type = other DNA
aggatcacttgagcacaggagatggaggtagcagtgagctgaaatcatgccactgcactccagcctgactgagtgactgagactttgtctccaaaaaaaaaaaaacaacgtgatattgag

SEQ ID NO: 104624 - DNA, 120 bp, synthetic construct
  source 1..120: mol_type = other DNA
agccatgccaaacaagtacaatgataaagtagcaatctctgatttttttttttaagtataccagttttattactagctaaggtagctcttaatcttttatttttaaagatacggtctttg

SEQ ID NO: 104625 - DNA, 120 bp, synthetic construct; identical to SEQ ID NO: 21126
  source 1..120: mol_type = other DNA

SEQ ID NO: 104626 - DNA, 120 bp, synthetic construct; identical to SEQ ID NO: 21127
  source 1..120: mol_type = other DNA

SEQ ID NO: 104627 - DNA, 120 bp, synthetic construct
  source 1..120: mol_type = other DNA
caccttccgcctccccagctcaagcgatgctcccacctcagtctcccgagtagttgggaccacaggtgtacccaccacacccgctgttttgttttgttttgtatttttggtagagactgg

SEQ ID NO: 104628 - DNA, 120 bp, synthetic construct; identical to SEQ ID NO: 21128
  source 1..120: mol_type = other DNA

SEQ ID NO: 104629 - DNA, 120 bp, synthetic construct
  source 1..120: mol_type = other DNA
ttttcttttttttttttttgagacggagactcgctctatcgtccaggctggagtgcagtggcgcgatctcggctcactgcaaactctgcctcccgggttcacaccattctcctgccccag

SEQ ID NO: 104630 - DNA, 120 bp, synthetic construct
  source 1..120: mol_type = other DNA
ttagtagagatgggatttcaccatgttggtcaggctggtcttgaaactaatggtatgtctttaaaatgtctttacttaatttagttgatcatttggttatcgaattctgagtttgaaata

SEQ ID NO: 104631 - DNA, 120 bp, synthetic construct
  source 1..120: mol_type = other DNA
taccttgaatctatttcttcattttgaaaagggggaactggctgggctcaatggctgacgcctgtaatcccagcactttgggaggtggaggaagtcagatcacaaggtcaagagatcgag

SEQ ID NO: 104632 - DNA, 120 bp, synthetic construct
  source 1..120: mol_type = other DNA
tgccttcaagcatctgtttaacaaagcacatcttgcaccgcccttaatccatttaaccctgggtggacacagcacatgtttcagagagcacagggttgggggtaaggtcacagatcaaca

SEQ ID NO: 104633 - DNA, 120 bp, synthetic construct; identical to SEQ ID NO: 21131
  source 1..120: mol_type = other DNA

SEQ ID NO: 104634 - DNA, 120 bp, synthetic construct; identical to SEQ ID NO: 21132
  source 1..120: mol_type = other DNA

SEQ ID NO: 104635 - DNA, 120 bp, synthetic construct; identical to SEQ ID NO: 21133
  source 1..120: mol_type = other DNA

SEQ ID NO: 104636 - DNA, 120 bp, synthetic construct; identical to SEQ ID NO: 21134
  source 1..120: mol_type = other DNA

SEQ ID NO: 104637 - DNA, 120 bp, synthetic construct
  source 1..120: mol_type = other DNA
caatttaaccattcccttttttttttttttttttttttttttgagacagagtcttgcttagtcacccatgctggagtgcagtggtgctacctcggctcactgcaacttctgcctcccggg

SEQ ID NO: 104638 - DNA, 120 bp, synthetic construct; identical to SEQ ID NO: 21135
  source 1..120: mol_type = other DNA

SEQ ID NO: 104639 - DNA, 120 bp, synthetic construct; identical to SEQ ID NO: 21136
  source 1..120: mol_type = other DNA

SEQ ID NO: 104640 - DNA, 120 bp, synthetic construct; identical to SEQ ID NO: 21137
  source 1..120: mol_type = other DNA

SEQ ID NO: 104641 - DNA, 120 bp, synthetic construct
  source 1..120: mol_type = other DNA
ctccgcctccctggttcaggcgattctcctgcctcagcctcccgagtagctgggactacaggcgcacaccaccatacccagctaatttttgtatttttagtagagacggggttcaggatg

SEQ ID NO: 104642 - DNA, 120 bp, synthetic construct
  source 1..120: mol_type = other DNA
aacctctgcttcccaggttcaagcaattctcctgcctcagcctcccaagtacctggaattacaggtgcctaccaccacgcctggctaattttttgtatttttagtagagaaggggtttca

SEQ ID NO: 104643 - DNA, 120 bp, synthetic construct; identical to SEQ ID NO: 21138
  source 1..120: mol_type = other DNA

SEQ ID NO: 104644 - DNA, 120 bp, synthetic construct; identical to SEQ ID NO: 19466
  source 1..120: mol_type = other DNA

SEQ ID NO: 104645 - DNA, 120 bp, synthetic construct; identical to SEQ ID NO: 19467
  source 1..120: mol_type = other DNA

SEQ ID NO: 104646 - DNA, 120 bp, synthetic construct; identical to SEQ ID NO: 26506
  source 1..120: mol_type = other DNA

SEQ ID NO: 104647 - DNA, 120 bp, synthetic construct
  source 1..120: mol_type = other DNA
atgattgccattctaactggtgtgagatgatatctcattgtggttttgatttgcattctctgatggccagtgatggtgagcattttttcacgtattttttggctgcataaatgtcttctt

SEQ ID NO: 104648 - DNA, 120 bp, synthetic construct
  source 1..120: mol_type = other DNA
tttggttccatatgaactttaaagtagttttttccaattctgtgaagaaagtcgttggtagcttgatggggatggcattgaatctgtaaatttccttgggcagtatggccattttcatga

SEQ ID NO: 104649 - DNA, 120 bp, synthetic construct
  source 1..120: mol_type = other DNA
gctgtaaatccatctcttcctggactctttttggttggtaagctattgattattgccacaatttcagatcctgttattggtctattcagagattcaacttcttcctggtttagtcttggg

SEQ ID NO: 104650 - DNA, 120 bp, synthetic construct
  source 1..120: mol_type = other DNA
ctatggttacagtgagctatgaatgcgccactgcactacagcctgggcaacagagaaataccctgtctccccaaaaatactaaataaatcaatgataaacacaggatgtaaaaacctgta

SEQ ID NO: 104651 - DNA, 120 bp, synthetic construct
  source 1..120: mol_type = other DNA
gcctcccaagtaactgggtacaggaatgcgccaccacgcccagctatttttttgtattttgggtagagacagggttttaccatgttggccaggctggtctcgaactcctgacctcaggtg

SEQ ID NO: 104652 - DNA, 120 bp, synthetic construct; identical to SEQ ID NO: 23833
  source 1..120: mol_type = other DNA

SEQ ID NO: 104653 - DNA, 120 bp, synthetic construct
  source 1..120: mol_type = other DNA
gaaaatttccttaaatcaatttttattttgtatcctattgaatctttttgagacagaatctcactgtgttgcccaggctggactccagtggtgtgatctcagctcactgcaacctccacc

SEQ ID NO: 104654 - DNA, 120 bp, synthetic construct; identical to SEQ ID NO: 13048
  source 1..120: mol_type = other DNA

SEQ ID NO: 104655 - DNA, 120 bp, synthetic construct; identical to SEQ ID NO: 13049
  source 1..120: mol_type = other DNA

SEQ ID NO: 104656 - DNA, 120 bp, synthetic construct
  source 1..120: mol_type = other DNA
tgagcccaggagtgggaagctgcagtgagctatgatcacaccaccgtactccgcctggaggacaataaaaccctgtttttttttgtttttttttttttttttttttttaagaaaaggtgg

SEQ ID NO: 104657 - DNA, 120 bp, synthetic construct
  source 1..120: mol_type = other DNA
tttgcttgtactccaatccgccctgtccctacattctaaaattcactttgaggttctttccagtgcttctttattcacatgtaagatgagcatatccttttcttacctccactccccttc

SEQ ID NO: 104658 - DNA, 120 bp, synthetic construct; identical to SEQ ID NO: 17334
  source 1..120: mol_type = other DNA

SEQ ID NO: 104659 - DNA, 120 bp, synthetic construct; identical to SEQ ID NO: 17335
  source 1..120: mol_type = other DNA

SEQ ID NO: 104660 - DNA, 120 bp, synthetic construct; identical to SEQ ID NO: 17336
  source 1..120: mol_type = other DNA

SEQ ID NO: 104661 - DNA, 120 bp, synthetic construct; identical to SEQ ID NO: 17337
  source 1..120: mol_type = other DNA

SEQ ID NO: 104662 - DNA, 120 bp, synthetic construct; identical to SEQ ID NO: 17338
  source 1..120: mol_type = other DNA

SEQ ID NO: 104663 - DNA, 120 bp, synthetic construct; identical to SEQ ID NO: 17339
  source 1..120: mol_type = other DNA

SEQ ID NO: 104664 - DNA, 120 bp, synthetic construct; identical to SEQ ID NO: 25666
  source 1..120: mol_type = other DNA

SEQ ID NO: 104665 - DNA, 120 bp, synthetic construct
  source 1..120: mol_type = other DNA
ctacgtctgattggtgtacctgaaagtgaggcggagaatggaaccaagttggaaaacactctgcaggatattatccaggagaacttccccaatctagcaaggcaggccaacgttcagatt

SEQ ID NO: 104666 - DNA, 120 bp, synthetic construct
  source 1..120: mol_type = other DNA
aacaagaggagctaactatcctaaatatatatgcacccaatacaggagcacccagattcataaagcaagtcctgagtgacctacaaagagacttagactcccacacattaataatgggag

SEQ ID NO: 104667 - DNA, 120 bp, synthetic construct
  source 1..120: mol_type = other DNA
aaaccaggaagaagttgaatctctgaatagaccaataacaggagctgaaattgtggcaataatcaatagtttaccaaccaaaaagagtccaggaccagatggattcgcagccgaattcta

SEQ ID NO: 104668 - DNA, 120 bp, synthetic construct
  source 1..120: mol_type = other DNA
acctcttcaaggagaactacaaaccactgctcaaggaaataaaagaggacacaaacaaatggaagaacattccatgctcatgggtaggaagaatcaatatcgtgaaaatggccgtactac

SEQ ID NO: 104669 - DNA, 120 bp, synthetic construct
  source 1..120: mol_type = other DNA
taaaaagtcaggaaacaacaggtgctggagaggatgtggagaaataggaacacttttacactgttggtgggactgtaaactaggtcaaccattgtggaagtcagtgtggcgattcctcag

SEQ ID NO: 104670 - DNA, 120 bp, synthetic construct; identical to SEQ ID NO: 25667
  source 1..120: mol_type = other DNA

SEQ ID NO: 104671 - DNA, 120 bp, synthetic construct
  source 1..120: mol_type = other DNA
accgcataagacagatactcccagagcggccatttatagacctccccccaggaatgcaattccttccccagggtattactatttttttttttattatactttaagttttagggtacatgt

SEQ ID NO: 104672 - DNA, 120 bp, synthetic construct
  source 1..120: mol_type = other DNA
tgccattgcttttggtgttttggacatgaagtccttgcccatgcctatgtcctgaatggtaatgcctaggttttcttctagggtttttatggttttaggtctaacatttaaatctttaat

SEQ ID NO: 104673 - DNA, 120 bp, synthetic construct
  source 1..120: mol_type = other DNA
ctctgcaagaagaagaatatggctctattctgcctgaccctgcaggcagtcagacctttggttgtcttctcttgttctgtaaaatcactgttattctgtttgttttcaaggtgcactgat

SEQ ID NO: 104674 - DNA, 120 bp, synthetic construct; identical to SEQ ID NO: 25668
  source 1..120: mol_type = other DNA

SEQ ID NO: 104675 - DNA, 120 bp, synthetic construct; identical to SEQ ID NO: 35292
  source 1..120: mol_type = other DNA

SEQ ID NO: 104676 - DNA, 120 bp, synthetic construct; identical to SEQ ID NO: 35293
  source 1..120: mol_type = other DNA

SEQ ID NO: 104677 - DNA, 120 bp, synthetic construct
  source 1..120: mol_type = other DNA
gactccaggcgaacccacctcttttttttctcacccaccccccacccccacccccacccccacccccacccccaccaagcacacacccggaagggtttccctgacacactggctgaggtg

SEQ ID NO: 104678 - DNA, 120 bp, synthetic construct
  source 1..120: mol_type = other DNA
gctttgtcgcctcttgaagagacaagagctctggtttataaacacattactgggattcattttgctttaagaattaaagactaggctgggagcggtggctcatgcctgtaatcccagcac

SEQ ID NO: 104679 - DNA, 120 bp, synthetic construct
  source 1..120: mol_type = other DNA
aacacacacacacacacacacctgcagagcgagactccgtctcaaacacacacacacacacctgcagagcgagactccgtctcaaacacacacacacacacacacctgcagagactccgt

SEQ ID NO: 104680 - DNA, 120 bp, synthetic construct; identical to SEQ ID NO: 33039
  source 1..120: mol_type = other DNA

SEQ ID NO: 104681 - DNA, 120 bp, synthetic construct
  source 1..120: mol_type = other DNA
aggggagatggcgtcctacgtagataacagcttccgccaggcggtgatgaagaatccccccgaaaggaccccccaggtgagaacgcggcggccgcctgcccttggccggatttctgcctc

SEQ ID NO: 104682 - DNA, 120 bp, synthetic construct; identical to SEQ ID NO: 25891
  source 1..120: mol_type = other DNA

SEQ ID NO: 104683 - DNA, 120 bp, synthetic construct; identical to SEQ ID NO: 25892
  source 1..120: mol_type = other DNA

SEQ ID NO: 104684 - DNA, 120 bp, synthetic construct
  source 1..120: mol_type = other DNA
ctgtaatcctagcactttgggaggccacagcaggaggatcacttgaggccaagagtttcaagcccagcttgagcaacaaagcaagatgctatatctaaaaacaaacaaacaaaaacaaaa

SEQ ID NO: 104685 - DNA, 120 bp, synthetic construct
  source 1..120: mol_type = other DNA
tggaaccttatcatccagtaatcctgatttattgcagtcacatcatcgcattttagacttcagtgctactcctggtgagtatcaccaacacttcttttgttttcttatagttatcttttt

SEQ ID NO: 104686 - DNA, 120 bp, synthetic construct
  source 1..120: mol_type = other DNA
ttggggtcctggtttggaagggtagagtatgcttgatgtaaagtcacggggttaaaccctggtgctgtcttccctttgtatatgtacgttcacaaacacattttctaatcatattctagt

SEQ ID NO: 104687 - DNA, 120 bp, synthetic construct
  source 1..120: mol_type = other DNA
acaaaaaataccaccaccatcaccacacacacacacacacacacacacacacacacacacacatttatggaattttcacagagaaagcatgtgtctaaaaaacaaaaacaaaacaaaaaa

SEQ ID NO: 104688 - DNA, 120 bp, synthetic construct
  source 1..120: mol_type = other DNA
agaaaggatagaaagtgcaactagtgcgagtgaaattccatgtgatttgtttgtttctaccacctacttctggatagacagttctatgaccaggtaactgagatagcagctgtgctgtct

SEQ ID NO: 104689 - DNA, 120 bp, synthetic construct
  source 1..120: mol_type = other DNA
accgcaaagagttatcaacaagattaatgatgtaatgtgtgtggagttccatcaaatagcacaaagcagatggccgggaaatgttaattttcttccctttttttaagagcttagattgag

SEQ ID NO: 104690 - DNA, 120 bp, synthetic construct
  source 1..120: mol_type = other DNA
acgaaggtaaacataaggcagagggtttccatctttgcttgaagaagcacagaataaatgccatgtgatttccttttcctcctctgtcaatttcaggaaatgactcaaaagtagacgggc

SEQ ID NO: 104691 - DNA, 120 bp, synthetic construct
  source 1..120: mol_type = other DNA
ggaagaagaaatggcggagtttggggtaagtggtggagaccttgcatacccacacacagttcttattctgctcattgcattgttttcttacctgctgtattttctgatgctttgcatttt

SEQ ID NO: 104692 - DNA, 120 bp, synthetic construct
  source 1..120: mol_type = other DNA
ttggcacattttaaatagataaagtactcccatgctagagtgagctgcatatgtaccttttcatcttccaggtctctcagccagggtagtacaaatgcaacagtgctagatgttgctcag

SEQ ID NO: 104693 - DNA, 120 bp, synthetic construct
  source 1..120: mol_type = other DNA
caaatcctgtttgtctcctcttactagctgcagccttaggcaacttacttgacctccctaatccttagtttccaggcgtgtaaaagggaggaagcatacatatgtcattgagtttttaat

SEQ ID NO: 104694 - DNA, 120 bp, synthetic construct
  source 1..120: mol_type = other DNA
tccttcacggaagaaagtgcccgtaaaggatctcccaccttttggtaagtgattacattcatttctttttttggtgccattcactgtcatggtttgcaaattaggaaaaaaatatttgtc

SEQ ID NO: 104695 - DNA, 120 bp, synthetic construct; identical to SEQ ID NO: 21801
  source 1..120: mol_type = other DNA

SEQ ID NO: 104696 - DNA, 120 bp, synthetic construct; identical to SEQ ID NO: 21802
  source 1..120: mol_type = other DNA

SEQ ID NO: 104697 - DNA, 120 bp, synthetic construct
  source 1..120: mol_type = other DNA
aatgatcgccattctaactggtgtgagatggtatctcattgcagttttgatttgcatttctctgatggccagtgatgatgagcattttttcatgtgtcttttggctgcataaatgtcttc

SEQ ID NO: 104698 - DNA, 120 bp, synthetic construct
  source 1..120: mol_type = other DNA
aaatagggaatcctttccctattgcttgtttttgtcaggtttgtcaaaaatcagatgattgtagatgtgtggtattatttcggagggctctgttctgttccattgttctatatctctgtt

SEQ ID NO: 104699 - DNA, 120 bp, synthetic construct
  source 1..120: mol_type = other DNA
gttgaggctacagtgagccataattgtatcactagacaatctatcctgggcaaccgagtgagaagaaagagaaagagagaaagagagaaaggaagaaagaaagaaagagagagagagaga

SEQ ID NO: 104700 - DNA, 120 bp, synthetic construct; identical to SEQ ID NO: 21803
  source 1..120: mol_type = other DNA

SEQ ID NO: 104701 - DNA, 120 bp, synthetic construct
  source 1..120: mol_type = other DNA
tccctgacacttaatagccagtgacactgaacaagtcactcatttccaggagcttcagtttcctcactggtataatggtgatctgacttaccacaataaaaggattagtaagatcaagcc

SEQ ID NO: 104702 - DNA, 120 bp, synthetic construct; identical to SEQ ID NO: 21804
  source 1..120: mol_type = other DNA

SEQ ID NO: 104703 - DNA, 120 bp, synthetic construct; identical to SEQ ID NO: 28951
  source 1..120: mol_type = other DNA

SEQ ID NO: 104704 - DNA, 120 bp, synthetic construct
  source 1..120: mol_type = other DNA
tactcaagaggctgaggcaggagaatgtcttgaatccaggaggcagaggttgtagtgagccaagattgcatcactgcattccagcctgggtgacagagtggactccgtctcaaaaaaaaa

SEQ ID NO: 104705 - DNA, 120 bp, synthetic construct
  source 1..120: mol_type = other DNA
cgagattgcagcactgcacgccagcctgacaacagagcaagactctgtctcaaaaaaaaaaaaaaaaaagtagtgaaaacaggaaggaaactgtttttttggtaacaacttatttgatta

SEQ ID NO: 104706 - DNA, 120 bp, synthetic construct; identical to SEQ ID NO: 21924
  source 1..120: mol_type = other DNA

SEQ ID NO: 104707 - DNA, 120 bp, synthetic construct; identical to SEQ ID NO: 21925
  source 1..120: mol_type = other DNA

SEQ ID NO: 104708 - DNA, 120 bp, synthetic construct
  source 1..120: mol_type = other DNA
aggctcttatttcatattaaaccatgtcttcgagcttgtaagcaataaggtttatgcggtttccagctcacacagtggggacaccctaagtcactgccttaagaaaaccacatctttcaa

SEQ ID NO: 104709 - DNA, 120 bp, synthetic construct; identical to SEQ ID NO: 17998
  source 1..120: mol_type = other DNA

SEQ ID NO: 104710 - DNA, 120 bp, synthetic construct; identical to SEQ ID NO: 17999
  source 1..120: mol_type = other DNA

SEQ ID NO: 104711 - DNA, 120 bp, synthetic construct
  source 1..120: mol_type = other DNA
atgagtttccatcactttattttgcaaaaatagaaaactcagcaatatgcgatacagcggggtagaggggagatgtaaacagaggggaggggacagcaccctgaccccccaagagaacac

SEQ ID NO: 104712 - DNA, 120 bp, synthetic construct
  source 1..120: mol_type = other DNA
gagccggttagatcaggaaggggatgaacacagaggcacccctagaaactttggcaaaaacaaggagctcattggaaggggtggggagagggcagagcaggtcctcccccagtcactggc

SEQ ID NO: 104713 - DNA, 120 bp, synthetic construct
  source 1..120: mol_type = other DNA
tgagtagctggaactacagatgtgcaccatggtgcctggctttacattgtatattaactaatttagtcctcaagacagcgttacaaggtacgtgaagaatagcccagtttacaaacaaga

SEQ ID NO: 104714 - DNA, 120 bp, synthetic construct
  source 1..120: mol_type = other DNA
tttcagaactctctggatggggccaggtgcaagaattaccagcagaagagaccactgggtcctccacgccccctcccagacagattccgcatggagtggtgggaaaggagactgagcact

SEQ ID NO: 104715 - DNA, 120 bp, synthetic construct
  source 1..120: mol_type = other DNA
ggaaagtctcctgatgggctttgctgaccttggtgatgagctcttctaactgagggctcagctcatagctgtcaggtgacccttcttccttcacctctttcttcttcttgttccggtcat

SEQ ID NO: 104716 - DNA, 120 bp, synthetic construct
  source 1..120: mol_type = other DNA
gcctctcactggccttgcaggttgccccaagcctgacctaatctattaaccacctatgtgcaaagcagtgctgctcagacacagcatctgtgtgcctggtctctcatcttactagggtaa

SEQ ID NO: 104717 - DNA, 120 bp, synthetic construct
  source 1..120: mol_type = other DNA
ggggataactcctcaggcttatctctctcacactacccctgaataaccatcagagacagtggagcaaatggggcaaaggtctcaggggagtgagtgagaggatgcaccacagccttggtt

SEQ ID NO: 104718 - DNA, 120 bp, synthetic construct
  source 1..120: mol_type = other DNA
ttcctctcttgcgcaagggcctgggtgcggtcagactggcatggggcagtgccagccaattataagactgggggccttagggagacaggcccgggggcaacttttcctgtctaagtgata

SEQ ID NO: 104719 - DNA, 120 bp, synthetic construct
  source 1..120: mol_type = other DNA
cccaactccccatcctattgggcaatgagaggaaagttaagaattcacagggatttggtgcaaagcaatagttccatgctttctcggttctttaaatgacacacttttaaattcttcccc

SEQ ID NO: 104720 - DNA, 120 bp, synthetic construct; identical to SEQ ID NO: 12959
  source 1..120: mol_type = other DNA

SEQ ID NO: 104721 - DNA, 120 bp, synthetic construct; identical to SEQ ID NO: 12960
  source 1..120: mol_type = other DNA

SEQ ID NO: 104722 - DNA, 120 bp, synthetic construct; identical to SEQ ID NO: 12961
  source 1..120: mol_type = other DNA

SEQ ID NO: 104723 - DNA, 120 bp, synthetic construct
  source 1..120: mol_type = other DNA
ttctgaatcagaatctgaccagcagcaaacaacaacaaaaacagttaagtgcaaaatagggagtaccccgaaaacaagagggaaagagccttgattagtcaacttcaagctgtcagtacc

SEQ ID NO: 104724 - DNA, 120 bp, synthetic construct
  source 1..120: mol_type = other DNA
ttgaggataactggctctgaattcctcacgctaaattctcccttttttctaaaaccttccctcgaaaagctgaaaagggggcatttcaaagtaaagcaggccctgccagaagggtaagtc

SEQ ID NO: 104725 - DNA, 120 bp, synthetic construct
  source 1..120: mol_type = other DNA
cagggagaagtgccagacctcttcaagggccacctctcttagtctatgtgtgagagagaatgtgtgtgtgtcatccatagaataagggagagggtgatgagatgcacaaactcaatgtga

SEQ ID NO: 104726 - DNA, 120 bp, synthetic construct
  source 1..120: mol_type = other DNA
tttgtgctgtcttgttcacctacatgccactcaaataacccctgttggactacagacatgccaccagcaggcttcaccaaacgccagccacagcgtcagcagcactacaaaatccctcct

SEQ ID NO: 104727 - DNA, 120 bp, synthetic construct
  source 1..120: mol_type = other DNA
tgaccccacacatctttggggacctggcacaggatttctttcccctttttgcagcctccatgtaattcaaagcaatttcacctttttttctctctctctcagacagaatcttgctctgtc

SEQ ID NO: 104728 - DNA, 120 bp, synthetic construct
  source 1..120: mol_type = other DNA
tatttgacaggagaactctcatttgcaaacacttccattgagtccacatccaaactccttcctcaccaccactaccaccctccattattcactactactccattaggccaaacccctgtc

SEQ ID NO: 104729 - DNA, 120 bp, synthetic construct
  source 1..120: mol_type = other DNA
gggacttcaggcatgtcacttaatctctctgtgcctcagtttcttcatgcgtcacttgggactaataatagggcctacctcatatggttattgtgaggactaaataaattaaccaatgtc

SEQ ID NO: 104730 - DNA, 120 bp, synthetic construct
  source 1..120: mol_type = other DNA
tggggtgggcaggcccagaggtaggggatgggtatatctgcctttctttccatcagtatttgcttctaggatgtatagctctcagtctttatacctctggtttttatttttgtttttgct

SEQ ID NO: 104731 - DNA, 120 bp, synthetic construct
  source 1..120: mol_type = other DNA
atggaaagtagagaacattcttcctctactaagatgccatctcaaatggtggggcagcggggatgacagactaggggagaggggctcttacaaagctgcttctcttagagctgaggtgga

SEQ ID NO: 104732 - DNA, 120 bp, synthetic construct
  source 1..120: mol_type = other DNA
cgtagctgctaaagacagagaggcagcgtcagtggaactctgggaccagcactcctgggtccctgtcccggtcttcctgctctttctttgttccatttgggcttccctcaagaatactcc

SEQ ID NO: 104733 - DNA, 120 bp, synthetic construct
  source 1..120: mol_type = other DNA
ctgtcccggggcctctcggagcccgcccgcccacgtgaccgccccaaaatatccgacacattttctcccaaaccgcacactgactctgcaggcggggacacggaaaatattttctttctt

SEQ ID NO: 104734 - DNA, 120 bp, synthetic construct
  source 1..120: mol_type = other DNA
tgcggcattattcacaatagcaaagacttggaaccaacccacatgtccatcagtgatagactgggttaacaaaatgtggcacatatacaccatggaatactatgcagccataaaaatgga

SEQ ID NO: 104735 - DNA, 120 bp, synthetic construct
  source 1..120: mol_type = other DNA
aatttcattaactttattgaaagtgatattatttggccaggaacattagctcactcctgtaatcccagtactttgggaggctgaggcgggtggattgcaaggtcaagagattgagaccat

SEQ ID NO: 104736 - DNA, 120 bp, synthetic construct; identical to SEQ ID NO: 24770
  source 1..120: mol_type = other DNA

SEQ ID NO: 104737 - DNA, 120 bp, synthetic construct; identical to SEQ ID NO: 14140
  source 1..120: mol_type = other DNA

SEQ ID NO: 104738 - DNA, 120 bp, synthetic construct; identical to SEQ ID NO: 14141
  source 1..120: mol_type = other DNA

SEQ ID NO: 104739 - DNA, 120 bp, synthetic construct; identical to SEQ ID NO: 14142
  source 1..120: mol_type = other DNA

SEQ ID NO: 104740 - DNA, 120 bp, synthetic construct; identical to SEQ ID NO: 14143
  source 1..120: mol_type = other DNA

SEQ ID NO: 104741 - DNA, 120 bp, synthetic construct
  source 1..120: mol_type = other DNA
tccacagctacccggacgtagatacagcacacaggcactcatgggttcctaagatcagcctggtgacctcatcggctcagctcttgccacacagacatacacaggccatctggagctgca

SEQ ID NO: 104742 - DNA, 120 bp, synthetic construct
  source 1..120: mol_type = other DNA
aagacgccttcagctggacaggagggtcagttttgaagtctgaagttttaaatacttgcaatgtcactgtgtcttcacatttttatgagctgaaactgggacgggagaagtcacatattt

SEQ ID NO: 104743 - DNA, 120 bp, synthetic construct; identical to SEQ ID NO: 3703
  source 1..120: mol_type = other DNA

SEQ ID NO: 104744 - DNA, 120 bp, synthetic construct; identical to SEQ ID NO: 14145
  source 1..120: mol_type = other DNA

SEQ ID NO: 104745 - DNA, 120 bp, synthetic construct; identical to SEQ ID NO: 14146
  source 1..120: mol_type = other DNA

SEQ ID NO: 104746 - DNA, 120 bp, synthetic construct; identical to SEQ ID NO: 14147
  source 1..120: mol_type = other DNA

SEQ ID NO: 104747 - DNA, 120 bp, synthetic construct; identical to SEQ ID NO: 14148
  source 1..120: mol_type = other DNA

SEQ ID NO: 104748 - DNA, 120 bp, synthetic construct; identical to SEQ ID NO: 14149
  source 1..120: mol_type = other DNA

SEQ ID NO: 104749 - DNA, 120 bp, synthetic construct; identical to SEQ ID NO: 14150
  source 1..120: mol_type = other DNA

SEQ ID NO: 104750 - DNA, 120 bp, synthetic construct; identical to SEQ ID NO: 14151
  source 1..120: mol_type = other DNA

SEQ ID NO: 104751 - DNA, 120 bp, synthetic construct; identical to SEQ ID NO: 14152
  source 1..120: mol_type = other DNA

SEQ ID NO: 104752 - DNA, 120 bp, synthetic construct; identical to SEQ ID NO: 14153
  source 1..120: mol_type = other DNA

SEQ ID NO: 104753 - DNA, 120 bp, synthetic construct
  source 1..120: mol_type = other DNA
tcgcggggaaatcccggggaagtgctgagtctggagtatcgactcccttcctcctcgcggggaaatcacggggaagtgctgagtctggagtatcgactcccttcctcctcgcggggaaat

SEQ ID NO: 104754 - DNA, 120 bp, synthetic construct
  source 1..120: mol_type = other DNA
ctcccttcctcctcgcggggaaatcccggggaagtgctgagtctggagtatcgactcccttcgtcctcgcggggaaatcccggggaagtgctgagtctggagtatcgactcccttcctcc

SEQ ID NO: 104755 - DNA, 120 bp, synthetic construct
  source 1..120: mol_type = other DNA
gactcccttcgtcctcgcggggaaatcccggggaagtgctgagtctggagtatcgactcccttcgtcctcgcggggaaatcccggggaagtgctgagtctggagtatcgactcccttcgt

SEQ ID NO: 104756 - DNA, 120 bp, synthetic construct; identical to SEQ ID NO: 14154
  source 1..120: mol_type = other DNA

SEQ ID NO: 104757 - DNA, 120 bp, synthetic construct
  source 1..120: mol_type = other DNA
tggaaggcacaagggcgggagaaagacctcagaagggatttaaagaatgaagaaataaaagctctgaaatttattttaacagagctttgggctacactctaacctttgcttcagcagcac

SEQ ID NO: 104758 - DNA, 120 bp, synthetic construct
  source 1..120: mol_type = other DNA
taaaactggcccaaatgcagggtcagcgcctgagatgcagcccccacagcagcccccccacagcccccccacagcccccccagcccccccacagccccccacagcagcccccccacagcc

SEQ ID NO: 104759 - DNA, 120 bp, synthetic construct
  source 1..120: mol_type = other DNA
gaggacccgcagttaaaccagcactgctacgcccggatctcaagcttctcaggccttcaatctgggaagtgaattcctgctgtctgtaaccacccagcctatggtacaatttttacggca

SEQ ID NO: 104760 - DNA, 120 bp, synthetic construct
  source 1..120: mol_type = other DNA
ttctcagctggaatattgattaaaaaataaaactggcaataactagaaaaaaaatcgcaataaggaatctgtccacccagccatcactcacccatccgtccatccacccatctgtccatc

SEQ ID NO: 104761 - DNA, 120 bp, synthetic construct
  source 1..120: mol_type = other DNA
cccatccacccatcactcaaccatctgttaatccacccatcactcgtccattgctccatccacccatcagtcacccattggtccatctgaattcctgctgtctgtaaccacccagcctat

SEQ ID NO: 104762 - DNA, 120 bp, synthetic construct
  source 1..120: mol_type = other DNA
aaaccaggaaacagagaaaacaggatgaaatgaaggcaggctgcggtgtcttaagccctacaagccaggccatagagctattcagctgtgaacatgtgccattcttcaagacgagggaag

SEQ ID NO: 104763 - DNA, 120 bp, synthetic construct
  source 1..120: mol_type = other DNA
catccacccatcactcacccatccttccatccacccatctctcaccatctgtccatccacccatcactcacccatccgtccatccatcactcacccatccttccatccacccatctctca

SEQ ID NO: 104764 - DNA, 120 bp, synthetic construct; identical to SEQ ID NO: 104762
  source 1..120: mol_type = other DNA

SEQ ID NO: 104765 - DNA, 120 bp, synthetic construct
  source 1..120: mol_type = other DNA
gtccattgctccatccacccatcagtcacccattggtccatctgcccatcactcacccatctgtccatccacccatcactcgcccatctgtccatccacccatcactcaccctgtccgta

SEQ ID NO: 104766 - DNA, 120 bp, synthetic construct
  source 1..120: mol_type = other DNA
ctgcatatggaagctgaggagatgggagatggttgtgactttggtgacacaggtgagcccaggtgatgtggtttggatttgtgtccccacccaaatctcaggtcagactgtaatccctag

SEQ ID NO: 104767 - DNA, 120 bp, synthetic construct; identical to SEQ ID NO: 14123
  source 1..120: mol_type = other DNA

SEQ ID NO: 104768 - DNA, 120 bp, synthetic construct; identical to SEQ ID NO: 14155
  source 1..120: mol_type = other DNA

SEQ ID NO: 104769 - DNA, 120 bp, synthetic construct; identical to SEQ ID NO: 14156
  source 1..120: mol_type = other DNA

SEQ ID NO: 104770 - DNA, 120 bp, synthetic construct; identical to SEQ ID NO: 14157
  source 1..120: mol_type = other DNA

SEQ ID NO: 104771 - DNA, 120 bp, synthetic construct; identical to SEQ ID NO: 14158
  source 1..120: mol_type = other DNA

SEQ ID NO: 104772 - DNA, 120 bp, synthetic construct; identical to SEQ ID NO: 14159
  source 1..120: mol_type = other DNA

SEQ ID NO: 104773 - DNA, 120 bp, synthetic construct; identical to SEQ ID NO: 14160
  source 1..120: mol_type = other DNA

SEQ ID NO: 104774 - DNA, 120 bp, synthetic construct; identical to SEQ ID NO: 14161
  source 1..120: mol_type = other DNA

SEQ ID NO: 104775 - DNA, 120 bp, synthetic construct; identical to SEQ ID NO: 14162
  source 1..120: mol_type = other DNA

SEQ ID NO: 104776 - DNA, 120 bp, synthetic construct; identical to SEQ ID NO: 14163
  source 1..120: mol_type = other DNA

SEQ ID NO: 104777 - DNA, 120 bp, synthetic construct; identical to SEQ ID NO: 14164
  source 1..120: mol_type = other DNA

SEQ ID NO: 104778 - DNA, 120 bp, synthetic construct; identical to SEQ ID NO: 14165
  source 1..120: mol_type = other DNA

SEQ ID NO: 104779 - DNA, 120 bp, synthetic construct; identical to SEQ ID NO: 14124
  source 1..120: mol_type = other DNA

SEQ ID NO: 104780 - DNA, 120 bp, synthetic construct; identical to SEQ ID NO: 14125
  source 1..120: mol_type = other DNA

SEQ ID NO: 104781 - DNA, 120 bp, synthetic construct; identical to SEQ ID NO: 14126
  source 1..120: mol_type = other DNA

SEQ ID NO: 104782 - DNA, 120 bp, synthetic construct; identical to SEQ ID NO: 14127
  source 1..120: mol_type = other DNA

SEQ ID NO: 104783 - DNA, 120 bp, synthetic construct; identical to SEQ ID NO: 14128
  source 1..120: mol_type = other DNA

SEQ ID NO: 104784 - DNA, 120 bp, synthetic construct; identical to SEQ ID NO: 14129
  source 1..120: mol_type = other DNA

SEQ ID NO: 104785 - DNA, 120 bp, synthetic construct; identical to SEQ ID NO: 14130
  source 1..120: mol_type = other DNA

SEQ ID NO: 104786 - DNA, 120 bp, synthetic construct; identical to SEQ ID NO: 14131
  source 1..120: mol_type = other DNA

SEQ ID NO: 104787 - DNA, 120 bp, synthetic construct; identical to SEQ ID NO: 14132
  source 1..120: mol_type = other DNA

SEQ ID NO: 104788 - DNA, 120 bp, synthetic construct; identical to SEQ ID NO: 14133
  source 1..120: mol_type = other DNA

SEQ ID NO: 104789 - DNA, 120 bp, synthetic construct; identical to SEQ ID NO: 14134
  source 1..120: mol_type = other DNA

SEQ ID NO: 104790 - DNA, 120 bp, synthetic construct; identical to SEQ ID NO: 14135
  source 1..120: mol_type = other DNA

SEQ ID NO: 104791 - DNA, 120 bp, synthetic construct; identical to SEQ ID NO: 14136
  source 1..120: mol_type = other DNA

SEQ ID NO: 104792 - DNA, 120 bp, synthetic construct; identical to SEQ ID NO: 14137
  source 1..120: mol_type = other DNA

SEQ ID NO: 104793 - DNA, 120 bp, synthetic construct; identical to SEQ ID NO: 14138
  source 1..120: mol_type = other DNA

SEQ ID NO: 104794 - DNA, 120 bp, synthetic construct; identical to SEQ ID NO: 14139
  source 1..120: mol_type = other DNA

SEQ ID NO: 104795 - DNA, 120 bp, synthetic construct; identical to SEQ ID NO: 9063
  source 1..120: mol_type = other DNA

SEQ ID NO: 104796 - DNA, 120 bp, synthetic construct
  source 1..120: mol_type = other DNA
actgtagattctggatattagccctttgtcagatgagtaggttgcgaaaactttctcccattttgtaggttgcctgttcactctgatggtagtttcttttgctgtgcagaagctctttag

SEQ ID NO: 104797 - DNA, 120 bp, synthetic construct
  source 1..120: mol_type = other DNA
ggctgagacgatggggttttctagatatacaatcatgtcatctgcaaacagggacaatttgacttcctcttttcctaattgaataccctttatttccttctcctgtctaattgccctggc

SEQ ID NO: 104798 - DNA, 120 bp, synthetic construct
  source 1..120: mol_type = other DNA
agaggtgtttgtagtattctctgatggtagtttgtatttctgtgggatcggtggtgatatcccctttatcatttcttattgtgtctatttgattcttctctctttttttctttattagtc

SEQ ID NO: 104799 - DNA, 120 bp, synthetic construct
  source 1..120: mol_type = other DNA
aagtcactcaggacttgctttatgaatctgggtgctcccgtattgggtgcatatatatttaggatagttagctcttcttgttgaattgatccctttaccattatgtaatggccttctttg

SEQ ID NO: 104800 - DNA, 120 bp, synthetic construct
  source 1..120: mol_type = other DNA
tcatttcattcatttcatcttccattgctgataccctttcttccagttgatcgtatcggctcctgaggcttctgcattcttcacgtagttctcgagccttggttttcagctccatcagct

SEQ ID NO: 104801 - DNA, 120 bp, synthetic construct
  source 1..120: mol_type = other DNA
ctgctttgtttgcctaagcaagcctgggcaatggtgggcaccctcccccagcctcgctgccgccttgcagtttgatctcagactgctgtgctagcaatcagcgagactccgtgggcgtag

SEQ ID NO: 104802 - DNA, 120 bp, synthetic construct
  source 1..120: mol_type = other DNA
gatttatccctattttcttttgctttcgtggattgtacttttgctattttatttaagaaatcattgtcagctgggcacggtggctcatgcctgtaatcctagcactttgggaggccaagg

SEQ ID NO: 104803 - DNA, 120 bp, synthetic construct; identical to SEQ ID NO: 9061
  source 1..120: mol_type = other DNA

SEQ ID NO: 104804 - DNA, 120 bp, synthetic construct; identical to SEQ ID NO: 9062
  source 1..120: mol_type = other DNA

SEQ ID NO: 104805 - DNA, 120 bp, synthetic construct; identical to SEQ ID NO: 32683
  source 1..120: mol_type = other DNA

SEQ ID NO: 104806 - DNA, 120 bp, synthetic construct
  source 1..120: mol_type = other DNA
tgtccttctcccactttttgatggggttgtttgtttttttcttgtaaatttgtttgagttcattgtagattctggatattagccctttgtcagatgagtaggttgcgaaaattttctccc

SEQ ID NO: 104807 - DNA, 120 bp, synthetic construct
  source 1..120: mol_type = other DNA
aggagattttgggctgagacaatggggttttctagataaacaatcatgtcgtctgcaaacagggacaatttgacttcctcttttcctaattgaataccctttatttccttctcctgcctg

SEQ ID NO: 104808 - DNA, 120 bp, synthetic construct
  source 1..120: mol_type = other DNA
cattttttattgtgtctatttgattcttctctcttttttctttattagtcttgctagcggtctatcaattttgttgatcctttcaaaaaaccagctcctggattcattgattttttgaag

SEQ ID NO: 104809 - DNA, 120 bp, synthetic construct
  source 1..120: mol_type = other DNA
gtcctgactctttatccaatttgccagtctgtgtcttttaattgcagaatttagtccatttatatttaaagttaatattgttatgtgtgaatttgatcctgtcattatgatgttagctgg

SEQ ID NO: 104810 - DNA, 120 bp, synthetic construct
  source 1..120: mol_type = other DNA
ttcttctaaatttttttcaaagttttcaacttctttgcctttggtttgaatgtcctcccgtagctcagagtaatttgatcgtctgaagccttcttctctcagctcgtcaaaatcattttc

SEQ ID NO: 104811 - DNA, 120 bp, synthetic construct; identical to SEQ ID NO: 32684
  source 1..120: mol_type = other DNA

SEQ ID NO: 104812 - DNA, 120 bp, synthetic construct; identical to SEQ ID NO: 27376
  source 1..120: mol_type = other DNA

SEQ ID NO: 104813 - DNA, 120 bp, synthetic construct; identical to SEQ ID NO: 27377
  source 1..120: mol_type = other DNA

SEQ ID NO: 104814 - DNA, 120 bp, synthetic construct
  source 1..120: mol_type = other DNA
cccttttatacagtgacccaccccagatccatcagttcactcctctccccttccttccttctaacatctgcccactcacaaatccacttgcctacccatcggtccaccattcactttcac

SEQ ID NO: 104815 - DNA, 120 bp, synthetic construct
  source 1..120: mol_type = other DNA
gccatccccatcaagctaccaatgactttcttcacagaattggaaaaaaccactctaaagttcatatggaaccaaaaaagacccccgcattgccaagtcaatgctaagccaaaagaacaa

SEQ ID NO: 104816 - DNA, 120 bp, synthetic construct
  source 1..120: mol_type = other DNA
taagatacacatatgtttattgcggcactattcacaatagcaaagacttggaaccaacccaaatgtccaacaatgatagactggattaagaaaatgtggcacatatacaccatggaatac

SEQ ID NO: 104817 - DNA, 120 bp, synthetic construct
  source 1..120: mol_type = other DNA
acataacaaagaaaattcagaagaaactgcaggatacttggaaaatgtgtaaagtttcttcttcttcttcttcttcttcttcttcttcctcctcctcctcctccccctcctcctcctccc

SEQ ID NO: 104818 - DNA, 120 bp, synthetic construct
  source 1..120: mol_type = other DNA
cagaaaaagagggaatcctccctaactcattttatgaggctagcatcatcttgataccaaagcctggcagagacacaacaaaaaaagagaattttagaccaatatccctgatgaacatcg

SEQ ID NO: 104819 - DNA, 120 bp, synthetic construct
  source 1..120: mol_type = other DNA
ttatacattcaatgccatccccatcaagctaccaatgactttcttcacagaattggaaaaaactactttcaagttcatatggaagcaaaaaagagcctgcattgccaagacaatcctaag

SEQ ID NO: 104820 - DNA, 120 bp, synthetic construct
  source 1..120: mol_type = other DNA
atcaaaaccacaatgagatatcatcttacaccagttagaatggcaatcattaaaaagacaggaaacaacaggtgctggagaggatgtggagaaataggaacacttttacactgttggtgg

SEQ ID NO: 104821 - DNA, 120 bp, synthetic construct; identical to SEQ ID NO: 26869
  source 1..120: mol_type = other DNA

SEQ ID NO: 104822 - DNA, 120 bp, synthetic construct
  source 1..120: mol_type = other DNA
tgctgcaataaacatacgtgtgcatgtgtctttatagcagtatgatttataatcctttggatatatacccagtaatgggatgactaggtcaaatggtatttctagttctagatccctgag

SEQ ID NO: 104823 - DNA, 120 bp, synthetic construct
  source 1..120: mol_type = other DNA
tcttttttgcttccatatgaacttgaaagtagttttttccaattctgtgaagaaagtcattggtagcttgatggggatggcattgaatgtataaattaccttgggcagtatggccatttt

SEQ ID NO: 104824 - DNA, 120 bp, synthetic construct
  source 1..120: mol_type = other DNA
tcctggatatccttgttaactttctgtctcgtggatctgtctaatgttgacagtgtggtgttaacgtctcccattattattgtgtggaagtctgagtctctttgtaggtctctaaggagt

SEQ ID NO: 104825 - DNA, 120 bp, synthetic construct; identical to SEQ ID NO: 26870
  source 1..120: mol_type = other DNA

SEQ ID NO: 104826 - DNA, 120 bp, synthetic construct; identical to SEQ ID NO: 19733
  source 1..120: mol_type = other DNA

SEQ ID NO: 104827 - DNA, 120 bp, synthetic construct; identical to SEQ ID NO: 19734
  source 1..120: mol_type = other DNA

SEQ ID NO: 104828 - DNA, 120 bp, synthetic construct
  source 1..120: mol_type = other DNA
acattgggctgcggctcaacacggacctagaggccgtcaagtcggacttggattacagccagcagcaatgggacagcaagaagcgcgagctacagggccttctgcaaactttgcacactt

SEQ ID NO: 104829 - DNA, 120 bp, synthetic construct; identical to SEQ ID NO: 10247
  source 1..120: mol_type = other DNA

SEQ ID NO: 104830 - DNA, 120 bp, synthetic construct; identical to SEQ ID NO: 10248
  source 1..120: mol_type = other DNA

SEQ ID NO: 104831 - DNA, 120 bp, synthetic construct; identical to SEQ ID NO: 9276
  source 1..120: mol_type = other DNA

SEQ ID NO: 104832 - DNA, 120 bp, synthetic construct; identical to SEQ ID NO: 25516
  source 1..120: mol_type = other DNA

SEQ ID NO: 104833 - DNA, 120 bp, synthetic construct
  source 1..120: mol_type = other DNA
cattgttggacatttgggttgcttccaagtctttgctattgtgaataatgccgcaataaacatacgtgtgcatgtgtctttatagcagcatgatttatagtcctttgggtatatacccag

SEQ ID NO: 104834 - DNA, 120 bp, synthetic construct; identical to SEQ ID NO: 25517
  source 1..120: mol_type = other DNA

SEQ ID NO: 104835 - DNA, 120 bp, synthetic construct; identical to SEQ ID NO: 25518
  source 1..120: mol_type = other DNA

SEQ ID NO: 104836 - DNA, 120 bp, synthetic construct; identical to SEQ ID NO: 25519
  source 1..120: mol_type = other DNA

SEQ ID NO: 104837 - DNA, 120 bp, synthetic construct; identical to SEQ ID NO: 7678
  source 1..120: mol_type = other DNA

SEQ ID NO: 104838 - DNA, 120 bp, synthetic construct
  source 1..120: mol_type = other DNA
cccagtaatgggatggctgggtcaaatggtatttctagttctagatccctgaggaatcgccacactgacttccacaatggttgaactagtttacagtcccaccaacaatgtaaaagtgta

SEQ ID NO: 104839 - DNA, 120 bp, synthetic construct; identical to SEQ ID NO: 7679
  source 1..120: mol_type = other DNA

SEQ ID NO: 104840 - DNA, 120 bp, synthetic construct
  source 1..120: mol_type = other DNA
ctatgcctggctaatttttttgttatttttaagtagagatggggtttcgccatattggccaaggaaggcggatcacttgaggccagaattcgagaccagcctggccaacatggcgaaacc

SEQ ID NO: 104841 - DNA, 120 bp, synthetic construct
  source 1..120: mol_type = other DNA
tcctgcctcagcctcccaaagtgctgggattacaggcatgagccaccgcgcccagccaggattcatactttaaaatgggaatgtggaaatagacattgtcctgtaaaatatagttagtgt

SEQ ID NO: 104842 - DNA, 120 bp, synthetic construct; identical to SEQ ID NO: 9191
  source 1..120: mol_type = other DNA

SEQ ID NO: 104843 - DNA, 120 bp, synthetic construct
  source 1..120: mol_type = other DNA
aaattaggctctaagcaacatactttatgaggacttggataaaaatcaaacctttacagggaatagtggcttaaaatgaaagggtaagccaggtgcagtgctgtgcacccgtagtaccag

SEQ ID NO: 104844 - DNA, 120 bp, synthetic construct; identical to SEQ ID NO: 22682
  source 1..120: mol_type = other DNA

SEQ ID NO: 104845 - DNA, 120 bp, synthetic construct; identical to SEQ ID NO: 22683
  source 1..120: mol_type = other DNA

SEQ ID NO: 104846 - DNA, 120 bp, synthetic construct
  source 1..120: mol_type = other DNA
agtgagccaacatcacgccacagcactctggcctgggcaacagagcgagactccatctcaaaaaaaaaagcaaaaaaactcttgcaacattctaaaattcacatttattcattctttcca

SEQ ID NO: 104847 - DNA, 120 bp, synthetic construct; identical to SEQ ID NO: 22392
  source 1..120: mol_type = other DNA

SEQ ID NO: 104848 - DNA, 120 bp, synthetic construct
  source 1..120: mol_type = other DNA
tgacacacgcactaatgacacagacattgatccccgagtgctccccattctgatctcacccctggccccacctgcattccccttggacccggtgctgcccctggccaccccactcctgtt

SEQ ID NO: 104849 - DNA, 120 bp, synthetic construct
  source 1..120: mol_type = other DNA
gtgatgcatcttggtgggaaaaagtcattaatggtcatactgtgcatatgtgatttcagctcttctcaagaaaggggaaaatagacacacacacacacacacacacacacacacacttct

SEQ ID NO: 104850 - DNA, 120 bp, synthetic construct; identical to SEQ ID NO: 15947
  source 1..120: mol_type = other DNA

SEQ ID NO: 104851 - DNA, 120 bp, synthetic construct; identical to SEQ ID NO: 15948
  source 1..120: mol_type = other DNA

SEQ ID NO: 104852 - DNA, 120 bp, synthetic construct; identical to SEQ ID NO: 15949
  source 1..120: mol_type = other DNA

SEQ ID NO: 104853 - DNA, 120 bp, synthetic construct
  source 1..120: mol_type = other DNA
tttgaagaacctccatactattctccagagtggctgtactaacttacgttcccaccaatagtatacaagggttccctcttctccatatccttaccagcattcattattgcctatctttat

SEQ ID NO: 104854 - DNA, 120 bp, synthetic construct; identical to SEQ ID NO: 15950
  source 1..120: mol_type = other DNA

SEQ ID NO: 104855 - DNA, 120 bp, synthetic construct; identical to SEQ ID NO: 15951
  source 1..120: mol_type = other DNA

SEQ ID NO: 104856 - DNA, 120 bp, synthetic construct
  source 1..120: mol_type = other DNA
ttttggcgaattggctttaatgagttttgaatgaatagcttaaagtattagaaagtaaaattcaggccaggtgcggtggcttatacctgtaatcccagcactttgggagactgaggcagg

SEQ ID NO: 104857 - DNA, 120 bp, synthetic construct
  source 1..120: mol_type = other DNA
ttctttgtacatgtataatttgaagaccctgcgccaagcagtctcttggaattagaagcaccttaaaatgaaaaaaatgtctcgccactgtgacaaatccacaggccttgcaagaaaccc

SEQ ID NO: 104858 - DNA, 120 bp, synthetic construct
  source 1..120: mol_type = other DNA
tcttttctttctttctttcttttctttctttctttattttcttttctttctttcttttctttctctctctctctccctccccttccccctccccttccccctccccctctccctcccctt

SEQ ID NO: 104859 - DNA, 120 bp, synthetic construct; identical to SEQ ID NO: 15953
  source 1..120: mol_type = other DNA

SEQ ID NO: 104860 - DNA, 120 bp, synthetic construct; identical to SEQ ID NO: 15954
  source 1..120: mol_type = other DNA

SEQ ID NO: 104861 - DNA, 120 bp, synthetic construct; identical to SEQ ID NO: 15955
  source 1..120: mol_type = other DNA

SEQ ID NO: 104862 - DNA, 120 bp, synthetic construct
  source 1..120: mol_type = other DNA
tgtctttgctatggtgaatagagctgcagtgaacatgtgagtgcgtgtgtctttttggtagaacgatttatttttctttgggcatatacccagtcatgggattgctgggttgaatggtag

SEQ ID NO: 104863 - DNA, 120 bp, synthetic construct
  source 1..120: mol_type = other DNA
tctctctcatgtttcccttcttgtacccaccagccctacattgatgtcttgttcttcagaatctttaatatgctagtatgcattaggaatctccaaggatgaaagagtaggagggagagg

SEQ ID NO: 104864 - DNA, 120 bp, synthetic construct
  source 1..120: mol_type = other DNA
gagaaggagaggagaaggagagggagaggagtagaggggaagagagaaggagaagagaagaaggagagggagagggacagtgagagagggagagggggagagagaaggagaggaggataa

SEQ ID NO: 104865 - DNA, 120 bp, synthetic construct; identical to SEQ ID NO: 15956
  source 1..120: mol_type = other DNA

SEQ ID NO: 104866 - DNA, 120 bp, synthetic construct; identical to SEQ ID NO: 15957
  source 1..120: mol_type = other DNA

SEQ ID NO: 104867 - DNA, 120 bp, synthetic construct; identical to SEQ ID NO: 15958
  source 1..120: mol_type = other DNA

SEQ ID NO: 104868 - DNA, 120 bp, synthetic construct
  source 1..120: mol_type = other DNA
gtctgccaccacatcagatgcacctttcaccttccaccatgattgtgaggcctccccagccacgtataactgtaagtccattaaatctatttttctttataaattaccagtctcaagtat

SEQ ID NO: 104869 - DNA, 120 bp, synthetic construct; identical to SEQ ID NO: 15960
  source 1..120: mol_type = other DNA

SEQ ID NO: 104870 - DNA, 120 bp, synthetic construct; identical to SEQ ID NO: 15961
  source 1..120: mol_type = other DNA

SEQ ID NO: 104871 - DNA, 120 bp, synthetic construct
  source 1..120: mol_type = other DNA
gagagagacagagagagagacagagagagagagagagagagagagagagagagacagcgcgagccaccggtcattgacttagataaccagcaaaattaaaaaagaaaaaaaaaaattgta

SEQ ID NO: 104872 - DNA, 120 bp, synthetic construct; identical to SEQ ID NO: 15963
  source 1..120: mol_type = other DNA

SEQ ID NO: 104873 - DNA, 120 bp, synthetic construct; identical to SEQ ID NO: 15964
  source 1..120: mol_type = other DNA

SEQ ID NO: 104874 - DNA, 120 bp, synthetic construct; identical to SEQ ID NO: 15965
  source 1..120: mol_type = other DNA

SEQ ID NO: 104875 - DNA, 120 bp, synthetic construct; identical to SEQ ID NO: 15966
  source 1..120: mol_type = other DNA

SEQ ID NO: 104876 - DNA, 120 bp, synthetic construct; identical to SEQ ID NO: 15967
  source 1..120: mol_type = other DNA

SEQ ID NO: 104877 - DNA, 120 bp, synthetic construct; identical to SEQ ID NO: 15939
  source 1..120: mol_type = other DNA

SEQ ID NO: 104878 - DNA, 120 bp, synthetic construct
  source 1..120: mol_type = other DNA
ccaacaacagtgtaaaagtgttcctatttctccacatcctctccagcacctgttgtttcccgactttttaatgattgccattctaactggtgtgagatggtatctcattgtggttttgat

SEQ ID NO: 104879 - DNA, 120 bp, synthetic construct; identical to SEQ ID NO: 3988
  source 1..120: mol_type = other DNA

SEQ ID NO: 104880 - DNA, 120 bp, synthetic construct; identical to SEQ ID NO: 15969
  source 1..120: mol_type = other DNA

SEQ ID NO: 104881 - DNA, 120 bp, synthetic construct; identical to SEQ ID NO: 15970
  source 1..120: mol_type = other DNA

SEQ ID NO: 104882 - DNA, 120 bp, synthetic construct
  source 1..120: mol_type = other DNA
cttgggcgacagagggagactccatctcaaaaaaacaaacaaacaaaaaaacaaaaaccagaggagagactggtattttagaggacctgaaagcagccagcataggtagagagtagtgat

SEQ ID NO: 104883 - DNA, 120 bp, synthetic construct
  source 1..120: mol_type = other DNA
aaaaaaagaatgagttcatgtcctttgcagggacatggatgaagctggaaaccgtcgttctcaccaactaacacaggaacaaaaaacgaaacaccgcatgttctcactgataagagggag

SEQ ID NO: 104884 - DNA, 120 bp, synthetic construct; identical to SEQ ID NO: 15942
  source 1..120: mol_type = other DNA

SEQ ID NO: 104885 - DNA, 120 bp, synthetic construct; identical to SEQ ID NO: 15943
  source 1..120: mol_type = other DNA

SEQ ID NO: 104886 - DNA, 120 bp, synthetic construct; identical to SEQ ID NO: 15944
  source 1..120: mol_type = other DNA

SEQ ID NO: 104887 - DNA, 120 bp, synthetic construct; identical to SEQ ID NO: 15945
  source 1..120: mol_type = other DNA

SEQ ID NO: 104888 - DNA, 120 bp, synthetic construct; identical to SEQ ID NO: 15946
  source 1..120: mol_type = other DNA

SEQ ID NO: 104889 - DNA, 120 bp, synthetic construct
  source 1..120: mol_type = other DNA
tttgtgtgcatgatcttttgaaatgtgtaaacattgcgaaatgcctcaaccgagctacatcacataaacatttatattctatttgattgtgtgaatctcaccaatctggaagtcataaaa

SEQ ID NO: 104890 - DNA, 120 bp, synthetic construct
  source 1..120: mol_type = other DNA
tgataaattggattaagaaaatgtggcacatatacaccatggaataccatgcagccctaaaaaaggatgagttcacgtcctttgtaggaacatggatgaagctggaaaccatcattctga

SEQ ID NO: 104891 - DNA, 120 bp, synthetic construct; identical to SEQ ID NO: 18554
  source 1..120: mol_type = other DNA

SEQ ID NO: 104892 - DNA, 120 bp, synthetic construct; identical to SEQ ID NO: 18555
  source 1..120: mol_type = other DNA

SEQ ID NO: 104893 - DNA, 120 bp, synthetic construct; identical to SEQ ID NO: 18556
  source 1..120: mol_type = other DNA

SEQ ID NO: 104894 - DNA, 120 bp, synthetic construct
  source 1..120: mol_type = other DNA
tctcccagctactttgtccctctcttttaaaaatattcatcagatgatgtcactgtcctgatctggtgacacagccttccactggtgtcctgtgtcatttggaagaaacacttaaagttg

SEQ ID NO: 104895 - DNA, 120 bp, synthetic construct
  source 1..120: mol_type = other DNA
tatggaggggactgaaggattctgtttgtttagttggtgagggctggcagggggtagacccaagcctgggaagtcttgtttgcttaatttactccaacccaaacagtgtatgtgtgccat

SEQ ID NO: 104896 - DNA, 120 bp, synthetic construct
  source 1..120: mol_type = other DNA
cttatttttctcagcaccacagctaagccatcgagaatggtgcctggcacaccccaggtgctaagcaaacatgcttgagtgagtgcatgaaagagtgaagagccaatagagagacatggg

SEQ ID NO: 104897 - DNA, 120 bp, synthetic construct
  source 1..120: mol_type = other DNA
ctgtttcccggtcccctcgaggatctccacaggtgagttacctggcttacgtcgggtgggaggtgaagagaggaactttctagttgcttttctccagcttggaagtgaggccttggagaa

SEQ ID NO: 104898 - DNA, 120 bp, synthetic construct
  source 1..120: mol_type = other DNA
tgcgaccttaatagaatgctgaacttttggaaagtggagcaaaatggagagagtcagagttggggactgagagtccccctctcgggctggaggccagggctactggtgacctgagggctt

SEQ ID NO: 104899 - DNA, 120 bp, synthetic construct; identical to SEQ ID NO: 18557
  source 1..120: mol_type = other DNA

SEQ ID NO: 104900 - DNA, 120 bp, synthetic construct; identical to SEQ ID NO: 18558
  source 1..120: mol_type = other DNA

SEQ ID NO: 104901 - DNA, 120 bp, synthetic construct; identical to SEQ ID NO: 18559
  source 1..120: mol_type = other DNA

SEQ ID NO: 104902 - DNA, 120 bp, synthetic construct
  source 1..120: mol_type = other DNA
tcccaaaatgctgggattacaggcgtgagccactgtgcctggctgctttcttgacttctaaccttgactatgtttgttagtggttcatctaactttttccagaaaacagcttttatttac

SEQ ID NO: 104903 - DNA, 120 bp, synthetic construct
  source 1..120: mol_type = other DNA
aaggcaaatagtttctctgtgcctcagatgtttcacctgtgaaatagggagaagagtatccatatccccaatggatgactgtaaaaatcacatgggtgatagctatcacatacccagcac

SEQ ID NO: 104904 - DNA, 120 bp, synthetic construct; identical to SEQ ID NO: 18562
  source 1..120: mol_type = other DNA

SEQ ID NO: 104905 - DNA, 120 bp, synthetic construct; identical to SEQ ID NO: 18563
  source 1..120: mol_type = other DNA

SEQ ID NO: 104906 - DNA, 120 bp, synthetic construct; identical to SEQ ID NO: 18564
  source 1..120: mol_type = other DNA

SEQ ID NO: 104907 - DNA, 120 bp, synthetic construct; identical to SEQ ID NO: 18545
  source 1..120: mol_type = other DNA

SEQ ID NO: 104908 - DNA, 120 bp, synthetic construct; identical to SEQ ID NO: 18546
  source 1..120: mol_type = other DNA

SEQ ID NO: 104909 - DNA, 120 bp, synthetic construct
  source 1..120: mol_type = other DNA
agctgagcttccactgagcatctctgagtgccagggtgaggggacagagatggctgccagcctcctcctctggggcctggagacaggagggggacaggtgttataataagcagtgacagt

SEQ ID NO: 104910 - DNA, 120 bp, synthetic construct
  source 1..120: mol_type = other DNA
ggcttgctgcctgccacagagggctgggcagtgctggtggccgccccgctgctgtgcggctctcaccagggcaaggccacctccccagtccacgctccgcaagtgctcagcacacacaca

SEQ ID NO: 104911 - DNA, 120 bp, synthetic construct
  source 1..120: mol_type = other DNA
cctacagagggaggcgcggatgggaggtgcagggggagctcccacatcccccatccccaaggccccctgtcccgcaggggagaacgctaagaaatggggaagcaggaggggtgatgggag

SEQ ID NO: 104912 - DNA, 120 bp, synthetic construct; identical to SEQ ID NO: 18547
  source 1..120: mol_type = other DNA

SEQ ID NO: 104913 - DNA, 120 bp, synthetic construct; identical to SEQ ID NO: 18548
  source 1..120: mol_type = other DNA

SEQ ID NO: 104914 - DNA, 120 bp, synthetic construct
  source 1..120: mol_type = other DNA
tgtttcgcgttcagagaagcgcctttcctaagggaggccggctcagtggcggggatgtcggtgatgtaatccgagggcatctacgcagaggcttccgcgctggggaaggcttctctggct

SEQ ID NO: 104915 - DNA, 120 bp, synthetic construct; identical to SEQ ID NO: 18549
  source 1..120: mol_type = other DNA

SEQ ID NO: 104916 - DNA, 120 bp, synthetic construct; identical to SEQ ID NO: 18550
  source 1..120: mol_type = other DNA

SEQ ID NO: 104917 - DNA, 120 bp, synthetic construct; identical to SEQ ID NO: 18551
  source 1..120: mol_type = other DNA

SEQ ID NO: 104918 - DNA, 120 bp, synthetic construct; identical to SEQ ID NO: 18552
  source 1..120: mol_type = other DNA

SEQ ID NO: 104919 - DNA, 120 bp, synthetic construct
  source 1..120: mol_type = other DNA
cctagctaatttttatattttttgtagagacagggtccacctatgttgcccaagctggtctcaaacacctggattcaagagatcctcctgccttggcctcccaaagtgctgggattacag

SEQ ID NO: 104920 - DNA, 120 bp, synthetic construct; identical to SEQ ID NO: 18553
  source 1..120: mol_type = other DNA

SEQ ID NO: 104921 - DNA, 120 bp, synthetic construct; identical to SEQ ID NO: 22482
  source 1..120: mol_type = other DNA

SEQ ID NO: 104922 - DNA, 120 bp, synthetic construct
  source 1..120: mol_type = other DNA
cgtctctgccaggccgcccatcttctgcaatgtggggagcgcctctgccctgctgccccgtctgggatgtgaggagcgtctctgcccggccgccccgtctgagaagtgaggagaccctct

SEQ ID NO: 104923 - DNA, 120 bp, synthetic construct
  source 1..120: mol_type = other DNA
actgaatttactgtataacagtagctctcgatgtgtagtacccagaccagaagcagcagaagcatctagaattttttattttttgagacagtctctctctgttgcccaggctggagtgca

SEQ ID NO: 104924 - DNA, 120 bp, synthetic construct; identical to SEQ ID NO: 22483
  source 1..120: mol_type = other DNA

SEQ ID NO: 104925 - DNA, 120 bp, synthetic construct
  source 1..120: mol_type = other DNA
tagaaagaggtagacatgggagacttctcattttgttctgtactaagaaaaattattctgccttgggatcctgttgatctgtgaccttacccccaaccctgtgctctctgaaacatgtgc

SEQ ID NO: 104926 - DNA, 120 bp, synthetic construct; identical to SEQ ID NO: 22484
  source 1..120: mol_type = other DNA

SEQ ID NO: 104927 - DNA, 120 bp, synthetic construct
  source 1..120: mol_type = other DNA
aagtgaggagcctctccgcccgacagccacccagtctgggaagtgaggagcgtctccgcctggcagccacccagtccgggagggaggtggggggggtcagccccccgccaggccagcacc

SEQ ID NO: 104928 - DNA, 120 bp, synthetic construct; identical to SEQ ID NO: 33802
  source 1..120: mol_type = other DNA

SEQ ID NO: 104929 - DNA, 120 bp, synthetic construct; identical to SEQ ID NO: 10036
  source 1..120: mol_type = other DNA

SEQ ID NO: 104930 - DNA, 120 bp, synthetic construct
  source 1..120: mol_type = other DNA
aggctatgtagcagcaatttccttttcaaaggccattggttctcaatccagctgtctggtagcatcagctaggaacccactgatgcctggatcctacctccagaggttctgatgcaaatg

SEQ ID NO: 104931 - DNA, 120 bp, synthetic construct; identical to SEQ ID NO: 13238
  source 1..120: mol_type = other DNA

SEQ ID NO: 104932 - DNA, 120 bp, synthetic construct; identical to SEQ ID NO: 13239
  source 1..120: mol_type = other DNA

SEQ ID NO: 104933 - DNA, 120 bp, synthetic construct
  source 1..120: mol_type = other DNA
ggaggtgaggggcgcctctgcccggccgcccctactgggaagtgaggagcccctctgcccggccaccaccccgtctgggaggtgtacccaacagctcattgagaacgggccaggatgaca

SEQ ID NO: 104934 - DNA, 120 bp, synthetic construct; identical to SEQ ID NO: 11153
  source 1..120: mol_type = other DNA

SEQ ID NO: 104935 - DNA, 120 bp, synthetic construct
  source 1..120: mol_type = other DNA
cttctcagacggggcggacgggcagagacgctcctcacctcccagacggggtcacggccgggtagaggcgctcctcacatcccagacggggtggcggggcaaaggcgctccccacatctc

SEQ ID NO: 104936 - DNA, 120 bp, synthetic construct
  source 1..120: mol_type = other DNA
gaaatccaattttattcctctttcaaaagtctaacatatattcatgttttggtttcgtggacttggtgtggtaccaaacacatcaaggaatataggagaatacattagaactcaccaagt

SEQ ID NO: 104937 - DNA, 120 bp, synthetic construct
  source 1..120: mol_type = other DNA
taggggcagactgacaccccacatggccgggtactcctctgagacaaaacttgcagaggaacgattagacagcagcatttgcggttcacgaaaaaccactgttctgcagacaccgctgct

SEQ ID NO: 104938 - DNA, 120 bp, synthetic construct
  source 1..120: mol_type = other DNA
ttccccaatctagcaaggcaggccaacattcagattcaggaaatacagagaatgccgcgaagatacttctcaagaaaagcaactccaagacacataattgtcagattcaccaaagttgaa

SEQ ID NO: 104939 - DNA, 120 bp, synthetic construct
  source 1..120: mol_type = other DNA
tcaattcaacaagaagagctaactatcctaaatatatatgcacccaatacaggagcacccagattcataaagctagtcctgagtgacctacaaagagacgtagactcccacacattaata

SEQ ID NO: 104940 - DNA, 120 bp, synthetic construct
  source 1..120: mol_type = other DNA
gatcccacagaaatacaaactaccatcagagaatactacaaacacctctatgcaaataaactagaaaatctagaagaaatggataaattcctcaacacatacactcttccaagactaaac

SEQ ID NO: 104941 - DNA, 120 bp, synthetic construct
  source 1..120: mol_type = other DNA
gacatgattgtatatctagaaaaccccattgtctcagccgaaaatctccttaagctgataagcaacttcagcaaagtctcaggatacaaaatcaatgtacaaaaatcacaagcattctta

SEQ ID NO: 104942 - DNA, 120 bp, synthetic construct
  source 1..120: mol_type = other DNA
aatttacaagaaaaaacaaacaaccccatcaaaaagtgggcgaaggacatgaacagacacttctcaaaagaagacatttaggcagccaaaaaacacatgaaaaaatgctcaccatcactg

SEQ ID NO: 104943 - DNA, 120 bp, synthetic construct
  source 1..120: mol_type = other DNA
gcatcacagtcctactgatatgcgacgtcacccccggcagcccagctgttaaaattcctctctttgtactatttctctttatttctcagtcggccgacacttatggaaaatagaaagaac

SEQ ID NO: 104944 - DNA, 120 bp, synthetic construct; identical to SEQ ID NO: 33843
  source 1..120: mol_type = other DNA

SEQ ID NO: 104945 - DNA, 120 bp, synthetic construct; identical to SEQ ID NO: 30556
  source 1..120: mol_type = other DNA

SEQ ID NO: 104946 - DNA, 120 bp, synthetic construct; identical to SEQ ID NO: 30557
  source 1..120: mol_type = other DNA

SEQ ID NO: 104947 - DNA, 120 bp, synthetic construct
  source 1..120: mol_type = other DNA
gcagaaggacaccacgttcaccaagatcttcgtgggcggcctgccgtaccacactaccgacgcctcgctcaggaagtacttcgagggcttcggcgacatcgaggaggccgtggtcatcac

SEQ ID NO: 104948 - DNA, 120 bp, synthetic construct; identical to SEQ ID NO: 35109
  source 1..120: mol_type = other DNA

SEQ ID NO: 104949 - DNA, 120 bp, synthetic construct
  source 1..120: mol_type = other DNA
tcaattaggaaaagaggaagtcaaattgtccctgtttgcagatgacacaattgtatatctagaaaaccccaccgtctcagcccaaaatctccttaagctgataggcaatttcagcaaagt

SEQ ID NO: 104950 - DNA, 120 bp, synthetic construct
  source 1..120: mol_type = other DNA
agtgagccaagattgcgccattgcactccagcctgggtgacagagcgagactccttcttggaaaacaaaaacaataactgtgtgaggttagtaaattataagaacctaaaagcaatataa

SEQ ID NO: 104951 - DNA, 120 bp, synthetic construct
  source 1..120: mol_type = other DNA
cagtaatgggatggctgggtcaaatggtatttctagttctagatccttgaggaatcaccacactgtcttccacaatggttgaactagtttacagttccaccaacagtgtaaaagtgttcc

SEQ ID NO: 104952 - DNA, 120 bp, synthetic construct; identical to SEQ ID NO: 25389
  source 1..120: mol_type = other DNA

SEQ ID NO: 104953 - DNA, 120 bp, synthetic construct; identical to SEQ ID NO: 25390
  source 1..120: mol_type = other DNA

SEQ ID NO: 104954 - DNA, 120 bp, synthetic construct; identical to SEQ ID NO: 12013
  source 1..120: mol_type = other DNA

SEQ ID NO: 104955 - DNA, 120 bp, synthetic construct
  source 1..120: mol_type = other DNA
tcccaaggtgctgggattacaggtgtgagccatctcacccggcctattttctgtttcgtttttttttttttcattagtagctatcctagtggatgtgaagtggtatcttattgtggtttc

SEQ ID NO: 104956 - DNA, 120 bp, synthetic construct
  source 1..120: mol_type = other DNA
caagatcatgccactgcactccagcatgggcaacagagagagaccttgtctcaaaaaaataaaatggtgaatgtaaaataaaatggtagctcacgcctataatcctggtactttgggagg

SEQ ID NO: 104957 - DNA, 120 bp, synthetic construct
  source 1..120: mol_type = other DNA
ctttaatttttttttttttttttttaagagacagggtgtcactatgttgcccaggctggttgggaactcctggccttaagccgtcctcctgcttcagtctcccaaagtgttgggaatata

SEQ ID NO: 104958 - DNA, 120 bp, synthetic construct; identical to SEQ ID NO: 8427
  source 1..120: mol_type = other DNA

SEQ ID NO: 104959 - DNA, 120 bp, synthetic construct; identical to SEQ ID NO: 8428
  source 1..120: mol_type = other DNA

SEQ ID NO: 104960 - DNA, 120 bp, synthetic construct; identical to SEQ ID NO: 8429
  source 1..120: mol_type = other DNA

SEQ ID NO: 104961 - DNA, 120 bp, synthetic construct; identical to SEQ ID NO: 21734
  source 1..120: mol_type = other DNA

SEQ ID NO: 104962 - DNA, 120 bp, synthetic construct
  source 1..120: mol_type = other DNA
tcacctcccggacggggcggctggccaggcggggggctgaccccccaatctccctcctggacggggcagctggccgagcagaggggctcctcacttcccagtaggggcggccgggcagag

SEQ ID NO: 104963 - DNA, 120 bp, synthetic construct
  source 1..120: mol_type = other DNA
agaggggagaggggagaggggagaggggagaggggagagggcttttttctttttttccctgagacagagtctctgttgcccaggctagagtgcagtggcgtgatctcggctcactgcaag

SEQ ID NO: 104964 - DNA, 120 bp, synthetic construct
  source 1..120: mol_type = other DNA
gtctgggaagtgaggagcccctctgcccggccgccaccccatctgggaggtgtacccaacagctcattgagaatgggccatgatgacgatggcgtttttgtcgaatagaaaagggggaaa

SEQ ID NO: 104965 - DNA, 120 bp, synthetic construct
  source 1..120: mol_type = other DNA
cctgtgtttccttttttttttttcttgtttttctttttttttttttttattcagggtttcactgtgttgcctaggctggagtgcagtggcccgatcttggctcactgcagcctcaacctc

SEQ ID NO: 104966 - DNA, 120 bp, synthetic construct
  source 1..120: mol_type = other DNA
agcctcggcctcccaaagtgctgggattacaggcgtgagccaccagctgcctctcttcaatttatttatttccccagtaacccttgtattcttgtttggacagtcctggcatcactgata

SEQ ID NO: 104967 - DNA, 120 bp, synthetic construct
  source 1..120: mol_type = other DNA
ctggtcctggactttttttgcttggtaagctactaattattgcctcaatttcagagcctgttattggtctattcagagattcaacttcttcctggtttagtcttgggagggtgtatgtgt

SEQ ID NO: 104968 - DNA, 120 bp, synthetic construct
  source 1..120: mol_type = other DNA
agggacatgaatggaactggaggccattatccctagcaagctaatgcagaaacagaaaaccaagtgccatgtgttctcacttataagtgggagctaaatgatgagaacacatgaacacat

SEQ ID NO: 104969 - DNA, 120 bp, synthetic construct
  source 1..120: mol_type = other DNA
gggcctgtcatgggattgggggaggggggaggggggagggaaagcattaggatatatagctaatgtaaatgacgagttaatgggtgcaacacacgaacatggcacatgtatacatatgta

SEQ ID NO: 104970 - DNA, 120 bp, synthetic construct
  source 1..120: mol_type = other DNA
gttctgggcggggggcggggatgtcagtagactacaatgagaatggttgtctttgagtggaactcaatgcccctaatatcttttacatttcaatggtatgtttttgtatgtttaccaaag

SEQ ID NO: 104971 - DNA, 120 bp, synthetic construct; identical to SEQ ID NO: 24168
  source 1..120: mol_type = other DNA

SEQ ID NO: 104972 - DNA, 120 bp, synthetic construct; identical to SEQ ID NO: 24169
  source 1..120: mol_type = other DNA

SEQ ID NO: 104973 - DNA, 120 bp, synthetic construct; identical to SEQ ID NO: 24170
  source 1..120: mol_type = other DNA

SEQ ID NO: 104974 - DNA, 120 bp, synthetic construct
  source 1..120: mol_type = other DNA
ttatatgctggattacatttattgatttgcgtgtattgaaccagccttgcatcccagggatgaagcccactcgatcatggtggataagccttttgatgtgctgctggattcggtttccca

SEQ ID NO: 104975 - DNA, 120 bp, synthetic construct
  source 1..120: mol_type = other DNA
actgggcgcaggtcagtgggtgcatgcaccgtgcgcaagccgaagcagggcgaggcattgcctcacttgggaagcgcaaggggtcagggagttccctttctgagtcaaagaaaggggtga

SEQ ID NO: 104976 - DNA, 120 bp, synthetic construct
  source 1..120: mol_type = other DNA
ggatcagcaatggaagatgaaatgaagcgagaagggaagtttagagaaaaaagaataaaaagaaatgagcaaagcctccaagaaatatgggactatgtgaaaagaccaaatctacatctg

SEQ ID NO: 104977 - DNA, 120 bp, synthetic construct
  source 1..120: mol_type = other DNA
aaaaggatggaagaagatctaccaagccaatggaaaacaaaaaaaggcaggggttgcaatcctagtctctgataaaacagactttaaaccaacaaagatcaaaagagacaaagaaggcca

SEQ ID NO: 104978 - DNA, 120 bp, synthetic construct
  source 1..120: mol_type = other DNA
cacctctacgcaaataaactagaaaatctagaagaaatggataaattcctggacacatacactctctcaagactaaaccaggaagaagttgaatctctgaatagaccaataacaggaact

SEQ ID NO: 104979 - DNA, 120 bp, synthetic construct
  source 1..120: mol_type = other DNA
tacaaaccactgctcaatgaaataaaagaggatacaaacaaatggaagaacattccatgctcatgggtaggaagaatcaatatcgtgaaattggccatactgcccaaggtaattgataga

SEQ ID NO: 104980 - DNA, 120 bp, synthetic construct; identical to SEQ ID NO: 35376
  source 1..120: mol_type = other DNA

SEQ ID NO: 104981 - DNA, 120 bp, synthetic construct
  source 1..120: mol_type = other DNA
ttgcgccattgcactccagcctgggggatagagcaagactcccccatctcaaaaaaaaagaaaaaagaaaaaaaaactactttgttttctgattttggaaggtaatacatagtcattata

SEQ ID NO: 104982 - DNA, 120 bp, synthetic construct; identical to SEQ ID NO: 35281
  source 1..120: mol_type = other DNA

SEQ ID NO: 104983 - DNA, 120 bp, synthetic construct
  source 1..120: mol_type = other DNA
ttctacctttaactgcctaatgtgtccgactagttgtgggagatggtgctaagccgccattggttttcatgtgcactttttattaaagcgggttttctctgtgaatgtggtgataattca

SEQ ID NO: 104984 - DNA, 120 bp, synthetic construct
  source 1..120: mol_type = other DNA
ttctcctcctagaacattttaagtagcttgatttaatctcttatccaaatatcatgctgagtgtggtgagtcacccttgaaatcccatcactttggtagtcccaagccggcagaacactt

SEQ ID NO: 104985 - DNA, 120 bp, synthetic construct
  source 1..120: mol_type = other DNA
attttaaactcttattttgtagtatctgtttgatatttggaaaattctcatagtagtaggttaaggttctatggaaaggataacctactacttagaaaggaaaatgagggaaagtaaatg

SEQ ID NO: 104986 - DNA, 120 bp, synthetic construct
  source 1..120: mol_type = other DNA
aaaatagaaaataatatgagaacattgaagtcagataacagaagaagtaactggcattcttggctccatgcttgctttttctcctaaggacatttctttcctgtcaccagagtgatttat

SEQ ID NO: 104987 - DNA, 120 bp, synthetic construct
  source 1..120: mol_type = other DNA
atctattgatcgtgaaattgtatatagtgcatatttaagtcttgctagttgcttttctttctgttacatctagcacacttcctgtcacatagcagaaagtacatttttattcacccttat

SEQ ID NO: 104988 - DNA, 120 bp, synthetic construct
  source 1..120: mol_type = other DNA
tgaaattaattaggatagttaagcatttctgagaaattacctgaagtactatattaagattcgttttttaggggcacgtctaaggcaatgtaagaaatgagtaaggcaagaaaacttaat

SEQ ID NO: 104989 - DNA, 120 bp, synthetic construct
  source 1..120: mol_type = other DNA
ctaagtactataaaggtgtattataagaatgattgaactaatatctaaaatttgtttaacaattataataagtttgcactgaagtaacacacatttgaaagtgagttgtgtttgtgaatg

SEQ ID NO: 104990 - DNA, 120 bp, synthetic construct
  source 1..120: mol_type = other DNA
ttaattggagattgttttcaagttgaaattgcagtgtttgctccattttaagatgcgtagcttcacggctgttttgcctccactgatcttgagggtgagcttcaattatactctgccacg

SEQ ID NO: 104991 - DNA, 120 bp, synthetic construct
  source 1..120: mol_type = other DNA
acagaaagaccgtagtttttgtatgactaaaaatgagccgttttacctgaatgcttagctttaagttcattgaacaaaagagaagtgacacatacgtgagcataattactgattgatagc

SEQ ID NO: 104992 - DNA, 120 bp, synthetic construct
  source 1..120: mol_type = other DNA
ctcagcaacatgaggtgagcggtagggttgaatgcaagtaatacttttgagaagaattgtaagactgcagactgaacagaagaaaataagacaataaataaaagttcttagcaaggaagt

SEQ ID NO: 104993 - DNA, 120 bp, synthetic construct
  source 1..120: mol_type = other DNA
catttgaatgttaaaggtcccatgtcacaaagaagagagaattatggagttcctccacgcagagcgacaatatcttcctggagaaatgatcgcatgtcaacaagacatgatggttatgca

SEQ ID NO: 104994 - DNA, 120 bp, synthetic construct
  source 1..120: mol_type = other DNA
aaacttatgcacacagaaatcatccaagttgccaagaaacgagggattatgctccaccatctagaggctatgcataccgtgataatggtcattctaatcgggatgaacattcctctagag

SEQ ID NO: 104995 - DNA, 120 bp, synthetic construct
  source 1..120: mol_type = other DNA
gagaaactagggagtatgctccaccatctagaggccatggataccgtgattatggtcattctcgtcgacatgaaagttattctagaggatataggtactgtaatttttctggatttgtca

SEQ ID NO: 104996 - DNA, 120 bp, synthetic construct
  source 1..120: mol_type = other DNA
atccaagttcccgagaaaccagggattatgctccaccacatagagactatgcataccgtgattatggtcattctagttgggatgaacattcctctagaggatataggtactaacatgtta

SEQ ID NO: 104997 - DNA, 120 bp, synthetic construct
  source 1..120: mol_type = other DNA
tgaaaataatagttattgcataccaatccttgtttgcaaatcaaaaattgaaatgttatttctgcattgttacctgcatattactgaaagaaacatgttggttttgtggagagaggtaga

SEQ ID NO: 104998 - DNA, 120 bp, synthetic construct
  source 1..120: mol_type = other DNA
gttttgtcttgtgaggttcccacgttaattttttcttgaatattttgacagtggatgttgtaagtaatggtttagtaatatgttcttacagataggaataatctagagtggttgggatag

SEQ ID NO: 104999 - DNA, 120 bp, synthetic construct
  source 1..120: mol_type = other DNA
ggccaacaccatgaaaccccatctctaccaaaaatacaaaaattagccgggcatggtggtgcctgcctgtagtacgttgcagttaattgggaggctcaggcaggacagtggtttgaacct

SEQ ID NO: 105000 - DNA, 120 bp, synthetic construct
  source 1..120: mol_type = other DNA
tctcctaagcaactgcaactgcagtcatatgacaccaatcctgtatgtgtgtgtgtgtgtgtgtgtgtgtgtgtgtgtgtgtgtatttctattttcagtagagaccaggtttcacaatat

SEQ ID NO: 105001 - DNA, 120 bp, synthetic construct
  source 1..120: mol_type = other DNA
tcagaattatctaaagcttagtggcttaaacaataattataatttactaactgtcagtctctgcaatcccccgcagtcactcagccaaatgattgtggttctggggcactcaggaggacg

SEQ ID NO: 105002 - DNA, 120 bp, synthetic construct
  source 1..120: mol_type = other DNA
ctaacaccatgtggtgaggacaaggagtccattcaggttaaggagggtgtgagcatattgtgatctggaagagagatacacctggtacagcaaccaggatcaaggtccctggcacatgtt

SEQ ID NO: 105003 - DNA, 120 bp, synthetic construct
  source 1..120: mol_type = other DNA
cctctctcatgggccggagactctggtgcacagggattcccgaatagcgaatcccaaagccctgcaggtttcactgattcttacctgaatgccccagccgaacacacaggtaaacacagg

SEQ ID NO: 105004 - DNA, 120 bp, synthetic construct
  source 1..120: mol_type = other DNA
aggcacgccctgcgtgcactctagttgagcccaaactgagccccaggtagtagcaggcctcaaggcgtagaagggagccagagaaggatgatgagacagctatcccttgagccttgcttc

SEQ ID NO: 105005 - DNA, 120 bp, synthetic construct
  source 1..120: mol_type = other DNA
ccactcagaacccctgtgccccaggaggacctcaacctgagcaagaccctggacccgtcccgcagaccccggctcctcaggctgagcttcaaatccatcctgtagcttacttagcaggac

SEQ ID NO: 105006 - DNA, 120 bp, synthetic construct
  source 1..120: mol_type = other DNA
accatgtgctctcagggcacccccaagcaagctgccctcctatctgcaggaccctggcctcagctcccttcgctatcccccatcccctgcctcctggttgtccccgtgtgccccttgctt

SEQ ID NO: 105007 - DNA, 120 bp, synthetic construct
  source 1..120: mol_type = other DNA
tggcctagaatctaacttgcattaagatatcacaaacattcagcagatagtttctaaatgccacagtaagcctggcagtctgcaagaagctcagaaaaacatggtccttctgagagtgca

SEQ ID NO: 105008 - DNA, 120 bp, synthetic construct
  source 1..120: mol_type = other DNA
tggcttaactacttatagctaaaaacgataataattactagctattattgagtatttactgtgtttcaggcactattccctctcctcctctctcctctcccctctccccctcccctctcg

SEQ ID NO: 105009 - DNA, 120 bp, synthetic construct; identical to SEQ ID NO: 25357
  source 1..120: mol_type = other DNA

SEQ ID NO: 105010 - DNA, 120 bp, synthetic construct
  source 1..120: mol_type = other DNA
aaaggaagagtaggatgagcctttggccagcagcccaaagacatctaatctgtgggttatattttcattttcttttttttttttctttgagacggagtcttgcgctgtcactcagcctgg

SEQ ID NO: 105011 - DNA, 120 bp, synthetic construct; identical to SEQ ID NO: 31444
  source 1..120: mol_type = other DNA

SEQ ID NO: 105012 - DNA, 120 bp, synthetic construct; identical to SEQ ID NO: 31445
  source 1..120: mol_type = other DNA

SEQ ID NO: 105013 - DNA, 120 bp, synthetic construct; identical to SEQ ID NO: 31446
  source 1..120: mol_type = other DNA

SEQ ID NO: 105014 - DNA, 120 bp, synthetic construct; identical to SEQ ID NO: 31447
  source 1..120: mol_type = other DNA

SEQ ID NO: 105015 - DNA, 120 bp, synthetic construct
  source 1..120: mol_type = other DNA
gtgatccgcctgcctcggcctcccaaagtgctgagattacagtgcctggcctgtatatatgtttatgatcgatttatcatatatatctttatgatctgtttatccataggtagaggttag

SEQ ID NO: 105016 - DNA, 120 bp, synthetic construct; identical to SEQ ID NO: 31448
  source 1..120: mol_type = other DNA

SEQ ID NO: 105017 - DNA, 120 bp, synthetic construct
  source 1..120: mol_type = other DNA
cattctgaaagtatcagttattttcctgttattatctgtggtaacattgcttgttttttttgttgttgttgagacagagtctcgctctgtctctgtcgcccaggctggaatgcagtggta

SEQ ID NO: 105018 - DNA, 120 bp, synthetic construct; identical to SEQ ID NO: 31449
  source 1..120: mol_type = other DNA

SEQ ID NO: 105019 - DNA, 120 bp, synthetic construct; identical to SEQ ID NO: 31450
  source 1..120: mol_type = other DNA

SEQ ID NO: 105020 - DNA, 120 bp, synthetic construct; identical to SEQ ID NO: 31451
  source 1..120: mol_type = other DNA

SEQ ID NO: 105021 - DNA, 120 bp, synthetic construct; identical to SEQ ID NO: 31452
  source 1..120: mol_type = other DNA

SEQ ID NO: 105022 - DNA, 120 bp, synthetic construct; identical to SEQ ID NO: 31453
  source 1..120: mol_type = other DNA

SEQ ID NO: 105023 - DNA, 120 bp, synthetic construct
  source 1..120: mol_type = other DNA
ctcatgcttgtaatcccagcactttgggagaccaagtgggaggattgcttgagcccaggagttcgagactagcctgggcaacatggtaaaaccttgtctctacaaaaaatacagaaatta

SEQ ID NO: 105024 - DNA, 120 bp, synthetic construct; identical to SEQ ID NO: 31454
  source 1..120: mol_type = other DNA

SEQ ID NO: 105025 - DNA, 120 bp, synthetic construct; identical to SEQ ID NO: 31442
  source 1..120: mol_type = other DNA

SEQ ID NO: 105026 - DNA, 120 bp, synthetic construct; identical to SEQ ID NO: 31443
  source 1..120: mol_type = other DNA

SEQ ID NO: 105027 - DNA, 120 bp, synthetic construct; identical to SEQ ID NO: 31455
  source 1..120: mol_type = other DNA

SEQ ID NO: 105028 - DNA, 120 bp, synthetic construct
  source 1..120: mol_type = other DNA
tagcactttgggaggccgaggcaggcgggttgcctgagctcaggagtttgagaccaacctgggcaacatggcaaaaccccatctctttaaaacaaaaaaagaaaaaaaaaaaaaaaatat

SEQ ID NO: 105029 - DNA, 120 bp, synthetic construct; identical to SEQ ID NO: 31456
  source 1..120: mol_type = other DNA

SEQ ID NO: 105030 - DNA, 120 bp, synthetic construct; identical to SEQ ID NO: 31457
  source 1..120: mol_type = other DNA

SEQ ID NO: 105031 - DNA, 120 bp, synthetic construct
  source 1..120: mol_type = other DNA
cagcctccgcgtcgggccagggtcacatcaagtttggcgggtgcggaaggtggggagggggtgcggcgggggaggcagtgggagccggaggggccgccgcctccgccttttcactgcgac

SEQ ID NO: 105032 - DNA, 120 bp, synthetic construct
  source 1..120: mol_type = other DNA
atcctcccaccttggcctcccaaagtgctggggttacaggtttgagtcaccatgcctggcccaaactttttaattctttactgatttaagaaaatgagttttattttgctaatactcgtg

SEQ ID NO: 105033 - DNA, 120 bp, synthetic construct
  source 1..120: mol_type = other DNA
agtgctgggattacaggcgtgagccactgcacccggccgagaaagcagttttatatacaagttcaggaaaaaggcatgggctggatatatatttcaaattctaaaagactatcaattgta

SEQ ID NO: 105034 - DNA, 120 bp, synthetic construct; identical to SEQ ID NO: 32982
  source 1..120: mol_type = other DNA

SEQ ID NO: 105035 - DNA, 120 bp, synthetic construct
  source 1..120: mol_type = other DNA
cccggcagccgccccgtctgagaagtgaggagcctctctgcctggcagccaccccgtctgggaagtgaggagcgtctccgcccggcagccgccccgtccgggagggaggtgggggggtca

SEQ ID NO: 105036 - DNA, 120 bp, synthetic construct
  source 1..120: mol_type = other DNA
aagaaaaatactgattttatacctgtggaacctggggtttcccttttaaattaaagtaaaaaatcccaatgatcagccaggcacgggggctcacacctgtaatcctagcactttgggaag

SEQ ID NO: 105037 - DNA, 120 bp, synthetic construct
  source 1..120: mol_type = other DNA
ttcttatttttttggtgaagacggggtttcactgtgttggctgggctggtctccagctcctagccgcgagtgatccgccagcctcggcctccggaggtgccgggattgcagacgatgtct

SEQ ID NO: 105038 - DNA, 120 bp, synthetic construct
  source 1..120: mol_type = other DNA
ctatcgtctgggacgtgaggagcccctctgcctggctgcccagtctggaaagtgagaagcgtctgcccggccgccatcccatctaggaagtgaggagcgtctctgcccggccacccattg

SEQ ID NO: 105039 - DNA, 120 bp, synthetic construct
  source 1..120: mol_type = other DNA
acaaacgctgcggaaggccgcagggtcctctgcctaggaaaaccagagacctctgttcacttgtttatctgctgaccttccctccactattgtcctatgaccctgccaaatccccctctg

SEQ ID NO: 105040 - DNA, 120 bp, synthetic construct; identical to SEQ ID NO: 27794
  source 1..120: mol_type = other DNA

SEQ ID NO: 105041 - DNA, 120 bp, synthetic construct
  source 1..120: mol_type = other DNA
taaacatatgtgtgcatgtgtctttatagcagcatgatttatagtcctttgggtatatacccagtaatgggatggctggatcaaatggtatttctagttctagatccctgaggaattgcc

SEQ ID NO: 105042 - DNA, 120 bp, synthetic construct; identical to SEQ ID NO: 27795
  source 1..120: mol_type = other DNA

SEQ ID NO: 105043 - DNA, 120 bp, synthetic construct; identical to SEQ ID NO: 27796
  source 1..120: mol_type = other DNA

SEQ ID NO: 105044 - DNA, 120 bp, synthetic construct; identical to SEQ ID NO: 13721
  source 1..120: mol_type = other DNA

SEQ ID NO: 105045 - DNA, 120 bp, synthetic construct; identical to SEQ ID NO: 13722
  source 1..120: mol_type = other DNA

SEQ ID NO: 105046 - DNA, 120 bp, synthetic construct; identical to SEQ ID NO: 13723
  source 1..120: mol_type = other DNA

SEQ ID NO: 105047 - DNA, 120 bp, synthetic construct
  source 1..120: mol_type = other DNA
gggtggactgacatttgctggaacattaaaaaagcattagaaggccgggcgtggtggctcatgcctgtaatcccagcgctttgggaggccgaggcaggcagatcacaaggtcaggagatt

SEQ ID NO: 105048 - DNA, 120 bp, synthetic construct; identical to SEQ ID NO: 13724
  source 1..120: mol_type = other DNA

SEQ ID NO: 105049 - DNA, 120 bp, synthetic construct
  source 1..120: mol_type = other DNA
ccaccccgtctgagaagtgaggagcccctctgcccggccgccaccccgtctgggaggtgtacccaacagctcattgagaacaggccatgatgacgatggcggtttcgtcgaatagaaaag

SEQ ID NO: 105050 - DNA, 120 bp, synthetic construct; identical to SEQ ID NO: 13712
  source 1..120: mol_type = other DNA

SEQ ID NO: 105051 - DNA, 120 bp, synthetic construct
  source 1..120: mol_type = other DNA
ccagctaatttctccattttttggtagagacagggtctcgttatgttgtccaggctggtctggaactcctggcctcaagcaatcctcctgcatcagttccccaaagtgctgggattacag

SEQ ID NO: 105052 - DNA, 120 bp, synthetic construct
  source 1..120: mol_type = other DNA
ccacgcccagcctatttgctcttttttttcgagacagagtcttgctctgtcacccaggctggaatgtggtggcacgatctcagctcactgcaatctgcaagcgattcaattctcatgcct

SEQ ID NO: 105053 - DNA, 120 bp, synthetic construct; identical to SEQ ID NO: 7234
  source 1..120: mol_type = other DNA

SEQ ID NO: 105054 - DNA, 120 bp, synthetic construct; identical to SEQ ID NO: 7235
  source 1..120: mol_type = other DNA

SEQ ID NO: 105055 - DNA, 120 bp, synthetic construct
  source 1..120: mol_type = other DNA
gctctacaccccaggtggaagttcttgctctctgggggttatctgagaatctggtgaaaacttagaccctcttctgaaaaacatatcccacaccacaccaaacttaaagaaagttctgtg

SEQ ID NO: 105056 - DNA, 120 bp, synthetic construct; identical to SEQ ID NO: 12015
  source 1..120: mol_type = other DNA

SEQ ID NO: 105057 - DNA, 120 bp, synthetic construct; identical to SEQ ID NO: 5338
  source 1..120: mol_type = other DNA

SEQ ID NO: 105058 - DNA, 120 bp, synthetic construct; identical to SEQ ID NO: 32042
  source 1..120: mol_type = other DNA

SEQ ID NO: 105059 - DNA, 120 bp, synthetic construct; identical to SEQ ID NO: 15522
  source 1..120: mol_type = other DNA

SEQ ID NO: 105060 - DNA, 120 bp, synthetic construct; identical to SEQ ID NO: 14660
  source 1..120: mol_type = other DNA

SEQ ID NO: 105061 - DNA, 120 bp, synthetic construct
  source 1..120: mol_type = other DNA
atatcccagacgatggggggccaggcagagacgctcctcacttcccagacggggtggcggctgggcagaggctgcaatctcggcactttggggggccaaggcaggcggctgggaggtgga

SEQ ID NO: 105062 - DNA, 120 bp, synthetic construct; identical to SEQ ID NO: 9330
  source 1..120: mol_type = other DNA

SEQ ID NO: 105063 - DNA, 120 bp, synthetic construct
  source 1..120: mol_type = other DNA
tccaacttgatattcatatgataaacagaattcagaaattaagaatttttaaaggggctgggtgtggtggctcacgcctgtaatcctagcactttgggaggctgaggtaggtggatcact

SEQ ID NO: 105064 - DNA, 120 bp, synthetic construct; identical to SEQ ID NO: 31605
  source 1..120: mol_type = other DNA

SEQ ID NO: 105065 - DNA, 120 bp, synthetic construct; identical to SEQ ID NO: 15465
  source 1..120: mol_type = other DNA

SEQ ID NO: 105066 - DNA, 120 bp, synthetic construct
  source 1..120: mol_type = other DNA
tttccttaatccaatctatcattgttggacatttgggttggttccaagtctttgctattgtgaataatgccgcaataaacatacgtgtgcatgtgtctttatagcagcatgatttatagt

SEQ ID NO: 105067 - DNA, 120 bp, synthetic construct
  source 1..120: mol_type = other DNA
gatagttgtaggtatgcggcgttatttctgagggctctgttctgttccattgatctatatctctgttttggtaccagtcccatgctgttttggttactgtagccctgtagtatagtttga

SEQ ID NO: 105068 - DNA, 120 bp, synthetic construct
  source 1..120: mol_type = other DNA
ggtatcaggatgatgctggcttcataaaatgagttagggaggattccctctttttgtattgattggaatagtttcagaaggaatggtaccagttcctccttgtacctctggtagaattcg

SEQ ID NO: 105069 - DNA, 120 bp, synthetic construct
  source 1..120: mol_type = other DNA
gccttcatttcgttatgtatccagtagtcattcaggagcaggttgttcagtttccatgtagttgagcggctttgagtgagattcttaatcctgagttctagtttgattgcactgtggtct

SEQ ID NO: 105070 - DNA, 120 bp, synthetic construct
  source 1..120: mol_type = other DNA
aaggcacataattgtcagattcaccaaagttgaaataaaggaaaaaatgttaagggcagccagagagaaaggtcgggttaccctcaaagggaagcccatcagactaacagcggatctctc

SEQ ID NO: 105071 - DNA, 120 bp, synthetic construct
  source 1..120: mol_type = other DNA
tactgctgtctttttgtttgtctgtgccctgcccccagaggtgaagcctacagtggcaggcaggcctccttgaactgtggtgggctccacccagttcgagcttcctggctgctttgttta

SEQ ID NO: 105072 - DNA, 120 bp, synthetic construct; identical to SEQ ID NO: 15466
  source 1..120: mol_type = other DNA

SEQ ID NO: 105073 - DNA, 120 bp, synthetic construct; identical to SEQ ID NO: 105070
  source 1..120: mol_type = other DNA

SEQ ID NO: 105074 - DNA, 120 bp, synthetic construct
  source 1..120: mol_type = other DNA
ttgaactcagctctgcaccaagcggacctaatagacatctacagaactctccaccccaaatcaacagaatatacatttttttcagcaccacaccacacctattacaaaattgaccacata

SEQ ID NO: 105075 - DNA, 120 bp, synthetic construct; identical to SEQ ID NO: 105068
  source 1..120: mol_type = other DNA

SEQ ID NO: 105076 - DNA, 120 bp, synthetic construct
  source 1..120: mol_type = other DNA
atcgccaagtcaatcctaagccaaaagaacaaagctggaggcatcacactacctgacttcaaactatactacaaggctacagtaaccaaaacagcatgggactggtaccaaaacagagat

SEQ ID NO: 105077 - DNA, 120 bp, synthetic construct; identical to SEQ ID NO: 31946
  source 1..120: mol_type = other DNA

SEQ ID NO: 105078 - DNA, 120 bp, synthetic construct
  source 1..120: mol_type = other DNA
taatttttgtattttttgtagagaaaaggttttaccatgttgcccaggctgatctcaaactcctaagcttaagcgaaccacctgccttgacctcccaaagtgctggcattacaggcatga

SEQ ID NO: 105079 - DNA, 120 bp, synthetic construct; identical to SEQ ID NO: 20555
  source 1..120: mol_type = other DNA

SEQ ID NO: 105080 - DNA, 120 bp, synthetic construct
  source 1..120: mol_type = other DNA
aattttcgcaacctacttatctgacaaagggctaatatccagaatctacaatgaactcaaacaaatttacaagaaaaaaacaaccccatcaaaaagtgggcgaaggacatgaacagacac

SEQ ID NO: 105081 - DNA, 120 bp, synthetic construct
  source 1..120: mol_type = other DNA
gtaccctaaagcttaaagtataataaaaaataaataaataaataaataagaaaaagaaagccaggcatggtgacatgtgcctgtggtcccagctattagggaggctgaggtgggaggatc

SEQ ID NO: 105082 - DNA, 120 bp, synthetic construct
  source 1..120: mol_type = other DNA
attgcaccactgcactgcagcctgggcggcagagcaagaccgtgtctcaaaaagaaaaccaattaaaataaaataatgttattaatcccctagtgagtacagacagacactgttttaggc

SEQ ID NO: 105083 - DNA, 120 bp, synthetic construct; identical to SEQ ID NO: 25374
  source 1..120: mol_type = other DNA

SEQ ID NO: 105084 - DNA, 120 bp, synthetic construct; identical to SEQ ID NO: 25375
  source 1..120: mol_type = other DNA

SEQ ID NO: 105085 - DNA, 120 bp, synthetic construct
  source 1..120: mol_type = other DNA
tgaggggcgcctctgcccggccgcccctactgggaagtgaggagcccctctgcccggccaggaccccgtctgggaggtgtgcccagcggctcattggggatgggccatgatgacaatggc

SEQ ID NO: 105086 - DNA, 120 bp, synthetic construct; identical to SEQ ID NO: 25376
  source 1..120: mol_type = other DNA

SEQ ID NO: 105087 - DNA, 120 bp, synthetic construct
  source 1..120: mol_type = other DNA
ctctgtgtctaacaatttaacttggttgagtgcagtgaggtatttaacccccaaaaatgttctctataagtaggttgcgaaaattttctcccatttgtaggttgcctgttcactctgatg

SEQ ID NO: 105088 - DNA, 120 bp, synthetic construct
  source 1..120: mol_type = other DNA
aatttgaaatcatcattctcagtaaactatctcaagaacaaaaaaccaaacaccacatattctcactcataggtgggaattgaacaatgagatcacatggacacaggaaggggaacatca

SEQ ID NO: 105089 - DNA, 120 bp, synthetic construct
  source 1..120: mol_type = other DNA
cgtagtctcagaaaaaacagactttaaaccaacaaagatcaaaagagacaaagaaggacgttacataatggtaaagggatcaattcaacaagaagagctaactatcctaaatatatatgc

SEQ ID NO: 105090 - DNA, 120 bp, synthetic construct
  source 1..120: mol_type = other DNA
tcagagcagaacggaaggaaatggagacacaaaaaaacccttcaaaaaattaatgaatccaggagctggttttctgaaaagatcaacaaaactgatagaccactagcaagactaataaag

SEQ ID NO: 105091 - DNA, 120 bp, synthetic construct
  source 1..120: mol_type = other DNA
tggaaaacactactttaaagttcatatggaaccaaaaaagagctcacattgccaagtcaatcctaagccaaaagaacaaagctggaggcatcacgctacctgacttcaaactatactaca

SEQ ID NO: 105092 - DNA, 120 bp, synthetic construct
  source 1..120: mol_type = other DNA
gcaaagacttggaaccaacctaaatgtccaacaatgatagatggattaagaaaatgtgtcacatatacaccatggaatactatgcagccacaaaaaatgatgagttcatgtcctttgtag

SEQ ID NO: 105093 - DNA, 120 bp, synthetic construct
  source 1..120: mol_type = other DNA
aggaggcactgctgggccctgatgtgaggtggatcagcgagaatgggaaggaggagatagatggttctcctcttttctttctttctttctttctttctttctttctttctttctttcttt

SEQ ID NO: 105094 - DNA, 120 bp, synthetic construct
  source 1..120: mol_type = other DNA
ggcatattcaagcatttttccactcatgtaagcatgtattcattcatctattcaacaaccaatgtttaaagaattactttggccgggcgcggtggctcacgcctgtaatcccagcacttt

SEQ ID NO: 105095 - DNA, 120 bp, synthetic construct; identical to SEQ ID NO: 29889
  source 1..120: mol_type = other DNA

SEQ ID NO: 105096 - DNA, 120 bp, synthetic construct
  source 1..120: mol_type = other DNA
gtgagatggtatctcatagtggttttgatttgcatttctctgatggccagtgatgatgagtgttttttcatgtgttttttggctgcataaatgtcttcttttgagaagtgtctgttcatg

SEQ ID NO: 105097 - DNA, 120 bp, synthetic construct
  source 1..120: mol_type = other DNA
caataaaatactggcaaaccgaatccagcagcacatcaaaaagcttatccaccatgatcaagtgggcttcatccctgggatgcaaggctggttcaatatatgcaaatcagtaaatgtgat

SEQ ID NO: 105098 - DNA, 120 bp, synthetic construct
  source 1..120: mol_type = other DNA
cagagatacagatcaatggaacagaatagagccctcagaaataacgccgcatacctacaactatctgatctttgacaaacctgagaaaaacaagcaatggggaaaggattccctatttaa

SEQ ID NO: 105099 - DNA, 120 bp, synthetic construct
  source 1..120: mol_type = other DNA
attatactcctatctacctaaactgtcaaatcacattgaaaataatctgataattaagttaaaaatttccagttctgtgcagaaagtcattggtagcttgatggggatggcattgaatct

SEQ ID NO: 105100 - DNA, 120 bp, synthetic construct
  source 1..120: mol_type = other DNA
gatttaaacgttagacctaaaaccataaaaaccctagaagaaaacctaggcattactattcaggacataggcatgggcaaggacttcatgtccaaaacaccaaaagcaatggcaacaaaa

SEQ ID NO: 105101 - DNA, 120 bp, synthetic construct
  source 1..120: mol_type = other DNA
gggaatatcacactctggggactgtggtggggtggggggaggggggagagatagcattgggagatatacctaatgctagatgacgagttagtgggtgcagcgcaccagcatggcacatgt

SEQ ID NO: 105102 - DNA, 120 bp, synthetic construct; identical to SEQ ID NO: 14224
  source 1..120: mol_type = other DNA

SEQ ID NO: 105103 - DNA, 120 bp, synthetic construct; identical to SEQ ID NO: 14225
  source 1..120: mol_type = other DNA

SEQ ID NO: 105104 - DNA, 120 bp, synthetic construct; identical to SEQ ID NO: 28358
  source 1..120: mol_type = other DNA

SEQ ID NO: 105105 - DNA, 120 bp, synthetic construct; identical to SEQ ID NO: 28359
  source 1..120: mol_type = other DNA

SEQ ID NO: 105106 - DNA, 120 bp, synthetic construct
  source 1..120: mol_type = other DNA
tgggagacaagagtgaaactctgtctcaaaaacaaacaaaccaaaaaacaaacacacacacacacacacacacacacacacacacacacacacacaaacacacaaaccagtaactaggac

SEQ ID NO: 105107 - DNA, 120 bp, synthetic construct; identical to SEQ ID NO: 33511
  source 1..120: mol_type = other DNA

SEQ ID NO: 105108 - DNA, 120 bp, synthetic construct
  source 1..120: mol_type = other DNA
gtccgggaggtgaggggcgcctctgcccggccgcccctactgggaagtgaggagcccctctgcccggccaggaccccgtctgggaggtgtgcccagcggctcattggggatgggccatga

SEQ ID NO: 105109 - DNA, 120 bp, synthetic construct
  source 1..120: mol_type = other DNA
tcctcacttctcagacggggcgtccgggcagagacgctcctcacatcccagacggggtggcagggcagaggtgctccccacatctcagacgatgggcggccgggcagagacgctcctcac

SEQ ID NO: 105110 - DNA, 120 bp, synthetic construct
  source 1..120: mol_type = other DNA
tgatgtcatgtactatggcatatctcaaatatacgtgatttcagctctttgcatacccatattggttttcttttttttttttttaattgatcattcttaggtgtttctcgcagaggggga

SEQ ID NO: 105111 - DNA, 120 bp, synthetic construct
  source 1..120: mol_type = other DNA
gcggggggctgacccccccacctccctcccggacggggtggctgctgggcggagacgttcctcacttcccagacgggatggctgccgggtggaggggctcctcacttctcagacggggcg

SEQ ID NO: 105112 - DNA, 120 bp, synthetic construct
  source 1..120: mol_type = other DNA
gagagagggagagggagagagggagagggagagagggagagggagagatttggttttcataataatcataaccctttccaaatgagggagagtaatgaattttatcattttattagttag

SEQ ID NO: 105113 - DNA, 120 bp, synthetic construct
  source 1..120: mol_type = other DNA
attgaggctgcggtgaaccatgatcacaccactgcactccagcttgggcaacagagcaagaccctgtctctaaaaaaaaaaaaaaaaaacaaacaaaagatgtgatgattgcctctttcg

SEQ ID NO: 105114 - DNA, 120 bp, synthetic construct
  source 1..120: mol_type = other DNA
tgaaataatcactaaaatagttaaattgttatataacaacatacatgcttctaggcctggcacagtttctcatgcctgtaatcccagcactttgggaggccgaggtgggcggatcacttg

SEQ ID NO: 105115 - DNA, 120 bp, synthetic construct; identical to SEQ ID NO: 33513
  source 1..120: mol_type = other DNA

SEQ ID NO: 105116 - DNA, 120 bp, synthetic construct; identical to SEQ ID NO: 33514
  source 1..120: mol_type = other DNA

SEQ ID NO: 105117 - DNA, 120 bp, synthetic construct; identical to SEQ ID NO: 69665
  source 1..120: mol_type = other DNA

SEQ ID NO: 105118 - DNA, 120 bp, synthetic construct; identical to SEQ ID NO: 33515
  source 1..120: mol_type = other DNA

SEQ ID NO: 105119 - DNA, 120 bp, synthetic construct; identical to SEQ ID NO: 33516
  source 1..120: mol_type = other DNA

SEQ ID NO: 105120 - DNA, 120 bp, synthetic construct; identical to SEQ ID NO: 33517
  source 1..120: mol_type = other DNA

SEQ ID NO: 105121 - DNA, 120 bp, synthetic construct; identical to SEQ ID NO: 33518
  source 1..120: mol_type = other DNA

SEQ ID NO: 105122 - DNA, 120 bp, synthetic construct
  source 1..120: mol_type = other DNA
cgaaggctcccagagtttaaattttggtgagctaattcttcacggtatttgaagagaattgtgctcaagggtggctgagactgagactacactgatttttgttcaagtcacctgaaagat

SEQ ID NO: 105123 - DNA, 120 bp, synthetic construct
  source 1..120: mol_type = other DNA
ctggctctgaggcatgagttgcaggggtggggggtgagccgacggggggtgatgtgtggacagggagctcaggggcttcagggctggagggggaggcaggttggcattcatggagaaggg

SEQ ID NO: 105124 - DNA, 120 bp, synthetic construct; identical to SEQ ID NO: 7041
  source 1..120: mol_type = other DNA

SEQ ID NO: 105125 - DNA, 120 bp, synthetic construct
  source 1..120: mol_type = other DNA
tttatttcttgaagggaagccttctaccaaacaaacaaacaaacaaacaagaaaacaccactttggcggatggatcactaggtcaggagatcgagactatcctggctaacatggtgaaac

SEQ ID NO: 105126 - DNA, 120 bp, synthetic construct; identical to SEQ ID NO: 7042
  source 1..120: mol_type = other DNA

SEQ ID NO: 105127 - DNA, 120 bp, synthetic construct
  source 1..120: mol_type = other DNA
cagtgaaccaagaccatgccactgcactccagcctcggtgacagagggagactccatctcaaaaaaaaaaaatagaaagtatgccagagtaatataactgctctatgaacacactaaata

SEQ ID NO: 105128 - DNA, 120 bp, synthetic construct
  source 1..120: mol_type = other DNA
gcaccgagtacagtactgggtacagcagttctctaatgtctgttattaatcgaaaagtactattactgtgagcaggaccaacctcccccccattcttgagaaaaatggactagaaatata

SEQ ID NO: 105129 - DNA, 120 bp, synthetic construct
  source 1..120: mol_type = other DNA
aattgagaaatcggatggttgccgggtctgtgtggatagaagtagatatgggagacttttcattttgttctgtactaagaaaaattcttctgccttgggatcctgttgatctgtgacctt

SEQ ID NO: 105130 - DNA, 120 bp, synthetic construct; identical to SEQ ID NO: 7044
  source 1..120: mol_type = other DNA

SEQ ID NO: 105131 - DNA, 120 bp, synthetic construct
  source 1..120: mol_type = other DNA
tgctgctgccgctgctaggcaaaggtgagttctgccggccgccggctcccgcaggggccagggcgaagttggcgccgagcagcggagcgggcgcgttcagaagcgcctttctgtttgccg

SEQ ID NO: 105132 - DNA, 120 bp, synthetic construct
  source 1..120: mol_type = other DNA
caagcgcttgtgtatgaaccaagtttccctctaagagggaaggagccctggccatcctccctcactccttacaaagggctttctctccccacagcctttgggaacagaagaagccatggt

SEQ ID NO: 105133 - DNA, 120 bp, synthetic construct
  source 1..120: mol_type = other DNA
ctgcagggcatagcctgtcagccccaggtatgctggaaccagagtgagagaacctccatctaaaagttacattcatttaaaagttgctcttaaaggtttctggcatttcattgctcaaca

SEQ ID NO: 105134 - DNA, 120 bp, synthetic construct
  source 1..120: mol_type = other DNA
tgtgcctactcacttcatcttttccaacaagtctgcaagggtcatggtcttggcccatttcacaggtgaggaaacaggttctcatagcctatggactcgaaccggtagagaggatgcggg

SEQ ID NO: 105135 - DNA, 120 bp, synthetic construct
  source 1..120: mol_type = other DNA
caataatagtaacaacagcaggctgggagcactcctgagggagcctcggctcctgccctgctgctctagggctggggactctccagagctgtctcatggcagggagagaccgtagtcaag

SEQ ID NO: 105136 - DNA, 120 bp, synthetic construct
  source 1..120: mol_type = other DNA
caagcaaacacctctgtttgcttttgcctcaaggagtggctccacaaagtgtagcagcccaggcaccaccacagaaaggtcaccgctgcacctggacaggtgtgcgcctacctggtggac

SEQ ID NO: 105137 - DNA, 120 bp, synthetic construct
  source 1..120: mol_type = other DNA
tcacatacaggatgccccacagcaccttgaaaactcgtgacccgggaaagcctcaaattgtctttgctcccctagcctccccaccacctgtatatgcaggggcatgtgagactgtacttg

SEQ ID NO: 105138 - DNA, 120 bp, synthetic construct
  source 1..120: mol_type = other DNA
aaatgctgccagggacattcctgttataaatacctgagttcgtgctttcagttcttttgggtacatacctggacatgaaatcgctaggtaattctgttttatattttgtggagccgccaa

SEQ ID NO: 105139 - DNA, 120 bp, synthetic construct
  source 1..120: mol_type = other DNA
taatcggatccgctgtaagttgattatcatcattgccgtggtgtgatgtcatgctgccaggccctggggcagttttctcaggacagcggtggatgcacctaggcagctctggaggccagc

SEQ ID NO: 105140 - DNA, 120 bp, synthetic construct
  source 1..120: mol_type = other DNA
actgcagcttaattcctagcctctgtgtggcctccagcagggtacctaagctagtgctgcctcattttcctcctgtgtgagatgggaatcctcatggtccctacctctgacagttgtttt

SEQ ID NO: 105141 - DNA, 120 bp, synthetic construct
  source 1..120: mol_type = other DNA
ttctgggcttctgttttctggcatgggatggggtgaatgatatctctgttctacagcaggggctcagactggatgtgtgagaagagcctcagttaaggagggccatgttcgtgcgtgcag

SEQ ID NO: 105142 - DNA, 120 bp, synthetic construct
  source 1..120: mol_type = other DNA
agtgatggtcatggtgttggtgttggtgttggtagtggtggtattggtgatggtgatagtggaggtcgtgatgatggttgtggtggaggtgatggtaatgttgatggtggaagtcatgat

SEQ ID NO: 105143 - DNA, 120 bp, synthetic construct
  source 1..120: mol_type = other DNA
cccgtcctgccgggcactggctcctgcttgtggctgcagcccagagcagtcccttccctttagcctccacttgcctgtctgtggctgtctcttggtcaggcattttttcagaacgggcag

SEQ ID NO: 105144 - DNA, 120 bp, synthetic construct
  source 1..120: mol_type = other DNA
ccaagagcaggttgagtgtatgggcactgtctgtcagcctcatactcttgttatcatcagacaagaaccctgagagttaagggaggcaaaggccagcaaggtcaggacttggggcagaga

SEQ ID NO: 105145 - DNA, 120 bp, synthetic construct
  source 1..120: mol_type = other DNA
attatatttatttcatccttttgattttaaaatgaattaaaacaaaaaccttttttgcgcacccaggcgcatgcagcagtggtgccggtcaggagcagaggttcctcctctgcaggctcc

SEQ ID NO: 105146 - DNA, 120 bp, synthetic construct
  source 1..120: mol_type = other DNA
tgagcacagggcctggatggacatttctccgaataagatttacagatggccccaagaagcacatgaaaagattctcagcattgccactcattagagaaatacaaatcaaaatcaccatgt

SEQ ID NO: 105147 - DNA, 120 bp, synthetic construct
  source 1..120: mol_type = other DNA
atttacagtagagcctcccttgatccgtgttttttccctaaatgcaaagttagattatagtcccaggcaaaagcagcctccagctgggacagagccgaggacccaggtttgtgcagcatg

SEQ ID NO: 105148 - DNA, 120 bp, synthetic construct
  source 1..120: mol_type = other DNA
gacaatttggggtgaggaggggccaaactgaggcaaaggagtagagagagcaaggcatggagatgcccaggctgctgatcagcatgctgcacaccagcatagagacaggattaacagccc

SEQ ID NO: 105149 - DNA, 120 bp, synthetic construct
  source 1..120: mol_type = other DNA
ccctacgctgcttctaattcatgcagtttttggatcatatcgttgttattgttttcttttttggaagtcccaaatttcggcccttgtgctgccatcctagggaagtttttcatggtctgg

SEQ ID NO: 105150 - DNA, 120 bp, synthetic construct
  source 1..120: mol_type = other DNA
ctagaaaaggcaggtgtaacaaccggagacaggagcaacccctggcctgtcccagcatctctccaaagccctccaccgatgaagcttggccttgtgctgcctgcaaagtaacctgctcca

SEQ ID NO: 105151 - DNA, 120 bp, synthetic construct
  source 1..120: mol_type = other DNA
tgtcaccacgtggcatttgggctttgaaggcatggggtgggaaaagctttgtaagtcctgctggtgaccttcccatggtgccaggagtgggagtgtctgtcaccagacgtgggtctcgac

SEQ ID NO: 105152 - DNA, 120 bp, synthetic construct
  source 1..120: mol_type = other DNA
cctacccactcttctgcagcctgggcatcaccagagccaccccacggccacccaagggcaaatggttcttattgggaagaccagggccagaggtgtgtgtcccagagaaaactagaccca

SEQ ID NO: 105153 - DNA, 120 bp, synthetic construct
  source 1..120: mol_type = other DNA
caccatcctatgttgtgtctgtgaatttgactactctagggatctcacataagtggaatcgtgcagtgttcatccttttgcaatgggcttatttcacttagcataatgtgctcaagggtt

SEQ ID NO: 105154 - DNA, 120 bp, synthetic construct
  source 1..120: mol_type = other DNA
gattcatttttcagttatttaggtaaaaattacatagataggccgggcacggtggctcatacctgtaatcccagcactttgggaggcagaggcgggcggatcgccggaggttgagagttc

SEQ ID NO: 105155 - DNA, 120 bp, synthetic construct
  source 1..120: mol_type = other DNA
gtgcccttccggcttggatgattgagaataggcttgtcactgaggatactgcttcccctgtttccttttctttttctgttttaaagcagttcttttctagcccgtgtgtaactatacaaa

SEQ ID NO: 105156 - DNA, 120 bp, synthetic construct
  source 1..120: mol_type = other DNA
gattaggaggtttcgagagagggagtaagtggggctggaaaaatcccaaggttttgatttagcaaatgacctgcaactctctggagaagcggcagttcccaaggaaagcctgacttctta

SEQ ID NO: 105157 - DNA, 120 bp, synthetic construct
  source 1..120: mol_type = other DNA
tgctggtcaccccttactggagaagttgccaccatcagagttggggagccttagacccagtgctcaacacacctccctgaggaaggggcctctaagccaagaactgaatgatgagagcta

SEQ ID NO: 105158 - DNA, 120 bp, synthetic construct
  source 1..120: mol_type = other DNA
agtggcttgcagggctttctccggaggaacatggggagctatggaagactttggagggagggagtgctggcaggacctgacttagttttaaaaggattagtcagactactgtgttaggaa

SEQ ID NO: 105159 - DNA, 120 bp, synthetic construct
  source 1..120: mol_type = other DNA
gcggtcggaaatcattatgcgttaatgtcacatcataccccagatgtccactgtgtttgttttcaagtggtagaatcgtggctttctcacgttctctaaaatgaacacatattgcttcca

SEQ ID NO: 105160 - DNA, 120 bp, synthetic construct
  source 1..120: mol_type = other DNA
gtgctgtggtctacccagtgtctgtctccggccacagttcgtttctcggtcggtttagtgtccgtgtagccacccaaccgtgtggccgaccattcgcgctttcatttgtccttcgcctcc

SEQ ID NO: 105161 - DNA, 120 bp, synthetic construct
  source 1..120: mol_type = other DNA
atcggctgtaattctccttataagaggtctgcattgtacctgttacacaggcgaggctcagtggctcagggaaggtgacggccaggctggccagtgaccccgtgggaacttgaacccagg

SEQ ID NO: 105162 - DNA, 120 bp, synthetic construct
  source 1..120: mol_type = other DNA
tttctcctgggatcgccttccaaataaaccacctgcatttggggtctgtgtctggtggaaccccaggccatgagtccttcacccctttctgcctggcctggtcctgttcattcctcagtc

SEQ ID NO: 105163 - DNA, 120 bp, synthetic construct
  source 1..120: mol_type = other DNA
agggaaagtaaaccacgttatacctgggtaacttaaaaaaaaaaggtttttaacaagattttatggaccaggcatagtggctcacgcctgtaatcccagcactttagggagaccgaggcg

SEQ ID NO: 105164 - DNA, 120 bp, synthetic construct
  source 1..120: mol_type = other DNA
ctcaaattgagaagggttccttggactttcagttcagtaaatcccaacgtttgaacattggtgctaacttaggaccagccccaggcctgttgcatggcactgtatgtgtgaaagtgcgtg

SEQ ID NO: 105165 - DNA, 120 bp, synthetic construct
  source 1..120: mol_type = other DNA
taaagaagatgaggcatgaggcatgaggcgtgatcccttctacccataggcgccagtgttgcacatcgtggtgttctttctgggatgtttctcgtaagcacttattaagttgacttgaaa

SEQ ID NO: 105166 - DNA, 120 bp, synthetic construct
  source 1..120: mol_type = other DNA
agacattccggcggctttgttgtctgagtgagggaggaaaggggagtaaagggttgagtcagggcctgcctggggcttttcctgccaccaaactgaacctcgaggccctgggttgccttg

SEQ ID NO: 105167 - DNA, 120 bp, synthetic construct
  source 1..120: mol_type = other DNA
acatacaggaccttgggtaaatttgaattttgggtaaacaacaagcagttttttggtataggtgtgttccatgcaacttttgcagcttctcgaaagacacacctctaggtccatccatgc

SEQ ID NO: 105168 - DNA, 120 bp, synthetic construct
  source 1..120: mol_type = other DNA
ggcctctttgctgtaagggccacctgtgtgaggaaccccccatacctcctctcccataagccatggctccccaggatgcttccgctggcaaggctctgtatatggtgtttccctactcag

SEQ ID NO: 105169 - DNA, 120 bp, synthetic construct
  source 1..120: mol_type = other DNA
tccctccctctgggcctctgttactccacccaggagaggggccagggcccctgtaaagtgtcttctggccataagttctatgatggacaggccagaaaagcagttcttccaccaaacaac

SEQ ID NO: 105170 - DNA, 120 bp, synthetic construct
  source 1..120: mol_type = other DNA
atggagaaccaggtctccgtggatgccttcaagatcctggtgagggtccctgcggggcagggaagatcccctgccctccccagctgccttccagggagggaggccagctggggagacaga

SEQ ID NO: 105171 - DNA, 120 bp, synthetic construct
  source 1..120: mol_type = other DNA
cactcatcagcaccaggtcttggacccatgactcaacctcagtatttgagaggatcaggttgatgtcgccctcatgtgcttattgcagtctctagagtgtggtaaacaggtttccagtgc

SEQ ID NO: 105172 - DNA, 120 bp, synthetic construct
  source 1..120: mol_type = other DNA
acataggaggatccaaagtgggaattccctcggaagaacttggttcttggaaaaactctaggagaaggcgaatttggaaaagtggtcaaggcaacggccttccatctgaaaggcagagca

SEQ ID NO: 105173 - DNA, 120 bp, synthetic construct
  source 1..120: mol_type = other DNA
caactgtcctctcccttccagacaacctttcaggacagaggaggtggcacggcacagctgggcagtgggacagctgacctgggagggatggcttagccatgtgttctgactcttggaata

SEQ ID NO: 105174 - DNA, 120 bp, synthetic construct
  source 1..120: mol_type = other DNA
agacctgctgtcagagttcaacgtcctgaagcaggtcaaccacccacatgtcatcaaattgtatggggcctgcagccaggatggtaaggccagctgcagggtgaggtgggcagccactgc

SEQ ID NO: 105175 - DNA, 120 bp, synthetic construct
  source 1..120: mol_type = other DNA
acgagcagcaggaggcagagagcaagtggttcaagagaaagctgaggcttcaaggtctgcgctctccacagagctgcagcagtgctgcctgaggcagggctgtgtccacccccttactca

SEQ ID NO: 105176 - DNA, 120 bp, synthetic construct
  source 1..120: mol_type = other DNA
agcctaggaaagataccgaagattagtggagctctaagctttttatagccctcaccccaaatctttctgaccctgggtccccaaggacccaattagaactccgctcagcctctgccatgt

SEQ ID NO: 105177 - DNA, 120 bp, synthetic construct
  source 1..120: mol_type = other DNA
tgtttaagtaaaagaagtgacagtaagattgtgttccaacccaaggcacacattttaaaaatggacttgcaccttcaggcttgtctgtggagaagctgtttctcaagtcaccctggaaag

SEQ ID NO: 105178 - DNA, 120 bp, synthetic construct
  source 1..120: mol_type = other DNA
acctgaagatggccttgtgtgagtttatagattggtgtgccccaaactgctcaaaggtggaagccaaaatctcattcttccaggtccaatgacaagagctgatcacttttaaaacacagg

SEQ ID NO: 105179 - DNA, 120 bp, synthetic construct
  source 1..120: mol_type = other DNA
tattaattaatgtatcattaattcattaatcatgaattcatcttaagcctcatgtgtcccttgtgcgtgtggctgctctgatgggagtggcttgggcaaggacttcagcttcatggagta

SEQ ID NO: 105180 - DNA, 120 bp, synthetic construct
  source 1..120: mol_type = other DNA
aaagccctcaatcaattcattcttcttgagagttttaaggactggcacttctcacttagctgccagagcaagcatagtatccagtgagctgtttaccagtgtctttgcaagggaagtaaa

SEQ ID NO: 105181 - DNA, 120 bp, synthetic construct
  source 1..120: mol_type = other DNA
ggagccaggaatgggctgggtcttctgaattttatgaggtttatgttgtctcccagtttttattgttaacaattcatttaaatttcccagagccgaacgcaggccaaacaaagcatatcg

SEQ ID NO: 105182 - DNA, 120 bp, synthetic construct
  source 1..120: mol_type = other DNA
tcctgggagctctatgcagcctggccctggtctcttggagaggtcaggagattggtgcgaggtggagacacagccagagcctctgccctgaggatggcttgttgtatactgagttgtatc

SEQ ID NO: 105183 - DNA, 120 bp, synthetic construct
  source 1..120: mol_type = other DNA
agctggctggccctgggaggacgcacccccactgctgttttcacatcctttcccttacccaccttcaggacggttgtcacttatgaagtcagtgctaaagctggagcagttgctttttga

SEQ ID NO: 105184 - DNA, 120 bp, synthetic construct
  source 1..120: mol_type = other DNA
cggcaaaattaatggacacgtttgatagttaacatttctttgtgaaaggtaatggactcacaaggggaagaaacatgctgagaatggaaagtctaccggccctttctttgtgaacgtcac

SEQ ID NO: 105185 - DNA, 120 bp, synthetic construct
  source 1..120: mol_type = other DNA
gtggctcatcctacctgttaggagcaggtagggcttgtactcactttaatttgaatcttatcaacttactcataaagggacaggctagctagctgtgttagaagtagcaatgacaatgac

SEQ ID NO: 105186 - DNA, 120 bp, synthetic construct
  source 1..120: mol_type = other DNA
tatccttgaccaatttatccttgaccaataacctaattgtctattcctgagttataaaagtccccatccttattagctctactggaattttcatacacgtaaatgcagaagttactaagt

SEQ ID NO: 105187 - DNA, 120 bp, synthetic construct
  source 1..120: mol_type = other DNA
ggagctggaaataaacctggagatgatgatgatgatgatgatgatgatgatggagcggatctgagccctgcgtggtttctttagtaggcccggagggactgatctagcgtctccaagaga

SEQ ID NO: 105188 - DNA, 120 bp, synthetic construct; identical to SEQ ID NO: 26335
  source 1..120: mol_type = other DNA

SEQ ID NO: 105189 - DNA, 120 bp, synthetic construct; identical to SEQ ID NO: 26336
  source 1..120: mol_type = other DNA

SEQ ID NO: 105190 - DNA, 120 bp, synthetic construct
  source 1..120: mol_type = other DNA
cggcatcccaaagtgctgggattacaggaatgagccaccgcgcccagccagaatctattttgtgtgtgtgtgtgtgtgtgtgtgtgtatatatatatatatatatttcgtatatatattt

SEQ ID NO: 105191 - DNA, 120 bp, synthetic construct
  source 1..120: mol_type = other DNA
accccaggtgatctacctgccttggcctcccaaagtgttgggattacaggcatgagtcaccacacctggccagatatttttaaaacattctagaaacacttaagaagtatattttttggt

SEQ ID NO: 105192 - DNA, 120 bp, synthetic construct
  source 1..120: mol_type = other DNA
gcgttaatttgcttaggataatagccccagctgcatccatgttgttacaaaggacatgattttgttctttgttcttttttttttttttttgagacagagtttcgctcttgttccccaggc

SEQ ID NO: 105193 - DNA, 120 bp, synthetic construct; identical to SEQ ID NO: 5817
  source 1..120: mol_type = other DNA

SEQ ID NO: 105194 - DNA, 120 bp, synthetic construct; identical to SEQ ID NO: 25384
  source 1..120: mol_type = other DNA

SEQ ID NO: 105195 - DNA, 120 bp, synthetic construct
  source 1..120: mol_type = other DNA
tctcattgtggttttgatttgcatttctctgatggccagtgatgattagcattttttcatgtgttttttggctgcataaatgtcttcttttgagaagtgtctgttcatgtccttcgccca

SEQ ID NO: 105196 - DNA, 120 bp, synthetic construct
  source 1..120: mol_type = other DNA
gttaaaacattatgcctttaagctacaattattaagtaaacaaaacaaaacacataaaatgtaaaagaaaagattctgggccaggtgcagtggctcatgccagtaaccccagcactttgg

SEQ ID NO: 105197 - DNA, 120 bp, synthetic construct
  source 1..120: mol_type = other DNA
cagaacaaagtgtgagtacctggcacagtgcctggtacaaaatagatgtttcataaactttagtgtccttcctcttcccctgcaccatgcatttataaatcctgtcacactgtagtaaac

SEQ ID NO: 105198 - DNA, 120 bp, synthetic construct
  source 1..120: mol_type = other DNA
aaattataaaatttcatctctactaaaattataaaaattagctagatgtggtgctgcacgcctgtggttccagctacaggtggccaaagcgcaagaatcgcttgaacctgggaggtagag

SEQ ID NO: 105199 - DNA, 120 bp, synthetic construct
  source 1..120: mol_type = other DNA
aaacatcacaatataattagaacataaagaagcctatataactatcttttttttttttgagacggagtctcactctgtcatccaggctggagcgcagtggcacgatctcggctcactgca

SEQ ID NO: 105200 - DNA, 120 bp, synthetic construct
  source 1..120: mol_type = other DNA
ggggggcagaggttgcagtaagccaagatcgcgccattgcatgccagcctgggcaacaagagcaaaattccgtctcaaaaaaaaaaaaaaagtactaaataaaaccaatgcaaaaggtat

SEQ ID NO: 105201 - DNA, 120 bp, synthetic construct
  source 1..120: mol_type = other DNA
tagagctgggatatctctgggacactttcttcctgccgttggactccaactaaaacatcagctctaccaattcttggtaataaatctctctatgtatacacacatacatcctattggttc

SEQ ID NO: 105202 - DNA, 120 bp, synthetic construct
  source 1..120: mol_type = other DNA
aggcagaggttgcagtgagccgagattgcgccactgcactccagtctgggcaacagagcaagactctgtttcaaaaaagaaaagaaaagaaaagaaaagaaaagaaaagaaaagaaaaga

SEQ ID NO: 105203 - DNA, 120 bp, synthetic construct
  source 1..120: mol_type = other DNA
attaaggataaataaggtcgtaagggtggggctctgatctgacaggattagcattctataagaacagacaccagagtgctcattcaatctctatctctctttctccaccagtgctcaatc

SEQ ID NO: 105204 - DNA, 120 bp, synthetic construct
  source 1..120: mol_type = other DNA
ctcaatctgaaaaaaagactgataaaaatgaacaaggctcaatgatccgtgagacaatatcaaaactccaacgtttatgtaattgtaattcaagaagagaagagagagaatgaggcagaa

SEQ ID NO: 105205 - DNA, 120 bp, synthetic construct
  source 1..120: mol_type = other DNA
actgcactacagcctgggcgacagagcaagactctgtctcaggaaaaaaaaaaaaaaaaaaaaaaaaaaaaaaaacttataagaactgagtttattttacatttcattcaatgcaaaatt

SEQ ID NO: 105206 - DNA, 120 bp, synthetic construct
  source 1..120: mol_type = other DNA
cccaggcatagctggggagaagacaaagttggagaatatgatccttgtctgtggaacatatactccagtatgaaagaataactctcacaaccctaatcattcctggcaactaaaaagctt

SEQ ID NO: 105207 - DNA, 120 bp, synthetic construct
  source 1..120: mol_type = other DNA
tacatagcatgttaaataatttttttaaggccaagtaaggtagctcatgcctataatcccagtactttaggaggccaatgcaaaaggatcacttgaggccaggagttcaagaccagcctg

SEQ ID NO: 105208 - DNA, 120 bp, synthetic construct; identical to SEQ ID NO: 13261
  source 1..120: mol_type = other DNA

SEQ ID NO: 105209 - DNA, 120 bp, synthetic construct
  source 1..120: mol_type = other DNA
ccaggtttaagtgattctcctgcctcagcttcctgagtagctgggattacaggcagctgtcatcatgcccagctaatttttgctttctttttttttttttttttgagacggagtcttgcc

SEQ ID NO: 105210 - DNA, 120 bp, synthetic construct
  source 1..120: mol_type = other DNA
cagcacctgttgtttcctgactttttaatgattgccattctaactggtgtgagatggtatctcattgtggttttgatttgcatttctctgatggccagtgatggtgagcatttttttgtg

SEQ ID NO: 105211 - DNA, 120 bp, synthetic construct
  source 1..120: mol_type = other DNA
gacccggcccctctgctgctccgggtgccctgtttactgtccgggcgctgccaatgtgaaagccttttctttctttctttctttctttctttctttctttctttctttctttctttctct

SEQ ID NO: 105212 - DNA, 120 bp, synthetic construct; identical to SEQ ID NO: 23718
  source 1..120: mol_type = other DNA

SEQ ID NO: 105213 - DNA, 120 bp, synthetic construct; identical to SEQ ID NO: 23719
  source 1..120: mol_type = other DNA

SEQ ID NO: 105214 - DNA, 120 bp, synthetic construct; identical to SEQ ID NO: 23720
  source 1..120: mol_type = other DNA

SEQ ID NO: 105215 - DNA, 120 bp, synthetic construct
  source 1..120: mol_type = other DNA
agcagagcttgcagtgagccgagattgcaccactgcagtccgcagtccggcctgggggacagagcgagactccttctcaaaaaaaaaaaaaaaaaaaaaaaaaaaaaaataaaaaaaaag

SEQ ID NO: 105216 - DNA, 120 bp, synthetic construct
  source 1..120: mol_type = other DNA
tgacaagttagagttgttcttttgtgtgtgtgtgtgtgtgtgtgtgtgtgtgtgtgtgtgagaaaaggtctcatttgtcacccaggagtgcattggtgcaatcacaactcactgcgatct

SEQ ID NO: 105217 - DNA, 120 bp, synthetic construct; identical to SEQ ID NO: 23723
  source 1..120: mol_type = other DNA

SEQ ID NO: 105218 - DNA, 120 bp, synthetic construct; identical to SEQ ID NO: 23724
  source 1..120: mol_type = other DNA

SEQ ID NO: 105219 - DNA, 120 bp, synthetic construct; identical to SEQ ID NO: 23725
  source 1..120: mol_type = other DNA

SEQ ID NO: 105220 - DNA, 120 bp, synthetic construct
  source 1..120: mol_type = other DNA
cagaccttgaatggtttttttttttttttttttgagagggagtctcgctctgtcatccaggctggagtgcaggctcagctcactgcagcctctgcctcctgggttccagcaattctctgt

SEQ ID NO: 105221 - DNA, 120 bp, synthetic construct; identical to SEQ ID NO: 23726
  source 1..120: mol_type = other DNA

SEQ ID NO: 105222 - DNA, 120 bp, synthetic construct
  source 1..120: mol_type = other DNA
cccagctacttgggagaattgcttgaacccaggaggctgcagtgagcagagatcttcccattgcactccagcctgggtgacagagactctgtctcaaaaaaaacaaacaaacaacaaaac

SEQ ID NO: 105223 - DNA, 120 bp, synthetic construct; identical to SEQ ID NO: 23728
  source 1..120: mol_type = other DNA

SEQ ID NO: 105224 - DNA, 120 bp, synthetic construct; identical to SEQ ID NO: 23729
  source 1..120: mol_type = other DNA

SEQ ID NO: 105225 - DNA, 120 bp, synthetic construct
  source 1..120: mol_type = other DNA
gacttcatgccctttgtaggcacatggatgaagctggaaacaatgattctcagcaaactatcagaagattggaaaaccaaacaccacatgttctcactcataagtgggagatgaacaatg

SEQ ID NO: 105226 - DNA, 120 bp, synthetic construct; identical to SEQ ID NO: 20057
  source 1..120: mol_type = other DNA

SEQ ID NO: 105227 - DNA, 120 bp, synthetic construct
  source 1..120: mol_type = other DNA
atggcaggcagctctcactccagatctgagctgtccgcagaagcagctggaggccaggggagaaactccagaaggagaggtgagttcaatcttatggaattcatttttacaaaaggcgta

SEQ ID NO: 105228 - DNA, 120 bp, synthetic construct; identical to SEQ ID NO: 20058
  source 1..120: mol_type = other DNA

SEQ ID NO: 105229 - DNA, 120 bp, synthetic construct; identical to SEQ ID NO: 20059
  source 1..120: mol_type = other DNA

SEQ ID NO: 105230 - DNA, 120 bp, synthetic construct; identical to SEQ ID NO: 20060
  source 1..120: mol_type = other DNA

SEQ ID NO: 105231 - DNA, 120 bp, synthetic construct; identical to SEQ ID NO: 20061
  source 1..120: mol_type = other DNA

SEQ ID NO: 105232 - DNA, 120 bp, synthetic construct; identical to SEQ ID NO: 20062
  source 1..120: mol_type = other DNA

SEQ ID NO: 105233 - DNA, 120 bp, synthetic construct; identical to SEQ ID NO: 20063
  source 1..120: mol_type = other DNA

SEQ ID NO: 105234 - DNA, 120 bp, synthetic construct; identical to SEQ ID NO: 20064
  source 1..120: mol_type = other DNA

SEQ ID NO: 105235 - DNA, 120 bp, synthetic construct; identical to SEQ ID NO: 20065
  source 1..120: mol_type = other DNA

SEQ ID NO: 105236 - DNA, 120 bp, synthetic construct; identical to SEQ ID NO: 20066
  source 1..120: mol_type = other DNA

SEQ ID NO: 105237 - DNA, 120 bp, synthetic construct; identical to SEQ ID NO: 20067
  source 1..120: mol_type = other DNA

SEQ ID NO: 105238 - DNA, 120 bp, synthetic construct; identical to SEQ ID NO: 20068
  source 1..120: mol_type = other DNA

SEQ ID NO: 105239 - DNA, 120 bp, synthetic construct; identical to SEQ ID NO: 20069
  source 1..120: mol_type = other DNA

SEQ ID NO: 105240 - DNA, 120 bp, synthetic construct
  source 1..120: mol_type = other DNA
cagttataacattggcaaactgcatagcttctctgtgtctcagtttcttcatctgtcaaatgaggataagtcttcacaggcatgagatgagggttaagggtagagtagacatgagcactt

SEQ ID NO: 105241 - DNA, 120 bp, synthetic construct; identical to SEQ ID NO: 21888
  source 1..120: mol_type = other DNA

SEQ ID NO: 105242 - DNA, 120 bp, synthetic construct
  source 1..120: mol_type = other DNA
ctgcagtgagctgtgatggtgccactgcactccagcctgggtaacagagtaaggccctgactcaaaaaaacaaaaacaaaaacaaacaaacaaacaaatgaaaaacccaaaccaaacata

SEQ ID NO: 105243 - DNA, 120 bp, synthetic construct
  source 1..120: mol_type = other DNA
ccctctgcctggctgcccagtctggaaagtgaggagtgtctctgcccggccaccatcccatctaggaagtgaggagcgcctcttcccggccgccatcacatctgggaagtgaggagcgtc

SEQ ID NO: 105244 - DNA, 120 bp, synthetic construct
  source 1..120: mol_type = other DNA
cagagacctttgttcacttgtttatctgctgaccttccctccactattgtcctgtgaccctgccaaatccccctctgcgagaaacacccaagaatgatcaattaaaaaaaaaaaataata

SEQ ID NO: 105245 - DNA, 120 bp, synthetic construct; identical to SEQ ID NO: 21890
  source 1..120: mol_type = other DNA

SEQ ID NO: 105246 - DNA, 120 bp, synthetic construct
  source 1..120: mol_type = other DNA
ctgacttccacaacggttgaactagtttacagtcccaccaacagtgtaaaagtgttcctatttctccacatcctctccagcatctgttgtttcctgactttttaatgatcaccattctaa

SEQ ID NO: 105247 - DNA, 120 bp, synthetic construct
  source 1..120: mol_type = other DNA
gatgcctccagctttgttcttttggcttaggattgccttggcgacgcgggctcttttttggttccatatgaactttaaagtagttttttccaattctgtgaagaaaggcattggtagctt

SEQ ID NO: 105248 - DNA, 120 bp, synthetic construct
  source 1..120: mol_type = other DNA
tcgttttgccagtattttattgaggatttttgcatcaatgttcatcaaggatattggtctaaaattctcttttttggttgtgtctctgcccggctttggtatcagaatgatgctagcctc

SEQ ID NO: 105249 - DNA, 120 bp, synthetic construct
  source 1..120: mol_type = other DNA
agtcattcaggagcaggttgttcagtttccatgtagttgagcggctttgagtgaaattcttaattctgagttctactttgtttgcactgtggtctgagagatagtttgttataatttctg

SEQ ID NO: 105250 - DNA, 120 bp, synthetic construct
  source 1..120: mol_type = other DNA
tggcccccactctcttctggcttgtagggtttctgccgagagatccgctgttagtctgatgggcttccctttgagggtaacctgacctttctctctggctgcccttaacattttttcctt

SEQ ID NO: 105251 - DNA, 120 bp, synthetic construct
  source 1..120: mol_type = other DNA
agttttccttctaacagacaggaccctcagatgcaggtctgttggaataccctgccgtgtgagatgtcagtgtgcccctgctgggggtgcctcccagttaggctgctcaggggtcagggg

SEQ ID NO: 105252 - DNA, 120 bp, synthetic construct; identical to SEQ ID NO: 21891
  source 1..120: mol_type = other DNA

SEQ ID NO: 105253 - DNA, 120 bp, synthetic construct; identical to SEQ ID NO: 19468
  source 1..120: mol_type = other DNA

SEQ ID NO: 105254 - DNA, 120 bp, synthetic construct; identical to SEQ ID NO: 4420
  source 1..120: mol_type = other DNA

SEQ ID NO: 105255 - DNA, 120 bp, synthetic construct; identical to SEQ ID NO: 19470
  source 1..120: mol_type = other DNA

SEQ ID NO: 105256 - DNA, 120 bp, synthetic construct; identical to SEQ ID NO: 32036
  source 1..120: mol_type = other DNA

SEQ ID NO: 105257 - DNA, 120 bp, synthetic construct
  source 1..120: mol_type = other DNA
ggatgaaggaagatctaccaagcaaatggaaaacaaaaaaaaaagcaggggttgcaattctagtctctgataaaacagactttaaaccacaaagaccaaaagagacaaacagggccatta

SEQ ID NO: 105258 - DNA, 120 bp, synthetic construct
  source 1..120: mol_type = other DNA
aaagagcctccaacttggaagcaggtagggtggacttcaagaatttaattttgaaaatggctcaatcggctcgattccttagttttgatcaatacatctttctctctctctctctctccc

SEQ ID NO: 105259 - DNA, 120 bp, synthetic construct
  source 1..120: mol_type = other DNA
tcggcctcccaaagtgctgggattacaggcatgagccaccgcgcccggccctgaattcagtttttataaaatcattggcattcttaatttcactaactcgaaaatataacttaaaacata

SEQ ID NO: 105260 - DNA, 120 bp, synthetic construct; identical to SEQ ID NO: 3540
  source 1..120: mol_type = other DNA

SEQ ID NO: 105261 - DNA, 120 bp, synthetic construct; identical to SEQ ID NO: 13205
  source 1..120: mol_type = other DNA

SEQ ID NO: 105262 - DNA, 120 bp, synthetic construct
  source 1..120: mol_type = other DNA
ggtatctcattgtggttttgatttgcatttctctgatggccagtgatggtgagcattttttcatgtgttttttggctgcacaaatgtcttcttttgagaagtgtctgttcatgtccttag

SEQ ID NO: 105263 - DNA, 120 bp, synthetic construct
  source 1..120: mol_type = other DNA
acaagcagagagccaaatcatgaatgaactcccaatcacaactgctacagagaataaaatacctagcaatacagctaacaagggaagtgaaggacctcttcaagaactacaaaccttctc

SEQ ID NO: 105264 - DNA, 120 bp, synthetic construct
  source 1..120: mol_type = other DNA
caccccgtctgggaagtgaggagtgtctccgcccggcagccaccccgtccgggagggagatgggggggtcagaccctcgcctggccagccgccccatccgggagggaggtggggggatca

SEQ ID NO: 105265 - DNA, 120 bp, synthetic construct
  source 1..120: mol_type = other DNA
gggaagtgaggagcccctctgcccggccagctgccccgtccgggaggtgaggggagcctctgccctgccgcccctactgggaagtgaggagcccctctgcccggccagctgccccgtccg

SEQ ID NO: 105266 - DNA, 120 bp, synthetic construct; identical to SEQ ID NO: 15334
  source 1..120: mol_type = other DNA

SEQ ID NO: 105267 - DNA, 120 bp, synthetic construct; identical to SEQ ID NO: 15335
  source 1..120: mol_type = other DNA

SEQ ID NO: 105268 - DNA, 120 bp, synthetic construct
  source 1..120: mol_type = other DNA
acagtcccaccaacagtgtaaaagtgttcctatttctccacatcctctccagcacctgttgtttcctgactttttaatgatcgccattctaactggtgtgagatggtatctcattgtagt

SEQ ID NO: 105269 - DNA, 120 bp, synthetic construct
  source 1..120: mol_type = other DNA
ggattgacttggcgatgcgggctcttttttggttccgtatgaactttaaagtagttttttacaattctgtgaagaaaggcattggtagcttgatggggatggcattgaatctgtaaatta

SEQ ID NO: 105270 - DNA, 120 bp, synthetic construct
  source 1..120: mol_type = other DNA
cagtattttattgagaatttttgcatcaatgttcatcaaggatattggtctaaaattctttttttgttatgtctctgtcaggctttggtatcagaatgatgctggcctcataaaatgagt

SEQ ID NO: 105271 - DNA, 120 bp, synthetic construct
  source 1..120: mol_type = other DNA
gtgagattcttaaccctgagttctagtttgattgcactgtggtctgagagacagtttgttataatttctgttcttttacatttgctgaggagagctttacttccaagtatgtggtcaatt

SEQ ID NO: 105272 - DNA, 120 bp, synthetic construct
  source 1..120: mol_type = other DNA
gtattttatttctccttcgcttatgaagcttggtttggctggatatgaaattctgggttgaaaattcttgtctttaagaatgttgaatattggcccccactctcttctggcttgtagggt

SEQ ID NO: 105273 - DNA, 120 bp, synthetic construct
  source 1..120: mol_type = other DNA
tgtgcccctgctggggggtgcctcccagttaggctgctcaggggtcaggggccagggacccacttgaggaggcagtctgcccgttctcagatctccagctgcgtgctgggagaaccactg

SEQ ID NO: 105274 - DNA, 120 bp, synthetic construct
  source 1..120: mol_type = other DNA
gaattgaacaatgagaacacttggacacagggcggggaacatcacacaccagggcccgtcagggggtcggggcctgggggagggatagcattaggagaaatacctaatgtaaatgacgag

SEQ ID NO: 105275 - DNA, 120 bp, synthetic construct; identical to SEQ ID NO: 9100
  source 1..120: mol_type = other DNA

SEQ ID NO: 105276 - DNA, 120 bp, synthetic construct; identical to SEQ ID NO: 9101
  source 1..120: mol_type = other DNA

SEQ ID NO: 105277 - DNA, 120 bp, synthetic construct
  source 1..120: mol_type = other DNA
gcacagctagttttttaatttttatttttattagagagaatcttgctgtgttgtccaggctggtctccaattcctggccttctgccttggtctctcgaagcgcagggattataggtgtgt

SEQ ID NO: 105278 - DNA, 120 bp, synthetic construct; identical to SEQ ID NO: 15662
  source 1..120: mol_type = other DNA

SEQ ID NO: 105279 - DNA, 120 bp, synthetic construct; identical to SEQ ID NO: 15663
  source 1..120: mol_type = other DNA

SEQ ID NO: 105280 - DNA, 120 bp, synthetic construct; identical to SEQ ID NO: 33799
  source 1..120: mol_type = other DNA

SEQ ID NO: 105281 - DNA, 120 bp, synthetic construct
  source 1..120: mol_type = other DNA
atactttcctcttcctctttgaatgaggggcaacattcctagtttttttttgggggggggggtgtttttgtttattttttgttttgtttttgttgagacagggtctcaccgtgttgccct

SEQ ID NO: 105282 - DNA, 120 bp, synthetic construct
  source 1..120: mol_type = other DNA
agagttccaagatggctgtgccatgtattttatccaggttttatagctgtgctcagtgggagaaaatgaggttcgtgcatgtttactccttcttatcttgaaccagaacttctaggcaca

SEQ ID NO: 105283 - DNA, 120 bp, synthetic construct
  source 1..120: mol_type = other DNA
taacccccatccagggagatcagtgtcctctcagacacttccaggtaagcatgatctcctggaagacatgagaagtctcttaaattgtctaattattacattggagctacataataactc

SEQ ID NO: 105284 - DNA, 120 bp, synthetic construct
  source 1..120: mol_type = other DNA
aaaaaaaataaataaataaaaagaattccttcattattttgtcatgctttaaggcccaggacaggcctaggcaaaagttttgatggccttttgttacatcccagcctttgtataagggca

SEQ ID NO: 105285 - DNA, 120 bp, synthetic construct
  source 1..120: mol_type = other DNA
cgagattgcgccactggagtccagcctggaccacagagtgaaactccgtctcaaaaaaaaaaaaaaagaaagaaagaaagaaaagaaggttctctctttgggcactccttttcaacatat

SEQ ID NO: 105286 - DNA, 120 bp, synthetic construct
  source 1..120: mol_type = other DNA
tcgtgcctggccctcttttcattttagagataggaatctcattctcttccagaggctggagtgcaaaggcatgaacataactcattgcagtctccaactcctgggctaaagggatgttcc

SEQ ID NO: 105287 - DNA, 120 bp, synthetic construct
  source 1..120: mol_type = other DNA
aacctggaactcttgggatcctcccgcctcgacctcccaaagtgctggggctaccggcttgagccactgtgccaggcgaatggctgttcctatatacacagttgacccttgaataacatg

SEQ ID NO: 105288 - DNA, 120 bp, synthetic construct; identical to SEQ ID NO: 1038
  source 1..120: mol_type = other DNA

SEQ ID NO: 105289 - DNA, 120 bp, synthetic construct
  source 1..120: mol_type = other DNA
caactccactcatactcacctccctcgccccccccccaccccgcccagaacactttggtagctgcctttgcttaaaaaaaaaaaaattctaaagttcttacaaatcgttagtatggctta

SEQ ID NO: 105290 - DNA, 120 bp, synthetic construct
  source 1..120: mol_type = other DNA
tagtttaagattacagtaagatgcaattcccaaagagtgaaatataaggctgggcgtggtggatcacacctgtaatcctaacactttgggaggctgaggcgggtggagcacctgagatca

SEQ ID NO: 105291 - DNA, 120 bp, synthetic construct
  source 1..120: mol_type = other DNA
ttttttgagagagagagtcttgctctgtcgcccaggctggagtgccttggcatagtctcagttctctgcaatctctgcctcccggtctcaggtgattctcctgcctcagcctcccaagta

SEQ ID NO: 105292 - DNA, 120 bp, synthetic construct
  source 1..120: mol_type = other DNA
ttaagttgacagaagaggtcaacaaaatcgtgaagtgagtgttctggggacctgagagtcaagggactggattctgtacaatgtctctgcatcatcatagtaaactttctacacatgctt

SEQ ID NO: 105293 - DNA, 120 bp, synthetic construct
  source 1..120: mol_type = other DNA
gagaaggcataccgtactttgtattctttttaaagtccctgttaggtggtggtgtagctggaagtgtatagtattgaggatgtaaagtttcccctaaaaaatttttggtatttggcgaat

SEQ ID NO: 105294 - DNA, 120 bp, synthetic construct
  source 1..120: mol_type = other DNA
tgcagtgagccgagattgcgccattgcactcacgcctgggcgacagagcaagactctgtctcaaaaaaaaaaaaaaaaaaaaaaaattaatgacctctgcccctaactgaacaaagccct

SEQ ID NO: 105295 - DNA, 120 bp, synthetic construct; identical to SEQ ID NO: 21183
  source 1..120: mol_type = other DNA

SEQ ID NO: 105296 - DNA, 120 bp, synthetic construct; identical to SEQ ID NO: 1081
  source 1..120: mol_type = other DNA

SEQ ID NO: 105297 - DNA, 120 bp, synthetic construct
  source 1..120: mol_type = other DNA
ctaaatattgttgacgataagaggattttaaaaaaaattcttttaaaacagaagcttatatacaacttagaatctaaaaccaatagatttatgggaaaccttaaaactgaaccacaacaa

SEQ ID NO: 105298 - DNA, 120 bp, synthetic construct
  source 1..120: mol_type = other DNA
atatgtgttaaggtactaagtttgtagtaatttgttacgcagcagattgtaaataacacgcagataaaaccagacagaacagaaaaataaaatgactttaactctagaaagtttccccat

SEQ ID NO: 105299 - DNA, 120 bp, synthetic construct
  source 1..120: mol_type = other DNA
cctgccagtctggagatgatcaaaaagcctataacaggcttggcctattttcctattgggttgctgggctttttttctttatttacttgtagagagttttagacctctgtgtatgtatgg

SEQ ID NO: 105300 - DNA, 120 bp, synthetic construct
  source 1..120: mol_type = other DNA
tataaggagttcgaggctgcagtcgaacttctggtcgaaatcctggtcacgccactgcatttcagcctgggcaacagagtaaaaccccatctttaaaaaaaattaagaaataaaaataat

SEQ ID NO: 105301 - DNA, 120 bp, synthetic construct
  source 1..120: mol_type = other DNA
cagtgagccgagatggtgccattgcactccagcccgagcaacaagatcaaaactcttatctcaaaaaaaaaaaaaaaagtaaactacaagatagttcaaaagaaattacacagaattcag

SEQ ID NO: 105302 - DNA, 120 bp, synthetic construct
  source 1..120: mol_type = other DNA
tcttgctttttataggggcagttttactcttaggtgactagaagtagatttcttcttttttataactataaaattaggtttacttttgttagaataaattaaagacagtgaatttgtaat

SEQ ID NO: 105303 - DNA, 120 bp, synthetic construct
  source 1..120: mol_type = other DNA
gcgtgcatctgtagtctcagctacttgggaggctgaggcaggagaatcgcttgaatctgggaggaggaggttgcagtgagccatgatcggaccactgcactccagccagggtgacagagc

SEQ ID NO: 105304 - DNA, 120 bp, synthetic construct; identical to SEQ ID NO: 1082
  source 1..120: mol_type = other DNA

SEQ ID NO: 105305 - DNA, 120 bp, synthetic construct
  source 1..120: mol_type = other DNA
tgagaatttcttgatgtgtctcatctactttttctcctcttgtattagcttgttgcctttctacttcacccctcttccttccaacccaaatagcttaggacagtggagtcctatagccca

SEQ ID NO: 105306 - DNA, 120 bp, synthetic construct
  source 1..120: mol_type = other DNA
ctagcccagtaaacctaaatgacttatttaaatgttatattttctttttttttttgagatagtctcgctctgtcactaggtttggagtgcagtggtgcaatctcagctcactgcaatctc

SEQ ID NO: 105307 - DNA, 120 bp, synthetic construct
  source 1..120: mol_type = other DNA
tcccaggttcacgccattctcctgcctcagcctcccaagtagctgggactacaggtgcccgccaacatgcctggctaatttctttgtatttttagtagagacaggttttaccatgttatc

SEQ ID NO: 105308 - DNA, 120 bp, synthetic construct; identical to SEQ ID NO: 1083
  source 1..120: mol_type = other DNA

SEQ ID NO: 105309 - DNA, 120 bp, synthetic construct
  source 1..120: mol_type = other DNA
gagtctgtgtcttccgccagcacatacacacagtctttagagcagctgcttaattctcccgaaactaaacttggtctgttactctgtctaaatatgttcttctttaatttcactgtctta

SEQ ID NO: 105310 - DNA, 120 bp, synthetic construct; identical to SEQ ID NO: 1084
  source 1..120: mol_type = other DNA

SEQ ID NO: 105311 - DNA, 120 bp, synthetic construct
  source 1..120: mol_type = other DNA
agaacacgaaacaaatctggtgaataccagaattaggacatgtgtcagccaggcgcagtggctcatgcctgtaatcccagcactttgggaggccgaggcgggtggatcacgaggtcagga

SEQ ID NO: 105312 - DNA, 120 bp, synthetic construct
  source 1..120: mol_type = other DNA
caaggtggctagtccaaatcaagacatgctaacagtaagtgtaaacacacacactggattttgaagacttggtgaaaaacaataatgtaaaatatcattaatttttatattaattagaag

SEQ ID NO: 105313 - DNA, 120 bp, synthetic construct
  source 1..120: mol_type = other DNA
actggtcactaagggtgagatttcacttccctaacctgttcttgaaggccttcaacagatcccacttcttgttccactctagtagccacacttctaaaaatgatctgtgcaacatatata

SEQ ID NO: 105314 - DNA, 120 bp, synthetic construct
  source 1..120: mol_type = other DNA
gccagcatggtgaaaccctgtttctactgaaaatacaaaaatgagccgggcgtggtggtgcgtgcctataattagcagctactcaggaggttgaggcaggaggatcgcttgagcacagga

SEQ ID NO: 105315 - DNA, 120 bp, synthetic construct; identical to SEQ ID NO: 21086
  source 1..120: mol_type = other DNA

SEQ ID NO: 105316 - DNA, 120 bp, synthetic construct; identical to SEQ ID NO: 66727
  source 1..120: mol_type = other DNA

SEQ ID NO: 105317 - DNA, 120 bp, synthetic construct; identical to SEQ ID NO: 66726
  source 1..120: mol_type = other DNA

SEQ ID NO: 105318 - DNA, 120 bp, synthetic construct
  source 1..120: mol_type = other DNA
aggcatgaaagatcttttggttgttttctggtaaaactatcataaaacagttgaagcaaatgactattggtagttttgtcattaacaggggtgccttctagttgttttgtttcctggtaa

SEQ ID NO: 105319 - DNA, 120 bp, synthetic construct
  source 1..120: mol_type = other DNA
ttgaataccctacaaaactaggacagtgtcctagaatttgtaatggcataaaccagaaacaacataaataaaggaacagaatttacagtacttccatgtgatgggataccatgaactcat

SEQ ID NO: 105320 - DNA, 120 bp, synthetic construct
  source 1..120: mol_type = other DNA
ttttattctaaatctttcctgggctaaaaagagagagagagaaaaaaaagggcactactactaccatttcagaagtctgtcgtacataaaaggaacaattttgttatttctggctgcctg

SEQ ID NO: 105321 - DNA, 120 bp, synthetic construct; identical to SEQ ID NO: 66722
  source 1..120: mol_type = other DNA

SEQ ID NO: 105322 - DNA, 120 bp, synthetic construct
  source 1..120: mol_type = other DNA
tgtccaatgcacttaaactcttaatttttatactatctacactgttaggtaaacaatattagctcctatcttaaaatgagagaaagggatgcagggaataacagctggaatttgaaccac

SEQ ID NO: 105323 - DNA, 120 bp, synthetic construct; identical to SEQ ID NO: 1085
  source 1..120: mol_type = other DNA

SEQ ID NO: 105324 - DNA, 120 bp, synthetic construct
  source 1..120: mol_type = other DNA
gtatggcaaggggacattttggtcttttttttttttttttttaaggcagggtcttgttgtgcaggctggagtacagtggtatgatcacagcttactgcggcttcgacctcctagctcaag

SEQ ID NO: 105325 - DNA, 120 bp, synthetic construct
  source 1..120: mol_type = other DNA
ccatgataattgtagaggaatgttaacttggaaagcttttccaagtgaacaaaataagttactgatgttttctaactgattttcaatggtgacagaaatacagatgctacaatacaccag

SEQ ID NO: 105326 - DNA, 120 bp, synthetic construct
  source 1..120: mol_type = other DNA
cagtacttgagctaaaagttttatttatttatttattatttcttttaaaagatggggtttctctgctggccaggctagagtgcagtggcacaatcttggctcactgcaacctctgcttcc

SEQ ID NO: 105327 - DNA, 120 bp, synthetic construct
  source 1..120: mol_type = other DNA
gacctcctgaccttgtgatctgcccgcctcggcctcctaacgtgctgggattacaggtgtgagccaccgcacccggcctctacactcaacttttaaatgcttctaatgataccactctaa

SEQ ID NO: 105328 - DNA, 120 bp, synthetic construct
  source 1..120: mol_type = other DNA
ataacggctgataggagctgtggtgagaattacatttctcctttaattgtaagtggctggtatatactactccaaggagaaatacctgtttcatttaaggaaaagttaagttagaaaaaa

SEQ ID NO: 105329 - DNA, 120 bp, synthetic construct
  source 1..120: mol_type = other DNA
tgcgccactgcgctccagcctgggtgacagagcgagactctgtctcaaaaacaagaaaagaaaagaaaagaaaagaaaaggttatgcgcttctggaagcatgaagaggtataatctttct

SEQ ID NO: 105330 - DNA, 120 bp, synthetic construct
  source 1..120: mol_type = other DNA
tgcccggctaatttttttgtagttttagtagagacagggtttcatcatgttggtcaggctggtctcaaactcctgacctcaggtgatccacctgccttggcctcccaaagtgctgggatt

SEQ ID NO: 105331 - DNA, 120 bp, synthetic construct
  source 1..120: mol_type = other DNA
gagccaccatgcccagctggaaataattcttaaaagctgtttaaaggaggattctgatgagccaggtttagaaatcagtgtatcagatcagagaataagagcttgtccctgttctcctat

SEQ ID NO: 105332 - DNA, 120 bp, synthetic construct
  source 1..120: mol_type = other DNA
attaatcaaagttattataagctttggtgtatagttaggctgttggccaaagctcacattgctcttttattccatagcccactttttttgtgggagttaggctttcagtccttaaagtga

SEQ ID NO: 105333 - DNA, 120 bp, synthetic construct
  source 1..120: mol_type = other DNA
ccaggtacaggcgtggtggctcacacctgtaatcccaacactctgtctgggaggccaaggtgggctgatcacttgaggtcaggagttcgagaccagcctggccaacatggtgaaacacag

SEQ ID NO: 105334 - DNA, 120 bp, synthetic construct
  source 1..120: mol_type = other DNA
cattcattacttttcaagatagcccagtgcatctttaggtggtttggctcttggtacttccttatatagaataaaaatattcttcaagccttctacctgttggtcttgtttcttcttttg

SEQ ID NO: 105335 - DNA, 120 bp, synthetic construct
  source 1..120: mol_type = other DNA
cttttttttttttttttttgagatggagtctcgctctgttgccaggctgcagtgctgcagtgctgcagtggcacgatctcggctcactgcaacctccgcctcctggtttcaagcaattct

SEQ ID NO: 105336 - DNA, 120 bp, synthetic construct
  source 1..120: mol_type = other DNA
cttgagcccaggagttcgaggatgcagtgagctatgatcatgccactgcactccagccacagcacctcccaaaactacatatcaaaaaattgtaggctgtgcgcagtagctcacacctat

SEQ ID NO: 105337 - DNA, 120 bp, synthetic construct
  source 1..120: mol_type = other DNA
cgtctcggcctctcaaagtgctgggattacaggcagtgagccaccatgccctgcctaatataaatctttttatttttatttgagacggagtctcgctctgtcaccaggctggagtgcagt

SEQ ID NO: 105338 - DNA, 120 bp, synthetic construct
  source 1..120: mol_type = other DNA
ctcctgggtgcaagtgattctcctgcctcagcctcccgagtagctgggactacaggcccgtgctaccaagcccagctaattttttgtatttttaatagagatggggtttcaccatgttgg

SEQ ID NO: 105339 - DNA, 120 bp, synthetic construct; identical to SEQ ID NO: 1086
  source 1..120: mol_type = other DNA

SEQ ID NO: 105340 - DNA, 120 bp, synthetic construct
  source 1..120: mol_type = other DNA
tctgtctccaaaaacaaaaacaaaaaaactcagctctacatacatgagaaaatgagtatgtaatatataaatttttttggtattattgtaaaagtaattttagcttcatggatcccctga

SEQ ID NO: 105341 - DNA, 120 bp, synthetic construct
  source 1..120: mol_type = other DNA
gcctcagcctcccaaagtgctgggattacaggcatgagccaccgcgcccggctggtctcgatctcttgacctcttgatctgtctaccttggcctcccaaagtactggaaggtctcaatct

SEQ ID NO: 105342 - DNA, 120 bp, synthetic construct
  source 1..120: mol_type = other DNA
caaaaaaaaaaaaaaaaaaaaaaaaaaaaaattagccaggtgtggtgtcgggcacctgtagttccacctattcaggaggcagagacaagagaatcacttgaacccaggaggcagaggttg

SEQ ID NO: 105343 - DNA, 120 bp, synthetic construct; identical to SEQ ID NO: 1087
  source 1..120: mol_type = other DNA

SEQ ID NO: 105344 - DNA, 120 bp, synthetic construct
  source 1..120: mol_type = other DNA
gtgccccgcaggacttaaatttcttttatttaggtagaacagttataaaacgaaatttttaccaggatcagttgaatttataatgggaaaattggggagataactatgataaatgtgtat

SEQ ID NO: 105345 - DNA, 120 bp, synthetic construct
  source 1..120: mol_type = other DNA
gtcttcaaaatctgcattttggtcataccaccgaaaccaccataccacccttcttattcttccacctcactgagggcctacatacccttactttcagaaatatacttctccaccatatga

SEQ ID NO: 105346 - DNA, 120 bp, synthetic construct
  source 1..120: mol_type = other DNA
tccagatttttgaagctgaaaaagcattgaagatgcttccaaagataaatattactgctaagtttttctccccagtaataagcagctggattttaaatattagtctaaaacatgaggtct

SEQ ID NO: 105347 - DNA, 120 bp, synthetic construct
  source 1..120: mol_type = other DNA
gtaccaatgtcaaaattcctgattttgatactgtgctttggtcaggttaaacaggttgagtatcccttatccaaaatgcttgagaccagaagtatttcagattttgaactttttcagact

SEQ ID NO: 105348 - DNA, 120 bp, synthetic construct; identical to SEQ ID NO: 21219
  source 1..120: mol_type = other DNA

SEQ ID NO: 105349 - DNA, 120 bp, synthetic construct; identical to SEQ ID NO: 66694
  source 1..120: mol_type = other DNA

SEQ ID NO: 105350 - DNA, 120 bp, synthetic construct
  source 1..120: mol_type = other DNA
aaaaaaagcctgcctccctcttaatttcctgctttaatccactcccagccaggaaatcagaatcaccaagcttctcatccctaggatagagccttagagcatcacatattgtgtcagtta

SEQ ID NO: 105351 - DNA, 120 bp, synthetic construct
  source 1..120: mol_type = other DNA
agtcagctgagattgtgccattgcactccagcctgggcgacagagactccatctcccaaacatcatcatcatcatcatcataaataagctgggtgcagttggtcacaactttaattctat

SEQ ID NO: 105352 - DNA, 120 bp, synthetic construct
  source 1..120: mol_type = other DNA
aagaatcgcttgaacccgggaggcagcagtgggccaagaccgcaccactgcactccagcctgggcaacagaatgattccatctcataaaaaaaaaaaaaaaaaaaaaaaaaaagctgata

SEQ ID NO: 105353 - DNA, 120 bp, synthetic construct
  source 1..120: mol_type = other DNA
cagcacgtaaaagaacaaggcttgttccccccttcctttttttttttgagatggagtcttgctctgtcaccaggctggagtgcggtggctcgatctcagctcactgcaacctctgcctcc

SEQ ID NO: 105354 - DNA, 120 bp, synthetic construct; identical to SEQ ID NO: 66973
  source 1..120: mol_type = other DNA

SEQ ID NO: 105355 - DNA, 120 bp, synthetic construct
  source 1..120: mol_type = other DNA
ttctttcagtactgttattgcagtttttgtttaaatgaatatttaacatttatataaatataaggtaaatattttgcatttgaattgcccttgttgtgcagttttgtttttcctggactg

SEQ ID NO: 105356 - DNA, 120 bp, synthetic construct
  source 1..120: mol_type = other DNA
gaaaaaattatatatttttttctttttttcttttttggagacagagtctcgctctgtcacacaggctggagtgcagtggtgcaatctctgctcaccacaacctctgcctccagggttcaa

SEQ ID NO: 105357 - DNA, 120 bp, synthetic construct
  source 1..120: mol_type = other DNA
ggccggacggcgcaaatgacacggaaagtccccttgttttgagtatgaggtgtttgtcgctgtccctttgtaagggtccagctccactccactcctcatactcacctccctcgcccccat

SEQ ID NO: 105358 - DNA, 120 bp, synthetic construct
  source 1..120: mol_type = other DNA
atgacgcctgagccatcgaggccgccgcagggccaggtcgaggccgccgcctccacagagcgcgccagggagcagcgctcgtcgggagccatgacgcctgagccatcgaggccgccgccg

SEQ ID NO: 105359 - DNA, 120 bp, synthetic construct
  source 1..120: mol_type = other DNA
agcagcgcccgtcgggagccatgacgcctgagccatcaaggcagccgccgggccaggtcgaggccgcggcctcaacagagcgcgccagggagcagcgcccgtcgggagccatgacgcctg

SEQ ID NO: 105360 - DNA, 120 bp, synthetic construct
  source 1..120: mol_type = other DNA
gaacccaggaggtggaggttgcagtacggtgagattgccccactgtactctagcctggatgacagggcaagactccatctcaaaaaaaaaaaaaaaaaaaaaaaaaaaaagactaaactg

SEQ ID NO: 105361 - DNA, 120 bp, synthetic construct
  source 1..120: mol_type = other DNA
aattcatttccacctctcaaggcctctcatattaatccctcctttccacacatatactgccctagctcagaccctctcatacttcttaaactgacacagacaacctcacttggaggctaa

SEQ ID NO: 105362 - DNA, 120 bp, synthetic construct; identical to SEQ ID NO: 21077
  source 1..120: mol_type = other DNA

SEQ ID NO: 105363 - DNA, 120 bp, synthetic construct
  source 1..120: mol_type = other DNA
cactcggctgggctcttggcagcaccctgtgctctgagggtgtcttgcccgccgggcgccgtggctcacgcctgtaatcccaacactttgggaggctgaggcgggcggatcacttgaggt

SEQ ID NO: 105364 - DNA, 120 bp, synthetic construct
  source 1..120: mol_type = other DNA
acctggcccggcggctgcctcgatggctcaggcatcatggctcctgacgggcgctgctccctggcgcgctctgttgaggcggcggcctcgacccggcccggcggcggcctcgatggctca

SEQ ID NO: 105365 - DNA, 120 bp, synthetic construct; identical to SEQ ID NO: 105364
  source 1..120: mol_type = other DNA

SEQ ID NO: 105366 - DNA, 120 bp, synthetic construct; identical to SEQ ID NO: 21078
  source 1..120: mol_type = other DNA

SEQ ID NO: 105367 - DNA, 120 bp, synthetic construct; identical to SEQ ID NO: 2458
  source 1..120: mol_type = other DNA

SEQ ID NO: 105368 - DNA, 120 bp, synthetic construct
  source 1..120: mol_type = other DNA
ttttcttttcttttcttttctttttttttttttttttttttgagacggagtctcgctctatcgtccaggctggagtgtagtggcgcgatctcggctcactgcaaactctgcctcccgggt

SEQ ID NO: 105369 - DNA, 120 bp, synthetic construct
  source 1..120: mol_type = other DNA
tgggattacaggtgtgcgccagcatgcctggctaattttttctatttttagtagagatgggatttcaccatactggtcaggctggtctggaaactaatggtatgtctttaaaacgtcttt

SEQ ID NO: 105370 - DNA, 120 bp, synthetic construct
  source 1..120: mol_type = other DNA
gctccgtggctgacgcctgtaatcccagcattttgggaggtggaggaagtcagattacaaggtcgagagagcgacaccatctggccaacatggtgaaaccccatctctactgaaaataca

SEQ ID NO: 105371 - DNA, 120 bp, synthetic construct
  source 1..120: mol_type = other DNA
ccatccatgtgatagagtatacagctactcaaacatcttatttttgaaattccaagaccccagtgaatgtccaaaaacgatgaatagtaccaaaccaggttgccatcaatcgaaacatgc

SEQ ID NO: 105372 - DNA, 120 bp, synthetic construct
  source 1..120: mol_type = other DNA
cgtgagttatgactgtaacactgcactccagcctgggtgacacagggagatcctctctctaaataataaatacataacatacaaaaaataaattcaagaaagcaagacaagcagacaaca

SEQ ID NO: 105373 - DNA, 120 bp, synthetic construct; identical to SEQ ID NO: 21079
  source 1..120: mol_type = other DNA

SEQ ID NO: 105374 - DNA, 120 bp, synthetic construct
  source 1..120: mol_type = other DNA
tggcctaatttctctgatcgtaatactgtcaaggaacctagaggatatttacttattttagttgttacttgatttgagaaatggaaatttcctgtatttggtactgtaattagtaatttt

SEQ ID NO: 105375 - DNA, 120 bp, synthetic construct
  source 1..120: mol_type = other DNA
aaaattatcactccaacccttaaaaaattctacttctggagaaaacatattacttcaaaggtgttcaaataaaagtgtcttggaattttctggaaatgaaccaaataaagattatatttg

SEQ ID NO: 105376 - DNA, 120 bp, synthetic construct; identical to SEQ ID NO: 21080
  source 1..120: mol_type = other DNA

SEQ ID NO: 105377 - DNA, 120 bp, synthetic construct
  source 1..120: mol_type = other DNA
gctcactgccacctccgcctcccaggttcaagcaattctcctgcctcagccttccgggtagctgggactacaggcacatgttaccgtgtcccgcttatttttgtatttttagcagaaacg

SEQ ID NO: 105378 - DNA, 120 bp, synthetic construct
  source 1..120: mol_type = other DNA
atggaattactttgcatgacagttataaatctcatggatttcaattccaaaaaaaaaaatctgatacaggaaaggtgtaacagtgccttcaagttattaaagaaaatctttaaagaatgc

SEQ ID NO: 105379 - DNA, 120 bp, synthetic construct; identical to SEQ ID NO: 21081
  source 1..120: mol_type = other DNA

SEQ ID NO: 105380 - DNA, 120 bp, synthetic construct
  source 1..120: mol_type = other DNA
catggcagtgggccacagcatccttcaatcttttagttgagcgatacaactccactagccggatgttcacatggacgtcatcaggtcttacataaagttctgactgaatcaagtcaaaaa

SEQ ID NO: 105381 - DNA, 120 bp, synthetic construct; identical to SEQ ID NO: 66700
  source 1..120: mol_type = other DNA

SEQ ID NO: 105382 - DNA, 120 bp, synthetic construct
  source 1..120: mol_type = other DNA
cctgaacccgggaggcggaggttacagtgagtcaaggtcgtgccactgcactccagcctggtgacagagcaagactccctctcaaaaaaaaaaaaacaaaaaagaaagaaagaaagaaag

SEQ ID NO: 105383 - DNA, 120 bp, synthetic construct
  source 1..120: mol_type = other DNA
accttgttagccaggatggtctcgatctcctgacctcgtgatctgccctcctcggcctcccaaagtgttgggattacaggcgtgagccaccgcgcccagcccacacctggctaatttttg

SEQ ID NO: 105384 - DNA, 120 bp, synthetic construct
  source 1..120: mol_type = other DNA
gttatttttcataaaaaatgctattattggccctgtgcggtggctcacacatgtaattccagcactttgggaggctgaggcgggtggatcacctgaggtcaggagttcaagaccagccta

SEQ ID NO: 105385 - DNA, 120 bp, synthetic construct
  source 1..120: mol_type = other DNA
gtgaggtcaggagttcgagaccagcctggccaatatagtaaaaccctgtctctactaaaaatataaaaaaagtttatcggggcatggtggcaggtgcctgtaatcccagctactcaggag

SEQ ID NO: 105386 - DNA, 120 bp, synthetic construct
  source 1..120: mol_type = other DNA
acaaatcatggcaatgcaggctttcgacaagagtgcactcaacatccctgtttcaccagcctcaccagtattgtgtatgcttagttattttccactgtatcaaattgactatttcatttc

SEQ ID NO: 105387 - DNA, 120 bp, synthetic construct
  source 1..120: mol_type = other DNA
gcctcccagagtgctgggatttacaggcgtgagccaccatgcccagcctttttttttttttttttttaatgagcctgcataacttttgaaaggaaaagaaataagcagtcttccaaaaaa

SEQ ID NO: 105388 - DNA, 120 bp, synthetic construct
  source 1..120: mol_type = other DNA
aattctcaagtaactgatagttcttatttttatttattttatttttttttttgagacggagtctcactctgtcgcccaggctggagcacagtggcacgacctcggctcactgcaagctcc

SEQ ID NO: 105389 - DNA, 120 bp, synthetic construct
  source 1..120: mol_type = other DNA
tggcaataggtaaagcacacccacattgaggcacaatattttttaaaagcagagaaagaatgtattgcacatttgcatatgcaaaaaatatttctgaacacccaagaaactcctaacagt

SEQ ID NO: 105390 - DNA, 120 bp, synthetic construct; identical to SEQ ID NO: 1102
  source 1..120: mol_type = other DNA

SEQ ID NO: 105391 - DNA, 120 bp, synthetic construct
  source 1..120: mol_type = other DNA
ttcagagtatggataataggggatagcactggaataaatgggacaaccaggaaattaaagagatcctaatgcaataacctatgaaaaaaaaaaaaaaagcatgatgaatagaatggcgaa

SEQ ID NO: 105392 - DNA, 120 bp, synthetic construct; identical to SEQ ID NO: 21082
  source 1..120: mol_type = other DNA

SEQ ID NO: 105393 - DNA, 120 bp, synthetic construct; identical to SEQ ID NO: 21083
  source 1..120: mol_type = other DNA

SEQ ID NO: 105394 - DNA, 120 bp, synthetic construct
  source 1..120: mol_type = other DNA
gcaaacctaaccctccaacccaaaaaatacagctggacaacaaaatgggtgcttatgtagcaaatgaaaagagtacaggtttaatattctcagtatctacataagacagcagaacgggga

SEQ ID NO: 105395 - DNA, 120 bp, synthetic construct
  source 1..120: mol_type = other DNA
ctgacacagtggctcatatctgtaatcccagcactttgggaggccgaggcgggcagatcacctgagatcaggagttcaagaccatcctggccaacatggtgaaaccccgtctctactaaa

SEQ ID NO: 105396 - DNA, 120 bp, synthetic construct; identical to SEQ ID NO: 21053
  source 1..120: mol_type = other DNA

SEQ ID NO: 105397 - DNA, 120 bp, synthetic construct; identical to SEQ ID NO: 21084
  source 1..120: mol_type = other DNA

SEQ ID NO: 105398 - DNA, 120 bp, synthetic construct
  source 1..120: mol_type = other DNA
atatcttatctgtgagagctagtgaatttagaaaacaagattaccgttaaataacaaggcaattaatttaagcagtttatagctccacgtctttgtttataaactggaaattcccatctc

SEQ ID NO: 105399 - DNA, 120 bp, synthetic construct
  source 1..120: mol_type = other DNA
cactgctaagataacaaaatcaatgtcttatcttagaaatcttttctaattccccaagaagtactttttaagagcatatacctagattcccaagtttaaaaagacacaccaaacctaaga

SEQ ID NO: 105400 - DNA, 120 bp, synthetic construct; identical to SEQ ID NO: 21085
  source 1..120: mol_type = other DNA

SEQ ID NO: 105401 - DNA, 120 bp, synthetic construct; identical to SEQ ID NO: 21177
  source 1..120: mol_type = other DNA

SEQ ID NO: 105402 - DNA, 120 bp, synthetic construct
  source 1..120: mol_type = other DNA
taacagctggaatttgaaacacatctgactccaaaaatgttttcttaacacaactctgctgccttgacaagatggcagatagatccaatgccgtctagtgtagctatgtggctacttgat

SEQ ID NO: 105403 - DNA, 120 bp, synthetic construct; identical to SEQ ID NO: 66722
  source 1..120: mol_type = other DNA

SEQ ID NO: 105404 - DNA, 120 bp, synthetic construct; identical to SEQ ID NO: 105320
  source 1..120: mol_type = other DNA

SEQ ID NO: 105405 - DNA, 120 bp, synthetic construct; identical to SEQ ID NO: 21178
  source 1..120: mol_type = other DNA

SEQ ID NO: 105406 - DNA, 120 bp, synthetic construct; identical to SEQ ID NO: 66725
  source 1..120: mol_type = other DNA

SEQ ID NO: 105407 - DNA, 120 bp, synthetic construct; identical to SEQ ID NO: 66726
  source 1..120: mol_type = other DNA

SEQ ID NO: 105408 - DNA, 120 bp, synthetic construct; identical to SEQ ID NO: 66727
  source 1..120: mol_type = other DNA

SEQ ID NO: 105409 - DNA, 120 bp, synthetic construct; identical to SEQ ID NO: 21086
  source 1..120: mol_type = other DNA

SEQ ID NO: 105410 - DNA, 120 bp, synthetic construct; identical to SEQ ID NO: 105314
  source 1..120: mol_type = other DNA

SEQ ID NO: 105411 - DNA, 120 bp, synthetic construct; identical to SEQ ID NO: 21179
  source 1..120: mol_type = other DNA

SEQ ID NO: 105412 - DNA, 120 bp, synthetic construct; identical to SEQ ID NO: 21087
  source 1..120: mol_type = other DNA

SEQ ID NO: 105413 - DNA, 120 bp, synthetic construct
  source 1..120: mol_type = other DNA
gcattttcctgggtttctggtaagctgactgcttattccactgctgattgctagattacaatctcttgtgcgacctttgccctggctgattacttcctttgttgattctttggcatatat

SEQ ID NO: 105414 - DNA, 120 bp, synthetic construct
  source 1..120: mol_type = other DNA
gtagttaaaagtttgatgactaaggttttttttgtttgtttttttgttttgagctggaatctcgctctgtcgccaggctgaagtgcagtggcgtgatcttggctcactacaacctccgcc

SEQ ID NO: 105415 - DNA, 120 bp, synthetic construct
  source 1..120: mol_type = other DNA
cctcccaacctacatctttctcctgtgctggatgcttcctgcccttgaacatcagactcctagttcttcagttttggaacttggactggctctcgttgctcctcagtctgcagatggcct

SEQ ID NO: 105416 - DNA, 120 bp, synthetic construct
  source 1..120: mol_type = other DNA
ggaatattaatagatgggaagaagatgtgtaataaaactgtctataaacacaattctgacaaatttcagaactgggattcatagggctttattcagttagattacatgctttacaacaga

SEQ ID NO: 105417 - DNA, 120 bp, synthetic construct; identical to SEQ ID NO: 21088
  source 1..120: mol_type = other DNA

SEQ ID NO: 105418 - DNA, 120 bp, synthetic construct; identical to SEQ ID NO: 21089
  source 1..120: mol_type = other DNA

SEQ ID NO: 105419 - DNA, 120 bp, synthetic construct; identical to SEQ ID NO: 66739
  source 1..120: mol_type = other DNA

SEQ ID NO: 105420 - DNA, 120 bp, synthetic construct; identical to SEQ ID NO: 21180
  source 1..120: mol_type = other DNA

SEQ ID NO: 105421 - DNA, 120 bp, synthetic construct; identical to SEQ ID NO: 21214
  source 1..120: mol_type = other DNA

SEQ ID NO: 105422 - DNA, 120 bp, synthetic construct
  source 1..120: mol_type = other DNA
aggagttcaagaccagcctggccaacatggtgaaaccccgtctctactcagaatacaaaaattagctgggcgtggtggtgcatgcctgtaatcccagctacttgggaggctgaggtagga

SEQ ID NO: 105423 - DNA, 120 bp, synthetic construct; identical to SEQ ID NO: 21090
  source 1..120: mol_type = other DNA

SEQ ID NO: 105424 - DNA, 120 bp, synthetic construct
  source 1..120: mol_type = other DNA
agcaaagctgacttaccataagtctatctcaaatagaaatgaaacactcaatttgtgaaatatgctgagttttaatgcgtgtgggggcagggtgaattaacatttgtgatgcaaggagaa

SEQ ID NO: 105425 - DNA, 120 bp, synthetic construct; identical to SEQ ID NO: 21091
  source 1..120: mol_type = other DNA

SEQ ID NO: 105426 - DNA, 120 bp, synthetic construct; identical to SEQ ID NO: 105297
  source 1..120: mol_type = other DNA

SEQ ID NO: 105427 - DNA, 120 bp, synthetic construct; identical to SEQ ID NO: 1081
  source 1..120: mol_type = other DNA

SEQ ID NO: 105428 - DNA, 120 bp, synthetic construct; identical to SEQ ID NO: 21092
  source 1..120: mol_type = other DNA

SEQ ID NO: 105429 - DNA, 120 bp, synthetic construct; identical to SEQ ID NO: 21093
  source 1..120: mol_type = other DNA

SEQ ID NO: 105430 - DNA, 120 bp, synthetic construct
  source 1..120: mol_type = other DNA
agatcacactactgcactccagcctggtgacagagtgagactccgtcaaaaaaataaataaaaataaagccaaattcatacagtccctgaggagtgggaactgatgcacatctcttgtat

SEQ ID NO: 105431 - DNA, 120 bp, synthetic construct; identical to SEQ ID NO: 21094
  source 1..120: mol_type = other DNA

SEQ ID NO: 105432 - DNA, 120 bp, synthetic construct
  source 1..120: mol_type = other DNA
atagacgaagtccagcattagtcatgactctggactaagtctggaaatctggaatctcttcccagctctgggaggtacaaagttttaaaaaataaggtcaaaatgctggaaaacattcaa

SEQ ID NO: 105433 - DNA, 120 bp, synthetic construct
  source 1..120: mol_type = other DNA
agtgaagaaagagtgagcatagcaaaattgagaaaggttgcttgaaaaccaaacaaaaaaccaaatacctgtaatcctagcactttgggagggtgaggtgggtggattgcctgcactcag

SEQ ID NO: 105434 - DNA, 120 bp, synthetic construct; identical to SEQ ID NO: 66754
  source 1..120: mol_type = other DNA

SEQ ID NO: 105435 - DNA, 120 bp, synthetic construct; identical to SEQ ID NO: 66908
  source 1..120: mol_type = other DNA

SEQ ID NO: 105436 - DNA, 120 bp, synthetic construct; identical to SEQ ID NO: 66909
  source 1..120: mol_type = other DNA

SEQ ID NO: 105437 - DNA, 120 bp, synthetic construct; identical to SEQ ID NO: 66910
  source 1..120: mol_type = other DNA

SEQ ID NO: 105438 - DNA, 120 bp, synthetic construct; identical to SEQ ID NO: 66911
  source 1..120: mol_type = other DNA

SEQ ID NO: 105439 - DNA, 120 bp, synthetic construct; identical to SEQ ID NO: 66912
  source 1..120: mol_type = other DNA

SEQ ID NO: 105440 - DNA, 120 bp, synthetic construct; identical to SEQ ID NO: 21209
  source 1..120: mol_type = other DNA

SEQ ID NO: 105441 - DNA, 120 bp, synthetic construct; identical to SEQ ID NO: 21210
  source 1..120: mol_type = other DNA

SEQ ID NO: 105442 - DNA, 120 bp, synthetic construct; identical to SEQ ID NO: 21211
  source 1..120: mol_type = other DNA

SEQ ID NO: 105443 - DNA, 120 bp, synthetic construct; identical to SEQ ID NO: 21212
  source 1..120: mol_type = other DNA

SEQ ID NO: 105444 - DNA, 120 bp, synthetic construct; identical to SEQ ID NO: 66917
  source 1..120: mol_type = other DNA

SEQ ID NO: 105445 - DNA, 120 bp, synthetic construct; identical to SEQ ID NO: 21213
  source 1..120: mol_type = other DNA

SEQ ID NO: 105446 - DNA, 120 bp, synthetic construct; identical to SEQ ID NO: 66919
  source 1..120: mol_type = other DNA

SEQ ID NO: 105447 - DNA, 120 bp, synthetic construct; identical to SEQ ID NO: 66920
  source 1..120: mol_type = other DNA

SEQ ID NO: 105448 - DNA, 120 bp, synthetic construct; identical to SEQ ID NO: 21214
  source 1..120: mol_type = other DNA

SEQ ID NO: 105449 - DNA, 120 bp, synthetic construct; identical to SEQ ID NO: 21180
  source 1..120: mol_type = other DNA

SEQ ID NO: 105450 - DNA, 120 bp, synthetic construct; identical to SEQ ID NO: 66923
  source 1..120: mol_type = other DNA

SEQ ID NO: 105451 - DNA, 120 bp, synthetic construct; identical to SEQ ID NO: 21320
  source 1..120: mol_type = other DNA

SEQ ID NO: 105452 - DNA, 120 bp, synthetic construct; identical to SEQ ID NO: 66925
  source 1..120: mol_type = other DNA

SEQ ID NO: 105453 - DNA, 120 bp, synthetic construct; identical to SEQ ID NO: 66926
  source 1..120: mol_type = other DNA

SEQ ID NO: 105454 - DNA, 120 bp, synthetic construct
  source 1..120: mol_type = other DNA
aatccctttggcaacaccctcacagacaacactcggattaatactttgcatcctttaatccaatcaggttgacacccagtattaaccatcacactgtccaaatggaaaaattattaaaca

SEQ ID NO: 105455 - DNA, 120 bp, synthetic construct
  source 1..120: mol_type = other DNA
ttttgttgttttttttttttgagctggcgtctcgctctgtcgccaggctggagtgcggtggcgtgatcttggctcactgcaacctccgcctcctggtttccagcaattctctgcctcagc

SEQ ID NO: 105456 - DNA, 120 bp, synthetic construct; identical to SEQ ID NO: 21215
  source 1..120: mol_type = other DNA

SEQ ID NO: 105457 - DNA, 120 bp, synthetic construct; identical to SEQ ID NO: 21047
  source 1..120: mol_type = other DNA

SEQ ID NO: 105458 - DNA, 120 bp, synthetic construct; identical to SEQ ID NO: 21216
  source 1..120: mol_type = other DNA

SEQ ID NO: 105459 - DNA, 120 bp, synthetic construct; identical to SEQ ID NO: 21048
  source 1..120: mol_type = other DNA

SEQ ID NO: 105460 - DNA, 120 bp, synthetic construct
  source 1..120: mol_type = other DNA
ttcacggtgaggtttcaaagagcaagagaacttagttaaagacatttcagtaactggaagatacttctatcatgctagggcagagcaaaagaacttggtacagtgtacggactcatgctt

SEQ ID NO: 105461 - DNA, 120 bp, synthetic construct; identical to SEQ ID NO: 20748
  source 1..120: mol_type = other DNA

SEQ ID NO: 105462 - DNA, 120 bp, synthetic construct; identical to SEQ ID NO: 21321
  source 1..120: mol_type = other DNA

SEQ ID NO: 105463 - DNA, 120 bp, synthetic construct
  source 1..120: mol_type = other DNA
atactgaagggccagtagttgcaactaaaaaaaaaaaagaaaagaaagaaaacactgttaaagtctatactacagttaagactatctaggcaagagctacaaatacaaaagcaatagaaa

SEQ ID NO: 105464 - DNA, 120 bp, synthetic construct; identical to SEQ ID NO: 21322
  source 1..120: mol_type = other DNA

SEQ ID NO: 105465 - DNA, 120 bp, synthetic construct; identical to SEQ ID NO: 66938
  source 1..120: mol_type = other DNA

SEQ ID NO: 105466 - DNA, 120 bp, synthetic construct; identical to SEQ ID NO: 21051
  source 1..120: mol_type = other DNA

SEQ ID NO: 105467 - DNA, 120 bp, synthetic construct; identical to SEQ ID NO: 21052
  source 1..120: mol_type = other DNA

SEQ ID NO: 105468 - DNA, 120 bp, synthetic construct; identical to SEQ ID NO: 66941
  source 1..120: mol_type = other DNA

SEQ ID NO: 105469 - DNA, 120 bp, synthetic construct; identical to SEQ ID NO: 66942
  source 1..120: mol_type = other DNA

SEQ ID NO: 105470 - DNA, 120 bp, synthetic construct; identical to SEQ ID NO: 66943
  source 1..120: mol_type = other DNA

SEQ ID NO: 105471 - DNA, 120 bp, synthetic construct; identical to SEQ ID NO: 21217
  source 1..120: mol_type = other DNA

SEQ ID NO: 105472 - DNA, 120 bp, synthetic construct; identical to SEQ ID NO: 66945
  source 1..120: mol_type = other DNA

SEQ ID NO: 105473 - DNA, 120 bp, synthetic construct; identical to SEQ ID NO: 66946
  source 1..120: mol_type = other DNA

SEQ ID NO: 105474 - DNA, 120 bp, synthetic construct; identical to SEQ ID NO: 21053
  source 1..120: mol_type = other DNA

SEQ ID NO: 105475 - DNA, 120 bp, synthetic construct; identical to SEQ ID NO: 66948
  source 1..120: mol_type = other DNA

SEQ ID NO: 105476 - DNA, 120 bp, synthetic construct; identical to SEQ ID NO: 66949
  source 1..120: mol_type = other DNA

SEQ ID NO: 105477 - DNA, 120 bp, synthetic construct; identical to SEQ ID NO: 21218
  source 1..120: mol_type = other DNA

SEQ ID NO: 105478 - DNA, 120 bp, synthetic construct; identical to SEQ ID NO: 66951
  source 1..120: mol_type = other DNA

SEQ ID NO: 105479 - DNA, 120 bp, synthetic construct; identical to SEQ ID NO: 66710
  source 1..120: mol_type = other DNA

SEQ ID NO: 105480 - DNA, 120 bp, synthetic construct; identical to SEQ ID NO: 66709
  source 1..120: mol_type = other DNA

SEQ ID NO: 105481 - DNA, 120 bp, synthetic construct; identical to SEQ ID NO: 66954
  source 1..120: mol_type = other DNA

SEQ ID NO: 105482 - DNA, 120 bp, synthetic construct; identical to SEQ ID NO: 21323
  source 1..120: mol_type = other DNA

SEQ ID NO: 105483 - DNA, 120 bp, synthetic construct; identical to SEQ ID NO: 66706
  source 1..120: mol_type = other DNA

SEQ ID NO: 105484 - DNA, 120 bp, synthetic construct
  source 1..120: mol_type = other DNA
tcgaacccaggaggtggaggctgcagtgagccgagatcacgccactgcactccagcctggcgacagagagagacttggtctcaaaaaaaataaaaaaataaaaaataagaaaaggtttta

SEQ ID NO: 105485 - DNA, 120 bp, synthetic construct
  source 1..120: mol_type = other DNA
aatcactaatcttatatttattctgtgattggagggctggaaataactgggaataagacatcatttgagaggttaagcatgaagtataggaagtatgcaggataaaaataagcattagat

SEQ ID NO: 105486 - DNA, 120 bp, synthetic construct; identical to SEQ ID NO: 66959
  source 1..120: mol_type = other DNA

SEQ ID NO: 105487 - DNA, 120 bp, synthetic construct; identical to SEQ ID NO: 66960
  source 1..120: mol_type = other DNA

SEQ ID NO: 105488 - DNA, 120 bp, synthetic construct; identical to SEQ ID NO: 66961
  source 1..120: mol_type = other DNA

SEQ ID NO: 105489 - DNA, 120 bp, synthetic construct; identical to SEQ ID NO: 66962
  source 1..120: mol_type = other DNA

SEQ ID NO: 105490 - DNA, 120 bp, synthetic construct; identical to SEQ ID NO: 66963
  source 1..120: mol_type = other DNA

SEQ ID NO: 105491 - DNA, 120 bp, synthetic construct; identical to SEQ ID NO: 21081
  source 1..120: mol_type = other DNA

SEQ ID NO: 105492 - DNA, 120 bp, synthetic construct; identical to SEQ ID NO: 66965
  source 1..120: mol_type = other DNA

SEQ ID NO: 105493 - DNA, 120 bp, synthetic construct; identical to SEQ ID NO: 66966
  source 1..120: mol_type = other DNA

SEQ ID NO: 105494 - DNA, 120 bp, synthetic construct; identical to SEQ ID NO: 21219
  source 1..120: mol_type = other DNA

SEQ ID NO: 105495 - DNA, 120 bp, synthetic construct; identical to SEQ ID NO: 66694
  source 1..120: mol_type = other DNA

SEQ ID NO: 105496 - DNA, 120 bp, synthetic construct; identical to SEQ ID NO: 21220
  source 1..120: mol_type = other DNA

SEQ ID NO: 105497 - DNA, 120 bp, synthetic construct; identical to SEQ ID NO: 21324
  source 1..120: mol_type = other DNA

SEQ ID NO: 105498 - DNA, 120 bp, synthetic construct
  source 1..120: mol_type = other DNA
agaatcacttgaacccgggaggcagaggctgcagtgggccaagatcgcaccactgaactccaacctgggcaacagaatgattccatctcaaaaaaaaaaaaaaaaaaatgctgatacaac

SEQ ID NO: 105499 - DNA, 120 bp, synthetic construct
  source 1..120: mol_type = other DNA
aagtcctgttccccccttcctttttttttttttttttgagatggagtcttgctctgtcgccaggctggagtgcggtggctcgatctcagctcactgcaacctctgcgtcccgggtacaag

SEQ ID NO: 105500 - DNA, 120 bp, synthetic construct
  source 1..120: mol_type = other DNA
ttaaaaaaaagggtaagaaatggttaaagaaataatacaagaaatgctacagaactgaaagaaatgagtttcccaattgaaaggacacttccagaaaacctttaagttaccaagaacaag

SEQ ID NO: 105501 - DNA, 120 bp, synthetic construct; identical to SEQ ID NO: 21325
  source 1..120: mol_type = other DNA

SEQ ID NO: 105502 - DNA, 120 bp, synthetic construct; identical to SEQ ID NO: 66687
  source 1..120: mol_type = other DNA

SEQ ID NO: 105503 - DNA, 120 bp, synthetic construct
  source 1..120: mol_type = other DNA
atcacttgagcccaggagttggagaccagcctgggtaacatggtaagaccccgtctctacattaaagaaaaaagccgggcatggtggcgcatgcctgtagtctcagctacccaggaggct

SEQ ID NO: 105504 - DNA, 120 bp, synthetic construct; identical to SEQ ID NO: 21326
  source 1..120: mol_type = other DNA

SEQ ID NO: 105505 - DNA, 120 bp, synthetic construct; identical to SEQ ID NO: 21327
  source 1..120: mol_type = other DNA

SEQ ID NO: 105506 - DNA, 120 bp, synthetic construct; identical to SEQ ID NO: 11226
  source 1..120: mol_type = other DNA

SEQ ID NO: 105507 - DNA, 120 bp, synthetic construct; identical to SEQ ID NO: 11227
  source 1..120: mol_type = other DNA

SEQ ID NO: 105508 - DNA, 120 bp, synthetic construct; identical to SEQ ID NO: 25196
  source 1..120: mol_type = other DNA

SEQ ID NO: 105509 - DNA, 120 bp, synthetic construct; identical to SEQ ID NO: 25197
  source 1..120: mol_type = other DNA

SEQ ID NO: 105510 - DNA, 120 bp, synthetic construct; identical to SEQ ID NO: 25198
  source 1..120: mol_type = other DNA

SEQ ID NO: 105511 - DNA, 120 bp, synthetic construct
  source 1..120: mol_type = other DNA
gggcctgctccttagtttgaaaacaagcagttgtgccactagtgccttggagtgagctggcaactgtggcgcctcagcttggagtgtgcttgacacctgtgttggccggtccatctggca

SEQ ID NO: 105512 - DNA, 120 bp, synthetic construct
  source 1..120: mol_type = other DNA
tgtgggcggagggtaggggctgcagaggccccggggtgtggggtggtgtggggctgggccgtgacaatgggtggggtaggaaggacttttcagttgaggaggagcagcgcagtgcaggga

SEQ ID NO: 105513 - DNA, 120 bp, synthetic construct
  source 1..120: mol_type = other DNA
tattcatcatgaatattggtctctagttttcttgtattgtctttgtctggcttgatgtcagggtaatactgtcatagaagaggaagtattcctccttcccctcctccgcctcccccttct

SEQ ID NO: 105514 - DNA, 120 bp, synthetic construct
  source 1..120: mol_type = other DNA
cagccccctgagtagctgggagaacaggtgtgtgccaccatgcctggctaatttttgtatttttagtagagatagggtttcgccatgttggccaggctggtctcgaactcctgacctcag

SEQ ID NO: 105515 - DNA, 120 bp, synthetic construct; identical to SEQ ID NO: 25199
  source 1..120: mol_type = other DNA

SEQ ID NO: 105516 - DNA, 120 bp, synthetic construct; identical to SEQ ID NO: 25200
  source 1..120: mol_type = other DNA

SEQ ID NO: 105517 - DNA, 120 bp, synthetic construct; identical to SEQ ID NO: 25201
  source 1..120: mol_type = other DNA

SEQ ID NO: 105518 - DNA, 120 bp, synthetic construct; identical to SEQ ID NO: 25202
  source 1..120: mol_type = other DNA

SEQ ID NO: 105519 - DNA, 120 bp, synthetic construct; identical to SEQ ID NO: 25203
  source 1..120: mol_type = other DNA

SEQ ID NO: 105520 - DNA, 120 bp, synthetic construct; identical to SEQ ID NO: 28438
  source 1..120: mol_type = other DNA

SEQ ID NO: 105521 - DNA, 120 bp, synthetic construct
  source 1..120: mol_type = other DNA
tttgagaccagcctggctgacatggtgaaaccccttttctattaaaatacaaaaattagcggggcgtggtggcaaacgcctgtaatcccagctgtttggaaggttgaggcagggagaatt

SEQ ID NO: 105522 - DNA, 120 bp, synthetic construct
  source 1..120: mol_type = other DNA
gtcctcaaagaagagcaaggagaccaatgtggttggaatgcagtaagctagagtggtaggaaatgaagtcagagggttagcaggagcttatacaactgtgtaaagactttggattttatt

SEQ ID NO: 105523 - DNA, 120 bp, synthetic construct; identical to SEQ ID NO: 31690
  source 1..120: mol_type = other DNA

SEQ ID NO: 105524 - DNA, 120 bp, synthetic construct
  source 1..120: mol_type = other DNA
tctatgagtttgcaagaacaacagcattactaaccttagggtgccccctaaagcagatacagcttatatcacaatacccaagtcctttcaaatatctggaaagccttcccaagaaggatg

SEQ ID NO: 105525 - DNA, 120 bp, synthetic construct; identical to SEQ ID NO: 31691
  source 1..120: mol_type = other DNA

SEQ ID NO: 105526 - DNA, 120 bp, synthetic construct; identical to SEQ ID NO: 8969
  source 1..120: mol_type = other DNA

SEQ ID NO: 105527 - DNA, 120 bp, synthetic construct; identical to SEQ ID NO: 8970
  source 1..120: mol_type = other DNA

SEQ ID NO: 105528 - DNA, 120 bp, synthetic construct
  source 1..120: mol_type = other DNA
tgatgagcattttttcatgtgttttttggctgcataaatatcttcttttgagaagtaaaatgaccactttttactgccagacctcagttccctcatctgtaaaatgatgacgttatccat

SEQ ID NO: 105529 - DNA, 120 bp, synthetic construct
  source 1..120: mol_type = other DNA
tcccacctatgagtgagaatatgcggtgtttggttttttgttcttgcgatagtttactgagaatgatgatttccagtttcatccatgtccctacaaaggacgtgaactcattctttttta

SEQ ID NO: 105530 - DNA, 120 bp, synthetic construct
  source 1..120: mol_type = other DNA
tttctccattgcttgtttttctcaggtttgtcaaagatcagatagttgtagatatgtggcattatttctgagggctctgttctgttccgttgatctatatctctgttttggtaccagtac

SEQ ID NO: 105531 - DNA, 120 bp, synthetic construct
  source 1..120: mol_type = other DNA
tggtggataagctttttgatgtgctgctggattcgttttgccagtattttattgaggatttttgcatcaatgttcatcaaggatattggtctaatattctctttttatgttgtgtctctg

SEQ ID NO: 105532 - DNA, 120 bp, synthetic construct
  source 1..120: mol_type = other DNA
gttatgtacccagtagtcattcaggagcaggttgttcagtttccatgtagttgagtggatttgagtgagattcttaatcctgagttctagtttgattgcactgtggtctgagagatagtt

SEQ ID NO: 105533 - DNA, 120 bp, synthetic construct
  source 1..120: mol_type = other DNA
attctggattgaaaattcttttctttaagaatgttgaatattggcccccactctcttctggcttgtagggtttctgctgagagatccggtgttagtctgatgggcttccctttgagggta

SEQ ID NO: 105534 - DNA, 120 bp, synthetic construct
  source 1..120: mol_type = other DNA
ggccgctcgggggtgcctcccagttaggctgctcgggggtcaggggtcagggacctacttgaggaggcagtctgcccgttctcagatctccagctgcgtgctgggagaaccactgctctc

SEQ ID NO: 105535 - DNA, 120 bp, synthetic construct; identical to SEQ ID NO: 14457
  source 1..120: mol_type = other DNA

SEQ ID NO: 105536 - DNA, 120 bp, synthetic construct; identical to SEQ ID NO: 14458
  source 1..120: mol_type = other DNA

SEQ ID NO: 105537 - DNA, 120 bp, synthetic construct; identical to SEQ ID NO: 14459
  source 1..120: mol_type = other DNA

SEQ ID NO: 105538 - DNA, 120 bp, synthetic construct; identical to SEQ ID NO: 14460
  source 1..120: mol_type = other DNA

SEQ ID NO: 105539 - DNA, 120 bp, synthetic construct; identical to SEQ ID NO: 14461
  source 1..120: mol_type = other DNA

SEQ ID NO: 105540 - DNA, 120 bp, synthetic construct; identical to SEQ ID NO: 14462
  source 1..120: mol_type = other DNA

SEQ ID NO: 105541 - DNA, 120 bp, synthetic construct
  source 1..120: mol_type = other DNA
cttgctagtggtctatcaattttgttgatcttttcaaaaaaccagctcctggattcattgattttttgaagagttttttgtgtctctatttccttcagttctgttctgatcttagtcatt

SEQ ID NO: 105542 - DNA, 120 bp, synthetic construct
  source 1..120: mol_type = other DNA
ggtcttgactctatccaatttgccagtctgtgtcttttaattagagcatttggcccatttacatttaaggttagtattgttatgtgtgaatttgatcctgtccttatgatgttagctggt

SEQ ID NO: 105543 - DNA, 120 bp, synthetic construct
  source 1..120: mol_type = other DNA
ccagcacctgttgtttcctgactttttaatgattgccattctaactggtgtgggatggatggtatctcattgtggttttgatttgcatttctctgatggccagtgatgatgagcattttt

SEQ ID NO: 105544 - DNA, 120 bp, synthetic construct
  source 1..120: mol_type = other DNA
tttttttccaattctgtgaagaaagtcattggtagcttgatggggttggcattgaatctataaatcaccttgggcggtatggccattttcacgatattgattcttcctacccatgagcat

SEQ ID NO: 105545 - DNA, 120 bp, synthetic construct
  source 1..120: mol_type = other DNA
gagggtgtatgtgtccaggaatttatccatttcttctagattttctatttatttgcatagaggcgtttatagtattctctgatggtagtttgtatttctgtgggatcagtggtgatatcc

SEQ ID NO: 105546 - DNA, 120 bp, synthetic construct
  source 1..120: mol_type = other DNA
tatatatttaggatagttagttcttcttgttgaattgatccctttagcattatgtaatagccttctttgtctcttttgatctttgttggtttaaagtctgttttatcagagactaggatt

SEQ ID NO: 105547 - DNA, 120 bp, synthetic construct
  source 1..120: mol_type = other DNA
cctgtcactttcaggtacaccaatcagacgtagatttgggcttttcacatactcccgtatttcttggagactttgtttgtttttattcttttttctctaaacttctcttctcgcttcatt

SEQ ID NO: 105548 - DNA, 120 bp, synthetic construct; identical to SEQ ID NO: 9543
  source 1..120: mol_type = other DNA

SEQ ID NO: 105549 - DNA, 120 bp, synthetic construct; identical to SEQ ID NO: 9544
  source 1..120: mol_type = other DNA

SEQ ID NO: 105550 - DNA, 120 bp, synthetic construct; identical to SEQ ID NO: 9545
  source 1..120: mol_type = other DNA

SEQ ID NO: 105551 - DNA, 120 bp, synthetic construct; identical to SEQ ID NO: 9546
  source 1..120: mol_type = other DNA

SEQ ID NO: 105552 - DNA, 120 bp, synthetic construct
  source 1..120: mol_type = other DNA
attaaacattatctatctatctatctatctatctgtctacctacctacctacctacctagtttcaaaggtttggaaatgtgaagtatattttccaacctaaatggagttaacctagaaat

SEQ ID NO: 105553 - DNA, 120 bp, synthetic construct; identical to SEQ ID NO: 26614
  source 1..120: mol_type = other DNA

SEQ ID NO: 105554 - DNA, 120 bp, synthetic construct; identical to SEQ ID NO: 26615
  source 1..120: mol_type = other DNA

SEQ ID NO: 105555 - DNA, 120 bp, synthetic construct; identical to SEQ ID NO: 9096
  source 1..120: mol_type = other DNA

SEQ ID NO: 105556 - DNA, 120 bp, synthetic construct
  source 1..120: mol_type = other DNA
atgtagatacttagattactaaatatatatttcatctacttctgaagttgatagtcttcccccccccccacttttttcttttttgagacagggtctccctctgtcacccaggctggagtg

SEQ ID NO: 105557 - DNA, 120 bp, synthetic construct; identical to SEQ ID NO: 9092
  source 1..120: mol_type = other DNA

SEQ ID NO: 105558 - DNA, 120 bp, synthetic construct; identical to SEQ ID NO: 9093
  source 1..120: mol_type = other DNA

SEQ ID NO: 105559 - DNA, 120 bp, synthetic construct
  source 1..120: mol_type = other DNA
tcagttatcgaagagttatctgcactcccatgtttgttgcagcactgttcatgatagccaagatttggaagcaacctacacgtccatcttgatgcaagatttgcttctaaatcttggcta

SEQ ID NO: 105560 - DNA, 120 bp, synthetic construct
  source 1..120: mol_type = other DNA
tttgagacagagtctcactctgtcacccaggctggaatgcagtggtggaatcttggctcactgcaacctctgcctcccgggttcaagcgattcccctgcctcagcctcctgagtagctgg

SEQ ID NO: 105561 - DNA, 120 bp, synthetic construct
  source 1..120: mol_type = other DNA
gatcatatcgcattgtaattttgttggtggtggtgatggttgttggtggtggtggtgtttttttttttttttttttttttttgagatggagtttcactctttgttgcccaggctggagtg

SEQ ID NO: 105562 - DNA, 120 bp, synthetic construct
  source 1..120: mol_type = other DNA
gggtggttgccaggcagagggtctcctcacttctcagacagggcggccgggcagagacgctcctcacctcccagacggggtctcggccgggcagaggcgctcctcacatcccagatgggg

SEQ ID NO: 105563 - DNA, 120 bp, synthetic construct; identical to SEQ ID NO: 9095
  source 1..120: mol_type = other DNA

SEQ ID NO: 105564 - DNA, 120 bp, synthetic construct
  source 1..120: mol_type = other DNA
gaatccctgaatagaccaataacaagttctgaaatgtatgtatccagcagcacatcaaaagcttattcatcacgatcaagttggcttcatccctggatgcaaggctggttcaacatacac

SEQ ID NO: 105565 - DNA, 120 bp, synthetic construct
  source 1..120: mol_type = other DNA
cgaaggacatgaacagacacttctcaaaagaggacatttatgcagccaaaaaacacatgaaaaaatgctcatcatcactggccatcagagaaatgcaaatcaaaaccactatgagatacc

SEQ ID NO: 105566 - DNA, 120 bp, synthetic construct
  source 1..120: mol_type = other DNA
tatgacaaacccactgccaatatcatacttaatgggcaaaagctggaagacttccctttgaaaagcaacacaagacaaggttgccctctctcaccactcctgttcaacatagtattgtaa

SEQ ID NO: 105567 - DNA, 120 bp, synthetic construct; identical to SEQ ID NO: 22026
  source 1..120: mol_type = other DNA

SEQ ID NO: 105568 - DNA, 120 bp, synthetic construct; identical to SEQ ID NO: 7454
  source 1..120: mol_type = other DNA

SEQ ID NO: 105569 - DNA, 120 bp, synthetic construct; identical to SEQ ID NO: 7455
  source 1..120: mol_type = other DNA

SEQ ID NO: 105570 - DNA, 120 bp, synthetic construct
  source 1..120: mol_type = other DNA
ggcaatatagcaagaccttgtctctacaaaaaaaaaaaaaatacaaaaaaattagcccggcatggtggcttgcgcctgtagtcctagctacttagactgaggcaggaagatctcttgagc

SEQ ID NO: 105571 - DNA, 120 bp, synthetic construct; identical to SEQ ID NO: 4172
  source 1..120: mol_type = other DNA

SEQ ID NO: 105572 - DNA, 120 bp, synthetic construct; identical to SEQ ID NO: 15642
  source 1..120: mol_type = other DNA

SEQ ID NO: 105573 - DNA, 120 bp, synthetic construct
  source 1..120: mol_type = other DNA
gggtacgaaggccaacggacgccttcctttagaacgctcagcacacagagcaacttctcacgcctactctcaaatggcgtactccaaactagcactcccgacgtccagctgtgaacccag

SEQ ID NO: 105574 - DNA, 120 bp, synthetic construct
  source 1..120: mol_type = other DNA
tgggaggtggaggttgcagtgagccgagattgtgccattgcagtccagcctaggcaacaagagcaaaacttcatctcaaaaaaaaaaaaaaaaatagggcagtcagggaaaactttcctg

SEQ ID NO: 105575 - DNA, 120 bp, synthetic construct; identical to SEQ ID NO: 7311
  source 1..120: mol_type = other DNA

SEQ ID NO: 105576 - DNA, 120 bp, synthetic construct; identical to SEQ ID NO: 7312
  source 1..120: mol_type = other DNA

SEQ ID NO: 105577 - DNA, 120 bp, synthetic construct; identical to SEQ ID NO: 7313
  source 1..120: mol_type = other DNA

SEQ ID NO: 105578 - DNA, 120 bp, synthetic construct; identical to SEQ ID NO: 7314
  source 1..120: mol_type = other DNA

SEQ ID NO: 105579 - DNA, 120 bp, synthetic construct; identical to SEQ ID NO: 7315
  source 1..120: mol_type = other DNA

SEQ ID NO: 105580 - DNA, 120 bp, synthetic construct
  source 1..120: mol_type = other DNA
tgcacacacaatagagcagactgagcctgggcttaacattgcattgccctggagcctaaaaggggaaacaaagggccgggcgacgtggctcacgcctgtaatcccggcacattgggaggc

SEQ ID NO: 105581 - DNA, 120 bp, synthetic construct; identical to SEQ ID NO: 7316
  source 1..120: mol_type = other DNA

SEQ ID NO: 105582 - DNA, 120 bp, synthetic construct
  source 1..120: mol_type = other DNA
agacgagcctaggaaacatagggagacccccccccatctctaaaaaaaaaaaaaaaaaaaaaaactttaaaatttaacccagtgtggtggcacatgcctatagtcccagctactcagtag

SEQ ID NO: 105583 - DNA, 120 bp, synthetic construct; identical to SEQ ID NO: 7317
  source 1..120: mol_type = other DNA

SEQ ID NO: 105584 - DNA, 120 bp, synthetic construct; identical to SEQ ID NO: 7318
  source 1..120: mol_type = other DNA

SEQ ID NO: 105585 - DNA, 120 bp, synthetic construct; identical to SEQ ID NO: 7319
  source 1..120: mol_type = other DNA

SEQ ID NO: 105586 - DNA, 120 bp, synthetic construct
  source 1..120: mol_type = other DNA
ttgagctgcagtctcactctgtcatccaggctggagtacagtggtgcgatctcggctcactgcaacctcagccttctgggttcaagcgattctcctgcctcagcctcctgagtagctggg

SEQ ID NO: 105587 - DNA, 120 bp, synthetic construct; identical to SEQ ID NO: 7320
  source 1..120: mol_type = other DNA

SEQ ID NO: 105588 - DNA, 120 bp, synthetic construct
  source 1..120: mol_type = other DNA
accaccacatccagctaatttttttgtaattttagtagagacggggtttcaccatgttggccaggctagtctcgaactgctgacttcatgatctgcccacctcatcctcctaaattggta

SEQ ID NO: 105589 - DNA, 120 bp, synthetic construct
  source 1..120: mol_type = other DNA
attatctaggtgtaaatcttggctgtaggccaggccctgtggctcatgtctgtaatcccatcactttgggaaaccgaggtgggcagatcacttgaggtcaggagttcgagaccagcttgg

SEQ ID NO: 105590 - DNA, 120 bp, synthetic construct
  source 1..120: mol_type = other DNA
tgcgtcaagcacgtgtgctttacacttgttcttattattaggtttaataatagaataattgccacatttactgagcactcattatgggccaggccctgccctaagtgcttaattagcttt

SEQ ID NO: 105591 - DNA, 120 bp, synthetic construct
  source 1..120: mol_type = other DNA
acaacctcagccttctgggttcaagcgattctcctgcctcagccgcctgagtagctgggattacaggcatgtgccaccgcgcctggctgattttgtatttttagtagagatagggtttct

SEQ ID NO: 105592 - DNA, 120 bp, synthetic construct
  source 1..120: mol_type = other DNA
ttcacacctgtaatcccagtacttttgggaaccgaggtgggcagatcacttgagcccagaagtttaagaccagcctgactaacacagtgagatcctgtctctgcagaaaatagaaaaatc

SEQ ID NO: 105593 - DNA, 120 bp, synthetic construct; identical to SEQ ID NO: 7324
  source 1..120: mol_type = other DNA

SEQ ID NO: 105594 - DNA, 120 bp, synthetic construct
  source 1..120: mol_type = other DNA
acacctagctttttttttttttgctttttgtagagatggagtctcactatgttgcccaggctggtctcaaactccaggccttaagcaatcctcccacctcagcctcccaaagtgcgaaga

SEQ ID NO: 105595 - DNA, 120 bp, synthetic construct
  source 1..120: mol_type = other DNA
atgggatactgaatggtgagctagcacgattttacagagagtgaattttttttgtgtgtgtgtgaggcagtcttactctgttgcccaggctggagtgcagtggtgcagtctcggcccact

SEQ ID NO: 105596 - DNA, 120 bp, synthetic construct
  source 1..120: mol_type = other DNA
atcccagttatcagatcccctgagggaacagtcaccccgatcaccctcagtcagatgagtgtgtgtagatcaatgcctcatagatgaaggcactgaggcacagagtggttaagtcatctg

SEQ ID NO: 105597 - DNA, 120 bp, synthetic construct
  source 1..120: mol_type = other DNA
taatcccagcactttgggaggccaaggagggcagatcacctgaggtcaggagttcaagaccagcctggtcaacatgggggaacctcatctctactaaaaatacaaaatttagctgggcat

SEQ ID NO: 105598 - DNA, 120 bp, synthetic construct
  source 1..120: mol_type = other DNA
atcccagctctgccataaatccctgtgtgactctgggcaatttaacctcttagagctttagtttcttcatctgtaatatgagggtagcagtactaccacatagggttttgagggagtaat

SEQ ID NO: 105599 - DNA, 120 bp, synthetic construct
  source 1..120: mol_type = other DNA
atgggaagaagtctgaggactgagtcctagaacaccctgcattttagaggggggacatgtgtaagagccagcaaaggagacagaattgtgcttggagaggcaggaggaagcccaggagag

SEQ ID NO: 105600 - DNA, 120 bp, synthetic construct
  source 1..120: mol_type = other DNA
tcataataaagctggattctctttaagagattgagaaattaaaaggcaaaagctgatatatcatgtttagttatattgtgagtcttataagaagctgggaggcaaccccattaactcacc

SEQ ID NO: 105601 - DNA, 120 bp, synthetic construct
  source 1..120: mol_type = other DNA
ggagaaaatgccttactaattccttgtattttctcagagaaacaagaggcaccgtcatcagcctcatgtgagggtgggaaggagggatggggtttgcggagagggaaagtgtggtatggt

SEQ ID NO: 105602 - DNA, 120 bp, synthetic construct
  source 1..120: mol_type = other DNA
ggagctggggatgtttggggtggaaaaaagaacaatggtctgggagggaatatgggaaatttttttttttttttttttttttttttttgagatggagtttcgctgttgtcatccaggctg

SEQ ID NO: 105603 - DNA, 120 bp, synthetic construct
  source 1..120: mol_type = other DNA
tgattggatcacaggggtggtttcccccatgctgttcttgtgacagtgagtgggttttcaggagagctgatggtttgaaagtgtggcacttcctctctctctttctctctctctctcacc

SEQ ID NO: 105604 - DNA, 120 bp, synthetic construct
  source 1..120: mol_type = other DNA
ctcctggattccggtttacacacttccattttctgccttttctctctgcttaatataaggattaatgagaactccctgattcccaggaagaaaatgtcagcagagctttcttaggcggaa

SEQ ID NO: 105605 - DNA, 120 bp, synthetic construct
  source 1..120: mol_type = other DNA
ctcttgtggcagtggaaaatacaactctcatggaacgtctgttccagaaggaaagactgccaataaacaataaaataggcaaaagatatagcatgttagagagtggtaagtaccacagat

SEQ ID NO: 105606 - DNA, 120 bp, synthetic construct
  source 1..120: mol_type = other DNA
tcactatagcctccgcctcccaggttccagtgaatctcctgcatcagcctcccaggtagataggattacaagcaagcatcaccacgcctggctaatttttgtatttttagtagagacagg

SEQ ID NO: 105607 - DNA, 120 bp, synthetic construct
  source 1..120: mol_type = other DNA
agcccagcgtagtggcgcatgcctgtaatcccagctactagggaagctgaggcaggagaatcgcgtgaacctgggaggcaaatgttccagtgagccgagatcgtgccattgcactccagc

SEQ ID NO: 105608 - DNA, 120 bp, synthetic construct; identical to SEQ ID NO: 7335
  source 1..120: mol_type = other DNA

SEQ ID NO: 105609 - DNA, 120 bp, synthetic construct; identical to SEQ ID NO: 7336
  source 1..120: mol_type = other DNA

SEQ ID NO: 105610 - DNA, 120 bp, synthetic construct; identical to SEQ ID NO: 7337
  source 1..120: mol_type = other DNA

SEQ ID NO: 105611 - DNA, 120 bp, synthetic construct; identical to SEQ ID NO: 7338
  source 1..120: mol_type = other DNA

SEQ ID NO: 105612 - DNA, 120 bp, synthetic construct
  source 1..120: mol_type = other DNA
aaagtgctgggattacaggcatgagccaccgtgcccaacctggatttttattctgaagactaatagggattctaaggaaggaaccagcctgattgaatttgcatatgtgtccacatctgc

SEQ ID NO: 105613 - DNA, 120 bp, synthetic construct
  source 1..120: mol_type = other DNA
acactcccctccaactcaggaagaaatgtgtgcagagtccttagctggggcgtgtgcactcggggccaggtgctcagtaggcttcggtgaatatttgttggctgatttattcagaaattc

SEQ ID NO: 105614 - DNA, 120 bp, synthetic construct
  source 1..120: mol_type = other DNA
cggttcttggatgccttctacagagacaaccatagccccaaattatagggatcacatatcagtgggtgagacatccttgcttgggatgaggaggggatgagctgtgtgaagcaaggcgcc

SEQ ID NO: 105615 - DNA, 120 bp, synthetic construct
  source 1..120: mol_type = other DNA
tgagttgaggaccaagaagcagttatcctcttgcctttgcaggacccaggcaaagggaagggcatagtgacagtgatgatctctcttccggaagtctttggtttgctgagagtaaaaggc

SEQ ID NO: 105616 - DNA, 120 bp, synthetic construct; identical to SEQ ID NO: 7342
  source 1..120: mol_type = other DNA

SEQ ID NO: 105617 - DNA, 120 bp, synthetic construct
  source 1..120: mol_type = other DNA
gagatcgtgctattgcactccagcttgggcaacaagagcaaaactccatctcaaaaaaaaaaaaaaagaaagaaaaagaatggagcattaaagacagttctgcagttctggtgagggctt

SEQ ID NO: 105618 - DNA, 120 bp, synthetic construct; identical to SEQ ID NO: 7343
  source 1..120: mol_type = other DNA

SEQ ID NO: 105619 - DNA, 120 bp, synthetic construct
  source 1..120: mol_type = other DNA
catgtaagaaggacatgcattttgggggctggggcaggatgctgtggtttgaatgcatccctcaaatttcatgtgttggaaacttaatctccaaattcatatgttgatgaaattggaggt

SEQ ID NO: 105620 - DNA, 120 bp, synthetic construct
  source 1..120: mol_type = other DNA
aatctaagaaaagatagttggaacaagtgttccattgtgtgaatgcagcagaatttatttatccattattgaggaggatttgggtagtttccagtttggagctattatgaatattctagt

SEQ ID NO: 105621 - DNA, 120 bp, synthetic construct
  source 1..120: mol_type = other DNA
tcattgttccctttatgtttagttcttttatgtcctttttaagaatttttgcagccagcgcggtggctcacacctgtaatcccagcactttgggaggctgaggctggcggatcacaaggt

SEQ ID NO: 105622 - DNA, 120 bp, synthetic construct; identical to SEQ ID NO: 7344
  source 1..120: mol_type = other DNA

SEQ ID NO: 105623 - DNA, 120 bp, synthetic construct; identical to SEQ ID NO: 7345
  source 1..120: mol_type = other DNA

SEQ ID NO: 105624 - DNA, 120 bp, synthetic construct; identical to SEQ ID NO: 7346
  source 1..120: mol_type = other DNA

SEQ ID NO: 105625 - DNA, 120 bp, synthetic construct
  source 1..120: mol_type = other DNA
aggttatagtgagtcgaggttgcaccactgccctccagcctaggtgacagagtgagactgtctcaaaaaaaaaagaaagaaaatatacattccatccagaactgttcacctttattctac

SEQ ID NO: 105626 - DNA, 120 bp, synthetic construct
  source 1..120: mol_type = other DNA
ttgggaagctgaggtgggagaatagcttgaggccaggagttcaagccagggcaacatagtgagaccccatctctacaaaagatacaaaaattagccaggcgtggtggtacacctgtagtc

SEQ ID NO: 105627 - DNA, 120 bp, synthetic construct
  source 1..120: mol_type = other DNA
ttaaaaaaagtctaaatatgtttaatgttgtctcagaagacaaaatatattttagacagatattcctcagtgatgagtaagcctcagctatctggaaaattcatgcaggcgccagagatc

SEQ ID NO: 105628 - DNA, 120 bp, synthetic construct
  source 1..120: mol_type = other DNA
tacactgccattcccagttctttttttcaaaaaaaaaaaaaaaatgtctacagaatcggccaggtgtggtggctcatgcctgtaatactagcactttggaaggctgaggtgggtggatca

SEQ ID NO: 105629 - DNA, 120 bp, synthetic construct
  source 1..120: mol_type = other DNA
aaacctcaagccttggagtccaaccccttttttgacagatgctaagagtggagacatgacttatcaagatcttacaactggctgggcacggtggctcacgcctgtgatcccagcactttg

SEQ ID NO: 105630 - DNA, 120 bp, synthetic construct; identical to SEQ ID NO: 7347
  source 1..120: mol_type = other DNA

SEQ ID NO: 105631 - DNA, 120 bp, synthetic construct; identical to SEQ ID NO: 7348
  source 1..120: mol_type = other DNA

SEQ ID NO: 105632 - DNA, 120 bp, synthetic construct; identical to SEQ ID NO: 7349
  source 1..120: mol_type = other DNA

SEQ ID NO: 105633 - DNA, 120 bp, synthetic construct
  source 1..120: mol_type = other DNA
aaatgttgggattacaggcgtgagccaccatgcccggccaaaacttcagtttataacacaatctttcacgtgtcttctgctttcattaaaagaatagacagttcccttctttatttcagt

SEQ ID NO: 105634 - DNA, 120 bp, synthetic construct; identical to SEQ ID NO: 7350
  source 1..120: mol_type = other DNA

SEQ ID NO: 105635 - DNA, 120 bp, synthetic construct; identical to SEQ ID NO: 7351
  source 1..120: mol_type = other DNA

SEQ ID NO: 105636 - DNA, 120 bp, synthetic construct; identical to SEQ ID NO: 7352
  source 1..120: mol_type = other DNA

SEQ ID NO: 105637 - DNA, 120 bp, synthetic construct
  source 1..120: mol_type = other DNA
accaggatctcttggcctcatgatcagcctgcctcggcctcccaaagtgctgggattacaggtgtgagccaccgtgcccagcctatacttccctttttgaataccatttggtgttttgaa

SEQ ID NO: 105638 - DNA, 120 bp, synthetic construct
  source 1..120: mol_type = other DNA
tagtctgcttgggctaccataacagcagcttaaactgttgtttagccactcagacttaaacaacagaaatttatttccttatagttctggaggctggaagttcaaggtgccggcaaggtt

SEQ ID NO: 105639 - DNA, 120 bp, synthetic construct
  source 1..120: mol_type = other DNA
ggttcacgccattctcctgcctcaatctcccgagtagctgggactacaggcgtccgccaagatgcccagctaatttttttttttttttttttttttgagacggagtctcgctctgttacc

SEQ ID NO: 105640 - DNA, 120 bp, synthetic construct
  source 1..120: mol_type = other DNA
atcttggagttcaggagtcccacactgcgaaccatattacctaataatccaacctgcttgtaattcacttatttaaccaatatttattgagtgccaactttgagcctaagatacagcagt

SEQ ID NO: 105641 - DNA, 120 bp, synthetic construct
  source 1..120: mol_type = other DNA
gtgtatcacggtcagcaaagaagccatgtgacagagaagggtgggccagggagagacggataagtgatctaactcctgaggaggtggcctggccaggagctagagcatgaggatctcgta

SEQ ID NO: 105642 - DNA, 120 bp, synthetic construct
  source 1..120: mol_type = other DNA
aagctgtcggtggatctaccattctggggtctggaggacctcttctcacagctccactaggtggtgccccagtagggactgtgtgtggggtctctgaccccacatttcccttctgcactg

SEQ ID NO: 105643 - DNA, 120 bp, synthetic construct; identical to SEQ ID NO: 30302
  source 1..120: mol_type = other DNA

SEQ ID NO: 105644 - DNA, 120 bp, synthetic construct; identical to SEQ ID NO: 9199
  source 1..120: mol_type = other DNA

SEQ ID NO: 105645 - DNA, 120 bp, synthetic construct
  source 1..120: mol_type = other DNA
ggagcgcctctgcccagccgcgaccccgtctgggaggtgaggagcgtctctgcccggccgccccgtctgagaagtgaggagaccctccgcccggcagccgccccgtctgagaagttagga

SEQ ID NO: 105646 - DNA, 120 bp, synthetic construct
  source 1..120: mol_type = other DNA
ctttgttaaacagatgcttgaaggcagcatgctcattaagagtcatcaccactccccagtctcaagtacccagggacacaaatgctgcggaaggccgcagggtcttctgcctaggaaaac

SEQ ID NO: 105647 - DNA, 120 bp, synthetic construct
  source 1..120: mol_type = other DNA
tcaaggctgtggtgagccatgatcatgctactgtactctagcctaggcaacagatgagaccctatctcgaaaaaaagaaaaaaaagaaaatgggaacactggctggctggatatttgtta

SEQ ID NO: 105648 - DNA, 120 bp, synthetic construct
  source 1..120: mol_type = other DNA
ggcgtgaaaccaattcctatttacttagcccagctccatggggtactgagatacatggggccgaaaaggggtaatatggccatcttttatcagaaaaagtgacaaaacgggaatttaaaa

SEQ ID NO: 105649 - DNA, 120 bp, synthetic construct
  source 1..120: mol_type = other DNA
acactccatgtacccaaaagcgccaatcctgtttgccatatctctgccttcttcaggtttcaccggctcctagcaaagaaaaaaaaatagtccttttagctaatagtgtggcatacatat

SEQ ID NO: 105650 - DNA, 120 bp, synthetic construct
  source 1..120: mol_type = other DNA
acatatggtaactaccccctaccaaacataaaatctctaataaacatggtattcactgggaagtagagggaagaggtcagaggagccctggaaggttaaggagtcaatcaagagcaaaat

SEQ ID NO: 105651 - DNA, 120 bp, synthetic construct
  source 1..120: mol_type = other DNA
ctgagattgcgccactgcactccagcctgggtgacagaatgagactccatatcaaaaaaaagaaagttcctacatctagagccactgattactagctactaatgaaatggttcattctca

SEQ ID NO: 105652 - DNA, 120 bp, synthetic construct
  source 1..120: mol_type = other DNA
cattctagggcagcagctgacccagggtccacatgttctttttctaacttgttcatcaactctcagcataacttctaccctatggggtttactggtatttcaaatggctgaagagtgact

SEQ ID NO: 105653 - DNA, 120 bp, synthetic construct
  source 1..120: mol_type = other DNA
caacagagtgagactctgtatcaaaaaagtcaaaaaccccatctccacaaaaacatacaaaaacttagcagtttacagtggtacatgtgcctgcattcccacctacttgagaggctgagg

SEQ ID NO: 105654 - DNA, 120 bp, synthetic construct
  source 1..120: mol_type = other DNA
ggagtgcagtgagctgagatcgcaccattgcactccagcctgcgtgacaagagcaaaagtctgtctcaaaaaaacaaaaataaaaataaataaaacaaaacagcatacaaccatgaccca

SEQ ID NO: 105655 - DNA, 120 bp, synthetic construct
  source 1..120: mol_type = other DNA
ctgaatctgcaactgcactcaagactgggcaagaaagcgagaccctgtctcaaaaagaaaaaagtgagactgaagagacaaaatgttttgctctggaggcagttttttccctcaagaatt

SEQ ID NO: 105656 - DNA, 120 bp, synthetic construct
  source 1..120: mol_type = other DNA
caagcctggtttcacagaatgtcaggttagcattcttcagtctttttctaaagaatactgacttctgggccaggcgcagtggctcacgcctgtaatcccagcactttgggaggccgaggc

SEQ ID NO: 105657 - DNA, 120 bp, synthetic construct
  source 1..120: mol_type = other DNA
ataataataataattattatttttgagatagagtcttgctctgttgctcagtctggaatgcagtgccataatctcggctcactgcaatctccacctaccaggttcaaacgattctcctgc

SEQ ID NO: 105658 - DNA, 120 bp, synthetic construct
  source 1..120: mol_type = other DNA
gcctcggcctcccaaagtgttgggattgcaggcgtgacccaccgcgcctggcctttttttttttttttttttttttttttttttttgttgagacggagtcttactctgttgctcagactg

SEQ ID NO: 105659 - DNA, 120 bp, synthetic construct
  source 1..120: mol_type = other DNA
agtcggaagttcgagactagcctgacaaatgtggagaaaccccatctctactgaaaatacaaaattagctgggcgtggtgaagcatgcctgtaatcccagctactcaggaggctgaggca

SEQ ID NO: 105660 - DNA, 120 bp, synthetic construct
  source 1..120: mol_type = other DNA
atcacaaataacctccacaaggcccactgtacttctgtcatgcaaaccatcattctggcatgtgtaactaagatatactgatgcccaattatcacaatctgtctgccctcacaataatgg

SEQ ID NO: 105661 - DNA, 120 bp, synthetic construct
  source 1..120: mol_type = other DNA
atactcacagaccatgcctcaaggttttaagtcaaggtctctaaatttcttatgggcaagattctggttgttccaagatgcccaggcagaaataatgtttccaagagaaccaaagagctg

SEQ ID NO: 105662 - DNA, 120 bp, synthetic construct
  source 1..120: mol_type = other DNA
catggcagtattcatctcttagaaagcgctttggtgctgccaaacattttccgttacttcacagaaccttgatgtcacctataaaaaccgttttacaaatgaggaaggctcaaaggtcag

SEQ ID NO: 105663 - DNA, 120 bp, synthetic construct
  source 1..120: mol_type = other DNA
ttcaaggctgcatgatcatgtcacagcactgcaggcctgggagacaaagtacaatccctgtctctttatttaagagaaaaaaaaaaaagtatgagaggccaagcaaagcattacttagac

SEQ ID NO: 105664 - DNA, 120 bp, synthetic construct
  source 1..120: mol_type = other DNA
aatacatatgaatgtaaacaaagtctggatgagtagcagttaaaaatgaaaaaacagccaatcacctgcggtcaggagttcatgaccagcctggccaacgtagtgaaaccccatttctac

SEQ ID NO: 105665 - DNA, 120 bp, synthetic construct
  source 1..120: mol_type = other DNA
tcataggtagcttacaggatgacacatgctttggtaaccatggggcataaacctctattagcatactcaaattcaaacttctagtacgccgatccacctggcaccaaaaggttatacatt

SEQ ID NO: 105666 - DNA, 120 bp, synthetic construct
  source 1..120: mol_type = other DNA
agtgagccaagatcgggccactgcacaccagcctgggggacagagtaagactccatctcacaaaaaaaaaaaaaaaaaaaaaggaaacaatttgtcaagcagggtaaaaacaatgaaagg

SEQ ID NO: 105667 - DNA, 120 bp, synthetic construct
  source 1..120: mol_type = other DNA
agtgagctgagattgcatcactacactccagcctggggaaccccagtgagacactgtctctaaaaaaagaaggaaaagaaaaaaaaaaaaatcagccagttgtggtagcatgcacctgta

SEQ ID NO: 105668 - DNA, 120 bp, synthetic construct
  source 1..120: mol_type = other DNA
cccacagtgctgagggattacaggcgtgagccactgcccatctatctacgcatctatccaatctatgtacctatctaacctatctatgtgtttctctattatgtagttattttcagaaag

SEQ ID NO: 105669 - DNA, 120 bp, synthetic construct
  source 1..120: mol_type = other DNA
gggcagggacttgggggtggagagaaatggaaaatgactaatggaatactggagtttctcaggtaaaaagatttttccaaaattattgtggtgatggctgcacaactctatgaatatact

SEQ ID NO: 105670 - DNA, 120 bp, synthetic construct
  source 1..120: mol_type = other DNA
tgtcttatttaaggtggtatttttcaagtctctgttacctatagtcaaactaatcctaaattatatacactcagctgggcatggtgattcacgcctgtaatcccagcacactgggaggcc

SEQ ID NO: 105671 - DNA, 120 bp, synthetic construct
  source 1..120: mol_type = other DNA
agaatctcctgaactcaggaggcagaggctgcagtaagccgatatctcgccattgcattccagcctgggaaacaagagaaaaaccccgtctcaaaaaaaaaaaaaaagttagctgggttg

SEQ ID NO: 105672 - DNA, 120 bp, synthetic construct
  source 1..120: mol_type = other DNA
taaataaataaataaaataaaaaaatagacactgggcgtggtggctcacacctgtaatcccagcactttgggaagccaaggcaggcaaattgcttgagcctaagagttggagaccatcct

SEQ ID NO: 105673 - DNA, 120 bp, synthetic construct
  source 1..120: mol_type = other DNA
agcttgcagtgagctgagatcacaccactgcactccagcctggtctatagagcgagaatccatctcaaaaaaaaaaaaaaagagctatctttgctttgtttatagttcaacatgcccaca

SEQ ID NO: 105674 - DNA, 120 bp, synthetic construct
  source 1..120: mol_type = other DNA
ttatctctcctttccactttgctataatgcagcattctttacaagtacatggtttgtcaagaaaggaaatcacgcttagctctcccagacgtgtcattttccaggctaggtttagtctca

SEQ ID NO: 105675 - DNA, 120 bp, synthetic construct
  source 1..120: mol_type = other DNA
ttaattatcttttatgtagagacagggtcttgctgtgttgccctggctagtctcaaactcctagcctcaagtgattctcccgtgttggctccctaagtgttgggactacaggggtgagcc

SEQ ID NO: 105676 - DNA, 120 bp, synthetic construct
  source 1..120: mol_type = other DNA
ctgggtcccctgaattttggtatgtattttagtaacagtttgtcaatttctgcaaaaaagccagctggaattttgataggaattacactgaatctacagatcgatttggggagtactgtc

SEQ ID NO: 105677 - DNA, 120 bp, synthetic construct
  source 1..120: mol_type = other DNA
tgtaatcccagcactttgggaggccgaggcaaatggatcacctgacgtcaggaaatcgagaccagtctggccaacatggcaaaatcccgtctctactaaaaatacaaaaaaaaattagcc

SEQ ID NO: 105678 - DNA, 120 bp, synthetic construct
  source 1..120: mol_type = other DNA
agtcactctgaaatcatcaactcttggttctttggttctagcatgtcttacacctgtttactcttactgttttaatgtctgtttactcattacagatgatgtcaaggaaggggatggctt

SEQ ID NO: 105679 - DNA, 120 bp, synthetic construct
  source 1..120: mol_type = other DNA
cctatctaagctacatatctaaccatgtgttatagccatacagtggagtactactcagcaacaataaggaacgaagtacagtactgtactgaaacatgctacaacatggatgaatcttga

SEQ ID NO: 105680 - DNA, 120 bp, synthetic construct
  source 1..120: mol_type = other DNA
ggcggatcacgaggtcaggatattgacaccatcctaacacagtgaatcccagtctctaccacacacacaaaaaattagccgggcgtggtggcaggtgcctgtagtcccagctacttggga

SEQ ID NO: 105681 - DNA, 120 bp, synthetic construct
  source 1..120: mol_type = other DNA
gtgacagtagagaaactgaaaaaatctatttcagaaaaggtaaaaggcgtcatggatattaatataaaagagtacggggccaggtgtggtggctctcccctataatctcagcattctggg

SEQ ID NO: 105682 - DNA, 120 bp, synthetic construct
  source 1..120: mol_type = other DNA
tacaggcgtgagccactgtgcccggcctaattaatttatcttttttttttttttttttttttgagacagcgtttcgatcttgtcccccagactggagtgtaatggcacgatctcagctca

SEQ ID NO: 105683 - DNA, 120 bp, synthetic construct
  source 1..120: mol_type = other DNA
aagacatatccacaatttaatgtcacaaatttttccagaaaatggtcaccacaaacatcaggtcttttagaggccaggcgtgatggctcacttctgtaatcctagcactttgggaggtca

SEQ ID NO: 105684 - DNA, 120 bp, synthetic construct
  source 1..120: mol_type = other DNA
cactgcactggcttttttttttttttttttttttaagaggctcagcctcaagaacagttaggaccacaggtcccttgtctcaaattctctctctgtgtgtgtgtgtgtgtgtgtgtgtgt

SEQ ID NO: 105685 - DNA, 120 bp, synthetic construct
  source 1..120: mol_type = other DNA
aattctcctgcatcagcctcatgagtaactagaattacaggtgcgcacaaccatgcccagctaatttttgtaattttagtagagatggggtttgaccatattggccaaactggtctcaaa

SEQ ID NO: 105686 - DNA, 120 bp, synthetic construct
  source 1..120: mol_type = other DNA
gaattcagaaaggagatttttgaaaataagggtggaaagatggggcgatggttagaccagaggatatggtatgtcatgcagagcaatctgcattctattctgtaaggaagggaaagccac

SEQ ID NO: 105687 - DNA, 120 bp, synthetic construct
  source 1..120: mol_type = other DNA
ctgtaatcccagcactttgggaggctgaggaggatggatcatttgagatcaggagttagagaccagcctggccaacatggtgagaccctgactctactaaaaatacaaaaaattagttgg

SEQ ID NO: 105688 - DNA, 120 bp, synthetic construct
  source 1..120: mol_type = other DNA
tccattacacgaaatatccagaataggcaaatctatagagacacaaagtagattagtggttacctaaggctgggcgtggtgatagggagattgaagatgacagttgaagaacatagggtt

SEQ ID NO: 105689 - DNA, 120 bp, synthetic construct
  source 1..120: mol_type = other DNA
agagagacaagtcagtgaattttttctttcgctacattcagtcaaaagcacagaataggtaaagagtaggatttaggctaggcgtggtggctcacacctatagtcccagcactttgggag

SEQ ID NO: 105690 - DNA, 120 bp, synthetic construct
  source 1..120: mol_type = other DNA
aaaaaaaagaattttgctgtctgagtattacagtattattacagggctttaatactggtggctcacgcctgtaatcccagttatttgggagactgagacaggagaattgctgcctcggga

SEQ ID NO: 105691 - DNA, 120 bp, synthetic construct
  source 1..120: mol_type = other DNA
gatttatatagtagattacatcaagggggtaagaaataaagcaatacatatgcaaaaatccatcttggaatctgaactcaagaaactacagaaacggctgggcacggtggctcacgcctg

SEQ ID NO: 105692 - DNA, 120 bp, synthetic construct
  source 1..120: mol_type = other DNA
gagcaagattgtagccaaaaaggtgaggtggggggatggtatataaaagggttaatttccagccgggcacggtggctcacgcctgtaattccagcactttgggaggccgaggcgggcgga

SEQ ID NO: 105693 - DNA, 120 bp, synthetic construct
  source 1..120: mol_type = other DNA
tgaaagggccaaactaccatccatccatctgtccataatgaacttgagcctggtataggttgagtactgcttatccaaaatgcttgggcccagaagtgtttcagatttcagaatttcttc

SEQ ID NO: 105694 - DNA, 120 bp, synthetic construct
  source 1..120: mol_type = other DNA
gacaacatggcaaaacgtcatctctataaaaattaaattaattaactaggtatggtggtgcttgcctgtagtcccagatgctcatgaggctgaggcaggagtattacttgggcacaagag

SEQ ID NO: 105695 - DNA, 120 bp, synthetic construct
  source 1..120: mol_type = other DNA
cctataatcccagggctttgtgaggttgagacgagagaatcacttaaggccaggagttcaagaccagtctgagcacatagtgagacccctctctctacaaaaaaaaaaattacaaaataa

SEQ ID NO: 105696 - DNA, 120 bp, synthetic construct
  source 1..120: mol_type = other DNA
ggaagccaaggcaggtggatcacaaggtcaggagttcaagaccagcctggccaacaaagtaaaaccccgtctctagtaaaacacacacacacacacacacacacaaaattagccgggcat

SEQ ID NO: 105697 - DNA, 120 bp, synthetic construct
  source 1..120: mol_type = other DNA
ggtgacagagcgagactgtgtctcaaaaaaaaaaaaaaaaaaaaaaaaattagctgggcatggtgacatgcctgtaaaccccaactaatggggaggctgaggcaggagaatcacttgaat

SEQ ID NO: 105698 - DNA, 120 bp, synthetic construct
  source 1..120: mol_type = other DNA
cttccttaacctctcaaagcctatatcccaaacaaagttacaaaaaaaaatcccagtagtagagcatatgatctctaggtccatggaagagacaccagagaatcacaactcatctgcaac

SEQ ID NO: 105699 - DNA, 120 bp, synthetic construct
  source 1..120: mol_type = other DNA
tattatgaaatcctttccgtttttttttttttttttttttttttgagtcttgcaccgtctcccaggctggagtgcaatggctcgatctctgctcacagcaacctccgcctcccaggttaa

SEQ ID NO: 105700 - DNA, 120 bp, synthetic construct
  source 1..120: mol_type = other DNA
agccgagatggcgctactgcactctggcccggacgacagagtgagactcagtctcaaaagagaaaaaaaaaaaaatatatatatatacacacacacatacacacacgtatatgtacacat

SEQ ID NO: 105701 - DNA, 120 bp, synthetic construct
  source 1..120: mol_type = other DNA
tcccaaagtgctgggattacaggcatgaaccaccgcgccctgccaggatccttttaaaactacaaatatgggtgggcgtggtggctcacccttgtaatcccagcactttgggaggccaag

SEQ ID NO: 105702 - DNA, 120 bp, synthetic construct
  source 1..120: mol_type = other DNA
cattcatctatctccctcaattgaaggcaggaccatccagttaacaaggggagagtgctgtgtaagctaatgaaccgaaattttttggcaaatgaacagtttctcccaaactattcacca

SEQ ID NO: 105703 - DNA, 120 bp, synthetic construct
  source 1..120: mol_type = other DNA
catcgcttaaatcatttacagttttgtgtgttgttttttttttccaaatggaaaataccccttttccactcaaaacagaccccaaagctttcagacgagttcgggcgcgttccaggtggt

SEQ ID NO: 105704 - DNA, 120 bp, synthetic construct
  source 1..120: mol_type = other DNA
atactctttcttggttcgagtatgaagaaggaggattctcaatctcattttctctctctctctctctctctacacacacacacacacacacacacacacacacaccacacacacacacac

SEQ ID NO: 105705 - DNA, 120 bp, synthetic construct; identical to SEQ ID NO: 14388
  source 1..120: mol_type = other DNA

SEQ ID NO: 105706 - DNA, 120 bp, synthetic construct; identical to SEQ ID NO: 14389
  source 1..120: mol_type = other DNA

SEQ ID NO: 105707 - DNA, 120 bp, synthetic construct
  source 1..120: mol_type = other DNA
tacataatgggcgcagcctggtgttgtggtggatctgaatgtcaagagaacaaaggcagaagaatgcaacattttttttttaatactttaagttctagggtacatgcgcacaacgtgcag

SEQ ID NO: 105708 - DNA, 120 bp, synthetic construct; identical to SEQ ID NO: 14390
  source 1..120: mol_type = other DNA

SEQ ID NO: 105709 - DNA, 120 bp, synthetic construct
  source 1..120: mol_type = other DNA
gaggagcgcctctgcctggctgccccgtctgggaagtgaggagagcctctgcccggctgccaccccgtctaggaagtgaggagcatctctgcctggccaccccgtctgggatgtgaggag

SEQ ID NO: 105710 - DNA, 120 bp, synthetic construct
  source 1..120: mol_type = other DNA
tgccccatctgggaaatgggaagcacctctgcccggccaccccatctgggaagtgaggagcgcctctgcccagctgacaccccatctgggatgtgaggagcacctctgcccggccgcccc

SEQ ID NO: 105711 - DNA, 120 bp, synthetic construct; identical to SEQ ID NO: 9431
  source 1..120: mol_type = other DNA

SEQ ID NO: 105712 - DNA, 120 bp, synthetic construct; identical to SEQ ID NO: 35228
  source 1..120: mol_type = other DNA

SEQ ID NO: 105713 - DNA, 120 bp, synthetic construct
  source 1..120: mol_type = other DNA
cttctgttttttttaagattatgaacatatgcggcatggcaggcatcaaagtacaaggaactacgccttttataggagggaggggcttctttggttcgagctataagctctccttctttt

SEQ ID NO: 105714 - DNA, 120 bp, synthetic construct
  source 1..120: mol_type = other DNA
tttcatcataaactggatatcctaagagttcctcttgctttagaggaattagaaagaaggatggcttgattgttcctaacacacatgcccctgtccatttagccggcagttgctgatgta

SEQ ID NO: 105715 - DNA, 120 bp, synthetic construct
  source 1..120: mol_type = other DNA
tttaaaggactccaactctttctctttctcaggggaattgggttttcttacatacgactgagtttctgcttacatattctttaatttcttttaattcctatttccattcccccctttggt

SEQ ID NO: 105716 - DNA, 120 bp, synthetic construct
  source 1..120: mol_type = other DNA
tgcttgcacaatgacccttttcatcaaccttattttatataagaaattaaactagtttgtgggcccctacatgtactgtgggttccagtcaccccaacgactgatcctaatggatgagtg

SEQ ID NO: 105717 - DNA, 120 bp, synthetic construct
  source 1..120: mol_type = other DNA
tttttttttttttttgagacagtctcgctctgtctctggaatgcagtggcactatctgggctcactacaacctccatcttctgggtacctagattcagtaacagtgtatccacttagaga

SEQ ID NO: 105718 - DNA, 120 bp, synthetic construct
  source 1..120: mol_type = other DNA
atcctcttcctcctctttgacctcttcagtaagcgacagcaccatagcattcatatctggaaaagtagaaaccccaagagaaagatcaaggcattggtcctgagggtgttggaaggaggt

SEQ ID NO: 105719 - DNA, 120 bp, synthetic construct
  source 1..120: mol_type = other DNA
tgctggcattacaggcgtgagccaccgccctgatttttttttttttggcatctcctttatttgtggcatgagagaaatgttcctaatgtgaggctcagctgggtgttacagaacagccta

SEQ ID NO: 105720 - DNA, 120 bp, synthetic construct
  source 1..120: mol_type = other DNA
gcaagccttttcgctatctctaccataatgcaaaaccaactatgtcagcaatgttttcagcctgccatatcaaagtattccagaaaattaaaatttagagctgccactctctacaaggct

SEQ ID NO: 105721 - DNA, 120 bp, synthetic construct
  source 1..120: mol_type = other DNA
taagcctaccgtaatagtgcttgtttagagacaattccaatgtacctgtggtcaaaggttcataaacataagcaatgccaaaagtgggccaaatgtgctatgggacaacattaggtccct

SEQ ID NO: 105722 - DNA, 120 bp, synthetic construct
  source 1..120: mol_type = other DNA
tctccttttatctgtaatattactttttccactcttgggtgcaggtgtagctgatgagtgggactcgatccctgctggtattgctatgtgtggcatgtctgcttgcagatacttgaccat

SEQ ID NO: 105723 - DNA, 120 bp, synthetic construct
  source 1..120: mol_type = other DNA
tgtgagtccctaatgagagaatagtgtgtttcaagttactgccagggtggaaaacagcaaaaccaaaatggtatcgggaaggaagccatgcccactcttaaaaattcattaagttttttc

SEQ ID NO: 105724 - DNA, 120 bp, synthetic construct
  source 1..120: mol_type = other DNA
aaggtccaagaactctgctttgaagttcaggatctaggttaccagagctagacaacatcttgacctataattctaacaggtacttatcagatacatgaaaacaaatgccaactgagtata

SEQ ID NO: 105725 - DNA, 120 bp, synthetic construct
  source 1..120: mol_type = other DNA
taggccattcttgttttgctataaggaaatgcctgaggctgagtaatttataaagaaaagaggtttagttggctcacagttctgcaggcttaacaggaagtgtgatgctggcatctgctt

SEQ ID NO: 105726 - DNA, 120 bp, synthetic construct; identical to SEQ ID NO: 35220
  source 1..120: mol_type = other DNA

SEQ ID NO: 105727 - DNA, 120 bp, synthetic construct
  source 1..120: mol_type = other DNA
tttgttttgttttttgttttttccagggacctgcagcaaagcttataagtgatcagtttgcttggctgtcttgaacagcgggcttacaggtgtcctaagcctgtattctatcctaaggta

SEQ ID NO: 105728 - DNA, 120 bp, synthetic construct
  source 1..120: mol_type = other DNA
cccatagccgtcagcaaaaagtgtaagaccgattaatccaaagagaatagcacttaacattccatagtgccaaacccgtccttagccaaaagggattttaccaagagccctcatttttaa

SEQ ID NO: 105729 - DNA, 120 bp, synthetic construct
  source 1..120: mol_type = other DNA
agggctcttcagttagcgggtgatgaatgctggcaggatggggtcctttccttcaaggcagtgggttcccttctggcccacagtttgtctagaaatgtcatttgggaactagggctggaa

SEQ ID NO: 105730 - DNA, 120 bp, synthetic construct; identical to SEQ ID NO: 105728
  source 1..120: mol_type = other DNA

SEQ ID NO: 105731 - DNA, 120 bp, synthetic construct; identical to SEQ ID NO: 105727
  source 1..120: mol_type = other DNA

SEQ ID NO: 105732 - DNA, 120 bp, synthetic construct; identical to SEQ ID NO: 35220
  source 1..120: mol_type = other DNA

SEQ ID NO: 105733 - DNA, 120 bp, synthetic construct
  source 1..120: mol_type = other DNA
gatatggttgggatatttgtctctgcccaaatctcatgttgaaatgtaatccttattttccccaatgttggaggtgaggcctgttgggacgtgtttgggtcatgggggtggaaacctcat

SEQ ID NO: 105734 - DNA, 120 bp, synthetic construct; identical to SEQ ID NO: 35221
  source 1..120: mol_type = other DNA

SEQ ID NO: 105735 - DNA, 120 bp, synthetic construct; identical to SEQ ID NO: 35222
  source 1..120: mol_type = other DNA

SEQ ID NO: 105736 - DNA, 120 bp, synthetic construct
  source 1..120: mol_type = other DNA
cttctttcacattccccaatgtctaagggatagcctctgtgccactttttgccagagtgtctttgagccagattcatattttgcatagcaccccatcaaaagtagttcatcaaatgtcta

SEQ ID NO: 105737 - DNA, 120 bp, synthetic construct
  source 1..120: mol_type = other DNA
agcaagacaatccacaaactccctgggccccctataacgagacttgccttgcaatataccatctttttaattctcaaggagtttcagaagatgaatgaccccttagaatttcttgaagga

SEQ ID NO: 105738 - DNA, 120 bp, synthetic construct
  source 1..120: mol_type = other DNA
cagaaaagctgcctgacaaaacggggcactgagtgttggcatcctgttgccctccattttctcaggcaggcaatgccaatttgggggagatgaaatattgacgttttggtgaattgcctt

SEQ ID NO: 105739 - DNA, 120 bp, synthetic construct
  source 1..120: mol_type = other DNA
attgaattcctagcactggtatcctttaggtagcacttccatgtggaggcatcctggggttttctgacatggggattattcgaactaatgctccaaagagctccattaaactaaactatt

SEQ ID NO: 105740 - DNA, 120 bp, synthetic construct
  source 1..120: mol_type = other DNA
agaatgtcatttatattgattaacgattttttttgttatgggggggttatttttttattttttggagaaggagtctcgctgggacacccaggctggagtgcaatggtgcgatctcggctc

SEQ ID NO: 105741 - DNA, 120 bp, synthetic construct; identical to SEQ ID NO: 35223
  source 1..120: mol_type = other DNA

SEQ ID NO: 105742 - DNA, 120 bp, synthetic construct
  source 1..120: mol_type = other DNA
gcatgtattgtgcaggtactcaggagtgcctcagcctcccgagtacctggaactacaggtgcgcaccagcacacctgggtaattattgtatttttagtagagacagggtttcaccatgtt

SEQ ID NO: 105743 - DNA, 120 bp, synthetic construct; identical to SEQ ID NO: 35224
  source 1..120: mol_type = other DNA

SEQ ID NO: 105744 - DNA, 120 bp, synthetic construct; identical to SEQ ID NO: 35225
  source 1..120: mol_type = other DNA

SEQ ID NO: 105745 - DNA, 120 bp, synthetic construct; identical to SEQ ID NO: 35226
  source 1..120: mol_type = other DNA

SEQ ID NO: 105746 - DNA, 120 bp, synthetic construct; identical to SEQ ID NO: 35227
  source 1..120: mol_type = other DNA

SEQ ID NO: 105747 - DNA, 120 bp, synthetic construct; identical to SEQ ID NO: 31913
  source 1..120: mol_type = other DNA

SEQ ID NO: 105748 - DNA, 120 bp, synthetic construct; identical to SEQ ID NO: 31914
  source 1..120: mol_type = other DNA

SEQ ID NO: 105749 - DNA, 120 bp, synthetic construct
  source 1..120: mol_type = other DNA
tcctgacctcgtgatccgcccgtcttggcctcccaaagtgctggaattataagcgtgagccaccacgcccggcccaacaaggataatttttaaggaatgtactcaatagtaacaatttaa

SEQ ID NO: 105750 - DNA, 120 bp, synthetic construct; identical to SEQ ID NO: 19681
  source 1..120: mol_type = other DNA

SEQ ID NO: 105751 - DNA, 120 bp, synthetic construct
  source 1..120: mol_type = other DNA
gtcctctataggtgtaagcactaggctgcttttctcctcaacaccgcacctcattctcatactaagattacctgaggtcaggagtttgagaccagcctggccaacatggcaaaacctcat

SEQ ID NO: 105752 - DNA, 120 bp, synthetic construct
  source 1..120: mol_type = other DNA
tcggactcctggcctcaggtgatcctcccacctcagcttcccaaagtgttgggattacaggcatgagccactgcacccagctgactatgcctcttttctttaaacttggccatgggctgg

SEQ ID NO: 105753 - DNA, 120 bp, synthetic construct
  source 1..120: mol_type = other DNA
gagattgagccattgcactccagcttggatgacagagcgagacttcgcctcaaaaaaaaaaaaatcctaactgaaacccactgtgaacattagggacaaaatgagaatttctaccatcac

SEQ ID NO: 105754 - DNA, 120 bp, synthetic construct
  source 1..120: mol_type = other DNA
tgtttgctattgtgaatagtgccgcagtaaacatacgtgtgcatgtgtctttatagcagcatgatttatagtcatttgggtatatacccagtaatgggatggctgggtcaaatggtattt

SEQ ID NO: 105755 - DNA, 120 bp, synthetic construct
  source 1..120: mol_type = other DNA
tgagggctctgttctgttccattggtctatatctctgttttggtaccagtactgttttggttactatagccttatagtatagtttgaagtcaggtagtgtgatgcctccagctttgttct

SEQ ID NO: 105756 - DNA, 120 bp, synthetic construct
  source 1..120: mol_type = other DNA
gcatgaagggttgttgaattttgtcaaaggccttttctgcatctattgagataatcatgtggtttttgtctttggctctgtttatatgctggattacatttattgattttcgtatgttga

SEQ ID NO: 105757 - DNA, 120 bp, synthetic construct
  source 1..120: mol_type = other DNA
tccctttattttgagcctatgtgtgtctctgcacctgagatgagtttcctgaatacagcacactgatgggtcttgagtctttatccaatttgccagtctgtgtcttttaattggagcatt

SEQ ID NO: 105758 - DNA, 120 bp, synthetic construct
  source 1..120: mol_type = other DNA
ttctcgcttcatttcattcatttcatcttccatcgctgataccctttcttccagttgatcgcatcggctgctgaggcttctgtattcttcacgtagttcttgagccttggttttcagctc

SEQ ID NO: 105759 - DNA, 120 bp, synthetic construct
  source 1..120: mol_type = other DNA
cgtgggcataggaccctccgagccaggtgcgggatataatctcctggtatgccatttgttaaccctgttggaagagcacagtattagggtgggagtgactcgattttcctggtgccgtct

SEQ ID NO: 105760 - DNA, 120 bp, synthetic construct; identical to SEQ ID NO: 32049
  source 1..120: mol_type = other DNA

SEQ ID NO: 105761 - DNA, 120 bp, synthetic construct
  source 1..120: mol_type = other DNA
atgggatgtaattcaactaaagagcttctgcacagcaaaagaaactaccatcagagtgaacaggcaacctacaacatgggagaaaatttttgcaacctactcatctgacaaagggctaat

SEQ ID NO: 105762 - DNA, 120 bp, synthetic construct; identical to SEQ ID NO: 32050
  source 1..120: mol_type = other DNA

SEQ ID NO: 105763 - DNA, 120 bp, synthetic construct; identical to SEQ ID NO: 11666
  source 1..120: mol_type = other DNA

SEQ ID NO: 105764 - DNA, 120 bp, synthetic construct
  source 1..120: mol_type = other DNA
tcccacacattaataatgggagactttaacaccccactgtcaacattagacagatcaacgagacagaaagtcaacaaggatacccaggaattgaactcagctctgcaccaagtggaccta

SEQ ID NO: 105765 - DNA, 120 bp, synthetic construct
  source 1..120: mol_type = other DNA
aagaaaaaaagagagaagaatcaaatagacacaataaaaaatgataaaggggatatcaccacctatcccacagaaatacaaactaccatcagagaatactacaaacacctctacgcaaaa

SEQ ID NO: 105766 - DNA, 120 bp, synthetic construct
  source 1..120: mol_type = other DNA
tcagcaaagtctcaggatacaaaatcaatgtacaaaaatcacaagcattcttatacaccaataacagacaaacagagagtcaaatcatgagtgaactcccattcacaattgcttcaaaga

SEQ ID NO: 105767 - DNA, 120 bp, synthetic construct
  source 1..120: mol_type = other DNA
ctgacaaagggctaatatccagaatctacgatgaactcaaacaaatttacaagaaaaaaacaaacaaccccatcaaaaagtgggtgaaggacatgaacagacacttctcaaaagaagaca

SEQ ID NO: 105768 - DNA, 120 bp, synthetic construct; identical to SEQ ID NO: 11667
  source 1..120: mol_type = other DNA

SEQ ID NO: 105769 - DNA, 120 bp, synthetic construct; identical to SEQ ID NO: 11668
  source 1..120: mol_type = other DNA

SEQ ID NO: 105770 - DNA, 120 bp, synthetic construct; identical to SEQ ID NO: 11669
  source 1..120: mol_type = other DNA

SEQ ID NO: 105771 - DNA, 120 bp, synthetic construct; identical to SEQ ID NO: 11670
  source 1..120: mol_type = other DNA

SEQ ID NO: 105772 - DNA, 120 bp, synthetic construct
  source 1..120: mol_type = other DNA
tgtcctttgcagggacatggatgaagctggaacctatcattctcagcaaaataacataggggcagaaaactaaacactgcatgttgtcactcataagtgggagttgaataatgagaacac

SEQ ID NO: 105773 - DNA, 120 bp, synthetic construct; identical to SEQ ID NO: 26526
  source 1..120: mol_type = other DNA

SEQ ID NO: 105774 - DNA, 120 bp, synthetic construct
  source 1..120: mol_type = other DNA
aatcaacagaatatacattcttttcagcaccacaccacacctactccaaaactgaccatatagttggaagtaaagcactcctcaggaaatgtaaaaggacagaaattataacaaactgtc

SEQ ID NO: 105775 - DNA, 120 bp, synthetic construct
  source 1..120: mol_type = other DNA
atccactaagatcaagtgggcttcatccctgggatgcaaggctggttcaacatatgcaaatcaataaacgtaatccagcatataaacagaaccaaagacaaaaaccacatgattatctga

SEQ ID NO: 105776 - DNA, 120 bp, synthetic construct
  source 1..120: mol_type = other DNA
actttaaagttcatatggaaccaaaaaagagcccgcattgccaggtcaaccctaagccaaaagaacaaagctggagacatcatgctacctgactgcaaactatactacaaggctacagta

SEQ ID NO: 105777 - DNA, 120 bp, synthetic construct
  source 1..120: mol_type = other DNA
gacacatgcacacgtatgtttactgcagcactattcgcaacagcaaagacttggaaccaagccaaatgtccaacaataatagactggattaagaaaatgtggcacatatataccatggaa

SEQ ID NO: 105778 - DNA, 120 bp, synthetic construct; identical to SEQ ID NO: 26528
  source 1..120: mol_type = other DNA

SEQ ID NO: 105779 - DNA, 120 bp, synthetic construct; identical to SEQ ID NO: 26529
  source 1..120: mol_type = other DNA

SEQ ID NO: 105780 - DNA, 120 bp, synthetic construct
  source 1..120: mol_type = other DNA
caagcactagccatactggttctttcctgtctcgttgatagtcacatttttttggctagtttttccttctacttgaagactttcctcccttacatggtgcctcctcggtatcaattaaac

SEQ ID NO: 105781 - DNA, 120 bp, synthetic construct; identical to SEQ ID NO: 13317
  source 1..120: mol_type = other DNA

SEQ ID NO: 105782 - DNA, 120 bp, synthetic construct; identical to SEQ ID NO: 13318
  source 1..120: mol_type = other DNA

SEQ ID NO: 105783 - DNA, 120 bp, synthetic construct
  source 1..120: mol_type = other DNA
gtttaaacagatgcttgaaggcagcatgctcccagagacacaaacactgcggaaggccacagggacttctgcctaggaaagccacgtattgtccaaggtttctccccatgtgatagtctg

SEQ ID NO: 105784 - DNA, 120 bp, synthetic construct
  source 1..120: mol_type = other DNA
cccggggacacggctaacgcttcccagaaaggcgacccttgggcatgtggggggtgtggtgtgtgtgtgtgtgtgtggtgtgtgaggtctgtgtgtggtgtcaatgtgaggtctgtgtct

SEQ ID NO: 105785 - DNA, 120 bp, synthetic construct
  source 1..120: mol_type = other DNA
tgtgtgaggtctctgtgtgtgtggtctctgtgtggtgtgtgtgtgaggtctgtgtgtgtggtgtgtgaggtctgtatgtgtgtatgtggtgtgtctgaggtctgtgtgtggtgtgtgtga

SEQ ID NO: 105786 - DNA, 120 bp, synthetic construct
  source 1..120: mol_type = other DNA
aatgtgaggtctctgtgtggtgtgtgaggtctgtatgtgtgtgtgtgtgtgtggtgtgtctgaggtctgtgtgtgtggtgtgtgaggtctgtgtgtgtgtggtgtgtctgaggtctgtgt

SEQ ID NO: 105787 - DNA, 120 bp, synthetic construct
  source 1..120: mol_type = other DNA
tgttgtatgtgtgtgtcgtgtgtgtttgggggctgaggtcccatgtagacagaagtcagtgccaaagccacaaactcctcccgaccccccgcctgccatttgaacacttgtcccgacatg

SEQ ID NO: 105788 - DNA, 120 bp, synthetic construct; identical to SEQ ID NO: 13322
  source 1..120: mol_type = other DNA

SEQ ID NO: 105789 - DNA, 120 bp, synthetic construct; identical to SEQ ID NO: 13413
  source 1..120: mol_type = other DNA

SEQ ID NO: 105790 - DNA, 120 bp, synthetic construct; identical to SEQ ID NO: 13414
  source 1..120: mol_type = other DNA

SEQ ID NO: 105791 - DNA, 120 bp, synthetic construct; identical to SEQ ID NO: 13415
  source 1..120: mol_type = other DNA

SEQ ID NO: 105792 - DNA, 120 bp, synthetic construct; identical to SEQ ID NO: 13416
  source 1..120: mol_type = other DNA

SEQ ID NO: 105793 - DNA, 120 bp, synthetic construct
  source 1..120: mol_type = other DNA
aaaaaaaaaaaaagagttattaatactattttacattctcttttcttttcccgcacagggtcactctgtcaccatggctggagtagtggcacaatctcggctcattgcaacctccacctc

SEQ ID NO: 105794 - DNA, 120 bp, synthetic construct; identical to SEQ ID NO: 13417
  source 1..120: mol_type = other DNA

SEQ ID NO: 105795 - DNA, 120 bp, synthetic construct
  source 1..120: mol_type = other DNA
ttgtggaagtcagtgtggcaattcctcagggatctagaactagaaataccatttgacccatccatcccattactggttatatacccaaaggattataaatcatgctgctataaagacaca

SEQ ID NO: 105796 - DNA, 120 bp, synthetic construct; identical to SEQ ID NO: 13399
  source 1..120: mol_type = other DNA

SEQ ID NO: 105797 - DNA, 120 bp, synthetic construct; identical to SEQ ID NO: 13400
  source 1..120: mol_type = other DNA

SEQ ID NO: 105798 - DNA, 120 bp, synthetic construct; identical to SEQ ID NO: 13401
  source 1..120: mol_type = other DNA

SEQ ID NO: 105799 - DNA, 120 bp, synthetic construct; identical to SEQ ID NO: 13402
  source 1..120: mol_type = other DNA

SEQ ID NO: 105800 - DNA, 120 bp, synthetic construct
  source 1..120: mol_type = other DNA
tcattcttttctaattgagatggaatccacatgccatgaaggtcaccattttagtgtgcagtgccccatggttttggcactttcacaaagttctgcagccatcattaccatctaactcaa

SEQ ID NO: 105801 - DNA, 120 bp, synthetic construct; identical to SEQ ID NO: 13403
  source 1..120: mol_type = other DNA

SEQ ID NO: 105802 - DNA, 120 bp, synthetic construct; identical to SEQ ID NO: 13404
  source 1..120: mol_type = other DNA

SEQ ID NO: 105803 - DNA, 120 bp, synthetic construct; identical to SEQ ID NO: 13405
  source 1..120: mol_type = other DNA

SEQ ID NO: 105804 - DNA, 120 bp, synthetic construct; identical to SEQ ID NO: 13406
  source 1..120: mol_type = other DNA

SEQ ID NO: 105805 - DNA, 120 bp, synthetic construct; identical to SEQ ID NO: 13407
  source 1..120: mol_type = other DNA

SEQ ID NO: 105806 - DNA, 120 bp, synthetic construct; identical to SEQ ID NO: 13408
  source 1..120: mol_type = other DNA

SEQ ID NO: 105807 - DNA, 120 bp, synthetic construct; identical to SEQ ID NO: 13409
  source 1..120: mol_type = other DNA

SEQ ID NO: 105808 - DNA, 120 bp, synthetic construct; identical to SEQ ID NO: 13410
  source 1..120: mol_type = other DNA

SEQ ID NO: 105809 - DNA, 120 bp, synthetic construct; identical to SEQ ID NO: 13411
  source 1..120: mol_type = other DNA

SEQ ID NO: 105810 - DNA, 120 bp, synthetic construct
  source 1..120: mol_type = other DNA
tcaatagaacagaacagagccctcagaaataacgccacatatctacaaccatctgatctttgacaaacctgagaaaaacaagcaatggggaaaggattccctatttaataaatggtgctg

SEQ ID NO: 105811 - DNA, 120 bp, synthetic construct
  source 1..120: mol_type = other DNA
tgatgagttcgtgtcctttgtagggacatggatgaaattggaaatcatcattctcagtaaactatcgcaagaacaaaaaaccaaacaccgcatattctcactcataggtgggaattgaac

SEQ ID NO: 105812 - DNA, 120 bp, synthetic construct
  source 1..120: mol_type = other DNA
aggagttcgagaccagtctggccaacatagcgaaacaccgtctcttctaaaatacaaaaaattagctgggtatggtggtgcatgcctgtaatcccagctacttgggaggctgagacatga

SEQ ID NO: 105813 - DNA, 120 bp, synthetic construct
  source 1..120: mol_type = other DNA
tttgcctttacattgtcatttattttattttatttttcttttgagacagggtctcactctgtcacccaggctggagtgcagtagctcaatcttggctcactgaaaccactgcttcccagg

SEQ ID NO: 105814 - DNA, 120 bp, synthetic construct
  source 1..120: mol_type = other DNA
ttcaagaccagcctgaccaatacagtgaaacactgtctctactaaaaatacaaaaaaattagctggacgtggtgacatgcacctgtagccccagctacttgggaggctaagcagaagaat

SEQ ID NO: 105815 - DNA, 120 bp, synthetic construct
  source 1..120: mol_type = other DNA
ttctacacacacaccaaattagccaggtgtggtggtgcacatctgtagtcccagctacttgggaggctgaggtgagagaatcatttgagccctgaagctcaagactacagtgagctgtga

SEQ ID NO: 105816 - DNA, 120 bp, synthetic construct; identical to SEQ ID NO: 23473
  source 1..120: mol_type = other DNA

SEQ ID NO: 105817 - DNA, 120 bp, synthetic construct; identical to SEQ ID NO: 23474
  source 1..120: mol_type = other DNA

SEQ ID NO: 105818 - DNA, 120 bp, synthetic construct; identical to SEQ ID NO: 23475
  source 1..120: mol_type = other DNA

SEQ ID NO: 105819 - DNA, 120 bp, synthetic construct; identical to SEQ ID NO: 23476
  source 1..120: mol_type = other DNA

SEQ ID NO: 105820 - DNA, 120 bp, synthetic construct; identical to SEQ ID NO: 23477
  source 1..120: mol_type = other DNA

SEQ ID NO: 105821 - DNA, 120 bp, synthetic construct; identical to SEQ ID NO: 23478
  source 1..120: mol_type = other DNA

SEQ ID NO: 105822 - DNA, 120 bp, synthetic construct; identical to SEQ ID NO: 23479
  source 1..120: mol_type = other DNA

SEQ ID NO: 105823 - DNA, 120 bp, synthetic construct; identical to SEQ ID NO: 23480
  source 1..120: mol_type = other DNA

SEQ ID NO: 105824 - DNA, 120 bp, synthetic construct
  source 1..120: mol_type = other DNA
ggatcacttgaggtcagaagttcaagaccatcctggccaacatactgaaaccctgtctctactaaaaagtacaaaaaattagctgggcatggtggctcaagcctgtaatcccagctactt

SEQ ID NO: 105825 - DNA, 120 bp, synthetic construct; identical to SEQ ID NO: 23481
  source 1..120: mol_type = other DNA

SEQ ID NO: 105826 - DNA, 120 bp, synthetic construct
  source 1..120: mol_type = other DNA
tggacaatcactgcacaacatgatgagaacagggatggcagaaacccagccctggggaagcctggctttgctcatccactcaaccaacattcccgaatgcttttgacatactttggggca

SEQ ID NO: 105827 - DNA, 120 bp, synthetic construct
  source 1..120: mol_type = other DNA
tttgacctgctccttttcgttttcctttttctttctttcttttttttttttttttgagatggaatctcactctatcgcccaggctggagtgcagtggtgcaatctcagcttgctgcaacc

SEQ ID NO: 105828 - DNA, 120 bp, synthetic construct; identical to SEQ ID NO: 105827
  source 1..120: mol_type = other DNA

SEQ ID NO: 105829 - DNA, 120 bp, synthetic construct
  source 1..120: mol_type = other DNA
gacatatgagaatgagttgcagggaggcaggagtccctgcatgagctcaccatgctgctgccttctccaggttcaactttctcacctattaaatgaaagagatggtttcttttttttttc

SEQ ID NO: 105830 - DNA, 120 bp, synthetic construct
  source 1..120: mol_type = other DNA
agctaaaattttttttgtagagacagggtctctctatgatgctcaggcaggtcttgagttcctgggctcaagtgatcctcccaccctggtcacccaaagggctgggattacaggtctgtg

SEQ ID NO: 105831 - DNA, 120 bp, synthetic construct
  source 1..120: mol_type = other DNA
tctctactgaaaaatacaaaaaaaattagccaggcgtggtggcgggcacctgtagtcccagctacttgagaggctgaggcaggagaatggcgtgaactcaggaggcggagcttgcagtga

SEQ ID NO: 105832 - DNA, 120 bp, synthetic construct; identical to SEQ ID NO: 1276
  source 1..120: mol_type = other DNA

SEQ ID NO: 105833 - DNA, 120 bp, synthetic construct
  source 1..120: mol_type = other DNA
gggggtctccgcgtgccccttccgcctcttggcatgttcccccgcctcctgccgcggatgtctggcccaggcgcctctccacctggcaaggccagggctggactcccacacccctgctca

SEQ ID NO: 105834 - DNA, 120 bp, synthetic construct
  source 1..120: mol_type = other DNA
accgacttcagcactcaggctgtctagagatccgagttggcaggcgggtttgggggcgtggcaagagccgctggaggtctggggcagcggttcttccaaggaatgcacagcttgggggtc

SEQ ID NO: 105835 - DNA, 120 bp, synthetic construct; identical to SEQ ID NO: 23478
  source 1..120: mol_type = other DNA

SEQ ID NO: 105836 - DNA, 120 bp, synthetic construct
  source 1..120: mol_type = other DNA
gctccccctcatagaagccatcctcatccatgtccccgaagatatatatgtagtccccagctgtgaggggcagctcaccctcagggtgatcattgggcccctcaaatgggttgtagttat

SEQ ID NO: 105837 - DNA, 120 bp, synthetic construct
  source 1..120: mol_type = other DNA
aagtgtagctaaagggtggagtctctggccatcggtgacacatgaagaagtcctcggggatctgagcaggcactgaatccagggactcaccacagagtgacatggttctcactgagacct

SEQ ID NO: 105838 - DNA, 120 bp, synthetic construct
  source 1..120: mol_type = other DNA
ctcagccactaggcgcccggggatattgcccacttgcctgttgcactcgctgaggtagaaatcatgggtgtcctgagagccccacactcttagcaactgccttttctggaagaccagctc

SEQ ID NO: 105839 - DNA, 120 bp, synthetic construct
  source 1..120: mol_type = other DNA
tctatgaacattttaatgaggggttggacataagacagaaaaataacattctgagagctcgtttggaggttctagcaggggagcgcagctactcttatactcttgactgaagaccgatcg

SEQ ID NO: 105840 - DNA, 120 bp, synthetic construct
  source 1..120: mol_type = other DNA
ttctgagtcacttcctgtgagggatcaccttgggatggcatttcttttccttttttttttttctttggagacagagtctcgcactgtcacccaggctggagtgcaatggcacaatctcgg

SEQ ID NO: 105841 - DNA, 120 bp, synthetic construct
  source 1..120: mol_type = other DNA
gtctatggaggaggtgactttgagccatgatgtgaccttagatgaggggcctctctgagcctcaggaagctcttctgcaaaatggggcaaataaagaaatgccctctgtgtgcagtggct

SEQ ID NO: 105842 - DNA, 120 bp, synthetic construct
  source 1..120: mol_type = other DNA
cgggaggctgaaacagagaattgcttgaaccctggaggtggaggttgcagtgagccaagaatgcgccactgcactccaggctggtgacagagtgagactccgtctcaaaaaaaataaaaa

SEQ ID NO: 105843 - DNA, 120 bp, synthetic construct
  source 1..120: mol_type = other DNA
ggagttggagccaagctaggcaacatagcgagaattcctcatctctacacacacacacacacacacacacacacacacacacacattaattagctgggtgtggtggcacatgcctccaga

SEQ ID NO: 105844 - DNA, 120 bp, synthetic construct; identical to SEQ ID NO: 7515
  source 1..120: mol_type = other DNA

SEQ ID NO: 105845 - DNA, 120 bp, synthetic construct; identical to SEQ ID NO: 7516
  source 1..120: mol_type = other DNA

SEQ ID NO: 105846 - DNA, 120 bp, synthetic construct; identical to SEQ ID NO: 3444
  source 1..120: mol_type = other DNA

SEQ ID NO: 105847 - DNA, 120 bp, synthetic construct; identical to SEQ ID NO: 12670
  source 1..120: mol_type = other DNA

SEQ ID NO: 105848 - DNA, 120 bp, synthetic construct
  source 1..120: mol_type = other DNA
gtgtgtctgtgtgtgtgtgtgtgtgtctgtgtgtctgtgtgtgtgataagaatttacgtagactctctacctaaagtatccctgctatatgactgtgtccaaaatgtatgtctccaacaa

SEQ ID NO: 105849 - DNA, 120 bp, synthetic construct
  source 1..120: mol_type = other DNA
aactggtgtgagatggtatctcattgtggttttgatttgcatttctctgatggtcagtgatggtgagcattttttcatgtgtcttttggctgcataaatgtcttcttttgagaagtgtct

SEQ ID NO: 105850 - DNA, 120 bp, synthetic construct; identical to SEQ ID NO: 28073
  source 1..120: mol_type = other DNA

SEQ ID NO: 105851 - DNA, 120 bp, synthetic construct; identical to SEQ ID NO: 28074
  source 1..120: mol_type = other DNA

SEQ ID NO: 105852 - DNA, 120 bp, synthetic construct
  source 1..120: mol_type = other DNA
attttttttatagagattgggtctagctttgttgcccaggcatttctcaaattcctaggctcaagtgattcacccaccttggcctctcaaagtgctgaaattacaggcatgtgccactgt

SEQ ID NO: 105853 - DNA, 120 bp, synthetic construct
  source 1..120: mol_type = other DNA
tacatatgtatacatgtgccatgctggtgtgctgcacccattaactcgtcatttagcattaggtatatctcctaaagctatccctcccccctccccccaccccaccacagtccctagagt

SEQ ID NO: 105854 - DNA, 120 bp, synthetic construct
  source 1..120: mol_type = other DNA
ggttgagaaaattttctcccattttgtaggttgcctgttcactctgatggtagttcctgttgctgtgcagaagctctttagtttaattagatcccatttgtcaattttggcttttgttgc

SEQ ID NO: 105855 - DNA, 120 bp, synthetic construct
  source 1..120: mol_type = other DNA
tgagcagtggtttgtagttcttcttgaagaggtccttcacatccctcttggattcctaggtattttattctctttgaaggaattgtgaatgagagttcactcatgatttggctctctgtt

SEQ ID NO: 105856 - DNA, 120 bp, synthetic construct; identical to SEQ ID NO: 28075
  source 1..120: mol_type = other DNA

SEQ ID NO: 105857 - DNA, 120 bp, synthetic construct
  source 1..120: mol_type = other DNA
gatattagccctttgtcagatgagtaggttgcaaaattttctcccattctgtaggttgcctgttcactctgatggtagtttcttttgctgtgcagaagctctttagtttaattagatccc

SEQ ID NO: 105858 - DNA, 120 bp, synthetic construct
  source 1..120: mol_type = other DNA
ttaaaaattttatttttccgtaagttattgggatacaggcggtatttggttacatgagtaagttctttcctggagatttgtgagaacctggtgcacccatcacctaagcagtatacactg

SEQ ID NO: 105859 - DNA, 120 bp, synthetic construct; identical to SEQ ID NO: 31700
  source 1..120: mol_type = other DNA

SEQ ID NO: 105860 - DNA, 120 bp, synthetic construct
  source 1..120: mol_type = other DNA
agagttctttgggtatatacccagtaatgggatggctgggtcaagtggtatttctagttctggatccctgatgaatcgccacattgacttccacaatggttgaactagtttacagtccca

SEQ ID NO: 105861 - DNA, 120 bp, synthetic construct
  source 1..120: mol_type = other DNA
agtagttttttccaattctgtgaagaaaggcattggtagcttgatggggatggcattcaatctgtaaattaccttgggcagtatggccattttcacgatattgattcttcctacccatga

SEQ ID NO: 105862 - DNA, 120 bp, synthetic construct
  source 1..120: mol_type = other DNA
atctggtcctggactctttttggttggtaaactattgagtattgccacaatttctgatcctgttattgatctgttcagagattcaacttcttcctggtttagtcttgggagagtgtatgt

SEQ ID NO: 105863 - DNA, 120 bp, synthetic construct
  source 1..120: mol_type = other DNA
gacagtggggtgttaaagtctcccattattaatgtgtgggagtctaagtctctttgtaggtcactcaggacttgctctatgaatctgggtgctcctatattgggtgcatatatatttagg

SEQ ID NO: 105864 - DNA, 120 bp, synthetic construct
  source 1..120: mol_type = other DNA
ttcttgaggagtatctttgtgtcgttctctgtttttcctgaatctgaacgttggcctgccttgctagatcggggaaattctcctggataatatcctgcagagtgttttccaacttggttc

SEQ ID NO: 105865 - DNA, 120 bp, synthetic construct
  source 1..120: mol_type = other DNA
tgctgtgctagcaatcagcgagactccgtgggcgtaggaccctctgagccatgtgcaggatataatctcatggtgcgccgttttttaagcccttcagaaaagcgcagtattcgggtggga

SEQ ID NO: 105866 - DNA, 120 bp, synthetic construct
  source 1..120: mol_type = other DNA
aattaaaccacttgtctttataaattacccagcgatatgctttggctatgtccccaaccaaatctcatcttgaattcccacgtgttgtgggagggacgcagtaggaggtaattgaatcat

SEQ ID NO: 105867 - DNA, 120 bp, synthetic construct
  source 1..120: mol_type = other DNA
gtcttcttctgagaagtgtctgttcatgtccttcgcccactttttgatggggttgtttgtttttttcttgtaaatttgtttgagttcattgtagattctggatattagccctttgtcaga

SEQ ID NO: 105868 - DNA, 120 bp, synthetic construct
  source 1..120: mol_type = other DNA
gtttttgcccattcagtatgatattggctgtgggtttgtcatagatagctcttcttattttgagatacatcccatcaatacctaatttattaagagtttttagcatgaagagttgttgaa

SEQ ID NO: 105869 - DNA, 120 bp, synthetic construct; identical to SEQ ID NO: 31701
  source 1..120: mol_type = other DNA

SEQ ID NO: 105870 - DNA, 120 bp, synthetic construct; identical to SEQ ID NO: 31702
  source 1..120: mol_type = other DNA

SEQ ID NO: 105871 - DNA, 120 bp, synthetic construct
  source 1..120: mol_type = other DNA
ctgtgcagaagctctttagtttaattagatcccatttgtcaattttggcttttgttgccattgcttttggtgttttagtcatgaagtccttgcccatgcctatgtcctgaatggtaatgc

SEQ ID NO: 105872 - DNA, 120 bp, synthetic construct; identical to SEQ ID NO: 105868
  source 1..120: mol_type = other DNA

SEQ ID NO: 105873 - DNA, 120 bp, synthetic construct
  source 1..120: mol_type = other DNA
tttccctctacacactgctttgaatgcgtcccagagattctggtatgttgtgtctttgttctcgttggtttcaaagaacatctttatttctgccttcacttcgttatgtacccagtagtc

SEQ ID NO: 105874 - DNA, 120 bp, synthetic construct
  source 1..120: mol_type = other DNA
ccggttgttcctttccatgtttagcgcttccttcaggagctcttttagggcaggcctggtggtgacaaaatctctcagcatttgcttgtctgtaaagtattttatttctccttcgcttat

SEQ ID NO: 105875 - DNA, 120 bp, synthetic construct
  source 1..120: mol_type = other DNA
ttttcaacttctttgcctttggtttgaatgtcctcccatagctcagagtaatttgatcgtctgaagctttcttctctcagctcgtcaaagtcattctccatccagctttgttccgttgct

SEQ ID NO: 105876 - DNA, 120 bp, synthetic construct
  source 1..120: mol_type = other DNA
cccacaacaggccccagtgtgtgatgttccccttcctgtccaagtgttctcattcttcatttcctacctatgagtgagaacatgcagggtttggttttttatccttgtgatagtttgctg

SEQ ID NO: 105877 - DNA, 120 bp, synthetic construct; identical to SEQ ID NO: 31703
  source 1..120: mol_type = other DNA

SEQ ID NO: 105878 - DNA, 120 bp, synthetic construct
  source 1..120: mol_type = other DNA
gagaagtgtctgttcatatccttcgcccactttttgatggggttgtttgtttttttcttgtaaatttgtttgagttcattgtagattctggatattagcctttgtcagatgagtaggttg

SEQ ID NO: 105879 - DNA, 120 bp, synthetic construct
  source 1..120: mol_type = other DNA
caattgtgaatgggagttcactcatgatttggctctctgtttgtctgttattggtgcgtaagaatgcttgtgatttttgtacattgattttgtatcctgagactttgctgaagttgctta

SEQ ID NO: 105880 - DNA, 120 bp, synthetic construct
  source 1..120: mol_type = other DNA
ttcaacttcttcctggtttagtcttgggagagtgtatgtgtcgaggaatttatccatttcttctagattttctagtttatttgcatagagttgtttgtagtattctctgatggtagtttg

SEQ ID NO: 105881 - DNA, 120 bp, synthetic construct
  source 1..120: mol_type = other DNA
ccttgttaactttctgtctcgttgatctgtctaatgttgacagtagggtgtttaaagtctgccgttattattgtgtgggagtctaagtctctttgtaggtcactcaggacttgctttatg

SEQ ID NO: 105882 - DNA, 120 bp, synthetic construct; identical to SEQ ID NO: 22402
  source 1..120: mol_type = other DNA

SEQ ID NO: 105883 - DNA, 120 bp, synthetic construct
  source 1..120: mol_type = other DNA
tatgcggtgtttggttttttgtccttgcgatagtttgctgagaatgacggtttccagcttcatccatgtccctacaaaggacatgaactcatccttttttatggctgcatagtattccat

SEQ ID NO: 105884 - DNA, 120 bp, synthetic construct
  source 1..120: mol_type = other DNA
gtgtggtattacttctgagggctctgttctgttccattggtctatatctctgttttggtaccagtaccatgctgttttggttactgtagccttgtagtatagtttgaagtcaggtagtgt

SEQ ID NO: 105885 - DNA, 120 bp, synthetic construct; identical to SEQ ID NO: 22403
  source 1..120: mol_type = other DNA

SEQ ID NO: 105886 - DNA, 120 bp, synthetic construct
  source 1..120: mol_type = other DNA
agacggagttttgctcttgttgcccaggctgtagtgcagtggtgcaatctcggctcacagcaacctctgcctcctgggttaaagagatgctcctgcctcagccttccaagtagctgggat

SEQ ID NO: 105887 - DNA, 120 bp, synthetic construct; identical to SEQ ID NO: 14612
  source 1..120: mol_type = other DNA

SEQ ID NO: 105888 - DNA, 120 bp, synthetic construct; identical to SEQ ID NO: 14613
  source 1..120: mol_type = other DNA

SEQ ID NO: 105889 - DNA, 120 bp, synthetic construct; identical to SEQ ID NO: 14614
  source 1..120: mol_type = other DNA

SEQ ID NO: 105890 - DNA, 120 bp, synthetic construct; identical to SEQ ID NO: 14609
  source 1..120: mol_type = other DNA

SEQ ID NO: 105891 - DNA, 120 bp, synthetic construct; identical to SEQ ID NO: 14610
  source 1..120: mol_type = other DNA

SEQ ID NO: 105892 - DNA, 120 bp, synthetic construct; identical to SEQ ID NO: 14611
  source 1..120: mol_type = other DNA

SEQ ID NO: 105893 - DNA, 120 bp, synthetic construct; identical to SEQ ID NO: 5569
  source 1..120: mol_type = other DNA

SEQ ID NO: 105894 - DNA, 120 bp, synthetic construct; identical to SEQ ID NO: 26920
  source 1..120: mol_type = other DNA

SEQ ID NO: 105895 - DNA, 120 bp, synthetic construct; identical to SEQ ID NO: 24499
  source 1..120: mol_type = other DNA

SEQ ID NO: 105896 - DNA, 120 bp, synthetic construct; identical to SEQ ID NO: 27444
  source 1..120: mol_type = other DNA

SEQ ID NO: 105897 - DNA, 120 bp, synthetic construct
  source 1..120: mol_type = other DNA
agcgcgcctacctgccgcacctagtaaccgcagagtacctacctgccgcacctagtaaccgcagcgcgcctacctgccgcacctagtaaccgcagcgcgcctacctgccgcacctagtaa

SEQ ID NO: 105898 - DNA, 120 bp, synthetic construct
  source 1..120: mol_type = other DNA
ctacctgccgcacctcggaaccgcagagcgcctacctgccgcacctcggaaccgcagagcgcctacctgccgcacctcggaaccgcagagcgcctacctgccgcacctcggaaccgcaga

SEQ ID NO: 105899 - DNA, 120 bp, synthetic construct
  source 1..120: mol_type = other DNA
gccgcacctagtaaccgcagagcgcctacctgccgcacctaggaaccgcagagcgcctacctgccgcacctagtaaccgcagagcgcctacctgccgcacctaggaaccgcagagcgcct

SEQ ID NO: 105900 - DNA, 120 bp, synthetic construct; identical to SEQ ID NO: 27445
  source 1..120: mol_type = other DNA

SEQ ID NO: 105901 - DNA, 120 bp, synthetic construct
  source 1..120: mol_type = other DNA
caccatgcctggccctagagctgtttttgatcacaggccattaactttttcttttgaggtattaattcctttctttatcaggcctgcagctcttttccaagattttggcaagttctaagg

SEQ ID NO: 105902 - DNA, 120 bp, synthetic construct
  source 1..120: mol_type = other DNA
gttcttgcgatagtttactgagaatgatggtttccattttcatccatgtccctacaaaggatatgaactcatcattttttatggctgcatagtattccatggtgtatatgtgccacattt

SEQ ID NO: 105903 - DNA, 120 bp, synthetic construct
  source 1..120: mol_type = other DNA
taaatctttaatccatcttgaattgatttttgtataaggtgtaaggaaggcatccagtttgagctttctacatatggctagccagttttcccagcaccatttattaaatagggaatcctt

SEQ ID NO: 105904 - DNA, 120 bp, synthetic construct
  source 1..120: mol_type = other DNA
gtttatatgctggattacatttattgatttgcgtatattgaaccagccttgcatcccagggatgaagcccacttgatcatggtggacaagctttttgatgtgctgctgaattcggtttgc

SEQ ID NO: 105905 - DNA, 120 bp, synthetic construct
  source 1..120: mol_type = other DNA
tctcttgtaggcatttagtgctataaatttccctctacacactgctttgaatgcgtcccagagattctggtatgtggtgtctttgttctcgttggtttcaaagaacatctttatttctgc

SEQ ID NO: 105906 - DNA, 120 bp, synthetic construct
  source 1..120: mol_type = other DNA
tgactctttatccaacttgccagtctgtgtcttttaattgcagaatttagtccgtttatatttaaagttaatattgttatgtgtgaatttgatcctgtcattatgatgttagctggtgat

SEQ ID NO: 105907 - DNA, 120 bp, synthetic construct
  source 1..120: mol_type = other DNA
tttgaatgtcctcccgtagctcagagtaatttgatcgtctgaagccttcttctctcagctcgtcaaaatcattctccatccagctttgttctgttgctggtgaggaactgcgttcctttg

SEQ ID NO: 105908 - DNA, 120 bp, synthetic construct
  source 1..120: mol_type = other DNA
tctccctgctcacgacacctccttatgacaatcaaaactggttctctgcttaataaagagagcttgcggggaaggatctgggaattcagtggcatactgaatttagtacttcttttcaaa

SEQ ID NO: 105909 - DNA, 120 bp, synthetic construct; identical to SEQ ID NO: 27525
  source 1..120: mol_type = other DNA

SEQ ID NO: 105910 - DNA, 120 bp, synthetic construct; identical to SEQ ID NO: 27526
  source 1..120: mol_type = other DNA

SEQ ID NO: 105911 - DNA, 120 bp, synthetic construct
  source 1..120: mol_type = other DNA
tgtacctccaatgactcaccaaaacgcctgcataaaaatccaggtgcagtggcactcacctgtagtcccagctacctgggaggctgaggcaggaggagcacttgagcccaggaagtttga

SEQ ID NO: 105912 - DNA, 120 bp, synthetic construct; identical to SEQ ID NO: 22556
  source 1..120: mol_type = other DNA

SEQ ID NO: 105913 - DNA, 120 bp, synthetic construct; identical to SEQ ID NO: 22557
  source 1..120: mol_type = other DNA

SEQ ID NO: 105914 - DNA, 120 bp, synthetic construct; identical to SEQ ID NO: 18971
  source 1..120: mol_type = other DNA

SEQ ID NO: 105915 - DNA, 120 bp, synthetic construct; identical to SEQ ID NO: 4335
  source 1..120: mol_type = other DNA

SEQ ID NO: 105916 - DNA, 120 bp, synthetic construct
  source 1..120: mol_type = other DNA
ggcacacgtatgtttattgcagcactattcacaatagcaaagacttggaaccaacccagatgtccatcaatgatagactggattaagaaaatgtggcacatgtacaccatggaataccgt

SEQ ID NO: 105917 - DNA, 120 bp, synthetic construct
  source 1..120: mol_type = other DNA
gactgtagagcctatgttcttttttcttatatcagaatttcctaaactgtgtttcactccgtatgatatatttattaataagtgcttctcggccgggcgcggtggctcacgcctgtagtc

SEQ ID NO: 105918 - DNA, 120 bp, synthetic construct; identical to SEQ ID NO: 7495
  source 1..120: mol_type = other DNA

SEQ ID NO: 105919 - DNA, 120 bp, synthetic construct; identical to SEQ ID NO: 34229
  source 1..120: mol_type = other DNA

SEQ ID NO: 105920 - DNA, 120 bp, synthetic construct; identical to SEQ ID NO: 34230
  source 1..120: mol_type = other DNA

SEQ ID NO: 105921 - DNA, 120 bp, synthetic construct; identical to SEQ ID NO: 32045
  source 1..120: mol_type = other DNA

SEQ ID NO: 105922 - DNA, 120 bp, synthetic construct; identical to SEQ ID NO: 32044
  source 1..120: mol_type = other DNA

SEQ ID NO: 105923 - DNA, 120 bp, synthetic construct; identical to SEQ ID NO: 32046
  source 1..120: mol_type = other DNA

SEQ ID NO: 105924 - DNA, 120 bp, synthetic construct; identical to SEQ ID NO: 32043
  source 1..120: mol_type = other DNA

SEQ ID NO: 105925 - DNA, 120 bp, synthetic construct; identical to SEQ ID NO: 32044
  source 1..120: mol_type = other DNA

SEQ ID NO: 105926 - DNA, 120 bp, synthetic construct; identical to SEQ ID NO: 32046
  source 1..120: mol_type = other DNA

SEQ ID NO: 105927 - DNA, 120 bp, synthetic construct; identical to SEQ ID NO: 20470
  source 1..120: mol_type = other DNA

SEQ ID NO: 105928 - DNA, 120 bp, synthetic construct
  source 1..120: mol_type = other DNA
gggcggggggctgacccccccacctccctcccggacgaggtggctgccgggcggagacgctcctcacttcccagacggggtggctgctgggtggaggggctcctcacttctcagacgggg

SEQ ID NO: 105929 - DNA, 120 bp, synthetic construct; identical to SEQ ID NO: 20471
  source 1..120: mol_type = other DNA

SEQ ID NO: 105930 - DNA, 120 bp, synthetic construct; identical to SEQ ID NO: 20472
  source 1..120: mol_type = other DNA

SEQ ID NO: 105931 - DNA, 120 bp, synthetic construct
  source 1..120: mol_type = other DNA
gctgccagatggaggggctcctcacttctcagacggggcgcctgccgggcggaggggctcctcacttctcagacagggcagctgccgggcggaggggctcctcacttctcagacagggcg

SEQ ID NO: 105932 - DNA, 120 bp, synthetic construct; identical to SEQ ID NO: 20473
  source 1..120: mol_type = other DNA

SEQ ID NO: 105933 - DNA, 120 bp, synthetic construct
  source 1..120: mol_type = other DNA
ctaagttttctcctagggtttttatggttttaggtctaacatgtaagtctttaatccatcttgaattaatttttgtataaggtgtaaggaagggatccagtttcagctttctacatatgg

SEQ ID NO: 105934 - DNA, 120 bp, synthetic construct
  source 1..120: mol_type = other DNA
gtcttgtgccagttttcaaagggaatgcttccagtttttgcccattccgtacgatactggctgtgggtttgtcatagatagctcttattattttgagatacgtcccatcaatacctaatt

SEQ ID NO: 105935 - DNA, 120 bp, synthetic construct
  source 1..120: mol_type = other DNA
ctaccactgcagccacctgcaactatttaaaaaaaaagttttttttttgtttgtttgttttttttgagacagggtcttgctctgtctcccaggctgaagcgcagtgccatgatctcagct

SEQ ID NO: 105936 - DNA, 120 bp, synthetic construct
  source 1..120: mol_type = other DNA
tgcagacggagtctggttcactcagtgctcaatggtgcacaggctggagtgcagtggcgtgatcgaggctcgctacaacctccacctcccagccgcctgccttggcctcccaaagtgccg

SEQ ID NO: 105937 - DNA, 120 bp, synthetic construct; identical to SEQ ID NO: 28423
  source 1..120: mol_type = other DNA

SEQ ID NO: 105938 - DNA, 120 bp, synthetic construct; identical to SEQ ID NO: 20657
  source 1..120: mol_type = other DNA

SEQ ID NO: 105939 - DNA, 120 bp, synthetic construct; identical to SEQ ID NO: 20658
  source 1..120: mol_type = other DNA

SEQ ID NO: 105940 - DNA, 120 bp, synthetic construct; identical to SEQ ID NO: 20659
  source 1..120: mol_type = other DNA

SEQ ID NO: 105941 - DNA, 120 bp, synthetic construct; identical to SEQ ID NO: 20660
  source 1..120: mol_type = other DNA

SEQ ID NO: 105942 - DNA, 120 bp, synthetic construct; identical to SEQ ID NO: 20661
  source 1..120: mol_type = other DNA

SEQ ID NO: 105943 - DNA, 120 bp, synthetic construct; identical to SEQ ID NO: 20662
  source 1..120: mol_type = other DNA

SEQ ID NO: 105944 - DNA, 120 bp, synthetic construct; identical to SEQ ID NO: 20663
  source 1..120: mol_type = other DNA

SEQ ID NO: 105945 - DNA, 120 bp, synthetic construct; identical to SEQ ID NO: 20664
  source 1..120: mol_type = other DNA

SEQ ID NO: 105946 - DNA, 120 bp, synthetic construct; identical to SEQ ID NO: 20665
  source 1..120: mol_type = other DNA

SEQ ID NO: 105947 - DNA, 120 bp, synthetic construct; identical to SEQ ID NO: 20666
  source 1..120: mol_type = other DNA

SEQ ID NO: 105948 - DNA, 120 bp, synthetic construct; identical to SEQ ID NO: 20667
  source 1..120: mol_type = other DNA

SEQ ID NO: 105949 - DNA, 120 bp, synthetic construct; identical to SEQ ID NO: 20668
  source 1..120: mol_type = other DNA

SEQ ID NO: 105950 - DNA, 120 bp, synthetic construct; identical to SEQ ID NO: 20669
  source 1..120: mol_type = other DNA

SEQ ID NO: 105951 - DNA, 120 bp, synthetic construct; identical to SEQ ID NO: 20670
  source 1..120: mol_type = other DNA

SEQ ID NO: 105952 - DNA, 120 bp, synthetic construct
  source 1..120: mol_type = other DNA
ccctgcctcagcccccgagtagctgcgattacaggcgcatgccaccaggcctgactattttttttttgtattttagtagagacgagattttaccatgttggccaggatggtctcgatctc

SEQ ID NO: 105953 - DNA, 120 bp, synthetic construct; identical to SEQ ID NO: 20671
  source 1..120: mol_type = other DNA

SEQ ID NO: 105954 - DNA, 120 bp, synthetic construct; identical to SEQ ID NO: 20672
  source 1..120: mol_type = other DNA

SEQ ID NO: 105955 - DNA, 120 bp, synthetic construct; identical to SEQ ID NO: 20673
  source 1..120: mol_type = other DNA

SEQ ID NO: 105956 - DNA, 120 bp, synthetic construct; identical to SEQ ID NO: 20674
  source 1..120: mol_type = other DNA

SEQ ID NO: 105957 - DNA, 120 bp, synthetic construct; identical to SEQ ID NO: 20675
  source 1..120: mol_type = other DNA

SEQ ID NO: 105958 - DNA, 120 bp, synthetic construct; identical to SEQ ID NO: 20676
  source 1..120: mol_type = other DNA

SEQ ID NO: 105959 - DNA, 120 bp, synthetic construct; identical to SEQ ID NO: 20677
  source 1..120: mol_type = other DNA

SEQ ID NO: 105960 - DNA, 120 bp, synthetic construct
  source 1..120: mol_type = other DNA
ccctgctaatttttgtattctttgtagggatggagttctgccatgttgcccaagttagtctcaaactcctgggctcaagcaatccacccacctcgggctcccaaagtgcttgtattacag

SEQ ID NO: 105961 - DNA, 120 bp, synthetic construct; identical to SEQ ID NO: 20678
  source 1..120: mol_type = other DNA

SEQ ID NO: 105962 - DNA, 120 bp, synthetic construct; identical to SEQ ID NO: 20679
  source 1..120: mol_type = other DNA

SEQ ID NO: 105963 - DNA, 120 bp, synthetic construct; identical to SEQ ID NO: 20680
  source 1..120: mol_type = other DNA

SEQ ID NO: 105964 - DNA, 120 bp, synthetic construct; identical to SEQ ID NO: 20681
  source 1..120: mol_type = other DNA

SEQ ID NO: 105965 - DNA, 120 bp, synthetic construct; identical to SEQ ID NO: 20682
  source 1..120: mol_type = other DNA

SEQ ID NO: 105966 - DNA, 120 bp, synthetic construct; identical to SEQ ID NO: 20683
  source 1..120: mol_type = other DNA

SEQ ID NO: 105967 - DNA, 120 bp, synthetic construct; identical to SEQ ID NO: 20684
  source 1..120: mol_type = other DNA

SEQ ID NO: 105968 - DNA, 120 bp, synthetic construct; identical to SEQ ID NO: 14215
  source 1..120: mol_type = other DNA

SEQ ID NO: 105969 - DNA, 120 bp, synthetic construct; identical to SEQ ID NO: 14216
  source 1..120: mol_type = other DNA

SEQ ID NO: 105970 - DNA, 120 bp, synthetic construct
  source 1..120: mol_type = other DNA
gtctgagatgtggggagcacctctgccccgccgccctgtctgggatgtgaggagcgcctctgctgggccgcaaccctgtctgggaggtgaggagcgtctctgcccggccgccccgtctga

SEQ ID NO: 105971 - DNA, 120 bp, synthetic construct
  source 1..120: mol_type = other DNA
ctaatcttaagtacccagggacacaaacactgcggaaggctgcagggtcctctgcctaggaaaaccagagacctttgttcacttgtttatctgctgaccttccctccactattgtcctat

SEQ ID NO: 105972 - DNA, 120 bp, synthetic construct; identical to SEQ ID NO: 28558
  source 1..120: mol_type = other DNA

SEQ ID NO: 105973 - DNA, 120 bp, synthetic construct
  source 1..120: mol_type = other DNA
aggaattagggagcagggtgagatagatggggtttgggagaaccagagcatccgggagggagggcgaggggaatgtcggaggtcctgggcaatggagaggggaagaactagggggctgaa

SEQ ID NO: 105974 - DNA, 120 bp, synthetic construct; identical to SEQ ID NO: 21663
  source 1..120: mol_type = other DNA

SEQ ID NO: 105975 - DNA, 120 bp, synthetic construct; identical to SEQ ID NO: 13283
  source 1..120: mol_type = other DNA

SEQ ID NO: 105976 - DNA, 120 bp, synthetic construct; identical to SEQ ID NO: 3884
  source 1..120: mol_type = other DNA

SEQ ID NO: 105977 - DNA, 120 bp, synthetic construct
  source 1..120: mol_type = other DNA
cttatcaatccttggacattttactcagatattacctactggcatgtgtagtctcctttaaaaaaaaaaaaatgtaggctgggcacggtggctcacacctgtaatcccagcactttggga

SEQ ID NO: 105978 - DNA, 120 bp, synthetic construct
  source 1..120: mol_type = other DNA
cgcggtggctcacgcctgtaatcccagcactttgggaggccgagacgggcggatcacgaggtcaggggatcgagaccatcctggctgacacggtgaaaccccgtctctactaaaaataca

SEQ ID NO: 105979 - DNA, 120 bp, synthetic construct
  source 1..120: mol_type = other DNA
tgaacaatgtgagagttccctgtctctgtgttagtaaaaaagttttactcatgccaatgaaaaagtcaaagaaaatggacctcatttcagggaaacttattaagttggtgtgaggaacac

SEQ ID NO: 105980 - DNA, 120 bp, synthetic construct
  source 1..120: mol_type = other DNA
gacgctcctcacatcccagacggggtggcagggcagaggcgctccccacatctcagatgatgggcggccgggcagagacgctcctcacttcctagatgggatggcggccgggcagagacg

SEQ ID NO: 105981 - DNA, 120 bp, synthetic construct; identical to SEQ ID NO: 8416
  source 1..120: mol_type = other DNA

SEQ ID NO: 105982 - DNA, 120 bp, synthetic construct; identical to SEQ ID NO: 8417
  source 1..120: mol_type = other DNA

SEQ ID NO: 105983 - DNA, 120 bp, synthetic construct
  source 1..120: mol_type = other DNA
ttttttttttgagacagggtctcactctgtcacccaggctggagtgcagcggtgtgatcacggttcactacagccttgacctcttgggctcaggtaatcctcccacctcagcctcccagg

SEQ ID NO: 105984 - DNA, 120 bp, synthetic construct
  source 1..120: mol_type = other DNA
ccactgcactgcagcctggttgacagagattctgtctcacaaaaaaaaaaaaaaaaaaaaaaaaaatatatatatatatatatatatatacacacacacacatatatgtagaaaagctgt

SEQ ID NO: 105985 - DNA, 120 bp, synthetic construct
  source 1..120: mol_type = other DNA
tggtctcaaactcctgagctcaagttatccacccacctctgcctcccaaagtgctgggattacaggtgttagccaccatacctgtcctacttctaactgatatacatgcatctggggacc

SEQ ID NO: 105986 - DNA, 120 bp, synthetic construct; identical to SEQ ID NO: 8418
  source 1..120: mol_type = other DNA

SEQ ID NO: 105987 - DNA, 120 bp, synthetic construct; identical to SEQ ID NO: 8419
  source 1..120: mol_type = other DNA

SEQ ID NO: 105988 - DNA, 120 bp, synthetic construct; identical to SEQ ID NO: 8420
  source 1..120: mol_type = other DNA

SEQ ID NO: 105989 - DNA, 120 bp, synthetic construct; identical to SEQ ID NO: 8421
  source 1..120: mol_type = other DNA

SEQ ID NO: 105990 - DNA, 120 bp, synthetic construct; identical to SEQ ID NO: 8422
  source 1..120: mol_type = other DNA

SEQ ID NO: 105991 - DNA, 120 bp, synthetic construct
  source 1..120: mol_type = other DNA
actggtgtgagatggtatctcgctgtggttttggtttgcatttctctgacgattagtaatcctgagcattttttcatatgcttattgggctgcatatatgtcttcttttgagaagtgcgt

SEQ ID NO: 105992 - DNA, 120 bp, synthetic construct
  source 1..120: mol_type = other DNA
aaccaggaagaaactgaaattctgaacagaccaatgacgagttccaaaattgaatcagtaataaaaaacctggccagggccatggctcatgcctacaatcccagcactttgggaggcaaa

SEQ ID NO: 105993 - DNA, 120 bp, synthetic construct
  source 1..120: mol_type = other DNA
ctcctgggatgcaaggttagttcaacataggcaaatcaataaatgtgattcatcacataaacagaattaaaaacaaataccacatatcaggccagccgcaatagctcatgcctgtaaccc

SEQ ID NO: 105994 - DNA, 120 bp, synthetic construct; identical to SEQ ID NO: 8423
  source 1..120: mol_type = other DNA

SEQ ID NO: 105995 - DNA, 120 bp, synthetic construct; identical to SEQ ID NO: 8424
  source 1..120: mol_type = other DNA

SEQ ID NO: 105996 - DNA, 120 bp, synthetic construct; identical to SEQ ID NO: 8425
  source 1..120: mol_type = other DNA

SEQ ID NO: 105997 - DNA, 120 bp, synthetic construct; identical to SEQ ID NO: 8426
  source 1..120: mol_type = other DNA

SEQ ID NO: 105998 - DNA, 120 bp, synthetic construct; identical to SEQ ID NO: 24300
  source 1..120: mol_type = other DNA

SEQ ID NO: 105999 - DNA, 120 bp, synthetic construct; identical to SEQ ID NO: 24301
  source 1..120: mol_type = other DNA

SEQ ID NO: 106000 - DNA, 120 bp, synthetic construct
  source 1..120: mol_type = other DNA
gggagaggggaggggagggaggaagggagggaaggagaaaatggttttatagggaattataatgtgtctggtatttttacttccttgacttcctgctattttcttatgtgacacacaaaa

SEQ ID NO: 106001 - DNA, 120 bp, synthetic construct; identical to SEQ ID NO: 35103
  source 1..120: mol_type = other DNA

SEQ ID NO: 106002 - DNA, 120 bp, synthetic construct
  source 1..120: mol_type = other DNA
ataatgctgcatacctacaactatctgatctttgacaaacctgacaaaaacaagcaatggggaaaggattccctatttaataaatggtgctgggaaaactggctagccatatgtagaaag

SEQ ID NO: 106003 - DNA, 120 bp, synthetic construct
  source 1..120: mol_type = other DNA
tggacacaggaaggggaatatcacactctagggactgtggtggggtggggggaggggggagggatagcattgggagatatacctaatgctagatgacgagttagtgggtgcagcgcacca

SEQ ID NO: 106004 - DNA, 120 bp, synthetic construct
  source 1..120: mol_type = other DNA
cctgatggagatagttgtgctgtgtgcattgaattgtataaaccaaatgatttggtacgcatcttaacgtgcaagtaagtttgattttcttctatatcttcaataaaatagctgacccac

SEQ ID NO: 106005 - DNA, 120 bp, synthetic construct
  source 1..120: mol_type = other DNA
aactatggagatttaaatatagtatgtgatatggtttggctgtgttcccacccaaatcacatttcgaattatagctcctataaaccccatgtgttgtgggagggacgtggtgggaggtaa

SEQ ID NO: 106006 - DNA, 120 bp, synthetic construct
  source 1..120: mol_type = other DNA
aattgccaagaaaatagggaaaatgtctccagggcatgtcagaggtcttcatggcagcccctcctatcacacgcccagaggcctaggaggaaaaaatggcttgctgggctgggcccaggg

SEQ ID NO: 106007 - DNA, 120 bp, synthetic construct
  source 1..120: mol_type = other DNA
aacttttgactggggatccaggcatttccatacagattctgtaatccaggcagaggttcccaagcctcaattcttgacttctgtgcacctgcaggctcaataccacgtggaaactgccaa

SEQ ID NO: 106008 - DNA, 120 bp, synthetic construct
  source 1..120: mol_type = other DNA
gcatgtgcaggagaacttcccttttataaaaccatcagttcacatgagacttactcactctcatgagaatagcatgggaaagacctgcccccatgattcaattaacctcccacgaggttt

SEQ ID NO: 106009 - DNA, 120 bp, synthetic construct; identical to SEQ ID NO: 24794
  source 1..120: mol_type = other DNA

SEQ ID NO: 106010 - DNA, 120 bp, synthetic construct; identical to SEQ ID NO: 27374
  source 1..120: mol_type = other DNA

SEQ ID NO: 106011 - DNA, 120 bp, synthetic construct; identical to SEQ ID NO: 27375
  source 1..120: mol_type = other DNA

SEQ ID NO: 106012 - DNA, 120 bp, synthetic construct
  source 1..120: mol_type = other DNA
ctatttctttctctacctcctcttaaggccaataattcttagatttgcccctttgaggccattttctagatcttgtaggcatgcttcattctcttttttcttttgtctcttcttactgtg

SEQ ID NO: 106013 - DNA, 120 bp, synthetic construct
  source 1..120: mol_type = other DNA
gaggtgctccccacatctcagacgatgggcggccgggcagagacgctcctcacttcctagatgggatggtggcggggaagaggcgctcctcgcttcctagatgggatggcggccgggcag

SEQ ID NO: 106014 - DNA, 120 bp, synthetic construct
  source 1..120: mol_type = other DNA
gtttgtacctgtccttcttgggaaggctttccaggaatttgaaaggacttgggcgttgtgatctaagccgtatctgcattagggggcaccccaagcccagtaaagctgtgactcttgcag

SEQ ID NO: 106015 - DNA, 120 bp, synthetic construct
  source 1..120: mol_type = other DNA
atggcatctggtaggctgaattaattccattttcttgttaccttccatggaagaagtttctaataaaaaaatcttttcagggccgagcgcagtggctcacgcctataatcgcagtagttt

SEQ ID NO: 106016 - DNA, 120 bp, synthetic construct
  source 1..120: mol_type = other DNA
gggtgaaggggtgacttctttaccctaatggtcttcgtaggcaggtctcaggatgtccactccaaagttcgtggtcttttttctagagaataataatttttaaaatccattgaactggcc

SEQ ID NO: 106017 - DNA, 120 bp, synthetic construct; identical to SEQ ID NO: 20335
  source 1..120: mol_type = other DNA

SEQ ID NO: 106018 - DNA, 120 bp, synthetic construct; identical to SEQ ID NO: 20336
  source 1..120: mol_type = other DNA

SEQ ID NO: 106019 - DNA, 120 bp, synthetic construct; identical to SEQ ID NO: 27146
  source 1..120: mol_type = other DNA

SEQ ID NO: 106020 - DNA, 120 bp, synthetic construct; identical to SEQ ID NO: 27147
  source 1..120: mol_type = other DNA

SEQ ID NO: 106021 - DNA, 120 bp, synthetic construct; identical to SEQ ID NO: 25799
  source 1..120: mol_type = other DNA

SEQ ID NO: 106022 - DNA, 120 bp, synthetic construct
  source 1..120: mol_type = other DNA
atggacacaggaaggggaatatcacactctggggactgtggtggggtcgggggaggggggagggatagcattgggagatatacctaatgctagatgacacattagtgggtgcagcgcacc

SEQ ID NO: 106023 - DNA, 120 bp, synthetic construct
  source 1..120: mol_type = other DNA
tcaactggaagaaagggtatcagcgatggaagacgaaatgaatgaaatgaagcatgaagagaagtttagagaaaaaataaaaagaaatgaacaaagcctccaagaaatatgggactatgt

SEQ ID NO: 106024 - DNA, 120 bp, synthetic construct
  source 1..120: mol_type = other DNA
gtctctgataaaacagactttaaaccaacaaagatcaaaagagacaaagaaggccattacataatggtaaagggatcaattcaacaagaagaactaactaacctaaatatatatgaaccc

SEQ ID NO: 106025 - DNA, 120 bp, synthetic construct
  source 1..120: mol_type = other DNA
ataaagaaaaaaagagagaagaatcaaatagacgcaataaaaaggggatatcaccaccgatcccacagaaatacaaactaccatcagagaatagtacaaacacctctacacaaataaact

SEQ ID NO: 106026 - DNA, 120 bp, synthetic construct
  source 1..120: mol_type = other DNA
aagctgataagcaacttcagcgaagactcaagatacaaaatcaatgtacaaacatcacaagcattcttatacaccaataacagacaaacagagagccaaatcatgagtgaactcccattc

SEQ ID NO: 106027 - DNA, 120 bp, synthetic construct
  source 1..120: mol_type = other DNA
taattgaactaaagagcttctgcacagtgaaagaaactaccatcagagtgaacaggcaacctacaaaatgggagaaaattttcgcaacctactcatctgacaaagggctaatatccagaa

SEQ ID NO: 106028 - DNA, 120 bp, synthetic construct
  source 1..120: mol_type = other DNA
cacattgtgcacatgtaccctaaaacttaaagtataataataataataataataataatataattgatagaccgctagcaagactaataaagaagaaaagagagaagaatcaaatagaca

SEQ ID NO: 106029 - DNA, 120 bp, synthetic construct
  source 1..120: mol_type = other DNA
ctctctcaccacacctattcaacatagtgttggaagttctggccagggcattcaggcaggagaaggaaataaagggtattcaattaggaaaagaggaagtcaaattgtccctgtttgcag

SEQ ID NO: 106030 - DNA, 120 bp, synthetic construct
  source 1..120: mol_type = other DNA
ccaaaagcaatggcaacaaaagccaaaattgacaaatgggatctaattaaactaaggaccttctgcacagcaaaacaaaccaccatcagggtgaacaggcaacctacagaatgggagaaa

SEQ ID NO: 106031 - DNA, 120 bp, synthetic construct; identical to SEQ ID NO: 25800
  source 1..120: mol_type = other DNA

SEQ ID NO: 106032 - DNA, 120 bp, synthetic construct
  source 1..120: mol_type = other DNA
atcattaaaaagtcaggaaacaacaggtgctggagaggatgtggagaaataggaacacttctacactgttggtgggactgtaaactggttcaaccattgtggaagtcggtgtggcgattc

SEQ ID NO: 106033 - DNA, 120 bp, synthetic construct; identical to SEQ ID NO: 25801
  source 1..120: mol_type = other DNA

SEQ ID NO: 106034 - DNA, 120 bp, synthetic construct; identical to SEQ ID NO: 25802
  source 1..120: mol_type = other DNA

SEQ ID NO: 106035 - DNA, 120 bp, synthetic construct
  source 1..120: mol_type = other DNA
caagaaaaaagtagttcccaggttattactggtaaattttatggtcttttaaaaatggaataagagggctctgttctgttccattcatctatatctctgttttggtaccagtaccatgct

SEQ ID NO: 106036 - DNA, 120 bp, synthetic construct
  source 1..120: mol_type = other DNA
tcaaaggctttttctgcatctattgagataatcatatggtttttgtctttggctctgtttatatgctggattacatttattgatttgcgtatattgaaccagccttgcatcccagggatg

SEQ ID NO: 106037 - DNA, 120 bp, synthetic construct
  source 1..120: mol_type = other DNA
caaaatgggagaaaattttcgcaacctactcatctgacaaagggctaatatccagaatctacaatgaactcaaacaaatttacaagaaaaaaacaaacaaccccatcaaaaagtgggcga

SEQ ID NO: 106038 - DNA, 120 bp, synthetic construct; identical to SEQ ID NO: 25803
  source 1..120: mol_type = other DNA

SEQ ID NO: 106039 - DNA, 120 bp, synthetic construct
  source 1..120: mol_type = other DNA
tttttaaaaaagagttgaagattaaagatatgttcataatcacgcctgtaatcccagcactttgggaggtcaaggtgggcagatcacgaagtcaggagatagaccatcctggccaacatg

SEQ ID NO: 106040 - DNA, 120 bp, synthetic construct; identical to SEQ ID NO: 18986
  source 1..120: mol_type = other DNA

SEQ ID NO: 106041 - DNA, 120 bp, synthetic construct; identical to SEQ ID NO: 18987
  source 1..120: mol_type = other DNA

SEQ ID NO: 106042 - DNA, 120 bp, synthetic construct
  source 1..120: mol_type = other DNA
ttctctctttcattcttgatcaatctagatagaaatttaatcatttgtactactctttagaaaatagcctttgatcaggccaggcgcggtggctcatgcctgtaatcccagcactttggg

SEQ ID NO: 106043 - DNA, 120 bp, synthetic construct; identical to SEQ ID NO: 12105
  source 1..120: mol_type = other DNA

SEQ ID NO: 106044 - DNA, 120 bp, synthetic construct
  source 1..120: mol_type = other DNA
ccacatcctctccagcacctgttgtttcctgactttttaatgattgccattctaactggtgtgagatgatatctcatagtggttttgatttgcatttctctgatggccagtgatggtgag

SEQ ID NO: 106045 - DNA, 120 bp, synthetic construct
  source 1..120: mol_type = other DNA
ccgccactacgcccggctaatttttttttgtatttttagtagagacggggtttcactgttttagcggggatggtctcgatctcctgacctcgtgatccgcccaccttggcctcccaaagt

SEQ ID NO: 106046 - DNA, 120 bp, synthetic construct
  source 1..120: mol_type = other DNA
tttttgcatcaatgttcatcaaggatattggtctaaaattctcttttttggttgtgtctctgcccggctttggtatcagaatgatgctggcctcatcaaatgagttagggaggattccct

SEQ ID NO: 106047 - DNA, 120 bp, synthetic construct
  source 1..120: mol_type = other DNA
gtttccatgtagttgagcggctttgagtgagattattaatcctgagttctagtttgattgcactgtggtctgagagatagtttgttataatttctgttcttttacatttgctgaggagag

SEQ ID NO: 106048 - DNA, 120 bp, synthetic construct
  source 1..120: mol_type = other DNA
taagaatgttgaatattggcccccactcttttctggcttgtagggtttctgccgagagatccgctgttagtctgatgggcttccctttcccgacctttctctctggctgcccttaacatt

SEQ ID NO: 106049 - DNA, 120 bp, synthetic construct
  source 1..120: mol_type = other DNA
cgtcgctcacgctgggagctgtagaccggagctgttcctattcggccatccgacaattcttttaaatgcatctttgaatatacaggaaagataggaaaatctccagtttccaaaaacaaa

SEQ ID NO: 106050 - DNA, 120 bp, synthetic construct
  source 1..120: mol_type = other DNA
gtgatgatgagcatgtttttcatatgtttgttggtcacagcaatgtcttcttttgaataatagcgttctttttttattattattatactttaagttttagggtacatgtgcacaatgtgc

SEQ ID NO: 106051 - DNA, 120 bp, synthetic construct
  source 1..120: mol_type = other DNA
actttttgatggggttgtttttttcttgtaaatttgtttgagttcattgtagtttttggatactagccctttgtcagatgagtaggttgcgaaaattttctcccattttgtaggttgtct

SEQ ID NO: 106052 - DNA, 120 bp, synthetic construct
  source 1..120: mol_type = other DNA
ctgtttgtctgttgttggtgtataagaatgcttgtgatttttgtacattgattttgtatcctgagactttgctgaagttgcatatcagcttaaggagattttgggctgagacaatgggat

SEQ ID NO: 106053 - DNA, 120 bp, synthetic construct
  source 1..120: mol_type = other DNA
ttgggagagtgtgtcgaggaatttatccatttcttctagattttctagtttatttgcatagaggtgtttgtagtattctctgatggtagtttgtatttctgtgggatcggtggtgatatc

SEQ ID NO: 106054 - DNA, 120 bp, synthetic construct
  source 1..120: mol_type = other DNA
cttcctccatccttttattttgagcctatgtgtgtctctgcacatgagatgagtttcctgaatacagcacactgatgggtcttgactctttatccagtttgccagtctgtgtcttttaat

SEQ ID NO: 106055 - DNA, 120 bp, synthetic construct
  source 1..120: mol_type = other DNA
atttcattcatttcatcttccatcgctgataccctttcttccagttgatcgcatcggctgctgaggcttctgtattcttcacgtagttcttgagccttggttttcagctccatcagctcc

SEQ ID NO: 106056 - DNA, 120 bp, synthetic construct; identical to SEQ ID NO: 26612
  source 1..120: mol_type = other DNA

SEQ ID NO: 106057 - DNA, 120 bp, synthetic construct
  source 1..120: mol_type = other DNA
tctgggaagtgaggagtgcctctgcccggctgccccatctgggaggtgtaccccacagctccgaagaggcagcgaccatcgagaacgggccatgatgacaatggcggttttgtcgaaaag

SEQ ID NO: 106058 - DNA, 120 bp, synthetic construct
  source 1..120: mol_type = other DNA
ccagatccctgaggaatcgccacactgtcttccacaatggttgaactagtttacattcccacaaacagtgtaaaagtgttcctatttctccacatcctctccagcacctattgtttcctg

SEQ ID NO: 106059 - DNA, 120 bp, synthetic construct
  source 1..120: mol_type = other DNA
aatcctccttcctcggcctcccaaagtgctaggattacaggcatgagccaccctgccaagcctcgcttagatgttttaaatatttattttgtagttttactttttcggtctttatctaga

SEQ ID NO: 106060 - DNA, 120 bp, synthetic construct
  source 1..120: mol_type = other DNA
agtaccatgcggttttgattactgtagccttgtagtatagtttgaagtcaggtagcatgatgcctccagctttgttcttttggcttaggattgacttggcaatgcgggctcttttttggt

SEQ ID NO: 106061 - DNA, 120 bp, synthetic construct
  source 1..120: mol_type = other DNA
tgagatacatcccatcaatacctaatttattgagagtttttagcatgaatggttgttgaattttgtcaaaggccttttctgcatctattgagattatcatatggtttttgtctttggttc

SEQ ID NO: 106062 - DNA, 120 bp, synthetic construct; identical to SEQ ID NO: 26613
  source 1..120: mol_type = other DNA

SEQ ID NO: 106063 - DNA, 120 bp, synthetic construct
  source 1..120: mol_type = other DNA
ttctggatattagccctttgtcagatgagtaggttgtgaaaatgttctcccattctgtaggttgcctgttcactctgatggtagtttcttttgctgtgcagaagctctttagtttaatta

SEQ ID NO: 106064 - DNA, 120 bp, synthetic construct
  source 1..120: mol_type = other DNA
aattgccctggccagaacttccaacactatgttgaataggagtggtgagagagggcatccctgtcttgtgccagttttcaaagggaatgcttccagtttttgcccattcagtatgatatt

SEQ ID NO: 106065 - DNA, 120 bp, synthetic construct
  source 1..120: mol_type = other DNA
ctcaacactttatcactttgcattgctctttctcctcccttaagtgaatttccattttgagggtacagctccacaggagaaaggtgtggtggtggtagtggtggagggtgtctgtggggg

SEQ ID NO: 106066 - DNA, 120 bp, synthetic construct
  source 1..120: mol_type = other DNA
tgctgccttcaagcatctgtttaacaaagcacatcttgcaccgcccttaatccatttaacccttagtggacacagcacatgtttcagagagcaggggttgggggtaaggttatagattaa

SEQ ID NO: 106067 - DNA, 120 bp, synthetic construct; identical to SEQ ID NO: 4986
  source 1..120: mol_type = other DNA

SEQ ID NO: 106068 - DNA, 120 bp, synthetic construct; identical to SEQ ID NO: 25138
  source 1..120: mol_type = other DNA

SEQ ID NO: 106069 - DNA, 120 bp, synthetic construct; identical to SEQ ID NO: 25139
  source 1..120: mol_type = other DNA

SEQ ID NO: 106070 - DNA, 120 bp, synthetic construct; identical to SEQ ID NO: 25140
  source 1..120: mol_type = other DNA

SEQ ID NO: 106071 - DNA, 120 bp, synthetic construct; identical to SEQ ID NO: 25141
  source 1..120: mol_type = other DNA

SEQ ID NO: 106072 - DNA, 120 bp, synthetic construct; identical to SEQ ID NO: 25142
  source 1..120: mol_type = other DNA

SEQ ID NO: 106073 - DNA, 120 bp, synthetic construct
  source 1..120: mol_type = other DNA
aacacaaaattttcacagaaagaaaaacgcctccctgacaatgcgactgtccacttgacaccagggccccgcgctgcccatggaatagggccagagtcctccactggcgttaaggttgcc

SEQ ID NO: 106074 - DNA, 120 bp, synthetic construct
  source 1..120: mol_type = other DNA
gaagccctgacctttgccgaggcaggcgtcgcagtacacgtgcccgcagttggtgaggctgaagcacgacgtcctgtggggcggctggaagcagcgattacagaacacccagttggccat

SEQ ID NO: 106075 - DNA, 120 bp, synthetic construct
  source 1..120: mol_type = other DNA
aagaaaaagaaagtgggtgattttaaaacggaggtccctggtcacaccatgagcctcacagatgggaaaactgaggcacgggggatggtgcggaccgccgtggcccctccatcatcagtg

SEQ ID NO: 106076 - DNA, 120 bp, synthetic construct
  source 1..120: mol_type = other DNA
tgaacagcctcttaggcgttagacaccaagagaatgcgtccttgttaagattcccagttggagcactaggcgaggctttcgaggggagcgtcctggacatgttcaaggagaatggttgga

SEQ ID NO: 106077 - DNA, 120 bp, synthetic construct
  source 1..120: mol_type = other DNA
aaggtttgggtaactccctttttatgcctaatttggaactctgtcagagtgggaaagtggcagtacggatggtgttccttgaaaacattgaaggcaaatgaataaaccctttgccatctg

SEQ ID NO: 106078 - DNA, 120 bp, synthetic construct; identical to SEQ ID NO: 18576
  source 1..120: mol_type = other DNA

SEQ ID NO: 106079 - DNA, 120 bp, synthetic construct
  source 1..120: mol_type = other DNA
tcccagatatgaaacggcgtggcattggtacataacccacagcatccgcctgtacacttaattttttattttttttattttttgagacggattctctctcttttgcccaggctggagtgc

SEQ ID NO: 106080 - DNA, 120 bp, synthetic construct; identical to SEQ ID NO: 18577
  source 1..120: mol_type = other DNA

SEQ ID NO: 106081 - DNA, 120 bp, synthetic construct; identical to SEQ ID NO: 18578
  source 1..120: mol_type = other DNA

SEQ ID NO: 106082 - DNA, 120 bp, synthetic construct; identical to SEQ ID NO: 18579
  source 1..120: mol_type = other DNA

SEQ ID NO: 106083 - DNA, 120 bp, synthetic construct; identical to SEQ ID NO: 18580
  source 1..120: mol_type = other DNA

SEQ ID NO: 106084 - DNA, 120 bp, synthetic construct; identical to SEQ ID NO: 18581
  source 1..120: mol_type = other DNA

SEQ ID NO: 106085 - DNA, 120 bp, synthetic construct; identical to SEQ ID NO: 18582
  source 1..120: mol_type = other DNA

SEQ ID NO: 106086 - DNA, 120 bp, synthetic construct; identical to SEQ ID NO: 18583
  source 1..120: mol_type = other DNA

SEQ ID NO: 106087 - DNA, 120 bp, synthetic construct
  source 1..120: mol_type = other DNA
gggagtcacagagggcttcccagggaatatcattccagaactgagtcctgaaaaataaggggcagaagataaccaccaaatgaaatgcatgatccttggtttgatcctgaattaaacaaa

SEQ ID NO: 106088 - DNA, 120 bp, synthetic construct
  source 1..120: mol_type = other DNA
atcttttccccacctttcccccctttctattccacaaaaccgccattgtcatcatggcccgttctcaacgagctgttgggtacacctcccagacggggtggtggcctggcagaggggctc

SEQ ID NO: 106089 - DNA, 120 bp, synthetic construct
  source 1..120: mol_type = other DNA
agacctagtctctatttcttttttttttttctttttccttttttatttgagacggagtttcactcttgttgcccaggctggagtgcaataatggcgcgatcttggctcactgcaacctcc

SEQ ID NO: 106090 - DNA, 120 bp, synthetic construct
  source 1..120: mol_type = other DNA
aatctcttgaacctggaaggcgaaggttgcagtgagctgagatcacgccactgcacttcagcttgggcaacagagcaagactctatctcaaaaaaattatcaaatgatttttttccttta

SEQ ID NO: 106091 - DNA, 120 bp, synthetic construct; identical to SEQ ID NO: 28285
  source 1..120: mol_type = other DNA

SEQ ID NO: 106092 - DNA, 120 bp, synthetic construct
  source 1..120: mol_type = other DNA
ctctccagcacctgttgtttcctgactttttaatgattgccattctaagtggtgtgagatggtatctcattgtggttttgatttgcatttctctgatggccagtgatgatgagcattttt

SEQ ID NO: 106093 - DNA, 120 bp, synthetic construct
  source 1..120: mol_type = other DNA
tccttgaagaggtccttcacatcccttgtaagttggattcctaaatattttattctctttgaagcaattgtgaatgggagttcactcatgatttggctctctgtttgtctgttattggtg

SEQ ID NO: 106094 - DNA, 120 bp, synthetic construct; identical to SEQ ID NO: 7536
  source 1..120: mol_type = other DNA

SEQ ID NO: 106095 - DNA, 120 bp, synthetic construct; identical to SEQ ID NO: 2789
  source 1..120: mol_type = other DNA

SEQ ID NO: 106096 - DNA, 120 bp, synthetic construct; identical to SEQ ID NO: 6348
  source 1..120: mol_type = other DNA

SEQ ID NO: 106097 - DNA, 120 bp, synthetic construct; identical to SEQ ID NO: 32202
  source 1..120: mol_type = other DNA

SEQ ID NO: 106098 - DNA, 120 bp, synthetic construct; identical to SEQ ID NO: 25181
  source 1..120: mol_type = other DNA

SEQ ID NO: 106099 - DNA, 120 bp, synthetic construct; identical to SEQ ID NO: 25182
  source 1..120: mol_type = other DNA

SEQ ID NO: 106100 - DNA, 120 bp, synthetic construct
  source 1..120: mol_type = other DNA
gaacctgggaggtggaggctgcagtcagccaagatcacaccactgcactccagcctgggtgacagaacaagactgtgtctcaaaaaaaaattatttgtttttattgatttttatttattt

SEQ ID NO: 106101 - DNA, 120 bp, synthetic construct; identical to SEQ ID NO: 13245
  source 1..120: mol_type = other DNA

SEQ ID NO: 106102 - DNA, 120 bp, synthetic construct; identical to SEQ ID NO: 13246
  source 1..120: mol_type = other DNA

SEQ ID NO: 106103 - DNA, 120 bp, synthetic construct
  source 1..120: mol_type = other DNA
ttctggcacccaccactctgactgtaattgtttgtttaaatgtctgccttctctgcttgattgtaacctctgtgacagcaggaaatgaatgcatccagtttgtttgttgatggatcatca

SEQ ID NO: 106104 - DNA, 120 bp, synthetic construct
  source 1..120: mol_type = other DNA
gagtggatgagtaaatggtaggagagtggtgggtggatggatggtagatggatggatggatggatggatgggtggatgggtaaatgggaggagagtggatgggtggatgggtaaatggga

SEQ ID NO: 106105 - DNA, 120 bp, synthetic construct
  source 1..120: mol_type = other DNA
gtcactggaacctgggaggcagaggttccagtgagccaaggtcatgccactgcactctagcctgggtgacagagcaagattctgtctcaaaaaatatataaatataaatatatatatata

SEQ ID NO: 106106 - DNA, 120 bp, synthetic construct
  source 1..120: mol_type = other DNA
atgacaaaggggatatcaccaccgatcccacagaaatacaaactaccatcagaaaatactataaatacctctatgaaaataaactagaaaatctagaagaaatggataaattcctcgaca

SEQ ID NO: 106107 - DNA, 120 bp, synthetic construct
  source 1..120: mol_type = other DNA
gacaggcaacttcagcaaagtctcaggatacaaaatcaacgtgcaaaaatcacaagcattcttatacaccaataacagacaaacagagagccaaatcatgagtgaactcccattcacaat

SEQ ID NO: 106108 - DNA, 120 bp, synthetic construct
  source 1..120: mol_type = other DNA
aacctaaagaaaatttttgcaatctactcatctgacaaagggctaatatccagaatctacaaagaactcaaacaaatttacaagaaaaaaacaaacaaccccatcaaaaagtgggcaaag

SEQ ID NO: 106109 - DNA, 120 bp, synthetic construct
  source 1..120: mol_type = other DNA
ttacaaggctacagtaaccaaaacagcatagtactggtaccaaaacagagaaatagaccaatggaacacaacagagccctcagaaataatgccgcatatctacaaccatctgatctttca

SEQ ID NO: 106110 - DNA, 120 bp, synthetic construct
  source 1..120: mol_type = other DNA
acatgcacacctatgtttattgcagcactatttacaatagcaaagacttggaaccaagccaaaagtccaacaatgatagactggattaagaaaatgtggcacatatacaccatggaatac

SEQ ID NO: 106111 - DNA, 120 bp, synthetic construct; identical to SEQ ID NO: 28125
  source 1..120: mol_type = other DNA

SEQ ID NO: 106112 - DNA, 120 bp, synthetic construct
  source 1..120: mol_type = other DNA
tgacgagttagtgggtgcagcgcaccagcatggcacatgtatacatatgtaactaacctgcacattgtgcacatgtaccctaaaacttaaagtataataataataaataaataaaaaatt

SEQ ID NO: 106113 - DNA, 120 bp, synthetic construct; identical to SEQ ID NO: 28126
  source 1..120: mol_type = other DNA

SEQ ID NO: 106114 - DNA, 120 bp, synthetic construct
  source 1..120: mol_type = other DNA
ctactgggaagtgaggagcgtctctgcccggccgcccatattctgagatgtggggagcgcctctgccccgccgccccatctgggatgtgaggagcgcctctgcccggccgagaccccgtc

SEQ ID NO: 106115 - DNA, 120 bp, synthetic construct
  source 1..120: mol_type = other DNA
gcccctctgcccggccaccaccccgtctgggaggtgtgcccaacagctcattgagaacgggccaggatgacaatggcggctttgtggaatagaaaggcgggaaaggtggggaaaagattg

SEQ ID NO: 106116 - DNA, 120 bp, synthetic construct; identical to SEQ ID NO: 11535
  source 1..120: mol_type = other DNA

SEQ ID NO: 106117 - DNA, 120 bp, synthetic construct; identical to SEQ ID NO: 11536
  source 1..120: mol_type = other DNA

SEQ ID NO: 106118 - DNA, 120 bp, synthetic construct
  source 1..120: mol_type = other DNA
caaagaaactaaaagtatggcacacatgcagtacaaaagcagtcaatataaactgtctctcaggcacatcaaaaagcttatccaccatgatcaagtgggcttcatccctgggatgcaagg

SEQ ID NO: 106119 - DNA, 120 bp, synthetic construct
  source 1..120: mol_type = other DNA
acgctacctgacttcaaactatactacaaggctacagtaaccaaaacagcatcatactggtaccaaaacagagatatacaccaatggaacagaacagagccctgagaaataatgccgtat

SEQ ID NO: 106120 - DNA, 120 bp, synthetic construct
  source 1..120: mol_type = other DNA
tgttcccccttttctgcatcctgcatcctcatcagcatctttttttttttttttttttttttttttttttgtgtgtgtgtgtgtgtgtgtgtgtgacggagccttgctctgtcgcccagg

SEQ ID NO: 106121 - DNA, 120 bp, synthetic construct
  source 1..120: mol_type = other DNA
tgtaatttattatgttttgatttgcatgtatctggtttgttttttggtgagagagttggggagacagagtctcgctctgtcatccaagctggagtgcactgacaccatcttggcatcttg

SEQ ID NO: 106122 - DNA, 120 bp, synthetic construct
  source 1..120: mol_type = other DNA
catttagggtcttgaaaattattgaaacattttaaaattaactttgtatgatgatgtaaggcagggatcctcaaaccctgggacacagactggtacccagccacggcctggtacctaacc

SEQ ID NO: 106123 - DNA, 120 bp, synthetic construct; identical to SEQ ID NO: 24461
  source 1..120: mol_type = other DNA

SEQ ID NO: 106124 - DNA, 120 bp, synthetic construct
  source 1..120: mol_type = other DNA
gatgggttgaggggtgcagcaaaccaccatggcacgtgtatacctatggaaaaaacctgcgcattctgcatatgtatcccagaacttaaagtataacaacaacaacaaaaaaagaataaa

SEQ ID NO: 106125 - DNA, 120 bp, synthetic construct
  source 1..120: mol_type = other DNA
cattttttcatgtgttttttggctgcataaatgtcttcttttgagaagtgtctgatcacttcaatcattgcaaaacaatgtgcaagtcctcctctagtacttgcacattgttttgcaatg

SEQ ID NO: 106126 - DNA, 120 bp, synthetic construct
  source 1..120: mol_type = other DNA
gtcttgcctaggttttcttctagggtttttatggttttaggtctaacgtttaaatctttaatccatcttgaattgatttttgtataaggtgtaaggaagggatccagtttcagctttcta

SEQ ID NO: 106127 - DNA, 120 bp, synthetic construct
  source 1..120: mol_type = other DNA
taggagcggtgagagagggcatccctgtcttgtgccagttttcaaagggaatgcttccagtttttgcccattcagtatgatattggctgtgggtttgtcatagatagctcttattatttt

SEQ ID NO: 106128 - DNA, 120 bp, synthetic construct
  source 1..120: mol_type = other DNA
ctttgttctcgttggtttcaaagaacatctttatttctgccttcatttcgttatgtacccagtagtcattcaggaacaggttgttcagtttccatgtagttgagcagctttgagtgagat

SEQ ID NO: 106129 - DNA, 120 bp, synthetic construct
  source 1..120: mol_type = other DNA
tttggcatgattttgcagcggctggtaccggttgttcctttccatgtttagtgcttccttcaggagctcttttagggcaggcctggtggtgacaaaatctctcagcatttgcttgtctat

SEQ ID NO: 106130 - DNA, 120 bp, synthetic construct
  source 1..120: mol_type = other DNA
gttagttttccttctaacagacaggaccctcagctgcaggtctgttggaataccctgccgtgtgaggtgtcaccattcaggacataggcgtgggcaaggacttcatgtccaaaacaccaa

SEQ ID NO: 106131 - DNA, 120 bp, synthetic construct
  source 1..120: mol_type = other DNA
cactcataggtgggaattgaacaatgagatcacatggacacaggaaggggaatatcatactctggggactgtggtggggtcgggggaggggggagggatagcattgggagatatacctaa

SEQ ID NO: 106132 - DNA, 120 bp, synthetic construct
  source 1..120: mol_type = other DNA
gtactcctctgagacaaaacttccagaggaacaatcagacagcagcattcgaggttcatgaaaatccactgttctgcagccaccgctgctggtacccaggcaaacagggtctggagtgga

SEQ ID NO: 106133 - DNA, 120 bp, synthetic construct
  source 1..120: mol_type = other DNA
caggaaatacagagaacgccacaaatatactcctcgagaagagcaactccaagacacataattgtcagattcaccaaagttgaaatgaaggaaaaaatgttaagggcagccagagagaaa

SEQ ID NO: 106134 - DNA, 120 bp, synthetic construct
  source 1..120: mol_type = other DNA
actttaacaccccactgtcaacattagacagatcgacaagacagaaagttaacaagcatacccaggaattgaactcagctctgcaccaagcggacctaatagacatctacagaactctcc

SEQ ID NO: 106135 - DNA, 120 bp, synthetic construct
  source 1..120: mol_type = other DNA
gattcacagccgaattctaccagaggtacaaggacgaactgataccattccttctgaaactattccaaacaatagaaagagagggaatcctccctaactcattttatgaggccagcatca

SEQ ID NO: 106136 - DNA, 120 bp, synthetic construct
  source 1..120: mol_type = other DNA
agaagatacaaacaaatggaagaacgttccatgctcatgggtaggaagaatcaatatcgtgaaaatggccatactgcccaaggtaatttatagattcaatgccatccccatcaagctacc

SEQ ID NO: 106137 - DNA, 120 bp, synthetic construct
  source 1..120: mol_type = other DNA
ttggtgggactgtaaactagttcaaccattgtggaagtcagtgtggcgattcctcagggatctagaactagaaataccatttgacccagccatcccattactgggtatataaccaaagga

SEQ ID NO: 106138 - DNA, 120 bp, synthetic construct
  source 1..120: mol_type = other DNA
cttgcttatagtttttactagccgtcaacccataggagtagaattcttttattaattaaaatccaatgggtttaagaactttaggctggggtggggggaggggggaggactagcattagg

SEQ ID NO: 106139 - DNA, 120 bp, synthetic construct; identical to SEQ ID NO: 24454
  source 1..120: mol_type = other DNA

SEQ ID NO: 106140 - DNA, 120 bp, synthetic construct; identical to SEQ ID NO: 24455
  source 1..120: mol_type = other DNA

SEQ ID NO: 106141 - DNA, 120 bp, synthetic construct; identical to SEQ ID NO: 5136
  source 1..120: mol_type = other DNA

SEQ ID NO: 106142 - DNA, 120 bp, synthetic construct; identical to SEQ ID NO: 5137
  source 1..120: mol_type = other DNA

SEQ ID NO: 106143 - DNA, 120 bp, synthetic construct
  source 1..120: mol_type = other DNA
tagtgttggaagttctggccagggcaatcaggcaggagaaggaaaaaagggtattcaattaggaaaagagtaagtcaaactgtccctctttgcagatgacatgattgtatatctagaaaa

SEQ ID NO: 106144 - DNA, 120 bp, synthetic construct
  source 1..120: mol_type = other DNA
agatggattaaagacttaaatgttagacctaaaaccataaaaaccctacaagaaaacctaggcaataccattcaggacataggcatgggcaaggacttcatgtctaaaacaccaaaagca

SEQ ID NO: 106145 - DNA, 120 bp, synthetic construct; identical to SEQ ID NO: 24458
  source 1..120: mol_type = other DNA

SEQ ID NO: 106146 - DNA, 120 bp, synthetic construct; identical to SEQ ID NO: 24460
  source 1..120: mol_type = other DNA

SEQ ID NO: 106147 - DNA, 120 bp, synthetic construct
  source 1..120: mol_type = other DNA
agccctttgtcagatgagtagattgcaaaaattttctcccattctataggttgcctattcactctgatggtagtttcttttgctgtgcagaagctctttagtttaattagatcccatttg

SEQ ID NO: 106148 - DNA, 120 bp, synthetic construct
  source 1..120: mol_type = other DNA
tgaggagtgagaatatcttgaacctgggagttggaggttgcagtgagccaagatcacaccaatgcactccaaactaggtgacagagcaagactctgtctcaaaaaaaaaaaaaaaaaaaa

SEQ ID NO: 106149 - DNA, 120 bp, synthetic construct; identical to SEQ ID NO: 24446
  source 1..120: mol_type = other DNA

SEQ ID NO: 106150 - DNA, 120 bp, synthetic construct; identical to SEQ ID NO: 24447
  source 1..120: mol_type = other DNA

SEQ ID NO: 106151 - DNA, 120 bp, synthetic construct; identical to SEQ ID NO: 24448
  source 1..120: mol_type = other DNA

SEQ ID NO: 106152 - DNA, 120 bp, synthetic construct
  source 1..120: mol_type = other DNA
gtaatctgaggctagatcaccccagacatgaagtaaaattgatggttaaacgagtaagctgaggctagatcaccccagacgtaaagtaaaattgacgggtaaacgggtaagctgaggcta

SEQ ID NO: 106153 - DNA, 120 bp, synthetic construct
  source 1..120: mol_type = other DNA
aacagtaaagacataaagtaaaattgacggttaaatgggtaagctgaggctagatcaccccagacataaagtaaattgacggttaaatgggtaagctgaggctagatcaccaaagtcata

SEQ ID NO: 106154 - DNA, 120 bp, synthetic construct
  source 1..120: mol_type = other DNA
aattgatggttaaatgggtaagctgaggctagatcacccaagacataaagtaaaattgatggttaaatgggtaagctgaggccagatcaccccagacataaagtaaaattgatggttaaa

SEQ ID NO: 106155 - DNA, 120 bp, synthetic construct
  source 1..120: mol_type = other DNA
tagagcactaaagacataaagtaaaattgacgggtaaacgggtaagctgaggctagatcaccccagacacaaagtaaaattgacggttaaacgggtaagctgaggctagatcacccagac

SEQ ID NO: 106156 - DNA, 120 bp, synthetic construct
  source 1..120: mol_type = other DNA
ttgacgggtaaacgggtaagctgaggctagatcaccccagacattaagtaaaattgatggttaaacgggtaaactgaggctagatccctaaagacataaagtaaaattgacggttaaaca

SEQ ID NO: 106157 - DNA, 120 bp, synthetic construct; identical to SEQ ID NO: 106153
  source 1..120: mol_type = other DNA

SEQ ID NO: 106158 - DNA, 120 bp, synthetic construct; identical to SEQ ID NO: 24449
  source 1..120: mol_type = other DNA

SEQ ID NO: 106159 - DNA, 120 bp, synthetic construct; identical to SEQ ID NO: 24450
  source 1..120: mol_type = other DNA

SEQ ID NO: 106160 - DNA, 120 bp, synthetic construct; identical to SEQ ID NO: 24451
  source 1..120: mol_type = other DNA

SEQ ID NO: 106161 - DNA, 120 bp, synthetic construct; identical to SEQ ID NO: 24452
  source 1..120: mol_type = other DNA

SEQ ID NO: 106162 - DNA, 120 bp, synthetic construct; identical to SEQ ID NO: 24453
  source 1..120: mol_type = other DNA

SEQ ID NO: 106163 - DNA, 120 bp, synthetic construct
  source 1..120: mol_type = other DNA
ttagtaaaaatggggtttcaccatgttagccaggctggtctcaatctcctgacctggtgatgtgcccaccttggcctcccaaagtgctgggattacaggcgtgagccactgtgcccggcc

SEQ ID NO: 106164 - DNA, 120 bp, synthetic construct
  source 1..120: mol_type = other DNA
atgggaatgcaaccaggcgcggtggctcatgcctgtaatcccagcactttgggaggccaaggtgggtgtggatcacctgaggtcaggagttcaagaccaggctggccaacatggtgaaac

SEQ ID NO: 106165 - DNA, 120 bp, synthetic construct
  source 1..120: mol_type = other DNA
aaaacatctaactggaggtagattgtagcaagcctgacaagtgttgcagagaaccagcagtggtagtgtggattcctgattatggcactatctggaccctctcaatattggtatacttgg

SEQ ID NO: 106166 - DNA, 120 bp, synthetic construct
  source 1..120: mol_type = other DNA
catatccatcagtgcggctttcaataccacttgaaacatgcatatcatcctagagacgatcggttttccagtgcttcttatctgatacacattactgcaaagccattataaattactgag

SEQ ID NO: 106167 - DNA, 120 bp, synthetic construct
  source 1..120: mol_type = other DNA
aatcaacagtaaggcttttaaattctacagtgagggcactgaagttcaagtgatatcactgctttcttaaaatagttttgtatagtcttgcaagagcacaaaaacttaagtcattaaaaa

SEQ ID NO: 106168 - DNA, 120 bp, synthetic construct; identical to SEQ ID NO: 1002
  source 1..120: mol_type = other DNA

SEQ ID NO: 106169 - DNA, 120 bp, synthetic construct
  source 1..120: mol_type = other DNA
tgacagagtgagactctgtctcaaaaaacaaaaaaaaaaagggggtcatgagttcacatcctttgaagggacatggatgaagctggaaaccatcattctcagcaaactaacacaggaata

SEQ ID NO: 106170 - DNA, 120 bp, synthetic construct
  source 1..120: mol_type = other DNA
gaagcacgaacaaaaccagatggtggattcttagggattttctttactaaatgagttacccattttttttgttcatcctgagaacatgctaacagcagcatatctcttgctgatgttaca

SEQ ID NO: 106171 - DNA, 120 bp, synthetic construct
  source 1..120: mol_type = other DNA
tgagataggagaatcacttgaacctgggaggcagaggctgcagtgagctgagatcacgccactgcactccagcctgggcgagacagagtgagaatccatctcaatcaatcagtcaatcaa

SEQ ID NO: 106172 - DNA, 120 bp, synthetic construct
  source 1..120: mol_type = other DNA
gccactctggaaaaagaatatggcaatttcttagaaaactaaacatatgcttaccatataacccagcaaattgcactgttgggcctttaatttcaagaaacaaaaattcatataacattt

SEQ ID NO: 106173 - DNA, 120 bp, synthetic construct
  source 1..120: mol_type = other DNA
cccacaaccctataaaactgttaagtgcaaagcaagattaaatgattcaaggtcaacatataaaaacaaatactgttggaacaaccagatacctatgtggggggaaaaaagccaacctga

SEQ ID NO: 106174 - DNA, 120 bp, synthetic construct
  source 1..120: mol_type = other DNA
gctgcagtgcagtggcgcaatcttggctcaccgcaacctcagcctcctgggttcaagcgattctcctgcctcagcctcccgagtagctgggattacaggcacctgccaccacgcccagct

SEQ ID NO: 106175 - DNA, 120 bp, synthetic construct; identical to SEQ ID NO: 1003
  source 1..120: mol_type = other DNA

SEQ ID NO: 106176 - DNA, 120 bp, synthetic construct
  source 1..120: mol_type = other DNA
tatataatatatataatacatataatatatatattttttttttgagacagagtttcgctcttgtggcccaggctggagtgcagtggcgcaatctaggctcactgcaacctctgcctccca

SEQ ID NO: 106177 - DNA, 120 bp, synthetic construct
  source 1..120: mol_type = other DNA
gaacaaaataccagttagaaaataattaggtatatggtacctgtttcttccagccatatcgtttgatatttcctctatttggtactgaaagccaaccttcaattcttgactctaggagaa

SEQ ID NO: 106178 - DNA, 120 bp, synthetic construct; identical to SEQ ID NO: 20358
  source 1..120: mol_type = other DNA

SEQ ID NO: 106179 - DNA, 120 bp, synthetic construct
  source 1..120: mol_type = other DNA
atgagcgaagatcacgccactgaactccagcctgggtgacagagggagactccgtctcaagggaaaaaaaaaaattatcatggtatagaatttaccatagaagttttagtttcactgtac

SEQ ID NO: 106180 - DNA, 120 bp, synthetic construct
  source 1..120: mol_type = other DNA
agactgcagtgagccaagattgtgccactgcactccagcctcagtgacaaagcaagaccctgtctcaaaaaggaacaaaaagaaacaaaaaacccaaagaaagaagcaatgaaaggaaaa

SEQ ID NO: 106181 - DNA, 120 bp, synthetic construct; identical to SEQ ID NO: 4533
  source 1..120: mol_type = other DNA

SEQ ID NO: 106182 - DNA, 120 bp, synthetic construct; identical to SEQ ID NO: 20360
  source 1..120: mol_type = other DNA

SEQ ID NO: 106183 - DNA, 120 bp, synthetic construct; identical to SEQ ID NO: 20361
  source 1..120: mol_type = other DNA

SEQ ID NO: 106184 - DNA, 120 bp, synthetic construct; identical to SEQ ID NO: 24622
  source 1..120: mol_type = other DNA

SEQ ID NO: 106185 - DNA, 120 bp, synthetic construct; identical to SEQ ID NO: 24646
  source 1..120: mol_type = other DNA

SEQ ID NO: 106186 - DNA, 120 bp, synthetic construct
  source 1..120: mol_type = other DNA
gtagtttaaccacaatgaaaaaggagggcatgacctaagagccccctccattctatccagacatgaaaagcactgctcagatggttgtatgtgacttacttaaaacctgtagcattttag

SEQ ID NO: 106187 - DNA, 120 bp, synthetic construct; identical to SEQ ID NO: 24623
  source 1..120: mol_type = other DNA

SEQ ID NO: 106188 - DNA, 120 bp, synthetic construct; identical to SEQ ID NO: 24624
  source 1..120: mol_type = other DNA

SEQ ID NO: 106189 - DNA, 120 bp, synthetic construct; identical to SEQ ID NO: 24625
  source 1..120: mol_type = other DNA

SEQ ID NO: 106190 - DNA, 120 bp, synthetic construct; identical to SEQ ID NO: 24626
  source 1..120: mol_type = other DNA

SEQ ID NO: 106191 - DNA, 120 bp, synthetic construct; identical to SEQ ID NO: 24642
  source 1..120: mol_type = other DNA

SEQ ID NO: 106192 - DNA, 120 bp, synthetic construct; identical to SEQ ID NO: 24643
  source 1..120: mol_type = other DNA

SEQ ID NO: 106193 - DNA, 120 bp, synthetic construct; identical to SEQ ID NO: 24644
  source 1..120: mol_type = other DNA

SEQ ID NO: 106194 - DNA, 120 bp, synthetic construct; identical to SEQ ID NO: 24645
  source 1..120: mol_type = other DNA

SEQ ID NO: 106195 - DNA, 120 bp, synthetic construct
  source 1..120: mol_type = other DNA
tgttgtaacacatgcctaccagaggacaaataagtatatgtcctgccgatgcctggtaagaggtttcttcattgacaacacatatgtagggaaattcttacttgcaatggattaaaaacg

SEQ ID NO: 106196 - DNA, 120 bp, synthetic construct; identical to SEQ ID NO: 24646
  source 1..120: mol_type = other DNA

SEQ ID NO: 106197 - DNA, 120 bp, synthetic construct
  source 1..120: mol_type = other DNA
caattctgtttattacatagttttcgataagattgtaccccttttaaacagtgtctattgatatatattctaggtgtctggaagtctttttctacagtcggctcttggttgtctctggga

SEQ ID NO: 106198 - DNA, 120 bp, synthetic construct; identical to SEQ ID NO: 26291
  source 1..120: mol_type = other DNA

SEQ ID NO: 106199 - DNA, 120 bp, synthetic construct; identical to SEQ ID NO: 26292
  source 1..120: mol_type = other DNA

SEQ ID NO: 106200 - DNA, 120 bp, synthetic construct; identical to SEQ ID NO: 7675
  source 1..120: mol_type = other DNA

SEQ ID NO: 106201 - DNA, 120 bp, synthetic construct
  source 1..120: mol_type = other DNA
ggtatatacccagtaatgggatggctgggccaaatggtatttccagttctagatccctgaggaatcgccacactgacttccacaatggttgaactagtttacagtcccaccaacagtgta

SEQ ID NO: 106202 - DNA, 120 bp, synthetic construct
  source 1..120: mol_type = other DNA
tatttctgagggctctgttctgttccattgatctatatctctgttttggtaccagtaccatgctgttactgtagccttgtagtatagtttgaagtcaggtagtgtgatgcctccagcttt

SEQ ID NO: 106203 - DNA, 120 bp, synthetic construct
  source 1..120: mol_type = other DNA
tcatggtggataagctttttgatgtgctgctggatttgttttgccagtattttattgaggatttttgcatcaatgttcatcaaggatattggtctaaaattctctttttttgttgtgtct

SEQ ID NO: 106204 - DNA, 120 bp, synthetic construct; identical to SEQ ID NO: 32744
  source 1..120: mol_type = other DNA

SEQ ID NO: 106205 - DNA, 120 bp, synthetic construct; identical to SEQ ID NO: 32745
  source 1..120: mol_type = other DNA

SEQ ID NO: 106206 - DNA, 120 bp, synthetic construct; identical to SEQ ID NO: 32746
  source 1..120: mol_type = other DNA

SEQ ID NO: 106207 - DNA, 120 bp, synthetic construct; identical to SEQ ID NO: 32747
  source 1..120: mol_type = other DNA

SEQ ID NO: 106208 - DNA, 120 bp, synthetic construct
  source 1..120: mol_type = other DNA
tagcactaaccaatattaccaatatgaggttgtttctaagtcaaagcattcagagaaacacaaaccttgacttcactggtacatccttggatttgaaaaaggggaggggaagggaaggga

SEQ ID NO: 106209 - DNA, 120 bp, synthetic construct
  source 1..120: mol_type = other DNA
taaagaacaccaattgctcccaatagaactctaactacagtatgtgtttacaagagcaaattactgtttatacacggacaggattgtgaatgaggcaaagaacattacaaattatatgtt

SEQ ID NO: 106210 - DNA, 120 bp, synthetic construct; identical to SEQ ID NO: 15364
  source 1..120: mol_type = other DNA

SEQ ID NO: 106211 - DNA, 120 bp, synthetic construct; identical to SEQ ID NO: 15357
  source 1..120: mol_type = other DNA

SEQ ID NO: 106212 - DNA, 120 bp, synthetic construct
  source 1..120: mol_type = other DNA
cctgcacgttgtgcacatgtaccctaaaacttaaagtataataaaaaaaataaaataaaataaaataaagtgtagtgttgaagtctccagctatcttcttgcatttggaagctctgttat

SEQ ID NO: 106213 - DNA, 120 bp, synthetic construct
  source 1..120: mol_type = other DNA
catgttctaactttcaatagatttcttcttcaatccagatgtgatttagaggcatatttcttaatttccaaacacatgggggctttttttcgggggagggggcagggtcttgctctgtca

SEQ ID NO: 106214 - DNA, 120 bp, synthetic construct; identical to SEQ ID NO: 15354
  source 1..120: mol_type = other DNA

SEQ ID NO: 106215 - DNA, 120 bp, synthetic construct; identical to SEQ ID NO: 15355
  source 1..120: mol_type = other DNA

SEQ ID NO: 106216 - DNA, 120 bp, synthetic construct; identical to SEQ ID NO: 3885
  source 1..120: mol_type = other DNA

SEQ ID NO: 106217 - DNA, 120 bp, synthetic construct; identical to SEQ ID NO: 15358
  source 1..120: mol_type = other DNA

SEQ ID NO: 106218 - DNA, 120 bp, synthetic construct; identical to SEQ ID NO: 15359
  source 1..120: mol_type = other DNA

SEQ ID NO: 106219 - DNA, 120 bp, synthetic construct
  source 1..120: mol_type = other DNA
ggatgtgaggagcgcctctgcccggccccgaccccgtctgggaggtgaggagcgtctctgccccgccgccctctctgagaagtgaggagcccctccgtccggcagccgccccttccggga

SEQ ID NO: 106220 - DNA, 120 bp, synthetic construct; identical to SEQ ID NO: 15360
  source 1..120: mol_type = other DNA

SEQ ID NO: 106221 - DNA, 120 bp, synthetic construct; identical to SEQ ID NO: 15361
  source 1..120: mol_type = other DNA

SEQ ID NO: 106222 - DNA, 120 bp, synthetic construct
  source 1..120: mol_type = other DNA
cgtattcaggaaacccacctcatgtgcagagacacacataggctcaaaataaaaggatggaggaagatctaccaagcaaatggaaaacaaaaaaaggcaggggttgcaatcctagtctct

SEQ ID NO: 106223 - DNA, 120 bp, synthetic construct
  source 1..120: mol_type = other DNA
aatacaaactaccatcagagaatactacaaacacctctacgcaaataaactagaaaatctagaagaaatggataaattcctcgacacataaactccccaaagactaaaccaggaagaagt

SEQ ID NO: 106224 - DNA, 120 bp, synthetic construct
  source 1..120: mol_type = other DNA
gagagccaaatcatgagtgaactcccattcataattgctacaaagaggataaaatacctaggaatccaacttacaagggatgtgaaggacctcttcaaggagaactacaaaccactgctc

SEQ ID NO: 106225 - DNA, 120 bp, synthetic construct
  source 1..120: mol_type = other DNA
tctcaaaagaagacatttatgcagccaaaaaacacatgaaaaaatgctcatcatcactggccatcagagaaaagcaaatcaaaaccactatgagataccatctcacaccagttagaatgg

SEQ ID NO: 106226 - DNA, 120 bp, synthetic construct; identical to SEQ ID NO: 15362
  source 1..120: mol_type = other DNA

SEQ ID NO: 106227 - DNA, 120 bp, synthetic construct; identical to SEQ ID NO: 15363
  source 1..120: mol_type = other DNA

SEQ ID NO: 106228 - DNA, 120 bp, synthetic construct; identical to SEQ ID NO: 6361
  source 1..120: mol_type = other DNA

SEQ ID NO: 106229 - DNA, 120 bp, synthetic construct
  source 1..120: mol_type = other DNA
gaaggaaaaaaaaaagaaagaaagaacaaatgaatgaagcccccaagggctttcaaattccatctcctggggggagggggaagggatagcattaggagatatacctaatgtaaatgacga

SEQ ID NO: 106230 - DNA, 120 bp, synthetic construct; identical to SEQ ID NO: 29029
  source 1..120: mol_type = other DNA

SEQ ID NO: 106231 - DNA, 120 bp, synthetic construct; identical to SEQ ID NO: 29030
  source 1..120: mol_type = other DNA

SEQ ID NO: 106232 - DNA, 120 bp, synthetic construct; identical to SEQ ID NO: 17323
  source 1..120: mol_type = other DNA

SEQ ID NO: 106233 - DNA, 120 bp, synthetic construct; identical to SEQ ID NO: 17324
  source 1..120: mol_type = other DNA

SEQ ID NO: 106234 - DNA, 120 bp, synthetic construct; identical to SEQ ID NO: 7799
  source 1..120: mol_type = other DNA

SEQ ID NO: 106235 - DNA, 120 bp, synthetic construct
  source 1..120: mol_type = other DNA
cgtacaagtgttcctatttctccacatcctctccagcacctgttgtttcctgactttttaatgatcgccattctaactggtgtgagatggtatctcattgtggttttgatttgcatttct

SEQ ID NO: 106236 - DNA, 120 bp, synthetic construct
  source 1..120: mol_type = other DNA
ctttatggggatggcattgaatctataaattaccttgggcagtatggccattttcacgacattgattcttcctacccatgagcatggaatgttcttccatttgtttgtatcctcttttat

SEQ ID NO: 106237 - DNA, 120 bp, synthetic construct
  source 1..120: mol_type = other DNA
tagatgatagtccctggtttgagaaaaagtttggtttgacatttagtaattaagccttattgcatgatacttccttgactcagcaaagccacatataatataaatcaagtgtagaggact

SEQ ID NO: 106238 - DNA, 120 bp, synthetic construct
  source 1..120: mol_type = other DNA
tttagtgtgaaatggctccacaattctttatctcatttctcttagttttccatattttaatcccatagagtgtaatctatctccctgtcccagctgagaagcagttaactaacactgctg

SEQ ID NO: 106239 - DNA, 120 bp, synthetic construct
  source 1..120: mol_type = other DNA
cttgcctgtgtcagcctaggagagaagataacagaaacctcagtgagcaggaaagaattcaaacagccagaaatgcagagttcttaagtcttggctcctaagttcttttttaggtcaaca

SEQ ID NO: 106240 - DNA, 120 bp, synthetic construct
  source 1..120: mol_type = other DNA
agggttttcagcacaggagtgagatgctatgatttatttttagggtagccttgttagtagggaggatccaagagtggaatcagggaaaccagtttgtcttgtagtagtctagttgaaaga

SEQ ID NO: 106241 - DNA, 120 bp, synthetic construct
  source 1..120: mol_type = other DNA
cagaaagatttgtggtcatgcatctaaaatggaaccaattaacatgattgtgtgttgtctgcacttagttcagcctcagaggtataagcatggagggggtggagagctgaatttaactag

SEQ ID NO: 106242 - DNA, 120 bp, synthetic construct
  source 1..120: mol_type = other DNA
atggagtcttgttctgttttgtttgtttgtttgttgagatggggtcttgttcttttcctcaggctggactgcaatggcatgtagctcactgtaactttgaactcctggactcaagcaatc

SEQ ID NO: 106243 - DNA, 120 bp, synthetic construct
  source 1..120: mol_type = other DNA
ccctacattatcatctgactagctattaacaaatcaatttatccctcctgagagtactactcctgtgctgacatgcatggctattcctgattcggcttctttctctctgatacactaggt

SEQ ID NO: 106244 - DNA, 120 bp, synthetic construct
  source 1..120: mol_type = other DNA
tcagttcagtgaattataccatcattcactcaactgctcaggatggaaatcttgaagtcatcctgaactccttcctctcccttacccctcacatgtaattagataccaactgctgttgat

SEQ ID NO: 106245 - DNA, 120 bp, synthetic construct
  source 1..120: mol_type = other DNA
actggtttccctacaagagtactttttgatgcttcatctctccagaacttcaaattatttaaactatttatattattgataaagtatcataggaatcagtggatctgcactattcaccga

SEQ ID NO: 106246 - DNA, 120 bp, synthetic construct
  source 1..120: mol_type = other DNA
ttacatttttgactctcacataactcttgctgttttagatgtgattcagattgagtgcagcagctctgtaaaaaccccgtaatttccaggaacaatgggaggtgtcccatttgtccagtg

SEQ ID NO: 106247 - DNA, 120 bp, synthetic construct
  source 1..120: mol_type = other DNA
ctccatcatttgcacttcttagtgaaatttcatgtgaagctgcaaaatcacccaggaaaatccaaatagcagcagatttggaaacgtgcactcaaatagggttgtggcaagtggagtgta

SEQ ID NO: 106248 - DNA, 120 bp, synthetic construct
  source 1..120: mol_type = other DNA
taatattctagaagagaacttggacacttgctttctatattttcaagtcgtcatcctttgatatgatgcccttgggcattaggccccttatagggtagggatgagggcagtacttctgaa

SEQ ID NO: 106249 - DNA, 120 bp, synthetic construct
  source 1..120: mol_type = other DNA
atgtaacacaaatctctgtttgcagaaggataaattggggttccagagagatcaagtgtcttgtttaaggataaagagctagataaatcagcactagatttccacctgggacctacttgg

SEQ ID NO: 106250 - DNA, 120 bp, synthetic construct
  source 1..120: mol_type = other DNA
ggaagttatggattccctaggtggagtaatactttcatatttatattttaaaaaattgctactgctgccttaaataaattgtatttaagggaatcaggctggaggcaaaggcactggtta

SEQ ID NO: 106251 - DNA, 120 bp, synthetic construct
  source 1..120: mol_type = other DNA
tgagaaatgctgcaagtctagtccaaggagattattctccagttttcatgaacaccttctacctccatgcttttgatcgctttaccccctccatctagcatatcctttctctaaattcac

SEQ ID NO: 106252 - DNA, 120 bp, synthetic construct
  source 1..120: mol_type = other DNA
aattctaaattcctgaacatcacctagcactgtgtcccacctgcttaattgtctccaaggtctctggattaatctttgtaataaagttggtctctgtgcaagcgtagtaatcttccccca

SEQ ID NO: 106253 - DNA, 120 bp, synthetic construct
  source 1..120: mol_type = other DNA
attaagtattcttgaattccatctcttgcctagacaggtctgctaaaccatatcttagagtagacagcatactttgcccaggatttctgatatggagagccagttaaaatctgattttgt

SEQ ID NO: 106254 - DNA, 120 bp, synthetic construct
  source 1..120: mol_type = other DNA
tctcccattttactaattataaaaccaagaattggaggtcaacatcttgccaaggttaccctcctaggcaagtcatgtctgttgaatacagggtttaaagccactcatgttggaccccaa

SEQ ID NO: 106255 - DNA, 120 bp, synthetic construct
  source 1..120: mol_type = other DNA
tggtttaggatcagctcacatgtcatctctggacctcagtgttctcatctgcaaaatgtggggtacccaagatagtccttaaggcctctcagctttcacagttaggtttgtccctaaaaa

SEQ ID NO: 106256 - DNA, 120 bp, synthetic construct
  source 1..120: mol_type = other DNA
aacagacatttataggacatttactatgtgccaggcactgagctaggcactgacagtttgaagatgacaaaggtgtaatcctgatccttagggaattccaattaggtagcgtttttctgc

SEQ ID NO: 106257 - DNA, 120 bp, synthetic construct
  source 1..120: mol_type = other DNA
gtactttttcatcatagtcagaccaggagattcaggttctatatttttgtttactttctacatcctctgttcagtttcatgttgtaacttcaaagagtggaatctctgaccagactcaat

SEQ ID NO: 106258 - DNA, 120 bp, synthetic construct
  source 1..120: mol_type = other DNA
tcgcagagggggatttggcagggtcatagggcaatagtggagggaaggtcagcagataaacaagtgaacaaaggtctctggttttcctaggcagaggaccctgcggccttccgcagtgtt

SEQ ID NO: 106259 - DNA, 120 bp, synthetic construct
  source 1..120: mol_type = other DNA
gggcggcagggcagaggcgctccccacatctcagacgatgggcggccgggcagagacactcctcacttcctagacgggatggcggccgggaagaggcgctcctcacttcccagactgggc

SEQ ID NO: 106260 - DNA, 120 bp, synthetic construct; identical to SEQ ID NO: 33748
  source 1..120: mol_type = other DNA

SEQ ID NO: 106261 - DNA, 120 bp, synthetic construct; identical to SEQ ID NO: 33749
  source 1..120: mol_type = other DNA

SEQ ID NO: 106262 - DNA, 120 bp, synthetic construct
  source 1..120: mol_type = other DNA
gcctgggtgagagagcgagactctgtctcaaaaaaaaaaaagaaagaaaagaaagaaaaaagatgactcaataaaaaatgagcaagctgcttgaacaggaacatcactgacagaaaattc

SEQ ID NO: 106263 - DNA, 120 bp, synthetic construct
  source 1..120: mol_type = other DNA
ccggccgcccatcgtctgagatgtggggagcgcctttgccctgccgccccgtctgggatgtgaggagtgcctctgcccggccgcaaccctgtctgggaggtgaggagcatctctgcccag

SEQ ID NO: 106264 - DNA, 120 bp, synthetic construct
  source 1..120: mol_type = other DNA
aggacccctctgcccagccaccaccccgtctgggaggtgtgcccaacagctcattgagaatgggccatgatgacaatggtggttttgtggaatagaaagcggggaaaggtggggaaaaga

SEQ ID NO: 106265 - DNA, 120 bp, synthetic construct; identical to SEQ ID NO: 17222
  source 1..120: mol_type = other DNA

SEQ ID NO: 106266 - DNA, 120 bp, synthetic construct; identical to SEQ ID NO: 17223
  source 1..120: mol_type = other DNA

SEQ ID NO: 106267 - DNA, 120 bp, synthetic construct; identical to SEQ ID NO: 17224
  source 1..120: mol_type = other DNA

SEQ ID NO: 106268 - DNA, 120 bp, synthetic construct; identical to SEQ ID NO: 17225
  source 1..120: mol_type = other DNA

SEQ ID NO: 106269 - DNA, 120 bp, synthetic construct; identical to SEQ ID NO: 17226
  source 1..120: mol_type = other DNA

SEQ ID NO: 106270 - DNA, 120 bp, synthetic construct
  source 1..120: mol_type = other DNA
aggatcatttgagccaggagtttgagaccagcctgggcaacatagcagaccctgtctctacaaaaaataaaaaattttccaggcgaggtggtgcatgactgtggtcctagctcctaggga

SEQ ID NO: 106271 - DNA, 120 bp, synthetic construct; identical to SEQ ID NO: 17227
  source 1..120: mol_type = other DNA

SEQ ID NO: 106272 - DNA, 120 bp, synthetic construct; identical to SEQ ID NO: 17228
  source 1..120: mol_type = other DNA

SEQ ID NO: 106273 - DNA, 120 bp, synthetic construct; identical to SEQ ID NO: 17229
  source 1..120: mol_type = other DNA

SEQ ID NO: 106274 - DNA, 120 bp, synthetic construct; identical to SEQ ID NO: 17230
  source 1..120: mol_type = other DNA

SEQ ID NO: 106275 - DNA, 120 bp, synthetic construct
  source 1..120: mol_type = other DNA
cctgtagtctctgtgctccacctccactgacctgtagtctctgtgccccacctccactgacctgtagtctctgtgctccacctccagtgacctgtagtccctgtgactccacctccactg

SEQ ID NO: 106276 - DNA, 120 bp, synthetic construct; identical to SEQ ID NO: 17231
  source 1..120: mol_type = other DNA

SEQ ID NO: 106277 - DNA, 120 bp, synthetic construct; identical to SEQ ID NO: 17232
  source 1..120: mol_type = other DNA

SEQ ID NO: 106278 - DNA, 120 bp, synthetic construct; identical to SEQ ID NO: 17233
  source 1..120: mol_type = other DNA

SEQ ID NO: 106279 - DNA, 120 bp, synthetic construct; identical to SEQ ID NO: 17234
  source 1..120: mol_type = other DNA

SEQ ID NO: 106280 - DNA, 120 bp, synthetic construct; identical to SEQ ID NO: 17235
  source 1..120: mol_type = other DNA

SEQ ID NO: 106281 - DNA, 120 bp, synthetic construct; identical to SEQ ID NO: 17203
  source 1..120: mol_type = other DNA

SEQ ID NO: 106282 - DNA, 120 bp, synthetic construct; identical to SEQ ID NO: 17204
  source 1..120: mol_type = other DNA

SEQ ID NO: 106283 - DNA, 120 bp, synthetic construct; identical to SEQ ID NO: 17205
  source 1..120: mol_type = other DNA

SEQ ID NO: 106284 - DNA, 120 bp, synthetic construct; identical to SEQ ID NO: 17214
  source 1..120: mol_type = other DNA

SEQ ID NO: 106285 - DNA, 120 bp, synthetic construct
  source 1..120: mol_type = other DNA
cctaggaacgtgactaccctacgtacttcctatgaggggagccgcacggcgtctgtccttttccgtccctaggaatgtgactaccctacgtacttcctatgaggggagctgcacggcgtc

SEQ ID NO: 106286 - DNA, 120 bp, synthetic construct
  source 1..120: mol_type = other DNA
gtccttttccatccctaggaacgtgactaccctacgtacttcctatgaggggagctgcacggcgtctgtcctgttccatccctaggaatgtgactacccaacgtacttcctatgagggga

SEQ ID NO: 106287 - DNA, 120 bp, synthetic construct
  source 1..120: mol_type = other DNA
acggcgtctgtcctgttccgtccctaggaatgtgactaccctacgtacttcctatgaggggagccgcacggcgtctgtccttttccatccctaggaatatgactaccctacgtacttcct

SEQ ID NO: 106288 - DNA, 120 bp, synthetic construct
  source 1..120: mol_type = other DNA
gtctgtccttttccgtccctaggaatgtgactaccctacgtacttcctatgaggggagctgcacggcgtctgtccttttccatccctaggaatatgactaccctacgtacttcctatgag

SEQ ID NO: 106289 - DNA, 120 bp, synthetic construct; identical to SEQ ID NO: 17199
  source 1..120: mol_type = other DNA

SEQ ID NO: 106290 - DNA, 120 bp, synthetic construct; identical to SEQ ID NO: 17200
  source 1..120: mol_type = other DNA

SEQ ID NO: 106291 - DNA, 120 bp, synthetic construct; identical to SEQ ID NO: 17201
  source 1..120: mol_type = other DNA

SEQ ID NO: 106292 - DNA, 120 bp, synthetic construct; identical to SEQ ID NO: 17202
  source 1..120: mol_type = other DNA

SEQ ID NO: 106293 - DNA, 120 bp, synthetic construct; identical to SEQ ID NO: 17206
  source 1..120: mol_type = other DNA

SEQ ID NO: 106294 - DNA, 120 bp, synthetic construct; identical to SEQ ID NO: 17207
  source 1..120: mol_type = other DNA

SEQ ID NO: 106295 - DNA, 120 bp, synthetic construct; identical to SEQ ID NO: 17208
  source 1..120: mol_type = other DNA

SEQ ID NO: 106296 - DNA, 120 bp, synthetic construct
  source 1..120: mol_type = other DNA
caatatggcgaaaccccgtctctactaaaaatacaaaaattagccaggtttggtggtatatgcctgtaatcccagctattcaggaggctaagacttgagaattgcttgaatccaaaaggc

SEQ ID NO: 106297 - DNA, 120 bp, synthetic construct
  source 1..120: mol_type = other DNA
ttcctctattgactaccttcctctattgactaccttcctctattgaataccttcctctattgaataccttcctctattgaataccttcctctattgaataccatcctctattgattaccc

SEQ ID NO: 106298 - DNA, 120 bp, synthetic construct
  source 1..120: mol_type = other DNA
gatcaccttcctctattgatcacctttctctattgattacccctctattgattacccttcctctattgattatcttcctctattgattacccttcctctattgattcccttcctctattg

SEQ ID NO: 106299 - DNA, 120 bp, synthetic construct; identical to SEQ ID NO: 17212
  source 1..120: mol_type = other DNA

SEQ ID NO: 106300 - DNA, 120 bp, synthetic construct; identical to SEQ ID NO: 17213
  source 1..120: mol_type = other DNA

SEQ ID NO: 106301 - DNA, 120 bp, synthetic construct
  source 1..120: mol_type = other DNA
ctgttgggggaatgtaaactagttcaaccattgtggaggacagtgtggtgattcctcagggatctagaactagaaataccatttgacccagccatcccattactgggtatatacccaaag

SEQ ID NO: 106302 - DNA, 120 bp, synthetic construct; identical to SEQ ID NO: 17215
  source 1..120: mol_type = other DNA

SEQ ID NO: 106303 - DNA, 120 bp, synthetic construct; identical to SEQ ID NO: 17216
  source 1..120: mol_type = other DNA

SEQ ID NO: 106304 - DNA, 120 bp, synthetic construct; identical to SEQ ID NO: 17217
  source 1..120: mol_type = other DNA

SEQ ID NO: 106305 - DNA, 120 bp, synthetic construct; identical to SEQ ID NO: 17218
  source 1..120: mol_type = other DNA

SEQ ID NO: 106306 - DNA, 120 bp, synthetic construct; identical to SEQ ID NO: 17219
  source 1..120: mol_type = other DNA

SEQ ID NO: 106307 - DNA, 120 bp, synthetic construct; identical to SEQ ID NO: 17220
  source 1..120: mol_type = other DNA

SEQ ID NO: 106308 - DNA, 120 bp, synthetic construct; identical to SEQ ID NO: 17221
  source 1..120: mol_type = other DNA

SEQ ID NO: 106309 - DNA, 120 bp, synthetic construct; identical to SEQ ID NO: 20764
  source 1..120: mol_type = other DNA

SEQ ID NO: 106310 - DNA, 120 bp, synthetic construct; identical to SEQ ID NO: 20765
  source 1..120: mol_type = other DNA

SEQ ID NO: 106311 - DNA, 120 bp, synthetic construct
  source 1..120: mol_type = other DNA
tccttgatgaacattgatgcaaaaatcctcaataaaatactggcaaaccgaatccagttgcacatcaaaaagcttatccaccatgatcaagtgggcttcatccctgggatgcaaggctgg

SEQ ID NO: 106312 - DNA, 120 bp, synthetic construct
  source 1..120: mol_type = other DNA
gcccgcattgccaagtcaatcctaagccaaaagaacaaagctggaggcatcacactacctgacttcaaactatactacaaggctacagtaaccaaaacagcatggtactggtaccaaaac

SEQ ID NO: 106313 - DNA, 120 bp, synthetic construct
  source 1..120: mol_type = other DNA
cccaaatgagtataaatcatgctgctataaagacacatgcacacgtatgtttattgcggcactattcacaatagcaaagacttggaaccaacccaaatgtccaacaatgatagactggat

SEQ ID NO: 106314 - DNA, 120 bp, synthetic construct; identical to SEQ ID NO: 7008
  source 1..120: mol_type = other DNA

SEQ ID NO: 106315 - DNA, 120 bp, synthetic construct; identical to SEQ ID NO: 7009
  source 1..120: mol_type = other DNA

SEQ ID NO: 106316 - DNA, 120 bp, synthetic construct; identical to SEQ ID NO: 27201
  source 1..120: mol_type = other DNA

SEQ ID NO: 106317 - DNA, 120 bp, synthetic construct; identical to SEQ ID NO: 34952
  source 1..120: mol_type = other DNA

SEQ ID NO: 106318 - DNA, 120 bp, synthetic construct
  source 1..120: mol_type = other DNA
tttttttttttttcttttttttttttttttttttttgagactctatcgcccgggctggagtgccatggtgcgatcttggctcactgcaacctccacctcccagtttcaagtgattctcct

SEQ ID NO: 106319 - DNA, 120 bp, synthetic construct
  source 1..120: mol_type = other DNA
ggtatgtagggggcaggtatggacagggcaggtatgtatggggtgggtatgtatggggtgggtatgtatggggcgggtatgtatggggcaggtatttacagagcacctcctgcataccag

SEQ ID NO: 106320 - DNA, 120 bp, synthetic construct; identical to SEQ ID NO: 27767
  source 1..120: mol_type = other DNA

SEQ ID NO: 106321 - DNA, 120 bp, synthetic construct; identical to SEQ ID NO: 27768
  source 1..120: mol_type = other DNA

SEQ ID NO: 106322 - DNA, 120 bp, synthetic construct; identical to SEQ ID NO: 27769
  source 1..120: mol_type = other DNA

SEQ ID NO: 106323 - DNA, 120 bp, synthetic construct
  source 1..120: mol_type = other DNA
ttttttaaaaaaaaaaaaaaagaaagttaaggacaaacggcaaactcacactgcctgacgcagggcctggtttctcttccttgaaggccttttacagatgtcagctttcactggcctcca

SEQ ID NO: 106324 - DNA, 120 bp, synthetic construct
  source 1..120: mol_type = other DNA
ataagggatcttgtccacagatgctgacatataattaacacttaagtagaagaataaatcgtttcagaaagtggtaggcgtgggccagacacggtggctcacatctgtaattccagtact

SEQ ID NO: 106325 - DNA, 120 bp, synthetic construct
  source 1..120: mol_type = other DNA
ccaaaaatccctttttcctccacaaggactggcaccacatgaaaagttatggccagatgcagtcttatcccacaagcatgcaggtaagcaagagagctgcccagtgtctgccctagacaa

SEQ ID NO: 106326 - DNA, 120 bp, synthetic construct
  source 1..120: mol_type = other DNA
aagcagacatttcacttcacagtccagtaaggcagacagatagatgtgaacaaggatgataatgtcagtgtgccctgcatatatattacagcagtcttgcccatttaatcagcaggaaac

SEQ ID NO: 106327 - DNA, 120 bp, synthetic construct
  source 1..120: mol_type = other DNA
atgattatgtaagagaatacccttgctctcaggctacacacatgctcaactattcaagggtaaaggggcacaacgtctgcaacttaacctccaatgattcagcagaaataattacacaca

SEQ ID NO: 106328 - DNA, 120 bp, synthetic construct
  source 1..120: mol_type = other DNA
ctacaataagtgcctggtactagtgcctaccctggggcatggagccaagagccctaaggaacaatgagagaatgagaaatggaggaaggaaggaagaaaagagcaagaggatgacctgag

SEQ ID NO: 106329 - DNA, 120 bp, synthetic construct
  source 1..120: mol_type = other DNA
gtgcagctcatctggggcacggctgatttcatagggactatcaatttcaatgttcctggaagaagatgggaataaaatatagcctccaaccaactacatcaataaaccagatttaggatc

SEQ ID NO: 106330 - DNA, 120 bp, synthetic construct
  source 1..120: mol_type = other DNA
acagagcaagtagacagcaaaaccaaaaacccacggaccatgtttacaacaaaaccaggcaacaaagtatctctactgaaccccacaacacagagacagggatgggggtcaaaacaccga

SEQ ID NO: 106331 - DNA, 120 bp, synthetic construct
  source 1..120: mol_type = other DNA
agctaaaggtattaataaaatcatgtaagtcatgcaagaacaatgtaaacaataattagaaaaattcaggccgggcgcggtggctcactcctgtaatcccagcactttggaaggctgagg

SEQ ID NO: 106332 - DNA, 120 bp, synthetic construct
  source 1..120: mol_type = other DNA
aggctgaggcaagagaatcgcttgaacctaggaggcagaggttgcagtgagtgaagatcaagccaagaaaaacagatgtaggtattaactgcagattaatagataaggcaaattgaatag

SEQ ID NO: 106333 - DNA, 120 bp, synthetic construct
  source 1..120: mol_type = other DNA
aattcacgaaattaaagaaaaggttagtttctcccttactattgaagactgacccaaattatagaggtactcatagcttgggaggttgtagccaacgatgtaatgggtcttccacccgcc

SEQ ID NO: 106334 - DNA, 120 bp, synthetic construct
  source 1..120: mol_type = other DNA
atagatcaaaatgacagctgtgtttgggtggcgcagtactatgaatatgcttttcctttttctattcaaattttcacttaaaaaatatggtttaggccgggcacggtggctcacgcctgt

SEQ ID NO: 106335 - DNA, 120 bp, synthetic construct
  source 1..120: mol_type = other DNA
cgccactatgctccagcctgggtggcagagtgagactctgtctcaaagaaaaaaaagaaaatggcttatctatatatatgggggggtattttttaagattctgttggtttctaacactgc

SEQ ID NO: 106336 - DNA, 120 bp, synthetic construct
  source 1..120: mol_type = other DNA
tcataaacctaagtggcaatacaaggtctgctaagttctgacttcacttttttttctttctttttgagacagagtcttgctctgtcacccaggctggagtacaatggtacaacctcagct

SEQ ID NO: 106337 - DNA, 120 bp, synthetic construct
  source 1..120: mol_type = other DNA
agctggtctcaagcaatctacccaccttgacctcccaaagtgctgggattacaagcataagccactgtgcccaaccagcaagagattttaaaatgttcatatccttcaatttgaaaaaca

SEQ ID NO: 106338 - DNA, 120 bp, synthetic construct
  source 1..120: mol_type = other DNA
caaatcttcctttttgccaaatggtctccataaacctttttttttttttttttgagacaaactctcaccctgtcgcccagattggagtgcaatgacgcgatcttggctcactgcaacttc

SEQ ID NO: 106339 - DNA, 120 bp, synthetic construct
  source 1..120: mol_type = other DNA
tagcttcaagtgatctgcccgcctcagcctcccaaagtgctgggattacaggcgtgagccagtgcgcctgcccctataacttgagatatatatatatatatatatatatatagatatata

SEQ ID NO: 106340 - DNA, 120 bp, synthetic construct
  source 1..120: mol_type = other DNA
ggagaattgcttgaacccaggaggcagaggttgcggttagctgagatcgccccactgcactccagtctgaatgacagatcaagactccttctcaaaaaaaataaaataaaataaagacaa

SEQ ID NO: 106341 - DNA, 120 bp, synthetic construct
  source 1..120: mol_type = other DNA
gtgtgtgggagtttatactagtctttgtactttggcatgtttgcgatttgccatagtaacaaaatctttgtaagccttaattgctccctctctcttcaagttccaaccaaggcccaacat

SEQ ID NO: 106342 - DNA, 120 bp, synthetic construct
  source 1..120: mol_type = other DNA
cacaacctccacctcttgggttcaagcgattctcctgcctcaacctcccgaatagctgggattacctattagaatgtttttaacttttgttccattgttgaacatttacactgttttaca

SEQ ID NO: 106343 - DNA, 120 bp, synthetic construct
  source 1..120: mol_type = other DNA
agcttgcagtgcgccgagatcgtgccactgcactccagccgggcgacagagcgagataccgtctcaagaaaaaaaaaaaaaaaaaaatgaatgaatgtaaagaatagtatttcaaggaat

SEQ ID NO: 106344 - DNA, 120 bp, synthetic construct
  source 1..120: mol_type = other DNA
actgtgacgttcactactcaaaatataagtagcggaatcttctcctcaggacagtcttaaccaattcttagtttcaagtcccaaatgtgcttctcatcccactctctgtcctgaattcta

SEQ ID NO: 106345 - DNA, 120 bp, synthetic construct
  source 1..120: mol_type = other DNA
gagccactctgaaagcccagttaactaaacacaccatgaaatgtcaaccctccgtatctttacagatatctctgcctgaaatgttccttccattccattagccttctttgtgattaattc

SEQ ID NO: 106346 - DNA, 120 bp, synthetic construct
  source 1..120: mol_type = other DNA
tggatcacctgaggtcaggaattcaaaaccagcctggccaacatagtgaaaccctctctctactaaaaatacaaaaaaattagctgggcgtggtggtgaacacctgtaatcccagctact

SEQ ID NO: 106347 - DNA, 120 bp, synthetic construct
  source 1..120: mol_type = other DNA
cagatcacctgaagtcagaagttcgagaccagcctggccaacatggggaaacccgtctctactaaaaacacaaaacttgtggggcacggtggctcacatttgtaatcccagcattttggg

SEQ ID NO: 106348 - DNA, 120 bp, synthetic construct
  source 1..120: mol_type = other DNA
catgttgcttattatcacatacattaattaaaacatcctcggtggggcgtaatggactcacgcctataatcctaggactctgggaggcaaagaactgcttgaggacaggagttcaagacc

SEQ ID NO: 106349 - DNA, 120 bp, synthetic construct
  source 1..120: mol_type = other DNA
gctgaggcaggagaattgcttgaacccgggaggcagaggttgcagccggctgagatggcgccatcacactccagcctgcataacaagagcaaaattccatctaaaaaaaaaaaagtggca

SEQ ID NO: 106350 - DNA, 120 bp, synthetic construct
  source 1..120: mol_type = other DNA
aaaaaaaaaaaaaaaaagtctcatgggtttttatttttgtagagacaagatctccctatgttgcccagactggtttcgaactcttgggctcaagcgatcctcccacagattacaggcacg

SEQ ID NO: 106351 - DNA, 120 bp, synthetic construct
  source 1..120: mol_type = other DNA
gcagactgcaagggagaagggtatacatatcccactgatctctctgccaacccaccctcaactgaaaaaaacaaaaattagactatcttttaggactgaagtagtgattcccagtaagat

SEQ ID NO: 106352 - DNA, 120 bp, synthetic construct
  source 1..120: mol_type = other DNA
cggatcatgaggtcaagagatcaagaccatcctggccaacatgcgtgaaaccctgtctctacaaaaaaaatacaacaattagctgggcgtggcagcacgcgcctgtagtcccagctactc

SEQ ID NO: 106353 - DNA, 120 bp, synthetic construct
  source 1..120: mol_type = other DNA
gcaggatagccgagctcctgctgtggtccacttatactgtaacaagctcattaaatcacaactggcttctataaagaacgggatttaacattcaagacattcaaagatggcaaggcaaat

SEQ ID NO: 106354 - DNA, 120 bp, synthetic construct
  source 1..120: mol_type = other DNA
tcgccttacggaagggaggtgcgttctaccggcccgaggtctcccgagcggtgccgagaacggcccaaacaggggcaagctccgaggctggtcggccgcggatcccagcagctgcccacg

SEQ ID NO: 106355 - DNA, 120 bp, synthetic construct
  source 1..120: mol_type = other DNA
attggggagtttattccatttatttttttattttgattctttttttatgtttaagatcaatcatttggcggggcgcggtggctcaagcctgtaatcccagcactttgggaggccgaggcg

SEQ ID NO: 106356 - DNA, 120 bp, synthetic construct
  source 1..120: mol_type = other DNA
atgtcagaaaggtgattttacagatatcattatttagctttttacaagattaagaacatgctgggcacagtggcttatgcctgtaattccagcactttgggaggctggggtgggaggatc

SEQ ID NO: 106357 - DNA, 120 bp, synthetic construct; identical to SEQ ID NO: 4327
  source 1..120: mol_type = other DNA

SEQ ID NO: 106358 - DNA, 120 bp, synthetic construct; identical to SEQ ID NO: 22491
  source 1..120: mol_type = other DNA

SEQ ID NO: 106359 - DNA, 120 bp, synthetic construct; identical to SEQ ID NO: 21690
  source 1..120: mol_type = other DNA

SEQ ID NO: 106360 - DNA, 120 bp, synthetic construct; identical to SEQ ID NO: 27126
  source 1..120: mol_type = other DNA

SEQ ID NO: 106361 - DNA, 120 bp, synthetic construct
  source 1..120: mol_type = other DNA
accagcctaggcaaaatagtgaggtcccatctccacaaaaaataaaaaattagctaggtgtggtggtacatgcctgtagtcccagctactggggagagtgaggcaggaggatcacttgaa

SEQ ID NO: 106362 - DNA, 120 bp, synthetic construct
  source 1..120: mol_type = other DNA
tttggtgactgtagccttgtagtatagtttgaagtcaggcagtgtgatgcctccagctttgttcttttggcttaggattgacttggcaatgcgggctcttttttggttccatatgaactt

SEQ ID NO: 106363 - DNA, 120 bp, synthetic construct
  source 1..120: mol_type = other DNA
gatgaagctggaaaccatcattctcagtaaactatagcaaggacaaaaaaccaaacaccgcatgttctcactcgtaggtgggaactgaacaatgagaacacatggacacaggaaggggaa

SEQ ID NO: 106364 - DNA, 120 bp, synthetic construct
  source 1..120: mol_type = other DNA
ttttttttttttttttagacggagtttcactcgtcacccaggctggagtgcaatggcgcaatctcagctcactgcaacctctgcctccaggcttcaagcggttctcttgcctcagcctcc

SEQ ID NO: 106365 - DNA, 120 bp, synthetic construct
  source 1..120: mol_type = other DNA
gacaaaacggactccgtctcaaaaaaactggagctggtaatagtacccatgatgcaggattgctcagattaaataatatatgtaacactcttagctccacgcctggcaagcactaacaac

SEQ ID NO: 106366 - DNA, 120 bp, synthetic construct
  source 1..120: mol_type = other DNA
cacgtttctcccactcctgaccacttcaaaggacataggatccccacaaaatggtgacaacaaatggagccattttcatatcctattttatttttgaagtcagtgtccagaaagaaaccg

SEQ ID NO: 106367 - DNA, 120 bp, synthetic construct
  source 1..120: mol_type = other DNA
ggccaacatggtgaaaccccacctctactaaaaatacaaaaatcagccagacatggtggcacacacctgtaatcccagctactcaggaggctgaggcacgagaactacttgaatctggga

SEQ ID NO: 106368 - DNA, 120 bp, synthetic construct
  source 1..120: mol_type = other DNA
agtgatcttccttcaacacacacctgaccatgtggtatccccatttacaactctatgacttttacccaatgtaccatgccatttgtatctgttttcacaaccccttcctatcaatcactc

SEQ ID NO: 106369 - DNA, 120 bp, synthetic construct
  source 1..120: mol_type = other DNA
aggtgtcctggaagccactagatttgggaatcatgatcttgtggcgaactaactcaatgcacacaacttccgctacaccccttatgaaagcagtccagtttagtggctacaagtttagat

SEQ ID NO: 106370 - DNA, 120 bp, synthetic construct
  source 1..120: mol_type = other DNA
gacataactacaaagcacacacagccaaagagaacagtgagaagacaaatcaactcccacctggtactgagcacatgtgcatatataaatacccgctttagttcttttccacagtgagaa

SEQ ID NO: 106371 - DNA, 120 bp, synthetic construct
  source 1..120: mol_type = other DNA
gcgtgtagtacttttctatgatgacccgggccgccttcttcacggttttggtgcgaacgcggccctgcgggtggagaggacaggatcactcacgagccagcgcaaccttctgggaagagt

SEQ ID NO: 106372 - DNA, 120 bp, synthetic construct; identical to SEQ ID NO: 28548
  source 1..120: mol_type = other DNA

SEQ ID NO: 106373 - DNA, 120 bp, synthetic construct; identical to SEQ ID NO: 28549
  source 1..120: mol_type = other DNA

SEQ ID NO: 106374 - DNA, 120 bp, synthetic construct
  source 1..120: mol_type = other DNA
catagttggaagtaaagctctcctcagcaaatgtaaaagaagagaaattataacaaactatctctcagaccacagtgcaatcaaactagaactcaggattaagaaactcactcaaaacct

SEQ ID NO: 106375 - DNA, 120 bp, synthetic construct
  source 1..120: mol_type = other DNA
aataaaatactggcaaaccgaatccagcagcatatcaaaaagcttatccaccatgatcaagtgggcttcatccctgggatgcaaggctggttcaacatatgcaaatcaataaatgtaatc

SEQ ID NO: 106376 - DNA, 120 bp, synthetic construct
  source 1..120: mol_type = other DNA
aaagaacaaagcttgaggcatcacactacctgacttcaaactatactacaaggctacagtaaccaaaacagcatggtactggtaccaaaacagagatatagatcaatggaacagaacaga

SEQ ID NO: 106377 - DNA, 120 bp, synthetic construct
  source 1..120: mol_type = other DNA
atggatgaaattggagatcatcattctcagtaaaccgtcgcaaggacaaaaaaccaaacactgcatgttctcactcatacgtgggaattgaacaatgagaacacatggacacaggaaggg

SEQ ID NO: 106378 - DNA, 120 bp, synthetic construct; identical to SEQ ID NO: 28550
  source 1..120: mol_type = other DNA

SEQ ID NO: 106379 - DNA, 120 bp, synthetic construct; identical to SEQ ID NO: 28551
  source 1..120: mol_type = other DNA

SEQ ID NO: 106380 - DNA, 120 bp, synthetic construct
  source 1..120: mol_type = other DNA
gcaataccattcaggacataggcatgggcaagaacttcatgtctaaaacaccaaaagcaatggcaacaaaagccaaaattaacaaatgggatctaattaaactaaagagcttccacacag

SEQ ID NO: 106381 - DNA, 120 bp, synthetic construct; identical to SEQ ID NO: 28552
  source 1..120: mol_type = other DNA

SEQ ID NO: 106382 - DNA, 120 bp, synthetic construct; identical to SEQ ID NO: 28553
  source 1..120: mol_type = other DNA

SEQ ID NO: 106383 - DNA, 120 bp, synthetic construct; identical to SEQ ID NO: 28556
  source 1..120: mol_type = other DNA

SEQ ID NO: 106384 - DNA, 120 bp, synthetic construct; identical to SEQ ID NO: 28557
  source 1..120: mol_type = other DNA

SEQ ID NO: 106385 - DNA, 120 bp, synthetic construct; identical to SEQ ID NO: 33573
  source 1..120: mol_type = other DNA

SEQ ID NO: 106386 - DNA, 120 bp, synthetic construct; identical to SEQ ID NO: 33574
  source 1..120: mol_type = other DNA

SEQ ID NO: 106387 - DNA, 120 bp, synthetic construct
  source 1..120: mol_type = other DNA
taatagtaacgtaactggtgtaatttaccaattgctacaactagcatgattgagtttaaaagattacgtgattcctcagggatctagaactagaaataccatttgacccagccatcccat

SEQ ID NO: 106388 - DNA, 120 bp, synthetic construct; identical to SEQ ID NO: 14589
  source 1..120: mol_type = other DNA

SEQ ID NO: 106389 - DNA, 120 bp, synthetic construct
  source 1..120: mol_type = other DNA
tgaatcacgaggtcagcagttcgaaccagcctggccaacatggtgaaaccccgtctgtactaaaactataaaaattagccaggtgtggtggcaggcacctgtaatcccagctactcggga

SEQ ID NO: 106390 - DNA, 120 bp, synthetic construct
  source 1..120: mol_type = other DNA
acaaaaaggatgtccagacaaaaaccccatccgaaggtcaccgacatcaaagatgtaaagggaatggtaaagggatcaatgcaacaaaaagagctaaccatcctagatatatatgcactc

SEQ ID NO: 106391 - DNA, 120 bp, synthetic construct
  source 1..120: mol_type = other DNA
agtctctaggaaaacagtgcaatcaaactggaactcaggattaaggaactcactcaaaaccacacaactacatggaaagggaaaaacgtgctcccgaatggctactgggtaaataatgaa

SEQ ID NO: 106392 - DNA, 120 bp, synthetic construct
  source 1..120: mol_type = other DNA
tcacaagaatcaaaaatcgggtgagtaatcacagtacttagttttaacttcatattgctgaaagaggcactgaagagggtagaagagacagtcatgaatcactgatgacaccccttcccc

SEQ ID NO: 106393 - DNA, 120 bp, synthetic construct
  source 1..120: mol_type = other DNA
aatcacagactctccaagtttcagtagactaatccatacaatgaagtattacataatatctctgaggttctttccagcttaaaaaatctataactcggccgggcgcggtggctcacgcct

SEQ ID NO: 106394 - DNA, 120 bp, synthetic construct
  source 1..120: mol_type = other DNA
tattatatattttcaagtattctccaggatccccaaaatcaacctagtaaaaaaaaatattggccaggtgctgtggctcatgcctgtaatcccagcactttgggaaactaaggcaggtgc

SEQ ID NO: 106395 - DNA, 120 bp, synthetic construct; identical to SEQ ID NO: 34265
  source 1..120: mol_type = other DNA

SEQ ID NO: 106396 - DNA, 120 bp, synthetic construct; identical to SEQ ID NO: 4222
  source 1..120: mol_type = other DNA

SEQ ID NO: 106397 - DNA, 120 bp, synthetic construct; identical to SEQ ID NO: 9340
  source 1..120: mol_type = other DNA

SEQ ID NO: 106398 - DNA, 120 bp, synthetic construct
  source 1..120: mol_type = other DNA
ttttatggctgcatagtattccatggtgtatatgtgccacattttcttaacagtctatcattgttggacatttgggttggttccaagtctttgctattgtgaataatgccgcaataaaca

SEQ ID NO: 106399 - DNA, 120 bp, synthetic construct
  source 1..120: mol_type = other DNA
gatggttttaggtctaacgtttaagtctttaatccatcttgaattgatttctgtatgaggtgtaaggaagggatccagtttcagctttctacatatggctagccagttttcccagcacca

SEQ ID NO: 106400 - DNA, 120 bp, synthetic construct
  source 1..120: mol_type = other DNA
tggctgtgggtttgtcatagatagcttttattattttgaaatacgtcccatcaatacctaattgagagtttttagcacgaagggttgttgaattttgtcaaaggccttttctgcatctat

SEQ ID NO: 106401 - DNA, 120 bp, synthetic construct
  source 1..120: mol_type = other DNA
atctttcctgctttctcttgtgggcatttagtgctataaatttccctctacacactgctttgaatgtgtcccagagattctggtatgttgtgtctttgttcttgttggtttcaaaggcat

SEQ ID NO: 106402 - DNA, 120 bp, synthetic construct
  source 1..120: mol_type = other DNA
agttgttcctttccatgtttagcgcttccttcaggagctcttttagggcaggcctggtagtgacaaaatctctcagcatttgcttgtctgtaaagtattttatttctccttcacttatga

SEQ ID NO: 106403 - DNA, 120 bp, synthetic construct
  source 1..120: mol_type = other DNA
gtggaatatctttttctatccctttattttcagtctgtttgtgtctttataggtgaagtgtgtttcttgtaggcaacagactaatgggtcttgttttttcatccattcagccagtctatg

SEQ ID NO: 106404 - DNA, 120 bp, synthetic construct
  source 1..120: mol_type = other DNA
gacggggcggccgggtagagatgctcctcacctcccagacggggttgccgccgggcagaggtgctcctcacatcccagacggggcggcggggcagaggcgctccccacatctcagacgat

SEQ ID NO: 106405 - DNA, 120 bp, synthetic construct; identical to SEQ ID NO: 9342
  source 1..120: mol_type = other DNA

SEQ ID NO: 106406 - DNA, 120 bp, synthetic construct
  source 1..120: mol_type = other DNA
agacccatcagtgtgctgtattcaggaaacccatctcacatgcagagacacacataggctcaaaataaagggaaggaggaagatctaccaagcaaatggaaaacaaaaaaaggcaggtgt

SEQ ID NO: 106407 - DNA, 120 bp, synthetic construct
  source 1..120: mol_type = other DNA
tgatagacagctagcaagactaatacagaagaaaagagagaagaatcaaatagacacaataaaaaatgataaaggggatatcactaccgatcccacagaaatacaaactaccatcagaga

SEQ ID NO: 106408 - DNA, 120 bp, synthetic construct
  source 1..120: mol_type = other DNA
aagcattcttatacaccaataacagacggagagccaaatcatgagtgaactcccattcacaattgcttcaaagagattaaaatacctaggaatccaacttacaagggacgtgaaggacct

SEQ ID NO: 106409 - DNA, 120 bp, synthetic construct
  source 1..120: mol_type = other DNA
aaagggctaatatccagaatctacaatgaactccaacaaatttacaagaaaaatgtaaccccatcaacaagtgggtgaaggatatgaacagacacttttcaaaagaagacatttatgcag

SEQ ID NO: 106410 - DNA, 120 bp, synthetic construct; identical to SEQ ID NO: 9343
  source 1..120: mol_type = other DNA

SEQ ID NO: 106411 - DNA, 120 bp, synthetic construct
  source 1..120: mol_type = other DNA
cccacctcagcttcccaaagtgctgggattacaagcgtgagccaccacgcccggcccaatttcagttttttaataactgtaaattacatttcatcagaagagcttaaaagatgtttaaaa

SEQ ID NO: 106412 - DNA, 120 bp, synthetic construct; identical to SEQ ID NO: 19667
  source 1..120: mol_type = other DNA

SEQ ID NO: 106413 - DNA, 120 bp, synthetic construct; identical to SEQ ID NO: 19668
  source 1..120: mol_type = other DNA

SEQ ID NO: 106414 - DNA, 120 bp, synthetic construct
  source 1..120: mol_type = other DNA
aaagtatttgtgttgtgacaagactgctgaatataagggactctgtcctgtgcctcatttttctttttcttttttttctttttggagacgagtcttgctctgtcgcccaggctggagtgc

SEQ ID NO: 106415 - DNA, 120 bp, synthetic construct
  source 1..120: mol_type = other DNA
gagtagctgggattacaggcacgtgccaacacgtttggctaatttttgtattttttttttcagtaaggacagggttcaccattgttggtctggttgatctcgaactccttaccttgtgat

SEQ ID NO: 106416 - DNA, 120 bp, synthetic construct
  source 1..120: mol_type = other DNA
tacagagatcctgaagagattgaaaaagaagagcaggctgctgctgagaaggcagtgaccaaggaggaatttcagggtgaatggactgctccctctcctgagttcactgctactcagcct

SEQ ID NO: 106417 - DNA, 120 bp, synthetic construct; identical to SEQ ID NO: 19669
  source 1..120: mol_type = other DNA

SEQ ID NO: 106418 - DNA, 120 bp, synthetic construct; identical to SEQ ID NO: 18596
  source 1..120: mol_type = other DNA

SEQ ID NO: 106419 - DNA, 120 bp, synthetic construct; identical to SEQ ID NO: 18597
  source 1..120: mol_type = other DNA

SEQ ID NO: 106420 - DNA, 120 bp, synthetic construct; identical to SEQ ID NO: 18601
  source 1..120: mol_type = other DNA

SEQ ID NO: 106421 - DNA, 120 bp, synthetic construct
  source 1..120: mol_type = other DNA
gccattctaactggtgtgagatggtatctcattgtggttttgatttgcatttctaaagaggaaatactttaaaactgataaaatactcacagccaaatgttagtaatagcacatttgctg

SEQ ID NO: 106422 - DNA, 120 bp, synthetic construct; identical to SEQ ID NO: 18602
  source 1..120: mol_type = other DNA

SEQ ID NO: 106423 - DNA, 120 bp, synthetic construct; identical to SEQ ID NO: 18603
  source 1..120: mol_type = other DNA

SEQ ID NO: 106424 - DNA, 120 bp, synthetic construct; identical to SEQ ID NO: 18604
  source 1..120: mol_type = other DNA

SEQ ID NO: 106425 - DNA, 120 bp, synthetic construct; identical to SEQ ID NO: 18605
  source 1..120: mol_type = other DNA

SEQ ID NO: 106426 - DNA, 120 bp, synthetic construct; identical to SEQ ID NO: 18606
  source 1..120: mol_type = other DNA

SEQ ID NO: 106427 - DNA, 120 bp, synthetic construct; identical to SEQ ID NO: 18607
  source 1..120: mol_type = other DNA

SEQ ID NO: 106428 - DNA, 120 bp, synthetic construct; identical to SEQ ID NO: 18608
  source 1..120: mol_type = other DNA

SEQ ID NO: 106429 - DNA, 120 bp, synthetic construct; identical to SEQ ID NO: 18609
  source 1..120: mol_type = other DNA

SEQ ID NO: 106430 - DNA, 120 bp, synthetic construct; identical to SEQ ID NO: 18610
  source 1..120: mol_type = other DNA

SEQ ID NO: 106431 - DNA, 120 bp, synthetic construct
  source 1..120: mol_type = other DNA
cattctttcccttgaggctgtctgcagtattctcatgagtctctaatctctgctgtctctttattgttttagctgcttttactgatattcccaatctgctgcctctttagatatgtcccc

SEQ ID NO: 106432 - DNA, 120 bp, synthetic construct; identical to SEQ ID NO: 18611
  source 1..120: mol_type = other DNA

SEQ ID NO: 106433 - DNA, 120 bp, synthetic construct; identical to SEQ ID NO: 18612
  source 1..120: mol_type = other DNA

SEQ ID NO: 106434 - DNA, 120 bp, synthetic construct; identical to SEQ ID NO: 18613
  source 1..120: mol_type = other DNA

SEQ ID NO: 106435 - DNA, 120 bp, synthetic construct; identical to SEQ ID NO: 18614
  source 1..120: mol_type = other DNA

SEQ ID NO: 106436 - DNA, 120 bp, synthetic construct; identical to SEQ ID NO: 18615
  source 1..120: mol_type = other DNA

SEQ ID NO: 106437 - DNA, 120 bp, synthetic construct; identical to SEQ ID NO: 18598
  source 1..120: mol_type = other DNA

SEQ ID NO: 106438 - DNA, 120 bp, synthetic construct; identical to SEQ ID NO: 18599
  source 1..120: mol_type = other DNA

SEQ ID NO: 106439 - DNA, 120 bp, synthetic construct; identical to SEQ ID NO: 18600
  source 1..120: mol_type = other DNA

SEQ ID NO: 106440 - DNA, 120 bp, synthetic construct; identical to SEQ ID NO: 18616
  source 1..120: mol_type = other DNA

SEQ ID NO: 106441 - DNA, 120 bp, synthetic construct; identical to SEQ ID NO: 18617
  source 1..120: mol_type = other DNA

SEQ ID NO: 106442 - DNA, 120 bp, synthetic construct
  source 1..120: mol_type = other DNA
cctcccgagttcaagagattctcgtgcctcagtctcccgagtagctgggactaccagtgcatgacaccatgcccggctgattttttgtatttttagtagagatgcggtttcaccatgttg

SEQ ID NO: 106443 - DNA, 120 bp, synthetic construct
  source 1..120: mol_type = other DNA
ttctttctatacagacacagtaacaatctgatctctcttgcttttccccacaaaagtgtgaatcagattctgttacttccttactggtggtctccattggcttcctctgtgcttaaagta

SEQ ID NO: 106444 - DNA, 120 bp, synthetic construct; identical to SEQ ID NO: 18584
  source 1..120: mol_type = other DNA

SEQ ID NO: 106445 - DNA, 120 bp, synthetic construct
  source 1..120: mol_type = other DNA
aatccacctgccttagcctcccaaagtgctaggattacaggcttcagccaccgtgtccagcctttctttcttgattagtcttactagagcaggcatggggatgatagtgaaaatgttgct

SEQ ID NO: 106446 - DNA, 120 bp, synthetic construct
  source 1..120: mol_type = other DNA
gcagtgtaactgtgaaacgcctcccattgagaggcgaagttgctgttctttcccttggatctggatgggctgtgactggatgggaaatggcgctcttggctggtgtgctgaggacgacat

SEQ ID NO: 106447 - DNA, 120 bp, synthetic construct
  source 1..120: mol_type = other DNA
ccgccattgtcatcctggcccgttctcaatgagctgttgggcacacctcccagacggggtggtggccggacagaggggctcctcacttcccagtaggggcggccgggcagaggcgcccct

SEQ ID NO: 106448 - DNA, 120 bp, synthetic construct; identical to SEQ ID NO: 18587
  source 1..120: mol_type = other DNA

SEQ ID NO: 106449 - DNA, 120 bp, synthetic construct; identical to SEQ ID NO: 18588
  source 1..120: mol_type = other DNA

SEQ ID NO: 106450 - DNA, 120 bp, synthetic construct; identical to SEQ ID NO: 18589
  source 1..120: mol_type = other DNA

SEQ ID NO: 106451 - DNA, 120 bp, synthetic construct; identical to SEQ ID NO: 18590
  source 1..120: mol_type = other DNA

SEQ ID NO: 106452 - DNA, 120 bp, synthetic construct; identical to SEQ ID NO: 18591
  source 1..120: mol_type = other DNA

SEQ ID NO: 106453 - DNA, 120 bp, synthetic construct; identical to SEQ ID NO: 18592
  source 1..120: mol_type = other DNA

SEQ ID NO: 106454 - DNA, 120 bp, synthetic construct; identical to SEQ ID NO: 18593
  source 1..120: mol_type = other DNA

SEQ ID NO: 106455 - DNA, 120 bp, synthetic construct; identical to SEQ ID NO: 18594
  source 1..120: mol_type = other DNA

SEQ ID NO: 106456 - DNA, 120 bp, synthetic construct; identical to SEQ ID NO: 18595
  source 1..120: mol_type = other DNA

SEQ ID NO: 106457 - DNA, 120 bp, synthetic construct
  source 1..120: mol_type = other DNA
agccgcctcgtccgggaggtgagtggtgcctctgcccggccacccctactgggaagtgaggagtccctctgcccggccagccgccccgtccgggagggaagtggggggggtcagcccccc

SEQ ID NO: 106458 - DNA, 120 bp, synthetic construct; identical to SEQ ID NO: 34007
  source 1..120: mol_type = other DNA

SEQ ID NO: 106459 - DNA, 120 bp, synthetic construct; identical to SEQ ID NO: 11704
  source 1..120: mol_type = other DNA

SEQ ID NO: 106460 - DNA, 120 bp, synthetic construct; identical to SEQ ID NO: 11705
  source 1..120: mol_type = other DNA

SEQ ID NO: 106461 - DNA, 120 bp, synthetic construct; identical to SEQ ID NO: 22390
  source 1..120: mol_type = other DNA

SEQ ID NO: 106462 - DNA, 120 bp, synthetic construct; identical to SEQ ID NO: 22391
  source 1..120: mol_type = other DNA

SEQ ID NO: 106463 - DNA, 120 bp, synthetic construct
  source 1..120: mol_type = other DNA
gcatgagccacagcgcccagccaggaatgtatttttttgtttgtttgtttgtttgttttttctttttatttatttatttatttatttttattgatcattcttgggtgtttctcacagagg

SEQ ID NO: 106464 - DNA, 120 bp, synthetic construct; identical to SEQ ID NO: 11645
  source 1..120: mol_type = other DNA

SEQ ID NO: 106465 - DNA, 120 bp, synthetic construct; identical to SEQ ID NO: 16105
  source 1..120: mol_type = other DNA

SEQ ID NO: 106466 - DNA, 120 bp, synthetic construct; identical to SEQ ID NO: 16106
  source 1..120: mol_type = other DNA

SEQ ID NO: 106467 - DNA, 120 bp, synthetic construct; identical to SEQ ID NO: 16107
  source 1..120: mol_type = other DNA

SEQ ID NO: 106468 - DNA, 120 bp, synthetic construct; identical to SEQ ID NO: 16108
  source 1..120: mol_type = other DNA

SEQ ID NO: 106469 - DNA, 120 bp, synthetic construct; identical to SEQ ID NO: 16109
  source 1..120: mol_type = other DNA

SEQ ID NO: 106470 - DNA, 120 bp, synthetic construct; identical to SEQ ID NO: 16110
  source 1..120: mol_type = other DNA

SEQ ID NO: 106471 - DNA, 120 bp, synthetic construct
  source 1..120: mol_type = other DNA
ggttgcagtgagccaagatgacgccattgcactccagcttgggcgacagagtgagactcggtctcaaaaaagaaaaagaaaaagaaagactggaaaagaaagaaaaagacctaatatcat

SEQ ID NO: 106472 - DNA, 120 bp, synthetic construct; identical to SEQ ID NO: 16111
  source 1..120: mol_type = other DNA

SEQ ID NO: 106473 - DNA, 120 bp, synthetic construct
  source 1..120: mol_type = other DNA
cctgggaggttgaggctgcagtgagccatgatcgggcccattacactccagcccgggtgacagagcaagaccctgtctcaagatggaaaaaagttctacttgcaacactccacacaacta

SEQ ID NO: 106474 - DNA, 120 bp, synthetic construct
  source 1..120: mol_type = other DNA
atggtgaaaccccaaatctactgaaaatacaaaaaaattagctgggcatggtggcacagctactcgggaggctgaggtgggaggatggcttgaacccaggaggcagaggttgcagtgagc

SEQ ID NO: 106475 - DNA, 120 bp, synthetic construct; identical to SEQ ID NO: 4011
  source 1..120: mol_type = other DNA

SEQ ID NO: 106476 - DNA, 120 bp, synthetic construct
  source 1..120: mol_type = other DNA
tgggaggccaaggcgggtggatcacaaggtcaggagttcgagaccagcctggccaacatggtgaaaccctgcctctactaaaaaaataaaaaaattagccaggtgtggtggtgtgtgcct

SEQ ID NO: 106477 - DNA, 120 bp, synthetic construct; identical to SEQ ID NO: 23848
  source 1..120: mol_type = other DNA

SEQ ID NO: 106478 - DNA, 120 bp, synthetic construct; identical to SEQ ID NO: 23849
  source 1..120: mol_type = other DNA

SEQ ID NO: 106479 - DNA, 120 bp, synthetic construct; identical to SEQ ID NO: 23850
  source 1..120: mol_type = other DNA

SEQ ID NO: 106480 - DNA, 120 bp, synthetic construct; identical to SEQ ID NO: 23851
  source 1..120: mol_type = other DNA

SEQ ID NO: 106481 - DNA, 120 bp, synthetic construct
  source 1..120: mol_type = other DNA
gccatcatgcctggctcattttttattttttagtagagacgggatttcaccatgttggctaggctggtctggaactcctcccttcaggtgatccgcccgcctcagcctcccaaagtgctg

SEQ ID NO: 106482 - DNA, 120 bp, synthetic construct; identical to SEQ ID NO: 23852
  source 1..120: mol_type = other DNA

SEQ ID NO: 106483 - DNA, 120 bp, synthetic construct; identical to SEQ ID NO: 23853
  source 1..120: mol_type = other DNA

SEQ ID NO: 106484 - DNA, 120 bp, synthetic construct; identical to SEQ ID NO: 33537
  source 1..120: mol_type = other DNA

SEQ ID NO: 106485 - DNA, 120 bp, synthetic construct; identical to SEQ ID NO: 33538
  source 1..120: mol_type = other DNA

SEQ ID NO: 106486 - DNA, 120 bp, synthetic construct; identical to SEQ ID NO: 29638
  source 1..120: mol_type = other DNA

SEQ ID NO: 106487 - DNA, 120 bp, synthetic construct
  source 1..120: mol_type = other DNA
tgcataaaatctaacctaacagaaaataagacaaacagtatcttaaacttcaggtatggtggctcatgcctgtaatcccagcaggctgaggcataaggatggcttgagaccaagagtttg

SEQ ID NO: 106488 - DNA, 120 bp, synthetic construct
  source 1..120: mol_type = other DNA
gagatgagtctcactatgttgcccaggactaaatggactcttcagtctttgtcttaatttgggaacatgtgacactgttgatcatatcttccttcttgaaacgtggacattctgtgacat

SEQ ID NO: 106489 - DNA, 120 bp, synthetic construct; identical to SEQ ID NO: 23132
  source 1..120: mol_type = other DNA

SEQ ID NO: 106490 - DNA, 120 bp, synthetic construct
  source 1..120: mol_type = other DNA
aagatcagttagttgtagatacgtggtattagttctgagggctctgttctgttccattggtcaatatctctattttggtaccagtaccatgctgttttggttactgtagccttgtagtat

SEQ ID NO: 106491 - DNA, 120 bp, synthetic construct
  source 1..120: mol_type = other DNA
tggctgtgggtgtgtcatagatagctcttattgagatacatcccatcaatacctaatatattgagagcttttagcaaaaatcacaagcattcttatacaccaataacagacaaacagagc

SEQ ID NO: 106492 - DNA, 120 bp, synthetic construct
  source 1..120: mol_type = other DNA
agacaaaattgacaaatgggatctaattaaactcaagagcttctgcacagcaaaagaaattaccatcagagtgaaacaggcaacctacaaaatgggagaaaatttttgcaacctactcat

SEQ ID NO: 106493 - DNA, 120 bp, synthetic construct
  source 1..120: mol_type = other DNA
atactaataaaataaaattaaaaaaaaagagtactacaataccagggggtggttccaagatggccaaataggaacagctccagtctacagctcccagcatggtcggagcagaagatgggt

SEQ ID NO: 106494 - DNA, 120 bp, synthetic construct
  source 1..120: mol_type = other DNA
aaatatatatgcacccaatacgggagcacccagattcataaagcaaatccttagagacctacaaagagacttagactcccacacaataataatgggagactttaacaccccactgtcaac

SEQ ID NO: 106495 - DNA, 120 bp, synthetic construct
  source 1..120: mol_type = other DNA
aatctctgggacacatttaaagcagtgtgtagagggaaacttatagcactaaatgcccacaagagaaagcaggaaagatctaaaattgacaccctaacatcacaattaaaagaactagag

SEQ ID NO: 106496 - DNA, 120 bp, synthetic construct; identical to SEQ ID NO: 22283
  source 1..120: mol_type = other DNA

SEQ ID NO: 106497 - DNA, 120 bp, synthetic construct; identical to SEQ ID NO: 16508
  source 1..120: mol_type = other DNA

SEQ ID NO: 106498 - DNA, 120 bp, synthetic construct
  source 1..120: mol_type = other DNA
tgccgggcggaggggctcctcacttctcagacggtgtggctgccaggtggaggggctcctcacttctcagacggggcggttgccaggcagagggtctcctcacttctcagacggggcggc

SEQ ID NO: 106499 - DNA, 120 bp, synthetic construct
  source 1..120: mol_type = other DNA
tggcgggggtccttgttcttagaactcccaagatggtggcaggccacttccaagatggcggcaagcctcttgttctctatcagtgaaatttctgtgagaggacccagagcatagcttctt

SEQ ID NO: 106500 - DNA, 120 bp, synthetic construct; identical to SEQ ID NO: 24829
  source 1..120: mol_type = other DNA

SEQ ID NO: 106501 - DNA, 120 bp, synthetic construct; identical to SEQ ID NO: 24830
  source 1..120: mol_type = other DNA

SEQ ID NO: 106502 - DNA, 120 bp, synthetic construct
  source 1..120: mol_type = other DNA
gtgaatagtgccacaataaacatatgtgtgcatgtgtctttatagcggcatgatttatagtcctttgggtatatacccagtaatgggatggctgggtcaaatggtatttctagttctaga

SEQ ID NO: 106503 - DNA, 120 bp, synthetic construct; identical to SEQ ID NO: 24831
  source 1..120: mol_type = other DNA

SEQ ID NO: 106504 - DNA, 120 bp, synthetic construct
  source 1..120: mol_type = other DNA
attcttctctcttctttattagtcttgctagcggtctatcaattttgttgatcgtttcaaaaaaccagctcctggattcattgattttttgaagggttttttgtgtctctatctccttca

SEQ ID NO: 106505 - DNA, 120 bp, synthetic construct
  source 1..120: mol_type = other DNA
ttgttttccatttgcttggtagatcttccttcatccctttattttgagcctatgtgtgtctctgcacatgagatgggtttcctgaatacagcacactgatgggtcttgactctttatcca

SEQ ID NO: 106506 - DNA, 120 bp, synthetic construct
  source 1..120: mol_type = other DNA
ttggaagatcttcaggggcaataacatccatggagctgtcacctcctatgataatagtgccttctgtaatatctcctggaggacctgcctgaggctgttttacagttaacttttttttat

SEQ ID NO: 106507 - DNA, 120 bp, synthetic construct; identical to SEQ ID NO: 24833
  source 1..120: mol_type = other DNA

SEQ ID NO: 106508 - DNA, 120 bp, synthetic construct; identical to SEQ ID NO: 24834
  source 1..120: mol_type = other DNA

SEQ ID NO: 106509 - DNA, 120 bp, synthetic construct; identical to SEQ ID NO: 24835
  source 1..120: mol_type = other DNA

SEQ ID NO: 106510 - DNA, 120 bp, synthetic construct
  source 1..120: mol_type = other DNA
tcctgactttttaatgattgccattctaactggtgtgagatggtatctcattgtggttttgatttgcgtttctctgatggccagtgatggtgagcattttttcatgtgttttttggctgc

SEQ ID NO: 106511 - DNA, 120 bp, synthetic construct
  source 1..120: mol_type = other DNA
caatgagcatggaatgttctttcatttgttgtatcctcttttatttcgttgagcagtggtttgtagttctccttgaagaggtccttcacatcccttgtaagttggattcctaggtatttt

SEQ ID NO: 106512 - DNA, 120 bp, synthetic construct
  source 1..120: mol_type = other DNA
cctctggtagaattcggctgtgaatccatctggtcctggaccctttttggtgggtaagctattgattattgccacaatttcagctcctgttattggtctattcagagattcaacttcttc

SEQ ID NO: 106513 - DNA, 120 bp, synthetic construct
  source 1..120: mol_type = other DNA
attaggtccgcttggtgcagagctgagttcaattcctgggtatccttgttgactttctgtctcgttgatctgtctaatgttgacagtggggtgttaaagtctcccattattaatgtgtgg

SEQ ID NO: 106514 - DNA, 120 bp, synthetic construct; identical to SEQ ID NO: 24836
  source 1..120: mol_type = other DNA

SEQ ID NO: 106515 - DNA, 120 bp, synthetic construct; identical to SEQ ID NO: 24837
  source 1..120: mol_type = other DNA

SEQ ID NO: 106516 - DNA, 120 bp, synthetic construct
  source 1..120: mol_type = other DNA
tatggttgcatagtattccatggtgtatatgtgccacattttcttactccagtctatcattgttggacatttgggttggttccaagtctttgctattgtgaatagtgccgcaataaacat

SEQ ID NO: 106517 - DNA, 120 bp, synthetic construct
  source 1..120: mol_type = other DNA
tgttctgttccattgatctatatctgtgttttggtaccagtaccatgctgttttgtttactgtagccttatagtatagtttgaagtcaggtagtgtgatgcctctggctttgttcttttg

SEQ ID NO: 106518 - DNA, 120 bp, synthetic construct
  source 1..120: mol_type = other DNA
attgagataatcatgtggtttttgcctttggttctgtttatatgctggattatatttattgatttgtatatattgaaccagccttgcattccagggatgaagcccacttgatcatggtgg

SEQ ID NO: 106519 - DNA, 120 bp, synthetic construct
  source 1..120: mol_type = other DNA
tttgaatgtgtcccaaagattgtggtatgttgtgtctttcttctcgttgatttcaaagaacatctttatttctgccttcatttcgttatgtacccagcagtcattcaggagcagtttgtt

SEQ ID NO: 106520 - DNA, 120 bp, synthetic construct
  source 1..120: mol_type = other DNA
ctgatattggttgttcctttccatgtttagcgcttccttcaggagctcttttagggcaggcctggtggtgacaaaatctctcagcatttgcttgtctgtaaagtattttatttctccttc

SEQ ID NO: 106521 - DNA, 120 bp, synthetic construct
  source 1..120: mol_type = other DNA
ggaggagaggtgctcgctttttagagtttccagtttttctgctctgttttttccccatctttgtggttttatctacttttggtctttgatgatggtgatgtacagatgggtttttggtgt

SEQ ID NO: 106522 - DNA, 120 bp, synthetic construct; identical to SEQ ID NO: 13304
  source 1..120: mol_type = other DNA

SEQ ID NO: 106523 - DNA, 120 bp, synthetic construct; identical to SEQ ID NO: 10097
  source 1..120: mol_type = other DNA

SEQ ID NO: 106524 - DNA, 120 bp, synthetic construct
  source 1..120: mol_type = other DNA
ccctgaggaatccccacactgacttccacaatagttgaactagtttacagtcccaccaacagtataaaagtgttcctatttttccacatcctctccagcacctgttgtttcctgactttt

SEQ ID NO: 106525 - DNA, 120 bp, synthetic construct
  source 1..120: mol_type = other DNA
tttggaacttggactggctttcattgctcctcagcttgcagatggcctattgcaggaccttgtggtagtgtgagttaatactacttaataaactcattcactctctctctatctttctat

SEQ ID NO: 106526 - DNA, 120 bp, synthetic construct; identical to SEQ ID NO: 22716
  source 1..120: mol_type = other DNA

SEQ ID NO: 106527 - DNA, 120 bp, synthetic construct; identical to SEQ ID NO: 22717
  source 1..120: mol_type = other DNA

SEQ ID NO: 106528 - DNA, 120 bp, synthetic construct; identical to SEQ ID NO: 22718
  source 1..120: mol_type = other DNA

SEQ ID NO: 106529 - DNA, 120 bp, synthetic construct; identical to SEQ ID NO: 22719
  source 1..120: mol_type = other DNA

SEQ ID NO: 106530 - DNA, 120 bp, synthetic construct; identical to SEQ ID NO: 22720
  source 1..120: mol_type = other DNA

SEQ ID NO: 106531 - DNA, 120 bp, synthetic construct
  source 1..120: mol_type = other DNA
ctcctgagtagctgggattacaggcacatgccaccatgcccagctaatttttttgattgtttgtttttatttttttttttgggatagagtctcgctctgtcgcccagggtggagtgcagt

SEQ ID NO: 106532 - DNA, 120 bp, synthetic construct
  source 1..120: mol_type = other DNA
ttttttttttttttttgagacagagtcttgctctgttgcccaggccggagtgcagtggtgcgatctcggctcactgcaagctccgcctcccgggttcacgccattctcctgcctcagcct

SEQ ID NO: 106533 - DNA, 120 bp, synthetic construct; identical to SEQ ID NO: 15151
  source 1..120: mol_type = other DNA

SEQ ID NO: 106534 - DNA, 120 bp, synthetic construct
  source 1..120: mol_type = other DNA
agtaaattctcttaagttttgtaagtctacaatctattacctttttttttttgagacagcgtcttgctctaccacccaggctggagtgcaatcgtgcgatctcactgcaacctccatcct

SEQ ID NO: 106535 - DNA, 120 bp, synthetic construct
  source 1..120: mol_type = other DNA
agtgtacatttcctctcgcagcagcttgtgtttcttccttcaagagtctgcttagagataataaagatcaacactattccttataacaacacctcagtatcctgcgagctgtacacacca

SEQ ID NO: 106536 - DNA, 120 bp, synthetic construct; identical to SEQ ID NO: 35159
  source 1..120: mol_type = other DNA

SEQ ID NO: 106537 - DNA, 120 bp, synthetic construct
  source 1..120: mol_type = other DNA
gggaatacaggcatgcatcaccacccatggctaatttttgtctttttggtagaggcagggtttcactatgttggccaaggtagtatatatatatatatatatttttacatatgtatatgt

SEQ ID NO: 106538 - DNA, 120 bp, synthetic construct; identical to SEQ ID NO: 35161
  source 1..120: mol_type = other DNA

SEQ ID NO: 106539 - DNA, 120 bp, synthetic construct
  source 1..120: mol_type = other DNA
aattctagatccctgaggaatcaccacactgacttccacaatggtcgaactagtttacagtcccaccaacagtgtaaaagtgttcctatttctccacatcctctccagcacctgttgttt

SEQ ID NO: 106540 - DNA, 120 bp, synthetic construct
  source 1..120: mol_type = other DNA
gtagtgtgatgcctccagctttgttcttttggcttagaattgacttggcgatgcgggctgttttttggttccatatgaactttaaagtatttttttccaattctgtgaagaaagtcattg

SEQ ID NO: 106541 - DNA, 120 bp, synthetic construct
  source 1..120: mol_type = other DNA
ttacatttattgatttgcgtatattgaaccagcctttcatcccagggatgaagcccacttgatcatggtggataagctttttgatgtgctgctggattcagtttgccagtattttattga

SEQ ID NO: 106542 - DNA, 120 bp, synthetic construct; identical to SEQ ID NO: 35162
  source 1..120: mol_type = other DNA

SEQ ID NO: 106543 - DNA, 120 bp, synthetic construct; identical to SEQ ID NO: 35163
  source 1..120: mol_type = other DNA

SEQ ID NO: 106544 - DNA, 120 bp, synthetic construct; identical to SEQ ID NO: 35154
  source 1..120: mol_type = other DNA

SEQ ID NO: 106545 - DNA, 120 bp, synthetic construct
  source 1..120: mol_type = other DNA
tgttcctatttctccacatcctctccagcacctgtcgtttcctgactttttaatgattgccattctaactggtgtgagatgatatctcattgtggttttgatttgcatttctctgatggc

SEQ ID NO: 106546 - DNA, 120 bp, synthetic construct
  source 1..120: mol_type = other DNA
atgggcaaaaactggaagcattccctttgaaaactggcacaagcagggatgccgtctctcaccactcctactcagcatactgttggaagttctggccagagcagttaggcaggagaagga

SEQ ID NO: 106547 - DNA, 120 bp, synthetic construct
  source 1..120: mol_type = other DNA
catcgctcacgctgggagctgtagactggagctgttcctattcggccatcgtggctccactccatgtgcaaggacttcatgtctaaaacaccaaaagcaatggcaataaaagccaaaatt

SEQ ID NO: 106548 - DNA, 120 bp, synthetic construct; identical to SEQ ID NO: 35155
  source 1..120: mol_type = other DNA

SEQ ID NO: 106549 - DNA, 120 bp, synthetic construct
  source 1..120: mol_type = other DNA
attaggaaaattgtttggagtttttggatggcttaggaatgtattgtcatttctccatttaaaataatgggttcatgtcctttgtagggacgtggatgaaattggaaatcatcattctca

SEQ ID NO: 106550 - DNA, 120 bp, synthetic construct
  source 1..120: mol_type = other DNA
catacatatatatacacacacacacacatatatgtgtgtgtgtatatatatatgtgtacacctgtggtttcagctacttgggaggctgaggtgggaggattgcttgagcttgggaggagg

SEQ ID NO: 106551 - DNA, 120 bp, synthetic construct
  source 1..120: mol_type = other DNA
atatataaaatatatgtatgtattatttttatatatatgtatatataaaacaggagacagcaaagaaattccagtcttgcaattaaattccagtcttgcagctgtctctgacctcctggg

SEQ ID NO: 106552 - DNA, 120 bp, synthetic construct; identical to SEQ ID NO: 6711
  source 1..120: mol_type = other DNA

SEQ ID NO: 106553 - DNA, 120 bp, synthetic construct
  source 1..120: mol_type = other DNA
ggaacgcagttcctcaccagcaacggaacaaagctggacggagaatgactttgacgagctcagtgaggaaggcttcagatgatcaaatcactccgagctatgggaggacattcaaaccaa

SEQ ID NO: 106554 - DNA, 120 bp, synthetic construct
  source 1..120: mol_type = other DNA
gcaaaatcatgccaaaatgtaaagaccatcgagactaggaagaaactgcatcaactaacgagcaaaatacccagctaacatcataatgacaggatcaaattcacacataacaatattaat

SEQ ID NO: 106555 - DNA, 120 bp, synthetic construct
  source 1..120: mol_type = other DNA
gagatagagacacaaaaaaaccttcaaaaaactaatgaatccaggagctggttttttgaaaggatcaacaaaattgatagaccgctagcaagactaataaagaaaaaaagagagaagaat

SEQ ID NO: 106556 - DNA, 120 bp, synthetic construct
  source 1..120: mol_type = other DNA
actcctattcaacatagtgttggaagttctggccagggcaattaggcaggagaaggaaataaagggtattcaattaggaaaagaggaagtcaaattgtccctgtttgcagataacatcat

SEQ ID NO: 106557 - DNA, 120 bp, synthetic construct
  source 1..120: mol_type = other DNA
aagagcttctgcacagcaaaagaaactaccatcagagtgaacaggcaacctacaaaatgggagaaaattttcgcaacctactcaactgacaaagggctaatatccagaatctacaatgaa

SEQ ID NO: 106558 - DNA, 120 bp, synthetic construct
  source 1..120: mol_type = other DNA
gcattgggagatatacctaatgctagatggtgagttagtgggtgcagcacaccagcatggtacatgtatacatatgtaactaacctgcacattgtgcacatgtaccctaaaacttaaagt

SEQ ID NO: 106559 - DNA, 120 bp, synthetic construct; identical to SEQ ID NO: 35158
  source 1..120: mol_type = other DNA

SEQ ID NO: 106560 - DNA, 120 bp, synthetic construct
  source 1..120: mol_type = other DNA
agagtttttagcatgaagagttgttgaattttgtcaaaggccttttctgcatctattgagataatcatgtggtttttgtctttggttctgtttatatgctggattacgtttattgatttg

SEQ ID NO: 106561 - DNA, 120 bp, synthetic construct
  source 1..120: mol_type = other DNA
tccctctacacactgctttgaatgtgtcccagagattctggtatgctgtgtctttgttcttgttggtttcaaagaacatctttatttctaccttcatttcgttttgtacccactagtcat

SEQ ID NO: 106562 - DNA, 120 bp, synthetic construct
  source 1..120: mol_type = other DNA
aatattgttatgtgtgaatttgatcctgtcattatgatgttagctggttcttttgctctttagttgatgcagtttcttcctagccttgatggtctttacaatttggcatgtttttgcagt

SEQ ID NO: 106563 - DNA, 120 bp, synthetic construct
  source 1..120: mol_type = other DNA
tcagtgaagtattgaagtctcccactattattgtgtgggagtctgtggctctttgtaggtctctaaggatttgctttatgaacctgggtgcccctctgttggggcatttatatataatat

SEQ ID NO: 106564 - DNA, 120 bp, synthetic construct
  source 1..120: mol_type = other DNA
ttctttttttttttttgttttttttttttgtttgtttgtttgtttgttttttgacagtctccctatgtcacgaggctggagtgcagtggcgcgatctcggctcactgcaacctccgcctc

SEQ ID NO: 106565 - DNA, 120 bp, synthetic construct; identical to SEQ ID NO: 35138
  source 1..120: mol_type = other DNA

SEQ ID NO: 106566 - DNA, 120 bp, synthetic construct; identical to SEQ ID NO: 35139
  source 1..120: mol_type = other DNA

SEQ ID NO: 106567 - DNA, 120 bp, synthetic construct; identical to SEQ ID NO: 35140
  source 1..120: mol_type = other DNA

SEQ ID NO: 106568 - DNA, 120 bp, synthetic construct
  source 1..120: mol_type = other DNA
aatataggcacctaaaacagggcctgatgaatagtaggtactcaatacatatttgcaaaataaaggaaagtgatatttttgtgggggcggaggacagagtcttactctgtcgcccaggct

SEQ ID NO: 106569 - DNA, 120 bp, synthetic construct
  source 1..120: mol_type = other DNA
tgaaactgcagaccttcacagtgtgtgttatagctcacaaaagtggcgcggacctgaaaggtgagcagcagcaagatttattgtgaagagcgaaagaactaaccttccacattatggaag

SEQ ID NO: 106570 - DNA, 120 bp, synthetic construct
  source 1..120: mol_type = other DNA
aagtaggaaatacgcataaatcaattcctactaaacaagaaactcttttatgacctcagaaactgtgtgtatgttttttggtgggtttttttttgggggggggggagggtgtaggggggg

SEQ ID NO: 106571 - DNA, 120 bp, synthetic construct
  source 1..120: mol_type = other DNA
atgatgtcaaacattaaagttcctaaaaccactttggccaactttgtggatcttgagtatcttatagaactaaaataaagaagggcaaggccgggtgcagtggctcatgcctgtaatccc

SEQ ID NO: 106572 - DNA, 120 bp, synthetic construct
  source 1..120: mol_type = other DNA
atagggttggactgaaggatttcaaagccccttcttgctataaaactctaagattcaaatacctaaaaagctgctatttggaaggaggaacatatttatcctaggtagactgagaggtca

SEQ ID NO: 106573 - DNA, 120 bp, synthetic construct
  source 1..120: mol_type = other DNA
agcaatctgccctcctcagcctagcaaagtgctgggattacagggtgagccactgtgcccagcctatctttttgtttcttttgtaatttgaatttttttctgcattttgtttcttttttt

SEQ ID NO: 106574 - DNA, 120 bp, synthetic construct
  source 1..120: mol_type = other DNA
ctttgtcagatgagtaggttgcgaaaattttctcccacgttgtaggctgcctgttcactctgatggtagtttcttttgctgtgcagaagctctttagtttaattagatcccatttgtcaa

SEQ ID NO: 106575 - DNA, 120 bp, synthetic construct; identical to SEQ ID NO: 23531
  source 1..120: mol_type = other DNA

SEQ ID NO: 106576 - DNA, 120 bp, synthetic construct; identical to SEQ ID NO: 23532
  source 1..120: mol_type = other DNA

SEQ ID NO: 106577 - DNA, 120 bp, synthetic construct; identical to SEQ ID NO: 23533
  source 1..120: mol_type = other DNA

SEQ ID NO: 106578 - DNA, 120 bp, synthetic construct
  source 1..120: mol_type = other DNA
tgcagcgcggacactcacctccagcggacgccctcttcatcgtaggggttgggcggggcgcgtcggggactgaaagtcgtttcggggcgggcgcccgtctccccgcggccgggtccgcat

SEQ ID NO: 106579 - DNA, 120 bp, synthetic construct; identical to SEQ ID NO: 11907
  source 1..120: mol_type = other DNA

SEQ ID NO: 106580 - DNA, 120 bp, synthetic construct; identical to SEQ ID NO: 11908
  source 1..120: mol_type = other DNA

SEQ ID NO: 106581 - DNA, 120 bp, synthetic construct; identical to SEQ ID NO: 22280
  source 1..120: mol_type = other DNA

SEQ ID NO: 106582 - DNA, 120 bp, synthetic construct
  source 1..120: mol_type = other DNA
atgccatttcttaccactcctgttcaacacagtattggaacttctggccagggcaatcaggcaagataaataaataagggtactaaaataggaaaaggttcaaggcagggtctgtgagtg

SEQ ID NO: 106583 - DNA, 120 bp, synthetic construct; identical to SEQ ID NO: 19136
  source 1..120: mol_type = other DNA

SEQ ID NO: 106584 - DNA, 120 bp, synthetic construct; identical to SEQ ID NO: 25053
  source 1..120: mol_type = other DNA

SEQ ID NO: 106585 - DNA, 120 bp, synthetic construct; identical to SEQ ID NO: 25054
  source 1..120: mol_type = other DNA

SEQ ID NO: 106586 - DNA, 120 bp, synthetic construct; identical to SEQ ID NO: 25055
  source 1..120: mol_type = other DNA

SEQ ID NO: 106587 - DNA, 120 bp, synthetic construct
  source 1..120: mol_type = other DNA
taactcgacaagtggcttcagactgtcctacgctctgacaactggcttcagactgtcctacgctctaactcgacaagtggcttcagactgtcctacgctctgacaactggctccagactg

SEQ ID NO: 106588 - DNA, 120 bp, synthetic construct; identical to SEQ ID NO: 25056
  source 1..120: mol_type = other DNA

SEQ ID NO: 106589 - DNA, 120 bp, synthetic construct; identical to SEQ ID NO: 25057
  source 1..120: mol_type = other DNA

SEQ ID NO: 106590 - DNA, 120 bp, synthetic construct
  source 1..120: mol_type = other DNA
cacagggttgggggtaacgtcaccgatcaacaggatcccaaggcagaagaatttttcttagtacagaacaaaatgaaaagtctcccatgtctacctctttccacacagacacggcaacca

SEQ ID NO: 106591 - DNA, 120 bp, synthetic construct
  source 1..120: mol_type = other DNA
tttattataaaagaaatgcttgcttgttgaaaaaagttaggcaataccaaagtatataatgtgaaaagagaagttgaacctcctcttctcaccccaccccccgccccagccgcagtcctc

SEQ ID NO: 106592 - DNA, 120 bp, synthetic construct; identical to SEQ ID NO: 27368
  source 1..120: mol_type = other DNA

SEQ ID NO: 106593 - DNA, 120 bp, synthetic construct
  source 1..120: mol_type = other DNA
tcccggctaaaacggtgaaaccccgtctctactaaaaatacaaaaaattagtgggcaacaagaaagaaacttcatctcaaaacaaaacaaaaaaaggagggggcaaaagacttgaaacag

SEQ ID NO: 106594 - DNA, 120 bp, synthetic construct; identical to SEQ ID NO: 10806
  source 1..120: mol_type = other DNA

SEQ ID NO: 106595 - DNA, 120 bp, synthetic construct; identical to SEQ ID NO: 25499
  source 1..120: mol_type = other DNA

SEQ ID NO: 106596 - DNA, 120 bp, synthetic construct; identical to SEQ ID NO: 25500
  source 1..120: mol_type = other DNA

SEQ ID NO: 106597 - DNA, 120 bp, synthetic construct; identical to SEQ ID NO: 22000
  source 1..120: mol_type = other DNA

SEQ ID NO: 106598 - DNA, 120 bp, synthetic construct; identical to SEQ ID NO: 22001
  source 1..120: mol_type = other DNA

SEQ ID NO: 106599 - DNA, 120 bp, synthetic construct
  source 1..120: mol_type = other DNA
ccattgcttttggtggtttagacatgaagtccttgcccatgcctatgtcctgaatggtactgcctaggttttcctctagggtttttgtggttttaggtctaacatttaagtctttaatcc

SEQ ID NO: 106600 - DNA, 120 bp, synthetic construct; identical to SEQ ID NO: 29691
  source 1..120: mol_type = other DNA

SEQ ID NO: 106601 - DNA, 120 bp, synthetic construct
  source 1..120: mol_type = other DNA
ttagccctttgtcagatgagtaggttgcgaaaattttctcccattttgtaggttgcctgttcactctgatggtagtttcttttgctgtgcagaagctctttagtttaattagatctcatt

SEQ ID NO: 106602 - DNA, 120 bp, synthetic construct
  source 1..120: mol_type = other DNA
atcagcttaaggagattttgggctgagacaatggggttttctagacataccatgtcatctgcaaacagggacaatttgacttcctcttttcctaattgaataccctttatttccttctcc

SEQ ID NO: 106603 - DNA, 120 bp, synthetic construct
  source 1..120: mol_type = other DNA
tgttattggtctattcagagattcaacttcttcctggtttagtcttgggagagtgtatgtgttgaggaatttatccatttcttctaaattttctagtttatttgcatagaggtgtttgta

SEQ ID NO: 106604 - DNA, 120 bp, synthetic construct; identical to SEQ ID NO: 29692
  source 1..120: mol_type = other DNA

SEQ ID NO: 106605 - DNA, 120 bp, synthetic construct; identical to SEQ ID NO: 29693
  source 1..120: mol_type = other DNA

SEQ ID NO: 106606 - DNA, 120 bp, synthetic construct; identical to SEQ ID NO: 29694
  source 1..120: mol_type = other DNA

SEQ ID NO: 106607 - DNA, 120 bp, synthetic construct
  source 1..120: mol_type = other DNA
aatccaggaactggttttttgaaaacatcaacaaaatcgttagaccgctagcaagaataataaagaagaaaagagagaagaatcaaatagatgcaataaaaaatgataaaggggatatca

SEQ ID NO: 106608 - DNA, 120 bp, synthetic construct
  source 1..120: mol_type = other DNA
gtattgatgggacatatctcaaaataataaagagctatctatgacaaacccacagccaatatcatactgaatgggcaaaaactggaagcattccctttgaaaactggcacaagacaggga

SEQ ID NO: 106609 - DNA, 120 bp, synthetic construct
  source 1..120: mol_type = other DNA
caaaagccaaaattgacaaatgggatctaattaaactaaagagcttctgcacagcaaaagaaactaccatcagagtgaacaggcaacctacaaaatgggagaaaatttccgcaacctact

SEQ ID NO: 106610 - DNA, 120 bp, synthetic construct
  source 1..120: mol_type = other DNA
aggcgcgtgggacgtggctccgcatatttctcctagctctttcaaatgaatgaactggaaatatcatacaaccacttcaaaggtaagtgaaaataaggtggtaccaggaaaatattcaaa

SEQ ID NO: 106611 - DNA, 120 bp, synthetic construct
  source 1..120: mol_type = other DNA
aaaaaaggaatttcacatccaactaaatgtcactggcttgtgatatgtctgataatatagccataatgtacggtaatagattatacctaatttaccctttctgtattgccaacttttcat

SEQ ID NO: 106612 - DNA, 120 bp, synthetic construct; identical to SEQ ID NO: 23065
  source 1..120: mol_type = other DNA

SEQ ID NO: 106613 - DNA, 120 bp, synthetic construct
  source 1..120: mol_type = other DNA
gtcctttgtagggacatggatgaaactggaaatcatcattctcagtaaactatcgcaaagacaaaaaaccaaacaccgcatgttctcactcatagatgggaattgaacaatgagaacaca

SEQ ID NO: 106614 - DNA, 120 bp, synthetic construct; identical to SEQ ID NO: 31653
  source 1..120: mol_type = other DNA

SEQ ID NO: 106615 - DNA, 120 bp, synthetic construct; identical to SEQ ID NO: 31654
  source 1..120: mol_type = other DNA

SEQ ID NO: 106616 - DNA, 120 bp, synthetic construct
  source 1..120: mol_type = other DNA
ctaacacagtgaaaccccgtctctacgaaaaatatgaaaaaattagcctggcctggtggcgggcgcctgtagtccaagctactcaggaggttgaggcaggagaatggcgtaaacccgtga

SEQ ID NO: 106617 - DNA, 120 bp, synthetic construct; identical to SEQ ID NO: 31656
  source 1..120: mol_type = other DNA

SEQ ID NO: 106618 - DNA, 120 bp, synthetic construct
  source 1..120: mol_type = other DNA
gcagtcggcctcatcaaacttgatttctcacctcctcagccccatcacctccatcctctttccccccgtctcgccttcacccccccaatttcctccttgcccctcatttccaccctcctc

SEQ ID NO: 106619 - DNA, 120 bp, synthetic construct
  source 1..120: mol_type = other DNA
gtaagagttttttaatacattttggacattaatccatctcagatgtatgatttgcaaatattttctcctattccatggattgcctttcactctgttaaaagtgtcctttgatgcacgaaa

SEQ ID NO: 106620 - DNA, 120 bp, synthetic construct
  source 1..120: mol_type = other DNA
agaaatttacaattgtactcagtcccctgcttcttttctttaaaagaaaattcttaatacatagttccttttggcctagcacggtggctcacacctgtaatcccaccacttggggaggcc

SEQ ID NO: 106621 - DNA, 120 bp, synthetic construct
  source 1..120: mol_type = other DNA
tgaggagcgtctctgcccggccacccatcgtctgggatgtgaggagcccctctgcctggctgcctagtctggaaagtgaggagcgtctctgcccagccgccctgccatctaggaagtgag

SEQ ID NO: 106622 - DNA, 120 bp, synthetic construct
  source 1..120: mol_type = other DNA
gaccatgcccaatccccctctgcgagaaacacccaagaatgatcaattaaaaaaaaaaaagtcttctattttctatttggaatacattttcaatttctgcatttaaatatttgatccatc

SEQ ID NO: 106623 - DNA, 120 bp, synthetic construct; identical to SEQ ID NO: 25997
  source 1..120: mol_type = other DNA

SEQ ID NO: 106624 - DNA, 120 bp, synthetic construct; identical to SEQ ID NO: 25998
  source 1..120: mol_type = other DNA

SEQ ID NO: 106625 - DNA, 120 bp, synthetic construct; identical to SEQ ID NO: 25999
  source 1..120: mol_type = other DNA

SEQ ID NO: 106626 - DNA, 120 bp, synthetic construct
  source 1..120: mol_type = other DNA
tgcctccagctttgttcttttggcttaggattgacttggcaatgtgggctcttttttcgttccatatgaactttaaagtagttttttccaattctgtgaagaaagtcattggtagcttga

SEQ ID NO: 106627 - DNA, 120 bp, synthetic construct
  source 1..120: mol_type = other DNA
ctattgagataatcatggtttttgtctttggttctgtttatatgctggattacgtttattgatttccatatgttgaaccagccttgcatcccagggatgaagcccacttgatcatggtgg

SEQ ID NO: 106628 - DNA, 120 bp, synthetic construct
  source 1..120: mol_type = other DNA
tcacttttgaagcttagtttagctggatatgaaattctgggttgaaaattcttttctctaagaatgttgaagattggcccccactctcttctggcttgtagagtttctgccgagagatca

SEQ ID NO: 106629 - DNA, 120 bp, synthetic construct; identical to SEQ ID NO: 33100
  source 1..120: mol_type = other DNA

SEQ ID NO: 106630 - DNA, 120 bp, synthetic construct; identical to SEQ ID NO: 33101
  source 1..120: mol_type = other DNA

SEQ ID NO: 106631 - DNA, 120 bp, synthetic construct; identical to SEQ ID NO: 33102
  source 1..120: mol_type = other DNA

SEQ ID NO: 106632 - DNA, 120 bp, synthetic construct; identical to SEQ ID NO: 33103
  source 1..120: mol_type = other DNA

SEQ ID NO: 106633 - DNA, 120 bp, synthetic construct
  source 1..120: mol_type = other DNA
tccaggaggccttcagaaataaagcattaaaatgaagagttttggcttgttccatggaagctctgggtcacaccctgacccttgtgtttgtcagatgagtaaactgagacagggccgggt

SEQ ID NO: 106634 - DNA, 120 bp, synthetic construct; identical to SEQ ID NO: 33104
  source 1..120: mol_type = other DNA

SEQ ID NO: 106635 - DNA, 120 bp, synthetic construct; identical to SEQ ID NO: 33105
  source 1..120: mol_type = other DNA

SEQ ID NO: 106636 - DNA, 120 bp, synthetic construct; identical to SEQ ID NO: 8973
  source 1..120: mol_type = other DNA

SEQ ID NO: 106637 - DNA, 120 bp, synthetic construct
  source 1..120: mol_type = other DNA
gtgagccgagatcgcaccactgcactccagcttgggcaacagagcgagactccatcaaaaacaaggaaagaaagaaagaaagaaagaaagaaagaaagaaagaaagaaagaaagaaagaa

SEQ ID NO: 106638 - DNA, 120 bp, synthetic construct
  source 1..120: mol_type = other DNA
gattatgatgaggtttcttttcttttcctttctttccttttcttttcttttcctctctttccttttcttttcttttcctttcctgccgctttccaccttcccccttcccccttcccctct

SEQ ID NO: 106639 - DNA, 120 bp, synthetic construct
  source 1..120: mol_type = other DNA
gcctcccaaagtgctgggattacaggtgtgagcaaccatgcccggcctatttctttcttacacgagtctgttgaggttctttgttttttgttttccccaatgtctactgaactaaatcaa

SEQ ID NO: 106640 - DNA, 120 bp, synthetic construct; identical to SEQ ID NO: 15085
  source 1..120: mol_type = other DNA

SEQ ID NO: 106641 - DNA, 120 bp, synthetic construct
  source 1..120: mol_type = other DNA
gcaagtcctgagtgacctacaaagagacttagactcccacacattaataatgggaggctttaacaccccactgccaacattagacagatcaatgagacagaaagtcaacaaggataccca

SEQ ID NO: 106642 - DNA, 120 bp, synthetic construct
  source 1..120: mol_type = other DNA
gaatctctgaatagaccaataacaggatctgaaattgtggcaataatcaatatcttaccaaccaaaaagagtccaggaccagatggattcacagccgatttctaccagagatacaaggag

SEQ ID NO: 106643 - DNA, 120 bp, synthetic construct; identical to SEQ ID NO: 15086
  source 1..120: mol_type = other DNA

SEQ ID NO: 106644 - DNA, 120 bp, synthetic construct
  source 1..120: mol_type = other DNA
tagcattaggagaaatacctaatgtaaatgacgagttgatgggtgcagcacaccaacatggcacatgtatacctatgtatcaaacctgcatgttatgcacatgtaccctataacttaaat

SEQ ID NO: 106645 - DNA, 120 bp, synthetic construct; identical to SEQ ID NO: 15088
  source 1..120: mol_type = other DNA

SEQ ID NO: 106646 - DNA, 120 bp, synthetic construct; identical to SEQ ID NO: 15089
  source 1..120: mol_type = other DNA

SEQ ID NO: 106647 - DNA, 120 bp, synthetic construct
  source 1..120: mol_type = other DNA
tgagtggtaacccattctgccatgggcaagaaatgggcctagatatactcattttagcattattttataaggtaaattgtagttactatttaaaataacctaattaagattacttatatt

SEQ ID NO: 106648 - DNA, 120 bp, synthetic construct
  source 1..120: mol_type = other DNA
tttagtttcttcaggtcctctcttcatccaaaaaattagctggctttgaattatggaattgtggccttggcagggttgttagaggtcacctcatcttacctcccagtggatggagaaata

SEQ ID NO: 106649 - DNA, 120 bp, synthetic construct; identical to SEQ ID NO: 15090
  source 1..120: mol_type = other DNA

SEQ ID NO: 106650 - DNA, 120 bp, synthetic construct; identical to SEQ ID NO: 15091
  source 1..120: mol_type = other DNA

SEQ ID NO: 106651 - DNA, 120 bp, synthetic construct
  source 1..120: mol_type = other DNA
taacagtgaaagttatttgatctaccaggaaaaaaaaatgtatcctaagtttaactgatcaaatgggtgtggttctgtcgcagggagggacagaatccagcagaaagctgagctgctgag

SEQ ID NO: 106652 - DNA, 120 bp, synthetic construct
  source 1..120: mol_type = other DNA
tgggttaaggtagggggatacgagaggaggatgcaaaggaggctttgaactggggaaaagggtggcaatgaggtgtgcttgtagcctaggaatagtcagggaagcagataatttagttaa

SEQ ID NO: 106653 - DNA, 120 bp, synthetic construct
  source 1..120: mol_type = other DNA
caggcacctcagaccatttgcccattttttgacaaaaattgtctagatctcataggatggagaaatcataagtgccgttttctggccatttagaaccattgtcgagcttgtattggggtc

SEQ ID NO: 106654 - DNA, 120 bp, synthetic construct
  source 1..120: mol_type = other DNA
gggggtgcttgttccccagaaaagtggagagaaaagagagagtagaggcatggagagaaggagtggggggtgcttgcctcccaggaaagtggagagaaaagagagagtagagaaatggag

SEQ ID NO: 106655 - DNA, 120 bp, synthetic construct; identical to SEQ ID NO: 7848
  source 1..120: mol_type = other DNA

SEQ ID NO: 106656 - DNA, 120 bp, synthetic construct; identical to SEQ ID NO: 11735
  source 1..120: mol_type = other DNA

SEQ ID NO: 106657 - DNA, 120 bp, synthetic construct
  source 1..120: mol_type = other DNA
gcttcatggtgctgaaatgaaaggagaagtcaggcagtcgcccacaagactggcacagcttcccttgggacttatattccgacgagagcctggttatttccactggatcttattagagtc

SEQ ID NO: 106658 - DNA, 120 bp, synthetic construct; identical to SEQ ID NO: 11736
  source 1..120: mol_type = other DNA

SEQ ID NO: 106659 - DNA, 120 bp, synthetic construct
  source 1..120: mol_type = other DNA
agcctgggcgacagagcaagactctgtctaaaaaaaaaaaaaaaaaaaaaaaaaaaaaaaagaatataaactttagtagtcagggcagaagtactctgtgtctgccacctttctcagcat

SEQ ID NO: 106660 - DNA, 120 bp, synthetic construct; identical to SEQ ID NO: 11737
  source 1..120: mol_type = other DNA

SEQ ID NO: 106661 - DNA, 120 bp, synthetic construct; identical to SEQ ID NO: 11732
  source 1..120: mol_type = other DNA

SEQ ID NO: 106662 - DNA, 120 bp, synthetic construct; identical to SEQ ID NO: 11733
  source 1..120: mol_type = other DNA

SEQ ID NO: 106663 - DNA, 120 bp, synthetic construct; identical to SEQ ID NO: 11734
  source 1..120: mol_type = other DNA

SEQ ID NO: 106664 - DNA, 120 bp, synthetic construct; identical to SEQ ID NO: 24269
  source 1..120: mol_type = other DNA

SEQ ID NO: 106665 - DNA, 120 bp, synthetic construct; identical to SEQ ID NO: 19459
  source 1..120: mol_type = other DNA

SEQ ID NO: 106666 - DNA, 120 bp, synthetic construct
  source 1..120: mol_type = other DNA
gtctggctggccaattgcagaaaaaaacagcttatgtgtgtcattacatgaccaatgaaaaggagatagcgtctggtctaaaactgagaaaaaacaaacctcattttctgatcagcgccc

SEQ ID NO: 106667 - DNA, 120 bp, synthetic construct; identical to SEQ ID NO: 19457
  source 1..120: mol_type = other DNA

SEQ ID NO: 106668 - DNA, 120 bp, synthetic construct; identical to SEQ ID NO: 19458
  source 1..120: mol_type = other DNA

SEQ ID NO: 106669 - DNA, 120 bp, synthetic construct
  source 1..120: mol_type = other DNA
tctcattcctgtatagctatttatttgatcaggtgtgaattagagttcttcattaaacatagttgttactcggcacaagagggtaaggggagacggaggaagtggctgcctacaacagta

SEQ ID NO: 106670 - DNA, 120 bp, synthetic construct
  source 1..120: mol_type = other DNA
gttaactaaagccctcgacaaccaaatcttactaaactcgctcaacaaccccaaggggtcgctactgttattaaaccgcgtttacagcggaggaaactgaggctccgggagattcaatca

SEQ ID NO: 106671 - DNA, 120 bp, synthetic construct
  source 1..120: mol_type = other DNA
ccccccccggggggcgcagcgcctcggcggagcggcggcggcgctgctgtttctttgcaaaaaaaaaaaaaaaaaaaagagagagagagggagagagagagagaggaaaaaacagtgaga

SEQ ID NO: 106672 - DNA, 120 bp, synthetic construct; identical to SEQ ID NO: 6789
  source 1..120: mol_type = other DNA

SEQ ID NO: 106673 - DNA, 120 bp, synthetic construct; identical to SEQ ID NO: 6790
  source 1..120: mol_type = other DNA

SEQ ID NO: 106674 - DNA, 120 bp, synthetic construct
  source 1..120: mol_type = other DNA
gcactttggtgggggtggggagtgggatgaagggagggacagtgaagagaattgaaaagaaaaggagaagaaaaggaacagggaagcacaaaaggtagtgcatatttaaaatttcaaaaa

SEQ ID NO: 106675 - DNA, 120 bp, synthetic construct
  source 1..120: mol_type = other DNA
gcaattagtcatcttacacactgcgatggttaattttgtgtgtcagcttgactgggccatagggtacccagatatttagtcaaacatttttctgggtgtatctgtgagggtgtttatgga

SEQ ID NO: 106676 - DNA, 120 bp, synthetic construct
  source 1..120: mol_type = other DNA
ccaatacgaatccccgaaccgaccttttagagctgaagcaactatctttctttctcttcttcctctcttctttattcacaggaggtagtaccatgataactttgcccttatacctgccaa

SEQ ID NO: 106677 - DNA, 120 bp, synthetic construct
  source 1..120: mol_type = other DNA
aaacatataaggcattcacttcacattccagtcctttccttacttttccaatctcacttcctgccatcttccctcccttctgaccaactcctaaccctctaactatattaggcttcttca

SEQ ID NO: 106678 - DNA, 120 bp, synthetic construct
  source 1..120: mol_type = other DNA
aaacacatcttgctaactaatagctggcaaagttcagaggtcacttttccttgtaaccttttctgacacatttcttctagactggatacccttcctatatgacactgcaaacatccacac

SEQ ID NO: 106679 - DNA, 120 bp, synthetic construct
  source 1..120: mol_type = other DNA
actttagagtccattcacagtgtagtctatgcacatggtaccttctagaattggcatgtagaaattctgatacaatgggaggcttgaacatctacactgtacaggggtttttgccagaca

SEQ ID NO: 106680 - DNA, 120 bp, synthetic construct
  source 1..120: mol_type = other DNA
tttctctgatggcttaaagacttgataaaattagaaatattcctggccacaacatttctgcaagggtgcgaagattttgaaatgtgtcgggggaaatcttaaggaggtagcagttcgaga

SEQ ID NO: 106681 - DNA, 120 bp, synthetic construct
  source 1..120: mol_type = other DNA
caagtgaggctgagttccagctctgtgccatcattatactatcatgtgtctctatgatggcatacatcattctatccttattgctagaatgggcactccctttttatctctagtacctca

SEQ ID NO: 106682 - DNA, 120 bp, synthetic construct
  source 1..120: mol_type = other DNA
taggcaatactattgaggacataggcatgggcaaagatttcatgacaaaaatgtcaaaagcagttgcagcgaaagtaaaaactgacaaatgggatctaattaaagagctctgtacagcaa

SEQ ID NO: 106683 - DNA, 120 bp, synthetic construct
  source 1..120: mol_type = other DNA
gcagggacattgatggagctggaagccattatcctcagcagactaatgcaggaacagaaaaccaaatacttcatgttctaattcataagtgggaactgaacaatgagaacccatggacac

SEQ ID NO: 106684 - DNA, 120 bp, synthetic construct
  source 1..120: mol_type = other DNA
ccttccatgacaggtgacagcgtgagtcatggaggtattaaccttgagaaccaacacaggaggaagaacagactcgggagatggtagaaaagataatgggttagattcagatattttaaa

SEQ ID NO: 106685 - DNA, 120 bp, synthetic construct
  source 1..120: mol_type = other DNA
gtctcagcctcccgagttgctgggactacaggtgcatgccaccatgcccggctaagaaaaaattcaattatttatggggctgttatgaaatgtaatatccaagaaatcaagatgaagtta

SEQ ID NO: 106686 - DNA, 120 bp, synthetic construct; identical to SEQ ID NO: 31741
  source 1..120: mol_type = other DNA

SEQ ID NO: 106687 - DNA, 120 bp, synthetic construct; identical to SEQ ID NO: 6267
  source 1..120: mol_type = other DNA

SEQ ID NO: 106688 - DNA, 120 bp, synthetic construct; identical to SEQ ID NO: 31743
  source 1..120: mol_type = other DNA

SEQ ID NO: 106689 - DNA, 120 bp, synthetic construct
  source 1..120: mol_type = other DNA
gcaaggcaggccaacattcagattcaggaaacacagagaacgccacaaagatactccttgagaagagcaactccaagacacataattgtcagattcaccaaagttgaaatgaaggaaaaa

SEQ ID NO: 106690 - DNA, 120 bp, synthetic construct
  source 1..120: mol_type = other DNA
aatagacatctacagaactctccaccccaaatcaagagaatatacatttttttcagcaccacaccacacctattccaaaactgaacacatagttggaagtaaagctctcctcagcaaatg

SEQ ID NO: 106691 - DNA, 120 bp, synthetic construct
  source 1..120: mol_type = other DNA
ccttgatgaacattgatgcaaaaatcctcaataaaataccggcaaaccgaatccagcagcacatcaaaaagcttatccaccatgatcaagtgggcttcatccctgggatgcaaggctggt

SEQ ID NO: 106692 - DNA, 120 bp, synthetic construct
  source 1..120: mol_type = other DNA
cttcacagaattggaaaaaactactttaaagttcatatggaaccaaaaaaaagcccacatcgccaaggcaatcctaagccaaaagaacaaagctggaggcatcacgctacctgacttcaa

SEQ ID NO: 106693 - DNA, 120 bp, synthetic construct
  source 1..120: mol_type = other DNA
atctagaactagaaataccatttgacccagacatcccattactgggtatatacccaaaggcctataaatcaggctgctataaagacacatgcacacgtatgtttattgcggcactattca

SEQ ID NO: 106694 - DNA, 120 bp, synthetic construct
  source 1..120: mol_type = other DNA
tttttgtccaaacaacttgaccttactgttttaggctgaccatcatgtctccgtgcagtggctcctgcccccctaatactttcagaggcctttaaaataacaaactatgctcaactcact

SEQ ID NO: 106695 - DNA, 120 bp, synthetic construct
  source 1..120: mol_type = other DNA
tgtcctcagaatgctacaaggtacagcccatttgagctcctgtatagacgctccgttttattaggcccagtctcattccagacaccagaccaacttagactgtgccccaaaaaacttgtc

SEQ ID NO: 106696 - DNA, 120 bp, synthetic construct; identical to SEQ ID NO: 14345
  source 1..120: mol_type = other DNA

SEQ ID NO: 106697 - DNA, 120 bp, synthetic construct; identical to SEQ ID NO: 14346
  source 1..120: mol_type = other DNA

SEQ ID NO: 106698 - DNA, 120 bp, synthetic construct
  source 1..120: mol_type = other DNA
catcacagggcggtttttctcctatatcagaattgaacaaatgtacaatcgggttttataacgagacattcagttcccaggggcaggcaggagacagtggccttcctctatctcaactgc

SEQ ID NO: 106699 - DNA, 120 bp, synthetic construct; identical to SEQ ID NO: 14347
  source 1..120: mol_type = other DNA

SEQ ID NO: 106700 - DNA, 120 bp, synthetic construct
  source 1..120: mol_type = other DNA
aggaaaatccggtaccagccactgcaaaaacatgccaaattgtaaacaccatcgatgctaggaagaaactgcatcaaataacgagcaaaagaaccagctaacatcataatgacaggatca

SEQ ID NO: 106701 - DNA, 120 bp, synthetic construct
  source 1..120: mol_type = other DNA
gaatctctgggacacatttaaagcagtgtgtcgagggaaatttataccactaaatgcccacaggagatagcaggaaagatctaaaattgacaccctaacatcacaattaaaagaactaga

SEQ ID NO: 106702 - DNA, 120 bp, synthetic construct
  source 1..120: mol_type = other DNA
gcagatgtgttagtgtttctgaaacacaagccttaccatatcactttcctacacaaactgcttgtgctgttagggtgcctgtagcccttgatccttcatcactgtgcctgtctcatgctt

SEQ ID NO: 106703 - DNA, 120 bp, synthetic construct; identical to SEQ ID NO: 4648
  source 1..120: mol_type = other DNA

SEQ ID NO: 106704 - DNA, 120 bp, synthetic construct; identical to SEQ ID NO: 21435
  source 1..120: mol_type = other DNA

SEQ ID NO: 106705 - DNA, 120 bp, synthetic construct; identical to SEQ ID NO: 21436
  source 1..120: mol_type = other DNA

SEQ ID NO: 106706 - DNA, 120 bp, synthetic construct; identical to SEQ ID NO: 18517
  source 1..120: mol_type = other DNA

SEQ ID NO: 106707 - DNA, 120 bp, synthetic construct; identical to SEQ ID NO: 10815
  source 1..120: mol_type = other DNA

SEQ ID NO: 106708 - DNA, 120 bp, synthetic construct
  source 1..120: mol_type = other DNA
tttaaagtaacttgactatgttcaccctgagtgctcttgcctcagtatggcaactgattatgagttcaggttaagagcaacaccagggaatacagaaacccacgttaagttggccattct

SEQ ID NO: 106709 - DNA, 120 bp, synthetic construct
  source 1..120: mol_type = other DNA
gtgagggggaatggtaacagggttcagaagtggaaacacggttttaacaaaattccagtcactttatacagaggcagagtcacatatcccaagagctggttcttcttttatttggttaaa

SEQ ID NO: 106710 - DNA, 120 bp, synthetic construct
  source 1..120: mol_type = other DNA
acactattatcacagttatcaccctattttaatgatttacaagtagtttatgcgctttccatcactataaagtatgggccagttgaaaattggccgggcatggcggctcacgcctgtaat

SEQ ID NO: 106711 - DNA, 120 bp, synthetic construct
  source 1..120: mol_type = other DNA
tactagtatttacctgggaaatactccatggatgcacacattcacacaggcacatgcagagttgtctttcctctgtgcttctactgtttcttgccatcctcttaatttggttctcttgaa

SEQ ID NO: 106712 - DNA, 120 bp, synthetic construct
  source 1..120: mol_type = other DNA
taagaagcgaccttgtcagcttagctaaatagtaattccttccagtcatattcctcaatccttatctgcttcataggttatattatcaatgacaaaaaggactgtaactctgacatggac

SEQ ID NO: 106713 - DNA, 120 bp, synthetic construct
  source 1..120: mol_type = other DNA
aactgagaatcaaccttgtgtaccataaatgtgcttttcttcagaaggccaatcccacagggactaggacacagaccccatcagcaatggtagtggctgcattactaataaaaatacaca

SEQ ID NO: 106714 - DNA, 120 bp, synthetic construct
  source 1..120: mol_type = other DNA
atgaacacacaagaagcctccttctctcactctaccttagggcaggatggccactcagtgggaaagaggttagcttgcaagatacccaagaataaaaataatctgacttagaaaaaaatc

SEQ ID NO: 106715 - DNA, 120 bp, synthetic construct
  source 1..120: mol_type = other DNA
tcctataagcacaagccttaggcataactcatccttgacatttttgttgtcaccaagaaaatgtttcattccatggtagaaagaaatgaggacattaaaaagacccacaggtataaatga

SEQ ID NO: 106716 - DNA, 120 bp, synthetic construct
  source 1..120: mol_type = other DNA
aggctgtggcttaagatatagcatcttagcatgaccagggactcaagatcaacccactccaggaatataacagacatgaaatatactaaaagggtacattctgtacagggtgagcttctt

SEQ ID NO: 106717 - DNA, 120 bp, synthetic construct
  source 1..120: mol_type = other DNA
cagtgataaatttggaatgagtgacagaaggaaattaatatcaggtacaagcttgttaaaataataaggccgggtgtggtggctcacacttgtaatcccagcactttggaaggccaaggc

SEQ ID NO: 106718 - DNA, 120 bp, synthetic construct
  source 1..120: mol_type = other DNA
ccaacctcagcctctcaaagcactgggattataggcctgagaccccacacccagccattatgacatatcttgaaacaacatagaaatgaagtctcagacaaattccattagattccaatt

SEQ ID NO: 106719 - DNA, 120 bp, synthetic construct
  source 1..120: mol_type = other DNA
aagcccagaaaagtaaactgggaccagatcatagagatcctgaatgccaggttaatgagtttggcctttattttgtaagtaatgagttagccactgaaggtttttttgttttgttttgtt

SEQ ID NO: 106720 - DNA, 120 bp, synthetic construct
  source 1..120: mol_type = other DNA
taaagtagaggttccttttcaaagactttcctccccatctaattaagaataaatagtaacttctcttagaagcaaaattgattcaaagacccgtgctaacattcttaaatatctgccagc

SEQ ID NO: 106721 - DNA, 120 bp, synthetic construct
  source 1..120: mol_type = other DNA
ttatttccataactatctttctttctcctcccttccacttctgggacttcagttgcaggtttgttagactgcctgatgttgtctcaccagtcattgaggctctgtttattttgctttcag

SEQ ID NO: 106722 - DNA, 120 bp, synthetic construct
  source 1..120: mol_type = other DNA
caagactattggactatgtttgggtgtcctctctttgcaccatggtctgaaaattacctcttggcataaaaccaaaatagagttgtttcctttctctcaggaatcacagtcctgtggtag

SEQ ID NO: 106723 - DNA, 120 bp, synthetic construct
  source 1..120: mol_type = other DNA
cggagcttgcagtgagccgagattgcaccactgcactctagcctgggcgacagagcaagactccgtctcaaaaaataacaataataaataaagaaattctgtatgtaggccaggtgcagt

SEQ ID NO: 106724 - DNA, 120 bp, synthetic construct
  source 1..120: mol_type = other DNA
gtctcctctagccccttcccagtcaatccccattttcatctccggaagcaaccactgatctgaattctatcaccacaggttagttttgtctgttctagaatttcatataaatggtatcat

SEQ ID NO: 106725 - DNA, 120 bp, synthetic construct
  source 1..120: mol_type = other DNA
ctaatatttaagaccactctgtagtctcttccagttatgctggtttttgttgggttttttttctgtgttttttgtttttttcgagacagagtctccctctgtcgcccaggctggaatgca

SEQ ID NO: 106726 - DNA, 120 bp, synthetic construct
  source 1..120: mol_type = other DNA
caaattcgttacataaccttaaatgcaaaataaaatttattaaataatttacagagtcagccaagtgtggtggctcacgcctgtaatcccaacactttgggaggccaaggcaggtggatc

SEQ ID NO: 106727 - DNA, 120 bp, synthetic construct
  source 1..120: mol_type = other DNA
cagccatgtataaaattgtaatgtatctactgaattagtgcttaaaatagtacatggtgcaatggctcctatctttaatcccaacactttgggaggcagaggcaggaggatcacttgcac

SEQ ID NO: 106728 - DNA, 120 bp, synthetic construct
  source 1..120: mol_type = other DNA
gaactgtgatcataccactgcattgcagcctgggcaacagagaaagaccctgtctgaaacaaaacacttttggttagtgcatatgactcagcatcatttgatcaagtatcacattgtatg

SEQ ID NO: 106729 - DNA, 120 bp, synthetic construct
  source 1..120: mol_type = other DNA
cctcccaaggtgctgggattatcagcgtgagccacacgcccagccaaactttattttttacatgtttaatggtctaacctccacaaaattacatgtgagccaccacacctgactgaaata

SEQ ID NO: 106730 - DNA, 120 bp, synthetic construct
  source 1..120: mol_type = other DNA
tatataaataaaattaaaggagataactatagagaacaaaggaccaatattacctagaaactgtagcaaggaggccgggcacagtggctcacgcctgtaatcctagcactttgggagtcc

SEQ ID NO: 106731 - DNA, 120 bp, synthetic construct
  source 1..120: mol_type = other DNA
agcattaaagcatataggtaaactagctaataaatggtagatagttctgttagtaatattcccaacaccttaagaggtaggaattattactgccattttacagataagaaaactcaggct

SEQ ID NO: 106732 - DNA, 120 bp, synthetic construct
  source 1..120: mol_type = other DNA
ctcgatctcagctcactgaaagcttctcctcccaggttcaagcgatccttctgcctcagcctctcgagtagctgggattacaggcaggcactgccatgcctgactaatttttatattttt

SEQ ID NO: 106733 - DNA, 120 bp, synthetic construct
  source 1..120: mol_type = other DNA
gttcaagttgagtggacaaaggtaaagaaaggtagtatacagagatggagcggtgatcaaaggcaggcttctcaacagaacagaattgggaaaatagggtagaaaaagtctctaagccaa

SEQ ID NO: 106734 - DNA, 120 bp, synthetic construct
  source 1..120: mol_type = other DNA
agttacttagctgcaaacagatacctgagcccagaaaacaggttacacaacaccatgaacacactattaagacatgtgaagagcaaaggtcaagaacaaggaaacatacacacgtcagca

SEQ ID NO: 106735 - DNA, 120 bp, synthetic construct
  source 1..120: mol_type = other DNA
actcaagcaatcctcccacctcaacctcctgagtacctgggggctacaggcataggccactatgcctggctcatttactttttaaaaccggccgggcgtggtggctcacgcctgtaatcc

SEQ ID NO: 106736 - DNA, 120 bp, synthetic construct
  source 1..120: mol_type = other DNA
cagtttgggaggcgaaggcaggaggatcacctgagaccaggagttaaagaccagcctgagcaacataacaagatcccatctctaaaaaaaaaattttttttttttgagactaagtctcac

SEQ ID NO: 106737 - DNA, 120 bp, synthetic construct
  source 1..120: mol_type = other DNA
ggaggccgaggcgggcagatcacgaggtcaggagttcaagaccagcctgactaacatggtaaaacaccttctctactaaaaatacaaaaattagctgggcatggtggcgtgcacctgtaa

SEQ ID NO: 106738 - DNA, 120 bp, synthetic construct
  source 1..120: mol_type = other DNA
aaaaaaaaaaaaaaaaaaaaagtaagtgtagaaatacacctatagcaggacacagtggctcacgcctgtaatccaagcactttaggaggccaagccggacagatcacttgagttcgggag

SEQ ID NO: 106739 - DNA, 120 bp, synthetic construct
  source 1..120: mol_type = other DNA
ttggtgacagacacaagtctactgaaaggtataatagtagataatcatgttgctttgctatactggcaccaccatttatttgtcatctgtaaaatgacagctagtgccttactcatagta

SEQ ID NO: 106740 - DNA, 120 bp, synthetic construct
  source 1..120: mol_type = other DNA
gttttctcaacagtgtatcttttttccacttaactgggactttgggctacggaaaacgttaaccagtactagtaaggaagctcaatttgcctctacactaattgggagcgctgaaaacac

SEQ ID NO: 106741 - DNA, 120 bp, synthetic construct; identical to SEQ ID NO: 33086
  source 1..120: mol_type = other DNA

SEQ ID NO: 106742 - DNA, 120 bp, synthetic construct; identical to SEQ ID NO: 33087
  source 1..120: mol_type = other DNA

SEQ ID NO: 106743 - DNA, 120 bp, synthetic construct; identical to SEQ ID NO: 33088
  source 1..120: mol_type = other DNA

SEQ ID NO: 106744 - DNA, 120 bp, synthetic construct; identical to SEQ ID NO: 33089
  source 1..120: mol_type = other DNA

SEQ ID NO: 106745 - DNA, 120 bp, synthetic construct; identical to SEQ ID NO: 33090
  source 1..120: mol_type = other DNA

SEQ ID NO: 106746 - DNA, 120 bp, synthetic construct; identical to SEQ ID NO: 33091
  source 1..120: mol_type = other DNA

SEQ ID NO: 106747 - DNA, 120 bp, synthetic construct
  source 1..120: mol_type = other DNA
aaacaattgtgcaaaagaggagagagtacctatataagaacagaaagcatagtctatatattttgtgggtttttttggcggggggggggggggggttgtttttttgagacagtctcactc

SEQ ID NO: 106748 - DNA, 120 bp, synthetic construct
  source 1..120: mol_type = other DNA
agacggggtttcaccgtgttagccaggatggtctcgatctcctgacctcgtgatccacccgtctcggcctcccaaagtgctgggattccaggcgtgagccaccgcgcccggccaggtgtt

SEQ ID NO: 106749 - DNA, 120 bp, synthetic construct
  source 1..120: mol_type = other DNA
cagtggaatgatcttggctcactgcagtctctgcctcccaagtagctgggagtacaggcacacaccaccatgctcagctaatttttttgtgtgtgtgtatatatatatatatatatatat

SEQ ID NO: 106750 - DNA, 120 bp, synthetic construct; identical to SEQ ID NO: 12010
  source 1..120: mol_type = other DNA

SEQ ID NO: 106751 - DNA, 120 bp, synthetic construct; identical to SEQ ID NO: 12011
  source 1..120: mol_type = other DNA

SEQ ID NO: 106752 - DNA, 120 bp, synthetic construct
  source 1..120: mol_type = other DNA
attttatttaaaagtattatgtcaattcgatatttaatatcttcactaatactctgattttttctctttcccctcccctcccctccccttctcccctcccatccccctctcccttcccct

SEQ ID NO: 106753 - DNA, 120 bp, synthetic construct
  source 1..120: mol_type = other DNA
ctattaaaaatacaaaagttagctgggtgtggtggcacacgcctgtaatcccagctactggggaggctgaggcagcagaatggcttgaacctgggaggcggaggctgcagtgagccgaga

SEQ ID NO: 106754 - DNA, 120 bp, synthetic construct; identical to SEQ ID NO: 28384
  source 1..120: mol_type = other DNA

SEQ ID NO: 106755 - DNA, 120 bp, synthetic construct; identical to SEQ ID NO: 28385
  source 1..120: mol_type = other DNA

SEQ ID NO: 106756 - DNA, 120 bp, synthetic construct; identical to SEQ ID NO: 28386
  source 1..120: mol_type = other DNA

SEQ ID NO: 106757 - DNA, 120 bp, synthetic construct; identical to SEQ ID NO: 28387
  source 1..120: mol_type = other DNA

SEQ ID NO: 106758 - DNA, 120 bp, synthetic construct; identical to SEQ ID NO: 21899
  source 1..120: mol_type = other DNA

SEQ ID NO: 106759 - DNA, 120 bp, synthetic construct; identical to SEQ ID NO: 34272
  source 1..120: mol_type = other DNA

SEQ ID NO: 106760 - DNA, 120 bp, synthetic construct
  source 1..120: mol_type = other DNA
aaagccaaggctcgagaactacgtgaagaatgcagaagcctcaggagccaatgcaatcaactggaagaaagggtatcagtgatggaagatgaaatgaatgaaaggaagccagaagggaag

SEQ ID NO: 106761 - DNA, 120 bp, synthetic construct
  source 1..120: mol_type = other DNA
gggatatcaccaccgatcccccagaaatacaaactaccatcagagaatactaaaaacacctctatgcaaataaactagaaaatctagaagaaatggataaattcctcgacacatacactc

SEQ ID NO: 106762 - DNA, 120 bp, synthetic construct
  source 1..120: mol_type = other DNA
tcaacacagtgttggaagttccggccagggtaatcaggcaggagaaggaaataaagggcattcaattaggaaaagaggaagtcaaattgtccctgtttgcagatgacatgattgtatatc

SEQ ID NO: 106763 - DNA, 120 bp, synthetic construct
  source 1..120: mol_type = other DNA
agtataaaacaccaaaaacaatggcaacaaaagccaaaattgacaaatgggatctaattaaactaaagagcttctgcacagcaaaagaaactaccatcagagtgaacaggcaacctacaa

SEQ ID NO: 106764 - DNA, 120 bp, synthetic construct
  source 1..120: mol_type = other DNA
ataggtgggaattgaacaatgagaacacatggacacaggaaggggaatatctcactctggggactgttgtggggtgggggtagtggggagggatagcattaggagatatagctaatgcta

SEQ ID NO: 106765 - DNA, 120 bp, synthetic construct
  source 1..120: mol_type = other DNA
ccagctcagccacagcagcatagggcaccgatcagagtcataaggaccctgttccaggccctagctcccaggcagcacttctgtgttaaaaaaaaaaaaaaaaaaaaaaaaaaaaaaaaa

SEQ ID NO: 106766 - DNA, 120 bp, synthetic construct; identical to SEQ ID NO: 32123
  source 1..120: mol_type = other DNA

SEQ ID NO: 106767 - DNA, 120 bp, synthetic construct
  source 1..120: mol_type = other DNA
cagccaccaccctgtctgggaagtgaggagcccctctgcccggccacccaactgactgggaagtgaggagcgcctccacctggccgcccacagtctgggaagtgaggaatgcctctgcca

SEQ ID NO: 106768 - DNA, 120 bp, synthetic construct; identical to SEQ ID NO: 32124
  source 1..120: mol_type = other DNA

SEQ ID NO: 106769 - DNA, 120 bp, synthetic construct; identical to SEQ ID NO: 15570
  source 1..120: mol_type = other DNA

SEQ ID NO: 106770 - DNA, 120 bp, synthetic construct; identical to SEQ ID NO: 15571
  source 1..120: mol_type = other DNA

SEQ ID NO: 106771 - DNA, 120 bp, synthetic construct; identical to SEQ ID NO: 24011
  source 1..120: mol_type = other DNA

SEQ ID NO: 106772 - DNA, 120 bp, synthetic construct
  source 1..120: mol_type = other DNA
cagggtgtttatagtggggggggctatagatgtgcggggggcaggtggtatacagaaaatctctgtaacttttgctcactgttgctgtgaactaaaaactgttttaaaaaataaagtcta

SEQ ID NO: 106773 - DNA, 120 bp, synthetic construct; identical to SEQ ID NO: 11681
  source 1..120: mol_type = other DNA

SEQ ID NO: 106774 - DNA, 120 bp, synthetic construct; identical to SEQ ID NO: 11682
  source 1..120: mol_type = other DNA

SEQ ID NO: 106775 - DNA, 120 bp, synthetic construct
  source 1..120: mol_type = other DNA
ttttaaaaacttagtcaggagaggagccaagatggccgaataggaacagctctggtctacagctcccagcgtgagcgacgcagaagacgggtgatttctgcatttccatctgaggtaccg

SEQ ID NO: 106776 - DNA, 120 bp, synthetic construct
  source 1..120: mol_type = other DNA
tgaaatgaagcaagaagggaagtttagagaaaaaagaataaaaagaaatgagcaaaccctccaagaaatatgggactatgggaaaagaccaaatctacgtctgactggtgtacctgaaag

SEQ ID NO: 106777 - DNA, 120 bp, synthetic construct
  source 1..120: mol_type = other DNA
agcgacctacaaagagacttagactcccacacaataataatgggagactttaacaccccactgtcaacattagacagatcaacgagacagaaagtcaacaaggatacccaggaatggaac

SEQ ID NO: 106778 - DNA, 120 bp, synthetic construct
  source 1..120: mol_type = other DNA
gatagaccactagcaagactaataaagaaaaaaagagagaagaatcaaatagatgcaataaaaaatgataaaggggatatcaccaccgatcccacagaaatacaaactaccatcagagaa

SEQ ID NO: 106779 - DNA, 120 bp, synthetic construct
  source 1..120: mol_type = other DNA
gttctggccagggcaattaggcaggagaaggaaataaaggctattcaattaggaaaagaggaagtcaaattgtccctgtttgcagacgacatgattgtatatctagaaaaccccattgtc

SEQ ID NO: 106780 - DNA, 120 bp, synthetic construct
  source 1..120: mol_type = other DNA
agcaatggcaacaaaagccaaaattgacaaatgggacctcattacactaaagagcttctgcacagcaaaagaaactaccatcagagtgaacaggcaacctacaaaatgggagaaaatttt

SEQ ID NO: 106781 - DNA, 120 bp, synthetic construct
  source 1..120: mol_type = other DNA
acatcacactctggggactgttgtatggtggggggaggcgggagggatagcattgggagatatatctaatgctagatgaggagttagtgggtgcagcacaccagcatggcacatgtatac

SEQ ID NO: 106782 - DNA, 120 bp, synthetic construct
  source 1..120: mol_type = other DNA
ttaactcatcattttttatggctgcatagtattccatggtgtatatgtgtcacattttcttaatccagtctatcattgttggacatttggcttggttccaagtctttgctattgtgaata

SEQ ID NO: 106783 - DNA, 120 bp, synthetic construct; identical to SEQ ID NO: 11683
  source 1..120: mol_type = other DNA

SEQ ID NO: 106784 - DNA, 120 bp, synthetic construct; identical to SEQ ID NO: 11684
  source 1..120: mol_type = other DNA

SEQ ID NO: 106785 - DNA, 120 bp, synthetic construct; identical to SEQ ID NO: 11685
  source 1..120: mol_type = other DNA

SEQ ID NO: 106786 - DNA, 120 bp, synthetic construct; identical to SEQ ID NO: 11686
  source 1..120: mol_type = other DNA

SEQ ID NO: 106787 - DNA, 120 bp, synthetic construct; identical to SEQ ID NO: 4492
  source 1..120: mol_type = other DNA

SEQ ID NO: 106788 - DNA, 120 bp, synthetic construct; identical to SEQ ID NO: 4493
  source 1..120: mol_type = other DNA

SEQ ID NO: 106789 - DNA, 120 bp, synthetic construct
  source 1..120: mol_type = other DNA
cacctacccatccactcatccatccattcactcacccacaaaacctttcatccatccatccacccatccatccacccaccaatccttccttctatcgatccatccatccatccatccatc

SEQ ID NO: 106790 - DNA, 120 bp, synthetic construct
  source 1..120: mol_type = other DNA
tagaagaaaccccattatagcccatctccaactcagtctatatacacatcctcaaccgtctctgcttctctctgcagcccattcatgcttttctccatactcacgatgaatctataatca

SEQ ID NO: 106791 - DNA, 120 bp, synthetic construct
  source 1..120: mol_type = other DNA
ttgcttgagcccgggaaggggaggttgcagtgagccaagactgcaccaatgcactccagcctgtgacagagcgagactccatctcaaaataaataaacaaaataaaagaaacaaaaatta

SEQ ID NO: 106792 - DNA, 120 bp, synthetic construct; identical to SEQ ID NO: 19351
  source 1..120: mol_type = other DNA

SEQ ID NO: 106793 - DNA, 120 bp, synthetic construct; identical to SEQ ID NO: 19352
  source 1..120: mol_type = other DNA

SEQ ID NO: 106794 - DNA, 120 bp, synthetic construct; identical to SEQ ID NO: 19347
  source 1..120: mol_type = other DNA

SEQ ID NO: 106795 - DNA, 120 bp, synthetic construct; identical to SEQ ID NO: 19348
  source 1..120: mol_type = other DNA

SEQ ID NO: 106796 - DNA, 120 bp, synthetic construct; identical to SEQ ID NO: 19349
  source 1..120: mol_type = other DNA

SEQ ID NO: 106797 - DNA, 120 bp, synthetic construct
  source 1..120: mol_type = other DNA
caagcgatcctcatgcctcagtcaaatagatgggacccaaatactgggactacaggcttgcaccaccatgcccgactaattttttctattttttatacagatagggtctcactatgttgc

SEQ ID NO: 106798 - DNA, 120 bp, synthetic construct
  source 1..120: mol_type = other DNA
actccgtctcaaaaaacaataggccaggtgcggtggctcatgcctgtaatcccagcactttgggagacgggcagatcacctgaggtcaggagttcgagaccatcctggccaacatggcga

SEQ ID NO: 106799 - DNA, 120 bp, synthetic construct; identical to SEQ ID NO: 19353
  source 1..120: mol_type = other DNA

SEQ ID NO: 106800 - DNA, 120 bp, synthetic construct; identical to SEQ ID NO: 19354
  source 1..120: mol_type = other DNA

SEQ ID NO: 106801 - DNA, 120 bp, synthetic construct
  source 1..120: mol_type = other DNA
gagtactgagtactgggggtgggggtgcctgagtactgggtactgggggtgcctgagtactgggtactgggggtaggggtgcctgagtactgggggtggaggtgggggtgcctgagcact

SEQ ID NO: 106802 - DNA, 120 bp, synthetic construct
  source 1..120: mol_type = other DNA
accctagacgggagcagggatggggtcttttaaagttaaggttttattcttttttaaaataatacagccgggaacagtggctcacacctgtaatcccagcactttgggaggccaaggcgg

SEQ ID NO: 106803 - DNA, 120 bp, synthetic construct; identical to SEQ ID NO: 19357
  source 1..120: mol_type = other DNA

SEQ ID NO: 106804 - DNA, 120 bp, synthetic construct; identical to SEQ ID NO: 19358
  source 1..120: mol_type = other DNA

SEQ ID NO: 106805 - DNA, 120 bp, synthetic construct; identical to SEQ ID NO: 19359
  source 1..120: mol_type = other DNA

SEQ ID NO: 106806 - DNA, 120 bp, synthetic construct; identical to SEQ ID NO: 31602
  source 1..120: mol_type = other DNA

SEQ ID NO: 106807 - DNA, 120 bp, synthetic construct; identical to SEQ ID NO: 31603
  source 1..120: mol_type = other DNA

SEQ ID NO: 106808 - DNA, 120 bp, synthetic construct; identical to SEQ ID NO: 23054
  source 1..120: mol_type = other DNA

SEQ ID NO: 106809 - DNA, 120 bp, synthetic construct; identical to SEQ ID NO: 28443
  source 1..120: mol_type = other DNA

SEQ ID NO: 106810 - DNA, 120 bp, synthetic construct
  source 1..120: mol_type = other DNA
agaaacagcatccacaccaaaaacccatctgtacatccccatcatcaaagaccaaaagtagataaaaccacaaagatggggaaaaaacagagcagaaaaactggaaactctaaaaagcag

SEQ ID NO: 106811 - DNA, 120 bp, synthetic construct
  source 1..120: mol_type = other DNA
agaccatcgaggctaggaagaaactgcatcaactaacgagcaaaataaccagctaacatcataatgacaggatcaaattcacacataacaatattaactttaaatgtaaatggactaaat

SEQ ID NO: 106812 - DNA, 120 bp, synthetic construct
  source 1..120: mol_type = other DNA
tagaaaagcgagagcaaacacattcaaaagctagcagaaggcaagaaataactaaaatcagagcagaactgaaggaaatagagacacaaaaaacccttcaaaaaattaatgaatccagga

SEQ ID NO: 106813 - DNA, 120 bp, synthetic construct
  source 1..120: mol_type = other DNA
ttcaacacagtgttggaagttctggccagggcaattatgcaggagaaggaaataaagggtattcaattaggaaaagaggaagtcaaattgtccctgtttgcagacgacatgattgtatat

SEQ ID NO: 106814 - DNA, 120 bp, synthetic construct
  source 1..120: mol_type = other DNA
cgtaggcatgggcaaggacttcatgtctaaaacaccaaaagcaatgggaacaaaagacaaaattgacaaatgggatctaattaaactaaagagcttctgcacagcaaaagaaactaccat

SEQ ID NO: 106815 - DNA, 120 bp, synthetic construct
  source 1..120: mol_type = other DNA
aaaataaaataataaatacaaaaaaaaaatacaaaaaattaaccgggcgtggtggcacacacctgtagtcccatctactaggaaggctgaggcaggagaatcgcttgaacctgggaggca

SEQ ID NO: 106816 - DNA, 120 bp, synthetic construct
  source 1..120: mol_type = other DNA
gagtgagcctggctgcagtgagttatgattgtgccactgcactccagcctcggcaacagagcaagaccccatctctaaaaataaattttaaaatgagtaaataagctccctctcccctct

SEQ ID NO: 106817 - DNA, 120 bp, synthetic construct
  source 1..120: mol_type = other DNA
cggcagccgccccgtctgagaagtgaggagcccctccgcccggcagccgccccgtcagagaagtgaggaacccctccgcccggcagccgccccgtccaggaagtgaggagcgtctccgcc

SEQ ID NO: 106818 - DNA, 120 bp, synthetic construct; identical to SEQ ID NO: 26841
  source 1..120: mol_type = other DNA

SEQ ID NO: 106819 - DNA, 120 bp, synthetic construct
  source 1..120: mol_type = other DNA
ggcggaggggctcttcacttctcagacgatgggtggccaggcagagacgctcctcacttcccacacggggtggcggccgggcagaggctgcactcccggcactttgggaggccaaggcag

SEQ ID NO: 106820 - DNA, 120 bp, synthetic construct; identical to SEQ ID NO: 26842
  source 1..120: mol_type = other DNA

SEQ ID NO: 106821 - DNA, 120 bp, synthetic construct; identical to SEQ ID NO: 26843
  source 1..120: mol_type = other DNA

SEQ ID NO: 106822 - DNA, 120 bp, synthetic construct; identical to SEQ ID NO: 26844
  source 1..120: mol_type = other DNA

SEQ ID NO: 106823 - DNA, 120 bp, synthetic construct; identical to SEQ ID NO: 26845
  source 1..120: mol_type = other DNA

SEQ ID NO: 106824 - DNA, 120 bp, synthetic construct
  source 1..120: mol_type = other DNA
cactgatgagcattttttcatgtgttttttggctgcataaatgtcttcttttgagaagtgtctgttcatgtccttcgcccactttttgatggggttgtttgtttttttcttgtaaatttg

SEQ ID NO: 106825 - DNA, 120 bp, synthetic construct
  source 1..120: mol_type = other DNA
tgcttctcagcttaaggagattttgggctgagacagtggggttttctagatatacaatcatgtcgtctgcaaacagggacaatttgacttcctcttttcctaattgaatgccctttattt

SEQ ID NO: 106826 - DNA, 120 bp, synthetic construct
  source 1..120: mol_type = other DNA
aaaaaccagctcctggattcattaattttttgaagggttttttgtgtctctatttccttcagttctgctctgattttagttatttcttgccttctgctagcttttgaacgtgtttgccct

SEQ ID NO: 106827 - DNA, 120 bp, synthetic construct
  source 1..120: mol_type = other DNA
gctggtgattttgctcgttagttgatgcagtttcttcctagtctcgatggtctttacattttggcatgattttgcagcggctggtaccggttgttcttttccatgtttagcgtttccttc

SEQ ID NO: 106828 - DNA, 120 bp, synthetic construct
  source 1..120: mol_type = other DNA
ttctccatccagctttgttccgttgctggtgaggaactgcgttcctttggtagaggagaggcgctctgcgttttagagtttccagtttttctgttctgttttttccccgtctttgtggtt

SEQ ID NO: 106829 - DNA, 120 bp, synthetic construct
  source 1..120: mol_type = other DNA
ggtgcgccattttttaagccggtccgaaaggcgcaatattcgggtgggagtgacccgattttccaggtgcgtctgtcacccctttctttgactcggaaagggaactccctgacctcttgc

SEQ ID NO: 106830 - DNA, 120 bp, synthetic construct
  source 1..120: mol_type = other DNA
agctgaagtcatagcctggggagtcccgagagcggccacagaccgcccggtgccggggctcgggctgagtgggctgtgaggaccgaggctgcgctgaaaagttggtgtcaattaagcagg

SEQ ID NO: 106831 - DNA, 120 bp, synthetic construct
  source 1..120: mol_type = other DNA
ggcggactgctgtgagacacacctcacagcctgtcccctcccctcctccctctcccctactcttgcctacccgtccccctccccgcactctttcccaccccaccccacccagcagcctta

SEQ ID NO: 106832 - DNA, 120 bp, synthetic construct; identical to SEQ ID NO: 24279
  source 1..120: mol_type = other DNA

SEQ ID NO: 106833 - DNA, 120 bp, synthetic construct; identical to SEQ ID NO: 24280
  source 1..120: mol_type = other DNA

SEQ ID NO: 106834 - DNA, 120 bp, synthetic construct
  source 1..120: mol_type = other DNA
ggcatggtggctcacgcctgtaatcccagcactttgggaggccgaggcggatggatcaatcacaagatcaggagatcaagaccatcctggccaacatggtgaaaccccgtctctactaaa

SEQ ID NO: 106835 - DNA, 120 bp, synthetic construct; identical to SEQ ID NO: 24281
  source 1..120: mol_type = other DNA

SEQ ID NO: 106836 - DNA, 120 bp, synthetic construct
  source 1..120: mol_type = other DNA
ctctctgaaacatgtgctgtgtcaactcagggttaaatggattaagggcggcgcaagatgtgctttgttaaacagatgcttgaaggcagcatgctcgttaagagtcatcaccactcccta

SEQ ID NO: 106837 - DNA, 120 bp, synthetic construct; identical to SEQ ID NO: 15521
  source 1..120: mol_type = other DNA

SEQ ID NO: 106838 - DNA, 120 bp, synthetic construct
  source 1..120: mol_type = other DNA
ctgcataatattccatggtgtatatgtgccacattttcttaatccactctatcaatgatgtacatctgggttggttccaagtctttgctattgtgaatagtgccacaataaacatacgtg

SEQ ID NO: 106839 - DNA, 120 bp, synthetic construct
  source 1..120: mol_type = other DNA
ccccattgcttgtttttgtcaggtttgtcaaagatcagatagttgtagatgtgtgttattatttctgagggctctgttctgttccattggtctatatctctgttttggtaccagtaccat

SEQ ID NO: 106840 - DNA, 120 bp, synthetic construct
  source 1..120: mol_type = other DNA
tagctcttattattttgagatacgacccatcaatacctaatttattgagagtttttagcaggaagggttgttgaattttgtcaaaggccttttctgcatctgttgagataatcatgtggt

SEQ ID NO: 106841 - DNA, 120 bp, synthetic construct
  source 1..120: mol_type = other DNA
aaaattgacaccctaacatcacaattaaaagaactagagaagcaagagcaaacacattcaaaagctagcagatggcaagaaataactaagatcagagcagaagtgaaggaaatagagaca

SEQ ID NO: 106842 - DNA, 120 bp, synthetic construct; identical to SEQ ID NO: 15517
  source 1..120: mol_type = other DNA

SEQ ID NO: 106843 - DNA, 120 bp, synthetic construct
  source 1..120: mol_type = other DNA
agctttctacatatggctagacagttttcccagcaccttttattaaatagggaatcctttccccattgcttctttttctcaggtttgtcaaagatcaggtagttgtagatatgcggcgtt

SEQ ID NO: 106844 - DNA, 120 bp, synthetic construct
  source 1..120: mol_type = other DNA
ggactataaatcatgctgctataaagacacatgcacatgtatgtttattgtggcactattcacaatagcaaagacttggaaccaacccaaatgtccaacaatgatagactggattaagaa

SEQ ID NO: 106845 - DNA, 120 bp, synthetic construct
  source 1..120: mol_type = other DNA
ttgctgaagagtgctttacttccaactatgtggtcaatttggggtaggtgtggtgtggtgctgaaaagaatgtatattctgttgatttggggtggagagttctgtagatgtctattaggt

SEQ ID NO: 106846 - DNA, 120 bp, synthetic construct
  source 1..120: mol_type = other DNA
atcagctgttcatctgatgggcttccctttgtgggtaacctgacctttgtctctggctgctcttaacattttttccttcatttcaactttggtgaatctgacaattttgtgtcttggagt

SEQ ID NO: 106847 - DNA, 120 bp, synthetic construct; identical to SEQ ID NO: 15518
  source 1..120: mol_type = other DNA

SEQ ID NO: 106848 - DNA, 120 bp, synthetic construct
  source 1..120: mol_type = other DNA
tatggctagccagtttgcccagcaccttttattaaatagggaatcctttccccattgcttctttttctcaggtttgtcaaagatcaggtagttgtagatatgcggcattatttctgaggg

SEQ ID NO: 106849 - DNA, 120 bp, synthetic construct
  source 1..120: mol_type = other DNA
catcaatacaggaaacaacaggtgctggagaggatgtggagaaataggaacacttttacactgttggtgggactgtaaactagttcaaccattgtggaagtcagtgtggcgattcctcag

SEQ ID NO: 106850 - DNA, 120 bp, synthetic construct
  source 1..120: mol_type = other DNA
ataaacatacatgtgaatgtgtctttatagcagcatgatttataatcctttgggtatatacccagtaatgggacgactgggtcaaatggtatttctagttctagatccctgaggaatcac

SEQ ID NO: 106851 - DNA, 120 bp, synthetic construct; identical to SEQ ID NO: 106848
  source 1..120: mol_type = other DNA

SEQ ID NO: 106852 - DNA, 120 bp, synthetic construct
  source 1..120: mol_type = other DNA
gcttccggtttttgtccattcactatgattttggctgtgggttttcaatagatagctcttattattttgagatttgtcccatcaatacctaatttattgagaatttttagcatgaagggt

SEQ ID NO: 106853 - DNA, 120 bp, synthetic construct
  source 1..120: mol_type = other DNA
tagggtgtcaattttagatctttcctgctttctcttgtgggcatttagtgctatgaatttccctctacacactgctttgaatgtgtcccagagattttggtatgttgtgtctttgttctc

SEQ ID NO: 106854 - DNA, 120 bp, synthetic construct; identical to SEQ ID NO: 15519
  source 1..120: mol_type = other DNA

SEQ ID NO: 106855 - DNA, 120 bp, synthetic construct
  source 1..120: mol_type = other DNA
cggcctcccaaaagtgctgggattacaggcgtgagcctccgtgcctggccacaaaaagatctgttttctatgttgcagtcattatctgaaaaatttctatcatttcaaatagttaaaaaa

SEQ ID NO: 106856 - DNA, 120 bp, synthetic construct; identical to SEQ ID NO: 15520
  source 1..120: mol_type = other DNA

SEQ ID NO: 106857 - DNA, 120 bp, synthetic construct
  source 1..120: mol_type = other DNA
caatagagtagaatcttgtctctacaaaaaaaaaaaaaaaaaattaagccaggcataatggcacctgtagtcccggctactcaagaggctgaggtgggaggattacctgaaaccaggagt

SEQ ID NO: 106858 - DNA, 120 bp, synthetic construct; identical to SEQ ID NO: 31430
  source 1..120: mol_type = other DNA

SEQ ID NO: 106859 - DNA, 120 bp, synthetic construct; identical to SEQ ID NO: 31431
  source 1..120: mol_type = other DNA

SEQ ID NO: 106860 - DNA, 120 bp, synthetic construct; identical to SEQ ID NO: 31432
  source 1..120: mol_type = other DNA

SEQ ID NO: 106861 - DNA, 120 bp, synthetic construct; identical to SEQ ID NO: 31433
  source 1..120: mol_type = other DNA

SEQ ID NO: 106862 - DNA, 120 bp, synthetic construct; identical to SEQ ID NO: 13337
  source 1..120: mol_type = other DNA

SEQ ID NO: 106863 - DNA, 120 bp, synthetic construct
  source 1..120: mol_type = other DNA
cctgaggcatccctagaaactgagcagatgccagcaccatgcttcctgtacagcctacagaactgtaagccaattaaatctctttataaattaaccaatctcaggtatttcctttccttt

SEQ ID NO: 106864 - DNA, 120 bp, synthetic construct; identical to SEQ ID NO: 17321
  source 1..120: mol_type = other DNA

SEQ ID NO: 106865 - DNA, 120 bp, synthetic construct; identical to SEQ ID NO: 9761
  source 1..120: mol_type = other DNA

SEQ ID NO: 106866 - DNA, 120 bp, synthetic construct; identical to SEQ ID NO: 25564
  source 1..120: mol_type = other DNA

SEQ ID NO: 106867 - DNA, 120 bp, synthetic construct; identical to SEQ ID NO: 25565
  source 1..120: mol_type = other DNA

SEQ ID NO: 106868 - DNA, 120 bp, synthetic construct; identical to SEQ ID NO: 13801
  source 1..120: mol_type = other DNA

SEQ ID NO: 106869 - DNA, 120 bp, synthetic construct
  source 1..120: mol_type = other DNA
tgtaggttccctgttcactctgatggtagtttcttttgctgtgcagaagctgtttagtttaattagatcccatttgtcaattttggcttttgttgccattgcttttggtgttttagacat

SEQ ID NO: 106870 - DNA, 120 bp, synthetic construct; identical to SEQ ID NO: 14264
  source 1..120: mol_type = other DNA

SEQ ID NO: 106871 - DNA, 120 bp, synthetic construct
  source 1..120: mol_type = other DNA
ccacattttcttaatccagactatcattgttggacatttgggttggttccaagtctttgctattgtgaatagtgccgcaataaacatacgtgtgcatgtgtctttatagcagcatgattt

SEQ ID NO: 106872 - DNA, 120 bp, synthetic construct
  source 1..120: mol_type = other DNA
atagtttgaagtcaggtagtgtgatgcctccagctttgttcttttgtcttaggattgacttggcaatgcgggctcttttttggttccatatgaactttaaagtagttttttccaattctg

SEQ ID NO: 106873 - DNA, 120 bp, synthetic construct
  source 1..120: mol_type = other DNA
gttcctccttgtacctctggtagaattcggctgtgaatccatctggtcctggactctttttggttggtaaactattgattattgccacaatttcagagcctgttattggtctattcagag

SEQ ID NO: 106874 - DNA, 120 bp, synthetic construct
  source 1..120: mol_type = other DNA
atccttgttgactttctgtctcgttgatctgtctaatgttgacagtggggtgttaaagtctcccattattaatgtgtgggagtctaagtctctttgtaggtcactgaggacttgctttat

SEQ ID NO: 106875 - DNA, 120 bp, synthetic construct
  source 1..120: mol_type = other DNA
gtatctttgtggcgttctctgtatttcctgaatctgaacgttggcctgccttgctagattggggaagttctcctggataatatcctgcagagtgttttccaacttggttccattctccac

SEQ ID NO: 106876 - DNA, 120 bp, synthetic construct
  source 1..120: mol_type = other DNA
gcaggcaggcctccttgagctgtggtgggctccacccagttcgagcttcctggctgctttgtttacctaagcaagcctgggcaatggcgggcgcccctcccccagcctcgctgccgcctt

SEQ ID NO: 106877 - DNA, 120 bp, synthetic construct; identical to SEQ ID NO: 14262
  source 1..120: mol_type = other DNA

SEQ ID NO: 106878 - DNA, 120 bp, synthetic construct; identical to SEQ ID NO: 14263
  source 1..120: mol_type = other DNA

SEQ ID NO: 106879 - DNA, 120 bp, synthetic construct
  source 1..120: mol_type = other DNA
tatccttatggatattatttttcatgatttaattagcggtggtatgacaaatagcctacaagatacagaaaaagaataggcagaattgggggcaggggggtggggggcgggaataactgc

SEQ ID NO: 106880 - DNA, 120 bp, synthetic construct
  source 1..120: mol_type = other DNA
atctgagggctctgttctgttccactggtctatatctctgttttggtaccagtaccatgctgttttggttactgtagccttgtagtatagtttgaagtcaggtagtgtgatgcctccagc

SEQ ID NO: 106881 - DNA, 120 bp, synthetic construct
  source 1..120: mol_type = other DNA
tgcctgattgccctggccagaacttccaacactatgttgaataggagaggtgagagagggcatccctgtcttgtgccagttttcaaagggaatgcttccagtttttgcccattcagtatg

SEQ ID NO: 106882 - DNA, 120 bp, synthetic construct
  source 1..120: mol_type = other DNA
gagaggtaccagggccagactcactttataacaacctactgtctagataactaacctgctcccatgataatacattaatccattagtgacggttttgcccttatgacccaattacctctt

SEQ ID NO: 106883 - DNA, 120 bp, synthetic construct
  source 1..120: mol_type = other DNA
ctcaagccatcctcccacctcagcctcctgagtagctgggactacaggtgtgcaccaacatgcccagcaatttttttcttttctttttttttctttttatatatatagagagacagcgtt

SEQ ID NO: 106884 - DNA, 120 bp, synthetic construct; identical to SEQ ID NO: 25443
  source 1..120: mol_type = other DNA

SEQ ID NO: 106885 - DNA, 120 bp, synthetic construct
  source 1..120: mol_type = other DNA
cagaattggaaaaaactactttaaagttcatatggaaccaaaaaagagcccacattgccaagtcaatcctaagccgaaagaacaaagctggaggcatcaagctacctgacttcaaactat

SEQ ID NO: 106886 - DNA, 120 bp, synthetic construct
  source 1..120: mol_type = other DNA
caccgcatgttctcactcataggtgggaattgaacactgagaacgcatggacacaggaagggtagcatcacacactggggactgttgtggggtggggggagggggaaggatagcatcagg

SEQ ID NO: 106887 - DNA, 120 bp, synthetic construct
  source 1..120: mol_type = other DNA
tatatcccattagttctgtccctctaagagaaccttgactaatacatattcaaaagctatttttcttagttgttttaaatggtgcttcttgttatataaagttaactaactttgagtata

SEQ ID NO: 106888 - DNA, 120 bp, synthetic construct
  source 1..120: mol_type = other DNA
ctttcccccgtttctattccacaaaacctccattgtcatcatggcccgttctcaatgagctgttggctacacctcccagacggggtggtggccgggcagaggggctcctcacttcccagt

SEQ ID NO: 106889 - DNA, 120 bp, synthetic construct
  source 1..120: mol_type = other DNA
gtccagctttggctcagcatgagagggagaccgtggaaagagagggagagggagaccatggaaagagagggagagggagaccgtggggagagtgagagggagagggagagggagaggagg

SEQ ID NO: 106890 - DNA, 120 bp, synthetic construct
  source 1..120: mol_type = other DNA
gactactgggtaaataatgaaatgaaggcagaaataaagatgttctttgaaaccaacgacaacaaagacacaacatatcagaatctctgggacacattcgaagcagtgtgtagagggaaa

SEQ ID NO: 106891 - DNA, 120 bp, synthetic construct
  source 1..120: mol_type = other DNA
gaaggaaataaagggtattcaattaggaaaagaggaagtcaaattgtccctgtttgcagacgacatgaatgtatatctagaaaaccccatcatctcagcccaaaatctccttcagctgat

SEQ ID NO: 106892 - DNA, 120 bp, synthetic construct
  source 1..120: mol_type = other DNA
atgtctaaaacaccaaaagcaatggcaacaaaagccaaaattgacaaatgggatctcattaaactaaagcgcttctgcacagcaaaagaaactaccatcagagtgaacaggcagcctaca

SEQ ID NO: 106893 - DNA, 120 bp, synthetic construct
  source 1..120: mol_type = other DNA
catgtcctttgcaggaacatggatggagctggaggtcattatccttggcaaagtagcatagaaagagaaaaccaaataccacatattctcacttataagttagagctaagtgatgagaac

SEQ ID NO: 106894 - DNA, 120 bp, synthetic construct
  source 1..120: mol_type = other DNA
tctgcccgccttggcctcccaaagtgctgggattacaggtgtgagccactgcacccagcaaatacttcctattctttttttttcttttttatttatttatttatttatttatttattttt

SEQ ID NO: 106895 - DNA, 120 bp, synthetic construct
  source 1..120: mol_type = other DNA
tctcagacggggcggctgccgggcggagggactcctgacttctcagacagggcagttgccaggcagagggtctcctcacttctcagacggggcagccgggcagaggcgctcctcacatcc

SEQ ID NO: 106896 - DNA, 120 bp, synthetic construct; identical to SEQ ID NO: 25445
  source 1..120: mol_type = other DNA

SEQ ID NO: 106897 - DNA, 120 bp, synthetic construct; identical to SEQ ID NO: 106890
  source 1..120: mol_type = other DNA

SEQ ID NO: 106898 - DNA, 120 bp, synthetic construct
  source 1..120: mol_type = other DNA
gtattgatgggacatatctcaaaatagtaagagctatctatgacaaacccacagccaatatcatactgaataggcaaaaactggaagcattccctttgaaaacgggcacaagacagggat

SEQ ID NO: 106899 - DNA, 120 bp, synthetic construct
  source 1..120: mol_type = other DNA
agtgcaaccattgtggaagtcagtgtggcgattcctcagggatctagaacttgaaataccatttgacccagccatcccattactgtgtatatacccaaaggattagaaatcatgctgcta

SEQ ID NO: 106900 - DNA, 120 bp, synthetic construct
  source 1..120: mol_type = other DNA
ggtttgctctttttgtatagtgccacatttcttggaggctttgtttcttttcattctcttttctctaatcttgtcttcttgctttatttcattcagttcatcttcaatctctgatatcct

SEQ ID NO: 106901 - DNA, 120 bp, synthetic construct
  source 1..120: mol_type = other DNA
tgtaaagaaaatgatagaattggaaaaatcactattatcagccatcacagaaataattcagtcaagaaatattgggggaggagccaagatggccgaataggaacagctccggtctacagc

SEQ ID NO: 106902 - DNA, 120 bp, synthetic construct
  source 1..120: mol_type = other DNA
agggtcctgtctgttagaaggaaaactaacaaacagaaaggacatccacaccaaaaacccatctgtacatcaccatcatcaaagaccaaaagtagataaaaccacaaagattggaaaaaa

SEQ ID NO: 106903 - DNA, 120 bp, synthetic construct
  source 1..120: mol_type = other DNA
ttaaagaaaagaattttcaacccagaatttcacatccagccaaactaagcttcagaagtgaaggacaaataaaatactttacagacaagcaaatgctgagagattttgtcaccaccaggc

SEQ ID NO: 106904 - DNA, 120 bp, synthetic construct
  source 1..120: mol_type = other DNA
atttcactcaaaaccgctcaactacatggaaactgaataacctgctcctgaatgactactggatacataacgaaatgaaggcagcaataaagatgttctttgaaaccagcgagaacaaag

SEQ ID NO: 106905 - DNA, 120 bp, synthetic construct
  source 1..120: mol_type = other DNA
catcaaaaagcttatccaccatgatcaagtgggcttcatccctgggatgcaaggctggttcaatatacgcaaatcaataaatgtaatccagcatataaacagaaccaaagaaaaaaacca

SEQ ID NO: 106906 - DNA, 120 bp, synthetic construct
  source 1..120: mol_type = other DNA
gccagttttcccagcaccatttatttaatagggaatcctttccccattgcttgtttttctcaggtttgtcaaagatcagatagctgtagatacgtggcattatttctgagggctctgttc

SEQ ID NO: 106907 - DNA, 120 bp, synthetic construct
  source 1..120: mol_type = other DNA
ttattcacaatagcaaagacttggaaccaacccaaatgtccaacaatgacagactggattaagaaaatgtggcacatatacaccatggaatactatgtagccataaaaaatgatgagttc

SEQ ID NO: 106908 - DNA, 120 bp, synthetic construct
  source 1..120: mol_type = other DNA
atggtatttctagttctagatgcctgaggaatcgtcacaccgatttccacagtggttgcactagtttacagtgtgtaaaagtgttcctatttctccacatcctctctagcacctgttgtt

SEQ ID NO: 106909 - DNA, 120 bp, synthetic construct
  source 1..120: mol_type = other DNA
gatattgattcttcttatccatgagcatggactgttcttccatttgtttgtatcctcttttatttcactgagcagtggtttgtagttctccttgaagaggtcctaaacgtcccttgtaag

SEQ ID NO: 106910 - DNA, 120 bp, synthetic construct
  source 1..120: mol_type = other DNA
cgggttacccacaaagggaagcccatcagactaacagcagatctctccgcagaaactctacaagccagaagagagtgggggccaatattcaacattcttaaagaaaagaattttcaaccc

SEQ ID NO: 106911 - DNA, 120 bp, synthetic construct
  source 1..120: mol_type = other DNA
atcataggcaaatcaataaatgtaatccagcatataaacagaaccaagaacaaaaaccatatggttatctcaatagatgcagaaaaagtcctttgacaaaattcaacaacccttcatgct

SEQ ID NO: 106912 - DNA, 120 bp, synthetic construct
  source 1..120: mol_type = other DNA
gcttctgcacagcaaaagaaactaccactagagtgaacaggcaacctacagaatgggagaaaatttttgcaacctactcatctgaccatgggctaatatccagaatctacaatgaactca

SEQ ID NO: 106913 - DNA, 120 bp, synthetic construct; identical to SEQ ID NO: 25439
  source 1..120: mol_type = other DNA

SEQ ID NO: 106914 - DNA, 120 bp, synthetic construct; identical to SEQ ID NO: 25440
  source 1..120: mol_type = other DNA

SEQ ID NO: 106915 - DNA, 120 bp, synthetic construct
  source 1..120: mol_type = other DNA
cgtctctgcccggccgcccatcgtctgagatgtggggagtgcctctgccccgccaccccttctgggatgtgaggagtgcctctgcctggccgccaccccatctgggaggtgaggagcgtc

SEQ ID NO: 106916 - DNA, 120 bp, synthetic construct; identical to SEQ ID NO: 25441
  source 1..120: mol_type = other DNA

SEQ ID NO: 106917 - DNA, 120 bp, synthetic construct
  source 1..120: mol_type = other DNA
gtgaggagcccctctgcccagccgcccagtctgggaagtgaggagcgcctcttcccggctgccggccgtcatcctgtctaggaagtgaggagtgtctctgccccgccgccaccccgtctg

SEQ ID NO: 106918 - DNA, 120 bp, synthetic construct
  source 1..120: mol_type = other DNA
ctccgagaaacacccaagaatgatcaataaatactaaaaaaataaaaaaaaagaacaaaaagaaaaagggatatcatttaaacacagtatgtagaaaagaataattattgaatctgtact

SEQ ID NO: 106919 - DNA, 120 bp, synthetic construct
  source 1..120: mol_type = other DNA
ccaatatcatactgaatgggcaaaaactggaagcattccctttgaaaacgggtacaagacagagatgccctctctcaccactcctgttcaatatagtgttggaagttctggccagggcaa

SEQ ID NO: 106920 - DNA, 120 bp, synthetic construct
  source 1..120: mol_type = other DNA
aaatggtgctgggaaaactggctagccatatgcagaacgctgaaactggatcccttccttacaccttacacaaaaatgaattcaagatggattaaagacttaaatgttagacctaaaacc

SEQ ID NO: 106921 - DNA, 120 bp, synthetic construct
  source 1..120: mol_type = other DNA
tcttctgctgtgcagaagctctttagtttaattagatcccatttctcaattttggcttctgttgccattgcttttggtgttttagacatgaagtccttgcccatgcctatgtcctgaatg

SEQ ID NO: 106922 - DNA, 120 bp, synthetic construct
  source 1..120: mol_type = other DNA
ttcttcagctgataggcaacttcagcaaagtctcaggatacaaaatcaatgtgcaaaaatcacaagcattcttatacaccaataacagacaaacagagagccaaatcatgagtgaactcc

SEQ ID NO: 106923 - DNA, 120 bp, synthetic construct; identical to SEQ ID NO: 17184
  source 1..120: mol_type = other DNA

SEQ ID NO: 106924 - DNA, 120 bp, synthetic construct; identical to SEQ ID NO: 17185
  source 1..120: mol_type = other DNA

SEQ ID NO: 106925 - DNA, 120 bp, synthetic construct; identical to SEQ ID NO: 17186
  source 1..120: mol_type = other DNA

SEQ ID NO: 106926 - DNA, 120 bp, synthetic construct; identical to SEQ ID NO: 17187
  source 1..120: mol_type = other DNA

SEQ ID NO: 106927 - DNA, 120 bp, synthetic construct; identical to SEQ ID NO: 17188
  source 1..120: mol_type = other DNA

SEQ ID NO: 106928 - DNA, 120 bp, synthetic construct; identical to SEQ ID NO: 11508
  source 1..120: mol_type = other DNA

SEQ ID NO: 106929 - DNA, 120 bp, synthetic construct; identical to SEQ ID NO: 17189
  source 1..120: mol_type = other DNA

SEQ ID NO: 106930 - DNA, 120 bp, synthetic construct; identical to SEQ ID NO: 17190
  source 1..120: mol_type = other DNA

SEQ ID NO: 106931 - DNA, 120 bp, synthetic construct; identical to SEQ ID NO: 17191
  source 1..120: mol_type = other DNA

SEQ ID NO: 106932 - DNA, 120 bp, synthetic construct; identical to SEQ ID NO: 17192
  source 1..120: mol_type = other DNA

SEQ ID NO: 106933 - DNA, 120 bp, synthetic construct; identical to SEQ ID NO: 19697
  source 1..120: mol_type = other DNA

SEQ ID NO: 106934 - DNA, 120 bp, synthetic construct
  source 1..120: mol_type = other DNA
ccagtaaagggatcactgggtcaaatggtatttctagttctagatccctgaggaatggccacactgacttacacaatggttgaactagtttacagtcccaccgacagggtaaaagtgttc

SEQ ID NO: 106935 - DNA, 120 bp, synthetic construct
  source 1..120: mol_type = other DNA
acttccatttgtttgtatcctcttttatttcattgagcagtggtttgtagttctccttaaagaggtccttcacatcccttgtaagttggattcctaggtattttattctctttgaagcaa

SEQ ID NO: 106936 - DNA, 120 bp, synthetic construct; identical to SEQ ID NO: 19698
  source 1..120: mol_type = other DNA

SEQ ID NO: 106937 - DNA, 120 bp, synthetic construct
  source 1..120: mol_type = other DNA
cacagctgatttctaccagaggtacaaagaggagctagtaccattccttctgaaactattgcaatcaatagaaaaagagggaatcctctctaactcattttatgagggcagcatcatcct

SEQ ID NO: 106938 - DNA, 120 bp, synthetic construct
  source 1..120: mol_type = other DNA
gaaggacctcttcaaggagaactacaaaccactgctcaatgaaataaaagaggatacaaacaaatggaagaacattcgatgttcatgggtaggaagaatcaatatcgtgaaaatggccat

SEQ ID NO: 106939 - DNA, 120 bp, synthetic construct
  source 1..120: mol_type = other DNA
aaaaccaaacactgtatgttctcactcataggtgggaattgaacaatgagaacacgtggacacaggaaggggaacatcacacaccggggcctgttgtggggtggggggaggggggaggga

SEQ ID NO: 106940 - DNA, 120 bp, synthetic construct; identical to SEQ ID NO: 19699
  source 1..120: mol_type = other DNA

SEQ ID NO: 106941 - DNA, 120 bp, synthetic construct
  source 1..120: mol_type = other DNA
aatgagaactcttggacacagggtggggaacatcacacaccggggcctatcgtggggtggggggaggggggaggggggaggaatagcattaggagaaacacctaatgtaaatgacaagtt

SEQ ID NO: 106942 - DNA, 120 bp, synthetic construct; identical to SEQ ID NO: 24846
  source 1..120: mol_type = other DNA

SEQ ID NO: 106943 - DNA, 120 bp, synthetic construct
  source 1..120: mol_type = other DNA
atgtgccacattttcttaatccagtctatcattgttggatatttgggttggtcccaagttttgctattgtgaatagagccgcaataaacatacgtgtgcatgtgtctttatagcagcatg

SEQ ID NO: 106944 - DNA, 120 bp, synthetic construct
  source 1..120: mol_type = other DNA
ctgagggctctattctgttccattgatctatatctctcttttggtaccagtaccatgctgttttggttactgtagccttgtagtatagtttgaagtcaggtagtgtgatgcctccagctt

SEQ ID NO: 106945 - DNA, 120 bp, synthetic construct
  source 1..120: mol_type = other DNA
ttatgtggtttttgtctttggttctgtttatatgctggattatgtttattgatttgtgtatattgaaccagccttgcatcccagggatgaagcccacttgatcatggtggataagctttt

SEQ ID NO: 106946 - DNA, 120 bp, synthetic construct; identical to SEQ ID NO: 24842
  source 1..120: mol_type = other DNA

SEQ ID NO: 106947 - DNA, 120 bp, synthetic construct; identical to SEQ ID NO: 24843
  source 1..120: mol_type = other DNA

SEQ ID NO: 106948 - DNA, 120 bp, synthetic construct
  source 1..120: mol_type = other DNA
tcatgtcctttgcccactttttgatggggttgtttgtttttttcttgtaaatttgtttgagttcattgtagattctggatattagccctttgtcagatgagtaggctgagaaaattttct

SEQ ID NO: 106949 - DNA, 120 bp, synthetic construct
  source 1..120: mol_type = other DNA
attcttcctacccatgagcatgggatgttcttccatttgtttgtatcctcttttatctcattgagcaatggtttgtagttctccttgaagatgtccttcacatcccttgtaagttggatt

SEQ ID NO: 106950 - DNA, 120 bp, synthetic construct
  source 1..120: mol_type = other DNA
cttggtagagtgtatgtgtcgaggaatttatccatttcttgtagattttctagtttatttgcatagaggtgtttgtttgtagtattctctgatggtagtttgtatttctgtgggatcggt

SEQ ID NO: 106951 - DNA, 120 bp, synthetic construct
  source 1..120: mol_type = other DNA
gagtccaagtctctttgtaggtcactcaggacttgcttcatgtatctgggtgctcctgtgttgggtgcatatatatttaggatagttagctcttcttgttgaattgatccctttaccatt

SEQ ID NO: 106952 - DNA, 120 bp, synthetic construct
  source 1..120: mol_type = other DNA
tctttttattcttttttctctaaacttcccttctctcttcatttcattcatttcatcttccattgctgataccctttcttccagttgatcgcattggctcctgaggcttctgcattcttc

SEQ ID NO: 106953 - DNA, 120 bp, synthetic construct
  source 1..120: mol_type = other DNA
tggtttacctgaaagtgacggggagaacggaaccaagttggaaaacactctgcaggatattatccaggagaacttccccaatctagcaaggcaggccaacattcagattcaggaaataca

SEQ ID NO: 106954 - DNA, 120 bp, synthetic construct
  source 1..120: mol_type = other DNA
cacagactggcaaattggataaagagtcaagacccatcaatgtgctgtattcaggaaacccatctcacatgcagagacacacataggctcaaaataaaaggatggaggaagatctaccaa

SEQ ID NO: 106955 - DNA, 120 bp, synthetic construct
  source 1..120: mol_type = other DNA
taagatcagagcagaactgaaggaaatagagacacaaaaaacccttaatgaatccaggagatggttttttgaaaggatcaacaaaatagatagaccagtagcaagactaataaagaaaaa

SEQ ID NO: 106956 - DNA, 120 bp, synthetic construct
  source 1..120: mol_type = other DNA
ctttgcagacgacatgattgtatatatagaaaaccccattgtctcagcccaaaatctccttaagctgataagcaacttcagcaaagtctcaggatacaaaatcaatgtacaaaaatcaca

SEQ ID NO: 106957 - DNA, 120 bp, synthetic construct
  source 1..120: mol_type = other DNA
tgtttgagttcattgtagattctggatattagccctttgtcagatgagtaggttgagaaaattttctcccattttgtaggttgcctgttcactctgacggtagcttcttttgctgtgcaa

SEQ ID NO: 106958 - DNA, 120 bp, synthetic construct
  source 1..120: mol_type = other DNA
tcacactctggggactgttgtggggttgggggaggggggagggatagcactgggagatatacctaatgctagatgacgagttagtgggtggagccactagcatggcacatgtatacatat

SEQ ID NO: 106959 - DNA, 120 bp, synthetic construct; identical to SEQ ID NO: 24844
  source 1..120: mol_type = other DNA

SEQ ID NO: 106960 - DNA, 120 bp, synthetic construct
  source 1..120: mol_type = other DNA
cagtatgcagccataaaaaatgatgagttcatgtctttgtagggacatggatgaaattggaaatcatcattctcagtaaactatcgcaaggacaaaaaaccaaacactgcatgttctcac

SEQ ID NO: 106961 - DNA, 120 bp, synthetic construct
  source 1..120: mol_type = other DNA
aatgcacaagcctcagtaactgaggcgatcaactggaagaaagggtatcagcgatggaagatgaaatgaatgaaatgaagcgagaagggaagtttagagaaaaaagaataaaaagaaatg

SEQ ID NO: 106962 - DNA, 120 bp, synthetic construct
  source 1..120: mol_type = other DNA
gtgtcttttaattggagcatttagcccatttgaatttaaggttagtattgttatgtgtgaatttgatcctgtcattatgatgttagctggttattttgctcgttagttgatgcagtttct

SEQ ID NO: 106963 - DNA, 120 bp, synthetic construct
  source 1..120: mol_type = other DNA
ataactaagatcagagcagaactgaaggaaatagagacacaaaaaactcttcaaaaaaatcagtgaatccaggagctggttttttgaaaagatcaacaaaattgatagaccgctagcaag

SEQ ID NO: 106964 - DNA, 120 bp, synthetic construct
  source 1..120: mol_type = other DNA
agatctttcttgctttctcttgtgggcacttagtgctgtaaatttcccgctacacactgctctaaatatgttccagagattctggtatgttgtgtctttgtttttgttggtttcaaagaa

SEQ ID NO: 106965 - DNA, 120 bp, synthetic construct; identical to SEQ ID NO: 106962
  source 1..120: mol_type = other DNA

SEQ ID NO: 106966 - DNA, 120 bp, synthetic construct
  source 1..120: mol_type = other DNA
ttgaatcggctactgaagcttgtgctttcatcacatagttctcgtgccatggttttcagctccatcaagtcctttaaggacttctctgcattggttattctagttacccattcgtctaat

SEQ ID NO: 106967 - DNA, 120 bp, synthetic construct
  source 1..120: mol_type = other DNA
tgtgttttccaaaccaaaatttaggacatgtgttatggcaaagaatttcctttaaaattgttcttaacacatggacacagggaggggaacatcacacactggggcctgttgaggggtgga

SEQ ID NO: 106968 - DNA, 120 bp, synthetic construct
  source 1..120: mol_type = other DNA
gcagcacaccagcatggcacatgtatacatatgtaacaaacctgcacattgtgcacatgcaccctaaaacttgaagtataataataataaaataaaataaaaaataaaaaaatttaaaaa

SEQ ID NO: 106969 - DNA, 120 bp, synthetic construct
  source 1..120: mol_type = other DNA
cggaggttgcagtgagccgagatcatgccactgcactccagcctggtgacagagcaagatcttgtctcaaaaaaaaaatatatatatatgtatataatatatgtatatatataatatata

SEQ ID NO: 106970 - DNA, 120 bp, synthetic construct
  source 1..120: mol_type = other DNA
tatttttgtgcctgaataatagtccatggagtcacttatgtaccacagagtttacatgttcaggagaggtttccctttttcctgggctatttccctcaacttttctttgcattggacctc

SEQ ID NO: 106971 - DNA, 120 bp, synthetic construct; identical to SEQ ID NO: 17390
  source 1..120: mol_type = other DNA

SEQ ID NO: 106972 - DNA, 120 bp, synthetic construct; identical to SEQ ID NO: 17391
  source 1..120: mol_type = other DNA

SEQ ID NO: 106973 - DNA, 120 bp, synthetic construct
  source 1..120: mol_type = other DNA
tcaggtactgtcaaatgctgggaggcatagacacatacacaagtaagaggatgacaaggtaaaatgtgagacatgcaggaggaaaggtgtaaacacattataattggagaatggatgagg

SEQ ID NO: 106974 - DNA, 120 bp, synthetic construct
  source 1..120: mol_type = other DNA
ccaggctggagtgcagtggcatcatctctgctcactgcaagctccgcctcccgggttcaccccacacgccattctcctgcctcagcctcctgagtagctgggagtacagctgccggccac

SEQ ID NO: 106975 - DNA, 120 bp, synthetic construct; identical to SEQ ID NO: 28912
  source 1..120: mol_type = other DNA

SEQ ID NO: 106976 - DNA, 120 bp, synthetic construct
  source 1..120: mol_type = other DNA
atgtgaaaagaccaactctcgtctgattggtgtacctgaaagtgacggggagaatggaaccaagttggaaaacactctgcaggatattatccaggagaacttccccaatctagcaaggca

SEQ ID NO: 106977 - DNA, 120 bp, synthetic construct
  source 1..120: mol_type = other DNA
agcaagtccttagagacctacaaagagacttagactcccgcacaataataatgggagactttaacaccccactgtcaacattagacagatcaacgagacagaaagttaacaaggatatcc

SEQ ID NO: 106978 - DNA, 120 bp, synthetic construct
  source 1..120: mol_type = other DNA
aagactaaaccaggaagaagctgattctctgaatagaccaataacaggctctgaaattgaggcaataattcatagtttaccaaccaaaaaaagtccaggaccagatggattcacagccga

SEQ ID NO: 106979 - DNA, 120 bp, synthetic construct
  source 1..120: mol_type = other DNA
atcaatgtgcaaaaatcacaagaattcttatacaccaataacagacaaacagagagccaaatcatgagtgaactcccattcacaattgcttcaaagagaataaaatacctaggaatccaa

SEQ ID NO: 106980 - DNA, 120 bp, synthetic construct
  source 1..120: mol_type = other DNA
accctcagagtgaacaggcaacctacagaacaggagaaaatttttgcaatctactcatctgacaaagggctaatatccagaatctacaatgaactcaaacaaatttacaagaaaaaaaca

SEQ ID NO: 106981 - DNA, 120 bp, synthetic construct
  source 1..120: mol_type = other DNA
tttgtagggacatggatgaaattggaaatcatcactctcagtaaactatcgcaaggacaaaaaaccaaacaccgcatattctcactcacagatgggaactgaacaatgagaacacatgga

SEQ ID NO: 106982 - DNA, 120 bp, synthetic construct
  source 1..120: mol_type = other DNA
aacagggtctggaatggacctctaggaaactccaacagacctgccgctgagggtcctgtctgttagaaggaaaactaacaaacagaaaggacatccacaccaaaaacccatctgtacatc

SEQ ID NO: 106983 - DNA, 120 bp, synthetic construct
  source 1..120: mol_type = other DNA
aagcccatcagactaacagcggatctcttggcagaaacgctacaagccagaagagagtgggggccaatattcaacattcttaaagaaaagaattttcaacccagaatttcatatccagcc

SEQ ID NO: 106984 - DNA, 120 bp, synthetic construct
  source 1..120: mol_type = other DNA
tagacatctacacaactctccaccccaaatcaacagaatatacattattttcagcaccacaccacacctattccaaaattgaccacatactgggaagtaaagctctcctcagcaaatgta

SEQ ID NO: 106985 - DNA, 120 bp, synthetic construct
  source 1..120: mol_type = other DNA
ttaccaaccaaaaagagtccaggaccagatggattcacagccgaattctaccagaggtacaaggaggaactggtaccattccttccgaaactattccaatcaatagaaaaggagggaatc

SEQ ID NO: 106986 - DNA, 120 bp, synthetic construct
  source 1..120: mol_type = other DNA
agaggatacaaacaaatggaagaacattccatgctcatgggcaggaagaatcaatattgtgaaaatggccaaactgcccaaggtaatttatagattgaatgccatccccatcaagctacc

SEQ ID NO: 106987 - DNA, 120 bp, synthetic construct
  source 1..120: mol_type = other DNA
aaaaattaactcaagatggattaaagacttaaatgttagacctaaaaccataaaaaccctagaagaaaacctaggcattaccattcaggacataggcatgggcaaggacttcatgtctaa

SEQ ID NO: 106988 - DNA, 120 bp, synthetic construct
  source 1..120: mol_type = other DNA
cctgcacattgtgcacatgtaccctaaaacttaaagtataaaaaaaaaaaaaagagacggggtgatttatttttggcatatggatatacagtttttccagcactatttctttttttttta

SEQ ID NO: 106989 - DNA, 120 bp, synthetic construct; identical to SEQ ID NO: 4779
  source 1..120: mol_type = other DNA

SEQ ID NO: 106990 - DNA, 120 bp, synthetic construct; identical to SEQ ID NO: 7497
  source 1..120: mol_type = other DNA

SEQ ID NO: 106991 - DNA, 120 bp, synthetic construct; identical to SEQ ID NO: 7498
  source 1..120: mol_type = other DNA

SEQ ID NO: 106992 - DNA, 120 bp, synthetic construct
  source 1..120: mol_type = other DNA
agcactaaacatggaaaggaacaactggtaccagccactgcaaaaacatgccaaaaacatgccaaacagcatcatcctgataccaaagccgggcagagacacaacaaaaaaagagaattt

SEQ ID NO: 106993 - DNA, 120 bp, synthetic construct
  source 1..120: mol_type = other DNA
caatatcatgaaaatggccatactgcccaaggtaatttatagattcaatgccatctccaacaagctaccaatgactttcttcacagaattggaaaaaactactttaaacttcatatggaa

SEQ ID NO: 106994 - DNA, 120 bp, synthetic construct
  source 1..120: mol_type = other DNA
agaaaattttcgcaacctattcatctgacaaagggctaatattcagaatctacaatgaacttaaacaaatttacaagaaaaagacaaacaaccccatcaaaaagtgggcgaaggacatga

SEQ ID NO: 106995 - DNA, 120 bp, synthetic construct
  source 1..120: mol_type = other DNA
cctaacagacatctgcagaactccccaccccaaatcaacagaatatacgttcttctcagcaccacaccacacttattccaaaattgaccacatagttagaagtaaagcactcctcagcaa

SEQ ID NO: 106996 - DNA, 120 bp, synthetic construct
  source 1..120: mol_type = other DNA
aaggaatcctccctaactcattttatgaggccagcatcatcctgataccaaagtctggcagagacacaacaaaaaaagagaattttagaccaatatccttgatgaacattgatgcaaaaa

SEQ ID NO: 106997 - DNA, 120 bp, synthetic construct
  source 1..120: mol_type = other DNA
aaattttctcccattctgtaggttgcctgttcactctgatggtagtttcttttgctgtgcagaagctctttagtttaattagatcccatttgtcaattttggcttttgttgccgttgctt

SEQ ID NO: 106998 - DNA, 120 bp, synthetic construct
  source 1..120: mol_type = other DNA
gcacccagattcataaagcaagtccttagagacctgcaaagagacttagactcccatacaataataatgggagactttaataccccattgtcaatattagacagatcaacaagacaggtt

SEQ ID NO: 106999 - DNA, 120 bp, synthetic construct
  source 1..120: mol_type = other DNA
aagaacagaaatcacaacaaactgtctctcagaccacagtgtaatcaaattagaactcagtattaagaaactcactcaaaaccacacaactacatggaaacggaacaacctgctcctgaa

SEQ ID NO: 107000 - DNA, 120 bp, synthetic construct
  source 1..120: mol_type = other DNA
ataactcctataaatgttctattatactaatataataaatattacaggctaggtgcggtggctcacacctgtaatcccagcattctgcgaggccaaggtgggcagatcacatgaggccag

SEQ ID NO: 107001 - DNA, 120 bp, synthetic construct
  source 1..120: mol_type = other DNA
aatatgtacaatatattccaactgatgtttaagaaaataaaagcccatatttgtttgtaaatgtaaagaaaggccgggcgcggtggctcacgcctgtaatcccagcactttgggaggccg

SEQ ID NO: 107002 - DNA, 120 bp, synthetic construct; identical to SEQ ID NO: 33525
  source 1..120: mol_type = other DNA

SEQ ID NO: 107003 - DNA, 120 bp, synthetic construct
  source 1..120: mol_type = other DNA
ctatgattacgccactgcactctagtctgagtaatttcatctctgtaaaaaaatattttttaaaaaaaggccaggcacgttggttcatgcctgtaatcccagcactttgagaggccgagg

SEQ ID NO: 107004 - DNA, 120 bp, synthetic construct; identical to SEQ ID NO: 28183
  source 1..120: mol_type = other DNA

SEQ ID NO: 107005 - DNA, 120 bp, synthetic construct; identical to SEQ ID NO: 28184
  source 1..120: mol_type = other DNA

SEQ ID NO: 107006 - DNA, 120 bp, synthetic construct; identical to SEQ ID NO: 28185
  source 1..120: mol_type = other DNA

SEQ ID NO: 107007 - DNA, 120 bp, synthetic construct
  source 1..120: mol_type = other DNA
tcctacccctttattttattgtattttatttatttatttttcgagacagagtttcactcttgttgcgcaggctggagtgcagtggcctgatttctgctcactacaacctccaccttccgg

SEQ ID NO: 107008 - DNA, 120 bp, synthetic construct
  source 1..120: mol_type = other DNA
ctcgggaggctgaggctcgagaatcgcttgaacctgggaggtggaggttgcattgagccgagatcatgcctcccactcactctataaaacacctcgttgagctgttgcaagaattaaatg

SEQ ID NO: 107009 - DNA, 120 bp, synthetic construct; identical to SEQ ID NO: 28181
  source 1..120: mol_type = other DNA

SEQ ID NO: 107010 - DNA, 120 bp, synthetic construct
  source 1..120: mol_type = other DNA
aggtccaagattcagaatcaagaaacgaagtcaatctgatattgctattacaacccaaatgcctcctgtggttggatttttatttgatagggcctggcattgggtgagggatggagacaa

SEQ ID NO: 107011 - DNA, 120 bp, synthetic construct
  source 1..120: mol_type = other DNA
aaagaccttcaaagacctcaaatgctgtccaaagatattctacccatagacacataatttaacacatccaaatatataaatcaggccgggtacagtggctcacacctgtcatcccagcac

SEQ ID NO: 107012 - DNA, 120 bp, synthetic construct; identical to SEQ ID NO: 28186
  source 1..120: mol_type = other DNA

SEQ ID NO: 107013 - DNA, 120 bp, synthetic construct
  source 1..120: mol_type = other DNA
atctcggctcgctacaacttccacctcccagctgcctgccttggcccagcaaagtgccgagattgcgcctttgcccggccgccaccccatctgggaagtgaggagcgtctctgcctggcc

SEQ ID NO: 107014 - DNA, 120 bp, synthetic construct; identical to SEQ ID NO: 28187
  source 1..120: mol_type = other DNA

SEQ ID NO: 107015 - DNA, 120 bp, synthetic construct
  source 1..120: mol_type = other DNA
tatacaccacagaatactatgcagccataaaaaaggatgatttcatgtcctttgtagggacatggatgaagctggaaaccatcattctcagcaaactatcgcaaggacaaaaaaccaaac

SEQ ID NO: 107016 - DNA, 120 bp, synthetic construct
  source 1..120: mol_type = other DNA
tacaaatcataaccacaatgtgataccaccttactcctgcaacaatggcactaatcaaaaaatgatagatgttggcgtggatgtggtgaaaagagaacacttctacactgctggtgggaa

SEQ ID NO: 107017 - DNA, 120 bp, synthetic construct
  source 1..120: mol_type = other DNA
tatatggtatatatatggtgtatataccatatatatatagtctttggtatatactatatacatacaccatggaatactactcagccataaaaaggaccaaaatagtggctttcacagcaa

SEQ ID NO: 107018 - DNA, 120 bp, synthetic construct; identical to SEQ ID NO: 24211
  source 1..120: mol_type = other DNA

SEQ ID NO: 107019 - DNA, 120 bp, synthetic construct
  source 1..120: mol_type = other DNA
gccgagaagctccaactgggtggagcccaccacagctcaaggaggcctgcctgcctctgtaggctccacctctgggggcagggcacagacaaacaaaaagacagcagtaacctctgcaga

SEQ ID NO: 107020 - DNA, 120 bp, synthetic construct
  source 1..120: mol_type = other DNA
ggatattatccaggagaacttccccaatctagaaaggcaggccaacattcagattcaggaaatacagagaacgccacaaagatactccttgagaagagcaactccaagacacataattgt

SEQ ID NO: 107021 - DNA, 120 bp, synthetic construct
  source 1..120: mol_type = other DNA
agaactctccaccccaaatcaacagaatatacatttttttcagcaccacaccacacctattccaaaattgaccacatagttggaagtaaagctctcctcagcaaatgtaaaagatcagaa

SEQ ID NO: 107022 - DNA, 120 bp, synthetic construct
  source 1..120: mol_type = other DNA
aaatactgacaaactgagtccagcagcacatcaaaaagcttatccaccatgatcaagtgggcttcatccctgggatgcaaggctggttcaatatatgcaaatcaataaatgtaatccagc

SEQ ID NO: 107023 - DNA, 120 bp, synthetic construct
  source 1..120: mol_type = other DNA
gaggcatcacgctacctgacttcaaactatactacaaggctacagtaaccaaaacagcatggtactggtaccaaaacagagatatagatcaatggaacagaacagagccctcagaaacaa

SEQ ID NO: 107024 - DNA, 120 bp, synthetic construct
  source 1..120: mol_type = other DNA
atgtccaacaatgatagactggattaagaaaatgtggcacatatacaccatggaatacgatgcagccataaaaaatgatgagttcatgtcctttgtagggacatggatgaaattggaaat

SEQ ID NO: 107025 - DNA, 120 bp, synthetic construct
  source 1..120: mol_type = other DNA
tggcctgtatctaacttctgggactactagtccagtcctctttccagacttcattttgtgttttctctgttttccttttatccttttgcagtccctcatcctcatcttctcctctaatac

SEQ ID NO: 107026 - DNA, 120 bp, synthetic construct; identical to SEQ ID NO: 24212
  source 1..120: mol_type = other DNA

SEQ ID NO: 107027 - DNA, 120 bp, synthetic construct; identical to SEQ ID NO: 24213
  source 1..120: mol_type = other DNA

SEQ ID NO: 107028 - DNA, 120 bp, synthetic construct
  source 1..120: mol_type = other DNA
gaacccagaaataaatccatgtatttatagccaactaatggtttttttgaaacagggtcttgctctgtcacccagactgaagtgcaatgatgtgatctctgctcactgcagcctcaacct

SEQ ID NO: 107029 - DNA, 120 bp, synthetic construct
  source 1..120: mol_type = other DNA
tgtatagcttggctccataggggtggtgttctcggttcctatgtctaccttttgtattttccagcccttccctcataatgttactgggaaagttaacagctagcataacattttgaaaac

SEQ ID NO: 107030 - DNA, 120 bp, synthetic construct
  source 1..120: mol_type = other DNA
ctctagtgcctttgctgccacactgattaaatcaatattgattgacaacctcagtgggatatttccatgtgccaggaagaatagtactatcagcagtacccaattcatggtggtttagaa

SEQ ID NO: 107031 - DNA, 120 bp, synthetic construct
  source 1..120: mol_type = other DNA
tttctttgaactgattcaagaatgagctgcagacattgttgcattcacccctaaatactttagcatgcattttcagagaataagaacattttctattttcatggaacaggcacactagtc

SEQ ID NO: 107032 - DNA, 120 bp, synthetic construct
  source 1..120: mol_type = other DNA
tgatgctcaacttgccccagatttggccagtgggaagccccttctagttggttcctgtgtcttactgacatgacctcatcattctttgaagaataattactttttagcacagaaaatatc

SEQ ID NO: 107033 - DNA, 120 bp, synthetic construct
  source 1..120: mol_type = other DNA
aaagtagcttcagttgtatgaggggcagtctgattggagtatgacttttcggggaggaatgagtccagtgccaacccagcaaagaaggaattggagaagaaatattcctatgtcaatctt

SEQ ID NO: 107034 - DNA, 120 bp, synthetic construct
  source 1..120: mol_type = other DNA
taagcactaccttcaattcagttagtgcaggtactaccagaaatataaataaaattttaaacccttttccaattgcaaagcataatttggatatgaatcgtgaacctattttgctcctta

SEQ ID NO: 107035 - DNA, 120 bp, synthetic construct
  source 1..120: mol_type = other DNA
ggcctacccacaaataatctacttggtctaggggctggatttcgcaaaacaagatcaacaaagcacctccacttatcacccaattacccctcccagaaatatggtgaaatttaagaattt

SEQ ID NO: 107036 - DNA, 120 bp, synthetic construct
  source 1..120: mol_type = other DNA
tacagttcgctttaaaaggtggcgtctgtaagcacgctgaataatgacagcagatacttcctcttgttttcgttttaaagtagtagtgattggctgataggagaccttggaaggattgga

SEQ ID NO: 107037 - DNA, 120 bp, synthetic construct
  source 1..120: mol_type = other DNA
tcggccaatcctagcaagacggatcactcggaacagggtaggggacacgaaatacttttctatcagctcggcaagaaacatacctatgaataaacaatgagaataccaaccagtgaagaa

SEQ ID NO: 107038 - DNA, 120 bp, synthetic construct
  source 1..120: mol_type = other DNA
tagttataaccaaggattataattagtgggaatcaaaggctatatacaatgagctggatataaggccagtttcttcagagaggggagtggcatgaaaatctgtccaacacaggtgcctcg

SEQ ID NO: 107039 - DNA, 120 bp, synthetic construct
  source 1..120: mol_type = other DNA
gcgtagagagatgagtttcagtacacactctccagtaaatagcacaatgaacaccagattgatgcgtgacaaaatggtagtcacatattcactctggtcatctgtttccaccatcattgt

SEQ ID NO: 107040 - DNA, 120 bp, synthetic construct
  source 1..120: mol_type = other DNA
tttctgccactgctagtcactgaaggccatctgcaggcttatttctttgggccactgaggaattctgagggaattttccaacttatatttttcctaaattgttgtttcatttctactctt

SEQ ID NO: 107041 - DNA, 120 bp, synthetic construct
  source 1..120: mol_type = other DNA
ttctgttcttctgtcataaagatgtcttgacctccaaagtatagaaaagaaaaatcaaactggttaaaactgtgtccttttgtacatttttttcaatgttaaaatagaaaatggatggct

SEQ ID NO: 107042 - DNA, 120 bp, synthetic construct
  source 1..120: mol_type = other DNA
atgtttggtgacagtgagggaacggtggcatgggtgttcatacactgatattgggagtttgagtagttatattactctaggggagtaaaatacttcattgtgggaatttattctcaggaa

SEQ ID NO: 107043 - DNA, 120 bp, synthetic construct
  source 1..120: mol_type = other DNA
tgacaccaataaacaggttcaaggtgaagaaggacccaaagatgatgaaaataacaaagtaaagatacatgtacagactttcttcatacttaggctggagttccacctaccaaaggggaa

SEQ ID NO: 107044 - DNA, 120 bp, synthetic construct
  source 1..120: mol_type = other DNA
tgggacttgagaatagaaagatgaaggttgatagaaaatactacatcttacaaagttttgaagagcaaagttggaatgagcatgaatttcagtttaggtcttggagcctgaaagaggctg

SEQ ID NO: 107045 - DNA, 120 bp, synthetic construct
  source 1..120: mol_type = other DNA
ttgctggagcactttttagaaagtcttacaaatgccaacacatgggtcaatagctctatcagccaaataattacaacttagatctaaggatcatctgctaaaatttatctgcagggtgat

SEQ ID NO: 107046 - DNA, 120 bp, synthetic construct
  source 1..120: mol_type = other DNA
tcatgtgtcgacaatttttaaagaaagcattcttgctagattttttttaacttttgtttttatttgtctttagagacaaggtctcactatgttgcctccactggtctagatctcctggcc

SEQ ID NO: 107047 - DNA, 120 bp, synthetic construct
  source 1..120: mol_type = other DNA
tttttttagatggagtttcactctttgttgcccaggctggagtgcagtggcacccaccgctatgcctggttctaattctaaaacctaaatgtcattccccaaactttgatccaaataata

SEQ ID NO: 107048 - DNA, 120 bp, synthetic construct
  source 1..120: mol_type = other DNA
agggagaagcattaaaaggttaaaggaaaaggaaaatcagaggaacttgctgccagatgaagtcagaattgtgttatcagaataaagaaaagttaaaaagcctatacagaagtttaactc

SEQ ID NO: 107049 - DNA, 120 bp, synthetic construct
  source 1..120: mol_type = other DNA
aatttggttgagttatccaggcagaaccaaatgatgtggccgatgcaactaccaagctgacacgtgacactttgccttatctcatctgactgtctgcattaatacaatggacttcataaa

SEQ ID NO: 107050 - DNA, 120 bp, synthetic construct
  source 1..120: mol_type = other DNA
aagttcagaaagtagcctataaatagcatttagtgctgtttccagtctacgtggaagagttgctcccacttatctggtacccatattactctgtactagagttcagtgtaatcctgacag

SEQ ID NO: 107051 - DNA, 120 bp, synthetic construct
  source 1..120: mol_type = other DNA
gaaatgtctgagaaaggagctatcttaatgaattaatactgtactagaggttgtttcttctcagaagcttttttttcaaaacaatcatcaaataaagtttctctactctagcacaaccaa

SEQ ID NO: 107052 - DNA, 120 bp, synthetic construct
  source 1..120: mol_type = other DNA
tatgcctcaaacagtatcatgagcttaacaagttaaattgttttttcacataatcattctacaccagggtcccccgccctcaccaatccagtaatctccccaaagatggataactccata

SEQ ID NO: 107053 - DNA, 120 bp, synthetic construct
  source 1..120: mol_type = other DNA
atgagtgcctgagttacgctttgacgcagctattgtgattttatgctgctagggcaaagaattaaatgagagtttctgagcatgttcaaatctcacttcccaatcataatcatcattctt

SEQ ID NO: 107054 - DNA, 120 bp, synthetic construct
  source 1..120: mol_type = other DNA
gcatggaaaataagtcaataatggcaaaatttctaatctgttatgcatgatggaaaatgattattgcatctttgaaaaggataaaataacattttgtgtgactctgaccaataagatgca

SEQ ID NO: 107055 - DNA, 120 bp, synthetic construct
  source 1..120: mol_type = other DNA
atggcttctgccatgatatctggccccaaagggccaatcaatgaatatttaccaaatacacacagcaataaatttacttcatttgtattcatttgtaggtaatatacatgactaaaggaa

SEQ ID NO: 107056 - DNA, 120 bp, synthetic construct
  source 1..120: mol_type = other DNA
ttttaaatgactgtagcacccaacagcatcactgtttttattgagtgcctttaatactgtacaagttgggggtcaagagtttggggccaagaaactaactcagtggcacaaaatcaacaa

SEQ ID NO: 107057 - DNA, 120 bp, synthetic construct
  source 1..120: mol_type = other DNA
ttttttgctatagaaaggaggttgaagaaataatgaaagcttgtgcttttgtaaagcagaaattgtgattgatcttcgcagtctccaatttgactaaatagttgggttcatctgcttctt

SEQ ID NO: 107058 - DNA, 120 bp, synthetic construct
  source 1..120: mol_type = other DNA
aaccagttatgttcaactattcggaaacacgtccttctcaggttccaccattgttttcctctgccttcttccacattgatttgacaacacttgaatctttgtacacagcctgcagaaagt

SEQ ID NO: 107059 - DNA, 120 bp, synthetic construct
  source 1..120: mol_type = other DNA
cctgctccaaggcaaaaaaaaaaaaaaggaggaaaagatatgtttgaagaaaaaggagaaagggaatgaatggagaaaaggaggaagaaaagaagggaaggaggaaagaaggaactaagg

SEQ ID NO: 107060 - DNA, 120 bp, synthetic construct
  source 1..120: mol_type = other DNA
ccaaatgaaagattaacattaggattcttttctttaccttcagtgaaacaagcttctggttcaagagtttcttcaggttccactacgggctgttcttctacaggtgcgccgatgtccaca

SEQ ID NO: 107061 - DNA, 120 bp, synthetic construct
  source 1..120: mol_type = other DNA
gatgggatgcacatttctctttctagagttctcagaagacaaagatggcagagataatagaaaatattaactaacatattaagataggaaaaactcatgacgctctttctgaagaccagc

SEQ ID NO: 107062 - DNA, 120 bp, synthetic construct
  source 1..120: mol_type = other DNA
gttctgttctagcatttgcactgaatttaaaacatatccaggaataagtcattggtttcttcctctgacaaacgaagagaatcacctagtggcaggcgttagtcacattctcaatcaaac

SEQ ID NO: 107063 - DNA, 120 bp, synthetic construct
  source 1..120: mol_type = other DNA
gacttacctaagttgtgactattttctgtgaaaattacgagaacccaaaagaccttatgttactttttgacacattttcaaaatggcattctctgaagaagacaaatagatcaacagttc

SEQ ID NO: 107064 - DNA, 120 bp, synthetic construct
  source 1..120: mol_type = other DNA
tagagcttggagtcactccatatttcagaaattttaaggtgatttaaaagatgatcaaatgcccttattagcattccaatggaatatctgcacttggaaagttcgcaggtctagacaagt

SEQ ID NO: 107065 - DNA, 120 bp, synthetic construct
  source 1..120: mol_type = other DNA
acgcccggcccaaggtgaacttcttaatgttctctgactttttctcctagtgatttttcctcccatcattgcggaagagtaataattgctctcttatttaaacccctttcaacactttac

SEQ ID NO: 107066 - DNA, 120 bp, synthetic construct
  source 1..120: mol_type = other DNA
taacatcagaaaaagtgacatgtgactattagaaagattaaaccataagcagtggggcttatgtcaatgaattactctagataaactatgataacctgagagaagtgttagtgctttttc

SEQ ID NO: 107067 - DNA, 120 bp, synthetic construct
  source 1..120: mol_type = other DNA
cagatgaaacaacttggcactaagctaatgcaaagagctattattttaaaaaggctcttaaagtttagaatttgtcaccaacaccactagtaactaggtggggggcggggtaataccaag

SEQ ID NO: 107068 - DNA, 120 bp, synthetic construct
  source 1..120: mol_type = other DNA
tatacagccaaaccacatctgtcactcaccatttctgaattgactattccaagaacttttaaaacaagttatggcctccagtggagccaacaaccttattttttcacccttctcctggcc

SEQ ID NO: 107069 - DNA, 120 bp, synthetic construct
  source 1..120: mol_type = other DNA
tgcgccactgcactctggcgtggatgaccgagtgaggccctgtctcaaaaaacaaacaaacaaacaaacaaataaataaatgaaaaatcctgtgatcatctctgaccaaggagaagcaaa

SEQ ID NO: 107070 - DNA, 120 bp, synthetic construct
  source 1..120: mol_type = other DNA
tttgccaaatgtatttgttttctgtgtctgtgtaacaaatgagcatacacccagcatcttaacatacattcaccaactcacagtttctgtaggtcggaagtctggcactgcctagttgga

SEQ ID NO: 107071 - DNA, 120 bp, synthetic construct
  source 1..120: mol_type = other DNA
caggcttaactacattgtgactggataaccctatatgccagctattttaaatttattgagctttactttgaactccagtatatggttacttttatagaaatattccatgaacccttgaaa

SEQ ID NO: 107072 - DNA, 120 bp, synthetic construct
  source 1..120: mol_type = other DNA
agccagggtggtctcgatctcctgacctcgtgattcgcccgcctcggcctcccggaatatttcttaaaatctattttaatgtttattaaaccatgaatcaaccttaaattttaccaattt

SEQ ID NO: 107073 - DNA, 120 bp, synthetic construct
  source 1..120: mol_type = other DNA
ggaaaagacactgtaatgagactcaacatttccacagggcagctagaaaactcaaatattaactcattaattcccacattattcccagttgatttcttcatcaagctgtatgttgaaagg

SEQ ID NO: 107074 - DNA, 120 bp, synthetic construct
  source 1..120: mol_type = other DNA
gaaaaggtataacgatgagaactgataaagcatagggaattacattgaatgaaagattagtatagctgggtggggaggtgtgaggtgtactattccatgatactgaaggagtcagcggtg

SEQ ID NO: 107075 - DNA, 120 bp, synthetic construct
  source 1..120: mol_type = other DNA
ctaagcaggaggactctgaaacactccagactatgctgttaacctatgcccaatgtgcagtgattggaagttaacaccaaatctatagttgacacctgtacctagttcttcaacaaatag

SEQ ID NO: 107076 - DNA, 120 bp, synthetic construct
  source 1..120: mol_type = other DNA
cttggcagttttgcccagccttcaaagctctctcagatctgtccaagtcaccattctttattattaatgttcaataaaaattcatgtttctagcttatcattattcctactatggcatga

SEQ ID NO: 107077 - DNA, 120 bp, synthetic construct; identical to SEQ ID NO: 21754
  source 1..120: mol_type = other DNA

SEQ ID NO: 107078 - DNA, 120 bp, synthetic construct; identical to SEQ ID NO: 21755
  source 1..120: mol_type = other DNA

SEQ ID NO: 107079 - DNA, 120 bp, synthetic construct
  source 1..120: mol_type = other DNA
acagatagcatatggtagccattagtcctcatcaaatgctaaatgtaggtctaaagattcaagacaaaggaagctagactaggctattactaaatttattttaacagaagttcagaaaca

SEQ ID NO: 107080 - DNA, 120 bp, synthetic construct
  source 1..120: mol_type = other DNA
atatgctgaagctctaaccttcaatatgactgtatttggggatagggcctgtaaggtggtgataaaggttaaatgaggtcatacaggttggactttattctgatagggctggtgcactta

SEQ ID NO: 107081 - DNA, 120 bp, synthetic construct
  source 1..120: mol_type = other DNA
atttataataaactgttggataactcaggtaatttcctgaatacagtacactgtacggtaaatattggttgtttatccttgtaatcacgtggttgactgggagctgcagcttgctgcccc

SEQ ID NO: 107082 - DNA, 120 bp, synthetic construct
  source 1..120: mol_type = other DNA
ttgatgagaaggaaacaccacagcatagtgattagaagatgggtgatctgaatttgtgactggctcaatagcacatccttggacaaagacatgatttctgttgctctcaagttctcccat

SEQ ID NO: 107083 - DNA, 120 bp, synthetic construct
  source 1..120: mol_type = other DNA
gtgcaggttagttacatatgtatacatgtgccatgctggtgtatttccaaaatgcatatcttaagtgggtacataccactaggtttccaatcaccatgaccatcatgaagacagtaaggc

SEQ ID NO: 107084 - DNA, 120 bp, synthetic construct
  source 1..120: mol_type = other DNA
agtctcccaaagtgctaggattacaggcatgagccaccaagccaggcctcttatagtgaatttttaatgagtacttggaatccaactgttcttaatttgttttataaaggtggttctaag

SEQ ID NO: 107085 - DNA, 120 bp, synthetic construct
  source 1..120: mol_type = other DNA
aatgaacggagaacagataatccttccacattggcgagtccaagttctaccaggctaagcgtcacaataaaaccgtcaaagatattccagccttcttggaaataatagtaaggatccatg

SEQ ID NO: 107086 - DNA, 120 bp, synthetic construct
  source 1..120: mol_type = other DNA
aagtactgacaacattttgcccatgagcacttttatttatctataagcttattcctatttccctcaatcagagttatacattcttatctattatactaggtgcattactattgtcattct

SEQ ID NO: 107087 - DNA, 120 bp, synthetic construct
  source 1..120: mol_type = other DNA
acattattgaaatggtccgtcattggatagtgctccatggccatgaaaagagtatttaagacaatacagatggtgatggccaggtcaacaaatgggtccatcacaaccaggttgacaaca

SEQ ID NO: 107088 - DNA, 120 bp, synthetic construct
  source 1..120: mol_type = other DNA
tttgttaccaaccttctactgtatttgttagaatgctggctatactcattgctcgttgcctttgggaaggatcttctagaaagtccatggaaacgtggaaagaacttgaccttctctttc

SEQ ID NO: 107089 - DNA, 120 bp, synthetic construct
  source 1..120: mol_type = other DNA
ttacatacccttgacacttaaacatagaatcattcatttactttcataccagagccttggagaatgtcctgctatctaaattcagtgtgggtatatagcaaatcctccaactggaggcag

SEQ ID NO: 107090 - DNA, 120 bp, synthetic construct
  source 1..120: mol_type = other DNA
catttctcaagttcaaagggaaacatccttagaatatggcaatggacgtggtaaacattcagtgaacactggcaccatgaccttaacaaggccaccttggtttttatggatcttgtcttt

SEQ ID NO: 107091 - DNA, 120 bp, synthetic construct
  source 1..120: mol_type = other DNA
tctctggaatgttctgaggcagttgccgttgctgcctgctatattgaagagaaatgattttaacatagcacctgaagagactgtatctttctttgaaagggctgaagtatttgcatggct

SEQ ID NO: 107092 - DNA, 120 bp, synthetic construct
  source 1..120: mol_type = other DNA
gaactagaggagcaactcttcatatgataaccaataatttcttgttctaagaaaagatgatttcctcctaatgccagtctactcattgaataaaagtctctcacttgaaaataccccaaa

SEQ ID NO: 107093 - DNA, 120 bp, synthetic construct
  source 1..120: mol_type = other DNA
tggagtcctccattaacgacctgagcctttaggaaagtcaaggaacagaccaaagttatctttctatatctgctttttcattttcattacttcccacctgagggataatatttgaggggg

SEQ ID NO: 107094 - DNA, 120 bp, synthetic construct
  source 1..120: mol_type = other DNA
gtgtagattatttcatcactgaggtattaagcctagtacccactagttatttttcctgatcctctccctcttcccaccttgcacactctggtaggccctagtgtgtgttgttccctatat

SEQ ID NO: 107095 - DNA, 120 bp, synthetic construct
  source 1..120: mol_type = other DNA
ttctcacgaaaaaaattcattcagtaaaaatagacaggaatgacaggaatttctttgtttttgcaaaacagccacatatttcaaaataaaagaatagtatattttctggtcctctcgcct

SEQ ID NO: 107096 - DNA, 120 bp, synthetic construct
  source 1..120: mol_type = other DNA
agagaaaggactataatagtttctggatgaatttttgatatctcatatttataaatgaagttttgcccattaaattcaatgatctaaccttaatgatcagccttaacctgaggaaaatat

SEQ ID NO: 107097 - DNA, 120 bp, synthetic construct
  source 1..120: mol_type = other DNA
agcaaccaaggatcctaggaaaattctttctagctgaattcttcagccttccaaatgatgataaaatagaaagtggcatttaggagtcaaaactagagtagttatgaacaaagttgttaa

SEQ ID NO: 107098 - DNA, 120 bp, synthetic construct
  source 1..120: mol_type = other DNA
gagagcttcttcacagactggatcagggctcccacaatggttttcaggcctgaaagaaagaagtctattactatgaagacttaacacgtgtgaaataataaaagcttcacacaattttct

SEQ ID NO: 107099 - DNA, 120 bp, synthetic construct
  source 1..120: mol_type = other DNA
ttttctgtaaaactgaatgtcaagcagagaaggatgctgaatcacatgatgggtccgtctcattatctaaccttgctctcacctggaatgactgaaatcgtcttcaatgctcggagaact

SEQ ID NO: 107100 - DNA, 120 bp, synthetic construct
  source 1..120: mol_type = other DNA
tgttgttgggctgcctccttctacactctactttcacttagtctggaatggttttctattatttttctgggtctcttcctgaggaagtttgccactagaaaaaaaagcattggggtgcat

SEQ ID NO: 107101 - DNA, 120 bp, synthetic construct
  source 1..120: mol_type = other DNA
tagccctaaatttaaattcagcttcctaacacaaagagttgtttcgtaaagtgtcttaagagtagtgtgagaaatacaaggtatatgaaatctatttagccattgtctgaaatgtcttgg

SEQ ID NO: 107102 - DNA, 120 bp, synthetic construct
  source 1..120: mol_type = other DNA
caatttgttggtgaccacgcttggaactatattggcctgacatgaagtgaatgtgcctgatggaaatgaaaactttgcgaggttcaatgttgtcttcacatggcatttgtaactaaccct

SEQ ID NO: 107103 - DNA, 120 bp, synthetic construct
  source 1..120: mol_type = other DNA
cacatcttatccaacacagttcaacgcatgaaaacaatttgtagtcaaagtacagcacgatgctaattgttgggttgctctattttgactgagtttatacaagtgcagcaggattcgata

SEQ ID NO: 107104 - DNA, 120 bp, synthetic construct
  source 1..120: mol_type = other DNA
aacaccaatgggaatcatgaaaccaaatcccttaagaccatttggaaatatatgccaacttctctcattaacttccggagtctttactaagcaaacagttttgcatggcagcatcataac

SEQ ID NO: 107105 - DNA, 120 bp, synthetic construct
  source 1..120: mol_type = other DNA
atgagaaaccagcacaatcacaatttctaaagtgccccatgaaaacaaactgtcactggatctcttcttaattagagaggaaatccaatgataccacttaccttttacctaatacttacc

SEQ ID NO: 107106 - DNA, 120 bp, synthetic construct
  source 1..120: mol_type = other DNA
cccctatacttgcaggattttctaaattcaagtaaagcaaacccaccctcccacacccctacctgctaatggagttggtttttgaaaattaagcactttctatctggtatgggtagaagt

SEQ ID NO: 107107 - DNA, 120 bp, synthetic construct
  source 1..120: mol_type = other DNA
caacatggtgaaaccccatctctactaaaaacacacaaaaaaattagctgggcctggtggtgggtccctgtaatcccagttgcttgggaggctgaggcaggagaacaggagaatcgcttg

SEQ ID NO: 107108 - DNA, 120 bp, synthetic construct
  source 1..120: mol_type = other DNA
ggaggtataaagggctgaaactaagtaagatgagtttaatgaaaccaaagcactctcaatgttggtatgtgattctaaatctaaaagtcctttgacatagagaaaattaatactttgaca

SEQ ID NO: 107109 - DNA, 120 bp, synthetic construct
  source 1..120: mol_type = other DNA
taagtagctctagagttttcaaatatataaatatttgccttccccgctatacgtataagaaagggctccaagagggaagagttcaaagactagctaagatattgctgtaccttaaactgt

SEQ ID NO: 107110 - DNA, 120 bp, synthetic construct
  source 1..120: mol_type = other DNA
gtatgagcagggacctagtttaggtccaattgttaatttcaattgatggcaattcagaatacatgtattaactgtttagtacaatatttgcaatgccctgtgctacattctaaagagaaa

SEQ ID NO: 107111 - DNA, 120 bp, synthetic construct
  source 1..120: mol_type = other DNA
gatgattctgtcatagcagggctgttaatatgtttgttacctaatggttgtaaaaaatcacaaaccattggccaaattatcaatgattatgttgtacatgtggattgaaatcttgcccct

SEQ ID NO: 107112 - DNA, 120 bp, synthetic construct
  source 1..120: mol_type = other DNA
ctcatttgtcatagcctgtgagttcaagccaagcttttcttccttttctggctcactgggggatgaaaagttttcttgcaggctttctacctgactctgaagagagtatgccatatttaa

SEQ ID NO: 107113 - DNA, 120 bp, synthetic construct
  source 1..120: mol_type = other DNA
aagaacatttctgtttctccaaagcatggccaattttagtattggaattttcaggttcagtatctttcttctcaaacttcctatctaagaaaatgaggccatcagcttccttctgtctga

SEQ ID NO: 107114 - DNA, 120 bp, synthetic construct
  source 1..120: mol_type = other DNA
tactgccggcctgggagaccagaatcacatcttgcaaaatggcatgagtaggaaacaggaaggacagctataggcttatttagattccatcactgacttctcttttttttttttccactg

SEQ ID NO: 107115 - DNA, 120 bp, synthetic construct
  source 1..120: mol_type = other DNA
tcctggatgtaagggagagtctgggtgacttttagttttacaggagctgatgataagcaaagaacagctacacactggggactgcccatatgacaattcgtgaaattataagcttttaat

SEQ ID NO: 107116 - DNA, 120 bp, synthetic construct
  source 1..120: mol_type = other DNA
tgtgggcatatgccattggaaaatatactctcagcagtgacattttaataagctcactgacactgcctttgtaaaagattacagagagcttcagtgtggtggttgtgttttttctattca

SEQ ID NO: 107117 - DNA, 120 bp, synthetic construct
  source 1..120: mol_type = other DNA
ttcagccctgcaaaaagcttcgtgtgcattgctgttgaatgacttacatttgaagatttgcttgctgtcagttcaatgtaaaagccatgagtataccttaccttggggaaaactctttcc

SEQ ID NO: 107118 - DNA, 120 bp, synthetic construct
  source 1..120: mol_type = other DNA
catactctatactgtgaatgaatttctgcctggaacacatcagtcttcacttcaataccgaagtcattttaaacgaattaaaatgtttaggcaattggattatctgcatttttacttttc

SEQ ID NO: 107119 - DNA, 120 bp, synthetic construct
  source 1..120: mol_type = other DNA
ctgcctcaaattcacatattacaaatgccaaacttttgcatgcatttggcaaggactaacttcacacagaactgggccagaaacagagtccctaaaagtttagggggtattttaaggtcc

SEQ ID NO: 107120 - DNA, 120 bp, synthetic construct
  source 1..120: mol_type = other DNA
ggcccctcaaagtgctgggattacaggcttgagccaccgcacctggcctctttttatttgtcatggtgcatttgggacagttgcatatgttatgatataatcaattcatttctcatgtat

SEQ ID NO: 107121 - DNA, 120 bp, synthetic construct
  source 1..120: mol_type = other DNA
aaatctaaccctctaggtctgacaagtgattcctggccaagatagtcaggatagtttgcagtgaccaaccttaatgaccaatcaaatagttattgctgtcttgactgggctttaacctct

SEQ ID NO: 107122 - DNA, 120 bp, synthetic construct
  source 1..120: mol_type = other DNA
ttcagcggttcttagaacttaacctgcagttatttagtacctgcaagaataggttgtctgtaaatcaatgaaaactgaatgttctgtctacaaactctggttcccctacaaggcatcagg

SEQ ID NO: 107123 - DNA, 120 bp, synthetic construct
  source 1..120: mol_type = other DNA
atggtgctttgtgctacagattttaaaagatttaattaaaaatgttaaaattgttaggtgattatctaattcttctttggcttctggatactgtataatgcttagaaaggcatccagaga

SEQ ID NO: 107124 - DNA, 120 bp, synthetic construct
  source 1..120: mol_type = other DNA
ttttctaggagtgatggtgaggaggaattgtgccagcttgcttcttcactgccattttggaaccagaactcaggtgatgactttttagatataacaccaaaggcacgatccatgaaaaaa

SEQ ID NO: 107125 - DNA, 120 bp, synthetic construct
  source 1..120: mol_type = other DNA
agagacaataaaaagatcagtgattgccagggcagtgaaaatactttgcatgacactgtaatagtggacacatgtcattatacatttgtgcaaacccatagaatgtacaataccaagatt

SEQ ID NO: 107126 - DNA, 120 bp, synthetic construct
  source 1..120: mol_type = other DNA
taccctatgctctgataatgtagttcgtaccatttctgtttcttggaatttattgtgatttatttttatcctaatagaggttgtttttaaaatgacttttctaagaacattaaaaagaaa

SEQ ID NO: 107127 - DNA, 120 bp, synthetic construct
  source 1..120: mol_type = other DNA
cacttacaaaggagatttcacctctttattctaaaaatttataacagaagacttaattgtcctaatttatgaaaatacatgtcactagatacggggtagtaacctcatagaatctgcagt

SEQ ID NO: 107128 - DNA, 120 bp, synthetic construct
  source 1..120: mol_type = other DNA
accctcaaagtgcagatggaggagctttatttaaagtaatcctaacccatgaagccttacagttaaactcccttgggcatctgcttttctccagtcaaacaaatatgtacgatagctcac

SEQ ID NO: 107129 - DNA, 120 bp, synthetic construct
  source 1..120: mol_type = other DNA
tagtacttaatgtgatagtattttgttgttgatgtggaacagtgttagtctataatacaggctttcaggcagacaagacctagtttaccttgacctctggacttctgaaaggttgagtaa

SEQ ID NO: 107130 - DNA, 120 bp, synthetic construct
  source 1..120: mol_type = other DNA
tctgccaaaatgcttgccatctccttgtaaagagctattactattctggggacataaaccatctgggcacgacaatttgtgaagtgtttcagttcgttttgtagtgttcttgccacctac

SEQ ID NO: 107131 - DNA, 120 bp, synthetic construct
  source 1..120: mol_type = other DNA
gaaaataagtaatcttattgtgtgggtgagtggtcactcgacagagatttgggaggatgtagagagtgaagtctaatcctcgtgactgtgattgtggttgcagattttgagataccaagt

SEQ ID NO: 107132 - DNA, 120 bp, synthetic construct
  source 1..120: mol_type = other DNA
caaagcctggtccattcctcagaatgtgggccatacagtggatgaagccctttgtttggattaaatgaatgttgctaggtggagagtgctaagtgaaaatgctatataaactgcatgctt

SEQ ID NO: 107133 - DNA, 120 bp, synthetic construct
  source 1..120: mol_type = other DNA
acaaatggaacctccctgagttatgaaaaattgagactagaagtatcagagctgcagaattcatttggttcagattctgtatatataaaatctagacatagaacaagtctaagcaaaggc

SEQ ID NO: 107134 - DNA, 120 bp, synthetic construct
  source 1..120: mol_type = other DNA
cacagatttgtatagagtggacactaccagatgtccagcacatctgtcacagcagatgtgacattgagccaagtctatttctgtctaggtgtatgatacttggtgctatactttggatat

SEQ ID NO: 107135 - DNA, 120 bp, synthetic construct
  source 1..120: mol_type = other DNA
atagacaatgtgcaaggcactggttagagatgtggagactatgaagttggcaaatagagaataataatattgagaatcctgcaaagtaaccaaattgattttagaagctcctttatgaaa

SEQ ID NO: 107136 - DNA, 120 bp, synthetic construct
  source 1..120: mol_type = other DNA
ggcattattgttttagaatgttaccaagttggcctagaagagtacttgatttgttgcgacaactgttgttgttctctaggtagagtgttgcgtaaaggaaacagtgatgtccaaaggggc

SEQ ID NO: 107137 - DNA, 120 bp, synthetic construct
  source 1..120: mol_type = other DNA
actaggtaggggatggggctggctgggacctgttaatttcagtggaagaatacatatggatgaattacttttagtggggattttctgatggaatgaattatcaatgtgccaggaagagac

SEQ ID NO: 107138 - DNA, 120 bp, synthetic construct
  source 1..120: mol_type = other DNA
caaataggaattttgcaacattgagctctctttaagcagaagccaggccataggttcttcactagtcaccagggtctacagcctttattgtctttaccagtcactaggtatgagacattt

SEQ ID NO: 107139 - DNA, 120 bp, synthetic construct
  source 1..120: mol_type = other DNA
taaaaacatcaggggttaaatagcatgggtaaaggacatgaaccaagctgcagagaagaggctgactgcctgctatatttgcaggcattactcagcacttttcttaaaccgatacatctt

SEQ ID NO: 107140 - DNA, 120 bp, synthetic construct
  source 1..120: mol_type = other DNA
aaatgttagaacaggtcatatcttttgggtttatttttaattgtttcgtacagatgaggtctcgctatgttgcctaggctagtcttgaactcctggcctcaagtgatccttctgcctcag

SEQ ID NO: 107141 - DNA, 120 bp, synthetic construct
  source 1..120: mol_type = other DNA
tcctgagtagctgggactacagttgcctgccaccacgcccagctaatttttttatttttatttttagcagagatggggtttcaccgtgttagctaggatggtctcaacctcctgacctca

SEQ ID NO: 107142 - DNA, 120 bp, synthetic construct
  source 1..120: mol_type = other DNA
gacgtgttggaatggactacttgcaaacagaatcactgagccacttaatgagttgagtggttgaaagtgtccttttaaatgatcaatttagaccccagagaatatctgccagacagaaca

SEQ ID NO: 107143 - DNA, 120 bp, synthetic construct
  source 1..120: mol_type = other DNA
ctcccttctaatttctgcccaacttcactaatctccttagggtagaaactgtaatagaataatggtgataagaacagtaaaaagatgatgtctgatttttgtatacatttcccttagtac

SEQ ID NO: 107144 - DNA, 120 bp, synthetic construct
  source 1..120: mol_type = other DNA
cataattctgatatgaaagttggaaatcagggatgaaaaatcacttttttttttggttgttgttacagagtctcgctctgtcgcccaggctggagtgcagtggtgtgaattcggctcact

SEQ ID NO: 107145 - DNA, 120 bp, synthetic construct
  source 1..120: mol_type = other DNA
ccatgtcacccaggctggtcttgaactcgtgagctcaagcaatctgcccgccttggccttccaatgttttcttttttaacaatttacaaatgtacagtgattacacttcgtttctatttt

SEQ ID NO: 107146 - DNA, 120 bp, synthetic construct
  source 1..120: mol_type = other DNA
taaaattcaacatctcttcatgttaaaaaccctcaacaaattaggccaaagcataagagccatctataaccaactcacagccaacatcatactgaggaggcaaaagatgaaagcattctc

SEQ ID NO: 107147 - DNA, 120 bp, synthetic construct
  source 1..120: mol_type = other DNA
caccacccaactataatacaagtctacagtaaccaaaacagcatagtactggcacaaaaacagcttatccaccacaatcaagtgggcttcatccctgggatgcaaggctggttcaatata

SEQ ID NO: 107148 - DNA, 120 bp, synthetic construct
  source 1..120: mol_type = other DNA
tgacttcaaactacactacaaggctacagtaacccaaacagcatggtactggtaccaaaacagagatatagatcaatggaacagaacagagccctcagaaataacgccacatatctacaa

SEQ ID NO: 107149 - DNA, 120 bp, synthetic construct
  source 1..120: mol_type = other DNA
gtatgtttattgcggcattattcacaatagcaaagacttggaaccaacccaaatgtccaacaatgatagactggattaagaaaatgtggcacatatacactatggaatactatgcagcca

SEQ ID NO: 107150 - DNA, 120 bp, synthetic construct
  source 1..120: mol_type = other DNA
tagagaaatgaaaatcaaaaccacaatgagataccatctcacaccagtcagaatgacaatttttaaaaagtcatgggcggggcgcggtgactcgcgcctgcaatcccagcactttgggag

SEQ ID NO: 107151 - DNA, 120 bp, synthetic construct
  source 1..120: mol_type = other DNA
tatatatatatatatatgacggtttctgttctagaggagcagacagtctgttaggccagacacagttgaatagcaatatattataatattgaggaagtaggctgggcgcggtggctcacg

SEQ ID NO: 107152 - DNA, 120 bp, synthetic construct
  source 1..120: mol_type = other DNA
gtgtatagctagagcagtgtatagctagagctgatttgtctgactctagccctagtttctttccattatatcaatttcctggaaatgtatctctgttcatggcatagtgcctgacactat

SEQ ID NO: 107153 - DNA, 120 bp, synthetic construct
  source 1..120: mol_type = other DNA
tatatatgagactatgagaccgccaaatgatatttctcagccaacagccttcacagacatttgtcttagagccgatttggctactttgtgttgccagtatgctgttgtaagaaagcacag

SEQ ID NO: 107154 - DNA, 120 bp, synthetic construct
  source 1..120: mol_type = other DNA
ctttacccctataaactgaagcatttgaaaatcagtaatattaactgagcaaaataacttgtggcaacaggtatcagtctgggacacaatcaagatacagaaaccgggccgggcgcggtg

SEQ ID NO: 107155 - DNA, 120 bp, synthetic construct
  source 1..120: mol_type = other DNA
ggggaaaaacaccaccagatgtcattacacaagcacgttgccaatggtccattgctaatggtccacattgctaatgatcgaagtaaaatcaaaatgtagcattagaaccaggaagagaag

SEQ ID NO: 107156 - DNA, 120 bp, synthetic construct
  source 1..120: mol_type = other DNA
tatcaattcagctttgggtgctaacataatttaattgggaaagaataatcatttcagcaactagtactagaaaaaccagatatccacatgcaaaaggaaggatttgaaactgtggataac

SEQ ID NO: 107157 - DNA, 120 bp, synthetic construct
  source 1..120: mol_type = other DNA
gaataagcaaatgtacagagacagcaaatagtgattgcctaggactgggagtgggaatagagagtgactacaagtgggcatcaagtttctttttagctcaatggaaatgttctaaaatga

SEQ ID NO: 107158 - DNA, 120 bp, synthetic construct
  source 1..120: mol_type = other DNA
atggtgacctgtgatcagtaatatttaatgtcactttagtaattgcttggggatggcaagaactgcacccaaataagagtgaacttaattggtgttacgtctgctctgactgctccacca

SEQ ID NO: 107159 - DNA, 120 bp, synthetic construct
  source 1..120: mol_type = other DNA
cctccataaaattaaagtgcaaggttaagcagtaggtactggtgtagaagctgcagcaagttatccagaagatctagctaagatcattgatatggtttggctatgtccccacccaaatct

SEQ ID NO: 107160 - DNA, 120 bp, synthetic construct
  source 1..120: mol_type = other DNA
gggaggaggtaaaaatatccatatgaacaggagtttggaagaaatcgattccaactttcatggatgactttgaggggtacaagattcagtggaagaagtaactgtaaatgtggcagaaat

SEQ ID NO: 107161 - DNA, 120 bp, synthetic construct
  source 1..120: mol_type = other DNA
cttcaggattgaggctagtcactagaaagacctgcatctgcaagggatgggctaggggttgaagattaagctaatcaccaatggtcaatgatttaatcaattatgcctacataatgagac

SEQ ID NO: 107162 - DNA, 120 bp, synthetic construct
  source 1..120: mol_type = other DNA
accctctgagaattagatgcatacaccaaggttattgctagagggcaagaattactacactttaagataaaacacaatggagacttggaagggtagtaggtgcaaggtgggtggatgata

SEQ ID NO: 107163 - DNA, 120 bp, synthetic construct
  source 1..120: mol_type = other DNA
ttatacttttgaactattctgatggcattaaaaaatgtttaagatgtaatatgtgctacaaaattgaaaacaccataggaatcccattattcaaacaggaagagaaatggtttagagcaa

SEQ ID NO: 107164 - DNA, 120 bp, synthetic construct
  source 1..120: mol_type = other DNA
gtgcagtgggagagatgatagaaatgtatacaggacctaggcacaacacaaaaggaaattaatcatacttggggaagaagaggtcgtggctattcaccaaataaagaagcagtagcaaag

SEQ ID NO: 107165 - DNA, 120 bp, synthetic construct
  source 1..120: mol_type = other DNA
ctaagttatgcaggtcttcaaaatattggaagatttcattattcatctgttaatattaccactaatcacatcagaaaccctgtaagttttgagaagctgttgagctcatggtggcagatg

SEQ ID NO: 107166 - DNA, 120 bp, synthetic construct
  source 1..120: mol_type = other DNA
tatgttactgaatggaaggagggttagaaatcagcagagtatgcaaaaacagagtaaaacaaaatgcctaggaatgaaaaaaaaaagagagagagagagagagagtcagggagagtaaga

SEQ ID NO: 107167 - DNA, 120 bp, synthetic construct
  source 1..120: mol_type = other DNA
aacaggccagggaccagtactggtccgtggcccagggtttggggacccttaatctgatgttactaagttacatcattaataatctatttctcctcacacagatttctttcctcacatcct

SEQ ID NO: 107168 - DNA, 120 bp, synthetic construct
  source 1..120: mol_type = other DNA
ttcttttttcttttctcttttttttttttttttttttttttttttgagacagagtcttgctctgtcatccagacgccaggccggagtgcagtggcatgatctcggcttgctgcaacctcc

SEQ ID NO: 107169 - DNA, 120 bp, synthetic construct
  source 1..120: mol_type = other DNA
tgattttagtagtcataagtattgccagagacaactgttagaggctgaattgtatcctccccaaatccatatgttggagtctcaaactccggtacctcagaatgtgactgtgttaggagt

SEQ ID NO: 107170 - DNA, 120 bp, synthetic construct
  source 1..120: mol_type = other DNA
ccggggaaagaattgtcttttcaacacgtggtgctgggacaactagatatgaacaaacaaaagagtaatgctgaacccctacctcacattatatgcaaaaagttgactcagaatgaatcc

SEQ ID NO: 107171 - DNA, 120 bp, synthetic construct
  source 1..120: mol_type = other DNA
ggggaaagcgtagaacaaggagtttgatctgtaactgactgtgaacaatcaactgagataactcactacctttggatcagttcttttcaacatttttgaggcaatttttttgcattctag

SEQ ID NO: 107172 - DNA, 120 bp, synthetic construct
  source 1..120: mol_type = other DNA
agtggatttgggtaatcattctaaaccaaactgtttttggaattttggcatgtcagaaagcagatgaattacagctcacatgtacgactgcacccaacttcagtcctgagtctcttggct

SEQ ID NO: 107173 - DNA, 120 bp, synthetic construct
  source 1..120: mol_type = other DNA
tgtttaccctctctgattgtctggattccctgatagtaccctctatacaaggaactagaatgtttcttactggattcctctgttggtggtgatagagtttactttgggtatctagtcggt

SEQ ID NO: 107174 - DNA, 120 bp, synthetic construct
  source 1..120: mol_type = other DNA
ccacttctctgggcaggagaaactaaagcaggaatcaccaacctcagcatggaattttcctatttctgtctggcaacatcctcttgggatgatttaaagtgctttttggagaaatatgtt

SEQ ID NO: 107175 - DNA, 120 bp, synthetic construct
  source 1..120: mol_type = other DNA
aataggatgaaggcaagcaaaggcaagaactggccagatgccaagctatttcaggccaaagaatcccatcttctatcaaaatgctgaactgcaaaacaaacctgatttcagttcatggaa

SEQ ID NO: 107176 - DNA, 120 bp, synthetic construct
  source 1..120: mol_type = other DNA
ttgtgttttaggattaggtttcatattatagtgaacagctcagagtcacaaaatgtgagttttacttcaacactgatgaacacatgcctttaacaaagccactgaagtcttctatggaca

SEQ ID NO: 107177 - DNA, 120 bp, synthetic construct
  source 1..120: mol_type = other DNA
tttcctgttccagctcaaaaactctatccagtgctttcccaaaagccagttggagtagcatgaacacattcatttgaagttactcaatgtctgggaaatgatgttgcccagtatctggta

SEQ ID NO: 107178 - DNA, 120 bp, synthetic construct
  source 1..120: mol_type = other DNA
cctccatgtctttgttcacaaccttcacttctcttggcagacctttcatccatctacacatagcaaattcggcggatattttaaatgtctgggtcaaatattctctcttctccaacgtct

SEQ ID NO: 107179 - DNA, 120 bp, synthetic construct
  source 1..120: mol_type = other DNA
tctgtcaatagattttgggtattaaagagagcgtgaggtcactcaggtggaaaaagctgggccaggtaattttgtctgttagttttacgacataaaggagagtctctcgatgccattaga

SEQ ID NO: 107180 - DNA, 120 bp, synthetic construct
  source 1..120: mol_type = other DNA
tcacaaagcattcaccaacactgtgccactattttagaaatagaaaccatatcctagccgaaaatgataaactcatatatttccttttgagattaacctgcccttttgaaagggagtcag

SEQ ID NO: 107181 - DNA, 120 bp, synthetic construct
  source 1..120: mol_type = other DNA
tgctatcgagacaacgcacagaagccagaattatgtctgcaggtgattatttcagggaagcagttactccttgttggaagattcactgcaatttcctttcaattacataggcagacattg

SEQ ID NO: 107182 - DNA, 120 bp, synthetic construct
  source 1..120: mol_type = other DNA
gttttgctaatcattgagaaattgtggagctggaaaagtctcagagataaaccaggcaagtgttcttattttggatatgaggaaactgatgccaagagaggtgcagtgacttgtccaagg

SEQ ID NO: 107183 - DNA, 120 bp, synthetic construct
  source 1..120: mol_type = other DNA
ctattctgtgtttatgtgttctttcctttgctcttaagtcagttaaacataatgcttgggttctttcctgatttatttcattcagcaatcccccctaccccccgacatcccttgcaaaga

SEQ ID NO: 107184 - DNA, 120 bp, synthetic construct
  source 1..120: mol_type = other DNA
ctaagtgcagtctctcatacctgttcatctgcagtggcatgaaaggcaaacagattcttctgctcattatgggttgttgaaatgacagaaccactttgtctcaacattttctatgacact

SEQ ID NO: 107185 - DNA, 120 bp, synthetic construct
  source 1..120: mol_type = other DNA
tgggctgcattcaaagccaacggatgaaggaccccaagtttctcaatccctggaaagtggacttgaaagtctttccctctacttgtccattattccacttctaacctacattttaatact

SEQ ID NO: 107186 - DNA, 120 bp, synthetic construct
  source 1..120: mol_type = other DNA
ttttagcaaagagactggtggcattttgtccctgccctagacatttgtggaactttgaacttgggagagatgatttagggtatgtggtggaagaaatttctaagtggcaaagcattcaag

SEQ ID NO: 107187 - DNA, 120 bp, synthetic construct
  source 1..120: mol_type = other DNA
tgacttggatgtgagacatggaatcaaagatcattttggagcttaaagatttgactgccctgctggatttcagacttgcacagggtctgtagttcctctgttttggccaatttctcccat

SEQ ID NO: 107188 - DNA, 120 bp, synthetic construct
  source 1..120: mol_type = other DNA
tatcttcatgaatttataaatgaggcaactgaggctcagagtagttgagcatcttggccaagatcacacagtaacgaggtgactaagtgtgattctgaaaccagcagtgtatctccaaag

SEQ ID NO: 107189 - DNA, 120 bp, synthetic construct
  source 1..120: mol_type = other DNA
aagcaaacccaatctactcttctaagtcacatttctaatgtcaattgacttgagtggctcttgaagtaaaaattaactttccagtttctcttccctcaggcccagtctgcagtggcaatc

SEQ ID NO: 107190 - DNA, 120 bp, synthetic construct
  source 1..120: mol_type = other DNA
gaagggcctggcacacctgctaaagagggaaaactggaaccgcattcccaaggaatccatgaaaatatcgtgttgagaagataaaaccaaatagtttgctttttatttccacaagtttgg

SEQ ID NO: 107191 - DNA, 120 bp, synthetic construct
  source 1..120: mol_type = other DNA
tttcatttgaaacaaaacaagaaagatttattttttcagaactcagcatttttttttttttttttgagatggagtttcgctctgtcgcccaggctggagtgcggtggcaggatctcggct

SEQ ID NO: 107192 - DNA, 120 bp, synthetic construct
  source 1..120: mol_type = other DNA
gcattagcagttccgagttgcagacagttctttttaaaatttgttttttggttcttccaggcctcatttgcaagttgctacttaattaactagggtggttaatgttaggtaaagtccaaa

SEQ ID NO: 107193 - DNA, 120 bp, synthetic construct
  source 1..120: mol_type = other DNA
ctggtctcaaactcctgacctcatgatctgccagccttggtctcccaaagtgttgggattacaggcgtgagccactgcacctggcctaagtaattttttttttttttttttttttttttt

SEQ ID NO: 107194 - DNA, 120 bp, synthetic construct
  source 1..120: mol_type = other DNA
taaattgaaaaggtgattggtgtaggtaagtctctgttaaaaactagggacagacagacactgggtcacttgacagagtggttaggtgtagtatacatgaaaccacgatgccaggacaca

SEQ ID NO: 107195 - DNA, 120 bp, synthetic construct
  source 1..120: mol_type = other DNA
acagtaaaaaccatttttataatatttaaccaaattacttcccagcacagtggttctcagacttcagcatgcctcacagtcacctggaggaaaggcttacacaaacacagattgccagga

SEQ ID NO: 107196 - DNA, 120 bp, synthetic construct
  source 1..120: mol_type = other DNA
atcacgtagacagtttatgcagactttactttcctaactcatgtcatcctgtccaaggtactgaacttcacttgccaaggacacacaggaagataaaccctctcaaatgtgctacatttg

SEQ ID NO: 107197 - DNA, 120 bp, synthetic construct
  source 1..120: mol_type = other DNA
gccaagactgtagtacataaactgctgaaacatgcaaaaatatttacccccaaaagatgtagtaaaagctcagcttcctccagcttccataacccctgaagtgttaatctggaggaacag

SEQ ID NO: 107198 - DNA, 120 bp, synthetic construct; identical to SEQ ID NO: 21747
  source 1..120: mol_type = other DNA

SEQ ID NO: 107199 - DNA, 120 bp, synthetic construct
  source 1..120: mol_type = other DNA
agagaataaaatacctaggagtccaacttacaagggacgtgaaggacctcttcaaggagaactacaaaccactgctcaatgaaataaaagaggatacaaacaaatggaagaacattcgat

SEQ ID NO: 107200 - DNA, 120 bp, synthetic construct
  source 1..120: mol_type = other DNA
gacaaagggctaatatccagaatctacaatgaactcaaacaaatttacaagaaaaaaacaaacaaccccatcaacaagtgggtgaaagacatgaacagacacttctcaaaagaagacatt

SEQ ID NO: 107201 - DNA, 120 bp, synthetic construct
  source 1..120: mol_type = other DNA
attttatttatacatgaagtttggtgagaagtgctcgattagttcagacaacatctggcacttgatgtctgtccttccctcctgctggtcattgtgcagttctggaaattaaaaaggtga

SEQ ID NO: 107202 - DNA, 120 bp, synthetic construct
  source 1..120: mol_type = other DNA
gttttgttaatactcttacaggaggggaagaaaaggcaactatcagtgcctagggccagccctgggacccaggccactctcctctggaagccttttatttttgtaggactgacaatatga

SEQ ID NO: 107203 - DNA, 120 bp, synthetic construct
  source 1..120: mol_type = other DNA
gaagtcggcgagatcttcactgtggctgtagtcagacccccgcacctggaggttatcgctggtggctctagtgacactgtcataggagggtgggaaggaagtggaggagatggaggagct

SEQ ID NO: 107204 - DNA, 120 bp, synthetic construct
  source 1..120: mol_type = other DNA
cgaaggtctggaagttgaacatgtcgtcgatgccagcctcccacttgacataagcgaagttggccatgccaaagatggagtagatgaacatgacgaggaagagcagcagcccgatgttga

SEQ ID NO: 107205 - DNA, 120 bp, synthetic construct
  source 1..120: mol_type = other DNA
atggaataaagagtgaaataaacttgtcttatatggcccaagtgccctttccagactccttatataataatgtcactgactgacatgggtccagtgtttacgatcactggggcaatgggc

SEQ ID NO: 107206 - DNA, 120 bp, synthetic construct
  source 1..120: mol_type = other DNA
gaaaaacagtttggtggtccctcaaaactttagataagtggttttcaggggtgagggagaggggaaatgaatggggattgactattaaatgggtagagtttcctttggggaaaggaatat

SEQ ID NO: 107207 - DNA, 120 bp, synthetic construct
  source 1..120: mol_type = other DNA
gcagccagcttgacaatacactcgcctgtgaagatggccacaaagagcaggttgatcttggccaagatgttgattttctcaggactttggtcatctgtctccaccatcatggtcaccata

SEQ ID NO: 107208 - DNA, 120 bp, synthetic construct
  source 1..120: mol_type = other DNA
agatttgctcaggtacagagggttcctgtgggtggggagtgtcctgggatgctacatccttatcataccttcctccctatctctacgaggctgggacctctcttcatgatcagacatctg

SEQ ID NO: 107209 - DNA, 120 bp, synthetic construct
  source 1..120: mol_type = other DNA
tgatgacaccaataaagaggttcagggtgaagaaagacccaaagatgatgaaaatgacaaaatagatgtacatgtagaggttgtattcccactgaggctgctcttcatactgcaagggag

SEQ ID NO: 107210 - DNA, 120 bp, synthetic construct
  source 1..120: mol_type = other DNA
agggaataagcttcttgattgaggccgagagtctgagggggcttgcaggaggtctgcccttcagatccaccctcatttccatttctaaaacatcacagaatcctgacagtgattctgtca

SEQ ID NO: 107211 - DNA, 120 bp, synthetic construct
  source 1..120: mol_type = other DNA
agtctcatttgtgtttttggccaaatccagtcctgccccgagccttttttttttttttgagacagagtctctctctgttgcccaggctggaatgcaatggtgtgatctcagctcactgca

SEQ ID NO: 107212 - DNA, 120 bp, synthetic construct
  source 1..120: mol_type = other DNA
ggtaggttaattttatggaatgtgtgataatcactgaagccaccatactcacaaaatcagtggaaaccctagaaggattgtgcgtgcttaaacattgcacatcaaagatggaaatatatt

SEQ ID NO: 107213 - DNA, 120 bp, synthetic construct
  source 1..120: mol_type = other DNA
gttgtcaaagttgactttcaccttggtccagtacaattctccggtcaagttcaaggactcacactggctcttgttgttcacgatggtgtagttcaaaggcaagtctccctctgtctggtt

SEQ ID NO: 107214 - DNA, 120 bp, synthetic construct
  source 1..120: mol_type = other DNA
agctcttaggacaccaaacatctgggtgtagagtgaggtggggaagccctgggagtttgcccttggctggctctgtggccaatggccaccgcagaggcattcctggcacctagtgtctca

SEQ ID NO: 107215 - DNA, 120 bp, synthetic construct
  source 1..120: mol_type = other DNA
tagctgagacccctgtgcccagcaagtcttgcttcctctcctttgtccggtgctctcccagccctcatgggagctcacagggcttgagggtgagccctggaggtgggttctcacagctgc

SEQ ID NO: 107216 - DNA, 120 bp, synthetic construct
  source 1..120: mol_type = other DNA
gattttatccttctaaagctccatgggcatccactcccttcttacttcaccgctggcctgtgatcacaggccaaaaatggcctgctgcctgacctcccctgcagtcaccattagcaccac

SEQ ID NO: 107217 - DNA, 120 bp, synthetic construct
  source 1..120: mol_type = other DNA
atttaaaagtggtaacctgcaccttcccctccaccccaccccttcccttcccaagttctctttgctccatggtagataccactttttcacataatgtaaaagtggcttattgattatgct

SEQ ID NO: 107218 - DNA, 120 bp, synthetic construct
  source 1..120: mol_type = other DNA
gcctctgagtggggtatggagactgcacaggcctgagcctgttctgtaaccacaggaaggatagctcctgctggtatgcagaacccgatgtcaaggctggaagccatcagcaaacccggc

SEQ ID NO: 107219 - DNA, 120 bp, synthetic construct
  source 1..120: mol_type = other DNA
gcctcagctccttctcccgcaccggcaatgggtttctccttcctgttcccttcgggtgcccacactcacgtctacgatgaggaagtcgagccagcaccaggcattggtgaagtacttctt

SEQ ID NO: 107220 - DNA, 120 bp, synthetic construct
  source 1..120: mol_type = other DNA
tagatggataataaggtagagtgaatggtgtgaccccctctcccttagcaatgaagatcaagtctgagttttgggctaggcctttctaaaacttgccattttaacaaggagagagggtat

SEQ ID NO: 107221 - DNA, 120 bp, synthetic construct
  source 1..120: mol_type = other DNA
aagtaaaaggcatctctaatttcatgacaccaaagtaaccactgctaacatttaggtgagtattatttttgacagtgtgtatgtgtgtgcacatacacacaatcaccacaattttatgag

SEQ ID NO: 107222 - DNA, 120 bp, synthetic construct
  source 1..120: mol_type = other DNA
gtttggtaaggagtaaatatccattttaatgctttttttcagaatgtagctcatcaaatgccccaacactttattaaataatccacttaaaatccactgattaaaagtcaactttatcat

SEQ ID NO: 107223 - DNA, 120 bp, synthetic construct
  source 1..120: mol_type = other DNA
cctttggattcagtagtagaaaacgtattttatttctattcttaccagagttctgaaaatcaggcattcactgaaataattatatggttttttatctttgtcctattaatacaaatagtt

SEQ ID NO: 107224 - DNA, 120 bp, synthetic construct
  source 1..120: mol_type = other DNA
gctttttctctacctctacacttttcttatttttccagatctcacgtggacagaattaatggaatcacaatctttgatttatagcacactatcatcaccattggtgcatgagtggccttc

SEQ ID NO: 107225 - DNA, 120 bp, synthetic construct
  source 1..120: mol_type = other DNA
tcctgtctcagcctcccaaagtgttaggattataggcatgagccactgcacccagccaatcgttatatttttattataggttggaccctctttctctcatctcaagcttttaacattgaa

SEQ ID NO: 107226 - DNA, 120 bp, synthetic construct
  source 1..120: mol_type = other DNA
gtttgtggctgtttaaaaacaaaactagttaacatattgtcaaaccatctttctctgaagcctacagagatttggctctagctgccaatggtaaaacagcaggcaggctgcaagtcatgg

SEQ ID NO: 107227 - DNA, 120 bp, synthetic construct
  source 1..120: mol_type = other DNA
atggctgaatacatagagctagatacaaggagggtttttagaagactgactgaacaaatgagaagtcaaggcaaaggactctggaatctgactgcttgggttcaaatgccagatctgtgg

SEQ ID NO: 107228 - DNA, 120 bp, synthetic construct
  source 1..120: mol_type = other DNA
acaaggctgggctgggataggttccagcttgtccgctgctcatctgggaaactgtccccctgggaaaatggtaggaactcctgggcattccctgggtcttctccatgtttgtagtttctg

SEQ ID NO: 107229 - DNA, 120 bp, synthetic construct
  source 1..120: mol_type = other DNA
cgggccattaccttcagtgaagcagtcctctgggtccttgacatcctggccgaggtcagggatctgctccaggagctcagcggtgttggtcatgtctgctgtgctgccctcggagcaact

SEQ ID NO: 107230 - DNA, 120 bp, synthetic construct
  source 1..120: mol_type = other DNA
ccttgagttggggcaatgctgtggtgcaattcatgccccagagctctacttgggacaggatgaggctgactccagctggaaagcctttccgtagcttccttctttgcttcatcctgtttc

SEQ ID NO: 107231 - DNA, 120 bp, synthetic construct
  source 1..120: mol_type = other DNA
aactgatttgaagaaaggaagacttataaaattcattcaaaggttagcatccgtgtgagagagccacttctctcccatggcattttgcctctctcctgtgtcttcctgtccccacatgcc

SEQ ID NO: 107232 - DNA, 120 bp, synthetic construct
  source 1..120: mol_type = other DNA
aaagaccccagcctatgagctgagtccacacacccagccagagggtctccagggccctgaccctgggggtttcagaccctgcccatgcatctggggcattgcctccagctgtcttcatgg

SEQ ID NO: 107233 - DNA, 120 bp, synthetic construct
  source 1..120: mol_type = other DNA
tgcctgctttgtgcagactctggtcccaagtgttaaaaataacaggttgcgagataagatagtgctgtccctgacacctcagtcttagggatgcttatttttaaatctcagaatgagccc

SEQ ID NO: 107234 - DNA, 120 bp, synthetic construct
  source 1..120: mol_type = other DNA
tgacaaacagctccgaggcttgaatccagggccctgagccctcatcctaacccctcattttattgaatgtggaaggtttggctataaaagaaaatacaaatttgaatccctctttccaag

SEQ ID NO: 107235 - DNA, 120 bp, synthetic construct
  source 1..120: mol_type = other DNA
gttctttttggaaatccactctgagactctgttccggtttctcaagagcctctaaaacacacctctaccagggaccccatacctatcagcaagctgggaatgagaattctgataaaagcg

SEQ ID NO: 107236 - DNA, 120 bp, synthetic construct
  source 1..120: mol_type = other DNA
tggataaggcacatgggagaagagagcagacaggtttggggaaaggctctggaatctatagcccatagtacttgccccacagcagcctgaaaaagtgaatgtaaaacctctctgtgagct

SEQ ID NO: 107237 - DNA, 120 bp, synthetic construct
  source 1..120: mol_type = other DNA
aacatggtgaaaccccgtctctactaaaaatacaaaaaattagtcaggcgtggtacatgcctgtgatcccagctactagggaggctgaggcagaagaatcacttgaacctgtgaggcaga

SEQ ID NO: 107238 - DNA, 120 bp, synthetic construct
  source 1..120: mol_type = other DNA
ataacaagcaagaagaccagcaggcataatgactgccccgacacctccatgcagtcccacatggtctcgatccactctccacagaggatgcggaagatgatgaggaaggcatgaaagaag

SEQ ID NO: 107239 - DNA, 120 bp, synthetic construct
  source 1..120: mol_type = other DNA
ttacctcatttgacagaagaagctgccaaccctcacaggtggagtaacttgtctaagtcccttggttcatagcagctgagtcaggattagaacccacggccttggctttccctcctgccc

SEQ ID NO: 107240 - DNA, 120 bp, synthetic construct
  source 1..120: mol_type = other DNA
tgtcgaagatgttccagccctgttggaagtagtagtaggggtcgagggcaatgatcttgaaggtcatctctgctgtgaaaatccctgtgaagacctgaggagggagcaggaattgtttgg

SEQ ID NO: 107241 - DNA, 120 bp, synthetic construct
  source 1..120: mol_type = other DNA
ctgcagtgtgccaattgatgggagcctggttcccagaggagagaatgttctgtgacggtgtggatggcaggaagtcagggtcctgtacgcagggcctcttgaccatgctgaggagttggg

SEQ ID NO: 107242 - DNA, 120 bp, synthetic construct
  source 1..120: mol_type = other DNA
tcttctgtttagaagataagctgtgtgatggcagggacctttccctactgtacctggaatggtaaccagcccataggtcgtcctctagtatctgttgaatagatgtacaaatgtttgagc

SEQ ID NO: 107243 - DNA, 120 bp, synthetic construct
  source 1..120: mol_type = other DNA
ataataactccataggaggtttctaggagttacagctaatggctgtaaagtggatactctctatgacagggcgattattgttactgtcagcagcatttattatgattgctgagagtggcc

SEQ ID NO: 107244 - DNA, 120 bp, synthetic construct
  source 1..120: mol_type = other DNA
agtaactgcttccctttaactatgctaacactgggtattccattcccatgaccttttctcatccaacaggacactcttgttttattggacatttctttttattttgtacttcttatttgg

SEQ ID NO: 107245 - DNA, 120 bp, synthetic construct
  source 1..120: mol_type = other DNA
gtagggtacacagtttatatctgtgatttaccaaatattgttcaattgctccccaaaatggttgtaccaaatccacactcttacaagctgtgagttcccactgttccacaaccctgtcaa

SEQ ID NO: 107246 - DNA, 120 bp, synthetic construct
  source 1..120: mol_type = other DNA
aggcatgagccactgcgtccagccttctcctactgatttataatgccacctctgttatttatcaagtcaccaaatatggattgttctatttctgtggtctcaattctgtagcacaatctg

SEQ ID NO: 107247 - DNA, 120 bp, synthetic construct
  source 1..120: mol_type = other DNA
atgtttttaatcccttattttatgtctttagttattatgaaggtgtttttttttttgagcagagtctggtcctgtcacccaggctggagtgcagtgatacgatcttggctcactgcaatc

SEQ ID NO: 107248 - DNA, 120 bp, synthetic construct
  source 1..120: mol_type = other DNA
tttttaagcttctttttgtttttggcacttggggtttctgttaaagtagcccctcttatctacggggaatacattcccacaaggctcctagtgagtgcctgaaaccatggatattactga

SEQ ID NO: 107249 - DNA, 120 bp, synthetic construct
  source 1..120: mol_type = other DNA
ctataacacaactacattgcctgttatcaatattttaacgacaagtttagtacaatgcagttcagctacaacttgctgacccagtgaagccaccagtgctgttcatcacacctaacttgc

SEQ ID NO: 107250 - DNA, 120 bp, synthetic construct
  source 1..120: mol_type = other DNA
aattactgagtaaactgcttgagatcagctagttagtaagagctgagtcagaattcaaatctggctctgcctgatttacttactacacccagctatccatccatctgtccatccatccat

SEQ ID NO: 107251 - DNA, 120 bp, synthetic construct
  source 1..120: mol_type = other DNA
cttaatctggaaatatgagagaagaggtccatagggacaggaaacaaagatggaggtggggaaaatggggacaggagagattatcaggacaaacgtacaactgcttaagacaacagtccc

SEQ ID NO: 107252 - DNA, 120 bp, synthetic construct
  source 1..120: mol_type = other DNA
actcaggctggggatgccacagggataggatgaaggtcttgatgggacactggatgctgggcttctctgttcccaactccctcccagttaagaactccctccacccctcctcccaatcac

SEQ ID NO: 107253 - DNA, 120 bp, synthetic construct
  source 1..120: mol_type = other DNA
gcatgcaatagcaagactctaatcttcatagggcagagggaagatgggcctagattagccagggtagaagaagcagggcatagggtggataccaaatagatctgggctcaagttaaggac

SEQ ID NO: 107254 - DNA, 120 bp, synthetic construct
  source 1..120: mol_type = other DNA
cttactcacacagtatatccaaacttatctatggtctagaaggccctgcacagtccaaatcctaactcatgaaattcattttaatgtttcaccacacctggccctgttagtccctctcat

SEQ ID NO: 107255 - DNA, 120 bp, synthetic construct
  source 1..120: mol_type = other DNA
gaatgggtgaagtcagaattcctggtaatgaagtgcttgaacttggattcctcccgacatgtgcagtacaatgagatgattttctccttaatgagattaggaaattctattagcgctccc

SEQ ID NO: 107256 - DNA, 120 bp, synthetic construct
  source 1..120: mol_type = other DNA
ggccttcacatttgctgttccttgtgtctggaacaggcttccccagatgatggtaatgaaggctttactagttgtgacatagttaactatcatccctctttatcaccattacacacaata

SEQ ID NO: 107257 - DNA, 120 bp, synthetic construct
  source 1..120: mol_type = other DNA
gattctaagggcatgaggagaggggacacgaccatgacatgtgctcttcatgtgctcccagcctgtcttttgtgccactggcctcagctaaacttctcagagcattgagggcttttttgg

SEQ ID NO: 107258 - DNA, 120 bp, synthetic construct
  source 1..120: mol_type = other DNA
gaggctcttctagaaggtttagctggccaaaagtgtactggaatatgtggcatggggtagtgagaagaacaagtggatgcttctaatagctctggcttctaatagctcactctatagcca

SEQ ID NO: 107259 - DNA, 120 bp, synthetic construct
  source 1..120: mol_type = other DNA
atggcatttccaagtcacctagtctagttgtgccaggggttcaaatagccatagcctagggaggagggtagagatgtcccacctatagagagggacatgtactgacctgcagaggagaat

SEQ ID NO: 107260 - DNA, 120 bp, synthetic construct
  source 1..120: mol_type = other DNA
ttatatgtactctgctaggcctaaatcaagctcccttctgcccatacgtcacaccatccccagctactatcaagttgcctctcctcacagagaggaagcacacaagcctggctcatgtct

SEQ ID NO: 107261 - DNA, 120 bp, synthetic construct
  source 1..120: mol_type = other DNA
acaaaagaaggcctcgctgtccctggggtcagggcataaatagaaaatacagtcagttgagaaaacaccaggagactcccctggcaggacaaggagacccggggtggtaggtgccacata

SEQ ID NO: 107262 - DNA, 120 bp, synthetic construct
  source 1..120: mol_type = other DNA
agtgaaacaacagaggggctcacacaacttggcacaatcattgggcttgttccaaccctcttgcagggttctggggtacacgtatatggaacgagcatcctggcaaggaacactgacggc

SEQ ID NO: 107263 - DNA, 120 bp, synthetic construct
  source 1..120: mol_type = other DNA
ttgcgcacgcacttgtgccttaggttgcccatgaagagctgcaggccgatgagggcaaagacgctgaggcagaagactgtgaggaccatcacatcagccagcttcttcacagactggatc

SEQ ID NO: 107264 - DNA, 120 bp, synthetic construct
  source 1..120: mol_type = other DNA
agaggctgtgttctgttagttgcacagcctagctccctgcagaagccagcaccacatagcagaatgacagaaaagcatgtgtagacaccagtctggcccttagcgactgtcctaggacaa

SEQ ID NO: 107265 - DNA, 120 bp, synthetic construct
  source 1..120: mol_type = other DNA
gattggtgggcttcctccttttccccaggaccgagaaatatttccctttgtaaatctttcttataaaacacaccaggaatatgccttaagtcctgtggttagtgtgtttgtctacttcgg

SEQ ID NO: 107266 - DNA, 120 bp, synthetic construct
  source 1..120: mol_type = other DNA
catcgcacaaccaggctcagaaatcacaagtcttttcagagttttcctagatggatggatggaatggtttctagagatgttatctgggcctagatttcccagatgcaattgccaacatct

SEQ ID NO: 107267 - DNA, 120 bp, synthetic construct
  source 1..120: mol_type = other DNA
agctgagatctgagaggcaaacctgggcatcttacctgggataactgaaatagtttttagagctctcaggactctgaaagttcgaagagccgacaaattgcctagttttatattttctga

SEQ ID NO: 107268 - DNA, 120 bp, synthetic construct
  source 1..120: mol_type = other DNA
agtggcaagtgacttgtgacatttaatcaaaggctttgcatccagggtgtgtgacatttaaccgaaggtgtctggtatttaacaaaggacattggacttgggatgtctgatgtttaacca

SEQ ID NO: 107269 - DNA, 120 bp, synthetic construct
  source 1..120: mol_type = other DNA
accgtccttgcttcaacagtccttgcttccctcctgtcccttacagacccagtctgtcccctggtgtctccattgaaaactctgcctatctctagcttatattctgcctgtctttgcttg

SEQ ID NO: 107270 - DNA, 120 bp, synthetic construct
  source 1..120: mol_type = other DNA
caccccagcagaaacatcagactcggggtgcctctcccatccatcccatggttaggagttgggagacttggttttagtctcagcattgcttctgattcagtctataactttgggcaagtg

SEQ ID NO: 107271 - DNA, 120 bp, synthetic construct
  source 1..120: mol_type = other DNA
actgagaaaatagaagcaatcagaagagaaattcctttcatttcattatcaactcttatcaatctacctccatctccacctgaaattcagccttccccactcttcaggtcgatgctcccc

SEQ ID NO: 107272 - DNA, 120 bp, synthetic construct
  source 1..120: mol_type = other DNA
cctactcaatatctcaccctgggtgctttcaaatgtcatacatcccaaactggacttttgattttcttcctacttcagccagtgtcgctctctccaattttccatttcaaccaatgggaa

SEQ ID NO: 107273 - DNA, 120 bp, synthetic construct
  source 1..120: mol_type = other DNA
acacccagctaattcttgtgtttttcataaacatggggtcttgctatgttgcccaggctagtcttgaactcttgagctcaagcaatctgctcaccttggcctcccaaagtgttggaatta

SEQ ID NO: 107274 - DNA, 120 bp, synthetic construct
  source 1..120: mol_type = other DNA
atgagatacttacgccatgataatcacactaaagtccagccagttccatgggtcccgaaggaaagtgaacgcgtgcaggcagaagcctcgagccagaatcttgaccagagactcaaaggt

SEQ ID NO: 107275 - DNA, 120 bp, synthetic construct
  source 1..120: mol_type = other DNA
cttatcaagtctgcttagaacctccaggtaaggtacttttgtttgggaagaaaagaaccagaagcagtttctggaactgtgcaaatggttataggaggcaggacttgggaaaaaaaaggc

SEQ ID NO: 107276 - DNA, 120 bp, synthetic construct
  source 1..120: mol_type = other DNA
gctccatgacacctaataggcaccagagacttgaaaccacactgctggtagggtctcgtgtggagggaaggcaggagaggtgggccccagacctcaaagccttttaaccgcagtcaggcg

SEQ ID NO: 107277 - DNA, 120 bp, synthetic construct
  source 1..120: mol_type = other DNA
ctctcgggaatctaaccaggtagatgccctccgtgctgctcctcttctagggagtcaggcaatcaggaaatcagcatctcaaaccagcctccagtttataattatttagtttctcatctg

SEQ ID NO: 107278 - DNA, 120 bp, synthetic construct
  source 1..120: mol_type = other DNA
ctgagtaactaggactacaggtgcacactaccatagccagctaatttttaatttttttttgtagacacaacgtcttaccatgttgcttagctggtcttgaactcctgggctcaagcaatc

SEQ ID NO: 107279 - DNA, 120 bp, synthetic construct
  source 1..120: mol_type = other DNA
tttgttatttgtaagaggaaatcccacttgagcatgtgtgtctggccctgagtgggagccaggggggcaatggagccatgtccccaaaacgctctgacatgggatattatgaaaaaacca

SEQ ID NO: 107280 - DNA, 120 bp, synthetic construct
  source 1..120: mol_type = other DNA
aactctggaggggtattttcatgtgtttgtgctattaaatcaacaggcacacacacatacaccacagacatgtggtttgattgcccatttgaatctggtagaggaacgtgggaggatttt

SEQ ID NO: 107281 - DNA, 120 bp, synthetic construct
  source 1..120: mol_type = other DNA
tgcactccagcctgggcggcagagtgagactccatctcaaaaaaaaaaaaagaaaaagaaaaagataaattttatggtatatgaagtagtatacctcaagttaaaaaaaaatcatggagc

SEQ ID NO: 107282 - DNA, 120 bp, synthetic construct
  source 1..120: mol_type = other DNA
agctggcctttcctcctcctgctgctctgttcttcttaccaggctgtgaccacactctggcagaaagcataactatttgcgaagctgccttatcacttttaggggaactataaaattccc

SEQ ID NO: 107283 - DNA, 120 bp, synthetic construct
  source 1..120: mol_type = other DNA
tgctaaccagagttctttgagatactctgaaactgcaaacattttgtcaacgcctaatcaaaaagcaagtgctgcctccctcaaaagatgcccacatgtgaataaactagaggcctcttt

SEQ ID NO: 107284 - DNA, 120 bp, synthetic construct
  source 1..120: mol_type = other DNA
aggacttacgggtgaggagaagggaaaacgaaaatgcagaagcagtcccctgagagagcttttcttgggaccctgtctcctggagtccaggacaaatgtcagccccatcccacaggacac

SEQ ID NO: 107285 - DNA, 120 bp, synthetic construct
  source 1..120: mol_type = other DNA
agttcagctgggggcttgggagcaggaccaagttcaaggcctcctcccccacctgtttatgtggactgggtgggcttttacttcacatgcacaaccactcacgtatccaatgcatgcatg

SEQ ID NO: 107286 - DNA, 120 bp, synthetic construct
  source 1..120: mol_type = other DNA
cacaggaggcgtgttttccctgaggctaccctctcttcttcattacaccaaaccagcatctcaggctgcataattcctgtttttattccagaattccaaaattaaggtgattggaatata

SEQ ID NO: 107287 - DNA, 120 bp, synthetic construct
  source 1..120: mol_type = other DNA
cattccacacaacaggaaacacttacatcttttggtttcttaactgtcatcacttgagacatttctcagcttggagttgtcatccagatgttggcaccctagtgtacacagctgtggtgg

SEQ ID NO: 107288 - DNA, 120 bp, synthetic construct
  source 1..120: mol_type = other DNA
tgaaccctgaattgctgtgaagcaggcacctggccaaaagacaggtaaatagtgagcaaacacaacacactcaggcctcaaaagggcgccgctcgtccctggggaagtgtggattgagat

SEQ ID NO: 107289 - DNA, 120 bp, synthetic construct
  source 1..120: mol_type = other DNA
tcttaacagactcggtgaaggggtggtggagagatttaggggagaaaccgcatctccttctcattaacctctaattcaaatttagcatttccttgaattgtgaatgtaggcaacaaagca

SEQ ID NO: 107290 - DNA, 120 bp, synthetic construct
  source 1..120: mol_type = other DNA
aaaccagattccagatgaagctctctgctgcagcagccgggcagcctcattttccaaagtaaacctaccaagagtgtcctttgtctctggggcccccaggctgctcctggtgggcgggtg

SEQ ID NO: 107291 - DNA, 120 bp, synthetic construct
  source 1..120: mol_type = other DNA
cttggaccatggcagtgcctccctctttccttctatcccacacatgcagccccctgctcctagatttagacattctccaaaattctgtgtgccctgagtgatgccagagtcacctcctgc

SEQ ID NO: 107292 - DNA, 120 bp, synthetic construct
  source 1..120: mol_type = other DNA
cagtgctaaagaagaggctcaggaagagggtgtgggtgccctcaaaacaggagctcactccccataggtggaggtcaggactccctgatcacactctgatcatactccacaaatgagcac

SEQ ID NO: 107293 - DNA, 120 bp, synthetic construct
  source 1..120: mol_type = other DNA
atgcttgacacacagaaagtgccaaatgaatttagttggtattgtggttattgttgttattattattcttatgagagatcaagctcagaaggcctccttgttgcccacaccagccctccc

SEQ ID NO: 107294 - DNA, 120 bp, synthetic construct
  source 1..120: mol_type = other DNA
cactgcatgtggctaccaagtgcttggaatgtggctactgtggactgagttgtgctattgtaaagtcacatccattttgcaggcttagtacaataaggaatgttgactatttcgttaata

SEQ ID NO: 107295 - DNA, 120 bp, synthetic construct
  source 1..120: mol_type = other DNA
gctcctttgaggctgcataggcattaaccctgtccagtctggagcccagttctgggggagatgggagagtctgaggagcctgtcattctctactcttaatctccgcctccagcgatcttg

SEQ ID NO: 107296 - DNA, 120 bp, synthetic construct
  source 1..120: mol_type = other DNA
gcgttctaagtctctttctagctcaattccttccaactcatttttctcaatacttgagctgaaaaaaagcttcacagaggaactgtgcactgatgccatggcaactgaggcatttatggg

SEQ ID NO: 107297 - DNA, 120 bp, synthetic construct
  source 1..120: mol_type = other DNA
gctttatttaactggcagtctgtgctgcatctgacccagcacagtggtgaggctgtcgctgcaaatggccggctgagctcccgtgtcttcttctgaccacgtctatgagcagaacatgag

SEQ ID NO: 107298 - DNA, 120 bp, synthetic construct
  source 1..120: mol_type = other DNA
tctgctaatacctctgtggggacatgactttccattgcctccctaggagatttaaacagaagaagaaactgaagaggagagaaagaactgaagcctcagtgcatagacattctctcctga

SEQ ID NO: 107299 - DNA, 120 bp, synthetic construct
  source 1..120: mol_type = other DNA
tgctccaacccacagagtttgcccctgcctcagggcctttgcacttgcagttccctctgtaacattctttccctagacctcctcgggcttggttctttcatgttattcaggtctcagttc

SEQ ID NO: 107300 - DNA, 120 bp, synthetic construct
  source 1..120: mol_type = other DNA
ctttgaaagagctgtctatacatgctgtctccacgtcctcacctccagctcgcttctcaacccactccaaactggcttccattcccaccaagtcactcattcattcattcaacaagaacc

SEQ ID NO: 107301 - DNA, 120 bp, synthetic construct
  source 1..120: mol_type = other DNA
ggtatagtacacagcagatattgacacttgggctcaaacccaagttctgctacttagaaaatgtgacggtgtgcaactatttaacctttctggaccaccagtttcaccatctgcaaaacg

SEQ ID NO: 107302 - DNA, 120 bp, synthetic construct
  source 1..120: mol_type = other DNA
atccactgattctctagatgacattgaataagtccttgagctcctctgggcctcagtttccccacttgtatgatatggtagtgatgacatgattaaaagtttaatgaggctcttttcagc

SEQ ID NO: 107303 - DNA, 120 bp, synthetic construct
  source 1..120: mol_type = other DNA
atctctacatggtctaaacgcgcagagatctcgtcccacagagaggacagccccagcggacggttccccctgggcccagagaaagggggtgcgtggcttcctcccccatatccagccctg

SEQ ID NO: 107304 - DNA, 120 bp, synthetic construct
  source 1..120: mol_type = other DNA
atctcctatcctatatcagcacctattctgatttttcggtcacccggaagtctatatcctcatcttaccaggcttcggaataatctcccacatccggaaaaaaagaaccatttgggtaca

SEQ ID NO: 107305 - DNA, 120 bp, synthetic construct
  source 1..120: mol_type = other DNA
gctctgctctccttgttttggacaggtgtttggaactcttgcttccttctactgtgtgtaccgggggtctcttaagagaactgaggaccaccagtccccaccccggacaccctgctttct

SEQ ID NO: 107306 - DNA, 120 bp, synthetic construct
  source 1..120: mol_type = other DNA
atttttcagcccgataaataggattcttcaaaccatgcattccatccgactactccaccctatgccctcttcctcacttacactgcagtttttgaagcatgagggaatacattttatgtc

SEQ ID NO: 107307 - DNA, 120 bp, synthetic construct
  source 1..120: mol_type = other DNA
ccacctatgagtgagaacatgcggtgtttggttttttgtccttgtgatagtttgctgagaatgatggtttccagcttcatccatgtccctacaaaggacatgaactcatcgtttatggct

SEQ ID NO: 107308 - DNA, 120 bp, synthetic construct
  source 1..120: mol_type = other DNA
tgcctatgtcctgaatggtattgcctaggttttgttttagggtttttatggttttaggtctaacgtttaagtctttaatccatcttgaattaatttttgtataaggtgtaaggaagggat

SEQ ID NO: 107309 - DNA, 120 bp, synthetic construct; identical to SEQ ID NO: 12938
  source 1..120: mol_type = other DNA

SEQ ID NO: 107310 - DNA, 120 bp, synthetic construct
  source 1..120: mol_type = other DNA
ccgtctggccagctgccccgtccgggaggtgaggggcgcctctgcccggccgcgcctactgggaagtgaggagcccctctgcccggccaccaccctgtctgggaggtgtacccaacagct

SEQ ID NO: 107311 - DNA, 120 bp, synthetic construct; identical to SEQ ID NO: 12939
  source 1..120: mol_type = other DNA

SEQ ID NO: 107312 - DNA, 120 bp, synthetic construct
  source 1..120: mol_type = other DNA
agtgcttttcttgatgtggtccccagtgatcaaattcatttattgtcttagaagttcgtgggttgcttaaagccaaagcaggaaaagcctacataacacgtgaaagatacaggtgagagc

SEQ ID NO: 107313 - DNA, 120 bp, synthetic construct
  source 1..120: mol_type = other DNA
gagtgacattactataacaaagttcttccattccaagataatatttatgtgaataaggttttagcacataaaattgattattagaaaggtggggaggattgatgttgagccatgtctcat

SEQ ID NO: 107314 - DNA, 120 bp, synthetic construct
  source 1..120: mol_type = other DNA
agcctgggcgacagagcgagactccgtctcaaaaaaaaaaaaaaaaaaaagaattctttaagtaaatttctttaccacaaactttacggtaaacaagagttttatttaaaaacatcaatg

SEQ ID NO: 107315 - DNA, 120 bp, synthetic construct; identical to SEQ ID NO: 12943
  source 1..120: mol_type = other DNA

SEQ ID NO: 107316 - DNA, 120 bp, synthetic construct; identical to SEQ ID NO: 21758
  source 1..120: mol_type = other DNA

SEQ ID NO: 107317 - DNA, 120 bp, synthetic construct; identical to SEQ ID NO: 21759
  source 1..120: mol_type = other DNA

SEQ ID NO: 107318 - DNA, 120 bp, synthetic construct; identical to SEQ ID NO: 21760
  source 1..120: mol_type = other DNA

SEQ ID NO: 107319 - DNA, 120 bp, synthetic construct; identical to SEQ ID NO: 21761
  source 1..120: mol_type = other DNA

SEQ ID NO: 107320 - DNA, 120 bp, synthetic construct; identical to SEQ ID NO: 21762
  source 1..120: mol_type = other DNA

SEQ ID NO: 107321 - DNA, 120 bp, synthetic construct
  source 1..120: mol_type = other DNA
ttaaacattagacctaaaaccataaaaaccctagaagaaaacccaggcattaccattcaggacataggcatgggcaaggacttcatgtctaaaacaccaaaagcaatggcaacaaaagac

SEQ ID NO: 107322 - DNA, 120 bp, synthetic construct
  source 1..120: mol_type = other DNA
tgcacaatgtgcacatgtaccctaaaacttaaagtataattaaaaaaaaaaattaaaagtagtatgccaatgccagagccaatttcaatgaaaaatttgaaaaagtacagattctgaata

SEQ ID NO: 107323 - DNA, 120 bp, synthetic construct
  source 1..120: mol_type = other DNA
catctcccgagttcaagcaattctcccatctcagcctcctaagtagctggaactacaggcttgtgccaccacatgggctaatttttgtattttttttttgtagagatggggtttcactat

SEQ ID NO: 107324 - DNA, 120 bp, synthetic construct
  source 1..120: mol_type = other DNA
ccgaccctgggaggtctttgcctgatccctacttaaagtgtaatgggtaaaagagctttgaaatcaaacacactaggtttgtgactcagctgctaacctgagatgccctggctttccatt

SEQ ID NO: 107325 - DNA, 120 bp, synthetic construct; identical to SEQ ID NO: 6804
  source 1..120: mol_type = other DNA

SEQ ID NO: 107326 - DNA, 120 bp, synthetic construct; identical to SEQ ID NO: 6805
  source 1..120: mol_type = other DNA

SEQ ID NO: 107327 - DNA, 120 bp, synthetic construct; identical to SEQ ID NO: 6805
  source 1..120: mol_type = other DNA

SEQ ID NO: 107328 - DNA, 120 bp, synthetic construct; identical to SEQ ID NO: 6806
  source 1..120: mol_type = other DNA

SEQ ID NO: 107329 - DNA, 120 bp, synthetic construct
  source 1..120: mol_type = other DNA
ctgaagcaggagaattgcttcaactcgggaggtggagcttgcagtgagcctagatcgtgccattgcactccaacctgggcaacaagagtgagactccatctcaagaaaagaaagaaagaa

SEQ ID NO: 107330 - DNA, 120 bp, synthetic construct
  source 1..120: mol_type = other DNA
tgccatcaggaacaggattgcatggtggcaatggggcaggtcatccctgagtgcctccttatcctgaagaaggctgtgtcccattgcgggtacatagtgtgtgctggaccactgggggtg

SEQ ID NO: 107331 - DNA, 120 bp, synthetic construct; identical to SEQ ID NO: 17421
  source 1..120: mol_type = other DNA

SEQ ID NO: 107332 - DNA, 120 bp, synthetic construct
  source 1..120: mol_type = other DNA
atctttgacaaacctgacaaaaacaagaaatgggggaaggattccctatttagtaaacggtgctgggaaaactggctagccatatgtagaaagctgaaactggatcccttccttacacct

SEQ ID NO: 107333 - DNA, 120 bp, synthetic construct
  source 1..120: mol_type = other DNA
atgtttattgtggcactattcacaatagcaaagacttggaaccaacccaaatgtccatcaatgatatagtggattaagaaaatgtggcacatatacaccacggaatactatgcagccata

SEQ ID NO: 107334 - DNA, 120 bp, synthetic construct; identical to SEQ ID NO: 31926
  source 1..120: mol_type = other DNA

SEQ ID NO: 107335 - DNA, 120 bp, synthetic construct; identical to SEQ ID NO: 28989
  source 1..120: mol_type = other DNA

SEQ ID NO: 107336 - DNA, 120 bp, synthetic construct
  source 1..120: mol_type = other DNA
tcccgcctttctattccacaaagccgccattgtcatcctggcccgttctcagtgagctgttgggcacacctcccagacggggtggtggccgggcagaggggctcctcacttcccagtagg

SEQ ID NO: 107337 - DNA, 120 bp, synthetic construct
  source 1..120: mol_type = other DNA
caaagtgctgggattacaggcatgagccatcacacctggcccaagaagtgtctcttctttggtgtgagctttttttttaagttcatcattagagttctatagttttctttacagggattc

SEQ ID NO: 107338 - DNA, 120 bp, synthetic construct; identical to SEQ ID NO: 21807
  source 1..120: mol_type = other DNA

SEQ ID NO: 107339 - DNA, 120 bp, synthetic construct
  source 1..120: mol_type = other DNA
gtctgttcatgtccttcgcccactttttgatggggttgtttgtttttttcttgtacatttgtttgagttcattgtagattctggatattagccctttgtcagatgagtaggttgcgaaaa

SEQ ID NO: 107340 - DNA, 120 bp, synthetic construct
  source 1..120: mol_type = other DNA
tctgcaaacagggacaatttgacttcctcttttcctaattgaataccctttatttccttctcctgcctaattgccctggccagaacttccaacactatgttgaataggagtggtcagaga

SEQ ID NO: 107341 - DNA, 120 bp, synthetic construct
  source 1..120: mol_type = other DNA
ggagagtgtatgtgtcgaggaatttatccatttcttctagattttctagtttatttgcgtagaggtgtttgtagtattctctgatggtagtttgtatttctgtgggatcggtggtgatat

SEQ ID NO: 107342 - DNA, 120 bp, synthetic construct
  source 1..120: mol_type = other DNA
ttgactttctgtctcattgatctgtctaatgttgacagtggggtgttaaagtctcccattattaatgtgtgggagtctaagtctctttgtaggtcactcaggacttgctttatgaatctg

SEQ ID NO: 107343 - DNA, 120 bp, synthetic construct
  source 1..120: mol_type = other DNA
cgttggcctgccttgctagattggggaagttctcctggataatatcctgcagagtgttttccaacttggttccattctccccatcactttcaggtacaccaatcagatgtagatttggtc

SEQ ID NO: 107344 - DNA, 120 bp, synthetic construct
  source 1..120: mol_type = other DNA
acatttaagtctgtagaggttactgctgtctttttgtttgtctgtgccctgcccccagaggtggagcctacagaggcaggcaggcctccttgagctgtggtgggctccacccagttcgag

SEQ ID NO: 107345 - DNA, 120 bp, synthetic construct; identical to SEQ ID NO: 21392
  source 1..120: mol_type = other DNA

SEQ ID NO: 107346 - DNA, 120 bp, synthetic construct; identical to SEQ ID NO: 21393
  source 1..120: mol_type = other DNA

SEQ ID NO: 107347 - DNA, 120 bp, synthetic construct
  source 1..120: mol_type = other DNA
atagactagattaaaaaaatgtgttgtgtggtggggggaggggggagggataacattaggagatatatctaatgttaaatgactagttaatgggtgtagcgcaccaacatggcacatgta

SEQ ID NO: 107348 - DNA, 120 bp, synthetic construct; identical to SEQ ID NO: 23870
  source 1..120: mol_type = other DNA

SEQ ID NO: 107349 - DNA, 120 bp, synthetic construct; identical to SEQ ID NO: 23871
  source 1..120: mol_type = other DNA

SEQ ID NO: 107350 - DNA, 120 bp, synthetic construct
  source 1..120: mol_type = other DNA
tgagattacaccattgcactgcagcctggctacagagcgagactctgtctcaaaaataaaaacaaacaaacaaaaaaagaaagtagaagatgacatcaccaagctccctttgtcccccct

SEQ ID NO: 107351 - DNA, 120 bp, synthetic construct; identical to SEQ ID NO: 23873
  source 1..120: mol_type = other DNA

SEQ ID NO: 107352 - DNA, 120 bp, synthetic construct; identical to SEQ ID NO: 23874
  source 1..120: mol_type = other DNA

SEQ ID NO: 107353 - DNA, 120 bp, synthetic construct; identical to SEQ ID NO: 23875
  source 1..120: mol_type = other DNA

SEQ ID NO: 107354 - DNA, 120 bp, synthetic construct; identical to SEQ ID NO: 23876
  source 1..120: mol_type = other DNA

SEQ ID NO: 107355 - DNA, 120 bp, synthetic construct; identical to SEQ ID NO: 23877
  source 1..120: mol_type = other DNA

SEQ ID NO: 107356 - DNA, 120 bp, synthetic construct; identical to SEQ ID NO: 23878
  source 1..120: mol_type = other DNA

SEQ ID NO: 107357 - DNA, 120 bp, synthetic construct; identical to SEQ ID NO: 11674
  source 1..120: mol_type = other DNA

SEQ ID NO: 107358 - DNA, 120 bp, synthetic construct
  source 1..120: mol_type = other DNA
atgctttatataaagcactagcaggtctttaaaatcaaatacccttggcaagtatcttgcacggagttactatacctctgggggtatctgggtttctgtcccttttcatcagtgattccc

SEQ ID NO: 107359 - DNA, 120 bp, synthetic construct
  source 1..120: mol_type = other DNA
ctctttaatgtggctgtttcctttcctccccgcttccctgggctcctgtggccagctcttacagtgaggggactgttcctactagcccctccctccaaaatatgaaatgaaaaccataac

SEQ ID NO: 107360 - DNA, 120 bp, synthetic construct; identical to SEQ ID NO: 13156
  source 1..120: mol_type = other DNA

SEQ ID NO: 107361 - DNA, 120 bp, synthetic construct
  source 1..120: mol_type = other DNA
ctcctcatttcccagacggggtggctgccgggcggagaggctcctcacttctcagacggggcggctgctgggcggaggggctcctcacttctcagacggggcggttgccaggcagagggt

SEQ ID NO: 107362 - DNA, 120 bp, synthetic construct; identical to SEQ ID NO: 13157
  source 1..120: mol_type = other DNA

SEQ ID NO: 107363 - DNA, 120 bp, synthetic construct; identical to SEQ ID NO: 25526
  source 1..120: mol_type = other DNA

SEQ ID NO: 107364 - DNA, 120 bp, synthetic construct; identical to SEQ ID NO: 31664
  source 1..120: mol_type = other DNA

SEQ ID NO: 107365 - DNA, 120 bp, synthetic construct
  source 1..120: mol_type = other DNA
attattcacaatagcaaagacttggaaccaacccaaatgtccaacaatgatagactggattaagaaaatgtggcacatatacaccatggaatactatgcagccttaaaaaatgatgagtt

SEQ ID NO: 107366 - DNA, 120 bp, synthetic construct; identical to SEQ ID NO: 31665
  source 1..120: mol_type = other DNA

SEQ ID NO: 107367 - DNA, 120 bp, synthetic construct; identical to SEQ ID NO: 7414
  source 1..120: mol_type = other DNA

SEQ ID NO: 107368 - DNA, 120 bp, synthetic construct; identical to SEQ ID NO: 7415
  source 1..120: mol_type = other DNA

SEQ ID NO: 107369 - DNA, 120 bp, synthetic construct
  source 1..120: mol_type = other DNA
tgctcggtctactcaagcagctcatttccaagtcacaacatccctgtgaggctgacaccattactgtccgcattttatagacaaggactttgagacagaaagaaatccctcactggaaat

SEQ ID NO: 107370 - DNA, 120 bp, synthetic construct; identical to SEQ ID NO: 9671
  source 1..120: mol_type = other DNA

SEQ ID NO: 107371 - DNA, 120 bp, synthetic construct; identical to SEQ ID NO: 9672
  source 1..120: mol_type = other DNA

SEQ ID NO: 107372 - DNA, 120 bp, synthetic construct; identical to SEQ ID NO: 9673
  source 1..120: mol_type = other DNA

SEQ ID NO: 107373 - DNA, 120 bp, synthetic construct
  source 1..120: mol_type = other DNA
cagaggcactcctcacttcccagacagggtggccgggcagaggagctcctcacttaacagactgggtggccgggcagaggcgctcctcacatcccagacgatgggaggccggacagaggc

SEQ ID NO: 107374 - DNA, 120 bp, synthetic construct
  source 1..120: mol_type = other DNA
tactcttagcactttgggaggccaaggcaggcggctgggaggtggaagttgtagtgagccaagatcacaccactgcactccagcctgggcaacactgagcactgagtgagcaagactcca

SEQ ID NO: 107375 - DNA, 120 bp, synthetic construct
  source 1..120: mol_type = other DNA
ttaaaaaaatttattttgtagagacagggtctcacaatattgcccaggctggtcttgaactcctagactcaaacagtcctgcctcagcttcccaaagtatcgggattacaggcatgagcc

SEQ ID NO: 107376 - DNA, 120 bp, synthetic construct; identical to SEQ ID NO: 5463
  source 1..120: mol_type = other DNA

SEQ ID NO: 107377 - DNA, 120 bp, synthetic construct; identical to SEQ ID NO: 26059
  source 1..120: mol_type = other DNA

SEQ ID NO: 107378 - DNA, 120 bp, synthetic construct; identical to SEQ ID NO: 26060
  source 1..120: mol_type = other DNA

SEQ ID NO: 107379 - DNA, 120 bp, synthetic construct; identical to SEQ ID NO: 26061
  source 1..120: mol_type = other DNA

SEQ ID NO: 107380 - DNA, 120 bp, synthetic construct
  source 1..120: mol_type = other DNA
tgtgatcacaccactgcactccagcccaggtgacatagccagaccctgtctcaaaaaaaaaatttttttttaataaaaacaggctgaaagaaaagattgaggtagtctcccagcacatgg

SEQ ID NO: 107381 - DNA, 120 bp, synthetic construct; identical to SEQ ID NO: 26062
  source 1..120: mol_type = other DNA

SEQ ID NO: 107382 - DNA, 120 bp, synthetic construct
  source 1..120: mol_type = other DNA
ccaggcgggattagcccaacttccctgggctccccttctccccgttctttagtctttaatgcttttcgtggtttcacatagtatcttcagctttttgtttgtttataattgacatataat

SEQ ID NO: 107383 - DNA, 120 bp, synthetic construct
  source 1..120: mol_type = other DNA
ctcctgcctcagctttccaaaaagtgctgggattactggtgtgatccaccattcccggcgtgtctcaagatattttctaattttccttttgatgtcttctttgactcattgattgttcaa

SEQ ID NO: 107384 - DNA, 120 bp, synthetic construct
  source 1..120: mol_type = other DNA
tattatttatttcttttgaatatttttgatccacagttggttgagtgtgcagttggttgaatttacaggtgtggaacccacagatacggagggccaactgtgcttgctgttgccgttttg

SEQ ID NO: 107385 - DNA, 120 bp, synthetic construct
  source 1..120: mol_type = other DNA
tactcaatcatgttattttagtatagaaagtaggaatccctgccttcagtctgcatcagaatctcttagagggttgttaaaaattcattcgtcagggcccagtcctagagattctcatcc

SEQ ID NO: 107386 - DNA, 120 bp, synthetic construct
  source 1..120: mol_type = other DNA
tcccaaagtgctgggattacaggcattagccactgagaccagccaattatgtcttctaataagctttctgcccctgtctttctcttatacgactctcataatgtgtatattgatctcctt

SEQ ID NO: 107387 - DNA, 120 bp, synthetic construct
  source 1..120: mol_type = other DNA
aacttgtactggtgatttctacatttgaaaaatcatctgtctctcctggtctttgtactggtgattggccttcactagtcagcatggatagagattccaagggcctctcaatcctttact

SEQ ID NO: 107388 - DNA, 120 bp, synthetic construct
  source 1..120: mol_type = other DNA
tgctgcccttttctgttagcacttagattcaaacaaaacagaaacctgatccccccaaaagtccgaacattatacatacttttcagtcttctctttctgtctcaggtagaagctaggagc

SEQ ID NO: 107389 - DNA, 120 bp, synthetic construct
  source 1..120: mol_type = other DNA
tgcgccaccacgcctggccagcagtgtaatttcctcatgactaaatgtgattgaatgcattcagcacctagtaagcattgagtaaatgatagcgatgatagtcgtcattattgtaaagat

SEQ ID NO: 107390 - DNA, 120 bp, synthetic construct
  source 1..120: mol_type = other DNA
cccgcctcggcctcccaaaatcctgggattacaggcatgagccactgtgcctggcttataatttttttcttttattcatgaagtagacactcaacccaaacactgttcaaatttttgtta

SEQ ID NO: 107391 - DNA, 120 bp, synthetic construct
  source 1..120: mol_type = other DNA
actgctgtttttgtgtctccactcaatatttgtatcagaaagtagcagccattgtctatgggttccaggtatgaagagtgataagacagagtctggagccttatacaatcactggaaagc

SEQ ID NO: 107392 - DNA, 120 bp, synthetic construct
  source 1..120: mol_type = other DNA
cttcctggctaacacggtgaaaccccgtttctactaaaacgacaaaaaattagctgggtgtggtggcgggttcctgtagtcccagctactcgggaggctgagtcaggagaatcgcttaaa

SEQ ID NO: 107393 - DNA, 120 bp, synthetic construct
  source 1..120: mol_type = other DNA
gtaagccgagatcatgccactatactccagcctgggtgacagagcgaggctccatctcaaaaaaaaaaaaaaaaagatcagactcaacaagtacatactcagtacataattggactccaa

SEQ ID NO: 107394 - DNA, 120 bp, synthetic construct
  source 1..120: mol_type = other DNA
gtgcttttgggttctctgggcatcttggatctgtgttttcatatcttttattattgttgaaaaattctcagctgttaccccttcagctatttcttctgctttgttttctccctcttttcc

SEQ ID NO: 107395 - DNA, 120 bp, synthetic construct
  source 1..120: mol_type = other DNA
tacaattggggatgcttcttctactttactgttagtgtggggatcaagtcagtgagttgggaggtaagctcagcttgggttgtttttgctttggttaccttcattgcattactagtgtct

SEQ ID NO: 107396 - DNA, 120 bp, synthetic construct
  source 1..120: mol_type = other DNA
gcctgtgatcccagcactttgggaggcagaggtgggcggatcacaaggtcaggagaccaagaccagcctgactaacacagtgaaaccccatctctactaaaaaaaaaaaaattacaaaaa

SEQ ID NO: 107397 - DNA, 120 bp, synthetic construct
  source 1..120: mol_type = other DNA
tgccaaatgcaaagcaaaatagtacagccaagattgtgcgggccaggggtcagcaaacttgttcataaaggaccagatagtaagtattttacttgtagtcatatggtctctgttgcaagt

SEQ ID NO: 107398 - DNA, 120 bp, synthetic construct
  source 1..120: mol_type = other DNA
atctctagaggcaagtctgccacgagagggcactgcaggcgaagcagttgtgcttgctcattgcctcagcccaagtgtactcaaagaaaagaggcagccagctgtgcgtgctgtatggaa

SEQ ID NO: 107399 - DNA, 120 bp, synthetic construct
  source 1..120: mol_type = other DNA
ggtggggggtgggggaagggataggattaggagatatacctaatgttaaatgatgagttaatcatgatgagttaatcatggtgtgccatgagcacaccaacatggcacatgtatacatat

SEQ ID NO: 107400 - DNA, 120 bp, synthetic construct
  source 1..120: mol_type = other DNA
aataacaaatgataactgaaactgaaagggaaaacccacaatcttgggtgaaactccttcctcagctggttcagtgtccaagcaaggtgaatgcaaatcaagtccctcaaaaccataggg

SEQ ID NO: 107401 - DNA, 120 bp, synthetic construct
  source 1..120: mol_type = other DNA
gcctctcaagtaactgaaactacaggtgcgtgccaccacacctggctaattaaaaaaaattttgtttgtagagatgggatctcactatgttgtccaggctggtcaaaaagacactcttca

SEQ ID NO: 107402 - DNA, 120 bp, synthetic construct
  source 1..120: mol_type = other DNA
gaggccactggaaacacagagggtttccaggcaaaaaataagtgaattctacagcttggatttcatgttttcaaacacacagtgtgatctttttttacggctaactggccaccctacagt

SEQ ID NO: 107403 - DNA, 120 bp, synthetic construct
  source 1..120: mol_type = other DNA
ggtaatacagcacgaaggttcttgttagatgctggcgccagcctctagagctgtgcgtcaaataaacttctttataaaattacccagtctgaaattctgtgatagtaccacaaaacagac

SEQ ID NO: 107404 - DNA, 120 bp, synthetic construct
  source 1..120: mol_type = other DNA
ctcagcttagatgcctcatctccatactctttaattcttgtccatctttcaaggaaaggttcccaacacttgtagcttcacttgattaatggtccctgcaaacctttgatccatactgca

SEQ ID NO: 107405 - DNA, 120 bp, synthetic construct
  source 1..120: mol_type = other DNA
cagaatggctggcttacagcaatctattgtcctcttggacttctggatgcttgagtttcaatttctcttaaagcaattaaggagcacctcacctgcataagaactgcaggccccagatat

SEQ ID NO: 107406 - DNA, 120 bp, synthetic construct
  source 1..120: mol_type = other DNA
ctgagtttggaaacaacagaaatggattaaaaacagcaaaatgaaaggggcccactgacacctgaagtgacagttgagaacagatgagacagaactgatggttgtgattgaaccatgagt

SEQ ID NO: 107407 - DNA, 120 bp, synthetic construct
  source 1..120: mol_type = other DNA
ccaatatgctgctcaaaggaaatgttcactggagcatggatttcagatttcggatttggggtgctcaactagtaagtgtaaggcaaatattccaaaatctgaaaacatatgaaaccccaa

SEQ ID NO: 107408 - DNA, 120 bp, synthetic construct
  source 1..120: mol_type = other DNA
aaactcctgggctcaggtgatcctcctacctcagcctcctgagtagctgggactatcagaatgcaccactgcatctggccttttaaaaaatttatatatatttttacagtatttacataa

SEQ ID NO: 107409 - DNA, 120 bp, synthetic construct
  source 1..120: mol_type = other DNA
gattccatcatcacctcagctttatttaccccatttcttggacactgactactcgtccactctatgccaggcagaagccagactcttttcctttgtcatgaatatatgcaaagattacaa

SEQ ID NO: 107410 - DNA, 120 bp, synthetic construct
  source 1..120: mol_type = other DNA
ctgttggcttttctcccttccttccttcttcctgcctcgaatgtggttctaatggcttgagttccaaaaactactctatgaccatgtggcaaccttgaggttagaagccacatgccaagt

SEQ ID NO: 107411 - DNA, 120 bp, synthetic construct
  source 1..120: mol_type = other DNA
ttagcctcaaacttctgggctcaagcgatcctcccaccacagcctcctgagtagttgggactacaggcacatgccgccatgtgcggcgaattcaaaaaaattctttgtaggttgggtgaa

SEQ ID NO: 107412 - DNA, 120 bp, synthetic construct
  source 1..120: mol_type = other DNA
ggcctctgaatgcctggcctcaccttttttttttttttttttaatggaaagggagtctatgtttcccaggctggtcttaaactcctagcctcaagctagcctaccacctagacctcccaa

SEQ ID NO: 107413 - DNA, 120 bp, synthetic construct
  source 1..120: mol_type = other DNA
acacagtctggctccacggacatcaggccagtcggtcttcactgcaccctgtgcaatttttgctatacctgagaaccacctgaatcaactttctttaaagtatctcttgggttttcttta

SEQ ID NO: 107414 - DNA, 120 bp, synthetic construct
  source 1..120: mol_type = other DNA
gatagaatgctcctgaaggaaagtaaactcagaaaccagaacttgcaccatggttagaattttggatgcatttacccaagaaaaggaattaggttgcacagcaagttcacccagcagaga

SEQ ID NO: 107415 - DNA, 120 bp, synthetic construct
  source 1..120: mol_type = other DNA
taggcatttaatccactgagtgcagagagcagcacctgcatcccacaggattgctggaggtgagttaatacacacgagatctttacagcagcatctgacatataaatcatagtttaacta

SEQ ID NO: 107416 - DNA, 120 bp, synthetic construct
  source 1..120: mol_type = other DNA
ttatttcccaattatttattgaacatttactctgccaggttctgttctagatgctggggatgtagcagagaataaaagagacgaataccacctgcccgcacaaagctctgttccagagga

SEQ ID NO: 107417 - DNA, 120 bp, synthetic construct
  source 1..120: mol_type = other DNA
gaccatcctggctaacgtggtgaaaccgtctctactaaaaatacaaaaaattagctgggtgtggttgcacgtgcctgtagtcccaattacttgggaggctgaggcaggaaaattgcttga

SEQ ID NO: 107418 - DNA, 120 bp, synthetic construct
  source 1..120: mol_type = other DNA
ctgttatatggaaaatagtttttaaatttcattttaggattgttcattgctagtgtatagaaatccaatttttgtttttttaacagtacttacaggcttttttctaggtaagcagggttt

SEQ ID NO: 107419 - DNA, 120 bp, synthetic construct
  source 1..120: mol_type = other DNA
atcttggctcactgcaacctctgccacctaggttcaagcaattcttgtgccttagccttccaagaagctgggattacaggtgtgtgctaccatgcctggctaatttttgtatttttagta

SEQ ID NO: 107420 - DNA, 120 bp, synthetic construct
  source 1..120: mol_type = other DNA
atgccttctacttcttttacttgcctttcatggactggctagaaccttcagtacaatgttgaactcaaatacagagtggacaaccttccttattcctgatcttatggggaaagtgttcaa

SEQ ID NO: 107421 - DNA, 120 bp, synthetic construct
  source 1..120: mol_type = other DNA
ggagggtttagtgagccatgattgtgctactgccttccagcctggatgacagagtgaggccctgtctcagaagaagaaaaaaagttactctagaattatactttacataatttacatctt

SEQ ID NO: 107422 - DNA, 120 bp, synthetic construct
  source 1..120: mol_type = other DNA
agttcctaagctcaagctgtcttcctgcttcagcatcccaagtagctaggactacaggtatgtgccaccacgcctggctaatttttcaaagaaaaaatttttttagtagagacaaggtct

SEQ ID NO: 107423 - DNA, 120 bp, synthetic construct
  source 1..120: mol_type = other DNA
ggcggaggttgcagtgagccaagatcgcaccactgtactccagtccaggtgacagagtgaaactcagactcaaaataaaaaaataaaaaagaaaaaaaagaaaaattaatatgctgtaga

SEQ ID NO: 107424 - DNA, 120 bp, synthetic construct
  source 1..120: mol_type = other DNA
tgaaccgtgagcatgccattgcactgtaacctgggtgacagcgagaccctgactcaaaaaaaaaggaatttaactcttccagttttagccacattctctgacattctctaagttttgatt

SEQ ID NO: 107425 - DNA, 120 bp, synthetic construct
  source 1..120: mol_type = other DNA
tttggctaactgtggagttccttaaaagtgaaagatgttggaaaaagagtggttttgagagatgtgatgtgaagaagaactcaacctgctgctgctgcttttgacgatggaagaagaggc

SEQ ID NO: 107426 - DNA, 120 bp, synthetic construct
  source 1..120: mol_type = other DNA
cggcccaagctcattcttgttttaaaaacagagccatcggatgatctcagatttttaagccttccaaggatgtgaaaagcatgtccctaaatcaaatcaagaactctccttcaatagctg

SEQ ID NO: 107427 - DNA, 120 bp, synthetic construct
  source 1..120: mol_type = other DNA
aagtaaaaactcggaaggttaattgactaattacaaaaagatgcagtggtgtttattactgaggcaggagaacagggtttagagacagggagtcttcactacagcctctgattcgtctcg

SEQ ID NO: 107428 - DNA, 120 bp, synthetic construct
  source 1..120: mol_type = other DNA
tgcatataaccatagttaaatgcttttttaaaaaattaaactatttatttatttatttatctttgagactgagttttgctcttgttgcccaggctggagtgcaatggtgcaatcttggct

SEQ ID NO: 107429 - DNA, 120 bp, synthetic construct
  source 1..120: mol_type = other DNA
taagactgtgccactgtataccaccctgggtgacaaagtgaaactcaagctaaaaaaaaaaaaaaaagagagagagttttgctctgtcactgattgtgcagtggcatgatcacagctcac

SEQ ID NO: 107430 - DNA, 120 bp, synthetic construct
  source 1..120: mol_type = other DNA
gacaaaactattttccagagtgggtggctgctgtgcctgaggcagatagtagggtaagtgggacaatatgccttttaaaaaatggggctacttcaagtttttacttctaatttggacact

SEQ ID NO: 107431 - DNA, 120 bp, synthetic construct
  source 1..120: mol_type = other DNA
acaggtgtgagcaaccgcgcctggcccctaaccgggctttaaacagaatctgggactggagcataatcccctagttcttttttttttttttttttttttttttttttgtgagacagtctc

SEQ ID NO: 107432 - DNA, 120 bp, synthetic construct
  source 1..120: mol_type = other DNA
acggtgagccaagattccgccactgcactccatcctgggcaacaacgtgagcgtgactctgtctcaaaaaaaaaaaaaaatgtatttcatacaatatttggtggggcaaagggggtttac

SEQ ID NO: 107433 - DNA, 120 bp, synthetic construct
  source 1..120: mol_type = other DNA
tctgcaaattattagcttttcggattctatttcttcctttgtaaagggtgggtagtattaatatctgcctcataagataacccgggggagggggggtcaagtttctagcatagcccagaa

SEQ ID NO: 107434 - DNA, 120 bp, synthetic construct
  source 1..120: mol_type = other DNA
aacaggtaaacaagctcattatcaatcatcaatttaatactgagaggatgtcagcttgaggctctggtaggctgtcttcttcctctatctccccttttcagaaaggctgatgcagacaga

SEQ ID NO: 107435 - DNA, 120 bp, synthetic construct
  source 1..120: mol_type = other DNA
aggtctcccttttctacagaggcgatagtttggtggcagaaaaagggcttggaactccaatgtctggattcaaattctggttccagcagtcattcgcttgccatgtgaccttgagcaatt

SEQ ID NO: 107436 - DNA, 120 bp, synthetic construct
  source 1..120: mol_type = other DNA
gaaaataacttcaaggtcagccacccatgggtcctacgatttcgagagcgtatttagacatttagcttcggagagagagatcttcgtgtattttgcctttgcttcgaatgccttcagaca

SEQ ID NO: 107437 - DNA, 120 bp, synthetic construct
  source 1..120: mol_type = other DNA
ttttaggagttttggaattagtgtttaaaagctgaggatcattatagtcattaagtgtatccatacagtatcattttgagttgtgcagcgctgtccactgaagggatgggtcgcccctcc

SEQ ID NO: 107438 - DNA, 120 bp, synthetic construct
  source 1..120: mol_type = other DNA
ggttggaggtagggttacagattaaaatggagtctcttatgtctgctttctatacggacaccttaacaatctgatctctctttcttttccccatagtccacactaggattcaatgccaag

SEQ ID NO: 107439 - DNA, 120 bp, synthetic construct
  source 1..120: mol_type = other DNA
atgtgtaccttgtggagctattgacatatgcattacatctttgtgggggaacacttgaaatctattcttagtgattttcaagtatgcaatgccttggttttgtgtgtgtgtgtgtgtgtg

SEQ ID NO: 107440 - DNA, 120 bp, synthetic construct
  source 1..120: mol_type = other DNA
caaggaatgacttgccaaggccaaggagttagagaactaagctaaggacagctaggcttctatgtaataatgttcatgctccttaaacacaaagtcaccaagagtcattaactatctggc

SEQ ID NO: 107441 - DNA, 120 bp, synthetic construct
  source 1..120: mol_type = other DNA
taaagaagtgatcttgctatccaggaattggttgtttttttttttttggttttggttttttttttgagactgagtctcgctctgtcgcccagggtggagtgcagtggtgtgatcttggct

SEQ ID NO: 107442 - DNA, 120 bp, synthetic construct
  source 1..120: mol_type = other DNA
aggattgggtgatgccatcatatggggggggtggtgaaagaaaagaaatcaaggatgacttaggttatagtttggtagttgggtggtaataatcattaaccagaacttttgtatacaaat

SEQ ID NO: 107443 - DNA, 120 bp, synthetic construct
  source 1..120: mol_type = other DNA
tttcaaataaggttatggcatttgtgcagctagtttctgtgagggccttgtagaaagtttacattgatatttgtctgggaaacaatagcgctagacagagagggcacgccatagattcca

SEQ ID NO: 107444 - DNA, 120 bp, synthetic construct
  source 1..120: mol_type = other DNA
ggattttccacagtaggggtgctcaacctgtaccgtgtaaactttggatcagttaaattctccttagaatgcctaggcacatcttagtttttgacttgaaaagcaattctggcactgatg

SEQ ID NO: 107445 - DNA, 120 bp, synthetic construct
  source 1..120: mol_type = other DNA
agtgctgggattacaggtgtgagccagcgcgcctggcccaagacctagcttttaaaaaatcactttctctatttctctgttgaacattaccaactctgattattcttattcttttgtctt

SEQ ID NO: 107446 - DNA, 120 bp, synthetic construct
  source 1..120: mol_type = other DNA
agtaattgtggtgactatttatggtttgtgtgtatgtgtgttgtttgtttgtttttgagacaagctctcactctattgcccaggctagaatgcagtggtatgatcagggcttgccgtagc

SEQ ID NO: 107447 - DNA, 120 bp, synthetic construct
  source 1..120: mol_type = other DNA
caaataatatatttcatagaaatataatcagctaggcatggtggttcatgcctgtaatcccaacactttaggaggcctacacagaaggatagcttgaggccaggagttcaagaccagcct

SEQ ID NO: 107448 - DNA, 120 bp, synthetic construct
  source 1..120: mol_type = other DNA
atctatttatgtgaatattttttaaatatacttgccctgccacccaacaagaagttgtgctttcattgccagacctgtgtattgggtgggtttagaaagcagagttatcggcctggcacg

SEQ ID NO: 107449 - DNA, 120 bp, synthetic construct
  source 1..120: mol_type = other DNA
tttaatttttaattttttttttttctttttttttgagacagagtctcgttctgtcgaccaggctggagtgtagtggcgtgatctgggctcactgcaacctccacgtcctgagttcaagtg

SEQ ID NO: 107450 - DNA, 120 bp, synthetic construct
  source 1..120: mol_type = other DNA
gccaggctggtcttgaactcctgacttcatgatccacccacctcgatctcccaaagtgctgggattacaggcttgagccactgtgcgtggcctattattttattttatttttatttttat

SEQ ID NO: 107451 - DNA, 120 bp, synthetic construct
  source 1..120: mol_type = other DNA
atatatgctaagttatatagaagttgcaactttgcaaattcttcttcttttttttctgagacagagtcttgctctgttgccaggctggagtgtagtggcgcgatctcagctcactgcatc

SEQ ID NO: 107452 - DNA, 120 bp, synthetic construct
  source 1..120: mol_type = other DNA
ccattctttaggttagaagtacaacacaggtctcattaggctaaaattaagttgtttgcaggggctgcattcttttccagaggctccttgccttttccaacttttataggccatccacat

SEQ ID NO: 107453 - DNA, 120 bp, synthetic construct
  source 1..120: mol_type = other DNA
ttttcatcttctctctgtcacttttagtctatgctggcagtatttctgttggtataacattcttaagaacattgttgggaccaggcgcgatggctcacatctgtaatcctagcactttgg

SEQ ID NO: 107454 - DNA, 120 bp, synthetic construct
  source 1..120: mol_type = other DNA
ccttggcctcccaaagtgctgggattatgtgtgaaccactgtaccaggccttgacagtaaatatctttttttttttttttttctgagacagagtctcacactattgccagggctgcaatg

SEQ ID NO: 107455 - DNA, 120 bp, synthetic construct
  source 1..120: mol_type = other DNA
caggttgccacttcagtagattctgctttccacattatcgtgggacataattctgctaaactttctgccctatgtaacaaggatcccctttccacaagtttttaataacatgttcctaat

SEQ ID NO: 107456 - DNA, 120 bp, synthetic construct
  source 1..120: mol_type = other DNA
atatggtaactctatgtttaactttttttttttttttttttttaaagacggagtctcgctctgttgccaggctggagtgcagtggcgcagtctcagctcattgcaaccttcacctcccag

SEQ ID NO: 107457 - DNA, 120 bp, synthetic construct
  source 1..120: mol_type = other DNA
gatagtctatgttgttttgtttttgagacagggtctcgctgtgttgcccaggctgaaatggcacaagttttctacaagtttttaataaaacttgtggggcatgatcatggcttactgcag

SEQ ID NO: 107458 - DNA, 120 bp, synthetic construct
  source 1..120: mol_type = other DNA
ttttggcaggaatacccctgcggtaatgctatacttctgtcagtacattgtatcaggaggcatgtgctaatgatttatcccattactggtgatgttaacttttgtcactgtttaagatgt

SEQ ID NO: 107459 - DNA, 120 bp, synthetic construct
  source 1..120: mol_type = other DNA
tggacatgccactaaaacagaaggaggctaataagtgatcttatttcttgcttctcaatcgtgaaactttcttttttaagagataaaagttttaggaggcccggtgcggtggctcatgcc

SEQ ID NO: 107460 - DNA, 120 bp, synthetic construct
  source 1..120: mol_type = other DNA
gctgagactatagacacacgccaccatgtccggctaatgtttgtattttttgtagaaatgggttttttttttttttttgccatcttgcccaggctggtctcaaactcctgagctcaggca

SEQ ID NO: 107461 - DNA, 120 bp, synthetic construct
  source 1..120: mol_type = other DNA
atcccagttaggaggctgactgtgtcagaatacaattttaaaacctcttttttgttgtccttgaaattgttgcaagcctcagctccttctgggtttcggtctcctgattcttcttaccaa

SEQ ID NO: 107462 - DNA, 120 bp, synthetic construct
  source 1..120: mol_type = other DNA
tattacagtgattgctttctttctttttcttttttttgagatggagtcaccctctgtcgcccagactggagtgcagtggcgtgatctccatttacgccaaactccgccccccggattcaa

SEQ ID NO: 107463 - DNA, 120 bp, synthetic construct
  source 1..120: mol_type = other DNA
aacctccacctcctgggttcaagcaattttcctgcctcagcctcccgagtaactgagattacaggcatgtgccaccacatccggctaattttgtattttcagtagagacggggtttctcc

SEQ ID NO: 107464 - DNA, 120 bp, synthetic construct
  source 1..120: mol_type = other DNA
gtgcaggtatgtatatgtgtttttacacacacatatgtgcttctttgaaaaacttggctgtttcattggccctagtctccgcctcctttgaaactcagcacttgatttagagggaacagt

SEQ ID NO: 107465 - DNA, 120 bp, synthetic construct
  source 1..120: mol_type = other DNA
atcatagttgtaatttacttgttcattgttgttcttccttactggattgtctgttccctgagggcttagactgcatctgtctgtatttttaattatctagtagggtacctagaatgcagt

SEQ ID NO: 107466 - DNA, 120 bp, synthetic construct
  source 1..120: mol_type = other DNA
gaggaaatatcttgcctagaatcggtatgaaattatatacctgagagacagaagccccactgttttaccttatgtaaagctctgtctgagcccctccatcgcgtctcttttgttacttta

SEQ ID NO: 107467 - DNA, 120 bp, synthetic construct
  source 1..120: mol_type = other DNA
tctagatggatgctttctactcagtttggtgatattgatgaacagatttaatcctaaaaatcactgaaagaacaagagcagtttatttattaggctgtagtttcccttattatctcagta

SEQ ID NO: 107468 - DNA, 120 bp, synthetic construct
  source 1..120: mol_type = other DNA
ataacaactgtctcttagaagataatgtgccctggaccgaatggcaagagaaattggatcatttgttctgaaatgaagtcagttccagcaactgtggtctttgcattcttgtggccctag

SEQ ID NO: 107469 - DNA, 120 bp, synthetic construct
  source 1..120: mol_type = other DNA
ctgcctccaaggttcaagcaattcttctgcctcagcctcccgggtagctgggattacaggcacccactaccatgcacggctaatgtttgtatttttagtagagacagggtctcactattt

SEQ ID NO: 107470 - DNA, 120 bp, synthetic construct
  source 1..120: mol_type = other DNA
aaaagtgtacgttttcagtacagataaaaccattcatttcccccacccaatattttcaatccacagttagttgtatatccacagatgcagaatccatggatgcagaactcaggacacaga

SEQ ID NO: 107471 - DNA, 120 bp, synthetic construct
  source 1..120: mol_type = other DNA
cactccagcctggcaacagagtgacactctgtctcaaaaaataaaaaaagaatgatgtttatgggagaagtgacagaagataaggctagaaagtgggccaaatggtgaaggactttgact

SEQ ID NO: 107472 - DNA, 120 bp, synthetic construct
  source 1..120: mol_type = other DNA
tcaggatttttcatagtgacagaaaaagtctatttgactttttcctataaaagtctagttgaatttaggtacatgccttgagaatggcagatagctgaagttgcaataatgaatgagtct

SEQ ID NO: 107473 - DNA, 120 bp, synthetic construct
  source 1..120: mol_type = other DNA
gcactttggaatgagacagatctgagttcaattctaactctgtcactaactgtgagaccttaccttgaaaaagttatttgtcaccacacctgccaccaagcctcagtatttttgtccaca

SEQ ID NO: 107474 - DNA, 120 bp, synthetic construct
  source 1..120: mol_type = other DNA
gagtgcatttaggtggaacatacatacttcccctttccaacagttttctatgagcaccactagtctatatggccttaattgccttatactctgcttgattcacacatccgtttggctcct

SEQ ID NO: 107475 - DNA, 120 bp, synthetic construct
  source 1..120: mol_type = other DNA
ctcagaaatgctttactttacctcagtacgtgagtactcttgacctcaagagaggttgtggggaagcagatgggcagaatacatcatgatgagattagtgtgacaacactggaaataaaa

SEQ ID NO: 107476 - DNA, 120 bp, synthetic construct
  source 1..120: mol_type = other DNA
aacatttacataattatttaaccctcataataatctgagaaacaggagtatcttcatttaagagcttaagaaactgaagtggccgaggtgggtgggaggccaaggcgagtggatcacctg

SEQ ID NO: 107477 - DNA, 120 bp, synthetic construct
  source 1..120: mol_type = other DNA
tttatttcttagccattgagtagacattttttaaaaaaaatcatccacataggctgggcacagtggctgacaactataatcccagtgctttgggaggccaaggcagaaggatcgcttgag

SEQ ID NO: 107478 - DNA, 120 bp, synthetic construct
  source 1..120: mol_type = other DNA
cacagttctagcaatgatcccaaactatcaaatcagggtctctgggagttgtgatgtgggtactcttttttgcttccccaaaatattttttggtgattatgggaaacaactggcctcttc

SEQ ID NO: 107479 - DNA, 120 bp, synthetic construct
  source 1..120: mol_type = other DNA
ggtattatttgcagcacaaaagttagtaattttgatgaaatccaattcatctgttttttcttttgtcatttatgattttggtgtcatctgtgaaaccactgcctaatccaagatcatgaa

SEQ ID NO: 107480 - DNA, 120 bp, synthetic construct
  source 1..120: mol_type = other DNA
atgagatcccaagtagtctgtctcccatcataaacttgaacatgagtttaaatcttctccttttcaaggccgggtgcagtggctcacacctgtaatctcagcactttgggaggcaaaggt

SEQ ID NO: 107481 - DNA, 120 bp, synthetic construct
  source 1..120: mol_type = other DNA
aacttctgcctcctgggttcaagagattcctgtgcctcagcctcttaagtagttggcgttatagacgcatgccaccactcctggtttttgtatttttagtagagatggggtttcaccatg

SEQ ID NO: 107482 - DNA, 120 bp, synthetic construct
  source 1..120: mol_type = other DNA
gacactggggattcagttatgagctagataaccattgttgctgctttcattcttccgttcctgttgacccagagtagtgcttctgacaggactcaaatagattaccttttcttatctaca

SEQ ID NO: 107483 - DNA, 120 bp, synthetic construct
  source 1..120: mol_type = other DNA
taatctcagcattttgggaggccgaggcgggcggataatctgaggccgggagttcgagaccagccttaccaacatggagaaacgctgtctctactaaaaatacaaaattagccgggcatg

SEQ ID NO: 107484 - DNA, 120 bp, synthetic construct
  source 1..120: mol_type = other DNA
ctaagggtccttaagtctgcttttattttttcttctagcaagtactggctgtgagtgtgggacaggattttgtgttttctgtgacagtctgcagtttttggcctctgaacttgatagttg

SEQ ID NO: 107485 - DNA, 120 bp, synthetic construct
  source 1..120: mol_type = other DNA
ggaggctgaggcgggaggattgcttgagcccaggagttcaatactagcctgggcaagacataacaagagtctatctctattttttagtattaaaaagaaaagtgggttttaactcaattg

SEQ ID NO: 107486 - DNA, 120 bp, synthetic construct
  source 1..120: mol_type = other DNA
ctgtaatcccagcattctgggaggacaaggcgggcagatcacgagatcaggagatcaagaccatcctggctaactcgatgaaaccccatctctactaaaaatacaaaaacaaaattagcc

SEQ ID NO: 107487 - DNA, 120 bp, synthetic construct
  source 1..120: mol_type = other DNA
tggttcttactgtgttgtcctctatggggctggcagccatgtgaagaaaggaggctcccagcatcatcttcctacacattattacattcacccatctttctgtttgtcattcttatctcc

SEQ ID NO: 107488 - DNA, 120 bp, synthetic construct
  source 1..120: mol_type = other DNA
aaagaagtgacgcatgtagagtgcttttgggttataggcaccaaaatcccattaaggactgattataagcttcatggtacagttcagcaaattatgattcattgaggggcacagaggacc

SEQ ID NO: 107489 - DNA, 120 bp, synthetic construct
  source 1..120: mol_type = other DNA
tcttccccaccttctccaaacacacatatacatactctactcaattctatttctgattttgtagttgttagttgtccatgctcaggataaaaaatgagtgggtagggttgagggactggt

SEQ ID NO: 107490 - DNA, 120 bp, synthetic construct
  source 1..120: mol_type = other DNA
aaataagaaaagttaaatttgatttctctaaccaccctcccccaccttgagattagatcattttctactgttgggggtatgatgtccttagcccatcccttcaggcctcagaaggtgatt

SEQ ID NO: 107491 - DNA, 120 bp, synthetic construct
  source 1..120: mol_type = other DNA
tgccttaattatttgactttcttgataggagtgaagatagtatctcaccttggaacggggcacagaaggcagtagatgaccacgatcgttggcaataatttgagtgtagccttcatgaga

SEQ ID NO: 107492 - DNA, 120 bp, synthetic construct
  source 1..120: mol_type = other DNA
agcgatccttgtgcctcagcctcccaaagtgttgggattacagacgtgagctacaacacccagcaggttttggagatttagtacaaaaaaagaacgtaaaatgtctgattataatttttt

SEQ ID NO: 107493 - DNA, 120 bp, synthetic construct
  source 1..120: mol_type = other DNA
agaaaattagctgaatagccactactttttttctggcataacctacccctgcttaagaacttccacgggcctttgattggggtttttaaccactttaacaaaccatgtaaccctgagagc

SEQ ID NO: 107494 - DNA, 120 bp, synthetic construct
  source 1..120: mol_type = other DNA
atatcattaggaccaggagaccattataaagtatatccaggccgggcacggtggctcatgcctgtaatcccagcactttgggtggccgaagcagacggatcacaaggtcaggagttcgag

SEQ ID NO: 107495 - DNA, 120 bp, synthetic construct
  source 1..120: mol_type = other DNA
cctcagggcaactgctgttactcatttcttgtgtctccttccagaaatcttctctgcatacaaacactaatgagagagctgtccacattgctttttgatttgctttttgactatcttggg

SEQ ID NO: 107496 - DNA, 120 bp, synthetic construct
  source 1..120: mol_type = other DNA
ccaaccaaggaaactggagaatacacagtgaggagtagagccaggatttaatcccaagtattctgactctagagccagcagttttaaccattatatcatattgcttgttaagctgtaggt

SEQ ID NO: 107497 - DNA, 120 bp, synthetic construct
  source 1..120: mol_type = other DNA
acctcagcttcccaaaaagctgggattacaggcttgagccactgcacccagcctgttgatcatgttcattaatctgtttgaactccatatattaaggaaattagtcctttgtcaaatatg

SEQ ID NO: 107498 - DNA, 120 bp, synthetic construct
  source 1..120: mol_type = other DNA
gaaaaaaaaaggccaggcgcggtgactcacgcctgtaatcccagtactttgagaggctgagacgggaggatcacgagatcaagagatggagaccatcctggccaacatggtgaaaccccg

SEQ ID NO: 107499 - DNA, 120 bp, synthetic construct
  source 1..120: mol_type = other DNA
gaaggcaaccaccagcataagtactagagtcacattgcctggattaaattctggctttgcctaaatgtgtggccttacacaagttaatctttctgggtctcagtacccttacatgtaaaa

SEQ ID NO: 107500 - DNA, 120 bp, synthetic construct
  source 1..120: mol_type = other DNA
agacctggcttttgccccatttcctgggctaacaggatttcatccaaccaagctactggccaaattttgaactattcaaacaccctggtttttgtagatttccttataggaaatgaaggc

SEQ ID NO: 107501 - DNA, 120 bp, synthetic construct
  source 1..120: mol_type = other DNA
tgccttggcctcccaaagtcgttggattacaggcgtgagccactgtgcctggcctataacactatttcttaaaacaaaacaaaaagaccaaagaacaagctttaaacaaccaaaatgact

SEQ ID NO: 107502 - DNA, 120 bp, synthetic construct
  source 1..120: mol_type = other DNA
atcagttcgaaaatcatttaacctgggcatttgtgttacctcaggtactgtagtaatgctaggatacaaatgtgaagaaaacgtagttcccgccctcaacgagctttcattctgatgagg

SEQ ID NO: 107503 - DNA, 120 bp, synthetic construct
  source 1..120: mol_type = other DNA
ctttacaaatttttttcttttgttttctttttttttgagacagagtctcgctctgttatgcaggctggagtgcagtggtgcgatctcggctcactgcaacctccaccttctgagttcaag

SEQ ID NO: 107504 - DNA, 120 bp, synthetic construct
  source 1..120: mol_type = other DNA
caagtctaaacctggtaagctccaaacttggtcattatccttgactctagtagtagtctcctaactggttcccatttgtgttcattcccaacacagcatacccagtgatcctgttaaaat

SEQ ID NO: 107505 - DNA, 120 bp, synthetic construct
  source 1..120: mol_type = other DNA
gaatgaatgagcatccagcgcctgtttgtttgtttgtttgtttgtttattttttgagacagagtctcgctctgttgcccaggctggagtgcaatggtgtgatctcagctcaccacaacct

SEQ ID NO: 107506 - DNA, 120 bp, synthetic construct
  source 1..120: mol_type = other DNA
tcccaaagtgctgggattataggtgtgaaccaccgtgcccagcctaaaggggttttaattatctggttttgtaggactggttaggagaatgagttgttgttgttgatgttgttttttaac

SEQ ID NO: 107507 - DNA, 120 bp, synthetic construct
  source 1..120: mol_type = other DNA
tttgagaccagcctggccaatatggtgaaaccttgtctctactaataatacaaaaattaagctgggcgtggtggcacacgcctttagtcccagctacttgggagactgaggcagaagaac

SEQ ID NO: 107508 - DNA, 120 bp, synthetic construct
  source 1..120: mol_type = other DNA
ttcaatcactttggaaaacattctggcagttacaacaaaaagttaaccttagagttaccatctgactcggcgatctacttttaggtgtatacccaagagaactgaaaacgtgtccacgca

SEQ ID NO: 107509 - DNA, 120 bp, synthetic construct
  source 1..120: mol_type = other DNA
atttcatataaaattcagattccttatcatgaccttcaagaccctatgcaaccgacccctgccttcctctgatctctgcttcacccatgtgctccagccacacaaatcttactattcatt

SEQ ID NO: 107510 - DNA, 120 bp, synthetic construct
  source 1..120: mol_type = other DNA
cagcgtgggcaacagagtaagactttgtctctaaagaaaagtcactagaaatagacttactgacatacacacgcaaaaggctatacagaatcccctaaagaagcaaacagtgacagtgga

SEQ ID NO: 107511 - DNA, 120 bp, synthetic construct
  source 1..120: mol_type = other DNA
gatagctcatattataaatttctaaatcctaggaagaaacgcttggagtgcttctgaatatacagaagttccatttaagggcaagtttccctgtagatgtatcaaaatactaccaactgt

SEQ ID NO: 107512 - DNA, 120 bp, synthetic construct; identical to SEQ ID NO: 5913
  source 1..120: mol_type = other DNA

SEQ ID NO: 107513 - DNA, 120 bp, synthetic construct; identical to SEQ ID NO: 28801
  source 1..120: mol_type = other DNA

SEQ ID NO: 107514 - DNA, 120 bp, synthetic construct; identical to SEQ ID NO: 28802
  source 1..120: mol_type = other DNA

SEQ ID NO: 107515 - DNA, 120 bp, synthetic construct; identical to SEQ ID NO: 28806
  source 1..120: mol_type = other DNA

SEQ ID NO: 107516 - DNA, 120 bp, synthetic construct; identical to SEQ ID NO: 28807
  source 1..120: mol_type = other DNA

SEQ ID NO: 107517 - DNA, 120 bp, synthetic construct
  source 1..120: mol_type = other DNA
gctctgttctgttccgttgatctatatctctgttttggtaccagtaccatgctgttttggatactggagccttgtagtatagtttgaagtcaggtagcgtgatgcttccagctttgttct

SEQ ID NO: 107518 - DNA, 120 bp, synthetic construct; identical to SEQ ID NO: 28808
  source 1..120: mol_type = other DNA

SEQ ID NO: 107519 - DNA, 120 bp, synthetic construct; identical to SEQ ID NO: 28809
  source 1..120: mol_type = other DNA

SEQ ID NO: 107520 - DNA, 120 bp, synthetic construct; identical to SEQ ID NO: 28810
  source 1..120: mol_type = other DNA

SEQ ID NO: 107521 - DNA, 120 bp, synthetic construct; identical to SEQ ID NO: 28811
  source 1..120: mol_type = other DNA

SEQ ID NO: 107522 - DNA, 120 bp, synthetic construct; identical to SEQ ID NO: 28812
  source 1..120: mol_type = other DNA

SEQ ID NO: 107523 - DNA, 120 bp, synthetic construct; identical to SEQ ID NO: 28813
  source 1..120: mol_type = other DNA

SEQ ID NO: 107524 - DNA, 120 bp, synthetic construct; identical to SEQ ID NO: 28814
  source 1..120: mol_type = other DNA

SEQ ID NO: 107525 - DNA, 120 bp, synthetic construct; identical to SEQ ID NO: 28815
  source 1..120: mol_type = other DNA

SEQ ID NO: 107526 - DNA, 120 bp, synthetic construct; identical to SEQ ID NO: 28816
  source 1..120: mol_type = other DNA

SEQ ID NO: 107527 - DNA, 120 bp, synthetic construct; identical to SEQ ID NO: 28817
  source 1..120: mol_type = other DNA

SEQ ID NO: 107528 - DNA, 120 bp, synthetic construct; identical to SEQ ID NO: 28818
  source 1..120: mol_type = other DNA

SEQ ID NO: 107529 - DNA, 120 bp, synthetic construct; identical to SEQ ID NO: 28819
  source 1..120: mol_type = other DNA

SEQ ID NO: 107530 - DNA, 120 bp, synthetic construct; identical to SEQ ID NO: 28803
  source 1..120: mol_type = other DNA

SEQ ID NO: 107531 - DNA, 120 bp, synthetic construct; identical to SEQ ID NO: 28804
  source 1..120: mol_type = other DNA

SEQ ID NO: 107532 - DNA, 120 bp, synthetic construct; identical to SEQ ID NO: 28805
  source 1..120: mol_type = other DNA

SEQ ID NO: 107533 - DNA, 120 bp, synthetic construct; identical to SEQ ID NO: 28820
  source 1..120: mol_type = other DNA

SEQ ID NO: 107534 - DNA, 120 bp, synthetic construct; identical to SEQ ID NO: 28821
  source 1..120: mol_type = other DNA

SEQ ID NO: 107535 - DNA, 120 bp, synthetic construct; identical to SEQ ID NO: 28822
  source 1..120: mol_type = other DNA

SEQ ID NO: 107536 - DNA, 120 bp, synthetic construct; identical to SEQ ID NO: 28793
  source 1..120: mol_type = other DNA

SEQ ID NO: 107537 - DNA, 120 bp, synthetic construct; identical to SEQ ID NO: 28794
  source 1..120: mol_type = other DNA

SEQ ID NO: 107538 - DNA, 120 bp, synthetic construct; identical to SEQ ID NO: 28795
  source 1..120: mol_type = other DNA

SEQ ID NO: 107539 - DNA, 120 bp, synthetic construct
  source 1..120: mol_type = other DNA
ctttaatccatcttgaattaatttttgtataaggtgtaaggaagggaatccagtttcagctttctacatatggctagccagttttcccagcaccatttattaaatagggaatcctttccc

SEQ ID NO: 107540 - DNA, 120 bp, synthetic construct
  source 1..120: mol_type = other DNA
taatttatttttttttaaaaagaggtttagatagctcatggtactgtaggttgtacaggaagcgtgatgctgctcagcttctggggaggcctcaggaaacttacagtcatggcagaaggc

SEQ ID NO: 107541 - DNA, 120 bp, synthetic construct; identical to SEQ ID NO: 28796
  source 1..120: mol_type = other DNA

SEQ ID NO: 107542 - DNA, 120 bp, synthetic construct; identical to SEQ ID NO: 28797
  source 1..120: mol_type = other DNA

SEQ ID NO: 107543 - DNA, 120 bp, synthetic construct
  source 1..120: mol_type = other DNA
catttgtcaattttggcttttgttgccattgcttttgctgttttggacataaagtccttgcccatgcctatgtcctgaatggtaatgcctaggttatcttctagggtttttatggtttta

SEQ ID NO: 107544 - DNA, 120 bp, synthetic construct
  source 1..120: mol_type = other DNA
ggtgtgtaagaatgcttgtgatttttgtacatcgattttgtatcctgagactttgctgaagttgcttatcagcttaaggagattttgggctgagacaatggggttttctagatatacaat

SEQ ID NO: 107545 - DNA, 120 bp, synthetic construct
  source 1..120: mol_type = other DNA
ctctcagaccacagtgcaatcaaactagaactcaagattaagaatctcactcaaagccgctcaactacatggaaactgaacaacctgctcctgaatgactactgggtacataacgaaatg

SEQ ID NO: 107546 - DNA, 120 bp, synthetic construct; identical to SEQ ID NO: 28798
  source 1..120: mol_type = other DNA

SEQ ID NO: 107547 - DNA, 120 bp, synthetic construct; identical to SEQ ID NO: 28799
  source 1..120: mol_type = other DNA

SEQ ID NO: 107548 - DNA, 120 bp, synthetic construct; identical to SEQ ID NO: 18502
  source 1..120: mol_type = other DNA

SEQ ID NO: 107549 - DNA, 120 bp, synthetic construct; identical to SEQ ID NO: 18503
  source 1..120: mol_type = other DNA

SEQ ID NO: 107550 - DNA, 120 bp, synthetic construct; identical to SEQ ID NO: 18504
  source 1..120: mol_type = other DNA

SEQ ID NO: 107551 - DNA, 120 bp, synthetic construct; identical to SEQ ID NO: 18505
  source 1..120: mol_type = other DNA

SEQ ID NO: 107552 - DNA, 120 bp, synthetic construct; identical to SEQ ID NO: 18506
  source 1..120: mol_type = other DNA

SEQ ID NO: 107553 - DNA, 120 bp, synthetic construct
  source 1..120: mol_type = other DNA
atcagaagcagcattttagcaagacgcttggcaagtgtgtccatgttcaactgtgaggagcatattatttgtcccaaacttgactgtgtgtcggaaccacctgtagaattaaaaaatgct

SEQ ID NO: 107554 - DNA, 120 bp, synthetic construct; identical to SEQ ID NO: 18507
  source 1..120: mol_type = other DNA

SEQ ID NO: 107555 - DNA, 120 bp, synthetic construct; identical to SEQ ID NO: 18508
  source 1..120: mol_type = other DNA

SEQ ID NO: 107556 - DNA, 120 bp, synthetic construct
  source 1..120: mol_type = other DNA
ctagctccagatcatcactactgcccaccatcacttccctggcacagggaggtcctctccacctccaagactcaggttccaaaacgctctgtgctgccacttggaccacactcagctaca

SEQ ID NO: 107557 - DNA, 120 bp, synthetic construct
  source 1..120: mol_type = other DNA
taaaggacttgatgacacctctttcttagcccttgatttaaacatcatattggatttacctgcttatactcgtttccccctagatgactgtgagtcaggctagactggaggttggggaaa

SEQ ID NO: 107558 - DNA, 120 bp, synthetic construct; identical to SEQ ID NO: 31544
  source 1..120: mol_type = other DNA

SEQ ID NO: 107559 - DNA, 120 bp, synthetic construct
  source 1..120: mol_type = other DNA
cactgcactccagcctggcggcaaagtgatactctatctcaaaaaaaaaaaaaagaaaaagaacacaaagccatgggagtggagacttccagggaccatggtctttatcttcattctgac

SEQ ID NO: 107560 - DNA, 120 bp, synthetic construct; identical to SEQ ID NO: 15609
  source 1..120: mol_type = other DNA

SEQ ID NO: 107561 - DNA, 120 bp, synthetic construct
  source 1..120: mol_type = other DNA
tctctgcccggccgccccgtctgagaagtgaggagaccctctgcctggcaaccgccccctctgagaagtgaggagtccctccgcccggcagccaccccatctgagaagtgaggagcccct

SEQ ID NO: 107562 - DNA, 120 bp, synthetic construct; identical to SEQ ID NO: 19086
  source 1..120: mol_type = other DNA

SEQ ID NO: 107563 - DNA, 120 bp, synthetic construct; identical to SEQ ID NO: 24086
  source 1..120: mol_type = other DNA

SEQ ID NO: 107564 - DNA, 120 bp, synthetic construct; identical to SEQ ID NO: 18526
  source 1..120: mol_type = other DNA

SEQ ID NO: 107565 - DNA, 120 bp, synthetic construct; identical to SEQ ID NO: 18527
  source 1..120: mol_type = other DNA

SEQ ID NO: 107566 - DNA, 120 bp, synthetic construct
  source 1..120: mol_type = other DNA
tttatttatttatttattattattatttttgagatggagtctctgtcgctcaggctggagtacagtggcatgatctcggctcactgccacctcctcctctcaggttcaagcaattctcat

SEQ ID NO: 107567 - DNA, 120 bp, synthetic construct; identical to SEQ ID NO: 33159
  source 1..120: mol_type = other DNA

SEQ ID NO: 107568 - DNA, 120 bp, synthetic construct; identical to SEQ ID NO: 33160
  source 1..120: mol_type = other DNA

SEQ ID NO: 107569 - DNA, 120 bp, synthetic construct; identical to SEQ ID NO: 9060
  source 1..120: mol_type = other DNA

SEQ ID NO: 107570 - DNA, 120 bp, synthetic construct; identical to SEQ ID NO: 8070
  source 1..120: mol_type = other DNA

SEQ ID NO: 107571 - DNA, 120 bp, synthetic construct; identical to SEQ ID NO: 8071
  source 1..120: mol_type = other DNA

SEQ ID NO: 107572 - DNA, 120 bp, synthetic construct; identical to SEQ ID NO: 8072
  source 1..120: mol_type = other DNA

SEQ ID NO: 107573 - DNA, 120 bp, synthetic construct; identical to SEQ ID NO: 8073
  source 1..120: mol_type = other DNA

SEQ ID NO: 107574 - DNA, 120 bp, synthetic construct; identical to SEQ ID NO: 8074
  source 1..120: mol_type = other DNA

SEQ ID NO: 107575 - DNA, 120 bp, synthetic construct
  source 1..120: mol_type = other DNA
tggcaaacaagtatgtgatcttttattctaaagaaaatgtagtatgattagcacacacacacacaaaaattattggccgggcgcagtggcccatgcctgtaatcccagcactttgggagg

SEQ ID NO: 107576 - DNA, 120 bp, synthetic construct; identical to SEQ ID NO: 8075
  source 1..120: mol_type = other DNA

SEQ ID NO: 107577 - DNA, 120 bp, synthetic construct; identical to SEQ ID NO: 8076
  source 1..120: mol_type = other DNA

SEQ ID NO: 107578 - DNA, 120 bp, synthetic construct; identical to SEQ ID NO: 8077
  source 1..120: mol_type = other DNA

SEQ ID NO: 107579 - DNA, 120 bp, synthetic construct; identical to SEQ ID NO: 8078
  source 1..120: mol_type = other DNA

SEQ ID NO: 107580 - DNA, 120 bp, synthetic construct; identical to SEQ ID NO: 8079
  source 1..120: mol_type = other DNA

SEQ ID NO: 107581 - DNA, 120 bp, synthetic construct; identical to SEQ ID NO: 8080
  source 1..120: mol_type = other DNA

SEQ ID NO: 107582 - DNA, 120 bp, synthetic construct; identical to SEQ ID NO: 8081
  source 1..120: mol_type = other DNA

SEQ ID NO: 107583 - DNA, 120 bp, synthetic construct
  source 1..120: mol_type = other DNA
gcacatgcctgtagccccaggtactcaggaggataaggtgggaagatcgcttgaacccaggagatggtggttgcagtgagccaagatcgtgccattgcactccagcctgggcaacagaac

SEQ ID NO: 107584 - DNA, 120 bp, synthetic construct; identical to SEQ ID NO: 8082
  source 1..120: mol_type = other DNA

SEQ ID NO: 107585 - DNA, 120 bp, synthetic construct
  source 1..120: mol_type = other DNA
aatacaaaactgaactgaagtctcggccaggcactgtgtctcacacgtataaatcccagcattttgggaggccaagatgggtggatcacttgaggccaggaattcgagaccagcctggcc

SEQ ID NO: 107586 - DNA, 120 bp, synthetic construct; identical to SEQ ID NO: 8083
  source 1..120: mol_type = other DNA

SEQ ID NO: 107587 - DNA, 120 bp, synthetic construct; identical to SEQ ID NO: 8084
  source 1..120: mol_type = other DNA

SEQ ID NO: 107588 - DNA, 120 bp, synthetic construct
  source 1..120: mol_type = other DNA
ctgaaactcgtgacctcaatcgatccacccaattcagtctcccaaagtgctgagattacaggtgtaagccactggacccagcccattacacaattcttcaactaacattttaaactttta

SEQ ID NO: 107589 - DNA, 120 bp, synthetic construct; identical to SEQ ID NO: 8085
  source 1..120: mol_type = other DNA

SEQ ID NO: 107590 - DNA, 120 bp, synthetic construct; identical to SEQ ID NO: 8086
  source 1..120: mol_type = other DNA

SEQ ID NO: 107591 - DNA, 120 bp, synthetic construct; identical to SEQ ID NO: 8087
  source 1..120: mol_type = other DNA

SEQ ID NO: 107592 - DNA, 120 bp, synthetic construct; identical to SEQ ID NO: 8088
  source 1..120: mol_type = other DNA

SEQ ID NO: 107593 - DNA, 120 bp, synthetic construct; identical to SEQ ID NO: 8089
  source 1..120: mol_type = other DNA

SEQ ID NO: 107594 - DNA, 120 bp, synthetic construct; identical to SEQ ID NO: 8090
  source 1..120: mol_type = other DNA

SEQ ID NO: 107595 - DNA, 120 bp, synthetic construct; identical to SEQ ID NO: 8091
  source 1..120: mol_type = other DNA

SEQ ID NO: 107596 - DNA, 120 bp, synthetic construct
  source 1..120: mol_type = other DNA
aatcccagtactttgcgaggccaaggcaggtggatcatgaggtcaggagttcaagatcagactggccaagatgctgaaaccccatctcaactaaaaatacaaaaattagccgggtagggt

SEQ ID NO: 107597 - DNA, 120 bp, synthetic construct; identical to SEQ ID NO: 8092
  source 1..120: mol_type = other DNA

SEQ ID NO: 107598 - DNA, 120 bp, synthetic construct; identical to SEQ ID NO: 8093
  source 1..120: mol_type = other DNA

SEQ ID NO: 107599 - DNA, 120 bp, synthetic construct; identical to SEQ ID NO: 8094
  source 1..120: mol_type = other DNA

SEQ ID NO: 107600 - DNA, 120 bp, synthetic construct; identical to SEQ ID NO: 8095
  source 1..120: mol_type = other DNA

SEQ ID NO: 107601 - DNA, 120 bp, synthetic construct
  source 1..120: mol_type = other DNA
gcagaggttgcagtaagcctgggagacagagcgagactccgtctcaaaaaaaaaaaaaaaaaaaaaaacacacaaaaaacatatatatatatacacacagacacggccaggcgcagtggc

SEQ ID NO: 107602 - DNA, 120 bp, synthetic construct
  source 1..120: mol_type = other DNA
ggacagaagcttgagagattgtcattttcaccctccagttctctggcaggacttgacttaagccgtgccagaagacagtgtctatccttaaagaaccttgatttatcttacctttatatg

SEQ ID NO: 107603 - DNA, 120 bp, synthetic construct
  source 1..120: mol_type = other DNA
gttcatgcctgtaatcccagcactttggaaggctgagatgggaggatcgcttgacgttaggagtttgagacaagcttggccaccatggtgaaatcccatctctagtaaaaataaaaaaat

SEQ ID NO: 107604 - DNA, 120 bp, synthetic construct
  source 1..120: mol_type = other DNA
ggaaaacataagtaaatgaattttccgcatttctggatgattggggtctttcatagattatttgtttagaggcagggtcttgctctgtcacccaagctgaagtgcagtggtgagatcata

SEQ ID NO: 107605 - DNA, 120 bp, synthetic construct
  source 1..120: mol_type = other DNA
tttcctgtaaatctgtttatgttctttgtagattctggctatcagccctgtgtcagatggatagattataaaaactttctcccattctgtgggttgcctgttcactctgatgatagtttt

SEQ ID NO: 107606 - DNA, 120 bp, synthetic construct; identical to SEQ ID NO: 28188
  source 1..120: mol_type = other DNA

SEQ ID NO: 107607 - DNA, 120 bp, synthetic construct
  source 1..120: mol_type = other DNA
cagccgccccgtctgagaagtgaggagcccctacgcctggcagccaccccgtctgggaagtgaggagcgtctccgcccggcagccaccccgtccgggagggaggtgggggtcagcccccc

SEQ ID NO: 107608 - DNA, 120 bp, synthetic construct; identical to SEQ ID NO: 28189
  source 1..120: mol_type = other DNA

SEQ ID NO: 107609 - DNA, 120 bp, synthetic construct; identical to SEQ ID NO: 28190
  source 1..120: mol_type = other DNA

SEQ ID NO: 107610 - DNA, 120 bp, synthetic construct; identical to SEQ ID NO: 28191
  source 1..120: mol_type = other DNA

SEQ ID NO: 107611 - DNA, 120 bp, synthetic construct
  source 1..120: mol_type = other DNA
acgccactgcacttcagcctgggtgacagagcaaggctccatctcaaaaaataaaaatacttatatatgctgttgtgtttccccaaaactgtactacgggggtcctcatcttttacttaa

SEQ ID NO: 107612 - DNA, 120 bp, synthetic construct
  source 1..120: mol_type = other DNA
cctctaaaggaaaccctgtgctcatttagcagtcacttcttgtttactctgctcccagccgctggtaaccactaatctactttctgtctgtatggattttggagcaaataaatctaatgt

SEQ ID NO: 107613 - DNA, 120 bp, synthetic construct
  source 1..120: mol_type = other DNA
tttaaactcttaagggttaataaaattcttttttttttttttagacggagtctcactgtgtcacccaggctggagtgcagtggcacaatcttggctcactgcaagctccgcctcccgggt

SEQ ID NO: 107614 - DNA, 120 bp, synthetic construct
  source 1..120: mol_type = other DNA
agcttgcagtgagccgagatcacgccactgcactccagcctgggcgacggagcgagacttgtctcaaaaaaaaaaaaaattctataaaaattgtttcttttgttttgtggttacttttgt

SEQ ID NO: 107615 - DNA, 120 bp, synthetic construct; identical to SEQ ID NO: 18816
  source 1..120: mol_type = other DNA

SEQ ID NO: 107616 - DNA, 120 bp, synthetic construct; identical to SEQ ID NO: 18817
  source 1..120: mol_type = other DNA

SEQ ID NO: 107617 - DNA, 120 bp, synthetic construct
  source 1..120: mol_type = other DNA
tgagtacacctcccagacggggtggtggctgggcagaggggctcctcacttcccagtaggggcggccgggcagaggcgcccctcacctcccggacggggtggctggctgggcggggggct

SEQ ID NO: 107618 - DNA, 120 bp, synthetic construct
  source 1..120: mol_type = other DNA
agatgctccccacatctcagatgatgggcggccgggcagagacgctcctcacttcctagatgggatggcggccgggcagagacgctcctcactttccagactgggcagccaggcagagag

SEQ ID NO: 107619 - DNA, 120 bp, synthetic construct; identical to SEQ ID NO: 14558
  source 1..120: mol_type = other DNA

SEQ ID NO: 107620 - DNA, 120 bp, synthetic construct; identical to SEQ ID NO: 14559
  source 1..120: mol_type = other DNA

SEQ ID NO: 107621 - DNA, 120 bp, synthetic construct; identical to SEQ ID NO: 4811
  source 1..120: mol_type = other DNA

SEQ ID NO: 107622 - DNA, 120 bp, synthetic construct
  source 1..120: mol_type = other DNA
cccagtagtggggttgctgaatcaaatggtagttctacttttagttgtttaaggaatcttcacactgttttccacactggttgttttagtttacattcacatagcagtgtagaagtgttc

SEQ ID NO: 107623 - DNA, 120 bp, synthetic construct; identical to SEQ ID NO: 22358
  source 1..120: mol_type = other DNA

SEQ ID NO: 107624 - DNA, 120 bp, synthetic construct
  source 1..120: mol_type = other DNA
atttttagactacccctgcttgttcctgtgaaccaaccaatcaatcaaccaaccaagcaatctccagctgcagctcagaaagaacaaaagggatgggtaatgtaaaaatctggatcaata

SEQ ID NO: 107625 - DNA, 120 bp, synthetic construct
  source 1..120: mol_type = other DNA
ttttttttttttttttttgagacagaatcttgctctgtcgcccaggttggagtgcagtggtgcgatctcggctcacagcaacctctgcttcacgggttcaagcgattctcctgcctcagc

SEQ ID NO: 107626 - DNA, 120 bp, synthetic construct
  source 1..120: mol_type = other DNA
tcttttccccacctttccccgctttctattccacaaaaccaccattgtcatcatggcccgttctcaatgagctgttgggcatacctcccagatggggtggtggccgggcagaggggctcc

SEQ ID NO: 107627 - DNA, 120 bp, synthetic construct
  source 1..120: mol_type = other DNA
caggcggagacgctcctcacttcctagacggggtggcggctgggcagaggctgcactctgggcactttgggaggccaaggcaggcggctgggaggtggaggttgtagcgagccgagatca

SEQ ID NO: 107628 - DNA, 120 bp, synthetic construct; identical to SEQ ID NO: 20400
  source 1..120: mol_type = other DNA

SEQ ID NO: 107629 - DNA, 120 bp, synthetic construct
  source 1..120: mol_type = other DNA
cggggtggctgccgggcggagatgctcctcacttcccagacggggtggctgccaggcggagaggctcctcacttctcagacggggtggccgggcagagacgctcctcacctcccagacgg

SEQ ID NO: 107630 - DNA, 120 bp, synthetic construct
  source 1..120: mol_type = other DNA
tataccatacctttattatcatgttttgttcctttctctttttaatttttgagacagagtttcgctcttgttgcccaggctggagtgcaatggtgtgatctcagctcactgcaacctccg

SEQ ID NO: 107631 - DNA, 120 bp, synthetic construct; identical to SEQ ID NO: 7399
  source 1..120: mol_type = other DNA

SEQ ID NO: 107632 - DNA, 120 bp, synthetic construct; identical to SEQ ID NO: 23998
  source 1..120: mol_type = other DNA

SEQ ID NO: 107633 - DNA, 120 bp, synthetic construct; identical to SEQ ID NO: 24795
  source 1..120: mol_type = other DNA

SEQ ID NO: 107634 - DNA, 120 bp, synthetic construct
  source 1..120: mol_type = other DNA
cagatttcctatacaccaacaacagacaaacagagagccaaatcatgagtgaactcccattcacaattgcttcaaagagaataaaatacctaggaatccaacttacaagggatgtgaaga

SEQ ID NO: 107635 - DNA, 120 bp, synthetic construct
  source 1..120: mol_type = other DNA
tatgtagccaaaaaacacatgaaaaaatgcttaccatcactggccatcagagaaatgcaaatcaaaaccacaatgagataccatctcacaccagttagaatggcagtcattaaaaagtca

SEQ ID NO: 107636 - DNA, 120 bp, synthetic construct; identical to SEQ ID NO: 8995
  source 1..120: mol_type = other DNA

SEQ ID NO: 107637 - DNA, 120 bp, synthetic construct; identical to SEQ ID NO: 8996
  source 1..120: mol_type = other DNA

SEQ ID NO: 107638 - DNA, 120 bp, synthetic construct
  source 1..120: mol_type = other DNA
gagccgagattgcaccactgcactcctgcctggacgacagagtgaaactctgtcctctgtctcaaaaaaaaaaaaaaaaaaaaagaagctgaggtgggtagcagcaatgttgaattaata

SEQ ID NO: 107639 - DNA, 120 bp, synthetic construct; identical to SEQ ID NO: 29673
  source 1..120: mol_type = other DNA

SEQ ID NO: 107640 - DNA, 120 bp, synthetic construct
  source 1..120: mol_type = other DNA
ttttttcttgtaaatttgtttgagttcattgtagattctggatattagccctttgtcagataagtaggttgcaaaaattttctcccattttgtaggttgcctgttcactctgatagtagt

SEQ ID NO: 107641 - DNA, 120 bp, synthetic construct
  source 1..120: mol_type = other DNA
tccttgagcagtgatttgtacttctccttaaagaggtccttcacatcccttgtaagttgtattcctaggtattttattctctttgaagcaattgtgaatgggagttcactcatgatttgg

SEQ ID NO: 107642 - DNA, 120 bp, synthetic construct
  source 1..120: mol_type = other DNA
tcataaaatgagttagggaggattccctctttttctattgattggaatagtttcagaaggaatggtaccagttcctccttgtacctctgttagaattcggctgtgaatccatctggtcct

SEQ ID NO: 107643 - DNA, 120 bp, synthetic construct
  source 1..120: mol_type = other DNA
atgtggtcaattttggaatagatgtggtgtggtgccgaaaaagtgtatattctgttgatttggggtggagagttctgtagatgtctattaggtccgcttggtgcagagctgagttcaatt

SEQ ID NO: 107644 - DNA, 120 bp, synthetic construct
  source 1..120: mol_type = other DNA
gtatctttgtggcattctctatatttcctgaatctgaacgttggcttgccttgctagattggggaagttctcctggataatatcctgcagagtgttttccaacttggttccattctcccc

SEQ ID NO: 107645 - DNA, 120 bp, synthetic construct
  source 1..120: mol_type = other DNA
gccgccttgcagtttgatctcagactgctgtgctagcaatcagcgagactccatgggcacaggaccctccgagccatgtgcgggatataatctcttggtgcgccgttttttaagcccgtc

SEQ ID NO: 107646 - DNA, 120 bp, synthetic construct; identical to SEQ ID NO: 29674
  source 1..120: mol_type = other DNA

SEQ ID NO: 107647 - DNA, 120 bp, synthetic construct
  source 1..120: mol_type = other DNA
agatggtatctcattgtgattttgctttgcatttctctgatggccagtgatggtgagcattttttcatgtgttttttggctgcataaatgtcttcttttgagaagtgtctgttcatgtcc

SEQ ID NO: 107648 - DNA, 120 bp, synthetic construct
  source 1..120: mol_type = other DNA
gtacaaaaatcacaagcattcttatacatcatcaacagacaaacagagagccaaatcatgagtgaactcccattcacaattgcttcaaagagaataaaatacctaggaatccaacttaca

SEQ ID NO: 107649 - DNA, 120 bp, synthetic construct
  source 1..120: mol_type = other DNA
ggatcggtggtgatatcccctttgtcattttttattgtgtctatttgattcttctctctttttttctttattagtcttgctagcggcctatcaattttgttgatcctttcaaaaaaccag

SEQ ID NO: 107650 - DNA, 120 bp, synthetic construct
  source 1..120: mol_type = other DNA
tgatgggtcttaactctttatccaatttgccagtctgtgtcttttaattggagcatttagtccatttacatttaaagttaatattgttatgtgtgaatttgatcctgtcattatgatgtt

SEQ ID NO: 107651 - DNA, 120 bp, synthetic construct
  source 1..120: mol_type = other DNA
attttttgcaaagttttcaacttctttgcctttggtttgaatgtcctcccgtagctcagagtaatttgatcgtctgaagccttcttctctcagctcatcaaagtcattctccatccagct

SEQ ID NO: 107652 - DNA, 120 bp, synthetic construct
  source 1..120: mol_type = other DNA
ttctgcgttgctcacgctcggagctgtagatcggagctgttcctattcagccatcttggctcctccccaaattatatgttgattcttaagcatagtgttaatttgacaattttcagatcc

SEQ ID NO: 107653 - DNA, 120 bp, synthetic construct
  source 1..120: mol_type = other DNA
gggagttccctttctgagtcaaagaaaggggtgacagacggcacctggaaaatccggtcactcccacccgaatactgcgcttttccggcgggcttaaaaaacggcgcatcacgagattat

SEQ ID NO: 107654 - DNA, 120 bp, synthetic construct
  source 1..120: mol_type = other DNA
gtatcagcgatggaagatgaaatgaatgaaataaagcgagaagggaagtttagagaaaaaagaataaaaagaaatgagcaaagcctccaagaaatatgggactatgtgaaaagaccaaat

SEQ ID NO: 107655 - DNA, 120 bp, synthetic construct
  source 1..120: mol_type = other DNA
tatcagagactaggatggcaacccctgcctttttttgttttccatttgcttggtagatcttcctccatccttttattttgagcctatgtgtgtctctgcacgtgagatgggtttcctgaa

SEQ ID NO: 107656 - DNA, 120 bp, synthetic construct
  source 1..120: mol_type = other DNA
aggaagtagagacacaaaaaacccttccaaaaattaatgaatccaggagctggttttttgaaaggatcaacaaaattgatagaccgctagcaagactaataaagaaaaaaagagagaaga

SEQ ID NO: 107657 - DNA, 120 bp, synthetic construct
  source 1..120: mol_type = other DNA
gacaaacccacatccaatatcatactgaatgggcaaaacctggaagcattccctttgaagactggcacaatacagggatgccctctctcaccactcctattcaacatagtgttcgaagtt

SEQ ID NO: 107658 - DNA, 120 bp, synthetic construct
  source 1..120: mol_type = other DNA
atttgttgattttggcttttgttgccatggcttttggtgttttagacatgaagtccttgcccatgcttatgtcctgaatggtaatgcctaggttttcttctagggtttttatggttttag

SEQ ID NO: 107659 - DNA, 120 bp, synthetic construct
  source 1..120: mol_type = other DNA
ctgcacattgtgcacatgtaccctaaaacttaaagtataattaaaaaaaaaaaaaaactggaaaaaacaaaagaaaaattaggaaatagtgaaaaggaaacataaaagacctatactcta

SEQ ID NO: 107660 - DNA, 120 bp, synthetic construct
  source 1..120: mol_type = other DNA
gtttgatgtgaaaaattgtactgtaggcaaaattaattcaagatggattaaagacttaaacattcgacctaaaaccataaaaaccctagaagaaaacctaggcattaccattcaggacat

SEQ ID NO: 107661 - DNA, 120 bp, synthetic construct
  source 1..120: mol_type = other DNA
atcgcaaggacaaaaaaccaaacactgcatgttctcactcatagatgggaattgaacaatgagaacacatggacacggaaggggaacatcacactctggggactgttgtggggtgggggg

SEQ ID NO: 107662 - DNA, 120 bp, synthetic construct; identical to SEQ ID NO: 29676
  source 1..120: mol_type = other DNA

SEQ ID NO: 107663 - DNA, 120 bp, synthetic construct; identical to SEQ ID NO: 29677
  source 1..120: mol_type = other DNA

SEQ ID NO: 107664 - DNA, 120 bp, synthetic construct
  source 1..120: mol_type = other DNA
agagtttgcagtgagctgagatcacgagatcatgccattgcactgtagcctggggaacagagtgagactccaactcaaaatgaaagaaagaaggaaagaaagagaaagaaagaaagaaag

SEQ ID NO: 107665 - DNA, 120 bp, synthetic construct; identical to SEQ ID NO: 29679
  source 1..120: mol_type = other DNA

SEQ ID NO: 107666 - DNA, 120 bp, synthetic construct; identical to SEQ ID NO: 29680
  source 1..120: mol_type = other DNA

SEQ ID NO: 107667 - DNA, 120 bp, synthetic construct; identical to SEQ ID NO: 29681
  source 1..120: mol_type = other DNA

SEQ ID NO: 107668 - DNA, 120 bp, synthetic construct
  source 1..120: mol_type = other DNA
tacagtcccaccaacagtgtaaaactgttcctatttctccacacctacccatctgacaaagggctaatatccagaatctacaaagaactaaaacaaatttacaagaaaaaagtcaaacaa

SEQ ID NO: 107669 - DNA, 120 bp, synthetic construct
  source 1..120: mol_type = other DNA
actcgggaagcgcaaggggtccgggagttccctttcctaatcaaagaaaggggtgacggacggcacctggagaatcgggtcactcccacccgaatactgtgcttttccgacgggcttaaa

SEQ ID NO: 107670 - DNA, 120 bp, synthetic construct
  source 1..120: mol_type = other DNA
aagaaatgagcaaagcctccaagaaatatgggactatgtgaagagaccaaatctacgtctgattggtgtacctgaaagtgatggggagaatggaaccaagttggaaaacactctgcaggc

SEQ ID NO: 107671 - DNA, 120 bp, synthetic construct; identical to SEQ ID NO: 29682
  source 1..120: mol_type = other DNA

SEQ ID NO: 107672 - DNA, 120 bp, synthetic construct; identical to SEQ ID NO: 29656
  source 1..120: mol_type = other DNA

SEQ ID NO: 107673 - DNA, 120 bp, synthetic construct
  source 1..120: mol_type = other DNA
tgttaatccctcactttgttgagtattgcttctatattgagaacctaagggctgatgagcaataatgaataatggataggaataaaatcaacaaaatgagaaatggcttccacttggccg

SEQ ID NO: 107674 - DNA, 120 bp, synthetic construct
  source 1..120: mol_type = other DNA
gcgtatacgtgtgcacatatatgcgcgtatacgtgtgcacatatatgcgcgtatatatgcgcgtatatatgcgcgtatatatgcgcgtatatatgcgcgtatatatgtgtatattacata

SEQ ID NO: 107675 - DNA, 120 bp, synthetic construct
  source 1..120: mol_type = other DNA
gggtaactctcacagtggaaggtaggcccgtccccttcttaatcaatatggaggctacccactccacattaccttcttttcaagggcctgtttcccttgcctccataactgttgtgggta

SEQ ID NO: 107676 - DNA, 120 bp, synthetic construct
  source 1..120: mol_type = other DNA
aaaacacacgtgctctccctgcaatcgtgtccgactgatctctcaaacccaagcaccttctacaaaacaacaactcctttccttcctaggcatggttagcgcggtcagaattcttacaca

SEQ ID NO: 107677 - DNA, 120 bp, synthetic construct
  source 1..120: mol_type = other DNA
cctccgtcttcaagaaaagtagaatggactaaaggtcttttaaaaacacacctcaccaagttcagccaccaaaaaggactggacaatacttttaccactttcccttctcagaattcaggc

SEQ ID NO: 107678 - DNA, 120 bp, synthetic construct
  source 1..120: mol_type = other DNA
acccaaatcctgtaaaacggccccacccttatctcccttcgctgactctcttttcagactcagcccgcctgcacccaggtgaaataaacagccatgttgctcacacaaagcctgtttggt

SEQ ID NO: 107679 - DNA, 120 bp, synthetic construct; identical to SEQ ID NO: 29667
  source 1..120: mol_type = other DNA

SEQ ID NO: 107680 - DNA, 120 bp, synthetic construct; identical to SEQ ID NO: 29668
  source 1..120: mol_type = other DNA

SEQ ID NO: 107681 - DNA, 120 bp, synthetic construct
  source 1..120: mol_type = other DNA
taaggtagtttgtggcccaatcatgaaagactttgtttaataaacattttttttcttttagacaaggccttgctctgttgcccaggctggagtgcagtgccacaattacagctcactgca

SEQ ID NO: 107682 - DNA, 120 bp, synthetic construct; identical to SEQ ID NO: 29669
  source 1..120: mol_type = other DNA

SEQ ID NO: 107683 - DNA, 120 bp, synthetic construct; identical to SEQ ID NO: 29670
  source 1..120: mol_type = other DNA

SEQ ID NO: 107684 - DNA, 120 bp, synthetic construct; identical to SEQ ID NO: 29671
  source 1..120: mol_type = other DNA

SEQ ID NO: 107685 - DNA, 120 bp, synthetic construct
  source 1..120: mol_type = other DNA
gatccacccaccttggcctcccaaagtgctgggattacaggcgtaagccaccgtgcttaaatattccaatttatgctctttattttcttcatttttaataatcaatttggttacaatacc

SEQ ID NO: 107686 - DNA, 120 bp, synthetic construct; identical to SEQ ID NO: 24329
  source 1..120: mol_type = other DNA

SEQ ID NO: 107687 - DNA, 120 bp, synthetic construct; identical to SEQ ID NO: 24330
  source 1..120: mol_type = other DNA

SEQ ID NO: 107688 - DNA, 120 bp, synthetic construct; identical to SEQ ID NO: 20862
  source 1..120: mol_type = other DNA

SEQ ID NO: 107689 - DNA, 120 bp, synthetic construct; identical to SEQ ID NO: 32738
  source 1..120: mol_type = other DNA

SEQ ID NO: 107690 - DNA, 120 bp, synthetic construct; identical to SEQ ID NO: 32739
  source 1..120: mol_type = other DNA

SEQ ID NO: 107691 - DNA, 120 bp, synthetic construct
  source 1..120: mol_type = other DNA
cgctggctcgggagtgaagctgcagaccttcacggtgagtgttacagctcttaaggcagcgcgtctggagttgttcgttcctcccggtgggctcgtggtctcgctgggctcaggagtgaa

SEQ ID NO: 107692 - DNA, 120 bp, synthetic construct
  source 1..120: mol_type = other DNA
ggcccggtgagaaatcgagcacagcgccggtgggccagcactgctgggggactcagtacaccctccgcagccactggcccgggtgctaagtcccccattgcccggggccagaagggctgg

SEQ ID NO: 107693 - DNA, 120 bp, synthetic construct
  source 1..120: mol_type = other DNA
tagcagagaggtccagggggtcggaggggtccgggtaggtgtctctgggaggcgtcccaggaggggccccggggggatccaggaaggagtccaggggtccggggatcccagaaggaggct

SEQ ID NO: 107694 - DNA, 120 bp, synthetic construct; identical to SEQ ID NO: 5480
  source 1..120: mol_type = other DNA

SEQ ID NO: 107695 - DNA, 120 bp, synthetic construct; identical to SEQ ID NO: 26278
  source 1..120: mol_type = other DNA

SEQ ID NO: 107696 - DNA, 120 bp, synthetic construct
  source 1..120: mol_type = other DNA
gctgggattacaggcatgagccaccaggcccggccccattattttttacaaaaagcctttttaatcccattctaattcttttgctatctgcctttcacttggaaatacagctacaatgga

SEQ ID NO: 107697 - DNA, 120 bp, synthetic construct
  source 1..120: mol_type = other DNA
aaactagaaaatctagaagaaatggatacattcctcgacatatacactctcccaagactaaaccaggaagaagttgaatctctgaatagaccaataacaggctctgaaattgtggcaata

SEQ ID NO: 107698 - DNA, 120 bp, synthetic construct
  source 1..120: mol_type = other DNA
acaacagacaaacagagagccaaatcatgagtgaactcccattcacaattgcttcaaagagaataaaatacctaggaatccaacttacaagggatgtgaaggaactcttcaaggagaact

SEQ ID NO: 107699 - DNA, 120 bp, synthetic construct
  source 1..120: mol_type = other DNA
acctactcatctgacaaagggctaatatccagaatctacaatgaactcaaacaaatttacaagaaaaaaacaaacaaccccatcaaaaagtgggcgaaggacatgaacagacatttctca

SEQ ID NO: 107700 - DNA, 120 bp, synthetic construct; identical to SEQ ID NO: 26279
  source 1..120: mol_type = other DNA

SEQ ID NO: 107701 - DNA, 120 bp, synthetic construct; identical to SEQ ID NO: 26280
  source 1..120: mol_type = other DNA

SEQ ID NO: 107702 - DNA, 120 bp, synthetic construct; identical to SEQ ID NO: 26281
  source 1..120: mol_type = other DNA

SEQ ID NO: 107703 - DNA, 120 bp, synthetic construct; identical to SEQ ID NO: 26282
  source 1..120: mol_type = other DNA

SEQ ID NO: 107704 - DNA, 120 bp, synthetic construct; identical to SEQ ID NO: 26283
  source 1..120: mol_type = other DNA

SEQ ID NO: 107705 - DNA, 120 bp, synthetic construct; identical to SEQ ID NO: 26284
  source 1..120: mol_type = other DNA

SEQ ID NO: 107706 - DNA, 120 bp, synthetic construct; identical to SEQ ID NO: 26285
  source 1..120: mol_type = other DNA

SEQ ID NO: 107707 - DNA, 120 bp, synthetic construct
  source 1..120: mol_type = other DNA
agcgaggggaacatcacacaccagggcctgtcgcagggttggaggcgaagtgagggagagcattaagacaaatacctaatgcatgtagggcttaaaacctagatgatgggttgataggtg

SEQ ID NO: 107708 - DNA, 120 bp, synthetic construct; identical to SEQ ID NO: 26286
  source 1..120: mol_type = other DNA

SEQ ID NO: 107709 - DNA, 120 bp, synthetic construct; identical to SEQ ID NO: 26287
  source 1..120: mol_type = other DNA

SEQ ID NO: 107710 - DNA, 120 bp, synthetic construct; identical to SEQ ID NO: 24609
  source 1..120: mol_type = other DNA

SEQ ID NO: 107711 - DNA, 120 bp, synthetic construct; identical to SEQ ID NO: 26974
  source 1..120: mol_type = other DNA

SEQ ID NO: 107712 - DNA, 120 bp, synthetic construct; identical to SEQ ID NO: 15282
  source 1..120: mol_type = other DNA

SEQ ID NO: 107713 - DNA, 120 bp, synthetic construct; identical to SEQ ID NO: 15481
  source 1..120: mol_type = other DNA

SEQ ID NO: 107714 - DNA, 120 bp, synthetic construct
  source 1..120: mol_type = other DNA
gagtggagagggtaagccttggggaaagctgctcagacagctaataatctaagattatttggggtgcaaacagtaacctgtttaggcacagattcttctctttgaagagaattgattttc

SEQ ID NO: 107715 - DNA, 120 bp, synthetic construct
  source 1..120: mol_type = other DNA
cacagggcaagtctcaaaaacagataacaattcccagtcaagagcaagagcatagccaaaaggcaaataaaatatcataccaatcttcaagtacggaagaaagacgactccactatggag

SEQ ID NO: 107716 - DNA, 120 bp, synthetic construct
  source 1..120: mol_type = other DNA
ttcatctatgctccttcagagaccacaagcccaaagactatcagtcctccctctcagaatacaggaaagagatatgtagaaagatccttgttcatgttgtgaaagagaagatggaaaggg

SEQ ID NO: 107717 - DNA, 120 bp, synthetic construct
  source 1..120: mol_type = other DNA
tgacctcaggtgatccacctgcctctgcctcccaaagtgctgggattacaggtgtgagccactgcgcccgacctgtattatatatatttttatgtaaaaatatattatttatatataaca

SEQ ID NO: 107718 - DNA, 120 bp, synthetic construct; identical to SEQ ID NO: 12910
  source 1..120: mol_type = other DNA

SEQ ID NO: 107719 - DNA, 120 bp, synthetic construct; identical to SEQ ID NO: 12911
  source 1..120: mol_type = other DNA

SEQ ID NO: 107720 - DNA, 120 bp, synthetic construct
  source 1..120: mol_type = other DNA
tttctaaccctctccctacttaaacctcccagacttgttctggttcataaaagcaagaggtaaaactggaaaaattgtgcacgtgttacctatgaatctacacgcctgccatttgcagtg

SEQ ID NO: 107721 - DNA, 120 bp, synthetic construct; identical to SEQ ID NO: 17403
  source 1..120: mol_type = other DNA

SEQ ID NO: 107722 - DNA, 120 bp, synthetic construct
  source 1..120: mol_type = other DNA
taattttaattagttatttaggaatgggtcttgctgtgttgcccaggttggtctcaaattcttgacctcaaaggatccttctgcctcagcctcttgagtagctgggattatagacatgca

SEQ ID NO: 107723 - DNA, 120 bp, synthetic construct; identical to SEQ ID NO: 25043
  source 1..120: mol_type = other DNA

SEQ ID NO: 107724 - DNA, 120 bp, synthetic construct; identical to SEQ ID NO: 25044
  source 1..120: mol_type = other DNA

SEQ ID NO: 107725 - DNA, 120 bp, synthetic construct
  source 1..120: mol_type = other DNA
ccttggcctcccaaagtgctgggattacaggcttgtgccaccacacctgtcccattttgagagaatttttgaagttgtaaatgaggtcattgataccagaatttatctattagtcttttt

SEQ ID NO: 107726 - DNA, 120 bp, synthetic construct
  source 1..120: mol_type = other DNA
gccaaagcaaagccaccaaactgtttttccatttgctataaatgcatttggctgtactatcaaaaaaaaaaggggattaagaaaatgtggcccatatacaccatggaatactatacagcc

SEQ ID NO: 107727 - DNA, 120 bp, synthetic construct; identical to SEQ ID NO: 5143
  source 1..120: mol_type = other DNA

SEQ ID NO: 107728 - DNA, 120 bp, synthetic construct
  source 1..120: mol_type = other DNA
acgaatgagtaaatagaaaacttgaattgtcctataagggcgtgaccagatggcttcactgatgaattcaactgaacatttaaaaaagaatgagtatcggtctttgccgccgcgccggcg

SEQ ID NO: 107729 - DNA, 120 bp, synthetic construct; identical to SEQ ID NO: 52307
  source 1..120: mol_type = other DNA

SEQ ID NO: 107730 - DNA, 120 bp, synthetic construct
  source 1..120: mol_type = other DNA
ttcagaggagaagagatgggcaaagcgaaagaaaacctatttaacaaaataatagctttggttgccattgcttttggtgttttagacacgaagtccctgcccatgcctatgtcctgaatg

SEQ ID NO: 107731 - DNA, 120 bp, synthetic construct
  source 1..120: mol_type = other DNA
ggctgagacgatggggttttctagatatacaatcatgtcgtctgcaaacaggagcaatttgactaaaaagcttctgcacagcaaaagaaactaccatcagagtgaacaggcaacctacaa

SEQ ID NO: 107732 - DNA, 120 bp, synthetic construct; identical to SEQ ID NO: 24511
  source 1..120: mol_type = other DNA

SEQ ID NO: 107733 - DNA, 120 bp, synthetic construct
  source 1..120: mol_type = other DNA
agttctggccagggcaatcaggcaagagaaggaaataaagggtattcaattaggaaatgaggaagtcaaattgtccctgtttgcagatgacatgattgtatatctagaaaaccccattgt

SEQ ID NO: 107734 - DNA, 120 bp, synthetic construct
  source 1..120: mol_type = other DNA
atatccagaatctacaataaactcaaacaaatttataagaaaaaaacaaacaaccccatcaaaaagtgggtgaaggatatgaacagacacttctcaaaagaagacatttatgcagccaaa

SEQ ID NO: 107735 - DNA, 120 bp, synthetic construct; identical to SEQ ID NO: 25533
  source 1..120: mol_type = other DNA

SEQ ID NO: 107736 - DNA, 120 bp, synthetic construct
  source 1..120: mol_type = other DNA
atgaacagagtctcatatcgattttgagattttgctgaagccatggggcttaagcagcctattgaaaggaagtcctcgtgtgtcccaggtttttgctggaaagaattatgcttttcttag

SEQ ID NO: 107737 - DNA, 120 bp, synthetic construct
  source 1..120: mol_type = other DNA
ggttgcagggagctgaggttgtgccactgcactccagcctcggtgacagagtgagactccgtctcaaaaaaagaaacaaacaaacaaaaaaaaccctaattatgttaaattaaaaatgtt

SEQ ID NO: 107738 - DNA, 120 bp, synthetic construct
  source 1..120: mol_type = other DNA
tccacttgcctcggcctcccaaagtactgggattacaggtgtgagccaccacacctggccgtcgcaagttattgtttatttatctttgatattcttttataaatggtgtgttccagttta

SEQ ID NO: 107739 - DNA, 120 bp, synthetic construct
  source 1..120: mol_type = other DNA
ccaaaatgctgggattacaggcgtgagccattgcgcctgacctgtaatttatttttttactgatggacactaggtttgtttttacccctacccttgttacaaatagcatggcaatgaaga

SEQ ID NO: 107740 - DNA, 120 bp, synthetic construct; identical to SEQ ID NO: 18528
  source 1..120: mol_type = other DNA

SEQ ID NO: 107741 - DNA, 120 bp, synthetic construct; identical to SEQ ID NO: 18529
  source 1..120: mol_type = other DNA

SEQ ID NO: 107742 - DNA, 120 bp, synthetic construct; identical to SEQ ID NO: 18530
  source 1..120: mol_type = other DNA

SEQ ID NO: 107743 - DNA, 120 bp, synthetic construct
  source 1..120: mol_type = other DNA
gaggtgataaatgtagtgtccttggtagagaactggacacagagtccacccccatgaagggggctgctcctcctccttctatgtttcctcttgttcttatttctcctcttgtatcttctc

SEQ ID NO: 107744 - DNA, 120 bp, synthetic construct; identical to SEQ ID NO: 18531
  source 1..120: mol_type = other DNA

SEQ ID NO: 107745 - DNA, 120 bp, synthetic construct; identical to SEQ ID NO: 18532
  source 1..120: mol_type = other DNA

SEQ ID NO: 107746 - DNA, 120 bp, synthetic construct; identical to SEQ ID NO: 18533
  source 1..120: mol_type = other DNA

SEQ ID NO: 107747 - DNA, 120 bp, synthetic construct; identical to SEQ ID NO: 28458
  source 1..120: mol_type = other DNA

SEQ ID NO: 107748 - DNA, 120 bp, synthetic construct
  source 1..120: mol_type = other DNA
gtttatctgctgaccttccctccactattgtcccatgaccctgccaaatccccctctgtgagaaacacccaagaattatcaataaaaaaataaatttaaaaaaaaaaaaaaaaaaaaaaa

SEQ ID NO: 107749 - DNA, 120 bp, synthetic construct; identical to SEQ ID NO: 28459
  source 1..120: mol_type = other DNA

SEQ ID NO: 107750 - DNA, 120 bp, synthetic construct
  source 1..120: mol_type = other DNA
ccctgggtcaacaatattctcagtcatctctactatttaactgtaaatctcaaactatgtgctgtttagaattatatgtgcctatcccattctgccggacgtacgtgttcttttctccat

SEQ ID NO: 107751 - DNA, 120 bp, synthetic construct
  source 1..120: mol_type = other DNA
gaatacattgctagaaactaattcttcttggcatggactttgtatactaacttagtccctggtttcaaagaatttttatttttctttcattttgatgtcctcatctaattaattttattg

SEQ ID NO: 107752 - DNA, 120 bp, synthetic construct; identical to SEQ ID NO: 26691
  source 1..120: mol_type = other DNA

SEQ ID NO: 107753 - DNA, 120 bp, synthetic construct; identical to SEQ ID NO: 26692
  source 1..120: mol_type = other DNA

SEQ ID NO: 107754 - DNA, 120 bp, synthetic construct; identical to SEQ ID NO: 26693
  source 1..120: mol_type = other DNA

SEQ ID NO: 107755 - DNA, 120 bp, synthetic construct; identical to SEQ ID NO: 26694
  source 1..120: mol_type = other DNA

SEQ ID NO: 107756 - DNA, 120 bp, synthetic construct; identical to SEQ ID NO: 26695
  source 1..120: mol_type = other DNA

SEQ ID NO: 107757 - DNA, 120 bp, synthetic construct; identical to SEQ ID NO: 26696
  source 1..120: mol_type = other DNA

SEQ ID NO: 107758 - DNA, 120 bp, synthetic construct; identical to SEQ ID NO: 89988
  source 1..120: mol_type = other DNA

SEQ ID NO: 107759 - DNA, 120 bp, synthetic construct
  source 1..120: mol_type = other DNA
ggtaaattttactgtacttaggttatgcctttttttttttttaaaggcagagtcttactctgttgcccatgctggagtgcagtggcgtgatctcggctcactgcaacctccacctcctgg

SEQ ID NO: 107760 - DNA, 120 bp, synthetic construct
  source 1..120: mol_type = other DNA
tgcccacctcagtcccccaaagtgctggaattacaggtgtgagccactatgcccggccctaacatttattattaaagtgataagctttgtcttcaatttctgttgactcacattagagta

SEQ ID NO: 107761 - DNA, 120 bp, synthetic construct
  source 1..120: mol_type = other DNA
aagcctggccaacatggtgaaaccctgtctctactaaaaatacaaaaattaggtgggcttggttgcacatgcctgtaatcccagctacttgggaaactgaggcaggagactcgcttgaac

SEQ ID NO: 107762 - DNA, 120 bp, synthetic construct
  source 1..120: mol_type = other DNA
caaccttgatacatattgcccggattttgaaagggctttgaggttatttgcccaaggtcatgataacagagatggtattcagaataagatctgacttcaaagcctttccagtctgtcttt

SEQ ID NO: 107763 - DNA, 120 bp, synthetic construct
  source 1..120: mol_type = other DNA
aaaaatacaaaaaaaaaaaaaaaaaaaaaatagccaggtgtgtggtggcacatgcctgtaatctcagctactcgggaggctgaggcaggaaaatcgcttgaacccaaggcagaggttgca

SEQ ID NO: 107764 - DNA, 120 bp, synthetic construct
  source 1..120: mol_type = other DNA
ggtagtcacaaaggcaaaaattaagtagcttaagttacattctaataaaagaaataataaagaaatctgattgtaccacaaagattctttgtgggcctggtttctgtaattctgtctcca

SEQ ID NO: 107765 - DNA, 120 bp, synthetic construct
  source 1..120: mol_type = other DNA
ctagtttttttgtatttttagtagagacagggtttcaccatgttagccaacctggtctcaaactcctgatctcaaatgatctgcctgcttcggcctcccaaagtgctgggattacagata

SEQ ID NO: 107766 - DNA, 120 bp, synthetic construct
  source 1..120: mol_type = other DNA
ccatcttggctaggctggtctcgaactcctgatctcaagttatccactcgctggccatcagtcatttatttttgaatgcctcttctattagtagcatgtgtaagaaattgtgatccattt

SEQ ID NO: 107767 - DNA, 120 bp, synthetic construct
  source 1..120: mol_type = other DNA
ttggaaaagttgagattttcaaatttgattataacataacttttgtagaaatacacggccaggtgcagtagctcacatttgtaatctcagcactttgggaggctgaggtgggaggatcgc

SEQ ID NO: 107768 - DNA, 120 bp, synthetic construct; identical to SEQ ID NO: 11731
  source 1..120: mol_type = other DNA

SEQ ID NO: 107769 - DNA, 120 bp, synthetic construct
  source 1..120: mol_type = other DNA
aggaaacgggctgtttctttactccggttttacaggaaaggaaacaggctcaagacgttttagtaacttctccaaggttacccagccagcaagtgatggggtccaggcctgaccagcgcc

SEQ ID NO: 107770 - DNA, 120 bp, synthetic construct
  source 1..120: mol_type = other DNA
ggggactagaagcaagatcgtgggctgagcctgtgcccagccggaccttctggctccttgcatttccagccttgaaatggaatcgattctccattctgggccacagcttcggtgagtaca

SEQ ID NO: 107771 - DNA, 120 bp, synthetic construct
  source 1..120: mol_type = other DNA
ttcattctccccttttggcatcctcacagtttttctgtaccttccccgagatggtggataaacttatcttgctggacacgccgctctttctcctggaatcagatgtgagaagcgggcttt

SEQ ID NO: 107772 - DNA, 120 bp, synthetic construct
  source 1..120: mol_type = other DNA
cacctgaggtcaggatttcgagaccagcctgaccaacatggagaaatcccgtctctactgaaagtacaaaattagctgggcgtggtggcacatgcctgtcatcccagctacttgggaggc

SEQ ID NO: 107773 - DNA, 120 bp, synthetic construct
  source 1..120: mol_type = other DNA
atcccgtgagacgtggagaagcttctttctccctctcacccaacaagcctgtttctccctggggtcacgctgagcaccaggcttcccagggtcttcagggacgttctctctttccctctg

SEQ ID NO: 107774 - DNA, 120 bp, synthetic construct
  source 1..120: mol_type = other DNA
ctcatgcctgtaatcccagcactttggaaggcggaggtgggcagattacgaggtcaggagattgagaacatcatggctaagatggtgaaaccctgtgtctactaaaaaatacaaaaaatt

SEQ ID NO: 107775 - DNA, 120 bp, synthetic construct
  source 1..120: mol_type = other DNA
gccaaggtttgcctgttagcgtctttgtcgtttttgaaaattacaggccaggcgtggtggctcacgcctgtaatcccagctactcaggaggctgaggcaggacaatcgcttgaatgggag

SEQ ID NO: 107776 - DNA, 120 bp, synthetic construct; identical to SEQ ID NO: 4998
  source 1..120: mol_type = other DNA

SEQ ID NO: 107777 - DNA, 120 bp, synthetic construct; identical to SEQ ID NO: 23860
  source 1..120: mol_type = other DNA

SEQ ID NO: 107778 - DNA, 120 bp, synthetic construct; identical to SEQ ID NO: 23861
  source 1..120: mol_type = other DNA

SEQ ID NO: 107779 - DNA, 120 bp, synthetic construct
  source 1..120: mol_type = other DNA
tggctacttaaaaaaacattttttttttttttgtagagacactatgttgcccaggatggccttgaactcctggcccaagcaatcctcctacctcagcctgccaaagtgtttggattacag

SEQ ID NO: 107780 - DNA, 120 bp, synthetic construct; identical to SEQ ID NO: 7423
  source 1..120: mol_type = other DNA

SEQ ID NO: 107781 - DNA, 120 bp, synthetic construct; identical to SEQ ID NO: 26857
  source 1..120: mol_type = other DNA

SEQ ID NO: 107782 - DNA, 120 bp, synthetic construct; identical to SEQ ID NO: 26858
  source 1..120: mol_type = other DNA

SEQ ID NO: 107783 - DNA, 120 bp, synthetic construct; identical to SEQ ID NO: 26859
  source 1..120: mol_type = other DNA

SEQ ID NO: 107784 - DNA, 120 bp, synthetic construct; identical to SEQ ID NO: 26860
  source 1..120: mol_type = other DNA

SEQ ID NO: 107785 - DNA, 120 bp, synthetic construct; identical to SEQ ID NO: 14627
  source 1..120: mol_type = other DNA

SEQ ID NO: 107786 - DNA, 120 bp, synthetic construct; identical to SEQ ID NO: 14628
  source 1..120: mol_type = other DNA

SEQ ID NO: 107787 - DNA, 120 bp, synthetic construct; identical to SEQ ID NO: 19120
  source 1..120: mol_type = other DNA

SEQ ID NO: 107788 - DNA, 120 bp, synthetic construct; identical to SEQ ID NO: 19114
  source 1..120: mol_type = other DNA

SEQ ID NO: 107789 - DNA, 120 bp, synthetic construct; identical to SEQ ID NO: 19115
  source 1..120: mol_type = other DNA

SEQ ID NO: 107790 - DNA, 120 bp, synthetic construct
  source 1..120: mol_type = other DNA
tagaagcctcacaaaattagtgtttttaaagactactgtaaataagtaatagaccctctttccttcattgctggctacactagggctaggtaggaaggctttacaatgaatgctaacagg

SEQ ID NO: 107791 - DNA, 120 bp, synthetic construct
  source 1..120: mol_type = other DNA
cagatggttttctgttgcataggctcagtgagaaagttatctgccttgctgagtgatatggtttggctgtgttcccacccaaatctcaacttgaattgtatctaccagaatttccacatg

SEQ ID NO: 107792 - DNA, 120 bp, synthetic construct
  source 1..120: mol_type = other DNA
aaggcttacaaaactacgtttttaaagactattgtaaataagtaatcgaccctctttatctttctttcattgctggttacactagagctaggtaggatggctttacaatgaatgctaaca

SEQ ID NO: 107793 - DNA, 120 bp, synthetic construct; identical to SEQ ID NO: 107791
  source 1..120: mol_type = other DNA

SEQ ID NO: 107794 - DNA, 120 bp, synthetic construct; identical to SEQ ID NO: 19113
  source 1..120: mol_type = other DNA

SEQ ID NO: 107795 - DNA, 120 bp, synthetic construct
  source 1..120: mol_type = other DNA
ctccctggctgaggggtctgggatttattcaggaggcctgtcactccccagcctcttctgggacttgaaaaactggagcctgttcttggcaagaagattctaatgcccaggtcggagtcg

SEQ ID NO: 107796 - DNA, 120 bp, synthetic construct
  source 1..120: mol_type = other DNA
cccagaagaggtggccttgagccaagctgaccccagccatcgggggagtgccaagcattgtactcagggtttacaaagatggtcttatttatttttttgagacagagtcttgctctgtcg

SEQ ID NO: 107797 - DNA, 120 bp, synthetic construct
  source 1..120: mol_type = other DNA
agacacagatctgattcacagcgcagggccttgtagaatgagaacgtttttgatttggtatctccctcctattcaccaaaacaccctcagtgcatgaaatgcatgaaatatgaaacacca

SEQ ID NO: 107798 - DNA, 120 bp, synthetic construct
  source 1..120: mol_type = other DNA
tgtcctcaggcacaggggctgtgacaaggccttcaacacagaacctggagctgaccccttgacctccctgacccctgatctgtccctgcaggagcctggtggccagactgccctgaagag

SEQ ID NO: 107799 - DNA, 120 bp, synthetic construct
  source 1..120: mol_type = other DNA
aaagtgctgggattacaggcgtgagccaccgcgcccggcccctcctggtgattcttatgcaagagtttgctagctacactctttcccactgtgctggagggtctcactgtgggaaacgga

SEQ ID NO: 107800 - DNA, 120 bp, synthetic construct
  source 1..120: mol_type = other DNA
tctgagggtctcctttcttcctcagtctgggccatgaggcaggaggctgtctgggtgtggtggggatgggtgcccaggagccagatgagttgttctagagtgaataccctgggaacaaat

SEQ ID NO: 107801 - DNA, 120 bp, synthetic construct
  source 1..120: mol_type = other DNA
ccatcctacctggcaggaggactgaggctccaggctctttgaggtttagtaattcagtgaaaatatactgggcatttgctgtgttccagatactgttctaagcactagggtttttgtgga

SEQ ID NO: 107802 - DNA, 120 bp, synthetic construct
  source 1..120: mol_type = other DNA
agattccacggggcgctcacacagtgctccttagaaaggaggatctgattggattggatttctcagcatcttgcgtggaacattctgattggataaacttcttttttttttttttgagac

SEQ ID NO: 107803 - DNA, 120 bp, synthetic construct
  source 1..120: mol_type = other DNA
gcagctcattctgaaaggccagtctgatccacctccccgaggctcccctttcctgcttcccctttcctccaggctgtgtcctgcgtactcttccttcatccttcgtctcctttccttagg

SEQ ID NO: 107804 - DNA, 120 bp, synthetic construct
  source 1..120: mol_type = other DNA
tggtagccggtgaagagagaaaaccaccaggtattattgagcaccgtctgtgacagcggacactgctacaatgttgttttttttctttttttgagacggatttttactcctgtcccccag

SEQ ID NO: 107805 - DNA, 120 bp, synthetic construct
  source 1..120: mol_type = other DNA
gctcatgcctgtaatcccagcacgttgggaagctgaagtgggtggattgcttgagcccgggagtccgacaccagcctgtgcaacacattgaaactccgtccctacaaaaaatacaaaaat

SEQ ID NO: 107806 - DNA, 120 bp, synthetic construct
  source 1..120: mol_type = other DNA
ggtatctgtgagttcaagctgttccctggccaggatctcagacaccctcccaagcagctccaggagcctgtgaggccaagggcagctctgaccagccatctctggccctgggcaggcctg

SEQ ID NO: 107807 - DNA, 120 bp, synthetic construct
  source 1..120: mol_type = other DNA
ccaggagacaggttagctgctccccacgtcagctgggacaccccgacttttgtttaccagagaaaaagggagggggagagggctgcctttggacttgtcccgggacacctaggctagggt

SEQ ID NO: 107808 - DNA, 120 bp, synthetic construct; identical to SEQ ID NO: 24854
  source 1..120: mol_type = other DNA

SEQ ID NO: 107809 - DNA, 120 bp, synthetic construct
  source 1..120: mol_type = other DNA
cattattcacaatagcaaagacttggaaccaacccaaatgtccaacaatgatagactggattacgaaaatgtggcacatatacaccacggaatactatgcagccataaaaaatgatgagt

SEQ ID NO: 107810 - DNA, 120 bp, synthetic construct; identical to SEQ ID NO: 28201
  source 1..120: mol_type = other DNA

SEQ ID NO: 107811 - DNA, 120 bp, synthetic construct
  source 1..120: mol_type = other DNA
gcgcctcttcccagccgccatcacatctaggaagtgaggagcgtctctgcccggccgcccatcgtctgagatgtggggagcgcctctgccccgccgccccatctgggttgtgaggagtgc

SEQ ID NO: 107812 - DNA, 120 bp, synthetic construct; identical to SEQ ID NO: 28202
  source 1..120: mol_type = other DNA

SEQ ID NO: 107813 - DNA, 120 bp, synthetic construct; identical to SEQ ID NO: 12281
  source 1..120: mol_type = other DNA

SEQ ID NO: 107814 - DNA, 120 bp, synthetic construct
  source 1..120: mol_type = other DNA
gcctccaagaaatatgggactacgtgaaaagaccaaatctacatctcactggagtacctgaaagtgatggggagaatggaaccaagttggaaaacactctgcaggatattatccaggaga

SEQ ID NO: 107815 - DNA, 120 bp, synthetic construct
  source 1..120: mol_type = other DNA
gatcaaaagagacaaggccattacataatggtaaagggatcaattcaacaagaagagctaagttcctaaatatatatgcacccaatacaggagcacccagattcataaagcaagtactga

SEQ ID NO: 107816 - DNA, 120 bp, synthetic construct
  source 1..120: mol_type = other DNA
aatattcaatagcttaccaaccaaaaagagtccaggaccagatggattcacagctgaattctaccagaggtacaaggaggaactgggaccattccttctgaaactattccaatcaataga

SEQ ID NO: 107817 - DNA, 120 bp, synthetic construct
  source 1..120: mol_type = other DNA
cttcaaagagaataaaatacctaggaatccaacttacaagggatgtgaaggacctcttcaaggagaactacaaaccactgctcaatgaaataaaagaggatacaaacaaatggtagaata

SEQ ID NO: 107818 - DNA, 120 bp, synthetic construct
  source 1..120: mol_type = other DNA
ggactgtgaactagttcaaccattgtggaagtcagtgtggcgattcctcagggatctagaactagaaataccatttgacccagccatcccattactgggtatatacccaaaggactataa

SEQ ID NO: 107819 - DNA, 120 bp, synthetic construct
  source 1..120: mol_type = other DNA
cttctctccccctccccgctccccccccgaccgcggagcagcaccatgtcggcgccggcggccaaagtcagtaaaaaggagctcaactccaaccacgacggggccgacgagacctcaggt

SEQ ID NO: 107820 - DNA, 120 bp, synthetic construct; identical to SEQ ID NO: 33024
  source 1..120: mol_type = other DNA

SEQ ID NO: 107821 - DNA, 120 bp, synthetic construct
  source 1..120: mol_type = other DNA
atttgacagacatccttgcagtttaagatgacacttttaaaataaattctctcctaatgatgacttgagccctgccactcaatgggagaatcagcagaacctgtaggatcttatttggaa

SEQ ID NO: 107822 - DNA, 120 bp, synthetic construct; identical to SEQ ID NO: 18973
  source 1..120: mol_type = other DNA

SEQ ID NO: 107823 - DNA, 120 bp, synthetic construct; identical to SEQ ID NO: 18974
  source 1..120: mol_type = other DNA

SEQ ID NO: 107824 - DNA, 120 bp, synthetic construct; identical to SEQ ID NO: 18975
  source 1..120: mol_type = other DNA

SEQ ID NO: 107825 - DNA, 120 bp, synthetic construct
  source 1..120: mol_type = other DNA
gggagagagggagtgaaggaaggaaggaaggaagggtgggtttgaaaaaccatgagttcacatcaaatactcaagttattgagaattgggaaaatctaagagctgtagagagtactatgc

SEQ ID NO: 107826 - DNA, 120 bp, synthetic construct; identical to SEQ ID NO: 18976
  source 1..120: mol_type = other DNA

SEQ ID NO: 107827 - DNA, 120 bp, synthetic construct
  source 1..120: mol_type = other DNA
ggccagtgatggtgagcattttttcatgtgttttttggctgcataaatgtcttcttttgagaagtgtctgttcatgtccttcacccactttttgattgggttgtttgtttttttcttgta

SEQ ID NO: 107828 - DNA, 120 bp, synthetic construct
  source 1..120: mol_type = other DNA
cttatttcattgagcagtggtttgtagttctccttgaagaggtccttcatatcacttgtaagttggattcctaggtattttattccctttgaagcaattgtgaacgggagttcgctcatg

SEQ ID NO: 107829 - DNA, 120 bp, synthetic construct
  source 1..120: mol_type = other DNA
gaatagtttcagaaggaatggtactagttcctccttgtacctccggtggaattcagctgtgaatccatctggtcctggactctttttggttggtaagctattgattattgccacaatttc

SEQ ID NO: 107830 - DNA, 120 bp, synthetic construct
  source 1..120: mol_type = other DNA
ggcagtgaccataggcttcaaaaaacacagctttccacatccttctatcctatgttccctcttatgaacagaatattcttctaccatctaggggccagagaatcttctcatttttttccc

SEQ ID NO: 107831 - DNA, 120 bp, synthetic construct; identical to SEQ ID NO: 23066
  source 1..120: mol_type = other DNA

SEQ ID NO: 107832 - DNA, 120 bp, synthetic construct; identical to SEQ ID NO: 13719
  source 1..120: mol_type = other DNA

SEQ ID NO: 107833 - DNA, 120 bp, synthetic construct; identical to SEQ ID NO: 33048
  source 1..120: mol_type = other DNA

SEQ ID NO: 107834 - DNA, 120 bp, synthetic construct; identical to SEQ ID NO: 33049
  source 1..120: mol_type = other DNA

SEQ ID NO: 107835 - DNA, 120 bp, synthetic construct; identical to SEQ ID NO: 4167
  source 1..120: mol_type = other DNA

SEQ ID NO: 107836 - DNA, 120 bp, synthetic construct
  source 1..120: mol_type = other DNA
taaaaaataataataagcataaaaattagctgggtgtggtgggacacacctgtagtcctagctactcaggaggctgagacagaaggattgctggaacgcaggtgtttgagctatgattat

SEQ ID NO: 107837 - DNA, 120 bp, synthetic construct
  source 1..120: mol_type = other DNA
cacctctgttgttctctcttctgatgaaatgaggtcagaaaaaccccttggcacaatggtctccccatagaagtcactggatttcattaacctttcattggttaatctcctgtcttgaca

SEQ ID NO: 107838 - DNA, 120 bp, synthetic construct; identical to SEQ ID NO: 23741
  source 1..120: mol_type = other DNA

SEQ ID NO: 107839 - DNA, 120 bp, synthetic construct; identical to SEQ ID NO: 23742
  source 1..120: mol_type = other DNA

SEQ ID NO: 107840 - DNA, 120 bp, synthetic construct; identical to SEQ ID NO: 7453
  source 1..120: mol_type = other DNA

SEQ ID NO: 107841 - DNA, 120 bp, synthetic construct
  source 1..120: mol_type = other DNA
tcaggagatcaagaccatcctggctaacactgtgaaaccctgtctctactaaaaacacaaaaaattagccaagtgtggtggcgggcgcctgtagtcccagctaccgggaggctgaggcag

SEQ ID NO: 107842 - DNA, 120 bp, synthetic construct
  source 1..120: mol_type = other DNA
cactgcactccagcctgggcgacagagtgagactccttctcaaaaaaaaaaaaaaaaaatatgcacacaatacaggagcacccagattcataaagcaagtcctcagagacctacaaagag

SEQ ID NO: 107843 - DNA, 120 bp, synthetic construct; identical to SEQ ID NO: 23747
  source 1..120: mol_type = other DNA

SEQ ID NO: 107844 - DNA, 120 bp, synthetic construct; identical to SEQ ID NO: 23748
  source 1..120: mol_type = other DNA

SEQ ID NO: 107845 - DNA, 120 bp, synthetic construct
  source 1..120: mol_type = other DNA
ctcccatgtctactcccttccacacagacacggcaaccatccgacctctcaatcttttccccacctttcccgcccttccattccacaaagccgccattgtcatcctggcccgttctcaat

SEQ ID NO: 107846 - DNA, 120 bp, synthetic construct
  source 1..120: mol_type = other DNA
gggaggccgaggttggtggatcactcgcggttaggggctggagaccggcccggccaacacagcgaaaccccgtctccaccaaaaccagtcaggcgtggcggcgcgtgcctgcaatcgcag

SEQ ID NO: 107847 - DNA, 120 bp, synthetic construct; identical to SEQ ID NO: 10043
  source 1..120: mol_type = other DNA

SEQ ID NO: 107848 - DNA, 120 bp, synthetic construct
  source 1..120: mol_type = other DNA
gcagttcacaataggggtcacactcctatgagaatctaatgccgctgctgatctgacaggaggtgaagctcgggcagtaatgtgagcaatggggagcagctgtcaatacagatgaaactc

SEQ ID NO: 107849 - DNA, 120 bp, synthetic construct
  source 1..120: mol_type = other DNA
tgtaagtgtgggtgtgtgtgggtgtatgtgtggatgggtgggtggatagatgggtatgagtgtgtgggggggtgtatgtatagatgggtggatggatgggtgtgagtgtgtgtgtgtatg

SEQ ID NO: 107850 - DNA, 120 bp, synthetic construct; identical to SEQ ID NO: 10046
  source 1..120: mol_type = other DNA

SEQ ID NO: 107851 - DNA, 120 bp, synthetic construct; identical to SEQ ID NO: 31488
  source 1..120: mol_type = other DNA

SEQ ID NO: 107852 - DNA, 120 bp, synthetic construct; identical to SEQ ID NO: 3587
  source 1..120: mol_type = other DNA

SEQ ID NO: 107853 - DNA, 120 bp, synthetic construct; identical to SEQ ID NO: 13439
  source 1..120: mol_type = other DNA

SEQ ID NO: 107854 - DNA, 120 bp, synthetic construct; identical to SEQ ID NO: 13440
  source 1..120: mol_type = other DNA

SEQ ID NO: 107855 - DNA, 120 bp, synthetic construct; identical to SEQ ID NO: 13441
  source 1..120: mol_type = other DNA

SEQ ID NO: 107856 - DNA, 120 bp, synthetic construct
  source 1..120: mol_type = other DNA
ttcatcttttttcattctcaggtcgctgatttcttggagcctgaaaagaaagtaacacagcagggatgaggacagatggtgtgagtcagtgagtgagtgacctgactaatagcctgggag

SEQ ID NO: 107857 - DNA, 120 bp, synthetic construct
  source 1..120: mol_type = other DNA
tggtgataatgggcatcgagtctcactagctccaaccagttgtgggtgacagatcctacacatccatgtctcttttctctgcaggccccatgggtccacctggagaaatgccatgtcctc

SEQ ID NO: 107858 - DNA, 120 bp, synthetic construct
  source 1..120: mol_type = other DNA
caccagcttctagaacatagagattacaaataggcatgcacatgcaggtcttggggaaaggaatgacgcttgcttttctgatgtctttgaatggcccagaggagacagaagcagacacaa

SEQ ID NO: 107859 - DNA, 120 bp, synthetic construct
  source 1..120: mol_type = other DNA
tagccttggccttcgacatgagatggagccctccttattccccatctggtccagttccttcacttacagatggcagcagtgaggtcttggggtagaaggaccctccaaagtcacacaaag

SEQ ID NO: 107860 - DNA, 120 bp, synthetic construct
  source 1..120: mol_type = other DNA
tggcagaggctggatccaaacccatcttcctggacctgaagcttatgcttccagccaccccactcctgagctgaataaagatgatttaagcttaataaatcgtgaatgtgttcacatgag

SEQ ID NO: 107861 - DNA, 120 bp, synthetic construct; identical to SEQ ID NO: 10885
  source 1..120: mol_type = other DNA

SEQ ID NO: 107862 - DNA, 120 bp, synthetic construct
  source 1..120: mol_type = other DNA
cgctcgaacccagtaggcagaggctgtggtgagccaagatcacgctactgcattccagcctgggcaacagtgcgagattctgtctcaaaaaaaaaaaaaaaaaaaaaaatatatatatat

SEQ ID NO: 107863 - DNA, 120 bp, synthetic construct
  source 1..120: mol_type = other DNA
cttttaccaagtatactgcttgtaaacattttgttaacaaggcacgtcctgcacatccctagatcccttaaaccttgattttatacaacacatgtttttgtgagctccagattgggtcaa

SEQ ID NO: 107864 - DNA, 120 bp, synthetic construct; identical to SEQ ID NO: 11106
  source 1..120: mol_type = other DNA

SEQ ID NO: 107865 - DNA, 120 bp, synthetic construct; identical to SEQ ID NO: 11201
  source 1..120: mol_type = other DNA

SEQ ID NO: 107866 - DNA, 120 bp, synthetic construct
  source 1..120: mol_type = other DNA
tcaacctcctaggctcagttgatcctctcacctcagcctcctaagcagctgggactacagatgcaccccgccatgcctagctaattttttaaaaatttttttgtagagatagggttttgc

SEQ ID NO: 107867 - DNA, 120 bp, synthetic construct
  source 1..120: mol_type = other DNA
ttttccttttttttttcctacaatacatttaaatggacatctcacttgctgctattgggagtataaatataaaatcttgggccgggtgcggtggctcacacctgtaatcccagcactttg

SEQ ID NO: 107868 - DNA, 120 bp, synthetic construct; identical to SEQ ID NO: 4206
  source 1..120: mol_type = other DNA

SEQ ID NO: 107869 - DNA, 120 bp, synthetic construct
  source 1..120: mol_type = other DNA
gggtgctcctgtattgggtgcctatatatttaggatagttagatcttcttgttgaattgatccctttaccattatgtaatggccttctttgtctcttttgatctttgttggtttaaagtc

SEQ ID NO: 107870 - DNA, 120 bp, synthetic construct
  source 1..120: mol_type = other DNA
atgcctatgatcccagcactttgggaggctgaggcaggaggatcacctgagctcaggagttccagatcagcctggccaccatggtgaaaccccatctctactaaaaatacaaaaattagc

SEQ ID NO: 107871 - DNA, 120 bp, synthetic construct
  source 1..120: mol_type = other DNA
gcacggggtttggggtaaggtcatagattaacagaatctcaaggcagaagaatttttcttagcacataacaaaatggagtctcctatgtctacttctttctacacagacacagtaacaat

SEQ ID NO: 107872 - DNA, 120 bp, synthetic construct
  source 1..120: mol_type = other DNA
agtcaaaatatggacggatggtgaggcctcccacggtcggtccatggacacagggatccacacgccctctcttgctctcaccagcagaatacggtgttgccaattaaaagttgaatcaat

SEQ ID NO: 107873 - DNA, 120 bp, synthetic construct
  source 1..120: mol_type = other DNA
catatacttctataggattatccatccatgtgactggtgttaccatctccgtggaggcccttttctttgcatctccgatgggttcattgtagaacttcaaatgtctagtgggtaaccaaa

SEQ ID NO: 107874 - DNA, 120 bp, synthetic construct
  source 1..120: mol_type = other DNA
ctgtactacatatgcagaatctgatataatattgataggttggtcaaaatcttgtaacactgtaatgactgcaaccaactctgctctttgagccgattgatatggagttttgattactcg

SEQ ID NO: 107875 - DNA, 120 bp, synthetic construct
  source 1..120: mol_type = other DNA
tgcagcacataaaatatcatcaatataatgaataatataacagtctgaaaacttttctctcactggttgaagagctcgacctacaaaagtctgacaaatagttggactattaagcattcc

SEQ ID NO: 107876 - DNA, 120 bp, synthetic construct
  source 1..120: mol_type = other DNA
tctgagacctgacttgcccaatatgcagcctttcctgttggatcagtgcttacaagccctcctattctttttatttcactatttccacccttaatatatggcaggagtaataattgagca

SEQ ID NO: 107877 - DNA, 120 bp, synthetic construct
  source 1..120: mol_type = other DNA
ctatgaccttaccggctttttcatcggcaattgacttttgagcaacatcttggagccttgccacaaaatcagggtagggctcttttgaaccttgtcttactgtattaaatgaggggcagg

SEQ ID NO: 107878 - DNA, 120 bp, synthetic construct
  source 1..120: mol_type = other DNA
tcttacgggcacctgacctgctggaagaggacttgtgcctcgtggtttagactctgatggccccattaattctggaccttttccttctaattttaacgtttcaggatatatcacctcctg

SEQ ID NO: 107879 - DNA, 120 bp, synthetic construct
  source 1..120: mol_type = other DNA
agacaattgtggggagagggtcagcagacaaacacgtgaacaaaggtcttggcatcatagacaatgtaaaggattaagtgctgtgcttttggatatgcatacacataaacatctcaatgc

SEQ ID NO: 107880 - DNA, 120 bp, synthetic construct; identical to SEQ ID NO: 27136
  source 1..120: mol_type = other DNA

SEQ ID NO: 107881 - DNA, 120 bp, synthetic construct; identical to SEQ ID NO: 13559
  source 1..120: mol_type = other DNA

SEQ ID NO: 107882 - DNA, 120 bp, synthetic construct; identical to SEQ ID NO: 13560
  source 1..120: mol_type = other DNA

SEQ ID NO: 107883 - DNA, 120 bp, synthetic construct
  source 1..120: mol_type = other DNA
gtttattgaggacttaacagacagggcggtccagtagcagcgagctggactggaaaactgctcccatttttaaaaagcatgcaggttatacagcattttcacttagcaacaacttccatt

SEQ ID NO: 107884 - DNA, 120 bp, synthetic construct; identical to SEQ ID NO: 31349
  source 1..120: mol_type = other DNA

SEQ ID NO: 107885 - DNA, 120 bp, synthetic construct
  source 1..120: mol_type = other DNA
tgtaaatttgtttgagtccattgtagattttggatattagccctttgtcagatgagtaggttgcgaaaattttctcccattttgtaggttgcctgttcactctgatggtagtttcttttg

SEQ ID NO: 107886 - DNA, 120 bp, synthetic construct; identical to SEQ ID NO: 31350
  source 1..120: mol_type = other DNA

SEQ ID NO: 107887 - DNA, 120 bp, synthetic construct; identical to SEQ ID NO: 31351
  source 1..120: mol_type = other DNA

SEQ ID NO: 107888 - DNA, 120 bp, synthetic construct; identical to SEQ ID NO: 31352
  source 1..120: mol_type = other DNA

SEQ ID NO: 107889 - DNA, 120 bp, synthetic construct
  source 1..120: mol_type = other DNA
ggatgaactagtttacagtcccaccaatagtgtaaaagtgttcctatttctccacatcctctccagcacctgttgtttcctgactttttaatgattgtcattctaactggtgtgagatgg

SEQ ID NO: 107890 - DNA, 120 bp, synthetic construct
  source 1..120: mol_type = other DNA
taagttacctgaaacattcaacactttaaataaaataagctttgtgttagatggttttgcccaactgtaggctaatgtaagtgttcggaacacatttaaggtaggctaggccaagctaaa

SEQ ID NO: 107891 - DNA, 120 bp, synthetic construct
  source 1..120: mol_type = other DNA
tatagtcctttgggtatatacccagtaatgggatggctgggtcaaatggcatctctagttctagatccctgagaaattgccacactgacttccacaatggttgaactagcttacagtccc

SEQ ID NO: 107892 - DNA, 120 bp, synthetic construct
  source 1..120: mol_type = other DNA
agctcccagcgtgagcgacgcagaagacgggtgatttctgcatttccatctgaggtaccggattcatctcactagggagtgccagacagtgggcgcaggtcagtgggtgcgcgcaccatg

SEQ ID NO: 107893 - DNA, 120 bp, synthetic construct
  source 1..120: mol_type = other DNA
aacgcagaagcctcaggagccgatgcgatcaactggaagaaagggtatcagcagtggaagatgaaatgaatgaaatgaagcgagaagggaaggttagagaaaaaagaataaaaagaaatg

SEQ ID NO: 107894 - DNA, 120 bp, synthetic construct
  source 1..120: mol_type = other DNA
gggttgcaatcctagtctctgataaaacagactttaaaccaacaaagatcaaaagagacaaagaaggccattacataatggtaaagggatcaattcaacaagaggagctaaccatcctaa

SEQ ID NO: 107895 - DNA, 120 bp, synthetic construct
  source 1..120: mol_type = other DNA
gcaataatcaatagcttaccaaccaaaaagagtccaggaccagatggattcacagccgaattctaccagaggtacaaggaggaactggtaccattccttctgaaactattacaatcaaga

SEQ ID NO: 107896 - DNA, 120 bp, synthetic construct
  source 1..120: mol_type = other DNA
accaagagcagacaaacagagagccaaatcatgagtgaactcccattcacaattgcttcaaagagaagaaaatacctaggaatccaacttacaagggatgtgaaggacctcttcaaggag

SEQ ID NO: 107897 - DNA, 120 bp, synthetic construct
  source 1..120: mol_type = other DNA
aacagacacttctcaaaagaagacatttatgcagccaaaaaacacatgaaaaaatgatcatcactggccatcagagaaatgcaaatcaaaaccacaatgagataccatctcacactagtt

SEQ ID NO: 107898 - DNA, 120 bp, synthetic construct; identical to SEQ ID NO: 31354
  source 1..120: mol_type = other DNA

SEQ ID NO: 107899 - DNA, 120 bp, synthetic construct; identical to SEQ ID NO: 31355
  source 1..120: mol_type = other DNA

SEQ ID NO: 107900 - DNA, 120 bp, synthetic construct; identical to SEQ ID NO: 31356
  source 1..120: mol_type = other DNA

SEQ ID NO: 107901 - DNA, 120 bp, synthetic construct; identical to SEQ ID NO: 31357
  source 1..120: mol_type = other DNA

SEQ ID NO: 107902 - DNA, 120 bp, synthetic construct
  source 1..120: mol_type = other DNA
tttattcacccaataccttcaactgtggaatgaaaaaataaaaataaaaaacattaactgggcctgtataaagggagggaaggaaggaaggaagggagggagtgagggagggagggaggg

SEQ ID NO: 107903 - DNA, 120 bp, synthetic construct
  source 1..120: mol_type = other DNA
gcaaccttaagggatgagaaaacgtctccctttgggaactagttcaaccattgtggaagtcaatgtggtgtttcctcagggatctagaactagaaataccatttgacccagccatcccat

SEQ ID NO: 107904 - DNA, 120 bp, synthetic construct; identical to SEQ ID NO: 31358
  source 1..120: mol_type = other DNA

SEQ ID NO: 107905 - DNA, 120 bp, synthetic construct; identical to SEQ ID NO: 6182
  source 1..120: mol_type = other DNA

SEQ ID NO: 107906 - DNA, 120 bp, synthetic construct; identical to SEQ ID NO: 31342
  source 1..120: mol_type = other DNA

SEQ ID NO: 107907 - DNA, 120 bp, synthetic construct; identical to SEQ ID NO: 31360
  source 1..120: mol_type = other DNA

SEQ ID NO: 107908 - DNA, 120 bp, synthetic construct; identical to SEQ ID NO: 31361
  source 1..120: mol_type = other DNA

SEQ ID NO: 107909 - DNA, 120 bp, synthetic construct
  source 1..120: mol_type = other DNA
agcaggcatgggagctcaccaccacaattactgccttaggtgactcttcacatgtatcctttctagtatcctttataagaaactgaaaaaaacatggttccctgagttctgtgagtctct

SEQ ID NO: 107910 - DNA, 120 bp, synthetic construct; identical to SEQ ID NO: 31362
  source 1..120: mol_type = other DNA

SEQ ID NO: 107911 - DNA, 120 bp, synthetic construct; identical to SEQ ID NO: 31363
  source 1..120: mol_type = other DNA

SEQ ID NO: 107912 - DNA, 120 bp, synthetic construct; identical to SEQ ID NO: 31364
  source 1..120: mol_type = other DNA

SEQ ID NO: 107913 - DNA, 120 bp, synthetic construct; identical to SEQ ID NO: 31365
  source 1..120: mol_type = other DNA

SEQ ID NO: 107914 - DNA, 120 bp, synthetic construct
  source 1..120: mol_type = other DNA
tagagtaaaacaccataagcatttgtatatataatttatagactatgtaagtatattataagaattatttcacgcctgtaattccagcactttgggaggccgaggcgggcggatcacgag

SEQ ID NO: 107915 - DNA, 120 bp, synthetic construct; identical to SEQ ID NO: 31344
  source 1..120: mol_type = other DNA

SEQ ID NO: 107916 - DNA, 120 bp, synthetic construct
  source 1..120: mol_type = other DNA
aatctgtaaattaccttgggcagtatggccattttcacgatattgattcttcctacccatgagcatggaatgttaatttccatttgtttgtatcctcttttatttccttgagcagtggtt

SEQ ID NO: 107917 - DNA, 120 bp, synthetic construct
  source 1..120: mol_type = other DNA
gttcatgtcctttgtagggacatggatgaaagtggaaatcatcattctcagtaaactatctcaagaacaaaaaaccaaacaccgcatattctcactcacaggtgggaattgaacaatgag

SEQ ID NO: 107918 - DNA, 120 bp, synthetic construct
  source 1..120: mol_type = other DNA
tatatatatatatatatatatatatatatatcaaccagcacatccacagaaagggatgaggacgtgggcccggcgcggtggctcatgcctgtaaaatcccagtacttcggaacgtagagg

SEQ ID NO: 107919 - DNA, 120 bp, synthetic construct; identical to SEQ ID NO: 31346
  source 1..120: mol_type = other DNA

SEQ ID NO: 107920 - DNA, 120 bp, synthetic construct
  source 1..120: mol_type = other DNA
atggtatctcattgtggttttgatttgcatttctctgatggccatggatgatgagcattttctcatgtgtttttaggctgcataaatgtcttcttttgagaagtgtctgttcatgtcctt

SEQ ID NO: 107921 - DNA, 120 bp, synthetic construct
  source 1..120: mol_type = other DNA
tgctgttggtgtataagaatgcttgtgatttttgtacattgattttgtatcccgagactttgctgaagttgcttatcagcttaaggagattttgggctgagacgatggggttttctagat

SEQ ID NO: 107922 - DNA, 120 bp, synthetic construct
  source 1..120: mol_type = other DNA
cttacaagggacatgaaggacctcttcaaggagaaccacaaaccactgctcaaggaaataaaagacgatagaaacaaatggaagaatattccatgctcatgggtaggaagaatcaatatt

SEQ ID NO: 107923 - DNA, 120 bp, synthetic construct
  source 1..120: mol_type = other DNA
aatggtatttctagttctagatccctgaggaatcgccacactgacttccacaatggttgaactagtttacagtcccaccaacagtgtaaaagtgttcctatttctccacaacctctccag

SEQ ID NO: 107924 - DNA, 120 bp, synthetic construct
  source 1..120: mol_type = other DNA
ctgcctcagtagaatgcctggatttgagagacctgctagactagtctattaactaaaccacaaagatgttatagtaatcaaccaaatagcaattgataacatggaaatgggttgtactga

SEQ ID NO: 107925 - DNA, 120 bp, synthetic construct; identical to SEQ ID NO: 31347
  source 1..120: mol_type = other DNA

SEQ ID NO: 107926 - DNA, 120 bp, synthetic construct
  source 1..120: mol_type = other DNA
tctgatggccagtgatggtgagcattttttcatgtgttttttggctgcataaatgtcttcttttgagaagtgtctgttcatgtccttcgcccactttttgatggggttatatttttcttg

SEQ ID NO: 107927 - DNA, 120 bp, synthetic construct
  source 1..120: mol_type = other DNA
aggattataaatcatgctgctgtaaagacacatgcatgcatatgtttattgcagcgctattgacaatagcaaagacttggaaccaaccccaatgtccatcaatgatagattggattaaga

SEQ ID NO: 107928 - DNA, 120 bp, synthetic construct
  source 1..120: mol_type = other DNA
atggtggttagagacactggggagcgtggaggcctggtgtgttagcgttctccagagggacagaactctgtgtgtgtatatatatatgtgtgtgtatatatatatgtatatatatacgta

SEQ ID NO: 107929 - DNA, 120 bp, synthetic construct; identical to SEQ ID NO: 7700
  source 1..120: mol_type = other DNA

SEQ ID NO: 107930 - DNA, 120 bp, synthetic construct
  source 1..120: mol_type = other DNA
aggtgggaggatcacttgagaccagaagttcaagactagcctgggcaatatagcaagaccctatctttacaaaaataaaaataattagccagagactgttgtacatgcctgtagtcctag

SEQ ID NO: 107931 - DNA, 120 bp, synthetic construct; identical to SEQ ID NO: 7701
  source 1..120: mol_type = other DNA

SEQ ID NO: 107932 - DNA, 120 bp, synthetic construct
  source 1..120: mol_type = other DNA
gtcttttgaccaacatctctctaaacaaacccccaccccaccccaccaccactacctcagcctctggtaaccaccattctactctctaattctataagatcaacttttatttttatgtta

SEQ ID NO: 107933 - DNA, 120 bp, synthetic construct; identical to SEQ ID NO: 7702
  source 1..120: mol_type = other DNA

SEQ ID NO: 107934 - DNA, 120 bp, synthetic construct
  source 1..120: mol_type = other DNA
aagtcttctgcagctctgattttgtacagttctatgatgtctgggaaaaaaaataaacccagaaggaacttctggaggcccagaactactctcctggcatggtttcctataataatgtcc

SEQ ID NO: 107935 - DNA, 120 bp, synthetic construct
  source 1..120: mol_type = other DNA
aaataaagaccaaaacacttcaaatactgaacattgaaataaattcccggtcttgcccaggtgatctcatctcagcctcccaagtagctgggactacagggatcttctccctttgttttt

SEQ ID NO: 107936 - DNA, 120 bp, synthetic construct; identical to SEQ ID NO: 28336
  source 1..120: mol_type = other DNA

SEQ ID NO: 107937 - DNA, 120 bp, synthetic construct; identical to SEQ ID NO: 31568
  source 1..120: mol_type = other DNA

SEQ ID NO: 107938 - DNA, 120 bp, synthetic construct; identical to SEQ ID NO: 31569
  source 1..120: mol_type = other DNA

SEQ ID NO: 107939 - DNA, 120 bp, synthetic construct
  source 1..120: mol_type = other DNA
gcagtggtgcaatctcggctcactgcaagctctgcctcccgggttcacgccattctcctgcctcagcctcctgagtagctgggactacaggtgcctgccaccacgcctggctaattcttt

SEQ ID NO: 107940 - DNA, 120 bp, synthetic construct
  source 1..120: mol_type = other DNA
gaatccagcagcacatcaaaaagcttctccaccatgatcaagtgggattcatccctgggatgcaaggctggttcaacatacgcaaatcaataaacgtaatccagcatataaacagaacca

SEQ ID NO: 107941 - DNA, 120 bp, synthetic construct
  source 1..120: mol_type = other DNA
gttcatatagaatcaaaacagagcccgcattgcgaagtcaatcctaagccaaaagaacaaagctggaggcatcacactacctgacttcaaactatactacaaggctacagtaaccaaaac

SEQ ID NO: 107942 - DNA, 120 bp, synthetic construct; identical to SEQ ID NO: 10710
  source 1..120: mol_type = other DNA

SEQ ID NO: 107943 - DNA, 120 bp, synthetic construct; identical to SEQ ID NO: 25731
  source 1..120: mol_type = other DNA

SEQ ID NO: 107944 - DNA, 120 bp, synthetic construct
  source 1..120: mol_type = other DNA
tgttcatatcctttgcccactttttgatgggcttgtttgtttttttcttgtaaatttgtttgagctcattgtagattctggatattagccctttgtcagatgagtagattgcgaaaattt

SEQ ID NO: 107945 - DNA, 120 bp, synthetic construct; identical to SEQ ID NO: 10824
  source 1..120: mol_type = other DNA

SEQ ID NO: 107946 - DNA, 120 bp, synthetic construct; identical to SEQ ID NO: 10825
  source 1..120: mol_type = other DNA

SEQ ID NO: 107947 - DNA, 120 bp, synthetic construct; identical to SEQ ID NO: 10826
  source 1..120: mol_type = other DNA

SEQ ID NO: 107948 - DNA, 120 bp, synthetic construct; identical to SEQ ID NO: 10827
  source 1..120: mol_type = other DNA

SEQ ID NO: 107949 - DNA, 120 bp, synthetic construct; identical to SEQ ID NO: 22015
  source 1..120: mol_type = other DNA

SEQ ID NO: 107950 - DNA, 120 bp, synthetic construct; identical to SEQ ID NO: 22016
  source 1..120: mol_type = other DNA

SEQ ID NO: 107951 - DNA, 120 bp, synthetic construct; identical to SEQ ID NO: 22017
  source 1..120: mol_type = other DNA

SEQ ID NO: 107952 - DNA, 120 bp, synthetic construct
  source 1..120: mol_type = other DNA
atttggtgattttttgttttgttttgtttgagacaggatcttgctctgtttcccaggctgtattacagtggcacaatctcagctcactgcaaactctgcctcccgggctcaagcaatcct

SEQ ID NO: 107953 - DNA, 120 bp, synthetic construct; identical to SEQ ID NO: 23671
  source 1..120: mol_type = other DNA

SEQ ID NO: 107954 - DNA, 120 bp, synthetic construct; identical to SEQ ID NO: 17328
  source 1..120: mol_type = other DNA

SEQ ID NO: 107955 - DNA, 120 bp, synthetic construct; identical to SEQ ID NO: 17329
  source 1..120: mol_type = other DNA

SEQ ID NO: 107956 - DNA, 120 bp, synthetic construct; identical to SEQ ID NO: 17330
  source 1..120: mol_type = other DNA

SEQ ID NO: 107957 - DNA, 120 bp, synthetic construct; identical to SEQ ID NO: 19402
  source 1..120: mol_type = other DNA

SEQ ID NO: 107958 - DNA, 120 bp, synthetic construct; identical to SEQ ID NO: 19403
  source 1..120: mol_type = other DNA

SEQ ID NO: 107959 - DNA, 120 bp, synthetic construct; identical to SEQ ID NO: 19404
  source 1..120: mol_type = other DNA

SEQ ID NO: 107960 - DNA, 120 bp, synthetic construct
  source 1..120: mol_type = other DNA
acctccctcttcgctgagactttgttttctaatctgtaaaatgggaatagtagtatccacttcatagggagagcctgacatctagccctgagaggagatgaactgggtaggagtcagtgt

SEQ ID NO: 107961 - DNA, 120 bp, synthetic construct
  source 1..120: mol_type = other DNA
ctggctaattttagtatttttagtacagatggggtttcacctcgttggccagacggctctcgaactccagacctcaagtgatccgcccattgtggcctcccaaagtgctgggactacagg

SEQ ID NO: 107962 - DNA, 120 bp, synthetic construct
  source 1..120: mol_type = other DNA
tgctaagacttctctcttcctggccctccagttaatcagttctgcttaggaaaggctggtatcatgtgtagtataaacagattttgtttttgtttttttgacagagccttgctgggtctc

SEQ ID NO: 107963 - DNA, 120 bp, synthetic construct
  source 1..120: mol_type = other DNA
ttaggcagcttacagaattgtggggcaaactggagaactaattccaagccatagaactgatttgacctgataagaaaactgctgttactgtcactaccatcaaatgctacatgccaggat

SEQ ID NO: 107964 - DNA, 120 bp, synthetic construct
  source 1..120: mol_type = other DNA
gcctgccgacagagcaagactctgtctcaaaaagaaaaaaaaaaaaaccaacctatccaaaacaggactctccacttcctctcactctccttatacatctgaacgtggggcaccactgtt

SEQ ID NO: 107965 - DNA, 120 bp, synthetic construct
  source 1..120: mol_type = other DNA
cgagattgtgccactgcactccaacctgggcgacagagtgagactctgtctcaaaaaaaagaaaaaagaaatttaaaaaaaagagtaaagaaaaaggccacttctctaatatgcagggaa

SEQ ID NO: 107966 - DNA, 120 bp, synthetic construct
  source 1..120: mol_type = other DNA
aaaagtgcatcatctcagaactttgtgaggccaaggtaggaagatagcttgagcccaggagtttcaagactagcctgggcaatgtagtgagactccatctctacaaaaaatttgaaaaat

SEQ ID NO: 107967 - DNA, 120 bp, synthetic construct
  source 1..120: mol_type = other DNA
cctcctgagtagctaggattacagatgaccactaccacaccctgctaatttttgtatttttagtagacagggtatcaccatgttggccaggctggtctcgaactcctgacttcgggtgat

SEQ ID NO: 107968 - DNA, 120 bp, synthetic construct
  source 1..120: mol_type = other DNA
acttgtaatcccagcactttgggacaccgaggtggatgaatcacgaggtcaggagttaaagaccagcctggccaaccccatctgtactaaaaatacaaaaaaaaaaaaaatagctgtggg

SEQ ID NO: 107969 - DNA, 120 bp, synthetic construct
  source 1..120: mol_type = other DNA
catgtcactctgatgtgatgggagacatcacaactggaagcacttggtgaatgtcatacaaaagctactaagtaaaaggtacttgaggccagccccagtggctcacacctgtaatcccat

SEQ ID NO: 107970 - DNA, 120 bp, synthetic construct
  source 1..120: mol_type = other DNA
ttctcctgcctcagactcccgagtagctgggactacaggcgcccaccaccacacctggcgaatttttggtatttttagtagagagggggtttcactgtgttagccaggatggtctcgatc

SEQ ID NO: 107971 - DNA, 120 bp, synthetic construct
  source 1..120: mol_type = other DNA
gcctgggtgacacagcaagactgtttctcaaaaaaaaaaaaaaaaaatcatttatttggttttttttagagacaggatcttgctgtgcatgatcttggctcactgcaacctctgcctccc

SEQ ID NO: 107972 - DNA, 120 bp, synthetic construct
  source 1..120: mol_type = other DNA
agcagaactaaaagagactgagaccaagttcaaatcaacattgtttgagcctctggctccagccatgcctgaagtcatcctatctctgatttttcaattatttaaaccaatagacccccc

SEQ ID NO: 107973 - DNA, 120 bp, synthetic construct
  source 1..120: mol_type = other DNA
tttgcccatttccccccgacacacacacatcttatactcactcccacactccctggtctctggtatgtgatttctgttccaacagttaggactccagatttgttttttttttaatttctt

SEQ ID NO: 107974 - DNA, 120 bp, synthetic construct
  source 1..120: mol_type = other DNA
tgcccggccttgaacattcttaggtgagtcaggatttatccgtcttcccctcttgggttatttatttgtcttcgagttccaggatgggcacttgatccaatcagctactcagttctggaa

SEQ ID NO: 107975 - DNA, 120 bp, synthetic construct
  source 1..120: mol_type = other DNA
ctcaattctttttttttttttttttttttgatagggagtctagctctgttgcccgcgctggagtgccgtggcgccatctcggctcaccgcaacctctgcctcccgggttcaagctgttct

SEQ ID NO: 107976 - DNA, 120 bp, synthetic construct
  source 1..120: mol_type = other DNA
cccgaatttcctccgggaggacgctctggtgggatccaagcacttcccccgctgcgtctgtggtcgcttttaggtgcaactggagaaggcactgaagccctacgagattcacaccgtctt

SEQ ID NO: 107977 - DNA, 120 bp, synthetic construct
  source 1..120: mol_type = other DNA
gagggctcctcctttctctaatttctattttagaaaattggaacaataatattcttctcccacatgaagatagtaacaatggcagtcgttcagcggatgcttactttgcgttcagcgctg

SEQ ID NO: 107978 - DNA, 120 bp, synthetic construct
  source 1..120: mol_type = other DNA
aagtgtgacatgaatattggaggatccgatgtagagggggggtgatctggaaaagttcccttttttagggggaaggtgctccaaagccctctactgctggatccaaagctaaggaaagtg

SEQ ID NO: 107979 - DNA, 120 bp, synthetic construct
  source 1..120: mol_type = other DNA
taggtggaaacagcaactccaactcctctggcggggctgggaccgttggtaggggactggtcagtgatggaacgtcccctggggaaagatggactcaccgttttgagaggctgagactca

SEQ ID NO: 107980 - DNA, 120 bp, synthetic construct
  source 1..120: mol_type = other DNA
tactctcaaaaacaatgcctccacttgaaagagaactgtggagtttttgttgttgtggttgttttagagagacagggtctccctctaagtcaggagtgcagcaacctgatcatagctcac

SEQ ID NO: 107981 - DNA, 120 bp, synthetic construct
  source 1..120: mol_type = other DNA
tattttattttatttttattttttatatttttgagacggcattttactctgtctcccaggctggagttgaagtggcatgatcttggctcactgcaacctccgcctcccgggttcaagcga

SEQ ID NO: 107982 - DNA, 120 bp, synthetic construct
  source 1..120: mol_type = other DNA
caggcgccatgccctctccagacgccactgtgcccccatccctgttttccagatgccctaccccaaccccaccaaatgttggtctttgatccctgaacacagccacagtttgctgtttag

SEQ ID NO: 107983 - DNA, 120 bp, synthetic construct
  source 1..120: mol_type = other DNA
ccaggatggggtagctaggatgcctgagatgagctccttgttctctagaggctttcagctgggttgacatcactccctatagaaagcttagtgtcccctgagcagcacaagcaggaatca

SEQ ID NO: 107984 - DNA, 120 bp, synthetic construct
  source 1..120: mol_type = other DNA
gtccagctaatttttgtatttttagtagagatggtgtttcaccatgttgcccaggctgctctcgaactcctaagctcaagtgatcctcctgcctcaacctcccaaagtgcgggtattaca

SEQ ID NO: 107985 - DNA, 120 bp, synthetic construct
  source 1..120: mol_type = other DNA
gcatgtggggagcaggcgccttgaggggaaggcaaggcttttttctcccaggatgggggaggctgccctgacaccccggtttccctccctctctccttcctgaagggtccttcctgttcc

SEQ ID NO: 107986 - DNA, 120 bp, synthetic construct
  source 1..120: mol_type = other DNA
acccatcctggcctcgtctttgccctccgtcgcagcctggccttgggcctgcccttcccggggacactcggtctgatccccttccctcctccctcaatgtctcatgtccctgtctgatct

SEQ ID NO: 107987 - DNA, 120 bp, synthetic construct
  source 1..120: mol_type = other DNA
tttaaaccccccagccctgctcgtgagattgggctgggtagggacagaggaggccgaaatccctcccccatgcttcctgacccttgttggccaagggcatctttgatggtacaagcagag

SEQ ID NO: 107988 - DNA, 120 bp, synthetic construct
  source 1..120: mol_type = other DNA
acctaaagatgactattgctaaaaattaggtgaattttcttctatattttaataagatgaattgctttttgagcacgtgtgctcttacaattgtattcttacgagtgacgtatttgacta

SEQ ID NO: 107989 - DNA, 120 bp, synthetic construct
  source 1..120: mol_type = other DNA
aagccatgtgtttgtcatcaaacatttgttatcacatgctttttttaaaaaaaagacagggtgttgctctgtcactcaggttggaatgcagtggggtgatcacaactcactgcagccttg

SEQ ID NO: 107990 - DNA, 120 bp, synthetic construct; identical to SEQ ID NO: 31383
  source 1..120: mol_type = other DNA

SEQ ID NO: 107991 - DNA, 120 bp, synthetic construct; identical to SEQ ID NO: 10903
  source 1..120: mol_type = other DNA

SEQ ID NO: 107992 - DNA, 120 bp, synthetic construct
  source 1..120: mol_type = other DNA
cactcatgatttggctctctgttttgtctgttattggtgtataggaatgcttgtgatttttgcacattgattttgtatcctgagactttgctgaagttgcttatcagcttaaggagattt

SEQ ID NO: 107993 - DNA, 120 bp, synthetic construct
  source 1..120: mol_type = other DNA
attgtgcctaagatcacacagaagcagagtctgctcttttttttttttttggctcggctgctctgattttttttttttttattgagtcggagtctcgctctgttacccatgctggagtgc

SEQ ID NO: 107994 - DNA, 120 bp, synthetic construct
  source 1..120: mol_type = other DNA
cctcccaaagtgctgggattacaggtgtgagccactgcactgggcctggattaatcactttaaaatgctagagaactaacttaaaattatgaacacaagggtagggagaataatttacta

SEQ ID NO: 107995 - DNA, 120 bp, synthetic construct; identical to SEQ ID NO: 6663
  source 1..120: mol_type = other DNA

SEQ ID NO: 107996 - DNA, 120 bp, synthetic construct; identical to SEQ ID NO: 28107
  source 1..120: mol_type = other DNA

SEQ ID NO: 107997 - DNA, 120 bp, synthetic construct
  source 1..120: mol_type = other DNA
catgagttttttggctgcataaatgtcttcttttgagaagtgtctgtttatatccttcgcccactttttgatggggttgtttgtttttttcttgtaaatttatttgagttcattgtagat

SEQ ID NO: 107998 - DNA, 120 bp, synthetic construct
  source 1..120: mol_type = other DNA
ttggctctctgtttgtctattattggcgtataggaatgcttgtgatttttgtacgttggttttgtatcctgagactttgctgaagttgcttatcagctgaaggagattttgggctgagac

SEQ ID NO: 107999 - DNA, 120 bp, synthetic construct; identical to SEQ ID NO: 25186
  source 1..120: mol_type = other DNA

SEQ ID NO: 108000 - DNA, 120 bp, synthetic construct; identical to SEQ ID NO: 25187
  source 1..120: mol_type = other DNA

SEQ ID NO: 108001 - DNA, 120 bp, synthetic construct; identical to SEQ ID NO: 25188
  source 1..120: mol_type = other DNA

SEQ ID NO: 108002 - DNA, 120 bp, synthetic construct; identical to SEQ ID NO: 22115
  source 1..120: mol_type = other DNA

SEQ ID NO: 108003 - DNA, 120 bp, synthetic construct; identical to SEQ ID NO: 22116
  source 1..120: mol_type = other DNA

SEQ ID NO: 108004 - DNA, 120 bp, synthetic construct; identical to SEQ ID NO: 22112
  source 1..120: mol_type = other DNA

SEQ ID NO: 108005 - DNA, 120 bp, synthetic construct; identical to SEQ ID NO: 22113
  source 1..120: mol_type = other DNA

SEQ ID NO: 108006 - DNA, 120 bp, synthetic construct; identical to SEQ ID NO: 22114
  source 1..120: mol_type = other DNA

SEQ ID NO: 108007 - DNA, 120 bp, synthetic construct
  source 1..120: mol_type = other DNA
aggaggtcaaggctgcagtgagccgtgactgcaccacagcattccagcctgggtgacagatcaagatcctgtcttggagggaggaattaataatatgaattaattaattaattaattaat

SEQ ID NO: 108008 - DNA, 120 bp, synthetic construct
  source 1..120: mol_type = other DNA
gggcagagacgctcctcacttcctagctaacttttaaattttatgttgcccaagctggtctcaaactcctggcctcaagcaatcctcctgccttggcctcccaaagtgttgcgaatacag

SEQ ID NO: 108009 - DNA, 120 bp, synthetic construct; identical to SEQ ID NO: 25875
  source 1..120: mol_type = other DNA

SEQ ID NO: 108010 - DNA, 120 bp, synthetic construct
  source 1..120: mol_type = other DNA
tctcaatgagctgttgggcacacctcccagacggggtggtggccgggcagagggctcctcacttcccagtaggggcggccgggcagaggcgcccctcacctcccgggaggggcggctggc

SEQ ID NO: 108011 - DNA, 120 bp, synthetic construct
  source 1..120: mol_type = other DNA
cggatcacttgcggttaggggctggagaccggcctggccaacacagcgaaacaccgtctccaccaaaaccagtcaggcgtggcggtgcgagcctgcaatcgcaggcattcggcaggctgt

SEQ ID NO: 108012 - DNA, 120 bp, synthetic construct
  source 1..120: mol_type = other DNA
agaagttgctctggatgagtcagtgagtgagcagtgagtgaatgtgaacgcctaggacatgatagtacactactgtagactttataaacactgtacgcttaggctacactaagtgtattt

SEQ ID NO: 108013 - DNA, 120 bp, synthetic construct
  source 1..120: mol_type = other DNA
ttctcccattttgtaggttgcctgttcactctgatggtagtttcttttgctgtgcagaagctcttgagtttagttagatcccatttgtcaattttggcttttgttgccattgcttttgat

SEQ ID NO: 108014 - DNA, 120 bp, synthetic construct
  source 1..120: mol_type = other DNA
acggttttcaaaatccaagttaagtaacggggactgaattttctatcagtccactagcttttaagtcaccaaggtgggattccagaggccagggaacaacttctgcgaagttgaagatta

SEQ ID NO: 108015 - DNA, 120 bp, synthetic construct
  source 1..120: mol_type = other DNA
tcatttcccccgcctctctgtcaccccccacacgccttttttttttttttttttttttgagacagagtctcgctctgttgcctagctggagtgcagtggcgcgatcttggctcactgcaa

SEQ ID NO: 108016 - DNA, 120 bp, synthetic construct; identical to SEQ ID NO: 32112
  source 1..120: mol_type = other DNA

SEQ ID NO: 108017 - DNA, 120 bp, synthetic construct
  source 1..120: mol_type = other DNA
gaatggcgatcattaaaaagtcaggaaacaacaggtgctggagaggatgtggagaaataggaacacttttacactgttggtgggactgtaaactagttcaaccattgtggaagtcggtgt

SEQ ID NO: 108018 - DNA, 120 bp, synthetic construct; identical to SEQ ID NO: 32113
  source 1..120: mol_type = other DNA

SEQ ID NO: 108019 - DNA, 120 bp, synthetic construct; identical to SEQ ID NO: 32114
  source 1..120: mol_type = other DNA

SEQ ID NO: 108020 - DNA, 120 bp, synthetic construct; identical to SEQ ID NO: 32115
  source 1..120: mol_type = other DNA

SEQ ID NO: 108021 - DNA, 120 bp, synthetic construct; identical to SEQ ID NO: 32116
  source 1..120: mol_type = other DNA

SEQ ID NO: 108022 - DNA, 120 bp, synthetic construct
  source 1..120: mol_type = other DNA
ctttgggtatatacccagtaatgggatggctgggtcaaatggtatttctagttctagatccctgaggaatcgccacactgacttccacaatggttcaactagtttacagtcccaccaaca

SEQ ID NO: 108023 - DNA, 120 bp, synthetic construct; identical to SEQ ID NO: 15595
  source 1..120: mol_type = other DNA

SEQ ID NO: 108024 - DNA, 120 bp, synthetic construct; identical to SEQ ID NO: 70124
  source 1..120: mol_type = other DNA

SEQ ID NO: 108025 - DNA, 120 bp, synthetic construct; identical to SEQ ID NO: 77621
  source 1..120: mol_type = other DNA

SEQ ID NO: 108026 - DNA, 120 bp, synthetic construct; identical to SEQ ID NO: 52252
  source 1..120: mol_type = other DNA

SEQ ID NO: 108027 - DNA, 120 bp, synthetic construct; identical to SEQ ID NO: 48995
  source 1..120: mol_type = other DNA

SEQ ID NO: 108028 - DNA, 120 bp, synthetic construct
  source 1..120: mol_type = other DNA
tccttcacttatgaagcttagtttggctggatatgaaattctgggttgaaaattcttttctttaagaatgttgaatattggcccccactctcttctggcctgtagggtttctgccgagag

SEQ ID NO: 108029 - DNA, 120 bp, synthetic construct
  source 1..120: mol_type = other DNA
gatgtcagtgtgcccctgatggggggtgcctcccagttaggctgctcgggggtcaggggtcagggacccacttgaggaggcagtctgcccgttctcagatctccagctgcgtgctgggag

SEQ ID NO: 108030 - DNA, 120 bp, synthetic construct; identical to SEQ ID NO: 15596
  source 1..120: mol_type = other DNA

SEQ ID NO: 108031 - DNA, 120 bp, synthetic construct; identical to SEQ ID NO: 15597
  source 1..120: mol_type = other DNA

SEQ ID NO: 108032 - DNA, 120 bp, synthetic construct; identical to SEQ ID NO: 15598
  source 1..120: mol_type = other DNA

SEQ ID NO: 108033 - DNA, 120 bp, synthetic construct; identical to SEQ ID NO: 33563
  source 1..120: mol_type = other DNA

SEQ ID NO: 108034 - DNA, 120 bp, synthetic construct; identical to SEQ ID NO: 33564
  source 1..120: mol_type = other DNA

SEQ ID NO: 108035 - DNA, 120 bp, synthetic construct
  source 1..120: mol_type = other DNA
atttttgcatcttttccataagtctaaagtttgttcaaaataaaaagttaaaaataaaaacagcaggccaggcgcggtggctcacgcctgtaatcccagcactttgagaggccaaggcgg

SEQ ID NO: 108036 - DNA, 120 bp, synthetic construct
  source 1..120: mol_type = other DNA
tgttgcatcgcggcccaatgcgcccggctgcgccgggtttcctgctccccgcgagtggaaattgcgaaaaaaaaaaaaaaaaaaaaaaaaaaaaaaaaaaaaaaaaaaaaaaaaacagcg

SEQ ID NO: 108037 - DNA, 120 bp, synthetic construct; identical to SEQ ID NO: 33555
  source 1..120: mol_type = other DNA

SEQ ID NO: 108038 - DNA, 120 bp, synthetic construct; identical to SEQ ID NO: 33556
  source 1..120: mol_type = other DNA

SEQ ID NO: 108039 - DNA, 120 bp, synthetic construct; identical to SEQ ID NO: 33557
  source 1..120: mol_type = other DNA

SEQ ID NO: 108040 - DNA, 120 bp, synthetic construct; identical to SEQ ID NO: 33558
  source 1..120: mol_type = other DNA

SEQ ID NO: 108041 - DNA, 120 bp, synthetic construct
  source 1..120: mol_type = other DNA
tttctaatttaattccattgtgattggagaatatacttcgtatgattttaatccttctaaatttactgagactccttttttttggcggggggggggggtgggggggacggattcttgctc

SEQ ID NO: 108042 - DNA, 120 bp, synthetic construct; identical to SEQ ID NO: 33559
  source 1..120: mol_type = other DNA

SEQ ID NO: 108043 - DNA, 120 bp, synthetic construct
  source 1..120: mol_type = other DNA
gcacctgttgtttcctgactttttaatgattgccattctaactggtgtgagatggtatctcattgtggttttgatttgcatttctctgatggccagtaatgatgagcattttttcatgtg

SEQ ID NO: 108044 - DNA, 120 bp, synthetic construct; identical to SEQ ID NO: 33560
  source 1..120: mol_type = other DNA

SEQ ID NO: 108045 - DNA, 120 bp, synthetic construct
  source 1..120: mol_type = other DNA
aggatcacttgagcccagaagatggaggctgcagtgagccataatcgtgccagtgcactccagcctgagcaacagagcaagattctatctccaaaaaaaaaaaaaaaacaaaaaaaaaaa

SEQ ID NO: 108046 - DNA, 120 bp, synthetic construct
  source 1..120: mol_type = other DNA
tgctttagaaactagagaaaggggaagaagacaggtctaacattttcaaggtcgtctttccctcttttaaatgtggctattatgttaggccagtggttcctaaccagaggcaattgtgcc

SEQ ID NO: 108047 - DNA, 120 bp, synthetic construct; identical to SEQ ID NO: 33562
  source 1..120: mol_type = other DNA

SEQ ID NO: 108048 - DNA, 120 bp, synthetic construct; identical to SEQ ID NO: 11125
  source 1..120: mol_type = other DNA

SEQ ID NO: 108049 - DNA, 120 bp, synthetic construct; identical to SEQ ID NO: 11126
  source 1..120: mol_type = other DNA

SEQ ID NO: 108050 - DNA, 120 bp, synthetic construct
  source 1..120: mol_type = other DNA
ctattactatcatcatcatcatcatcatcatcatcatcatcatcatcatcattactctgagatagggtcttgctttgggacccaggctagagtgcagtggagtaatcagagctcactgca

SEQ ID NO: 108051 - DNA, 120 bp, synthetic construct
  source 1..120: mol_type = other DNA
ccatcgtctgagatgtggggagtgcctctgccctgccgccccgtctgggatgtgaggagcgcctctccccggccgcgaccccgtctgggaggtgaggagcctctctgcccagccgccccg

SEQ ID NO: 108052 - DNA, 120 bp, synthetic construct
  source 1..120: mol_type = other DNA
ccctaatctcaagtacccagggacacaaacactgcggaaggcctcggggtcctctgcctagaaaaaccagagacctttgttcacttgtttgtctgctgaccttccctccactattgtcct

SEQ ID NO: 108053 - DNA, 120 bp, synthetic construct
  source 1..120: mol_type = other DNA
aggatatcctatatttaaagaccttccctgactctctccaagtccatccatcatccatccatccatccatccaccatccatccatccatcatccatttaccatctatccatctatccatc

SEQ ID NO: 108054 - DNA, 120 bp, synthetic construct
  source 1..120: mol_type = other DNA
atttaccatctatccatctatcatccatccatccatccaccatccagccatctatcatccaaccaccatccatccatccttcatccagccatccatcatctatctaccatccatccaaca

SEQ ID NO: 108055 - DNA, 120 bp, synthetic construct
  source 1..120: mol_type = other DNA
cataggttctgtatatttacttgtctccttgtttacttttctactctagaatagaagtgccacaagggcagggacagtctcttgttcactgctatattcatactgcctaacggctcgtag

SEQ ID NO: 108056 - DNA, 120 bp, synthetic construct; identical to SEQ ID NO: 21164
  source 1..120: mol_type = other DNA

SEQ ID NO: 108057 - DNA, 120 bp, synthetic construct; identical to SEQ ID NO: 21165
  source 1..120: mol_type = other DNA

SEQ ID NO: 108058 - DNA, 120 bp, synthetic construct; identical to SEQ ID NO: 21166
  source 1..120: mol_type = other DNA

SEQ ID NO: 108059 - DNA, 120 bp, synthetic construct; identical to SEQ ID NO: 21167
  source 1..120: mol_type = other DNA

SEQ ID NO: 108060 - DNA, 120 bp, synthetic construct; identical to SEQ ID NO: 21168
  source 1..120: mol_type = other DNA

SEQ ID NO: 108061 - DNA, 120 bp, synthetic construct; identical to SEQ ID NO: 21169
  source 1..120: mol_type = other DNA

SEQ ID NO: 108062 - DNA, 120 bp, synthetic construct
  source 1..120: mol_type = other DNA
tttgagaagtgtctgttcacatcgtttgcccactttttgatggggttgtttgtttttttcttgtaaatttgtttgagttcattgtagattctggatattagccctttgtcagatgagtag

SEQ ID NO: 108063 - DNA, 120 bp, synthetic construct
  source 1..120: mol_type = other DNA
gcaactgtgaatgggagttcactcatgatttggctctctgtttgtctgttgttggtgtataagaatgcttgtgatttttgtacattgattttgtatcctgagactttgctgaagttgctt

SEQ ID NO: 108064 - DNA, 120 bp, synthetic construct
  source 1..120: mol_type = other DNA
tacagaactctccaccccaaatcaacagaatatacatttttttcagcaccacaccacacctattccaaaattgaccacatggttggaagtaaagctctcctcagcaaatgtaaaagaaca

SEQ ID NO: 108065 - DNA, 120 bp, synthetic construct; identical to SEQ ID NO: 52252
  source 1..120: mol_type = other DNA

SEQ ID NO: 108066 - DNA, 120 bp, synthetic construct; identical to SEQ ID NO: 21170
  source 1..120: mol_type = other DNA

SEQ ID NO: 108067 - DNA, 120 bp, synthetic construct; identical to SEQ ID NO: 25295
  source 1..120: mol_type = other DNA

SEQ ID NO: 108068 - DNA, 120 bp, synthetic construct; identical to SEQ ID NO: 25296
  source 1..120: mol_type = other DNA

SEQ ID NO: 108069 - DNA, 120 bp, synthetic construct; identical to SEQ ID NO: 25297
  source 1..120: mol_type = other DNA

SEQ ID NO: 108070 - DNA, 120 bp, synthetic construct; identical to SEQ ID NO: 25298
  source 1..120: mol_type = other DNA

SEQ ID NO: 108071 - DNA, 120 bp, synthetic construct; identical to SEQ ID NO: 25299
  source 1..120: mol_type = other DNA

SEQ ID NO: 108072 - DNA, 120 bp, synthetic construct; identical to SEQ ID NO: 27114
  source 1..120: mol_type = other DNA

SEQ ID NO: 108073 - DNA, 120 bp, synthetic construct; identical to SEQ ID NO: 20154
  source 1..120: mol_type = other DNA

SEQ ID NO: 108074 - DNA, 120 bp, synthetic construct; identical to SEQ ID NO: 20155
  source 1..120: mol_type = other DNA

SEQ ID NO: 108075 - DNA, 120 bp, synthetic construct
  source 1..120: mol_type = other DNA
agtttccattaggaatgcctatttccatgacttaatttttctttttttttccttgagaaagagtttcactcttgttgcctaggctggagtgcagtggcgtgatctgagctcactgcaacc

SEQ ID NO: 108076 - DNA, 120 bp, synthetic construct
  source 1..120: mol_type = other DNA
ggccaggggaggcagcatgggccaggggaggcagcagcacgggccaggggaggcagcagcatgggtcaggggaggcagcagcatgggtcaggggaggcagcatgggccaggggaggcagc

SEQ ID NO: 108077 - DNA, 120 bp, synthetic construct; identical to SEQ ID NO: 19919
  source 1..120: mol_type = other DNA

SEQ ID NO: 108078 - DNA, 120 bp, synthetic construct; identical to SEQ ID NO: 19920
  source 1..120: mol_type = other DNA

SEQ ID NO: 108079 - DNA, 120 bp, synthetic construct; identical to SEQ ID NO: 19921
  source 1..120: mol_type = other DNA

SEQ ID NO: 108080 - DNA, 120 bp, synthetic construct; identical to SEQ ID NO: 19922
  source 1..120: mol_type = other DNA

SEQ ID NO: 108081 - DNA, 120 bp, synthetic construct
  source 1..120: mol_type = other DNA
gtaagtaatctcactggctcccctaaagtacctctggtccctttcatacttcctgggtaccctcttttgcatccgtggaaacctccacctatttctgccccctcgactcacttcaccaca

SEQ ID NO: 108082 - DNA, 120 bp, synthetic construct
  source 1..120: mol_type = other DNA
atgcgtgtgtgatggaggggggatgactgtgaatgggagagaggggtatgaatggggggacttgccaacaccgtgaagaggtgtggggatgtggggatcagagggacaggggcctgggat

SEQ ID NO: 108083 - DNA, 120 bp, synthetic construct; identical to SEQ ID NO: 19923
  source 1..120: mol_type = other DNA

SEQ ID NO: 108084 - DNA, 120 bp, synthetic construct; identical to SEQ ID NO: 19924
  source 1..120: mol_type = other DNA

SEQ ID NO: 108085 - DNA, 120 bp, synthetic construct
  source 1..120: mol_type = other DNA
cctcccatcaaggatgcgatctgggacggggcaccggggacccgggcgtaacccaatttggtgtcgcccagggcaacgctccccacctcacccgtacccccagccgcacacccaggccag

SEQ ID NO: 108086 - DNA, 120 bp, synthetic construct; identical to SEQ ID NO: 12067
  source 1..120: mol_type = other DNA

SEQ ID NO: 108087 - DNA, 120 bp, synthetic construct; identical to SEQ ID NO: 12068
  source 1..120: mol_type = other DNA

SEQ ID NO: 108088 - DNA, 120 bp, synthetic construct; identical to SEQ ID NO: 12069
  source 1..120: mol_type = other DNA

SEQ ID NO: 108089 - DNA, 120 bp, synthetic construct
  source 1..120: mol_type = other DNA
aattgcttgaactcaggaggcggaggttgcaatcagccaagattgccccacttcaccccagcctgggcaacagagcaagactccatcttaaatatatatatatatataatatatatgtta

SEQ ID NO: 108090 - DNA, 120 bp, synthetic construct; identical to SEQ ID NO: 12070
  source 1..120: mol_type = other DNA

SEQ ID NO: 108091 - DNA, 120 bp, synthetic construct; identical to SEQ ID NO: 12071
  source 1..120: mol_type = other DNA

SEQ ID NO: 108092 - DNA, 120 bp, synthetic construct; identical to SEQ ID NO: 12072
  source 1..120: mol_type = other DNA

SEQ ID NO: 108093 - DNA, 120 bp, synthetic construct
  source 1..120: mol_type = other DNA
tttaagtctttaatccatcgtgaattaatttttgtataaggtgtaaggaaggcattcagtttcttctgcaaagaacttaaacaaatttataagaaaaaatcaaacaaccccatcaaaaag

SEQ ID NO: 108094 - DNA, 120 bp, synthetic construct; identical to SEQ ID NO: 12073
  source 1..120: mol_type = other DNA

SEQ ID NO: 108095 - DNA, 120 bp, synthetic construct
  source 1..120: mol_type = other DNA
ccccgttctattttcttctctgctctccttgcaacatggcattcactgtggattaaaggggtagggggaggggggagggatagcattagaagatataccttatgttaaatgatgagttaa

SEQ ID NO: 108096 - DNA, 120 bp, synthetic construct; identical to SEQ ID NO: 12075
  source 1..120: mol_type = other DNA

SEQ ID NO: 108097 - DNA, 120 bp, synthetic construct; identical to SEQ ID NO: 12076
  source 1..120: mol_type = other DNA

SEQ ID NO: 108098 - DNA, 120 bp, synthetic construct; identical to SEQ ID NO: 12077
  source 1..120: mol_type = other DNA

SEQ ID NO: 108099 - DNA, 120 bp, synthetic construct; identical to SEQ ID NO: 12078
  source 1..120: mol_type = other DNA

SEQ ID NO: 108100 - DNA, 120 bp, synthetic construct; identical to SEQ ID NO: 12057
  source 1..120: mol_type = other DNA

SEQ ID NO: 108101 - DNA, 120 bp, synthetic construct; identical to SEQ ID NO: 12079
  source 1..120: mol_type = other DNA

SEQ ID NO: 108102 - DNA, 120 bp, synthetic construct
  source 1..120: mol_type = other DNA
caccccggtattacaagacatgacttttcttggtttaccttccaatccacacgtcttttttttcttttcttttttttttgagatggagtttcgctcttgttgcccaggctgcagtgcagt

SEQ ID NO: 108103 - DNA, 120 bp, synthetic construct
  source 1..120: mol_type = other DNA
aaaccaccattgtcatcatggcccattctcaatgagctgttgggtacacctcccagacggggtggtggccgggcagaggggctcacttcccagtaggggcggccgggcagaggcgcccct

SEQ ID NO: 108104 - DNA, 120 bp, synthetic construct; identical to SEQ ID NO: 12080
  source 1..120: mol_type = other DNA

SEQ ID NO: 108105 - DNA, 120 bp, synthetic construct; identical to SEQ ID NO: 12081
  source 1..120: mol_type = other DNA

SEQ ID NO: 108106 - DNA, 120 bp, synthetic construct
  source 1..120: mol_type = other DNA
atgatgatgactgactaagctacctacaaagatacaggtcactctatgttattactgcactgttaatggtaaaaaaatttttttttttgagacagggcctcactatgctgcccaggctgg

SEQ ID NO: 108107 - DNA, 120 bp, synthetic construct; identical to SEQ ID NO: 12058
  source 1..120: mol_type = other DNA

SEQ ID NO: 108108 - DNA, 120 bp, synthetic construct; identical to SEQ ID NO: 12059
  source 1..120: mol_type = other DNA

SEQ ID NO: 108109 - DNA, 120 bp, synthetic construct
  source 1..120: mol_type = other DNA
taggaataaatctaaaaaaggttttgcagaagctctttgtggagatacttaaaaaaccagtttgaaagagaaatgtaggcagggcgcagtggctcacatctgtaatcccagcactttggg

SEQ ID NO: 108110 - DNA, 120 bp, synthetic construct; identical to SEQ ID NO: 12060
  source 1..120: mol_type = other DNA

SEQ ID NO: 108111 - DNA, 120 bp, synthetic construct; identical to SEQ ID NO: 12061
  source 1..120: mol_type = other DNA

SEQ ID NO: 108112 - DNA, 120 bp, synthetic construct; identical to SEQ ID NO: 12062
  source 1..120: mol_type = other DNA

SEQ ID NO: 108113 - DNA, 120 bp, synthetic construct; identical to SEQ ID NO: 12063
  source 1..120: mol_type = other DNA

SEQ ID NO: 108114 - DNA, 120 bp, synthetic construct; identical to SEQ ID NO: 12064
  source 1..120: mol_type = other DNA

SEQ ID NO: 108115 - DNA, 120 bp, synthetic construct; identical to SEQ ID NO: 12065
  source 1..120: mol_type = other DNA

SEQ ID NO: 108116 - DNA, 120 bp, synthetic construct; identical to SEQ ID NO: 12066
  source 1..120: mol_type = other DNA

SEQ ID NO: 108117 - DNA, 120 bp, synthetic construct
  source 1..120: mol_type = other DNA
gtgtactttacgtgtgtatgtgtacacatgcaaagagatttattttaagggattggtttaaatgattgtggaggctgacaagtccaaaatccataggacagggcagcaggctggaaactc

SEQ ID NO: 108118 - DNA, 120 bp, synthetic construct
  source 1..120: mol_type = other DNA
ttcaaatgttaaatgtgatgctatatgtattttgccacaatttttaaaaaagtttaggacctgggcttgtgcattacaccacagaacaccctggcccatgattggctggggttgttctcc

SEQ ID NO: 108119 - DNA, 120 bp, synthetic construct
  source 1..120: mol_type = other DNA
cgaagctgggggtcggtggagtgggggggagaagccgccacctccggaaattaattgtttttctttccccttctcgccctaccttggtcttcgtgccccgacgcggcccccaccccagct

SEQ ID NO: 108120 - DNA, 120 bp, synthetic construct; identical to SEQ ID NO: 24016
  source 1..120: mol_type = other DNA

SEQ ID NO: 108121 - DNA, 120 bp, synthetic construct
  source 1..120: mol_type = other DNA
tgcatgcgtgcaccagggagtgtggatatacttgcctgttctggggttgtacatgtgtgtgcacacagatgaccctgtacagtgattgtatgcgtgcaccagtgagtgtggatatacttg

SEQ ID NO: 108122 - DNA, 120 bp, synthetic construct
  source 1..120: mol_type = other DNA
ctcttctgggggtgtatgtgtgtgtgggcacacaggtgaccctgtacggtgattgcatgtgtgcaccgagtgtggatatacttgcctgttctgggggtgtacgtgtgtttgtgtgcacac

SEQ ID NO: 108123 - DNA, 120 bp, synthetic construct
  source 1..120: mol_type = other DNA
tgattgcatgcgtgcaccagggagtgtggatatacttgcctgttctgggggtgtacacgtgtgtgtgcacacaggtgatcctgtacagtgattgcatgcgtgcaccagggagtgtggata

SEQ ID NO: 108124 - DNA, 120 bp, synthetic construct; identical to SEQ ID NO: 24017
  source 1..120: mol_type = other DNA

SEQ ID NO: 108125 - DNA, 120 bp, synthetic construct; identical to SEQ ID NO: 24018
  source 1..120: mol_type = other DNA

SEQ ID NO: 108126 - DNA, 120 bp, synthetic construct; identical to SEQ ID NO: 24019
  source 1..120: mol_type = other DNA

SEQ ID NO: 108127 - DNA, 120 bp, synthetic construct; identical to SEQ ID NO: 24020
  source 1..120: mol_type = other DNA

SEQ ID NO: 108128 - DNA, 120 bp, synthetic construct
  source 1..120: mol_type = other DNA
gtgactagagcgtagcaaactgccaagcccgagggagcctggctcttggaaaagcgggtggctctggcctgcctgggtactagggagccactgcaggcttctgagcagagccccagtgga

SEQ ID NO: 108129 - DNA, 120 bp, synthetic construct
  source 1..120: mol_type = other DNA
ttgccgtcgtggggtgtctgtgaccgtcatgtgggtgtttgtgttatgcaggcttctgtcaccggggcttcctgtgttctggggggatcgcgtgccatgacaaacccctctcattctggg

SEQ ID NO: 108130 - DNA, 120 bp, synthetic construct; identical to SEQ ID NO: 19297
  source 1..120: mol_type = other DNA

SEQ ID NO: 108131 - DNA, 120 bp, synthetic construct; identical to SEQ ID NO: 19298
  source 1..120: mol_type = other DNA

SEQ ID NO: 108132 - DNA, 120 bp, synthetic construct
  source 1..120: mol_type = other DNA
atcacttgaattcaggacgcacagattgcagtgagctgagattgtgccattgcagtccagcctgggcaacagaatgagactcagtctccaaaaaaaaaaaaaaaaaactatccacatggt

SEQ ID NO: 108133 - DNA, 120 bp, synthetic construct; identical to SEQ ID NO: 19299
  source 1..120: mol_type = other DNA

SEQ ID NO: 108134 - DNA, 120 bp, synthetic construct; identical to SEQ ID NO: 19300
  source 1..120: mol_type = other DNA

SEQ ID NO: 108135 - DNA, 120 bp, synthetic construct
  source 1..120: mol_type = other DNA
ggatgacgcagtacctatatccaacatgcaaagaaacctaataccgtgtggatgacgcagtacctatatcccaacatgcacagaaacctcataccgtgtggatgatgcggtacctatacc

SEQ ID NO: 108136 - DNA, 120 bp, synthetic construct; identical to SEQ ID NO: 19302
  source 1..120: mol_type = other DNA

SEQ ID NO: 108137 - DNA, 120 bp, synthetic construct; identical to SEQ ID NO: 19304
  source 1..120: mol_type = other DNA

SEQ ID NO: 108138 - DNA, 120 bp, synthetic construct
  source 1..120: mol_type = other DNA
aggaggccgggcagatagatggcgcttcatcgtgagtgagatcgtgagtgagagatagaggaggccaggcagatagatggcgcttcatcgtgagtgagatcgtgagtgagagatagagga

SEQ ID NO: 108139 - DNA, 120 bp, synthetic construct; identical to SEQ ID NO: 108138
  source 1..120: mol_type = other DNA

SEQ ID NO: 108140 - DNA, 120 bp, synthetic construct; identical to SEQ ID NO: 19305
  source 1..120: mol_type = other DNA

SEQ ID NO: 108141 - DNA, 120 bp, synthetic construct; identical to SEQ ID NO: 19306
  source 1..120: mol_type = other DNA

SEQ ID NO: 108142 - DNA, 120 bp, synthetic construct
  source 1..120: mol_type = other DNA
actaagcagcctcacctcctgttgaatggatgcatgatgggtggatggactgacagaaagatggcaggtggatggatgaatgaaagaatggatggaagatgaatagatgggtgggtgagt

SEQ ID NO: 108143 - DNA, 120 bp, synthetic construct
  source 1..120: mol_type = other DNA
gatgaatggatggatggatgggtgggtagatgagtgcatgggtggatgggtgggtagatgagtggatgggtgaatggatggacagatggatagttggatgggtggacagatggatggatg

SEQ ID NO: 108144 - DNA, 120 bp, synthetic construct
  source 1..120: mol_type = other DNA
tgggtggattggtgggtggatgaatggatggatggatgggtgggtggatgagtagatggatgaatggatgaacagatgaatggactctaggcatgtagtagacaggtcatacctaaagga

SEQ ID NO: 108145 - DNA, 120 bp, synthetic construct; identical to SEQ ID NO: 19307
  source 1..120: mol_type = other DNA

SEQ ID NO: 108146 - DNA, 120 bp, synthetic construct
  source 1..120: mol_type = other DNA
ctcccgagtagctgggattacagttgcccgccatcacacccagccaatttttgtatttttagtagagacggggtttcaccatgttgacaggctggtgtcgaactcctgacctcaggtgat

SEQ ID NO: 108147 - DNA, 120 bp, synthetic construct; identical to SEQ ID NO: 19308
  source 1..120: mol_type = other DNA

SEQ ID NO: 108148 - DNA, 120 bp, synthetic construct; identical to SEQ ID NO: 19309
  source 1..120: mol_type = other DNA

SEQ ID NO: 108149 - DNA, 120 bp, synthetic construct; identical to SEQ ID NO: 19310
  source 1..120: mol_type = other DNA

SEQ ID NO: 108150 - DNA, 120 bp, synthetic construct; identical to SEQ ID NO: 19311
  source 1..120: mol_type = other DNA

SEQ ID NO: 108151 - DNA, 120 bp, synthetic construct; identical to SEQ ID NO: 32734
  source 1..120: mol_type = other DNA

SEQ ID NO: 108152 - DNA, 120 bp, synthetic construct; identical to SEQ ID NO: 32735
  source 1..120: mol_type = other DNA

SEQ ID NO: 108153 - DNA, 120 bp, synthetic construct; identical to SEQ ID NO: 32736
  source 1..120: mol_type = other DNA

SEQ ID NO: 108154 - DNA, 120 bp, synthetic construct; identical to SEQ ID NO: 32737
  source 1..120: mol_type = other DNA

SEQ ID NO: 108155 - DNA, 120 bp, synthetic construct
  source 1..120: mol_type = other DNA
ccacaatccatggccttacatcatgtccttgtcagctcaggctgccataacaaatataccacagactaataataagagctatctatgacaaacccacagccaatatcatactgaatgggc

SEQ ID NO: 108156 - DNA, 120 bp, synthetic construct
  source 1..120: mol_type = other DNA
aactatctgatctttgacaaacctgagaaaaacaagcaatggggaaaggattccctatttaacaaatgatgctgggaaaactggctagccatatgtagaaagctgaaactggatcccttc

SEQ ID NO: 108157 - DNA, 120 bp, synthetic construct
  source 1..120: mol_type = other DNA
catgtaccctaaaacttaaagtataattaaaaaaagaaaagaaaaaaaatataccacagactgggtggcttaaactacacacatttatttttcattctggaatctggacatcctagatca

SEQ ID NO: 108158 - DNA, 120 bp, synthetic construct
  source 1..120: mol_type = other DNA
gagctaactatcctaaatatatatgggtgcatataactatcctaaatatatatgcacccaatacaggagcaccggattcataaagcatgcccttagagacctacaaagagacttagactc

SEQ ID NO: 108159 - DNA, 120 bp, synthetic construct
  source 1..120: mol_type = other DNA
aaacatgaaatatttgctctattccgttttatcagatatgtattttctataaaagaaagtcatgccaccaggcacggtggctcatgcctgtaatcccaacactttgggaggccgaagcgg

SEQ ID NO: 108160 - DNA, 120 bp, synthetic construct
  source 1..120: mol_type = other DNA
gctcaagtgatcctcccacctcggcctcccaagtagctgggactacaggcacatgccatcccacctagctaattttttttttttttttattgatcattcttgggtgtttctcgcagaggg

SEQ ID NO: 108161 - DNA, 120 bp, synthetic construct
  source 1..120: mol_type = other DNA
tcctgcctcagcctcccaaagtgctgggattacaggtgtgagccactgcacccagccaaatactaatatttaagaagaactttttatgatgtctgggatttgctttaaaataattcagaa

SEQ ID NO: 108162 - DNA, 120 bp, synthetic construct
  source 1..120: mol_type = other DNA
tctacaactagaccaggtgatctgagaacgctagagttactgccagaagcaacctaaatcctccctggagaaagtcctggctccaaatttctataatcaattttgcaaatgtgatgttag

SEQ ID NO: 108163 - DNA, 120 bp, synthetic construct
  source 1..120: mol_type = other DNA
tcctcctacctcagcttcccaaagtactgggcttacaggcatgagccacagcaacccccggccctctacattaaatttaaatggaataaatgctcctgcttttaaaaaaagaaataccat

SEQ ID NO: 108164 - DNA, 120 bp, synthetic construct
  source 1..120: mol_type = other DNA
tctaaatttttagaatgagattgtactttatacaatatttcaaaatttgctcttccctggccagacacagtggctcatgcctgtaatctcagcactttgggagtgcgaggcaggaggatc

SEQ ID NO: 108165 - DNA, 120 bp, synthetic construct; identical to SEQ ID NO: 17422
  source 1..120: mol_type = other DNA

SEQ ID NO: 108166 - DNA, 120 bp, synthetic construct
  source 1..120: mol_type = other DNA
gcagcatgattcatagtcctttgggtatatacccagtaatgggatggctgggtcaaatggtatttccagttctagatccctgaggaatcgccacactgacttccacaatggttgaactag

SEQ ID NO: 108167 - DNA, 120 bp, synthetic construct
  source 1..120: mol_type = other DNA
aaagtagtttttcccaattctgtgaagaaagtcattggtagcttccatgctcatgggtaggaagaatcaatatcgtgaaaatggccatactgcccaaggtaatttacagattcaatgcca

SEQ ID NO: 108168 - DNA, 120 bp, synthetic construct; identical to SEQ ID NO: 4145
  source 1..120: mol_type = other DNA

SEQ ID NO: 108169 - DNA, 120 bp, synthetic construct; identical to SEQ ID NO: 20047
  source 1..120: mol_type = other DNA

SEQ ID NO: 108170 - DNA, 120 bp, synthetic construct
  source 1..120: mol_type = other DNA
tgtgtgtgtatatgtggtgtgtgtggtgtgtgtgtatatgtggtgtgtgtgtatatgtggtgtgtgtatggtgtgtggtgtgtgggtgtgtgtggtgtgtgtggatggtgtgtatggtgt

SEQ ID NO: 108171 - DNA, 120 bp, synthetic construct; identical to SEQ ID NO: 16022
  source 1..120: mol_type = other DNA

SEQ ID NO: 108172 - DNA, 120 bp, synthetic construct
  source 1..120: mol_type = other DNA
caatgacagatttagggggtacaagtgctgatttgttacatggatgtattgtgtagtggtaaagtatgggctggaaaaactggattgccatatgcagaagaatgaaagtggacccctatc

SEQ ID NO: 108173 - DNA, 120 bp, synthetic construct; identical to SEQ ID NO: 16023
  source 1..120: mol_type = other DNA

SEQ ID NO: 108174 - DNA, 120 bp, synthetic construct
  source 1..120: mol_type = other DNA
ggcgttaggtacatttgcagtgttgtgcaactgtcaccactcttcatttcccggtcttttttttaaacttttaagttcaggggtacaagtgcaggtttggtacataggtaaacttgtgtc

SEQ ID NO: 108175 - DNA, 120 bp, synthetic construct; identical to SEQ ID NO: 16024
  source 1..120: mol_type = other DNA

SEQ ID NO: 108176 - DNA, 120 bp, synthetic construct
  source 1..120: mol_type = other DNA
gagatggtatctcattgtggttttgatttgcatttctctgatgatcagtgatgatgagcattttttcatgtgtctgttggctgcatagacgtcttcttttgggaagtgtctgttcatatc

SEQ ID NO: 108177 - DNA, 120 bp, synthetic construct; identical to SEQ ID NO: 16025
  source 1..120: mol_type = other DNA

SEQ ID NO: 108178 - DNA, 120 bp, synthetic construct
  source 1..120: mol_type = other DNA
aatcgccacactgacttccacaatggttgaactagtttacagtcccaccagcagtgtaaaagtgttcctatttctccacatcctctccagcacctgttgtttcctgactttttaatgatt

SEQ ID NO: 108179 - DNA, 120 bp, synthetic construct; identical to SEQ ID NO: 23903
  source 1..120: mol_type = other DNA

SEQ ID NO: 108180 - DNA, 120 bp, synthetic construct; identical to SEQ ID NO: 23904
  source 1..120: mol_type = other DNA

SEQ ID NO: 108181 - DNA, 120 bp, synthetic construct; identical to SEQ ID NO: 23905
  source 1..120: mol_type = other DNA

SEQ ID NO: 108182 - DNA, 120 bp, synthetic construct; identical to SEQ ID NO: 23906
  source 1..120: mol_type = other DNA

SEQ ID NO: 108183 - DNA, 120 bp, synthetic construct; identical to SEQ ID NO: 7621
  source 1..120: mol_type = other DNA

SEQ ID NO: 108184 - DNA, 120 bp, synthetic construct; identical to SEQ ID NO: 7622
  source 1..120: mol_type = other DNA

SEQ ID NO: 108185 - DNA, 120 bp, synthetic construct; identical to SEQ ID NO: 26616
  source 1..120: mol_type = other DNA

SEQ ID NO: 108186 - DNA, 120 bp, synthetic construct
  source 1..120: mol_type = other DNA
catgtccttcgcccactttttgatggggttgttttttttcttgtaaatttgtttgagttcattgtagattctggatattagccctttgtcagatgagtaggttgcgaaaattttctccca

SEQ ID NO: 108187 - DNA, 120 bp, synthetic construct
  source 1..120: mol_type = other DNA
tacattgattttgtatcctgagactttgctgaagttgcttatcagcttaaggagattttgggctgagacgatggggttttctagataaacaatcatgttgtctgcaaacagggacaattt

SEQ ID NO: 108188 - DNA, 120 bp, synthetic construct
  source 1..120: mol_type = other DNA
aatgtatccatttcttctagattttctagtttatttgtgtagaggtgtttgtagtattctctgatggtagtttgtatttctgtgggatcagtggtgatatcccctttatcattttttatt

SEQ ID NO: 108189 - DNA, 120 bp, synthetic construct
  source 1..120: mol_type = other DNA
tatgaatctgggtgctcctgtattgggtgcatatatatttaggataattagctcctcttgttgaattgatccctttaccattatgtaatggccttctttgtctcttttgatctttgttgg

SEQ ID NO: 108190 - DNA, 120 bp, synthetic construct
  source 1..120: mol_type = other DNA
ccccatcactttcaggtacaccaatcagacgcagatttggtcttttcacatagtcccatatttcttggaggctttgctcatttctttttattcttttttctctaaacttcccttctcgct

SEQ ID NO: 108191 - DNA, 120 bp, synthetic construct
  source 1..120: mol_type = other DNA
ccgccttgcagtttgatctcagactgctgtgctagcaatcagcgagattccgtgggcgtaggaccctctgagccaggtgtgggatatagtctcgtggtgcgctgtttttttaagccggtc

SEQ ID NO: 108192 - DNA, 120 bp, synthetic construct
  source 1..120: mol_type = other DNA
gagaaggcaagatgctagccagatcactgaggccagaaaggggtcccagccaaggagcattgaaggagcaaaggctgggagggaggacaggcctggtaggtttgtcttctggtatcaaag

SEQ ID NO: 108193 - DNA, 120 bp, synthetic construct; identical to SEQ ID NO: 22320
  source 1..120: mol_type = other DNA

SEQ ID NO: 108194 - DNA, 120 bp, synthetic construct; identical to SEQ ID NO: 22321
  source 1..120: mol_type = other DNA

SEQ ID NO: 108195 - DNA, 120 bp, synthetic construct; identical to SEQ ID NO: 22322
  source 1..120: mol_type = other DNA

SEQ ID NO: 108196 - DNA, 120 bp, synthetic construct; identical to SEQ ID NO: 10972
  source 1..120: mol_type = other DNA

SEQ ID NO: 108197 - DNA, 120 bp, synthetic construct
  source 1..120: mol_type = other DNA
acctcggcctcccaaagttctgggattacaggcgtgagccatcgcgcccggcccaaactgaaaaattttaagtaacagatgtattccagaccttgttgaataccaacacagcagacagtt

SEQ ID NO: 108198 - DNA, 120 bp, synthetic construct; identical to SEQ ID NO: 10973
  source 1..120: mol_type = other DNA

SEQ ID NO: 108199 - DNA, 120 bp, synthetic construct
  source 1..120: mol_type = other DNA
ggacctctgaagttcttctgtggaacttctgagcctctgattaagaatccttgaggtaataaaaatgtattggtctcgtattcagacagctgtggtttgaatccttattctcctgtctac

SEQ ID NO: 108200 - DNA, 120 bp, synthetic construct
  source 1..120: mol_type = other DNA
cattgtttcaggcactgtgtttactgtacactgggggtacaatggtgcctgtcctcctggagcttatgttctcatgtggaagacagaccaaaaaaaatgaatgaaacagacatataagta

SEQ ID NO: 108201 - DNA, 120 bp, synthetic construct
  source 1..120: mol_type = other DNA
ttgtaccacagcacttcagcctgggtgaccggagtcagaccttgtctcaaaaaaattttttttcttaaataaatatagcatcaatacagcattataatatgattaatactatatcaataa

SEQ ID NO: 108202 - DNA, 120 bp, synthetic construct
  source 1..120: mol_type = other DNA
gctgggggatgaggttgcagtgagctgtgattgcaccactgtactccagcctgggcaacagagcaaggccctgtctcaaaaaaaaataataatagtaattagacttaatatacacaaata

SEQ ID NO: 108203 - DNA, 120 bp, synthetic construct
  source 1..120: mol_type = other DNA
ataaattttgcataaccaaaacactataaacaaagtcaaaagacaactgacaaacttggagaaaatatttgtaacatacaacaaaaggctaatatccctaatatataaagaacttttaaa

SEQ ID NO: 108204 - DNA, 120 bp, synthetic construct
  source 1..120: mol_type = other DNA
atgaaaaagatctctatgaactgatatggagtgattcccaggacatactgttatgtgaaaacataaaccccccaaaactgtatgtagtatgctgtccttcctgtacgaaggaatggaggt

SEQ ID NO: 108205 - DNA, 120 bp, synthetic construct
  source 1..120: mol_type = other DNA
aaagtgctgagattgcaggtgtgagccactgtgcctggcctctctttttttttgagacagggtctggctctgttgcccagtctagagtacagtggtgtgatctcggcttactccaacttc

SEQ ID NO: 108206 - DNA, 120 bp, synthetic construct
  source 1..120: mol_type = other DNA
ttgaggctgcagtgagctgtgatcatgccactgcacttcagcccgggcaacagagtgagactctgtctcaaggaaaaaaaaaaaaatacaaaacacaaaaatagagaattaccatcaggc

SEQ ID NO: 108207 - DNA, 120 bp, synthetic construct; identical to SEQ ID NO: 10980
  source 1..120: mol_type = other DNA

SEQ ID NO: 108208 - DNA, 120 bp, synthetic construct; identical to SEQ ID NO: 10981
  source 1..120: mol_type = other DNA

SEQ ID NO: 108209 - DNA, 120 bp, synthetic construct
  source 1..120: mol_type = other DNA
tggccatcagtggaggattgaataaagaaaatgtggtacatatacaccatggaattctacgcagccataaaaaggaatgaaatcaggatggtgcagtggctcatgcctgtaattcccaca

SEQ ID NO: 108210 - DNA, 120 bp, synthetic construct; identical to SEQ ID NO: 10982
  source 1..120: mol_type = other DNA

SEQ ID NO: 108211 - DNA, 120 bp, synthetic construct; identical to SEQ ID NO: 10983
  source 1..120: mol_type = other DNA

SEQ ID NO: 108212 - DNA, 120 bp, synthetic construct; identical to SEQ ID NO: 10984
  source 1..120: mol_type = other DNA

SEQ ID NO: 108213 - DNA, 120 bp, synthetic construct; identical to SEQ ID NO: 10985
  source 1..120: mol_type = other DNA

SEQ ID NO: 108214 - DNA, 120 bp, synthetic construct
  source 1..120: mol_type = other DNA
attacaggcatgtgccgtcatgcccagcttatttttgtatttttagtagagacgaggtttcaccatgttggccaggctggtctcgaactcctgatctcaggtgattcacccgcctcagcc

SEQ ID NO: 108215 - DNA, 120 bp, synthetic construct
  source 1..120: mol_type = other DNA
tgtagctgaaaatgggtttatcatggtatcatgtataattgtgaaaaataaaaaacaaccagagtccctcaaaatagaggtttgctgtaataatttttaagattttggtgtatctggaca

SEQ ID NO: 108216 - DNA, 120 bp, synthetic construct
  source 1..120: mol_type = other DNA
ggctgaggcaggagaatggctagaacctgggacgtggagcttgcagtgagccgagattgcgccactgcgctccagcctgggcaacagagcgagactccatctcaaaaaaaaaaaaaaaaa

SEQ ID NO: 108217 - DNA, 120 bp, synthetic construct
  source 1..120: mol_type = other DNA
tatttttatttcttttgaaacagggtcttgctctgttgctcaggctggaatacagtggtgtgaacacagctcactgcagtctccacctcccaggtttaagtgattctccccgttcagcct

SEQ ID NO: 108218 - DNA, 120 bp, synthetic construct
  source 1..120: mol_type = other DNA
agagacgtttagtttggtgccatggagaagtcaactctgttatttactgcttacacaaaacagttatctgctgggattgaagtctagaattaggtttaaaaataaaaataaataacatca

SEQ ID NO: 108219 - DNA, 120 bp, synthetic construct
  source 1..120: mol_type = other DNA
tgcagtgagccgagattgcaccactgcactgcagactgggtaacagagcaatactctgtctcaaaaaaaaaaaaaaaaaaaaaaaaaaagactttttgagtggagggaggagagcaaggg

SEQ ID NO: 108220 - DNA, 120 bp, synthetic construct; identical to SEQ ID NO: 2291
  source 1..120: mol_type = other DNA

SEQ ID NO: 108221 - DNA, 120 bp, synthetic construct
  source 1..120: mol_type = other DNA
atctggaaaaattagtctgtaaacccttactttctaaaaataattaactagagctagtcgaagagaataaaattttccgagtgatagatagctatttatggaagcaaaaattacccagga

SEQ ID NO: 108222 - DNA, 120 bp, synthetic construct
  source 1..120: mol_type = other DNA
gagctatgtttgcaccactgcactctagcttgtgcaacagagtgagaccctgtctcaaaatcaaaacaaaaaatgcatggtatgtaacaaacaacattgatttattaatagttaaggccc

SEQ ID NO: 108223 - DNA, 120 bp, synthetic construct; identical to SEQ ID NO: 445
  source 1..120: mol_type = other DNA

SEQ ID NO: 108224 - DNA, 120 bp, synthetic construct
  source 1..120: mol_type = other DNA
gaaaatagtttgcaagatgtagtgattggtaggtaaagagagagcacaggtacattgcaaatcattgacagttgggtgaacaataagattatttattaaaacaagtaaccttgggagaaa

SEQ ID NO: 108225 - DNA, 120 bp, synthetic construct
  source 1..120: mol_type = other DNA
ttctcttccctacctcccctatctaatctattagcaagtcctaggaattttcattcagaactatatcacaaattcatccacttttttccatctccactgctaacatcttagtccagtgta

SEQ ID NO: 108226 - DNA, 120 bp, synthetic construct; identical to SEQ ID NO: 10996
  source 1..120: mol_type = other DNA

SEQ ID NO: 108227 - DNA, 120 bp, synthetic construct; identical to SEQ ID NO: 10997
  source 1..120: mol_type = other DNA

SEQ ID NO: 108228 - DNA, 120 bp, synthetic construct
  source 1..120: mol_type = other DNA
cagtttcgcaagtagctgggattacaggcatgcgccaccatgcccggctaattttgtatttttagtagatatggggtttctctatgttagttaggctggtcttgaactcccaacctcagg

SEQ ID NO: 108229 - DNA, 120 bp, synthetic construct
  source 1..120: mol_type = other DNA
gagtgcagtggcacaatctcagctcattgcaatctctacctcctgggttcaagcaaatctcctgcctcagcttcccgagtagctgggattacaggcatgtgccaccactcccggctaatt

SEQ ID NO: 108230 - DNA, 120 bp, synthetic construct
  source 1..120: mol_type = other DNA
tttccttgattataactataatgataatggattagtttatataaacctatgtttagacaagttcaagacaagcgtgtctttctataaaaagtattgaaaatgaaggaaatgagatcatgt

SEQ ID NO: 108231 - DNA, 120 bp, synthetic construct
  source 1..120: mol_type = other DNA
ccccaggaacagatggctcttcacatcctattgggaagaaatctttaaaccatttcaggtgagtcaacagatcacaccaacatctcttcacagttgttggtatgtatttcattcattaac

SEQ ID NO: 108232 - DNA, 120 bp, synthetic construct
  source 1..120: mol_type = other DNA
agaggcattcacctttctccccactagtaagatctgtgctgtttcattttacatcttttttttttggttgggggaaagggggctgatcatcaaatgagttgacaacattgggtgcatgat

SEQ ID NO: 108233 - DNA, 120 bp, synthetic construct; identical to SEQ ID NO: 10946
  source 1..120: mol_type = other DNA

SEQ ID NO: 108234 - DNA, 120 bp, synthetic construct; identical to SEQ ID NO: 10947
  source 1..120: mol_type = other DNA

SEQ ID NO: 108235 - DNA, 120 bp, synthetic construct
  source 1..120: mol_type = other DNA
ctgaggcacaagaattatttgaatccaggaggtggaggttgcagtgagccaagatcacaccactgccctccagcatggtcaacagaacgagactgtcttgaaaaaaaaaaagataaatta

SEQ ID NO: 108236 - DNA, 120 bp, synthetic construct; identical to SEQ ID NO: 10948
  source 1..120: mol_type = other DNA

SEQ ID NO: 108237 - DNA, 120 bp, synthetic construct; identical to SEQ ID NO: 10949
  source 1..120: mol_type = other DNA

SEQ ID NO: 108238 - DNA, 120 bp, synthetic construct; identical to SEQ ID NO: 10950
  source 1..120: mol_type = other DNA

SEQ ID NO: 108239 - DNA, 120 bp, synthetic construct; identical to SEQ ID NO: 10951
  source 1..120: mol_type = other DNA

SEQ ID NO: 108240 - DNA, 120 bp, synthetic construct; identical to SEQ ID NO: 10952
  source 1..120: mol_type = other DNA

SEQ ID NO: 108241 - DNA, 120 bp, synthetic construct; identical to SEQ ID NO: 10953
  source 1..120: mol_type = other DNA

SEQ ID NO: 108242 - DNA, 120 bp, synthetic construct
  source 1..120: mol_type = other DNA
gagatggggtttcgccatgttggccaggctggtcttgaactcctgacctacagtgatccgcctgccttggtctcccaaagttctgggattacaggcgtgagccactgaacctggccaaaa

SEQ ID NO: 108243 - DNA, 120 bp, synthetic construct
  source 1..120: mol_type = other DNA
ctgggactacaggcacctgccaccacgctcggctaattttttatatttttagtaaagatggggtttcaccatgttggccaggatggtctcaaactcctgaacttgtgatccacccgcctt

SEQ ID NO: 108244 - DNA, 120 bp, synthetic construct; identical to SEQ ID NO: 10954
  source 1..120: mol_type = other DNA

SEQ ID NO: 108245 - DNA, 120 bp, synthetic construct
  source 1..120: mol_type = other DNA
tgcatgccactatgcccagcttgttttttattttttgtagagacagggtctcactatgttggcaggctggtctctaactcctgggttcaggtgatcctcctgcctcggcctcccaaagtg

SEQ ID NO: 108246 - DNA, 120 bp, synthetic construct
  source 1..120: mol_type = other DNA
tgcactccagcctgggctacaagagtgagactctgtctcaaaataataataataataattctcagtaatttttgcaatttttttggtacctaaaataatttctgttattgtgttggataa

SEQ ID NO: 108247 - DNA, 120 bp, synthetic construct; identical to SEQ ID NO: 10955
  source 1..120: mol_type = other DNA

SEQ ID NO: 108248 - DNA, 120 bp, synthetic construct; identical to SEQ ID NO: 10956
  source 1..120: mol_type = other DNA

SEQ ID NO: 108249 - DNA, 120 bp, synthetic construct
  source 1..120: mol_type = other DNA
cctactgggttcaagccattctcatgcctcagcttcccgagtagctgagattacaggtgtaccaccacgactggctaatttttttgtatttttagtagggacggggtttcaccatgttgg

SEQ ID NO: 108250 - DNA, 120 bp, synthetic construct
  source 1..120: mol_type = other DNA
tctatctgtgtcatttgctggggcacccttcatgtcagcttctgattacttttcccttttctgaaaagggagaggtcttttaatttcctgtctggtgggaggaggtctgtatgccacttc

SEQ ID NO: 108251 - DNA, 120 bp, synthetic construct
  source 1..120: mol_type = other DNA
taaaatttattatttataagtatacagttcagtgacattaagtacattcacaatgttttacagccatcactactttctagttctagaacttttctatcacaccaaaaagaaaccccatac

SEQ ID NO: 108252 - DNA, 120 bp, synthetic construct
  source 1..120: mol_type = other DNA
atccaccctccttagcttcctgagtagctgggactacagatgcatgccaccacacctggctaattttttttttttttttttttaatagagacagagtctcactgtattgcctaggctggt

SEQ ID NO: 108253 - DNA, 120 bp, synthetic construct
  source 1..120: mol_type = other DNA
catctcagctgacagagccagaaaatgtatgtatttatactaccctgtatatatccacatatctataaatatttctatatgtatccatctgtatctaattaagctaaacatgagtttata

SEQ ID NO: 108254 - DNA, 120 bp, synthetic construct
  source 1..120: mol_type = other DNA
ggcagatcacaaggtcaagaggtcgagaccatcctggccaacatggtaaaaccgcgtctctactaaaaatacaaaaattagccgggtgtggcggtgcacacctgtagtcccagctactcg

SEQ ID NO: 108255 - DNA, 120 bp, synthetic construct; identical to SEQ ID NO: 10962
  source 1..120: mol_type = other DNA

SEQ ID NO: 108256 - DNA, 120 bp, synthetic construct; identical to SEQ ID NO: 10963
  source 1..120: mol_type = other DNA

SEQ ID NO: 108257 - DNA, 120 bp, synthetic construct
  source 1..120: mol_type = other DNA
tctttacaaagattaaaaaatagaaatataaaaagttagccaggcatggtggcacttgtctgtaatcccacttacttgggaggctgaggtgggaggattgtttgagctcaggaggtcaag

SEQ ID NO: 108258 - DNA, 120 bp, synthetic construct
  source 1..120: mol_type = other DNA
ttatgcaacatggatatgtatcaaaacattgaattgtggcccagcacggtggctcatgctggtaattccagcactttgtgagtctgaggtgggtggatcacctgaggtcaggagttcaag

SEQ ID NO: 108259 - DNA, 120 bp, synthetic construct; identical to SEQ ID NO: 10964
  source 1..120: mol_type = other DNA

SEQ ID NO: 108260 - DNA, 120 bp, synthetic construct; identical to SEQ ID NO: 10965
  source 1..120: mol_type = other DNA

SEQ ID NO: 108261 - DNA, 120 bp, synthetic construct; identical to SEQ ID NO: 10966
  source 1..120: mol_type = other DNA

SEQ ID NO: 108262 - DNA, 120 bp, synthetic construct
  source 1..120: mol_type = other DNA
gccattcttctgcctcagcctcccgagtagctgggactacaggggcccaccaccacgctcggctaattttttgtattttttagtggagacggggtttcaccgtgttagtcaggatggtct

SEQ ID NO: 108263 - DNA, 120 bp, synthetic construct; identical to SEQ ID NO: 10967
  source 1..120: mol_type = other DNA

SEQ ID NO: 108264 - DNA, 120 bp, synthetic construct
  source 1..120: mol_type = other DNA
ccattgcactccagcctgggtgacaaaagcgagactctgtctcaaaaaaaaaaaaaaagaaaaaaaaaaaaaaaacaaaaaaaccttgtgttttatggatctcacattcatctcagatat

SEQ ID NO: 108265 - DNA, 120 bp, synthetic construct
  source 1..120: mol_type = other DNA
ttttaccatgttgcctaggctagtcttgaactcctgacctcaggtgatccacttgcctcagcctcccgaagttctgggattacaggcgtgagccaaggctcctggcctcctgtcactttt

SEQ ID NO: 108266 - DNA, 120 bp, synthetic construct
  source 1..120: mol_type = other DNA
tctcggactcctgacctcaggtgatcctcccacttcggcctctcaaagtgcggggattacaggcgtgagccaccatgccaggccccaaccaacatttcaagataatatatttctccttcc

SEQ ID NO: 108267 - DNA, 120 bp, synthetic construct
  source 1..120: mol_type = other DNA
gtgcttagctttattccccttaaagagagtctttttttgagatggagtctcactctgttgcccaggctagagtgcagtggtgcaatctaggctcactgcaacctccgcctcctgggttca

SEQ ID NO: 108268 - DNA, 120 bp, synthetic construct; identical to SEQ ID NO: 10969
  source 1..120: mol_type = other DNA

SEQ ID NO: 108269 - DNA, 120 bp, synthetic construct; identical to SEQ ID NO: 10970
  source 1..120: mol_type = other DNA

SEQ ID NO: 108270 - DNA, 120 bp, synthetic construct; identical to SEQ ID NO: 10971
  source 1..120: mol_type = other DNA

SEQ ID NO: 108271 - DNA, 120 bp, synthetic construct; identical to SEQ ID NO: 17646
  source 1..120: mol_type = other DNA

SEQ ID NO: 108272 - DNA, 120 bp, synthetic construct
  source 1..120: mol_type = other DNA
gggagcgcctctgccccgccgccccgtctgggatgtgaggagcacctctgcccggctgcaaccccgtctgggaggtgaggagggtctctgcccggctgccccatctgagaagtgaggagc

SEQ ID NO: 108273 - DNA, 120 bp, synthetic construct
  source 1..120: mol_type = other DNA
acacccaagaatgatcaataaatactaaaaaaaaaaaaaaaaaaaaaaaaaaaaaagagtaatgtagtcaccagagggctggtgtctctgctgatgcaaagttggcgcatcaggtctcac

SEQ ID NO: 108274 - DNA, 120 bp, synthetic construct; identical to SEQ ID NO: 32923
  source 1..120: mol_type = other DNA

SEQ ID NO: 108275 - DNA, 120 bp, synthetic construct; identical to SEQ ID NO: 11154
  source 1..120: mol_type = other DNA

SEQ ID NO: 108276 - DNA, 120 bp, synthetic construct
  source 1..120: mol_type = other DNA
gctgggtcaaatggtatttccagttctagatccctgaggaatcgccacactgacttccacaatggttgaactagtttacagtcccaccaacagtgtaaaagtgttcttatttttccacat

SEQ ID NO: 108277 - DNA, 120 bp, synthetic construct; identical to SEQ ID NO: 33301
  source 1..120: mol_type = other DNA

SEQ ID NO: 108278 - DNA, 120 bp, synthetic construct; identical to SEQ ID NO: 33302
  source 1..120: mol_type = other DNA

SEQ ID NO: 108279 - DNA, 120 bp, synthetic construct; identical to SEQ ID NO: 33303
  source 1..120: mol_type = other DNA

SEQ ID NO: 108280 - DNA, 120 bp, synthetic construct; identical to SEQ ID NO: 33304
  source 1..120: mol_type = other DNA

SEQ ID NO: 108281 - DNA, 120 bp, synthetic construct; identical to SEQ ID NO: 33305
  source 1..120: mol_type = other DNA

SEQ ID NO: 108282 - DNA, 120 bp, synthetic construct
  source 1..120: mol_type = other DNA
tatttttagtacagacagggtttcggcctcctgagtagctgggattacaggcacctgccaccaggcctgggtaactttctggtagttttagtagagacagggtttcagcctcccgagtag

SEQ ID NO: 108283 - DNA, 120 bp, synthetic construct; identical to SEQ ID NO: 24828
  source 1..120: mol_type = other DNA

SEQ ID NO: 108284 - DNA, 120 bp, synthetic construct
  source 1..120: mol_type = other DNA
cgagatcgcactactgcactccagcctgggcaacagagcgagactccatctcaaaaaagaaaagaaaagaaaagaaaagaaatgcctacatcaggccaggcacagtggctcatgcctata

SEQ ID NO: 108285 - DNA, 120 bp, synthetic construct; identical to SEQ ID NO: 17360
  source 1..120: mol_type = other DNA

SEQ ID NO: 108286 - DNA, 120 bp, synthetic construct
  source 1..120: mol_type = other DNA
gcctgggtgacagagcgagaccctgtctcaaaaaaaaaaaaaaaaaaaaaagaagtgctctatttcaggagaaactggcactttctgagcctactctcccctaatgccagctctcctgct

SEQ ID NO: 108287 - DNA, 120 bp, synthetic construct; identical to SEQ ID NO: 33438
  source 1..120: mol_type = other DNA

SEQ ID NO: 108288 - DNA, 120 bp, synthetic construct; identical to SEQ ID NO: 33439
  source 1..120: mol_type = other DNA

SEQ ID NO: 108289 - DNA, 120 bp, synthetic construct; identical to SEQ ID NO: 33440
  source 1..120: mol_type = other DNA

SEQ ID NO: 108290 - DNA, 120 bp, synthetic construct
  source 1..120: mol_type = other DNA
aattttttgtattttctgtagaggtagggtttcgccatattgcccagggtggtctcgaactcttgggctcaagtgatctacccaccatggctaccgaaagtgctgagattactgatgtga

SEQ ID NO: 108291 - DNA, 120 bp, synthetic construct; identical to SEQ ID NO: 33441
  source 1..120: mol_type = other DNA

SEQ ID NO: 108292 - DNA, 120 bp, synthetic construct; identical to SEQ ID NO: 33442
  source 1..120: mol_type = other DNA

SEQ ID NO: 108293 - DNA, 120 bp, synthetic construct
  source 1..120: mol_type = other DNA
gggctcaagtgatcctgctgccttagcttcccaagtacctgggtgcctcctgagtagctgggtgccaccatatctggctaattttttacccttttttttttttttttttttttttttttt

SEQ ID NO: 108294 - DNA, 120 bp, synthetic construct; identical to SEQ ID NO: 33443
  source 1..120: mol_type = other DNA

SEQ ID NO: 108295 - DNA, 120 bp, synthetic construct; identical to SEQ ID NO: 33444
  source 1..120: mol_type = other DNA

SEQ ID NO: 108296 - DNA, 120 bp, synthetic construct
  source 1..120: mol_type = other DNA
ctcccagggtcaagcaattctctcacctcagcctcctgagtagttgggactgcaggcatgcatcaccatacctggctaatttttaattttttttttatttttattttttgtagagactgg

SEQ ID NO: 108297 - DNA, 120 bp, synthetic construct; identical to SEQ ID NO: 25531
  source 1..120: mol_type = other DNA

SEQ ID NO: 108298 - DNA, 120 bp, synthetic construct
  source 1..120: mol_type = other DNA
acccttgcactggtctgattagagatatgtgtaacagggatttcatatttatagataccatctatattttaagatatgttaggctgggcacggtggctcacgcctgtaatcccagcactt

SEQ ID NO: 108299 - DNA, 120 bp, synthetic construct; identical to SEQ ID NO: 33879
  source 1..120: mol_type = other DNA

SEQ ID NO: 108300 - DNA, 120 bp, synthetic construct
  source 1..120: mol_type = other DNA
ttttctgcaattggaatttcaggaatgaaattgcccatgagtcagaatctactattcttaaatgggacagacatacacatgagcaggtttctcatctgggctctatttcagaaatgtggt

SEQ ID NO: 108301 - DNA, 120 bp, synthetic construct
  source 1..120: mol_type = other DNA
aaaataaatcaaataaaaaaataaaaagcaattgcacagaacattaactacaggcctggcacagtggctcaagcctgtaatcccagcattttgggaggccaaggtgggcagatcacctga

SEQ ID NO: 108302 - DNA, 120 bp, synthetic construct
  source 1..120: mol_type = other DNA
gacttcaaaccatactgcaaggctacagtaaccaaaacagcgtggtactgctaccaaaacagagatatagaccaatggaacagaacagagccctcagaaataataccacacatctacaac

SEQ ID NO: 108303 - DNA, 120 bp, synthetic construct
  source 1..120: mol_type = other DNA
tggcacatatacaccatggaatactatgcagccataaaaaatgatgagttcatgtcctttgtagggacatggatgaagctggaaaccttcattctcagcaaactatcgcaaggacaaaaa

SEQ ID NO: 108304 - DNA, 120 bp, synthetic construct; identical to SEQ ID NO: 33882
  source 1..120: mol_type = other DNA

SEQ ID NO: 108305 - DNA, 120 bp, synthetic construct
  source 1..120: mol_type = other DNA
atcattctctctctgacacacacaaacacacacacatacacacacacacacacacacactaaaattcacagtctctagattcacaatctctagattgtgtggtgaggtacctacctacct

SEQ ID NO: 108306 - DNA, 120 bp, synthetic construct; identical to SEQ ID NO: 11190
  source 1..120: mol_type = other DNA

SEQ ID NO: 108307 - DNA, 120 bp, synthetic construct; identical to SEQ ID NO: 11191
  source 1..120: mol_type = other DNA

SEQ ID NO: 108308 - DNA, 120 bp, synthetic construct; identical to SEQ ID NO: 11192
  source 1..120: mol_type = other DNA

SEQ ID NO: 108309 - DNA, 120 bp, synthetic construct; identical to SEQ ID NO: 11193
  source 1..120: mol_type = other DNA

SEQ ID NO: 108310 - DNA, 120 bp, synthetic construct; identical to SEQ ID NO: 12429
  source 1..120: mol_type = other DNA

SEQ ID NO: 108311 - DNA, 120 bp, synthetic construct
  source 1..120: mol_type = other DNA
agctcaggcctgtaatcccagcactttgggaggccaaggcgggtgcatcatctgaggtcaggagttcgagacaaacctggccaacatggcgaaaccccgtctgtactaaaaatacaaaaa

SEQ ID NO: 108312 - DNA, 120 bp, synthetic construct; identical to SEQ ID NO: 13696
  source 1..120: mol_type = other DNA

SEQ ID NO: 108313 - DNA, 120 bp, synthetic construct; identical to SEQ ID NO: 13697
  source 1..120: mol_type = other DNA

SEQ ID NO: 108314 - DNA, 120 bp, synthetic construct; identical to SEQ ID NO: 11515
  source 1..120: mol_type = other DNA

SEQ ID NO: 108315 - DNA, 120 bp, synthetic construct; identical to SEQ ID NO: 11516
  source 1..120: mol_type = other DNA

SEQ ID NO: 108316 - DNA, 120 bp, synthetic construct; identical to SEQ ID NO: 11517
  source 1..120: mol_type = other DNA

SEQ ID NO: 108317 - DNA, 120 bp, synthetic construct; identical to SEQ ID NO: 11518
  source 1..120: mol_type = other DNA

SEQ ID NO: 108318 - DNA, 120 bp, synthetic construct; identical to SEQ ID NO: 11519
  source 1..120: mol_type = other DNA

SEQ ID NO: 108319 - DNA, 120 bp, synthetic construct
  source 1..120: mol_type = other DNA
tccagagaacctgagagtgatggtttcccaagcaaacaggacaggtaggaaaggagacagaggagccagggcctctcagtgccaaattgggggcccaggtgtctggagggtccccatgca

SEQ ID NO: 108320 - DNA, 120 bp, synthetic construct
  source 1..120: mol_type = other DNA
agtgagtggctcccagctcaggagcatccagggagaggaagctgtggggtcccaggatgccggctcagccctgggagggggatgggaatggcgtctgatcctctgtccacatgtgtgagc

SEQ ID NO: 108321 - DNA, 120 bp, synthetic construct
  source 1..120: mol_type = other DNA
ggtgagtgggtcggtggctgggggtcccaggcaggggctggggctgccgctgagcctctgcatctccccagggtccctgaacaaggatcccagttacagtcttcaagtgcagaggcaggt

SEQ ID NO: 108322 - DNA, 120 bp, synthetic construct; identical to SEQ ID NO: 19938
  source 1..120: mol_type = other DNA

SEQ ID NO: 108323 - DNA, 120 bp, synthetic construct; identical to SEQ ID NO: 19941
  source 1..120: mol_type = other DNA

SEQ ID NO: 108324 - DNA, 120 bp, synthetic construct; identical to SEQ ID NO: 19940
  source 1..120: mol_type = other DNA

SEQ ID NO: 108325 - DNA, 120 bp, synthetic construct; identical to SEQ ID NO: 18979
  source 1..120: mol_type = other DNA

SEQ ID NO: 108326 - DNA, 120 bp, synthetic construct; identical to SEQ ID NO: 19905
  source 1..120: mol_type = other DNA

SEQ ID NO: 108327 - DNA, 120 bp, synthetic construct; identical to SEQ ID NO: 19906
  source 1..120: mol_type = other DNA

SEQ ID NO: 108328 - DNA, 120 bp, synthetic construct
  source 1..120: mol_type = other DNA
cctgctaggcacactcacactgcacagagaggtccagggcttgctgctgggagccaagcctgttctccgctcggcaggtgtagcgccctgaatccccggcccttaccccacgcagctcca

SEQ ID NO: 108329 - DNA, 120 bp, synthetic construct; identical to SEQ ID NO: 19939
  source 1..120: mol_type = other DNA

SEQ ID NO: 108330 - DNA, 120 bp, synthetic construct; identical to SEQ ID NO: 19940
  source 1..120: mol_type = other DNA

SEQ ID NO: 108331 - DNA, 120 bp, synthetic construct; identical to SEQ ID NO: 3377
  source 1..120: mol_type = other DNA

SEQ ID NO: 108332 - DNA, 120 bp, synthetic construct
  source 1..120: mol_type = other DNA
gggcgacagagcaagactccgtctccaaaaaaaaaaaagaatgcaaatgaaactggatgatgttaagaccacattagaatcaggaaacacatgtaagcctactcagctggacccagaatt

SEQ ID NO: 108333 - DNA, 120 bp, synthetic construct
  source 1..120: mol_type = other DNA
tcactctcatggtagtttcttttgctgtgcagaagctctttagtttaattagatcccacttgtcaattttggcttttgttgccattgcttttggtgttttagacatgaagtccttgccca

SEQ ID NO: 108334 - DNA, 120 bp, synthetic construct; identical to SEQ ID NO: 12375
  source 1..120: mol_type = other DNA

SEQ ID NO: 108335 - DNA, 120 bp, synthetic construct
  source 1..120: mol_type = other DNA
atatttcatagctctgtcccctcctctaagcaataataacccagtagcactaacgagcatccctgaggcccaaattctggtctttaaatgctattttccatttaaagaaaccagagttgg

SEQ ID NO: 108336 - DNA, 120 bp, synthetic construct
  source 1..120: mol_type = other DNA
gagctcacatcaaaaggacacaggagtcagcctgaagaggctccaggctcccactggctaagtggaataatttcagtttcaaaagaagaatgacttaatggactgaagcacataaaatat

SEQ ID NO: 108337 - DNA, 120 bp, synthetic construct; identical to SEQ ID NO: 12376
  source 1..120: mol_type = other DNA

SEQ ID NO: 108338 - DNA, 120 bp, synthetic construct
  source 1..120: mol_type = other DNA
ttatactttaagttttagggtacatgtgcacattgtgcaggttagttacatatgtatacatgtgccatgctggtgcgctgcgcccactaactcatcatctagcattaggtatatctccca

SEQ ID NO: 108339 - DNA, 120 bp, synthetic construct
  source 1..120: mol_type = other DNA
cttcgcccactttttgatggggttgtttgtttttttcttgtaaatttgtttgagttcattgtagattctggatattagccctttgtcagatgagtaggttgcgaaaattttctcccattt

SEQ ID NO: 108340 - DNA, 120 bp, synthetic construct
  source 1..120: mol_type = other DNA
attgaatatcctttatttccttttcctgcctaattgccctggccagaacttccaacactatgttgaataggagtggtgagagagggcatccctgtcttgtgccagttttcaaagggaatg

SEQ ID NO: 108341 - DNA, 120 bp, synthetic construct
  source 1..120: mol_type = other DNA
tgattttttgaagggttttttgtgtctctatttccttcagttctgctctgaatttagttatttcttgccttctgctagcttttgaatgtgtttgctcttgcttttctagttcttttaatt

SEQ ID NO: 108342 - DNA, 120 bp, synthetic construct
  source 1..120: mol_type = other DNA
tggtgattttgctcgttagttgatgcagtttcttcctagtctcgatggtctttacattttggcatgattttgcagcggctggtactggttgttcctttccatgtttagcgcttccttcag

SEQ ID NO: 108343 - DNA, 120 bp, synthetic construct
  source 1..120: mol_type = other DNA
acattcttctaattttttttcaaagttttcaacttctttgcctttggtttgaatgtcctcccatagctcagagtaatttgatcgtctgaagccttcttctctcagctcgtcaaagtcatt

SEQ ID NO: 108344 - DNA, 120 bp, synthetic construct
  source 1..120: mol_type = other DNA
gcacccactggcctgcgcccactgtctggcactccctagtgagatgaacccggtacctcagatggaaatgcagaaatcacccatcttctgcgtcggtcacgctgggagctgtagaccgga

SEQ ID NO: 108345 - DNA, 120 bp, synthetic construct; identical to SEQ ID NO: 27052
  source 1..120: mol_type = other DNA

SEQ ID NO: 108346 - DNA, 120 bp, synthetic construct
  source 1..120: mol_type = other DNA
ggtgaggagcatctctgcccggccaacccgtctgagaagtgaggagaccctctgccccacaaccaccccgactgagaagtgaggagcccctccgcccggcagccaccccgtctgggaagt

SEQ ID NO: 108347 - DNA, 120 bp, synthetic construct; identical to SEQ ID NO: 27053
  source 1..120: mol_type = other DNA

SEQ ID NO: 108348 - DNA, 120 bp, synthetic construct; identical to SEQ ID NO: 27054
  source 1..120: mol_type = other DNA

SEQ ID NO: 108349 - DNA, 120 bp, synthetic construct
  source 1..120: mol_type = other DNA
gcgggaacacttttacactgttggtgggactgtaaactagttcaaccattgtggaagtcagtgtggcgattcctcagggatctagaactagaaataccatttgacccagccatcccatta

SEQ ID NO: 108350 - DNA, 120 bp, synthetic construct; identical to SEQ ID NO: 27055
  source 1..120: mol_type = other DNA

SEQ ID NO: 108351 - DNA, 120 bp, synthetic construct
  source 1..120: mol_type = other DNA
ctgcccggccgccaccccgtccgagaagtgaggagcgtctctgcctggccgcccatcatctgggatgtgaggagcccctctgcccggctgcccagtctgggaagtgaggagcgcctcttc

SEQ ID NO: 108352 - DNA, 120 bp, synthetic construct
  source 1..120: mol_type = other DNA
attttcttttcttttttttttttttattgatcattctggggtgtttctcgcagagggggatttggcagggtcataggacaatagtggagggaaggtcagcagataaacaagtgaacaaag

SEQ ID NO: 108353 - DNA, 120 bp, synthetic construct
  source 1..120: mol_type = other DNA
ctcccgagtagctgggactacaggtgcacaccaccacacctggctaattttttgaatttttagtagagatggggtttcaccatattggccagtctggtctcaaactcctgacctcatgat

SEQ ID NO: 108354 - DNA, 120 bp, synthetic construct
  source 1..120: mol_type = other DNA
tgaggagcccctccgcccagcagccaccccgtctgagaagtgaggagcccctccgcccggcagccaccccgtctgggaagtgaggagcgtctccgcccggcagccaccccgtccggaagg

SEQ ID NO: 108355 - DNA, 120 bp, synthetic construct
  source 1..120: mol_type = other DNA
ctccccctctgcgagaaacacccaagaatgatcaataaaaaaaaataaaaagaaaaaaaataaaaaagaaaaaaaaagaaaaaaaataaaccaaaagaaactatccccgaaaagacctaa

SEQ ID NO: 108356 - DNA, 120 bp, synthetic construct; identical to SEQ ID NO: 28148
  source 1..120: mol_type = other DNA

SEQ ID NO: 108357 - DNA, 120 bp, synthetic construct
  source 1..120: mol_type = other DNA
aaaccacccccatgatccaatcacctcccaccagtccccacctctaatatcggggattacaattcaacatgagacttgggtggggacgcagatccaaaccataccagcaacccagcaatc

SEQ ID NO: 108358 - DNA, 120 bp, synthetic construct
  source 1..120: mol_type = other DNA
acaattcttcttcctggggaagccaaaagattggacacccctgctctaaatctcagtttaaactcctgagagacacatattgttggtgaaatcgcaaactggtacaatttaggagggtaa

SEQ ID NO: 108359 - DNA, 120 bp, synthetic construct
  source 1..120: mol_type = other DNA
tggtgagtgagcgtcgcctcgtttgggggcgcgcgtcttcgcgaccctcggctgggcccgccgcccgcttcccgcccctggcgcctcacagctgcagccacttcccgccttgcctccttc

SEQ ID NO: 108360 - DNA, 120 bp, synthetic construct
  source 1..120: mol_type = other DNA
tctagctggtttacagtccctaaacctccattgggaaccccttctgtgcccgaggtacagtgccaagtgctagatgatcactatagaatgaatagcatgcaaaactagttaatatatatt

SEQ ID NO: 108361 - DNA, 120 bp, synthetic construct
  source 1..120: mol_type = other DNA
tcacttgtgaccactcaagcaagcattttgatcttgagcctttgagttgaatcgaaatgaggggcaagttccagagagcagtacccaatttaaatcgtgcttctccagatatttattcca

SEQ ID NO: 108362 - DNA, 120 bp, synthetic construct
  source 1..120: mol_type = other DNA
gtttctaaattttctctaagaacccagtgaaaaattccctcataatctttgtactcttgttcatttgtttattaagttcctcttagaagttagattgctgagtcaaaaggtgtgccctac

SEQ ID NO: 108363 - DNA, 120 bp, synthetic construct
  source 1..120: mol_type = other DNA
tgcagttgtgagttaatattgcatctttacatttctgtcaactgcagatgtcaccatctatggtcagtaagtgattgtgtgcataaattttgataaagtttaactttgtataatagattt

SEQ ID NO: 108364 - DNA, 120 bp, synthetic construct; identical to SEQ ID NO: 1448
  source 1..120: mol_type = other DNA

SEQ ID NO: 108365 - DNA, 120 bp, synthetic construct; identical to SEQ ID NO: 1449
  source 1..120: mol_type = other DNA

SEQ ID NO: 108366 - DNA, 120 bp, synthetic construct
  source 1..120: mol_type = other DNA
ctcccaaagtgctaggattacaggcatgagccaccgcacccggccaacatttcttactcatttgttaaatctacttatatattaaagattgttataggtggaactgtatctcctaaaaag

SEQ ID NO: 108367 - DNA, 120 bp, synthetic construct
  source 1..120: mol_type = other DNA
agctctatttgtcaaggttttttttttttttttgagacgagtctcgctctgtcacccaggctggagtgcagtggcacgatctcgggtcactgcaacctccacctcccggattcaagcaat

SEQ ID NO: 108368 - DNA, 120 bp, synthetic construct
  source 1..120: mol_type = other DNA
tcccatccctgtgtccatgtgttctcattgttcaacttccacttataagtgagaacatgcagtgtttggttttctgttcctgtgttagtttgctgagaatgatggtttccagcttcatcc

SEQ ID NO: 108369 - DNA, 120 bp, synthetic construct
  source 1..120: mol_type = other DNA
aaggggcccggtttcagttttctgcatatggctagccagttttcccaacaccatttattaagtagggaattctttccccattgcttgtttttgtcaggtttgtcaaagatcagatggttg

SEQ ID NO: 108370 - DNA, 120 bp, synthetic construct
  source 1..120: mol_type = other DNA
ttgagatacgtttcatcaacacctagtttatggagagtttttagcatgaagtggtgttgaattctatcaaaggccttttctgcatctattgagataatcatgtggtttctgtcattggtt

SEQ ID NO: 108371 - DNA, 120 bp, synthetic construct
  source 1..120: mol_type = other DNA
tggtggcaggcatctgtagtcccagctactcaggaggctgaggcgggagaatggtgtgaacccgggaggtggagcttgcagtgagccgagatcatgccactgcactccagcctgagcaac

SEQ ID NO: 108372 - DNA, 120 bp, synthetic construct
  source 1..120: mol_type = other DNA
gtaggtctgtaagaacttgctttatgaatcgggatgctcctgtattgggtgcatatatatttaggatagttagcgcttcttgttgcattaatccctttaccattatgtaatggccttctt

SEQ ID NO: 108373 - DNA, 120 bp, synthetic construct
  source 1..120: mol_type = other DNA
tcacttatgaagcatagtctggctggatatgaaattctgggttgaaaattattttcttttcttttttttttttttattgatcattctggggtgtttctcgcagagggggatttggcaggg

SEQ ID NO: 108374 - DNA, 120 bp, synthetic construct
  source 1..120: mol_type = other DNA
acgatgggcggccgggcagagacgctcctcacttcctagatgggatggcagccgggaagaggcgctcctcacttcctagatgggatggcggccgggcagagacgctcctcactttccaga

SEQ ID NO: 108375 - DNA, 120 bp, synthetic construct; identical to SEQ ID NO: 27268
  source 1..120: mol_type = other DNA

SEQ ID NO: 108376 - DNA, 120 bp, synthetic construct; identical to SEQ ID NO: 27269
  source 1..120: mol_type = other DNA

SEQ ID NO: 108377 - DNA, 120 bp, synthetic construct
  source 1..120: mol_type = other DNA
gtggcgcacattcgtaaccccagctactatggaggctgagaaaggagaatcgcttgaacccggaggcagaagttgtagtgagccaagatcgtgccactgcactccagcctgggtgacaga

SEQ ID NO: 108378 - DNA, 120 bp, synthetic construct; identical to SEQ ID NO: 27270
  source 1..120: mol_type = other DNA

SEQ ID NO: 108379 - DNA, 120 bp, synthetic construct
  source 1..120: mol_type = other DNA
agactgcattagattgtttctttgggccgtataattatttgttgcatggggttgtcctatgcactgtaggatatttaatagcatctctgacctctacccgctagatgcctgccagtagta

SEQ ID NO: 108380 - DNA, 120 bp, synthetic construct; identical to SEQ ID NO: 1451
  source 1..120: mol_type = other DNA

SEQ ID NO: 108381 - DNA, 120 bp, synthetic construct
  source 1..120: mol_type = other DNA
aaaaaaaaaaattataaacattatttttaaattgtaagtaggccgggtgtggtggctcacgcctataatcccaacactttgggaggctgaggcaggtggatcacttgaggtcaggagttc

SEQ ID NO: 108382 - DNA, 120 bp, synthetic construct; identical to SEQ ID NO: 1452
  source 1..120: mol_type = other DNA

SEQ ID NO: 108383 - DNA, 120 bp, synthetic construct
  source 1..120: mol_type = other DNA
caatttgggtagaacaaatgctttttaaaatttaaatttttgttataaaaggtgtatgatggctgggcacggtggctcacacctgtattcccagccagctctttggaaggccgaggcagg

SEQ ID NO: 108384 - DNA, 120 bp, synthetic construct
  source 1..120: mol_type = other DNA
acctaatggtgaaaaacttgaagcattcctactaagatcagggataaggcaaggatgtctcctcactactccttttcagcattgtactggaagtcctagctaatgtgacaaaaaaagaaa

SEQ ID NO: 108385 - DNA, 120 bp, synthetic construct
  source 1..120: mol_type = other DNA
tagttcattttgcattgctgtaagggaatacctgaggctgagtcatttataaagaaaagaggtttatttggctcataattctgcaggctgaacaagaagcatggcaccagcatctgcttc

SEQ ID NO: 108386 - DNA, 120 bp, synthetic construct
  source 1..120: mol_type = other DNA
ctcagctctggagggcagcagccttgttctactaaggagtagcccagtagggactctatgggggctccaaccccacatttccccttggcactgccctagtagagtctctctgtgggggct

SEQ ID NO: 108387 - DNA, 120 bp, synthetic construct
  source 1..120: mol_type = other DNA
ctcctaggacctaattgagggagtttaacaaggtcactggatagaaattcaacacaagccttgaccaggaattttttccttcaggagtatagccaacttagaaggactctccacttcaaa

SEQ ID NO: 108388 - DNA, 120 bp, synthetic construct
  source 1..120: mol_type = other DNA
taccagagaggaatctattcttacaagatagctgcatagggtgatatctgtgactttgcggcttttttaactgattgcattccccagtcatttgcaacttgggtggcagaaagctgagat

SEQ ID NO: 108389 - DNA, 120 bp, synthetic construct
  source 1..120: mol_type = other DNA
ttacccaagtagtacagcagactgaaagcaagataattacaaagaaaaccacttattgactgtccagagaaaaatggtatattgtacatagggaacaacagtgcagttaacacctcactt

SEQ ID NO: 108390 - DNA, 120 bp, synthetic construct
  source 1..120: mol_type = other DNA
tggcctcccaaagtgctaggactacaagcctgagccaccatgctgtgccaagaagtaattcaatacattttctaaaattttctaaagtacactggaataaattgaatttatacactgtag

SEQ ID NO: 108391 - DNA, 120 bp, synthetic construct
  source 1..120: mol_type = other DNA
gtgtgttaggacatgagtctcagtgtatttcaaaagattaaaatcttacagagtatgttttctgaccataatgaaagtaaatttgaaccacatgataataaaatgactacatattaaaaa

SEQ ID NO: 108392 - DNA, 120 bp, synthetic construct
  source 1..120: mol_type = other DNA
aagagatcctcccgcctaggcctcccaaagtgctgggattacaggcatgcaccactgtgcccaggataaatatgcaaaaattcttaacaaaatatcgattcactgaagcccatcaatata

SEQ ID NO: 108393 - DNA, 120 bp, synthetic construct
  source 1..120: mol_type = other DNA
tgctaaataaatttgaaaggcagtctaggccacaaggactgcaattcctgcacaagtcctggtgctgtgttgggctcagagccagtggatttggggtccacacgatctagtgagacacca

SEQ ID NO: 108394 - DNA, 120 bp, synthetic construct
  source 1..120: mol_type = other DNA
accaaaggtagataaaaccacaaagatggggagaaaccagagcagaaaagctgaaaaaaaaatttttttttatactttaagttttagggtacatgtgcacaatgtgcaggttagttacat

SEQ ID NO: 108395 - DNA, 120 bp, synthetic construct
  source 1..120: mol_type = other DNA
cttttggtgttttagatatgacgtccttgcccttgcctatgtcctgaatggtaatgcctaggttttcttctagggtttttatggttttaggtctaacatttaagtctttaatccatcttg

SEQ ID NO: 108396 - DNA, 120 bp, synthetic construct
  source 1..120: mol_type = other DNA
ccaacactgtgttgaagaggagtggtgagagagggcatccctgtcttgtgccagttttcaaagggaatgcttccagtttttgcccattcagtatgatattggctgtgggtttgtcataga

SEQ ID NO: 108397 - DNA, 120 bp, synthetic construct
  source 1..120: mol_type = other DNA
cccagagcgtgatattcccctttctgtgtccatgtgatctcattgttcaattcccacctatgagtgagaatatgcggtgtttggttttttgttcttgcgatagtttactgagaatgatga

SEQ ID NO: 108398 - DNA, 120 bp, synthetic construct
  source 1..120: mol_type = other DNA
ctagccggttttcccagcaccatttattaactagggaatcctttccccattgcttgtttttctcaggtttgtcaaagatcagatggttgtagatatgcggtgttatttctgagggctctg

SEQ ID NO: 108399 - DNA, 120 bp, synthetic construct
  source 1..120: mol_type = other DNA
tgctggattacatttattgttttgcatatattgaaccagtcttgcatcccagggatgaagcccacttgatcatggtggataagctttttgatgtgctgctggattcggtttgccagtatt

SEQ ID NO: 108400 - DNA, 120 bp, synthetic construct
  source 1..120: mol_type = other DNA
gagttttgagtgagattcttaatcctgagttctagtttgattgcactgtggtctgagagatagtttgttgtaatctctgttcttttacattttctgaggagagctttacttccaagtatg

SEQ ID NO: 108401 - DNA, 120 bp, synthetic construct
  source 1..120: mol_type = other DNA
tctctgtaaaggattttatttctctttcacttatgaagcttcgtttggctggatatgaaattctgggttgaaaattctttaagaatgttgaatactggcccccagtctcttccggcttgt

SEQ ID NO: 108402 - DNA, 120 bp, synthetic construct
  source 1..120: mol_type = other DNA
aatagcctaccaaccaaaaaaagtccaggaccagacggattcacagccaaattctaaagtccaggaccagatggattcacagccaaattctaccagaggtacaagggggagctggtacca

SEQ ID NO: 108403 - DNA, 120 bp, synthetic construct
  source 1..120: mol_type = other DNA
tggccatactgcccaaggtaatttatagattcaatgccatctccatgaagctaccaatgactttcttctcagaattggaaaaaaactactttaaagttcatatggaagcagaaaagagcc

SEQ ID NO: 108404 - DNA, 120 bp, synthetic construct; identical to SEQ ID NO: 27283
  source 1..120: mol_type = other DNA

SEQ ID NO: 108405 - DNA, 120 bp, synthetic construct
  source 1..120: mol_type = other DNA
gcccagctgattttttgtatttttagtagagacggggtttcacagtgttagccagaatggcctcgatctcctgacctcgtgatccacccgcctcggcctcccaaagtgctaggattacag

SEQ ID NO: 108406 - DNA, 120 bp, synthetic construct
  source 1..120: mol_type = other DNA
gaaaaggcagcttatgggatgggagaaaatagttataaatcatatatctgatgagggttaatatccagaatatataaagaactccagctccctctccctctccctctccctctcatgcgg

SEQ ID NO: 108407 - DNA, 120 bp, synthetic construct
  source 1..120: mol_type = other DNA
gagtcatcaccaatccctaatctcaagtaatcagggacacaaacactgcggaggccgcagggtcctctgcctaggaaaaccagagacctttgttcacttgtttatctgctgaccttccct

SEQ ID NO: 108408 - DNA, 120 bp, synthetic construct
  source 1..120: mol_type = other DNA
acggccaaggggagtggcatcacggatcagtacggcccctccggccaaccggatcccaagaaggcggaggaactcagacttcacgccccctccctgccgcgccctgaatctacacgcggg

SEQ ID NO: 108409 - DNA, 120 bp, synthetic construct; identical to SEQ ID NO: 19623
  source 1..120: mol_type = other DNA

SEQ ID NO: 108410 - DNA, 120 bp, synthetic construct; identical to SEQ ID NO: 19624
  source 1..120: mol_type = other DNA

SEQ ID NO: 108411 - DNA, 120 bp, synthetic construct; identical to SEQ ID NO: 12828
  source 1..120: mol_type = other DNA

SEQ ID NO: 108412 - DNA, 120 bp, synthetic construct; identical to SEQ ID NO: 12829
  source 1..120: mol_type = other DNA

SEQ ID NO: 108413 - DNA, 120 bp, synthetic construct
  source 1..120: mol_type = other DNA
ctcaggtaactcccctgcatcggcctcccaaagtgctgggactacaggcatgagccagcgtgccggccttcctttttttttttttttttttaattaaaacattagttaattcttattaaa

SEQ ID NO: 108414 - DNA, 120 bp, synthetic construct
  source 1..120: mol_type = other DNA
tgatttatagtcatttgggtatatacccagtaatgggatggctgggtcaaatggtatttctagttctagatccctgaggaatcgccacactgacttccacaatggttgaaccagtttaca

SEQ ID NO: 108415 - DNA, 120 bp, synthetic construct
  source 1..120: mol_type = other DNA
tttgaagtcaggtagtgtgatgcctccagctttgttcttttggcttagggttgacttggcgatgcgggctcttttttggttccatatgaactttaaagtagttttttccaattctgtgaa

SEQ ID NO: 108416 - DNA, 120 bp, synthetic construct; identical to SEQ ID NO: 14454
  source 1..120: mol_type = other DNA

SEQ ID NO: 108417 - DNA, 120 bp, synthetic construct
  source 1..120: mol_type = other DNA
tcctttaaacacacttttaaaatacagtttttaaaattaaatagaaacatggtctcactgtgttgcccaggctggtctggaactcctgacctcaagtgatccttctccgttggcctcctg

SEQ ID NO: 108418 - DNA, 120 bp, synthetic construct
  source 1..120: mol_type = other DNA
ccagcctgactggcataacatcacatgacagataaaggaggaaatggaaatattttacgttaaaatatgttctttcacgaggtcaggagatcgagaccatcctggctaacatggtgaaac

SEQ ID NO: 108419 - DNA, 120 bp, synthetic construct
  source 1..120: mol_type = other DNA
actgtgcctcaggccatggtcactcatgtttggttcagagtaaatcttttcaagtattttacagagtttggcgttcttcatcaatagctaactccaggtagacagtatcaccgtagaatt

SEQ ID NO: 108420 - DNA, 120 bp, synthetic construct
  source 1..120: mol_type = other DNA
atgagctgagatcgtgccattgcactccagcctgggcgacggaggtagactccatctcaaaaaaataagaataaataaataaaataacatgtaaaacaaggctctcttccctgttcttgg

SEQ ID NO: 108421 - DNA, 120 bp, synthetic construct; identical to SEQ ID NO: 9450
  source 1..120: mol_type = other DNA

SEQ ID NO: 108422 - DNA, 120 bp, synthetic construct; identical to SEQ ID NO: 9451
  source 1..120: mol_type = other DNA

SEQ ID NO: 108423 - DNA, 120 bp, synthetic construct; identical to SEQ ID NO: 9452
  source 1..120: mol_type = other DNA

SEQ ID NO: 108424 - DNA, 120 bp, synthetic construct; identical to SEQ ID NO: 4456
  source 1..120: mol_type = other DNA

SEQ ID NO: 108425 - DNA, 120 bp, synthetic construct
  source 1..120: mol_type = other DNA
ttctagaaggtaagggccttgcaaggggtgactctcactctgctcatgttttccctcacatgctgactttttttttttttttttttttaagatggactttcgctgttattgcccaggctg

SEQ ID NO: 108426 - DNA, 120 bp, synthetic construct
  source 1..120: mol_type = other DNA
gcaaattttaaaaaaaaaatttttgtagagatagggtctcgttatgttatccaggctggtctcgaactaccaccctcaagggatcctcttgcctcagcctcccaaagggttgaaattgat

SEQ ID NO: 108427 - DNA, 120 bp, synthetic construct; identical to SEQ ID NO: 19726
  source 1..120: mol_type = other DNA

SEQ ID NO: 108428 - DNA, 120 bp, synthetic construct
  source 1..120: mol_type = other DNA
cggagacgctcctcacttcccagacggggtggttgctgggcggagggtctcctcacttctcagacggggcagctgccgggcggaggggctcctcacttctcagatggggcggttgccagg

SEQ ID NO: 108429 - DNA, 120 bp, synthetic construct
  source 1..120: mol_type = other DNA
aggtagctgggactacaggcgcccgccaccatgctcagctaatttttgcctttttaatagagatagggtttcgccatgttggccaggctagtctcgaactcctggcctcaagtgatccac

SEQ ID NO: 108430 - DNA, 120 bp, synthetic construct; identical to SEQ ID NO: 19727
  source 1..120: mol_type = other DNA

SEQ ID NO: 108431 - DNA, 120 bp, synthetic construct; identical to SEQ ID NO: 19728
  source 1..120: mol_type = other DNA

SEQ ID NO: 108432 - DNA, 120 bp, synthetic construct; identical to SEQ ID NO: 19729
  source 1..120: mol_type = other DNA

SEQ ID NO: 108433 - DNA, 120 bp, synthetic construct; identical to SEQ ID NO: 19730
  source 1..120: mol_type = other DNA

SEQ ID NO: 108434 - DNA, 120 bp, synthetic construct; identical to SEQ ID NO: 19731
  source 1..120: mol_type = other DNA

SEQ ID NO: 108435 - DNA, 120 bp, synthetic construct
  source 1..120: mol_type = other DNA
tataattctagcactgtgggaggctgaggtgggaggattgcttgaggctaggagttcgaaaccagcgtgggcaacctagtgggactctgcctctacaaaaaataaaaaaatatagctagg

SEQ ID NO: 108436 - DNA, 120 bp, synthetic construct
  source 1..120: mol_type = other DNA
agaatcgctagaacctgggaggcagaggttgcagtgagacaagattgtgccactgcactacagcctgggcaacaagagtgaaactctttctcaaaaaaaagacaaaaggcactttgggag

SEQ ID NO: 108437 - DNA, 120 bp, synthetic construct; identical to SEQ ID NO: 19732
  source 1..120: mol_type = other DNA

SEQ ID NO: 108438 - DNA, 120 bp, synthetic construct
  source 1..120: mol_type = other DNA
gagcagagaaatggcattaagggagttgggagggagagaaaaatggggatcttgttttttgtcgtcttgaaactgtgttgtaggcagtggggtctctctgtacctcccacccttgaggag

SEQ ID NO: 108439 - DNA, 120 bp, synthetic construct; identical to SEQ ID NO: 22302
  source 1..120: mol_type = other DNA

SEQ ID NO: 108440 - DNA, 120 bp, synthetic construct; identical to SEQ ID NO: 22303
  source 1..120: mol_type = other DNA

SEQ ID NO: 108441 - DNA, 120 bp, synthetic construct
  source 1..120: mol_type = other DNA
ctggtttgtgacagtaactcaataataacaccctccattctttgagcaatgatcaggtgtggtggtaggtgctcctttccatgaattgatgtctcccccttttacaaataagggaagttg

SEQ ID NO: 108442 - DNA, 120 bp, synthetic construct
  source 1..120: mol_type = other DNA
cactgccattaaaatgttagtaagtggctggcacatctaggggcatgggaggtgggcagttaggaatttaggttccaggcatttcaagccctggagcaagagtagagctggatgagtgga

SEQ ID NO: 108443 - DNA, 120 bp, synthetic construct; identical to SEQ ID NO: 22289
  source 1..120: mol_type = other DNA

SEQ ID NO: 108444 - DNA, 120 bp, synthetic construct; identical to SEQ ID NO: 22290
  source 1..120: mol_type = other DNA

SEQ ID NO: 108445 - DNA, 120 bp, synthetic construct; identical to SEQ ID NO: 22291
  source 1..120: mol_type = other DNA

SEQ ID NO: 108446 - DNA, 120 bp, synthetic construct; identical to SEQ ID NO: 22292
  source 1..120: mol_type = other DNA

SEQ ID NO: 108447 - DNA, 120 bp, synthetic construct; identical to SEQ ID NO: 22293
  source 1..120: mol_type = other DNA

SEQ ID NO: 108448 - DNA, 120 bp, synthetic construct; identical to SEQ ID NO: 22294
  source 1..120: mol_type = other DNA

SEQ ID NO: 108449 - DNA, 120 bp, synthetic construct; identical to SEQ ID NO: 22295
  source 1..120: mol_type = other DNA

SEQ ID NO: 108450 - DNA, 120 bp, synthetic construct; identical to SEQ ID NO: 22296
  source 1..120: mol_type = other DNA

SEQ ID NO: 108451 - DNA, 120 bp, synthetic construct; identical to SEQ ID NO: 22297
  source 1..120: mol_type = other DNA

SEQ ID NO: 108452 - DNA, 120 bp, synthetic construct; identical to SEQ ID NO: 22298
  source 1..120: mol_type = other DNA

SEQ ID NO: 108453 - DNA, 120 bp, synthetic construct; identical to SEQ ID NO: 22299
  source 1..120: mol_type = other DNA

SEQ ID NO: 108454 - DNA, 120 bp, synthetic construct; identical to SEQ ID NO: 22300
  source 1..120: mol_type = other DNA

SEQ ID NO: 108455 - DNA, 120 bp, synthetic construct; identical to SEQ ID NO: 22301
  source 1..120: mol_type = other DNA

SEQ ID NO: 108456 - DNA, 120 bp, synthetic construct; identical to SEQ ID NO: 22294
  source 1..120: mol_type = other DNA

SEQ ID NO: 108457 - DNA, 120 bp, synthetic construct; identical to SEQ ID NO: 22295
  source 1..120: mol_type = other DNA

SEQ ID NO: 108458 - DNA, 120 bp, synthetic construct; identical to SEQ ID NO: 11512
  source 1..120: mol_type = other DNA

SEQ ID NO: 108459 - DNA, 120 bp, synthetic construct; identical to SEQ ID NO: 19025
  source 1..120: mol_type = other DNA

SEQ ID NO: 108460 - DNA, 120 bp, synthetic construct; identical to SEQ ID NO: 18318
  source 1..120: mol_type = other DNA

SEQ ID NO: 108461 - DNA, 120 bp, synthetic construct; identical to SEQ ID NO: 13552
  source 1..120: mol_type = other DNA

SEQ ID NO: 108462 - DNA, 120 bp, synthetic construct; identical to SEQ ID NO: 18262
  source 1..120: mol_type = other DNA

SEQ ID NO: 108463 - DNA, 120 bp, synthetic construct; identical to SEQ ID NO: 18263
  source 1..120: mol_type = other DNA

SEQ ID NO: 108464 - DNA, 120 bp, synthetic construct; identical to SEQ ID NO: 18264
  source 1..120: mol_type = other DNA

SEQ ID NO: 108465 - DNA, 120 bp, synthetic construct; identical to SEQ ID NO: 18265
  source 1..120: mol_type = other DNA

SEQ ID NO: 108466 - DNA, 120 bp, synthetic construct; identical to SEQ ID NO: 28973
  source 1..120: mol_type = other DNA

SEQ ID NO: 108467 - DNA, 120 bp, synthetic construct; identical to SEQ ID NO: 28974
  source 1..120: mol_type = other DNA

SEQ ID NO: 108468 - DNA, 120 bp, synthetic construct
  source 1..120: mol_type = other DNA
tctcgtgcttcgtggtgggaggcgagaagcgcctgtgtctgccgcagattctcaactcggtgctgcgcgacttctcgctgcagcagatcaacgcggtgtgcgacgagctccacatctact

SEQ ID NO: 108469 - DNA, 120 bp, synthetic construct; identical to SEQ ID NO: 6913
  source 1..120: mol_type = other DNA

SEQ ID NO: 108470 - DNA, 120 bp, synthetic construct; identical to SEQ ID NO: 6914
  source 1..120: mol_type = other DNA

SEQ ID NO: 108471 - DNA, 120 bp, synthetic construct
  source 1..120: mol_type = other DNA
tggctaatgaggtcaggagttaaagattagcctggctgatatggtgaaaccacgtatctactaaaaaaaaaaaaatacaaaaattagccggcattgtggcaggtgcctgtagtccccagc

SEQ ID NO: 108472 - DNA, 120 bp, synthetic construct
  source 1..120: mol_type = other DNA
gtggcggagatcttcagagagaggacgcccgagaggacaggcggtggcggagatcttcatagagaggacgcccgagaagacaggcggtggcggagatcttcagagagagagatgcccgag

SEQ ID NO: 108473 - DNA, 120 bp, synthetic construct
  source 1..120: mol_type = other DNA
gcggtggcggagatcttcagagagaggacgcctgagaagacaggcggtggtggagatcttcagagagaggacgcctgagaagacaggcagtggcggagatcttcagaaagaaagcccaga

SEQ ID NO: 108474 - DNA, 120 bp, synthetic construct
  source 1..120: mol_type = other DNA
cagaagggggaagaggtgtccgctgtgtgggctgctgactcctctgtgtgtgaggcccttcatctaagtgattgtgtattcagtttaattctcattatatttctatactgaaagaagatt

SEQ ID NO: 108475 - DNA, 120 bp, synthetic construct
  source 1..120: mol_type = other DNA
acagctgtgcgtgcgcccaccacagcccctccccagaccggccacacacgggcggctgggaccccctcgctttcaggccatcgtgggtgggggtgctgtcacaggtcagattgtgggcct

SEQ ID NO: 108476 - DNA, 120 bp, synthetic construct; identical to SEQ ID NO: 10128
  source 1..120: mol_type = other DNA

SEQ ID NO: 108477 - DNA, 120 bp, synthetic construct; identical to SEQ ID NO: 10129
  source 1..120: mol_type = other DNA

SEQ ID NO: 108478 - DNA, 120 bp, synthetic construct; identical to SEQ ID NO: 10130
  source 1..120: mol_type = other DNA

SEQ ID NO: 108479 - DNA, 120 bp, synthetic construct
  source 1..120: mol_type = other DNA
tgcaatgagccaagatcaagtcactgcactccagcctgggtgacagagggagactccctctcaaaaaaaaaaaaaaaaaaaaaaaaaaaaaaggaccgtgggttgtatgatgcagtgatg

SEQ ID NO: 108480 - DNA, 120 bp, synthetic construct; identical to SEQ ID NO: 13802
  source 1..120: mol_type = other DNA

SEQ ID NO: 108481 - DNA, 120 bp, synthetic construct; identical to SEQ ID NO: 13803
  source 1..120: mol_type = other DNA

SEQ ID NO: 108482 - DNA, 120 bp, synthetic construct
  source 1..120: mol_type = other DNA
ggaaggtttttaaatttatttatttctctctctctctctgtctctgtctccctttctctctctcttttttttttttttggacagagtcttgttctgtcgcccagggtggagtgcagtggc

SEQ ID NO: 108483 - DNA, 120 bp, synthetic construct
  source 1..120: mol_type = other DNA
ctggcccgttctcaatgagctgttgggcacacctcccagacggggtggtggccgggcagaggggctcctcacttcccagtaggggcggccgggcagaggcgcccctcacctcccggacgg

SEQ ID NO: 108484 - DNA, 120 bp, synthetic construct
  source 1..120: mol_type = other DNA
ggctccgcatgagagggagaccgtggggagacggagacgggagagggagggggagggggagggggagggagagggagagctggtttttaaatttctaattcagtctcttttataagtcta

SEQ ID NO: 108485 - DNA, 120 bp, synthetic construct; identical to SEQ ID NO: 25428
  source 1..120: mol_type = other DNA

SEQ ID NO: 108486 - DNA, 120 bp, synthetic construct
  source 1..120: mol_type = other DNA
tatttctccacatcctctccagcacctgttgtttcctgactttttaatgatagccattctaactggtgtgagatgatatctcatagtggttttgatttgcatttctctgatggccagtga

SEQ ID NO: 108487 - DNA, 120 bp, synthetic construct
  source 1..120: mol_type = other DNA
ggattgacttggcgatgcgggctcttttttggttccatatgaactttaaggtagttttttccaattctgtgaagaaagtcattggtagcttgatggggatggcattgaatctgtaaatta

SEQ ID NO: 108488 - DNA, 120 bp, synthetic construct
  source 1..120: mol_type = other DNA
caaaaaatcaatgaatccaggagctggttttttgaaaggatcaacaaaattgatagaccgctagcaagactaataaaaaaagagagaagaatcaaatagacacaataaaaaatgataaag

SEQ ID NO: 108489 - DNA, 120 bp, synthetic construct; identical to SEQ ID NO: 8899
  source 1..120: mol_type = other DNA

SEQ ID NO: 108490 - DNA, 120 bp, synthetic construct
  source 1..120: mol_type = other DNA
ctgcactccagcctgggggagagagaccccgtctcaaaaaataaatgaataaataaataatagtccgggcgtggtggctcacacctgtaatcccagcactttgggaggccgaggtaggta

SEQ ID NO: 108491 - DNA, 120 bp, synthetic construct; identical to SEQ ID NO: 25846
  source 1..120: mol_type = other DNA

SEQ ID NO: 108492 - DNA, 120 bp, synthetic construct; identical to SEQ ID NO: 25847
  source 1..120: mol_type = other DNA

SEQ ID NO: 108493 - DNA, 120 bp, synthetic construct; identical to SEQ ID NO: 25848
  source 1..120: mol_type = other DNA

SEQ ID NO: 108494 - DNA, 120 bp, synthetic construct
  source 1..120: mol_type = other DNA
cccatctcagccttgcaaagtgctgggattataggcgtgagccaccgagcccagcctatacatacattttttatattcaatatttcaaagacttgtttcctgtttagtatttgcagggaa

SEQ ID NO: 108495 - DNA, 120 bp, synthetic construct
  source 1..120: mol_type = other DNA
ctctttcacatttgctgaggagagctttacttccaagtatgtggtcaattttggaataggtgtggtgtggtgctgaaaaaaatgtatattctgttgatttggggtggagagttctgtaga

SEQ ID NO: 108496 - DNA, 120 bp, synthetic construct; identical to SEQ ID NO: 25849
  source 1..120: mol_type = other DNA

SEQ ID NO: 108497 - DNA, 120 bp, synthetic construct; identical to SEQ ID NO: 25850
  source 1..120: mol_type = other DNA

SEQ ID NO: 108498 - DNA, 120 bp, synthetic construct
  source 1..120: mol_type = other DNA
tctgagaactggcagactgcctcctcaagtggttccctgacccctgacccccgagcagcctaactgggaggcaccccccagcaggggcacactgacacctcacacggcagggtattccaa

SEQ ID NO: 108499 - DNA, 120 bp, synthetic construct
  source 1..120: mol_type = other DNA
cgggttaccctcaaagggaagcccatcagactaacagcggatctcttggcagaaaccctacaagccagaagagagtgggggccaatattcaacattcttaaagaaaagaattttcaaccc

SEQ ID NO: 108500 - DNA, 120 bp, synthetic construct
  source 1..120: mol_type = other DNA
ccgctcaactacatggaaactgaacaacctgctcctgaatgactactgggtacataacgaaatgaaggcagaaataaagatgttctttgaaaccaatgagaacaaagacaccacatacca

SEQ ID NO: 108501 - DNA, 120 bp, synthetic construct
  source 1..120: mol_type = other DNA
aaattaggtattgatgggacgtatttcaaaaaaataagagctatctatgacaaacccacagccaatatcatactgaatgggcaaaaactggaagcattccctttgaaaactggcacaaga

SEQ ID NO: 108502 - DNA, 120 bp, synthetic construct
  source 1..120: mol_type = other DNA
tactgtaccaaaacagagatatagatcaatggaacagaacagagccctcagaaataatgccgcatatctacaactatctgatctttgacaaacctgagaaaaacaagcaatggggaaagg

SEQ ID NO: 108503 - DNA, 120 bp, synthetic construct
  source 1..120: mol_type = other DNA
cgcaagaacaaaaaaccaaacaccgcatattctcactcataggtaggaattgaacaatgagatcacatggacacaggaaggggaatatcacactctggggactgtggtggggtgggggga

SEQ ID NO: 108504 - DNA, 120 bp, synthetic construct
  source 1..120: mol_type = other DNA
tgacatgccccggaaatattttccccattgtcttggtgattagcatttgcctccttgttacctatgcaaatttctgcagccagcttaaatttctccccagaacatggttttttcctttct

SEQ ID NO: 108505 - DNA, 120 bp, synthetic construct; identical to SEQ ID NO: 15284
  source 1..120: mol_type = other DNA

SEQ ID NO: 108506 - DNA, 120 bp, synthetic construct
  source 1..120: mol_type = other DNA
agtttgaagtcaggtagtgtgatgcctccagctttgttcttttggcttccttacaccttataaaaaattaattcaagatgattaaagacttaaacgttagacctaaaaccataaaaaccc

SEQ ID NO: 108507 - DNA, 120 bp, synthetic construct
  source 1..120: mol_type = other DNA
aggacaaaaaaccaaacactgcatgttctcactcatagatgggaattgaacaatgagaacacatggacacaggaaggggaacatcacactctggggactgttgtggggtgaggggaggtg

SEQ ID NO: 108508 - DNA, 120 bp, synthetic construct; identical to SEQ ID NO: 15094
  source 1..120: mol_type = other DNA

SEQ ID NO: 108509 - DNA, 120 bp, synthetic construct; identical to SEQ ID NO: 15095
  source 1..120: mol_type = other DNA

SEQ ID NO: 108510 - DNA, 120 bp, synthetic construct; identical to SEQ ID NO: 26219
  source 1..120: mol_type = other DNA

SEQ ID NO: 108511 - DNA, 120 bp, synthetic construct; identical to SEQ ID NO: 26220
  source 1..120: mol_type = other DNA

SEQ ID NO: 108512 - DNA, 120 bp, synthetic construct
  source 1..120: mol_type = other DNA
cagaagttcgagaccagcctggccatcatggtgaaaccccattgctactaaaaatacaaagaaaaaaaaaaaaattagccaggtatggtgacgtgtacctgtagtcccagctactcagga

SEQ ID NO: 108513 - DNA, 120 bp, synthetic construct; identical to SEQ ID NO: 26221
  source 1..120: mol_type = other DNA

SEQ ID NO: 108514 - DNA, 120 bp, synthetic construct; identical to SEQ ID NO: 26222
  source 1..120: mol_type = other DNA

SEQ ID NO: 108515 - DNA, 120 bp, synthetic construct
  source 1..120: mol_type = other DNA
catcacacttatgcagcccccagtgagcccccagcacacgggtatcacacttatgcagcccccagtgagcccccagcacacgggtatcacacttatgcagcccccagtgagcccccagca

SEQ ID NO: 108516 - DNA, 120 bp, synthetic construct
  source 1..120: mol_type = other DNA
agcacacgggcatcacacttatgcagcccccagtgagcccccagcacacgggtatcacacttatgcagcccccagtgagcccccagcacacgggtatcacacttatgcagcccccagtga

SEQ ID NO: 108517 - DNA, 120 bp, synthetic construct
  source 1..120: mol_type = other DNA
gcacacgggcatcacacttatgcagcccccagtgagcccccagcacacggtatcacacttatgcagcccccagtgagcccccagtgagcccccagcacacgggcatcacacttatgcagc

SEQ ID NO: 108518 - DNA, 120 bp, synthetic construct; identical to SEQ ID NO: 26223
  source 1..120: mol_type = other DNA

SEQ ID NO: 108519 - DNA, 120 bp, synthetic construct; identical to SEQ ID NO: 26224
  source 1..120: mol_type = other DNA

SEQ ID NO: 108520 - DNA, 120 bp, synthetic construct; identical to SEQ ID NO: 26225
  source 1..120: mol_type = other DNA

SEQ ID NO: 108521 - DNA, 120 bp, synthetic construct; identical to SEQ ID NO: 26226
  source 1..120: mol_type = other DNA

SEQ ID NO: 108522 - DNA, 120 bp, synthetic construct; identical to SEQ ID NO: 26227
  source 1..120: mol_type = other DNA

SEQ ID NO: 108523 - DNA, 120 bp, synthetic construct; identical to SEQ ID NO: 26228
  source 1..120: mol_type = other DNA

SEQ ID NO: 108524 - DNA, 120 bp, synthetic construct; identical to SEQ ID NO: 24639
  source 1..120: mol_type = other DNA

SEQ ID NO: 108525 - DNA, 120 bp, synthetic construct; identical to SEQ ID NO: 24640
  source 1..120: mol_type = other DNA

SEQ ID NO: 108526 - DNA, 120 bp, synthetic construct; identical to SEQ ID NO: 24641
  source 1..120: mol_type = other DNA

SEQ ID NO: 108527 - DNA, 120 bp, synthetic construct
  source 1..120: mol_type = other DNA
taaaaagtaaaaaaaaaaaaaaaaagaaaagaaaaggtgaaaattaggccgggcatggtggctcaagcctgtaatcccagcactttgggagacagaggcaggcggatcacctgagttcag

SEQ ID NO: 108528 - DNA, 120 bp, synthetic construct
  source 1..120: mol_type = other DNA
aagccaaaattgacaaatgggatacaattaaactaaaggcttctgcacagcaaaagaaaccaccatcagagtgaacaggcaacctacacaatgggagaaaatttttgcaacctactcatc

SEQ ID NO: 108529 - DNA, 120 bp, synthetic construct; identical to SEQ ID NO: 29986
  source 1..120: mol_type = other DNA

SEQ ID NO: 108530 - DNA, 120 bp, synthetic construct; identical to SEQ ID NO: 22543
  source 1..120: mol_type = other DNA

SEQ ID NO: 108531 - DNA, 120 bp, synthetic construct; identical to SEQ ID NO: 30081
  source 1..120: mol_type = other DNA

SEQ ID NO: 108532 - DNA, 120 bp, synthetic construct; identical to SEQ ID NO: 18977
  source 1..120: mol_type = other DNA

SEQ ID NO: 108533 - DNA, 120 bp, synthetic construct; identical to SEQ ID NO: 18978
  source 1..120: mol_type = other DNA

SEQ ID NO: 108534 - DNA, 120 bp, synthetic construct
  source 1..120: mol_type = other DNA
gtctctactaaaaatacaaaaattagctgggcgtggtggtgcatgccagctactcaggaggctgaggcagaagaatcgcttgagcttgggaggcggaggatgcagtgagctgaaatcgca

SEQ ID NO: 108535 - DNA, 120 bp, synthetic construct
  source 1..120: mol_type = other DNA
tcctttacataagaagacaaagcagcaggaagaggtagtcaaagttcttcagttgggatccagggacttgctgaatttcattgcatattctgtttccctgggggaaaaaagcaattcgaa

SEQ ID NO: 108536 - DNA, 120 bp, synthetic construct
  source 1..120: mol_type = other DNA
tctctttagtaggaagagtagacatttaattttacaggatttaagaactctgcctaaagtcaaggtgatcaattagcttacccttaggaatctctgtcctccatgttgggctctgtgcct

SEQ ID NO: 108537 - DNA, 120 bp, synthetic construct
  source 1..120: mol_type = other DNA
gttacatttttcatacctgttcctcaggtatgagctaacagctcttggctaagggctcatacctgaggaacaggtatgaagaatggaattcagataagaggtcttatcatcttgttgctg

SEQ ID NO: 108538 - DNA, 120 bp, synthetic construct
  source 1..120: mol_type = other DNA
cattccatagtttaatattaaatcttgctctgatcttgttggagatagacagcactatccaccagcaaatttctaattttagccaggtgcggtggctcacgcctgtaatcccagcacttt

SEQ ID NO: 108539 - DNA, 120 bp, synthetic construct
  source 1..120: mol_type = other DNA
gtagtatgtagtgtttcccaaaccagtttgactatggaatattttttctggatattttgtggacccagtgttccaaggaattctctttagtaaacaatggtttatagcttactttggccg

SEQ ID NO: 108540 - DNA, 120 bp, synthetic construct
  source 1..120: mol_type = other DNA
tgagcaccttctgtttgtccaaggaaccatggaggatgaagaggtgaattacacatactacctaattcatattgttcatattcaaatagctttaatacagatcatattgtagtacaataa

SEQ ID NO: 108541 - DNA, 120 bp, synthetic construct
  source 1..120: mol_type = other DNA
tcatgtccaaaccccgtaaggctcactcaaataccacctatgctatggagtattctctgccccctcaccttttactatagctggaagtaatatagtgttttctgagttctttgttttctc

SEQ ID NO: 108542 - DNA, 120 bp, synthetic construct
  source 1..120: mol_type = other DNA
cttgggggtgatttgtatctctttcacaaagggagtagtttgagaaaatgtgggtaacttgttctcctgtagtcatgtttgtgtgtgtgtgcgtgtgcatgtgtgtgtaacatatacaaa

SEQ ID NO: 108543 - DNA, 120 bp, synthetic construct
  source 1..120: mol_type = other DNA
atttacattaggtatttctcctaatgctatccctccaccagccctccaccccatgacaggcccccatgtgtgacgttccccgcctggtgtccaagtgttctcattgttcaattcccacct

SEQ ID NO: 108544 - DNA, 120 bp, synthetic construct
  source 1..120: mol_type = other DNA
agctctttaatttaattagatcccatttgtcaattttggctttggttgccattgcttttggtgttttagacatgaagtccttgcccatgcctatgtcctgaatggtaatgtctaggtttt

SEQ ID NO: 108545 - DNA, 120 bp, synthetic construct
  source 1..120: mol_type = other DNA
tgccctggccagaacttccaacactatgttgaatagaagtggtgagagagggcatccctgtcttgtaccagttttcaaagggaatgcttccagttcttgcccattcagtatgatattggc

SEQ ID NO: 108546 - DNA, 120 bp, synthetic construct
  source 1..120: mol_type = other DNA
ttgatctttcaaaaaaccagctcctggattcgttgattttttgaagggttttttgtgtctctatctccttcagttctgctctgatcttagttatttcttgccttctgctagcttttgaat

SEQ ID NO: 108547 - DNA, 120 bp, synthetic construct
  source 1..120: mol_type = other DNA
gtctctgcacatgagatggttctcgtgaatacagcacactgatgggtcttgactctttatccaatttgccactctatgtcttttaattggggcattcagcccatttacatttaaggttaa

SEQ ID NO: 108548 - DNA, 120 bp, synthetic construct
  source 1..120: mol_type = other DNA
tcagctccatcaggtcatttaaagtcttctctgcagtgtttattctagttagccattcatctaatcttttttcaaggtttttagcttccttgtaatgggttcaaacattctcctttagct

SEQ ID NO: 108549 - DNA, 120 bp, synthetic construct
  source 1..120: mol_type = other DNA
gcatgggacccaccaagccaggcgcaggatataatctcctggtgttccgtttgctaagacctttggaaaagcacagtatttgggtgggagtgttgcgattttccaggtacagtctgtcac

SEQ ID NO: 108550 - DNA, 120 bp, synthetic construct
  source 1..120: mol_type = other DNA
ttatttatttatttattttttatttctttgagatggagtcttgctctgtctcccagtctggagtacagtgttgtgagatctcagctcactgcaacctccacctcctgggttaaagtgatc

SEQ ID NO: 108551 - DNA, 120 bp, synthetic construct
  source 1..120: mol_type = other DNA
tgatgttaattagtcctagattagtcacctaactttttttttttttttttttttgagacggagtcttgctctgtcgccagtatggagtgcagtggcaccatctctcggctcactgcaacc

SEQ ID NO: 108552 - DNA, 120 bp, synthetic construct
  source 1..120: mol_type = other DNA
ttgtttgggttagccattcctgtttacttggagttcttccttgacccttcttgctctctacagcagaagatattccttgagaaaaacacctaaggtccaaatatcctcttctactggttc

SEQ ID NO: 108553 - DNA, 120 bp, synthetic construct
  source 1..120: mol_type = other DNA
ttatgtgtagttccatatatttcagttgctattgatgtttatgggatcagaggcatttgataaattctgatgtctgtctattcagtcagtagagaggattacagctgttcacaaagcagt

SEQ ID NO: 108554 - DNA, 120 bp, synthetic construct
  source 1..120: mol_type = other DNA
attgatcggcctgagtctaatagctttggggacaggaggcatcaaaccctgtgtggcagcttttggtggagaccagtttgaagaaaaacatgtaagaatcctgttattttgtattttcaa

SEQ ID NO: 108555 - DNA, 120 bp, synthetic construct
  source 1..120: mol_type = other DNA
ctcttccctcttccaccctgacataatgcctattatctccttctgcctctgctatcctgtcctgtcttccagtgtttttcttacctttcagaccatttgggttattttatactctttatc

SEQ ID NO: 108556 - DNA, 120 bp, synthetic construct
  source 1..120: mol_type = other DNA
ggatacggtagtggcactgaagacaggaagattatttttaacctatgaaaagggaggaaaagaatgctaaagctgctctggagtttgaaaggtgagtaaatgattggggtcagccagcaa

SEQ ID NO: 108557 - DNA, 120 bp, synthetic construct
  source 1..120: mol_type = other DNA
ttggaggtaaattctgaatgaagtcagaaactttaagaaaaaagtgcctaaggttgcataaccagtaagatgctttctggggagccttaaaaagtccaaactctgggccagtcagggact

SEQ ID NO: 108558 - DNA, 120 bp, synthetic construct
  source 1..120: mol_type = other DNA
gcagcttcagttttctgggtgctaatcaataactcaattctctgatcttttactgtaattaatttcttttttctttttttttcttttttgagatggagtctcgctctgtcgcccaggctg

SEQ ID NO: 108559 - DNA, 120 bp, synthetic construct
  source 1..120: mol_type = other DNA
atcgcttgagcccagaaggtcaaggctgcgatgagccatgattgagccactgcacttcagcctgggcaacagagcaagcccctgtctcaaaaataaataaatgaataaaataataaataa

SEQ ID NO: 108560 - DNA, 120 bp, synthetic construct
  source 1..120: mol_type = other DNA
tggggggataggttcaaacttcaagaaacgccaggatttaaaagacaggcaaagaggaaaagcccacaaatgagactaagaaggaatggccaaagtggtaatagcgttatcttggatatg

SEQ ID NO: 108561 - DNA, 120 bp, synthetic construct
  source 1..120: mol_type = other DNA
gctttaaactgtctttggcttgaaggtcgggtttcactgggacccgtccgtgtctgcctaggaatttatctgtctcttgtcactatcagtaagaaagtgaaatagtatttatagttggaa

SEQ ID NO: 108562 - DNA, 120 bp, synthetic construct
  source 1..120: mol_type = other DNA
ccagccgtctaggtacttttttatctgcccacttgactctcaggattagcattcctccactgaactattttttctatcaaccatgagaagggtattatagataaaggatgctatttggag

SEQ ID NO: 108563 - DNA, 120 bp, synthetic construct
  source 1..120: mol_type = other DNA
ggaagagactagggaatgagaaactagttggtggccattttaataatccaaagtacaagttgtgaagtcctgaacaagagtggtagcagtagtaaagtgaaagagggggcaaataggcaa

SEQ ID NO: 108564 - DNA, 120 bp, synthetic construct
  source 1..120: mol_type = other DNA
aaggtataataagttggaaaaggcagaggatgtttttctctttgtctctcccatgatgtctactctctgccctagtttgctatttccaatcgtttcaagaaccgttctggagacattcca

SEQ ID NO: 108565 - DNA, 120 bp, synthetic construct
  source 1..120: mol_type = other DNA
aggtttgagtggcactactacgcaattggtctatctcttcaacaaggatcacagcaggggacctgtgggaaatggaatattttgtatgtatggatatggaaagaatgagaaggttatacg

SEQ ID NO: 108566 - DNA, 120 bp, synthetic construct
  source 1..120: mol_type = other DNA
taaggcttattttgtgagcaatgaagtcatgagaggaaagagctcacaataaggctggcagaaagacaggctcagagtgaaacttgtcccttgggatatttgaaagctaaaatgctatgc

SEQ ID NO: 108567 - DNA, 120 bp, synthetic construct
  source 1..120: mol_type = other DNA
ataaaatacaactactacacaggtaaaataagtgtcctaagaagggaagatcaagtgccaaggagaggtagaaaagaaaaagtccctcccctgccaaagccaacagatttctgcagagga

SEQ ID NO: 108568 - DNA, 120 bp, synthetic construct
  source 1..120: mol_type = other DNA
gagagcagccacaggggctgaactctgcaaagccacaagggtggagctatccaagtccttgggagcccaccccttgtattggtgtgccctgaatgtgggacatggagtcaaaggagatta

SEQ ID NO: 108569 - DNA, 120 bp, synthetic construct
  source 1..120: mol_type = other DNA
ctttagagtctaaagtttagatataattgtttctcctttccaccacagatcacttaggaaaatggctgttggtatgatcctagcatgcctggcatttgcagttgcggcagctgtagagat

SEQ ID NO: 108570 - DNA, 120 bp, synthetic construct
  source 1..120: mol_type = other DNA
tgatagagtccatcaaatcctttcaggtgaggtgtgtacctgaatgaattagaaactctgtatgctatattgatcttgatttttccttaacattaattgtatcataagcatcttcccatg

SEQ ID NO: 108571 - DNA, 120 bp, synthetic construct
  source 1..120: mol_type = other DNA
tctaggacagtgagaggcagataggcttcttttctcatgtgggattcgaagatgactctatctgtgtatgccccctgtactctggggcataaatcctttctgctgaattttatctattta

SEQ ID NO: 108572 - DNA, 120 bp, synthetic construct
  source 1..120: mol_type = other DNA
caccattataagggaaataaattagatgcacctaagctggattagtgaggaaactcagatttccatgaatgatcatgatagtgtccgtctagctagaggtctggtgaggatgtggcagat

SEQ ID NO: 108573 - DNA, 120 bp, synthetic construct
  source 1..120: mol_type = other DNA
gagctcaaatcagggacagaagcctggcatgaaaataacctactccaagaaacatttctcttcaaagataattagtggcttcactgctttcctcaccatcagtagagagatgagatcact

SEQ ID NO: 108574 - DNA, 120 bp, synthetic construct; identical to SEQ ID NO: 24601
  source 1..120: mol_type = other DNA

SEQ ID NO: 108575 - DNA, 120 bp, synthetic construct
  source 1..120: mol_type = other DNA
tagtttacagtcccaccaacagtgtaaaagtgttcctatttctccacatcctctccagcacctgttgtttcctgactttttaatgattgccattctaactgatgtgagatggtatctcat

SEQ ID NO: 108576 - DNA, 120 bp, synthetic construct
  source 1..120: mol_type = other DNA
tgtaaagtagttttttccaattctttgaagaaagtcattggtagcttgatggggatggcattgaatctataaattaccttgggcagtatggccattttcacaatattgattcttcctacc

SEQ ID NO: 108577 - DNA, 120 bp, synthetic construct
  source 1..120: mol_type = other DNA
atccatgttcatcgaggatattggtctaaaattctcttttttggttgtgtctctgcccggctttggtatcagaatgatgctggcctcataaaatgagttagggaggattccctctttttc

SEQ ID NO: 108578 - DNA, 120 bp, synthetic construct
  source 1..120: mol_type = other DNA
ttgaactgtggtctgagagatagtttgttataatttctattcttttacatttgccgaggagagctttacttccaactatgtggtcaattttggaataggtgtggtgtggtgctgaaaaaa

SEQ ID NO: 108579 - DNA, 120 bp, synthetic construct
  source 1..120: mol_type = other DNA
cctgtaaaggatgttatttctccttcacttatgaagcttagtttggctggatatgaaattctgggttgaaaattcttttctttaagaatgttgaatattggcccccactctcttctggct

SEQ ID NO: 108580 - DNA, 120 bp, synthetic construct
  source 1..120: mol_type = other DNA
aacagacaggaccctcagctgcaggtctgttggagtacctggccatgtgaggtgtcagtctgcccctgctggggggtgcctcccagttaggctgctcaggggtcaggggtcagggaccca

SEQ ID NO: 108581 - DNA, 120 bp, synthetic construct; identical to SEQ ID NO: 24602
  source 1..120: mol_type = other DNA

SEQ ID NO: 108582 - DNA, 120 bp, synthetic construct
  source 1..120: mol_type = other DNA
gatctctaactcctgaccttggatgatctgcccaccttggcctcccaaagtgctaggattacaggcttgagctactgcgcccagtctgtaatactattttttaaatgtataagaatacga

SEQ ID NO: 108583 - DNA, 120 bp, synthetic construct
  source 1..120: mol_type = other DNA
tttttttcttctactggattagacaagagagatagcagcatatcagagctgatctcctccacctttctccaatgacagaagttccaggactggttttccagtacatctttaaacaaggcc

SEQ ID NO: 108584 - DNA, 120 bp, synthetic construct
  source 1..120: mol_type = other DNA
ttataatttgcaaccttgtcttgtcaaccttgctgatccagctttttcttattattacaccttgtcttgcttattgcagcaaatattcaataacaacaatgtttctataagtccaacttc

SEQ ID NO: 108585 - DNA, 120 bp, synthetic construct
  source 1..120: mol_type = other DNA
acatgtacgctgcagaacattggtttggaaaaaactgttgagcagttcttccttgtaagtgctgagcttcctctctgaaacctcctaccattgttttttttcccctgtagctaacaagaa

SEQ ID NO: 108586 - DNA, 120 bp, synthetic construct
  source 1..120: mol_type = other DNA
gtatagcctactacacatctaagttatatggtatagactgtttctccagctatatggtgtagactgtttctcctaggctacaaacctgcacagcatgttactgtattaaatgctgtaggc

SEQ ID NO: 108587 - DNA, 120 bp, synthetic construct; identical to SEQ ID NO: 12722
  source 1..120: mol_type = other DNA

SEQ ID NO: 108588 - DNA, 120 bp, synthetic construct
  source 1..120: mol_type = other DNA
caaaatgctaataatgacatggacaatgaaatccaggttgaagtggtctcagatggagatgagacacttggaaactggaacaaaggtgactcttgttatgttttagcagagactggcacc

SEQ ID NO: 108589 - DNA, 120 bp, synthetic construct
  source 1..120: mol_type = other DNA
attttctatcttgtaacattgctaaactaagttattagttctagcaggtttttttgcagattccttagtgtttttttttttttattatactttaagttttagggtacatgtgcacaacgt

SEQ ID NO: 108590 - DNA, 120 bp, synthetic construct
  source 1..120: mol_type = other DNA
ttttgagaagtgtctgttcatatccttcgcccgcttgttgatggagttgtttgtttttttcttgtaaatttgtttgagttcattgtagattctggatattagccctttgtcagatgagta

SEQ ID NO: 108591 - DNA, 120 bp, synthetic construct
  source 1..120: mol_type = other DNA
gtctccccctcacccagaagaaaccttgattcctaaatatctgtgccccacaccccaggtgagccttttggaagcagctccccaaaggagtgctgactgcccgagtgaggggctttctgt

SEQ ID NO: 108592 - DNA, 120 bp, synthetic construct; identical to SEQ ID NO: 18479
  source 1..120: mol_type = other DNA

SEQ ID NO: 108593 - DNA, 120 bp, synthetic construct; identical to SEQ ID NO: 12976
  source 1..120: mol_type = other DNA

SEQ ID NO: 108594 - DNA, 120 bp, synthetic construct; identical to SEQ ID NO: 12977
  source 1..120: mol_type = other DNA

SEQ ID NO: 108595 - DNA, 120 bp, synthetic construct; identical to SEQ ID NO: 12978
  source 1..120: mol_type = other DNA

SEQ ID NO: 108596 - DNA, 120 bp, synthetic construct
  source 1..120: mol_type = other DNA
ctatcattaaaagtcaggaaacaacaggtgctggagaggatgtggagaaatagaaacacttctacactgttggtgggactgtaaactagttcaaccattgtggaagacagtgtggcgatt

SEQ ID NO: 108597 - DNA, 120 bp, synthetic construct
  source 1..120: mol_type = other DNA
tattcaacatagtgttggaagttctggccagggcaatcaggcaggagaaggaaataaagggtattcagttaggaaaagaggaaatcaaattgtccctgtttgcagatgacatgactgtat

SEQ ID NO: 108598 - DNA, 120 bp, synthetic construct
  source 1..120: mol_type = other DNA
aaaagaattttcaacccagaatttcatatccagccaaactgagcttcataagtgaaagagaaataaaatactctacagacaagcaaatgctgagagattttgtcaccacaaggcctgccc

SEQ ID NO: 108599 - DNA, 120 bp, synthetic construct
  source 1..120: mol_type = other DNA
ctcaactacatggaaactgaacaacctgctcctgaatgactactgggcacataacgaaatgaaggcagaaataaagatgtcctttgaaaccaatgagaacaaagacgcaacataccagaa

SEQ ID NO: 108600 - DNA, 120 bp, synthetic construct
  source 1..120: mol_type = other DNA
atgggacatatctcaaaataagagctatctatgacaaacccacagccaatatcatactgaatgggcaaaaactggaagcattccctttgaaaactggcacaagacagggatgccctctct

SEQ ID NO: 108601 - DNA, 120 bp, synthetic construct; identical to SEQ ID NO: 108596
  source 1..120: mol_type = other DNA

SEQ ID NO: 108602 - DNA, 120 bp, synthetic construct; identical to SEQ ID NO: 12979
  source 1..120: mol_type = other DNA

SEQ ID NO: 108603 - DNA, 120 bp, synthetic construct
  source 1..120: mol_type = other DNA
tttgtcaaaggccttttctgcatctattgagataatcatgtggtttttgtctttggttctgtttatatgctggattacgtttattggtttttgtatgttgaaccagccttgcatcccagg

SEQ ID NO: 108604 - DNA, 120 bp, synthetic construct
  source 1..120: mol_type = other DNA
ttaagcccactgttgagacctgctgctaagaaaaaaagttcctttcaaaatattactgcttattgacaatgcacctgggtcacccaggagctctgatagagatgtacaaggaggttaata

SEQ ID NO: 108605 - DNA, 120 bp, synthetic construct; identical to SEQ ID NO: 12981
  source 1..120: mol_type = other DNA

SEQ ID NO: 108606 - DNA, 120 bp, synthetic construct; identical to SEQ ID NO: 12982
  source 1..120: mol_type = other DNA

SEQ ID NO: 108607 - DNA, 120 bp, synthetic construct; identical to SEQ ID NO: 10771
  source 1..120: mol_type = other DNA

SEQ ID NO: 108608 - DNA, 120 bp, synthetic construct; identical to SEQ ID NO: 10772
  source 1..120: mol_type = other DNA

SEQ ID NO: 108609 - DNA, 120 bp, synthetic construct; identical to SEQ ID NO: 10773
  source 1..120: mol_type = other DNA

SEQ ID NO: 108610 - DNA, 120 bp, synthetic construct
  source 1..120: mol_type = other DNA
ctgagaagtgagaagcccctccgcccggcagccacaccgtctgagaagcgaggagcccctccgcccagcagccaccccgtgtgggaagtgaggagcgtctccgcccgacagccaccccgt

SEQ ID NO: 108611 - DNA, 120 bp, synthetic construct; identical to SEQ ID NO: 10774
  source 1..120: mol_type = other DNA

SEQ ID NO: 108612 - DNA, 120 bp, synthetic construct
  source 1..120: mol_type = other DNA
gcctcccaaagtgctgggatttcaagtatgagccacagcgcctggctgcttctttcaatagacagctattctgctccaggttgtgttcttgtgaaattttatgtctaaataaaatgtctt

SEQ ID NO: 108613 - DNA, 120 bp, synthetic construct
  source 1..120: mol_type = other DNA
agatgccccgtccaggagggaggtggggtggtcagccccccgcccggccagccgccccgtccgggaggtgaggggcgcctctgcccagccgcccctactgagaagtgaggagcccctctg

SEQ ID NO: 108614 - DNA, 120 bp, synthetic construct
  source 1..120: mol_type = other DNA
cactgcactccagcctggccgacagagcgagactccgtctcaaaaaaaaaaaaaaaaaaattacatacaggaacacagccatggaaataacccctttttatagtgatataggaaagttct

SEQ ID NO: 108615 - DNA, 120 bp, synthetic construct; identical to SEQ ID NO: 11772
  source 1..120: mol_type = other DNA

SEQ ID NO: 108616 - DNA, 120 bp, synthetic construct; identical to SEQ ID NO: 19893
  source 1..120: mol_type = other DNA

SEQ ID NO: 108617 - DNA, 120 bp, synthetic construct; identical to SEQ ID NO: 22690
  source 1..120: mol_type = other DNA

SEQ ID NO: 108618 - DNA, 120 bp, synthetic construct; identical to SEQ ID NO: 22691
  source 1..120: mol_type = other DNA

SEQ ID NO: 108619 - DNA, 120 bp, synthetic construct; identical to SEQ ID NO: 22692
  source 1..120: mol_type = other DNA

SEQ ID NO: 108620 - DNA, 120 bp, synthetic construct; identical to SEQ ID NO: 28330
  source 1..120: mol_type = other DNA

SEQ ID NO: 108621 - DNA, 120 bp, synthetic construct; identical to SEQ ID NO: 28331
  source 1..120: mol_type = other DNA

SEQ ID NO: 108622 - DNA, 120 bp, synthetic construct
  source 1..120: mol_type = other DNA
tagatatgggtggaaattttatttatttatttatttttttgagacagagtctctgttgcccaggctagagtacagtggcactatctcagcccactgcaacctctgcctcccgggttaaag

SEQ ID NO: 108623 - DNA, 120 bp, synthetic construct; identical to SEQ ID NO: 8989
  source 1..120: mol_type = other DNA

SEQ ID NO: 108624 - DNA, 120 bp, synthetic construct
  source 1..120: mol_type = other DNA
ttcctggacacatacaccctcccaagactaaaccagcaagaagttgaatctctgaatagaccaataacaggctctgaaattgaggcaataattaatagcttaccaaccaaaaaaagtcca

SEQ ID NO: 108625 - DNA, 120 bp, synthetic construct
  source 1..120: mol_type = other DNA
gaactacaaaccactgctcaatgaaataaaagaggatacaaacaaatggaagaacattccatgctcatgggtaggaagaatcaatattgtgaaaacggccatactgcccaaggtaattta

SEQ ID NO: 108626 - DNA, 120 bp, synthetic construct; identical to SEQ ID NO: 11835
  source 1..120: mol_type = other DNA

SEQ ID NO: 108627 - DNA, 120 bp, synthetic construct; identical to SEQ ID NO: 11836
  source 1..120: mol_type = other DNA

SEQ ID NO: 108628 - DNA, 120 bp, synthetic construct
  source 1..120: mol_type = other DNA
gttcattgtagattctggatattagccctttgtcagatgagtaggttgggaaaattttctcccattttttaggttgcctgttcactctgatggtagtttcttttgctgtgcagaagctct

SEQ ID NO: 108629 - DNA, 120 bp, synthetic construct
  source 1..120: mol_type = other DNA
aagctgaaactggatcccttccttacaccttatacaaaaatcaattcaagatggattaaagatttaaacgttagacctaaaaccataaaaaccctagaagaaaacctaggcattaccctc

SEQ ID NO: 108630 - DNA, 120 bp, synthetic construct; identical to SEQ ID NO: 11837
  source 1..120: mol_type = other DNA

SEQ ID NO: 108631 - DNA, 120 bp, synthetic construct
  source 1..120: mol_type = other DNA
tgttgatccgcccgcctcggcctcccaaagtgcttggattacaggcgtgagccaccatgccctgccaacaatatatttttaattaactttagtccatatatttatataaacatatatata

SEQ ID NO: 108632 - DNA, 120 bp, synthetic construct; identical to SEQ ID NO: 31493
  source 1..120: mol_type = other DNA

SEQ ID NO: 108633 - DNA, 120 bp, synthetic construct; identical to SEQ ID NO: 31494
  source 1..120: mol_type = other DNA

SEQ ID NO: 108634 - DNA, 120 bp, synthetic construct
  source 1..120: mol_type = other DNA
ctgggtgtatgacacgcccggctcttccatcgtcactgaggtaaaaaagcctctgtaacatgggagttcctgggacagggagaaatataaagcaaatcctatgaagttcagttccatatc

SEQ ID NO: 108635 - DNA, 120 bp, synthetic construct
  source 1..120: mol_type = other DNA
cttcttgggtctctgttcttcctcttttccctttcctgagtggtatcagcggtgacacatttagggctattactggaggaaagcttagggtccctcccctctgggcctgagcattgctct

SEQ ID NO: 108636 - DNA, 120 bp, synthetic construct
  source 1..120: mol_type = other DNA
agtgcttagtgtggggttgccaggtacaatacaggatgcccagttaaactcgaacatttgaacttcagataatccaactggataggatacttacttcccagatactgcatgatatttggt

SEQ ID NO: 108637 - DNA, 120 bp, synthetic construct; identical to SEQ ID NO: 28479
  source 1..120: mol_type = other DNA

SEQ ID NO: 108638 - DNA, 120 bp, synthetic construct; identical to SEQ ID NO: 28480
  source 1..120: mol_type = other DNA

SEQ ID NO: 108639 - DNA, 120 bp, synthetic construct; identical to SEQ ID NO: 28481
  source 1..120: mol_type = other DNA

SEQ ID NO: 108640 - DNA, 120 bp, synthetic construct; identical to SEQ ID NO: 28482
  source 1..120: mol_type = other DNA

SEQ ID NO: 108641 - DNA, 120 bp, synthetic construct
  source 1..120: mol_type = other DNA
aatgggtacaacacacgtttcagacagggaaactgaggcccagggctgtgaagtgactcactgccatcgtactccacagtattctggttaggggagccatggacttgatgcagacaaagc

SEQ ID NO: 108642 - DNA, 120 bp, synthetic construct
  source 1..120: mol_type = other DNA
gaaactttgaatttgtcttatgaaaatgtagtaggagaaaactctgtgaaacagcccagggataccgagtttgatgaactgcatttgctttgctgaagagaggatggaagggtgtagtcc

SEQ ID NO: 108643 - DNA, 120 bp, synthetic construct
  source 1..120: mol_type = other DNA
ggttggagaaaacccgaaggcaggagagtggagttgtgtgaacaactctttaaaagagtgtggggagggtccaggatgaggaggctgataggggagggagtcagggatgcaggaagaaga

SEQ ID NO: 108644 - DNA, 120 bp, synthetic construct
  source 1..120: mol_type = other DNA
gcttccatgatggttgataagactatgggaggaaggaagcctggtttgggtgcagcctgaccagtggcgataataatgatgccatctgctaaatatgaagataaggcaaggggacaggcg

SEQ ID NO: 108645 - DNA, 120 bp, synthetic construct
  source 1..120: mol_type = other DNA
ccagcagtgaggatgagccacacttttactcatttgtgggggagaaaaaagaaatagcctgtcttttcatctttgaaaacaaggtgctatcacttggcattctgagaactcattcactag

SEQ ID NO: 108646 - DNA, 120 bp, synthetic construct
  source 1..120: mol_type = other DNA
tcctgggctcctgcaaggaacccgcataacgtccacacctcctgtttcagtcacagaatttgttggctcgggctccagaagaacggtggcgatcatgtaccagatggccttcacggtggg

SEQ ID NO: 108647 - DNA, 120 bp, synthetic construct
  source 1..120: mol_type = other DNA
tgaagtcagatgctctgttatcttcttgatcctctccctcttccccctcttctcttcctctctgctgtcatctctgctcttctcccacttcttcatttttatagtactattggtattatt

SEQ ID NO: 108648 - DNA, 120 bp, synthetic construct
  source 1..120: mol_type = other DNA
ccaggagagatgaggcccctgctgcacagaaggaaggctacataggaagcgatggctcccttttggtctataaatcttaggtgacactaggagtctgagtgacccacagagctgtgacct

SEQ ID NO: 108649 - DNA, 120 bp, synthetic construct
  source 1..120: mol_type = other DNA
ctttttgtttctcccttggggattgaataataaggaaaaggcttcattttagtgaggagcatttgttacctttgggagatcaccagtgggatgagagaaataggataaagggttatcggg

SEQ ID NO: 108650 - DNA, 120 bp, synthetic construct
  source 1..120: mol_type = other DNA
ttgtagtagccctgtccttggcactaattctttgtataaatgtcagctgtctcatggacagttctgcagcatctcttacctgcattactgtaggcaccttctgggtggcctgctggcttt

SEQ ID NO: 108651 - DNA, 120 bp, synthetic construct
  source 1..120: mol_type = other DNA
tctgttctcacaatgtaaatatgactgtaaaagctttctagcttccaaatgatattttccccccgaagtgacacatgaggcaccctacattttggctcaggtgagagtgatttagctagg

SEQ ID NO: 108652 - DNA, 120 bp, synthetic construct
  source 1..120: mol_type = other DNA
gttgtgactctttgataagcctctggaatgagaacaaagatgaggtgctacctttgtctacaaagtttttttagattttaaattgaggggccgtgcacagtggctcatgcctgtaatcac

SEQ ID NO: 108653 - DNA, 120 bp, synthetic construct
  source 1..120: mol_type = other DNA
catcattgcacctatgagacccacccatgttgtcacatgagagtgtagttggtacttcaaacaaaattattgtgtaggattccactgtatgaatatgacactctgcatcccttccactgt

SEQ ID NO: 108654 - DNA, 120 bp, synthetic construct
  source 1..120: mol_type = other DNA
ctctgtcttagtccttatcacattttaggacagtcattcattcaacccgcaggaaatatctccaggccttctatatggctggcaggtatctaggtcctaggatttcaaccatgagcgaag

SEQ ID NO: 108655 - DNA, 120 bp, synthetic construct
  source 1..120: mol_type = other DNA
gcagcctgccagcgtgaaacaagggctcgcttccctcattctcagcctctgagactattatgaaaggtgttttggttaaaactgtattggaaacaaatattaaattgaggattagaaatc

SEQ ID NO: 108656 - DNA, 120 bp, synthetic construct
  source 1..120: mol_type = other DNA
aagttgttctgtacatacaacaagtacaagaacaaaaggtgtagagaagtgggtactggacagggacttgggaaacctgtgttgtagccctgtccttggcactaattgattgtataaaca

SEQ ID NO: 108657 - DNA, 120 bp, synthetic construct
  source 1..120: mol_type = other DNA
ccaccaacagttcacaaaggttccaattcctccacatccttgccaacacttgttaatttctgttggtctttttgatagtagccatcctaatgggtttgaagtgttatctcattgtggttt

SEQ ID NO: 108658 - DNA, 120 bp, synthetic construct
  source 1..120: mol_type = other DNA
cgttgggttaaaaactcaggagtgggattgttaggtcatatggtaagtgtgtgtttaattctatgagaaactgtcagactgtcagaccgttttccgaagtggctgtgccatcttgcgttc

SEQ ID NO: 108659 - DNA, 120 bp, synthetic construct
  source 1..120: mol_type = other DNA
aagttactgggactgagtacaggagatgaaggcatattaaaaagaaaaccttctatatttggcagttctgagcccagagtctaaaatagccaggccaaacaattccattgtcatggccac

SEQ ID NO: 108660 - DNA, 120 bp, synthetic construct
  source 1..120: mol_type = other DNA
tattagaagaatgagggataatgcaaatgtgtttgaaactgtgataacatgaaaagacaatctacaagaggaagggctgcctagtgtgtgaggtctaagggagtccgagaagattccagg

SEQ ID NO: 108661 - DNA, 120 bp, synthetic construct
  source 1..120: mol_type = other DNA
aaggagaatagattcagtgagggaaaggcaagacaggactaagagttgcaaagtaaaatggaaataagaaataagcagagtttaatccaggcatggtggctaacgcctgtaatccctcac

SEQ ID NO: 108662 - DNA, 120 bp, synthetic construct
  source 1..120: mol_type = other DNA
ctgcctgcctctgactcccaaagtgctaggattacagatgttagccatcacgcgcgaatccagtgaattttatccaaccaagctctcatttctatatagaagcaatagccaatcatttaa

SEQ ID NO: 108663 - DNA, 120 bp, synthetic construct
  source 1..120: mol_type = other DNA
tgagatgactccctagcttgattacaaagtaaaatccaacaatatgctgctatatgaagtataacttttcctgagaaaagctaaaaaagaaagaatgcacaaaagcatactagggaaata

SEQ ID NO: 108664 - DNA, 120 bp, synthetic construct
  source 1..120: mol_type = other DNA
cctagaaatggcacagatggtagaattagtggacatgaacattagaacagttatgatacctatattctctatgtttaaggtcctagagtaaagattgagcatgttaagtagatgcaagga

SEQ ID NO: 108665 - DNA, 120 bp, synthetic construct
  source 1..120: mol_type = other DNA
actgaaaatgataactacgtgagtaaatggaaattttttttttctggttattttctttaaaagacaatgaactgtttaaagcaggcattggcaaacttttccagtacagagctggatagc

SEQ ID NO: 108666 - DNA, 120 bp, synthetic construct
  source 1..120: mol_type = other DNA
acaaccccatgctgtctacaagaaactgactttaaatataaggggagaaagatagtttaaaacgaaaggatggagaaggatattttatgctaatactaatcaaaagaaagctggagaggc

SEQ ID NO: 108667 - DNA, 120 bp, synthetic construct
  source 1..120: mol_type = other DNA
ttcttcaggtattatacacctaagagctaaatatttgaatgtgtagttaaaaagaggtaggctctctgccattgcatgggcaacggatggctcatacccactttcactctagcctgttac

SEQ ID NO: 108668 - DNA, 120 bp, synthetic construct
  source 1..120: mol_type = other DNA
aggagggagaaaagagtgatgggaggggtccaccctgcccacatatagactgtgctctatagctaattctatgtgtatatgtaccccaacaacaaatccccaaatacttaaacatcagtt

SEQ ID NO: 108669 - DNA, 120 bp, synthetic construct
  source 1..120: mol_type = other DNA
tgcagtcctacagacttacgattgaacctaggtcacctgactcagtaggccatgtgactttgggaatgtcattgaaccctatggagctttatttttcatttaatttccatgcctgcaaaa

SEQ ID NO: 108670 - DNA, 120 bp, synthetic construct
  source 1..120: mol_type = other DNA
gtgatccgcccatctcagcctcccaaagtgttgggattacaggcgtgagccaccgtgcctggcctggtagtcttttaagatgttctgtttaatcccttcactctctcatcctaatcattc

SEQ ID NO: 108671 - DNA, 120 bp, synthetic construct
  source 1..120: mol_type = other DNA
aactccaacttttaattttgttgttacagaaaagcaaagcccaaagaaaacacgatttaccttaaggtccaaacctcagaaccctcgggcacctgagagagatgttttgcggcgatgtcg

SEQ ID NO: 108672 - DNA, 120 bp, synthetic construct
  source 1..120: mol_type = other DNA
gtaggttatatgcaaaaatgacatcattttatatcagggacttgaacattctcagattttggtgtccatgggggtcctggaaccaatcctcacagatatcaaggggcaactgtactggtt

SEQ ID NO: 108673 - DNA, 120 bp, synthetic construct
  source 1..120: mol_type = other DNA
atgtgtattaaaaatgtcctctctaatctttcttagaatcctcttggcaaaacttctgaggaaggccttaaacaaacaaaaaaaagtcaacattaaaaacagcgacactccctggtcaaa

SEQ ID NO: 108674 - DNA, 120 bp, synthetic construct; identical to SEQ ID NO: 12003
  source 1..120: mol_type = other DNA

SEQ ID NO: 108675 - DNA, 120 bp, synthetic construct
  source 1..120: mol_type = other DNA
gaatggatggatagatggatggatggttgaatgggtggaatgaaaggatggatggttgtaatagatggatggatggatggttggaatagatggatggatggatggatggttggaatagac

SEQ ID NO: 108676 - DNA, 120 bp, synthetic construct; identical to SEQ ID NO: 12004
  source 1..120: mol_type = other DNA

SEQ ID NO: 108677 - DNA, 120 bp, synthetic construct
  source 1..120: mol_type = other DNA
cagagagggaggcagaaatcccctgcttctcccctcctccaacctcttgccagcacctcccatcagccaaacccaaagggaagccatgctggcaaggggacctgataaacatagtctaga

SEQ ID NO: 108678 - DNA, 120 bp, synthetic construct; identical to SEQ ID NO: 24203
  source 1..120: mol_type = other DNA

SEQ ID NO: 108679 - DNA, 120 bp, synthetic construct
  source 1..120: mol_type = other DNA
atttataactagaataaccaatacagagaagtgcttaaaggagctgatggagctgaaggccaaggctcgagaaccacatgaagaatgcagaagcctcaggagctgatgtgatcaactgga

SEQ ID NO: 108680 - DNA, 120 bp, synthetic construct
  source 1..120: mol_type = other DNA
tctcacatgcagagacacacataggctcaaaataaaaggatggaggaagatctaccaagcaaatggaaaacaaaaaaaggcatgggttgcaatcctagtctctgataaaacagactataa

SEQ ID NO: 108681 - DNA, 120 bp, synthetic construct
  source 1..120: mol_type = other DNA
ccgctagcaagactaataaagaaaaaaagagagaagaatcaaatagacgcaataaaaaatgataaaggggatatcaccacctatcccacagaaatacaaactaccatcagaggatactac

SEQ ID NO: 108682 - DNA, 120 bp, synthetic construct
  source 1..120: mol_type = other DNA
tgtctcagcccaaaatctccttaagctgataaacaacttcagcaaagtctcaggataccaaatcaaagtacaaaaatcacaagcattcttatacaccaataacagacaatcagagagcca

SEQ ID NO: 108683 - DNA, 120 bp, synthetic construct
  source 1..120: mol_type = other DNA
aaggaaactaccatcagagtgaagaggcaacctacaaaatgggagaaaattttcgcaacctactcatctgacaaagggctaatatccagaatctacaatgaactcaaacaaatttacaag

SEQ ID NO: 108684 - DNA, 120 bp, synthetic construct; identical to SEQ ID NO: 28213
  source 1..120: mol_type = other DNA

SEQ ID NO: 108685 - DNA, 120 bp, synthetic construct; identical to SEQ ID NO: 11630
  source 1..120: mol_type = other DNA

SEQ ID NO: 108686 - DNA, 120 bp, synthetic construct; identical to SEQ ID NO: 11631
  source 1..120: mol_type = other DNA

SEQ ID NO: 108687 - DNA, 120 bp, synthetic construct; identical to SEQ ID NO: 11632
  source 1..120: mol_type = other DNA

SEQ ID NO: 108688 - DNA, 120 bp, synthetic construct
  source 1..120: mol_type = other DNA
aagatggaaaaaaaaccctccagaaaaccaatgtccaatgtcctaggaatgctgagaataaagtgagctggaagaatttggcaggatctggtcccatgggtatttttccacagtgtacaa

SEQ ID NO: 108689 - DNA, 120 bp, synthetic construct
  source 1..120: mol_type = other DNA
ggttttggaattctctaaagctccagatggggaggtaaaatcaagtcagttgagctcctctggtctctctgccaacaacaataacaacaactacagcagcagaaacaacaacagtagaaa

SEQ ID NO: 108690 - DNA, 120 bp, synthetic construct
  source 1..120: mol_type = other DNA
aacagcagcagcaacatcagcaacaacagcagcaacaacagtagcagcagtaggaacagcagcaataattataacagcagcagcaacaacagtaacaacagtagaaataagtacaatagc

SEQ ID NO: 108691 - DNA, 120 bp, synthetic construct
  source 1..120: mol_type = other DNA
tgttcacaggatctccaccaggagtagattccatctcaagaaaccactttctaagctcatctgtaagaagcaactcctcatctgttcaagttttatcacgaggttgaagcaattcagtca

SEQ ID NO: 108692 - DNA, 120 bp, synthetic construct
  source 1..120: mol_type = other DNA
cttactaacttcgaatttttcttctgctacttcttcacctgtctcagccttcatataatggaaaagagttagggctttgttctgggttaggctttggcttaagggaatgttgtgaccggt

SEQ ID NO: 108693 - DNA, 120 bp, synthetic construct
  source 1..120: mol_type = other DNA
aggcatattttcttctttaatccagtgagtaggtactgttgtccccatttacagatgaggaaactgaggctttgaggcattaaggcaataaagccacacacatgggaaatgtgacggcag

SEQ ID NO: 108694 - DNA, 120 bp, synthetic construct
  source 1..120: mol_type = other DNA
ctgtttgaatgggttcatatggtccaaaattcaaaattacaaaaaggtaagcattgaagtctcccttctacctgtatctcacagtcactcaattccatagacaaccagtgttacggttct

SEQ ID NO: 108695 - DNA, 120 bp, synthetic construct
  source 1..120: mol_type = other DNA
aacacgggagactacatttctccccattcttccccaacatagtgtgttaccaagtaattttagttttgacaatccaagtagttattagtgcagtgttaatttgaacttctcttactatga

SEQ ID NO: 108696 - DNA, 120 bp, synthetic construct
  source 1..120: mol_type = other DNA
tctagggtagaggacattgccaccatattaagatactttggagttagaaaataactctgcaaaaaattaactgtatgaaaaggaggactgtaacccttccagtttaaatcacttagtaag

SEQ ID NO: 108697 - DNA, 120 bp, synthetic construct
  source 1..120: mol_type = other DNA
tctttgttgcctggggactaggttgcctttgtaggactaacattagccacaacataagaaattatggtttaggagtcatgcagttggagtctacaagattctgaccctttctaaactgct

SEQ ID NO: 108698 - DNA, 120 bp, synthetic construct
  source 1..120: mol_type = other DNA
tgatggaaaggggtgggggtcagacatatctcattataccctctcccttttggagttcaagcacaactcaccagtgttaacattaaaacatatcttaagactgacacaacagactctttg

SEQ ID NO: 108699 - DNA, 120 bp, synthetic construct
  source 1..120: mol_type = other DNA
tctggtcgtcttcattgctacactcccaccagtactgtgacagtttacaaatgccatggcaacatcaggaagttaccctatatggtcaaaaaacaggaaactcattaataacccaccttt

SEQ ID NO: 108700 - DNA, 120 bp, synthetic construct
  source 1..120: mol_type = other DNA
ttccattacctacccaaatcctataaaacggccccacccctatctcccttcgatgactgtctttttggactcagacctcctgcacccaggtgaaataaacagcctcgttgctcacacaaa

SEQ ID NO: 108701 - DNA, 120 bp, synthetic construct
  source 1..120: mol_type = other DNA
acagtggttccaaatagccagaaaatggcacttttgatttttccatcctacaaaatctagataattcttgtcgtaaaatgggcaaacggtctgaggtccctgatatccaggcattctttt

SEQ ID NO: 108702 - DNA, 120 bp, synthetic construct
  source 1..120: mol_type = other DNA
cctccagaacctcctcccccaggagcttgctacaagtgccagcaatctggcctctgggccaaggaatgcctgcagcctgggcttcctcctagccatgtcccatctgtgcaggaccccact

SEQ ID NO: 108703 - DNA, 120 bp, synthetic construct
  source 1..120: mol_type = other DNA
tgtcctaaaaccagacaagccttacaggttagttcaggatctgcgccttatcaaccaaattgttttgcctatccaccccgaggtgccaaacccatatactctcctatccttaatacctcc

SEQ ID NO: 108704 - DNA, 120 bp, synthetic construct
  source 1..120: mol_type = other DNA
acttgggccctcactcttgcaaagggactacaaatcaatattaatactgactctaaatatgccttccatatcctgcaccaccatatgggcagaaagaaatttctcactatgcaagggtcc

SEQ ID NO: 108705 - DNA, 120 bp, synthetic construct
  source 1..120: mol_type = other DNA
tcaatcttcaggaaaggtaaaatggactaatggtcttttaaaaacacacctcacgaagctcagccaccaactttaaaaaaaggactctgtcaagaatagagcccaaaaactcaccaacca

SEQ ID NO: 108706 - DNA, 120 bp, synthetic construct; identical to SEQ ID NO: 28486
  source 1..120: mol_type = other DNA

SEQ ID NO: 108707 - DNA, 120 bp, synthetic construct; identical to SEQ ID NO: 28487
  source 1..120: mol_type = other DNA

SEQ ID NO: 108708 - DNA, 120 bp, synthetic construct; identical to SEQ ID NO: 28488
  source 1..120: mol_type = other DNA

SEQ ID NO: 108709 - DNA, 120 bp, synthetic construct
  source 1..120: mol_type = other DNA
actgaccctgctcattccaacgagtgattcctgcagttcagaagaaacaagagggatgggtaatataaaaatctggatcaatattctaattctgggctcattggaatcaggtagtgaccc

SEQ ID NO: 108710 - DNA, 120 bp, synthetic construct
  source 1..120: mol_type = other DNA
ggattgggacccctttctggtaacagagacaggcttgttatgaggctgaaatgaattaatattgtcaaaggcttagaatagtgcctggcacatggtatatacagtggaagtgcctattaa

SEQ ID NO: 108711 - DNA, 120 bp, synthetic construct
  source 1..120: mol_type = other DNA
acaggaagtggtaaagaagctggcccaaacccaccaaaaccaagatggcgatggaagtgacctctggtcatcctcactactcattatacactaattataatgcattagcatgttaaaaga

SEQ ID NO: 108712 - DNA, 120 bp, synthetic construct
  source 1..120: mol_type = other DNA
aaatgagtgactgaggaaaatgtcccagtcagtcgaggtttattaagtcagctttagggcatgtccctgaaaagcaatgagccacagacacatctgtggctgtttttacaaagaggcttt

SEQ ID NO: 108713 - DNA, 120 bp, synthetic construct
  source 1..120: mol_type = other DNA
aagtgctatgtgacgctcctgaaatctaattgctccaggtgcatcaacacaggtgctccattatgctgatgcattttcttaatgtgggtctttatttcctctgggttttgaaattgcctt

SEQ ID NO: 108714 - DNA, 120 bp, synthetic construct
  source 1..120: mol_type = other DNA
tttttttttaatgatgggaggagcaattgtttctttttacttccatcacctggcttccctaagctgtttctatggacctgtttgtgctgttccacaacaatctcccctgtagccattggg

SEQ ID NO: 108715 - DNA, 120 bp, synthetic construct
  source 1..120: mol_type = other DNA
ccaaatctatagctggcattagggttcactcttggtggtacacctcctgtgggtttggacaaatgcataatgacctgtatccactattttagtatcatatggaataatttcactgcccta

SEQ ID NO: 108716 - DNA, 120 bp, synthetic construct
  source 1..120: mol_type = other DNA
gctagtcccccatcccactgcttttataatctctgatctacttcagtggctggctgtggctgggtagtttccaaaaaccaggagaagggaagaaattggaatagttagaactaattagaa

SEQ ID NO: 108717 - DNA, 120 bp, synthetic construct
  source 1..120: mol_type = other DNA
agcatggcttgaagctctgagagcagcctgtaggtagcaaacacaataaagatcaagtcactgggctgtgaagccactggaattattcttgttcagaaatttattttttctccaggtaga

SEQ ID NO: 108718 - DNA, 120 bp, synthetic construct
  source 1..120: mol_type = other DNA
attacaggcatgcaccacaatgcccagcttttttttttttttttttttccccgagacagggtcttgctctattgcccaggctggagtgcagtggcacgatcttggctcactgaaacatct

SEQ ID NO: 108719 - DNA, 120 bp, synthetic construct
  source 1..120: mol_type = other DNA
tatccaaagtgtttacaattctaagaaatcatgtgtgtttaaagaactgctttactgatctaagaatctgacctgaggatggtgaatatgcagatgatgggggtgctgggcacctgggca

SEQ ID NO: 108720 - DNA, 120 bp, synthetic construct
  source 1..120: mol_type = other DNA
taagaatttgaggtcagagggtgaggtaactgaaaagcgagacttcatagtttgagtttgatgtagcagggctcggggagcccttgcaagtttttgagcaagactagaactattgactct

SEQ ID NO: 108721 - DNA, 120 bp, synthetic construct
  source 1..120: mol_type = other DNA
gggagagagatttggtctgataatccagtatcccctttgctttatttcagataatctcacattaggggtttctaagagtttctggtatttcccatgtgtttcccttaggcagggatgact

SEQ ID NO: 108722 - DNA, 120 bp, synthetic construct
  source 1..120: mol_type = other DNA
agtcccattgtagatgggatgaaaggcctgccaacataagcaaacacatttgatttataattttcatgatgcaattgtatttcagatacatgcaagattttgacctagagtagtaactca

SEQ ID NO: 108723 - DNA, 120 bp, synthetic construct
  source 1..120: mol_type = other DNA
ttgttctcacagttgcaagcacaaacattcttactcaggatgtagcctattaaccagcctgctttgctgaccagtccttggattaagcgaaaaattaacatccacgtataggttggggaa

SEQ ID NO: 108724 - DNA, 120 bp, synthetic construct
  source 1..120: mol_type = other DNA
tcctacttactatgatgttgggcaacctattcaaccatattcagtgtcttcatctggaaaagacccatctgacccagctgaaaagaggattaagtgagatattagaggtaaggagcttgg

SEQ ID NO: 108725 - DNA, 120 bp, synthetic construct
  source 1..120: mol_type = other DNA
atgttccacatagggaagcaatgctacttaaaagaataataaggcatggctagaataaatttggggaatctgggatagaggtctgagactcctcctacccctcagcagggctatttaaat

SEQ ID NO: 108726 - DNA, 120 bp, synthetic construct
  source 1..120: mol_type = other DNA
acccacgtttaattatatgcaaattaaggggtggcttatgcagaaatttctaggaaaagggtggtaacttctgggttgtagagtcattgccattaaaaggggctggagattgccatgttg

SEQ ID NO: 108727 - DNA, 120 bp, synthetic construct
  source 1..120: mol_type = other DNA
ttgctgcttgttaaaattaaaaaaaccctgggattggtgaggaattgcttttttgtctcaggtgacactcaaaatcattgatgaggaagttatgggttatacttgggtccactcttagtc

SEQ ID NO: 108728 - DNA, 120 bp, synthetic construct
  source 1..120: mol_type = other DNA
cttctgctgccagttgggccccaggcccctgtgaagtgcatatgccttgggggtgtgatatattaagccatcattattcatccttaacacatttgcaagttttaattcagcctaaaataa

SEQ ID NO: 108729 - DNA, 120 bp, synthetic construct
  source 1..120: mol_type = other DNA
ttacaaaagggatgagatcatctgttactctcccttccgacttgaagcttctgcatagcccccatggaagatttgctgtgtaatgttgaaatatctgtctatgaccccagagaatttgaa

SEQ ID NO: 108730 - DNA, 120 bp, synthetic construct
  source 1..120: mol_type = other DNA
attacttatagacaaatttattttttcctttctaatttcaatgcacatgcagataggtgtgtggacgtgatacaatgcaggcaccaggaggttgggccatttagcatctccctgctgtct

SEQ ID NO: 108731 - DNA, 120 bp, synthetic construct
  source 1..120: mol_type = other DNA
tccctatcttggcaacatttccaggagtcctaatatgctttggcctgttccttattgctgggacatgcacaaactagaatcattattgtcagcatctgaggacgttttaactaatccagt

SEQ ID NO: 108732 - DNA, 120 bp, synthetic construct
  source 1..120: mol_type = other DNA
actcattccctgtctccgcatcgacacggaggagccactggatataacgctgaggtattaaaaaaagaaggaagttcagaaaaacaaacacagtacgacagcatttgtaggaagtttttt

SEQ ID NO: 108733 - DNA, 120 bp, synthetic construct
  source 1..120: mol_type = other DNA
gagagccaaatcctgagtgaactcccattcacaattgctacaaacggaataaaatgcctaggaatacaacttacaagggacatgagggacttcttcaagaagaactacataccagtgctc

SEQ ID NO: 108734 - DNA, 120 bp, synthetic construct; identical to SEQ ID NO: 11978
  source 1..120: mol_type = other DNA

SEQ ID NO: 108735 - DNA, 120 bp, synthetic construct
  source 1..120: mol_type = other DNA
acaatggttaaactagtttacagtcccaccaacagtgtgaaagtgttcctgtttctccacatcctctccagcacctgttgtttcctgactttttaatgatcgccattctaactggtgtga

SEQ ID NO: 108736 - DNA, 120 bp, synthetic construct
  source 1..120: mol_type = other DNA
tgtctctgacatgccctggagacattttcctcattttcttggtgattagcctttggctcctcattacttatgcaagtttctgcagcaggcttgaatttctccttagaaaatgggtttttc

SEQ ID NO: 108737 - DNA, 120 bp, synthetic construct
  source 1..120: mol_type = other DNA
ggtagtatgcatttctgtgggatcagtggtgatatcccctttatcatttttttttgcatctatttgattcttttttttttccttttgtctttacatttctttttttttattattattata

SEQ ID NO: 108738 - DNA, 120 bp, synthetic construct
  source 1..120: mol_type = other DNA
ttgcttgagttcattgtagattctggatattagccctttgtcagatgagtaggtggcaaaaattttctcccattttgtaggttgcctgttcactctgatggtagtttcttttgctgtgca

SEQ ID NO: 108739 - DNA, 120 bp, synthetic construct
  source 1..120: mol_type = other DNA
aattgccctggccagaacttccaacactatgttgaataggagtggtgagagagggcatccctgtcttgtgccagttttcaaagggaatgcttccagtttttgcccactcagtatgatatt

SEQ ID NO: 108740 - DNA, 120 bp, synthetic construct
  source 1..120: mol_type = other DNA
atcccctttatcattttttattgtgtctatttgattcttctctctttttttctgtattagacttgctagtggtctatcaattttgttgatcctttcaaaaaaccagctcctggattcatt

SEQ ID NO: 108741 - DNA, 120 bp, synthetic construct
  source 1..120: mol_type = other DNA
agattgagaccatcgtggctaatatggtgaaaccccgtctctactaaaaaatacaaaaaaaatagcaaggcatggtgatgagtgcctgtagtcccagctactcaggaggctgaggcagga

SEQ ID NO: 108742 - DNA, 120 bp, synthetic construct; identical to SEQ ID NO: 11979
  source 1..120: mol_type = other DNA

SEQ ID NO: 108743 - DNA, 120 bp, synthetic construct; identical to SEQ ID NO: 11980
  source 1..120: mol_type = other DNA

SEQ ID NO: 108744 - DNA, 120 bp, synthetic construct; identical to SEQ ID NO: 11981
  source 1..120: mol_type = other DNA

SEQ ID NO: 108745 - DNA, 120 bp, synthetic construct
  source 1..120: mol_type = other DNA
ttatggctgcatagtattccatggtgtatatgtgccacattttctttttttatttttattttttatttatttatttattaatatactttaagttttagggtacatgtgcacattgtgcag

SEQ ID NO: 108746 - DNA, 120 bp, synthetic construct
  source 1..120: mol_type = other DNA
gtcttcttttgagaagtgtctgttcatatcctttgcccactttttgttgggattgtttgtttttttcttgtaaatttgtttgagttcattgtagattctggatattagccctttgtcaga

SEQ ID NO: 108747 - DNA, 120 bp, synthetic construct
  source 1..120: mol_type = other DNA
ggcaattgcaatatgcctggacaaggctgccgcaagggtttaagaattctcctaccatttttggtgctgggaaaattggctagccatatgtagaaagctgaaactggatcccttccttac

SEQ ID NO: 108748 - DNA, 120 bp, synthetic construct
  source 1..120: mol_type = other DNA
cacatacacaccatggaatactatgcagccataaaaaattatgagttcatgtcctttgtagggacatggatgaaactggaaaccatcattctcagcaaactatcacaaggacaaaaaacc

SEQ ID NO: 108749 - DNA, 120 bp, synthetic construct
  source 1..120: mol_type = other DNA
gaattggtggtgatatcccctttgtcattttttattgcatctacttgatttttctctcttttgttctttattagtcctgctagcagtctatcaattttgttgatcttttcaaaaaaccag

SEQ ID NO: 108750 - DNA, 120 bp, synthetic construct
  source 1..120: mol_type = other DNA
tctttgtatgtctctaaggactagctttatgaatctgggtgctcctgtattgggcacatatatatttaggatagttagctcttcttgttgaattgatccctttaccattatgtaatggcc

SEQ ID NO: 108751 - DNA, 120 bp, synthetic construct; identical to SEQ ID NO: 28489
  source 1..120: mol_type = other DNA

SEQ ID NO: 108752 - DNA, 120 bp, synthetic construct
  source 1..120: mol_type = other DNA
agtaatgggatggctgggtcaaatggtatttctagttctagatccttgaggaatcgccacactgtcttccacaatggttgaactagtttacagtcccacaaacagtgtgaaagtgtttct

SEQ ID NO: 108753 - DNA, 120 bp, synthetic construct
  source 1..120: mol_type = other DNA
atggtgcgcagtcaaaccttttaatgatgtggttctggtggggtttataaagggaggtggacccctgggaagatgctttcctgaaccacaacccccacacttgggtcaccatttcctctt

SEQ ID NO: 108754 - DNA, 120 bp, synthetic construct
  source 1..120: mol_type = other DNA
aaatggtcctcccccaccacagctgttggtgatcttttgaaaaagagaagttggaaagggttctggccagagaataaggagacttaagattgaattttgcctttgcccttaacttgctgt

SEQ ID NO: 108755 - DNA, 120 bp, synthetic construct
  source 1..120: mol_type = other DNA
ttagtacagacggagtttcaccatgttggttagccaggatggtcttgcaggatggtcttgatctctttttttttttttttttttgagatggagtcttgctctgtcgcccaggctggagtg

SEQ ID NO: 108756 - DNA, 120 bp, synthetic construct
  source 1..120: mol_type = other DNA
gtctgacctgtgcacagaagaatgtctttccccaggaaaaggctgtcattctcccattaggctcccactcaccggatcattgtgggatacagttccccagtatacaggaagatgcagttg

SEQ ID NO: 108757 - DNA, 120 bp, synthetic construct
  source 1..120: mol_type = other DNA
agagcccatgactgagaataaatcccaaattggaagcaaataattcattggcaggattgttccttctgactatgtttcccttaactgtcatgggattgctatggtgatgggaaggaagga

SEQ ID NO: 108758 - DNA, 120 bp, synthetic construct
  source 1..120: mol_type = other DNA
tgaagccctgggaggttatcatgggaagtctcaggggatctcacctccatactcaatttggctccttcttcccgcttcccattgatccgggcgactctctgcagggccctcagggtgagg

SEQ ID NO: 108759 - DNA, 120 bp, synthetic construct
  source 1..120: mol_type = other DNA
ggaatttcagtggaggtatggatgaggagctgggttcagaatatctgggaactgccccctccacactcttgattttttttttttttctgctcctcctcaacctattctcctggctagagt

SEQ ID NO: 108760 - DNA, 120 bp, synthetic construct
  source 1..120: mol_type = other DNA
agtgctgggattacaggtgtgagccactgcgcctggcccgcaatcctgtttttaaatgaggggtcagggcggcatgagcctgagaaaaggttgttctattggcaggaaggtgagacccga

SEQ ID NO: 108761 - DNA, 120 bp, synthetic construct
  source 1..120: mol_type = other DNA
tttttctttttaactcagcagttaaaaaactcagcagttaatttctccatgtactttttttttttttttaacaaaggcccccatcttcccatcttggcccctggatggggagccccaggt

SEQ ID NO: 108762 - DNA, 120 bp, synthetic construct
  source 1..120: mol_type = other DNA
gctttgggaggcctagttgggaagattgcttgaggccaagagttcgagatcagcctgagcaacatagcgagactctgactctacaaaaaataaaacataaaattcatctttatattccca

SEQ ID NO: 108763 - DNA, 120 bp, synthetic construct; identical to SEQ ID NO: 15397
  source 1..120: mol_type = other DNA

SEQ ID NO: 108764 - DNA, 120 bp, synthetic construct; identical to SEQ ID NO: 15398
  source 1..120: mol_type = other DNA

SEQ ID NO: 108765 - DNA, 120 bp, synthetic construct
  source 1..120: mol_type = other DNA
gttccattggtctatatacctgttgtggtaccagtaccatgctgttttggttacggtagcctagtttggagtcaggtagtgtgatgcctccagctttgttctttgcttaggattgccttg

SEQ ID NO: 108766 - DNA, 120 bp, synthetic construct
  source 1..120: mol_type = other DNA
actgacttccacaatggttgaactagtttacagtcccaccaacagtgtaaaagtgttcctatttctccacatcctctccagcacctgttgtttcctgacattttaatgattgccattcta

SEQ ID NO: 108767 - DNA, 120 bp, synthetic construct
  source 1..120: mol_type = other DNA
caggtagtgtgatgcctccagctttgttcttttggcttaggattgacttggagatgcgggctcttttttggttccatatgaactttaaagtagttttttccaattctgtgaagaaagtca

SEQ ID NO: 108768 - DNA, 120 bp, synthetic construct
  source 1..120: mol_type = other DNA
ttctattgattggaatagtttcagaaggaatggtaccagctcctccttgtacctctggtagaattcggctgtgaatccatctggtcctggactctttttggttggtaaactattgattat

SEQ ID NO: 108769 - DNA, 120 bp, synthetic construct; identical to SEQ ID NO: 67073
  source 1..120: mol_type = other DNA

SEQ ID NO: 108770 - DNA, 120 bp, synthetic construct
  source 1..120: mol_type = other DNA
tcactttcaggtacaccaatcagacgtagatttggtcttttcacatagtcccatatttcttggaggctttgctcatttcttttgattcttttttctctaaacttcccttctcgcttcatt

SEQ ID NO: 108771 - DNA, 120 bp, synthetic construct
  source 1..120: mol_type = other DNA
ttgcagtttgatctcagactgctgtgctagcaatcagcgagattccgtgggcgtaggaccctctgagccaggtgtgggatatagtctcctggtgcgccgtttttcaagccggtctgaaaa

SEQ ID NO: 108772 - DNA, 120 bp, synthetic construct; identical to SEQ ID NO: 32126
  source 1..120: mol_type = other DNA

SEQ ID NO: 108773 - DNA, 120 bp, synthetic construct; identical to SEQ ID NO: 32127
  source 1..120: mol_type = other DNA

SEQ ID NO: 108774 - DNA, 120 bp, synthetic construct
  source 1..120: mol_type = other DNA
aaaaccctggaagaaaacctaggcaataccattcaggacataggcatgggcaaggacttcatgtctaaaacaccaaaagcaatggcaacagaagtcaaaattgacaaatggaatcgaatt

SEQ ID NO: 108775 - DNA, 120 bp, synthetic construct; identical to SEQ ID NO: 32128
  source 1..120: mol_type = other DNA

SEQ ID NO: 108776 - DNA, 120 bp, synthetic construct; identical to SEQ ID NO: 32129
  source 1..120: mol_type = other DNA

SEQ ID NO: 108777 - DNA, 120 bp, synthetic construct; identical to SEQ ID NO: 32130
  source 1..120: mol_type = other DNA

SEQ ID NO: 108778 - DNA, 120 bp, synthetic construct
  source 1..120: mol_type = other DNA
ctagtgagccacagctcaaaaggcaaaagaggacaaaagccccctaggatgaagaaatgaaggacctttgaacatctttatttctgccttcatttcgttatgtacccagtagtcattcag

SEQ ID NO: 108779 - DNA, 120 bp, synthetic construct
  source 1..120: mol_type = other DNA
ctatgtgtgtctctgcatgtgagatgggtttcctgaacacagcacactgatgggtcttgaatcttttttttttttttttttgagacggagtttcgctctgtcgcccatgctggagtgcag

SEQ ID NO: 108780 - DNA, 120 bp, synthetic construct
  source 1..120: mol_type = other DNA
caggctctgaaattgtggcaataatcaatagcttacgaaccaaaaaaagtccaggaccagatggattcacagccgaattctaccagaggtacaaggaggagctggtaccattccttctga

SEQ ID NO: 108781 - DNA, 120 bp, synthetic construct
  source 1..120: mol_type = other DNA
ggggatgtgaaggacctcttcaagcagaactacaaaccactgctcaaggaaataaaagaggatacaaacaaatggaagaacattccatgctcatgggtaggaagaatcaatatcgtgaaa

SEQ ID NO: 108782 - DNA, 120 bp, synthetic construct
  source 1..120: mol_type = other DNA
caacctacaaaatgggagaaaattttcgcaacctactcatctgacaaagggctaatatccagaatctacaatgaactcaaacaaatttacaagaaaaaaacaaacaacccatcaaaaagg

SEQ ID NO: 108783 - DNA, 120 bp, synthetic construct; identical to SEQ ID NO: 32131
  source 1..120: mol_type = other DNA

SEQ ID NO: 108784 - DNA, 120 bp, synthetic construct
  source 1..120: mol_type = other DNA
tttactaccttgccctttatagaaaaagttttctgactcctgccctgggcattttttatttatttatttatttttttgagacggagtctcactctgtcacccaggctggcatgccgtggc

SEQ ID NO: 108785 - DNA, 120 bp, synthetic construct; identical to SEQ ID NO: 22397
  source 1..120: mol_type = other DNA

SEQ ID NO: 108786 - DNA, 120 bp, synthetic construct
  source 1..120: mol_type = other DNA
tgttgtttcctgactttttaatgattgccattctaactggtgtgagatgatattccatgctcatgggtaggaagaatcaatatcgtgaaaatggccatactgccattttcataatttcat

SEQ ID NO: 108787 - DNA, 120 bp, synthetic construct; identical to SEQ ID NO: 22398
  source 1..120: mol_type = other DNA

SEQ ID NO: 108788 - DNA, 120 bp, synthetic construct; identical to SEQ ID NO: 22399
  source 1..120: mol_type = other DNA

SEQ ID NO: 108789 - DNA, 120 bp, synthetic construct; identical to SEQ ID NO: 22400
  source 1..120: mol_type = other DNA

SEQ ID NO: 108790 - DNA, 120 bp, synthetic construct
  source 1..120: mol_type = other DNA
ggctgaccctccacctccctcccggacacggcggctgccgggcggagacgctcctcacttcccagacggggtggctgccgggcggaggggctcctcatttctcagacggggcggctgccg

SEQ ID NO: 108791 - DNA, 120 bp, synthetic construct; identical to SEQ ID NO: 22401
  source 1..120: mol_type = other DNA

SEQ ID NO: 108792 - DNA, 120 bp, synthetic construct; identical to SEQ ID NO: 3800
  source 1..120: mol_type = other DNA

SEQ ID NO: 108793 - DNA, 120 bp, synthetic construct; identical to SEQ ID NO: 15283
  source 1..120: mol_type = other DNA

SEQ ID NO: 108794 - DNA, 120 bp, synthetic construct
  source 1..120: mol_type = other DNA
gtggaggttgcagtgagctgagatcatgccactgtactccagcctggccaacagagcaaggctccatctcaaaaaatatatatattatatacatatatataaaatatttttttaatgtag

SEQ ID NO: 108795 - DNA, 120 bp, synthetic construct
  source 1..120: mol_type = other DNA
cggctgggcagaggcgctcctcacatcccagacggggcggtggggcagaggcgctccccacatctcagacgatgggcggccgggcagagacgctcctcacttcctagatgggatggcggc

SEQ ID NO: 108796 - DNA, 120 bp, synthetic construct
  source 1..120: mol_type = other DNA
ttcatgacattctcctatctcaggctcccaagtagctgggactacaggcgcccgtcaccgtgtctggctaatttttgtattttttttagtagagatggggtttcaccatgttagccggga

SEQ ID NO: 108797 - DNA, 120 bp, synthetic construct
  source 1..120: mol_type = other DNA
ccacaaagggaaacccatcagactaacagcagatctctcgacagaaactgatctcccgacagatctctggccagaagagagtgggggccaatattcaacattcttaaagaaaagaatttt

SEQ ID NO: 108798 - DNA, 120 bp, synthetic construct
  source 1..120: mol_type = other DNA
acatctacagaactctctaccccaaatcaacagaatatacattcttctcagcaccacatggcacttattccaaaattgaccacatagttggaagtaaagccctcttcagcaaatgtaaaa

SEQ ID NO: 108799 - DNA, 120 bp, synthetic construct
  source 1..120: mol_type = other DNA
atatttaaaaaacagaaataggccaggtgagaatttgaggagtttgagaccagcctgggcaacatgacaaatgcccgtctctacagagaatacaaaaattagctgggtgtggtggcatgt

SEQ ID NO: 108800 - DNA, 120 bp, synthetic construct
  source 1..120: mol_type = other DNA
gttggcgtactgataatttcatatatataactgaatatagaaaaacaacaaatgtgtgctactaaatcaatgtcacactttttattttaatacatacctttttttgaggatgcacccagg

SEQ ID NO: 108801 - DNA, 120 bp, synthetic construct
  source 1..120: mol_type = other DNA
gagatggtgccactgcacccagcctgggtgacaaagcaagactccatctcaataaataaaaaataaacacaacgaggactggtgcagtgggtcatgcctgtaatcttttttttttttttt

SEQ ID NO: 108802 - DNA, 120 bp, synthetic construct
  source 1..120: mol_type = other DNA
tcgatctcctggactcaagcagtcttcctgcctcagcttccctagtaactgggactacagtagtgagccactgcacacaacttcaatgtggaatttttaaatttttgaatcttaaataat

SEQ ID NO: 108803 - DNA, 120 bp, synthetic construct
  source 1..120: mol_type = other DNA
catccccctcttcgagaaacacccacaaatgatcaataaatactaagggaactcagaggctggcgggatcctccatatgctgaacgctggttccccgggtccccttatttctgtctctat

SEQ ID NO: 108804 - DNA, 120 bp, synthetic construct
  source 1..120: mol_type = other DNA
tactgccatagaggccttctttcagtccctaggatacaccaaattcttagtacattgatatggtttggctgtgtccccatccaaatctcaccttgaattgtaataatccccacaagtcaa

SEQ ID NO: 108805 - DNA, 120 bp, synthetic construct
  source 1..120: mol_type = other DNA
tgcgctccagcctgggcgacagagcaagacactgtctcaaaaataatgtatattttacaaagaattagcatgtgaataccttttatgtgccaggcactgtactaagtgcactacatctag

SEQ ID NO: 108806 - DNA, 120 bp, synthetic construct
  source 1..120: mol_type = other DNA
cctataatcccagcactttgggaggctgaggcgggcggatcacgaggtcaggagatcaagaccatcctggctaacatggtgaaaccccgtctctactaaaaaaatacaaaaaagttagcc

SEQ ID NO: 108807 - DNA, 120 bp, synthetic construct
  source 1..120: mol_type = other DNA
tcccaaagtgctgagattataggtgtgagccaccgcacccggcccacagtttctaaagtagtaatttagttctagaaacagcagggaatatgattataagagcagtcacaatgttctcaa

SEQ ID NO: 108808 - DNA, 120 bp, synthetic construct; identical to SEQ ID NO: 23426
  source 1..120: mol_type = other DNA

SEQ ID NO: 108809 - DNA, 120 bp, synthetic construct; identical to SEQ ID NO: 23427
  source 1..120: mol_type = other DNA

SEQ ID NO: 108810 - DNA, 120 bp, synthetic construct
  source 1..120: mol_type = other DNA
aaggtggaggttgcagtgagtggagatcgtgccactgcactctagcctgggtgacagagcaagactctgtgaaagaaagaaaaagaaagaaagaaagaaagaaagaaagaaagaaagaaa

SEQ ID NO: 108811 - DNA, 120 bp, synthetic construct; identical to SEQ ID NO: 14303
  source 1..120: mol_type = other DNA

SEQ ID NO: 108812 - DNA, 120 bp, synthetic construct; identical to SEQ ID NO: 3724
  source 1..120: mol_type = other DNA

SEQ ID NO: 108813 - DNA, 120 bp, synthetic construct; identical to SEQ ID NO: 14305
  source 1..120: mol_type = other DNA

SEQ ID NO: 108814 - DNA, 120 bp, synthetic construct
  source 1..120: mol_type = other DNA
tgttctcactcataggtgggaattgaacaataagaacatttggacacagggtggggaacatcacacactggggcctgttgtggggtggggagaggggggagggatagcattaggagatat

SEQ ID NO: 108815 - DNA, 120 bp, synthetic construct; identical to SEQ ID NO: 14306
  source 1..120: mol_type = other DNA

SEQ ID NO: 108816 - DNA, 120 bp, synthetic construct
  source 1..120: mol_type = other DNA
gctgcataaatgttttcttttgagaagtctctgttcatctccttcgcccacttgttgatggggttgtttgcttttttcttgtaaatttgtttgagttcattgtagattctggatattagc

SEQ ID NO: 108817 - DNA, 120 bp, synthetic construct; identical to SEQ ID NO: 14307
  source 1..120: mol_type = other DNA

SEQ ID NO: 108818 - DNA, 120 bp, synthetic construct; identical to SEQ ID NO: 14308
  source 1..120: mol_type = other DNA

SEQ ID NO: 108819 - DNA, 120 bp, synthetic construct; identical to SEQ ID NO: 14309
  source 1..120: mol_type = other DNA

SEQ ID NO: 108820 - DNA, 120 bp, synthetic construct
  source 1..120: mol_type = other DNA
gccatcagagaaatacaaatcaaaaccacaatgagataccatctcacaccagttagaagggcaatcattaagaagtcaggaaacaacaggtgctggagaggatgtagagaaataggaaca

SEQ ID NO: 108821 - DNA, 120 bp, synthetic construct; identical to SEQ ID NO: 19471
  source 1..120: mol_type = other DNA

SEQ ID NO: 108822 - DNA, 120 bp, synthetic construct; identical to SEQ ID NO: 19472
  source 1..120: mol_type = other DNA

SEQ ID NO: 108823 - DNA, 120 bp, synthetic construct; identical to SEQ ID NO: 7899
  source 1..120: mol_type = other DNA

SEQ ID NO: 108824 - DNA, 120 bp, synthetic construct
  source 1..120: mol_type = other DNA
ctgccgggcggagacgctcctcacttcccagacggggcggctgccgggcggagggtctcctcacttctcagacggggcggccgagcagaggcgctcctcacatcccagacggggcggcgg

SEQ ID NO: 108825 - DNA, 120 bp, synthetic construct; identical to SEQ ID NO: 7900
  source 1..120: mol_type = other DNA

SEQ ID NO: 108826 - DNA, 120 bp, synthetic construct
  source 1..120: mol_type = other DNA
gaagtccttgcccatgcctatgtcctgaatggtaatgcctaggttttcttctaggggttttatggttttaggtctaacgtttaagtctttaatccatcttgaattgatttttgtataagg

SEQ ID NO: 108827 - DNA, 120 bp, synthetic construct
  source 1..120: mol_type = other DNA
cttccagtttttacccagtcagtatgatattggctgtgggtttgtcatagatagctgttattattttgagatacatcccatcaatacctaatttattgaaagtttttagcatgaagtgtt

SEQ ID NO: 108828 - DNA, 120 bp, synthetic construct
  source 1..120: mol_type = other DNA
gctttgaatgcgtcccagagattctggtatgttgtgtctttgttctcgttggtttcaaagagcgtctttatttctgccttcatttcgttatgtacccagtagtcattcaggagcaggttg

SEQ ID NO: 108829 - DNA, 120 bp, synthetic construct
  source 1..120: mol_type = other DNA
aaagttaatattgttatgtgtgaatttgatcctgtcattatgatgttagctggttattttgctcgtttgttaatgcagtttcttcctagtctcgacggtctttacattttggcatgattt

SEQ ID NO: 108830 - DNA, 120 bp, synthetic construct
  source 1..120: mol_type = other DNA
cctcacacggccggttactccaacagacctgcagctgagggtcctgtctgttagaaggaaaactaacaaacagaaaggacatccacaccaaaaacccatctgtacatcaccatcatcaaa

SEQ ID NO: 108831 - DNA, 120 bp, synthetic construct
  source 1..120: mol_type = other DNA
tccatctggtcctggactctttttggttggtaagctattattgccacaatttcagatcctgttattggtcgacatgattgtatatctagaaaaccccattgtctcagcccaaagtctcct

SEQ ID NO: 108832 - DNA, 120 bp, synthetic construct
  source 1..120: mol_type = other DNA
agataccatctcacaccagttagaatggcgatcattaaaaagtcaggaaacaacaggtgctggagaggatgtggagaaataggaacacttttacactgttggtggggctgtaaactagtt

SEQ ID NO: 108833 - DNA, 120 bp, synthetic construct; identical to SEQ ID NO: 24396
  source 1..120: mol_type = other DNA

SEQ ID NO: 108834 - DNA, 120 bp, synthetic construct; identical to SEQ ID NO: 24397
  source 1..120: mol_type = other DNA

SEQ ID NO: 108835 - DNA, 120 bp, synthetic construct; identical to SEQ ID NO: 24398
  source 1..120: mol_type = other DNA

SEQ ID NO: 108836 - DNA, 120 bp, synthetic construct; identical to SEQ ID NO: 13694
  source 1..120: mol_type = other DNA

SEQ ID NO: 108837 - DNA, 120 bp, synthetic construct
  source 1..120: mol_type = other DNA
accgtcagagtgaacaggcaacctacagaatgggagaaaagttttgcaatctactcatctgacaaagggctaatatccagaatctacaaagaactcaaacaaatttacaagaaaaaaaca

SEQ ID NO: 108838 - DNA, 120 bp, synthetic construct
  source 1..120: mol_type = other DNA
ccggggcctgttgtggggtagggggaggggggaggatagcattaggagatatatctaatgtaaatgatgagttaatgggtgcaggacaccaacatggcacatgtatacatatgtaacaaa

SEQ ID NO: 108839 - DNA, 120 bp, synthetic construct; identical to SEQ ID NO: 7049
  source 1..120: mol_type = other DNA

SEQ ID NO: 108840 - DNA, 120 bp, synthetic construct; identical to SEQ ID NO: 7050
  source 1..120: mol_type = other DNA

SEQ ID NO: 108841 - DNA, 120 bp, synthetic construct
  source 1..120: mol_type = other DNA
ctcacaccaatgggagcctctgtttatgtcgggagccatcaaatagtcatcttccccctaccatcccccgcccactctccgtcgcgctgcgctgcgtcgctttcagcctctggtgaaggg

SEQ ID NO: 108842 - DNA, 120 bp, synthetic construct; identical to SEQ ID NO: 24766
  source 1..120: mol_type = other DNA

SEQ ID NO: 108843 - DNA, 120 bp, synthetic construct
  source 1..120: mol_type = other DNA
agattgcttgagcccaggagtttgaggttgcagtgagccgtgatcatgctactgcactctagcctgggtgacagagcaagatcctgtctctaaaaatattaaaatgaataaataaaagaa

SEQ ID NO: 108844 - DNA, 120 bp, synthetic construct
  source 1..120: mol_type = other DNA
tcaaactcctgggctcaagcaagcagtcctcccagctcagtctcccaaagtgttgggattacaggcatgagccaaggtgtctggcctgaaaatttatatatatatatataatatatatat

SEQ ID NO: 108845 - DNA, 120 bp, synthetic construct
  source 1..120: mol_type = other DNA
acatgctctcttacctccatggggttgatgagggtctgggagatggccacagccagggagccagcaaggagacgctcctggaagggcggggacccttgtattccacagaagtaattcttg

SEQ ID NO: 108846 - DNA, 120 bp, synthetic construct; identical to SEQ ID NO: 19636
  source 1..120: mol_type = other DNA

SEQ ID NO: 108847 - DNA, 120 bp, synthetic construct; identical to SEQ ID NO: 35219
  source 1..120: mol_type = other DNA

SEQ ID NO: 108848 - DNA, 120 bp, synthetic construct; identical to SEQ ID NO: 98868
  source 1..120: mol_type = other DNA

SEQ ID NO: 108849 - DNA, 120 bp, synthetic construct
  source 1..120: mol_type = other DNA
agttggattcctaggtattttattctctttgaagcaattgtgaatgggagttcacccatgatttggctctctgtttgtctgttgttggtgtataagaatgcttgtgatttttgtacattg

SEQ ID NO: 108850 - DNA, 120 bp, synthetic construct
  source 1..120: mol_type = other DNA
tatcaccaccgatcccacagaaatacaaactaccatcagagaatactacaaacacctctacgcaaataaactagaaaatctagaagaaatggatacattcctcgacacatacactctccc

SEQ ID NO: 108851 - DNA, 120 bp, synthetic construct
  source 1..120: mol_type = other DNA
taagtctctttgtaggtcactgaggacttgctttatgaatctgggtgctcctgtattgggtgcataaatatttaggatagttagctcctcttgttgaattgatccctttaccattatgta

SEQ ID NO: 108852 - DNA, 120 bp, synthetic construct
  source 1..120: mol_type = other DNA
actttcaggtacaccaatcagacgtagatttggtcttttcacatagtcccacatttcttggaggctttgctcatttctttttattcttttttctctaaacttcccttctcgcttcatttc

SEQ ID NO: 108853 - DNA, 120 bp, synthetic construct
  source 1..120: mol_type = other DNA
gcaagcctgggcaatggcgggcgcccctcccccagcctcgttgccgccttgcagtttgatctcagactgctgtgctagcaatcagcgagattccgtgggcgtaggaccctccgagccagg

SEQ ID NO: 108854 - DNA, 120 bp, synthetic construct; identical to SEQ ID NO: 8873
  source 1..120: mol_type = other DNA

SEQ ID NO: 108855 - DNA, 120 bp, synthetic construct; identical to SEQ ID NO: 27030
  source 1..120: mol_type = other DNA

SEQ ID NO: 108856 - DNA, 120 bp, synthetic construct; identical to SEQ ID NO: 27031
  source 1..120: mol_type = other DNA

SEQ ID NO: 108857 - DNA, 120 bp, synthetic construct; identical to SEQ ID NO: 27032
  source 1..120: mol_type = other DNA

SEQ ID NO: 108858 - DNA, 120 bp, synthetic construct
  source 1..120: mol_type = other DNA
tcaaggaaataaaagaggatacaaacaaatggaagaacattccatgctcatgggtaggaagaatcaatatcgtgaaaatggccatacagcccaaggtaatttatagattcaatgccatcc

SEQ ID NO: 108859 - DNA, 120 bp, synthetic construct
  source 1..120: mol_type = other DNA
gaaataccatttgacccagccatctcattactgggtatacacccaaaggactataaatcatgctgctataaagacacgtgcacacgtatgtttattgtggcattattcacaatagcaaag

SEQ ID NO: 108860 - DNA, 120 bp, synthetic construct; identical to SEQ ID NO: 29926
  source 1..120: mol_type = other DNA

SEQ ID NO: 108861 - DNA, 120 bp, synthetic construct; identical to SEQ ID NO: 29886
  source 1..120: mol_type = other DNA

SEQ ID NO: 108862 - DNA, 120 bp, synthetic construct; identical to SEQ ID NO: 31652
  source 1..120: mol_type = other DNA

SEQ ID NO: 108863 - DNA, 120 bp, synthetic construct
  source 1..120: mol_type = other DNA
aaaatgctagaccaatttttaaatttttttgtagaaatggggtctcactatgttgcctaggctgttctcaaacttctggcctcaagccatcctttcatcttggccttccaaagcactggg

SEQ ID NO: 108864 - DNA, 120 bp, synthetic construct
  source 1..120: mol_type = other DNA
gcccgagggaactagtcaccctcttctggcctcttcttgccccagccttccaggacaggttcctgcccctctgctatggcgggctatgggaggccagagatctgaggaccctggaccctg

SEQ ID NO: 108865 - DNA, 120 bp, synthetic construct
  source 1..120: mol_type = other DNA
gtggcacaatctcggctcaatggaacctccgcctcccgggttcaagcaattcttctgcctcagcctcctgagtagctggggttacaggtgtgtgccaccatgcctggctaatttttgtat

SEQ ID NO: 108866 - DNA, 120 bp, synthetic construct
  source 1..120: mol_type = other DNA
taaaaacttaaaaaaaaaaagaacacgtctcactacacccattgcacagagggcagatactaaggtctaaaatgtgaaaaggtcttgcccaaggtcacttggagaatggtgggcagagat

SEQ ID NO: 108867 - DNA, 120 bp, synthetic construct
  source 1..120: mol_type = other DNA
actgagttctagagcagagcccctactcagatgtctgggataacctgctccccaaagaaagcccggtatgctccaagggacatcctgtaccagaaatatctattcccgcttgttctctac

SEQ ID NO: 108868 - DNA, 120 bp, synthetic construct
  source 1..120: mol_type = other DNA
cagcaaactcattcattatttactgtggtcatggtgggtcgagggagcagctggactgtgggaggccccaaacaaggagtttggacttttacaggaagctctggagacctaggaggtttc

SEQ ID NO: 108869 - DNA, 120 bp, synthetic construct
  source 1..120: mol_type = other DNA
aacgagatcctggggaagggactgatttctctgagcctcagtttcctcatccgtcgttcctacctcatactgttttcaaaaaggtacttcagactgggcatagtggctcacagctgtaat

SEQ ID NO: 108870 - DNA, 120 bp, synthetic construct
  source 1..120: mol_type = other DNA
aaaaaaagtttttaaaaaattagctaggcttggtgacatggacctgtagtcccagctactcagaggctgaggcaggaggatcacttaagactaagaggttgaggctgcagtgagtgatga

SEQ ID NO: 108871 - DNA, 120 bp, synthetic construct
  source 1..120: mol_type = other DNA
tcacctgagctcgagagttaaagactagactggccaacatggtgaaaccctgtttttactaaaaatacaaaaattagccaggtgtggtggcacacgcctgtaatcttggctactcaggag

SEQ ID NO: 108872 - DNA, 120 bp, synthetic construct
  source 1..120: mol_type = other DNA
agggctgtgagaccagggaatgcaggtaaagcggacctactctgtggttagcccatggctaatagaaccattgccggtgcccctgtcaacactgaaggcccagttgcttcactgcctctc

SEQ ID NO: 108873 - DNA, 120 bp, synthetic construct
  source 1..120: mol_type = other DNA
gtatctttgagggttgaaaaaaatacagtggggccagtcctgaagctagggtgtggcaggaggggctcagtaactggtcattgtcatcagcactgtttaacttctctcttgtatgtgaat

SEQ ID NO: 108874 - DNA, 120 bp, synthetic construct
  source 1..120: mol_type = other DNA
tattaccgcatggctgccctggtgtactatggattccgcatgcggcccaacgacatcgtctatgactgcctccccctctaccactcagcaggtaactctagggctgtcacacagcctcca

SEQ ID NO: 108875 - DNA, 120 bp, synthetic construct
  source 1..120: mol_type = other DNA
gagaatggtttgaacccaggaggcaaaggttgcagtgagcctagatcgtgccattgcacatcagcctgggtgacagggcaagactctgtctcaaaataaataaataaattaatttaattt

SEQ ID NO: 108876 - DNA, 120 bp, synthetic construct
  source 1..120: mol_type = other DNA
tccctttcccctagttaccctcttcccaactacactccggggcatctgtcttatagctgaggtggccagtcattccaaagggctcatttgtggcaaagttcccattgttcagatgggaag

SEQ ID NO: 108877 - DNA, 120 bp, synthetic construct
  source 1..120: mol_type = other DNA
gggtttcaccgttttagccgggatggtctcgatctcctgacctcgtgatccgcccgcctcggcctcccaaagtgctgggattacaggcgtgagccaccgcgcccggccaagcaattctct

SEQ ID NO: 108878 - DNA, 120 bp, synthetic construct
  source 1..120: mol_type = other DNA
ctggcaaacaggatgaaacccatctttactaaaaaataaaaaaaaaaaattagctgggcctgttggcgtgtgcctgtaatctcagctactcaggaggctaaggcaggagaattgcttgaa

SEQ ID NO: 108879 - DNA, 120 bp, synthetic construct
  source 1..120: mol_type = other DNA
ttccttctggagagacccggttggctgttacttgacctctgcacacagcctggccgggcagttggtaaagtgacctgcctgtgtagaggtgagcagacggggctggcagagaagacacac

SEQ ID NO: 108880 - DNA, 120 bp, synthetic construct
  source 1..120: mol_type = other DNA
aacatggtgaaatgccatctccactaaaaatacaaacataaaaataaaaaaattaggctgagcatggtggctcacacctgtaatctcagcactttgggaggccaaggcagatggattgcc

SEQ ID NO: 108881 - DNA, 120 bp, synthetic construct
  source 1..120: mol_type = other DNA
acgttgtcgtcatatcagtcctgccttgatggtgggcactccctagccaatgtggcttctgccagagagtgggtacctggagtgcctaaagcatcggggagggtttaggacttcagtgtg

SEQ ID NO: 108882 - DNA, 120 bp, synthetic construct
  source 1..120: mol_type = other DNA
tacaacattgcttttgccaccttctgttggttaaagcaagttgtaaagccagtccagattgaggccaatggagattgaaaaagtcgagctcttgccaggagaagtgccaaagccacatag

SEQ ID NO: 108883 - DNA, 120 bp, synthetic construct
  source 1..120: mol_type = other DNA
aattatactagttcagagatgttaaaatctgcaagcacgtccgtgttagaatccagagaatacggttgagcacctgccttatggggctgatgtacagatgaaataagctcacactgttac

SEQ ID NO: 108884 - DNA, 120 bp, synthetic construct
  source 1..120: mol_type = other DNA
cttataaatggaaccagagcagaagtccccagactcaggaagtcaacagagtgggcagggacagtggtagcatccatctggtggccaaagagaatcgtagccccagagctgcccaagttc

SEQ ID NO: 108885 - DNA, 120 bp, synthetic construct
  source 1..120: mol_type = other DNA
agtgctgtgattacaggcatgagcctctgtgcccagccacatttttaatttttattttggcttgtcactgactcgaagctcaaatcactcttgattacgataaatgaatgcccagctaag

SEQ ID NO: 108886 - DNA, 120 bp, synthetic construct; identical to SEQ ID NO: 4504
  source 1..120: mol_type = other DNA

SEQ ID NO: 108887 - DNA, 120 bp, synthetic construct
  source 1..120: mol_type = other DNA
tcccacctcagcctccccagtattgagtagctgggactacaggtgtaagccaccatgccaagctaattaaaacatggtttgtttgtttgtttgtttgtttgtttgtttctttctttcttt

SEQ ID NO: 108888 - DNA, 120 bp, synthetic construct; identical to SEQ ID NO: 15612
  source 1..120: mol_type = other DNA

SEQ ID NO: 108889 - DNA, 120 bp, synthetic construct
  source 1..120: mol_type = other DNA
cagtatctttggctctgccctcagcctctgaatcccagaaaggtctctcttgccctttccttcaagctcccaggttcgttcgttctttctttctttctttctttctttctttctttcttt

SEQ ID NO: 108890 - DNA, 120 bp, synthetic construct
  source 1..120: mol_type = other DNA
ggaacatcacactctggggactgttgtggggtggggggaggggggagggatggcattaggagatatacctaatgctaaatgacgagttgatgggtgcagcacaccagcatgccacatgta

SEQ ID NO: 108891 - DNA, 120 bp, synthetic construct
  source 1..120: mol_type = other DNA
atttagatgaaatattcagaatatataaatccatagagacagaagggagatggtggttgccagggcctggggaaggagggattagagagtgactccttaacgagtttggggttttccttt

SEQ ID NO: 108892 - DNA, 120 bp, synthetic construct
  source 1..120: mol_type = other DNA
cttggctgctggatcacatttccatacctactagaagcagcaaccagcttgttctctgtttcctagaagagcttttccaaatatgatagcagaacaattgctcatatagagagaatccag

SEQ ID NO: 108893 - DNA, 120 bp, synthetic construct
  source 1..120: mol_type = other DNA
tctgctcttggccatagtgatctgtgggtttgccagttctgcatgaccagaaggtggaaggagagatgaagcatttctgaatgacctaaggttttcctatcctcttattttatgaatatt

SEQ ID NO: 108894 - DNA, 120 bp, synthetic construct
  source 1..120: mol_type = other DNA
ttagacctaactgctgggatatgttgactttaccaatgggaagaaaaaaaaatcagacaatgctgtgtatcccatgactcaaatctatttttggctgagaccctaaggcctctccagggt

SEQ ID NO: 108895 - DNA, 120 bp, synthetic construct
  source 1..120: mol_type = other DNA
tccaaaaaccagtctgacatcttataataccagaaatatacacacacttcaaacctgggaaatcatcctatgaatctgctctgaccaatatggtagccactaatacctgaaatatggagt

SEQ ID NO: 108896 - DNA, 120 bp, synthetic construct
  source 1..120: mol_type = other DNA
tgggcatttcgttaaagagcacaccaccattgtctctggaatctttttcttagacactgacacccattcttcaagtttgatactgatgccatcctggtcaatgaaattatcaacgcaagg

SEQ ID NO: 108897 - DNA, 120 bp, synthetic construct
  source 1..120: mol_type = other DNA
gttgggagcggccgtttatagctgtattctggtgaaatgccttgcaaacattaaagtcagaaaatcccattgagactggaatcaacaacacctcactttgggacatcatagcagttcttg

SEQ ID NO: 108898 - DNA, 120 bp, synthetic construct
  source 1..120: mol_type = other DNA
tgcgtaacacacagctgggtgcatattaaatgcttgagtagcactagctagtgttatagttgctagccttatctgagaaaagtcagagtgaaaggtggttagaatcactgcataagttct

SEQ ID NO: 108899 - DNA, 120 bp, synthetic construct
  source 1..120: mol_type = other DNA
cgcaatcagagctctcactgcccccgaggcgatatcacgctttctggaaggagccatggatgctgggaaacatggaaggagggatgtgagatcaatgttgaagtactgattaaaactctt

SEQ ID NO: 108900 - DNA, 120 bp, synthetic construct
  source 1..120: mol_type = other DNA
acaaatgctgcttcctggtcaataataccttctaatattccatatgacctggccatctgctacagtgtgccagggacaggactagttgctggagataaaaaattggtcccagaaaatatt

SEQ ID NO: 108901 - DNA, 120 bp, synthetic construct
  source 1..120: mol_type = other DNA
ggtgaggagttcaagaccatcctggccaacatggtgaaacactgcctctactaaaaatacaaaaaacaaacaaaaaaaacattagccaggcatgatggtgtgtgcctgtaatcccagcta

SEQ ID NO: 108902 - DNA, 120 bp, synthetic construct
  source 1..120: mol_type = other DNA
ctgagaactctcctttgttgatattttccatcagcgcgcatatagctgacaggaaaaaaatatttcaagtaggtatgcagtctacccttcctggaaaagctgtccttgttccccactttt

SEQ ID NO: 108903 - DNA, 120 bp, synthetic construct
  source 1..120: mol_type = other DNA
tgtggcaccttttccaggagactgttgggatgcccttctccacttctaggttgtgagcaaaaattgctgggactcatctgcattttgttgattgcaaattagaaatttggagaaacaaaa

SEQ ID NO: 108904 - DNA, 120 bp, synthetic construct
  source 1..120: mol_type = other DNA
ccttttctctccctcatccacgtggagagcagtgatgatgctacactaactctcgaggatgtccaggcatgttacttttggacagtttctcagagctcacagaatccattaagttcaaag

SEQ ID NO: 108905 - DNA, 120 bp, synthetic construct
  source 1..120: mol_type = other DNA
agaatagtgatttgctttcagttttgcctcctcagtgacaacactgttcctgacccctctgtctcctttaggcaaagaaattccttcttcccttgcccatctttacccatcaggaatcag

SEQ ID NO: 108906 - DNA, 120 bp, synthetic construct
  source 1..120: mol_type = other DNA
atgctacatggcacaggctggtcttgaacttctgggcttaagcgatcctcttatcttagcctccagagtctctgggtaacttacattactttttaaatttggggacatttataataaaaa

SEQ ID NO: 108907 - DNA, 120 bp, synthetic construct
  source 1..120: mol_type = other DNA
tctttacaacaaacagatatggaaatgtattgacattaggtatttagagaggtttatgtcaagtattaaacaagattttggccaggtcccagcactttgggaggctgaggcaggaggagc

SEQ ID NO: 108908 - DNA, 120 bp, synthetic construct
  source 1..120: mol_type = other DNA
gtgctaattgaccacatccctggggagaagcataaaaccaaaatctgatcgtttcagaaaagaattaatcctgtgttgtggaaactttcaaggaagattcctctacctctctgttgccct

SEQ ID NO: 108909 - DNA, 120 bp, synthetic construct
  source 1..120: mol_type = other DNA
tctatgggtcggggtgcacgcaccagttataacattctctagccttatactacagactgccaactctcaaacttggctgtacattagaatctgagagttttaaaaaatattgatggctgg

SEQ ID NO: 108910 - DNA, 120 bp, synthetic construct
  source 1..120: mol_type = other DNA
gggaaggcatgccaatctactcacaattttattctttaaagcagacagtttctaagagtgaacctcagaccagctccatcagcgtcacctggaaactcgttagaaatgcaaattatttcg

SEQ ID NO: 108911 - DNA, 120 bp, synthetic construct
  source 1..120: mol_type = other DNA
ccctaattagtcctgagagattttatgactgtaattataataatttcaactcctagggaaggaagcatgggatgggcccccactctaaagactatgctccaggctagtaagcataggttt

SEQ ID NO: 108912 - DNA, 120 bp, synthetic construct
  source 1..120: mol_type = other DNA
tagtttagaatgggaggctgtttgtagcttggagatttcgagatagtgaaatccattcaagtggaagagctaccagcctctgaagagttgaccagaaacctcacaatcactaaattcaga

SEQ ID NO: 108913 - DNA, 120 bp, synthetic construct
  source 1..120: mol_type = other DNA
acgtggtttttggttccacttttgtactggcctttcaactagagatggtggatgaggacttcctgttgcattctctctccttgctttttagtttagacaagagcataacaattctgaatg

SEQ ID NO: 108914 - DNA, 120 bp, synthetic construct
  source 1..120: mol_type = other DNA
aaacatggattaatgatgggtccagctgcaccagcaggttttatatcaggcctcctctctgtctccttttctccctctgaaacatcataaaaatatgggaaactcctcttgaactttaat

SEQ ID NO: 108915 - DNA, 120 bp, synthetic construct
  source 1..120: mol_type = other DNA
cctatagattttcaaattactaaaaagtgactgcattttggaagctactttagttctgtgttaaaggccattgtattttccagctgggctcggtggctcacacctgtaatcccagcactt

SEQ ID NO: 108916 - DNA, 120 bp, synthetic construct
  source 1..120: mol_type = other DNA
agtgaaatgctgtataaactgcaggcttcttacaaacagcagaggttctcttctccagcctgccactaaactgctggtttaacgttttaggctgaatcttttttcagcctaaaagttggc

SEQ ID NO: 108917 - DNA, 120 bp, synthetic construct
  source 1..120: mol_type = other DNA
agttaaagaaagaaaaagagatttcattccaaccacatgactggaaattagacagtgcacaggaatgctaggctctcagaggacggacccagcaaatgtgttggatagacttggaaagtt

SEQ ID NO: 108918 - DNA, 120 bp, synthetic construct
  source 1..120: mol_type = other DNA
catgcctgtaatcctagcactttgggaggccaaaatgggcagatcacctgagctcaggagtttgagaccagcctggccaccatggcaaaaccccatctctactaaaaatacaaaaagaag

SEQ ID NO: 108919 - DNA, 120 bp, synthetic construct
  source 1..120: mol_type = other DNA
aaatgcccaaactgcatgggacttcgatgaactgcaggatccaatggaggactattagattttttactggtctggggaaatctggatcaaaatggatgagttttctctgtgtgtttgatg

SEQ ID NO: 108920 - DNA, 120 bp, synthetic construct
  source 1..120: mol_type = other DNA
gcaccagtaggttgtgcgtttagaaactgcaacagatttttttgattgtggctatcaaggcaaatagctaaaaaattaagtactgggtctccttactctacaactcttgggcccttcacc

SEQ ID NO: 108921 - DNA, 120 bp, synthetic construct
  source 1..120: mol_type = other DNA
ctcatataccccgtaaatatatatacacctacgacatacccacaacaattaaaaatttaaaaaataggctgggcacagtggctgacacctataatcccagcactttgggaggctgaggca

SEQ ID NO: 108922 - DNA, 120 bp, synthetic construct
  source 1..120: mol_type = other DNA
ccataaatgaggaagcaatttcagaacaaatttttgaaacggtgttggaaaggactactatctctcttaactgaaataagagaaccaattgcatttaccacttcagccagaaccaatggc

SEQ ID NO: 108923 - DNA, 120 bp, synthetic construct
  source 1..120: mol_type = other DNA
gttaaatctggcctgccacttgtttttgcaggtggcaagaacgtttatatttgtgtgttttgagaaataaaaataaagtcctaagtcacccaaccaactgaaccgagcctgtcttggcca

SEQ ID NO: 108924 - DNA, 120 bp, synthetic construct
  source 1..120: mol_type = other DNA
ttgctttgttactacagtggcagaatggcatggttttgaccttatgtctgaaatactgaaaagcctaaaatactatctggcccagtactcagaaagctcaccaaccctactgttccctat

SEQ ID NO: 108925 - DNA, 120 bp, synthetic construct
  source 1..120: mol_type = other DNA
taaacggggtagggaaacaatttgcataggcttcccctataaagggcttcttgatttacttctctaccacccccgatgattcagtgaggtcccagagaaaataaaggtttaatctttttc

SEQ ID NO: 108926 - DNA, 120 bp, synthetic construct
  source 1..120: mol_type = other DNA
atgttagggctattaaccaatgggttgtcacagctttctcagaaagctctggagttgttggaatgtctttatttccatccagggctttgttatgggctgggtgggtagtgtgtgagtaat

SEQ ID NO: 108927 - DNA, 120 bp, synthetic construct
  source 1..120: mol_type = other DNA
agcctgggaaacacagtgagaccttgtctctacaaaaaaaaaaaaaaaaaaaaaaaaaagcttcgtgtgatggcacaaacctgtggtcccagctgcatgggaaaatcacttgagcccgag

SEQ ID NO: 108928 - DNA, 120 bp, synthetic construct
  source 1..120: mol_type = other DNA
agagtagctgaaagtagacactttggtcatttggttatctaggctgaataattcccaacctcctgatggctgtttcagtctcattaacattagtgaaacctgagtacctctgaccaccca

SEQ ID NO: 108929 - DNA, 120 bp, synthetic construct
  source 1..120: mol_type = other DNA
ctgtagtgttatgataggtggcagacaatcctggactaggaatcagaagctgaaattgtgacctaattctcttcctctcctagttgacttggggaagtcacttctctgaggttcattttt

SEQ ID NO: 108930 - DNA, 120 bp, synthetic construct
  source 1..120: mol_type = other DNA
agtaataaaaccaaacgggaggtaggcttggttatttccctgttttaaagactgtaccctttttgttgcatctcctcatcatcatcctccatgtgttctctgtttcttggagaatcctgc

SEQ ID NO: 108931 - DNA, 120 bp, synthetic construct
  source 1..120: mol_type = other DNA
gggggaggaaatagatggaggtggagcagtttgagtgtgctctaagaagtataatgtcaaatctcagcacttgtcttctgtcatatccaatgtggcctttgattctctttaacagaaatc

SEQ ID NO: 108932 - DNA, 120 bp, synthetic construct
  source 1..120: mol_type = other DNA
ctgcagtgagactctcttggtcttgtacattctatgggtttggacgcatgtatgatggcatgtatccaccattgtagtatcaggcatactagtttcatggccctaaaaatcttcttatgg

SEQ ID NO: 108933 - DNA, 120 bp, synthetic construct
  source 1..120: mol_type = other DNA
atagacagttaccaaacactgtactatgcatggtatgattccaatacagatgacatatgcatgtgggtgtatgtttgcattaaaaaaggctgtgttccaaaatgttaggcactgactttt

SEQ ID NO: 108934 - DNA, 120 bp, synthetic construct
  source 1..120: mol_type = other DNA
gctgtacctgtttggtgtttgtgtgctccctgctttgcacagctctgcttcttattgagttgtttcctgatgtgttctcgttctcaagaaagttttcttcattctaagaaaaaagtgcag

SEQ ID NO: 108935 - DNA, 120 bp, synthetic construct
  source 1..120: mol_type = other DNA
tcccatctcatttcaacttgccgttttctagagtgaggtaatggataaatggtgtcaggaaatgccttctgttagcccaacgactatgactgcatcttcaaagaccaagtgtatgactct

SEQ ID NO: 108936 - DNA, 120 bp, synthetic construct
  source 1..120: mol_type = other DNA
ccacattctctcaagccttaactccctcattcatacaacacagtttggatttggggttcttgcggatccttacggaatcctgacattttctaattctattaggagattcagcttcttgac

SEQ ID NO: 108937 - DNA, 120 bp, synthetic construct
  source 1..120: mol_type = other DNA
ggtatcccttttcaaagaatgttagctgacacatggtcacctaggaaaaagattacatatccaagcttcccttgcaactaagttctggcaacgaaatgaaagtagaaagggtgccctgtt

SEQ ID NO: 108938 - DNA, 120 bp, synthetic construct
  source 1..120: mol_type = other DNA
ccagaccatcttgtgcctatagaggagtgattctttgggcctggtgaagatcaaaagacacagtagtgtgcctaggaattaaattccgtttggaaattagaacttagaaagcctgatttg

SEQ ID NO: 108939 - DNA, 120 bp, synthetic construct
  source 1..120: mol_type = other DNA
actgttacctttcaatgctgagggatctttggattgggtgcaagaagtcaagtctctgtatgctgctgtgagtggctgtaacactagcaatgtctatggcttcagaacactgttaacatt

SEQ ID NO: 108940 - DNA, 120 bp, synthetic construct
  source 1..120: mol_type = other DNA
tccaaatgcattgatgtatatttttatttcttccttaaatacagggtttccagagctgggggctagttaaaagtcatcatggactgggtgcagtggctcacacctgtaatcccagcactt

SEQ ID NO: 108941 - DNA, 120 bp, synthetic construct
  source 1..120: mol_type = other DNA
cgggttcaagtgattctcatacctcagtctcctgagtagctgggactacaggcacacgccaccacaccctgctcattttttttttgtatttttagtagagacaggattttgccatgatgg

SEQ ID NO: 108942 - DNA, 120 bp, synthetic construct
  source 1..120: mol_type = other DNA
taaaaagttcaaggtgctacttctaggagttaattggaacaaagtccactgtgtttgaagttctaaagatgtgacctgtttagccacggtgaactggaaatcctctcaccagcacaacac

SEQ ID NO: 108943 - DNA, 120 bp, synthetic construct
  source 1..120: mol_type = other DNA
tacagcacagtaaaagatattaagaggctaacaacacctgtctgtgaagcaatttggtcagagtggtcatgaaatgattgacttctaaattcaagaacaggaaatatggcttcagctctt

SEQ ID NO: 108944 - DNA, 120 bp, synthetic construct
  source 1..120: mol_type = other DNA
atgctggcaacttccatagtcctcacataaatggattgcggtatttgctataggaagaggcagattttacatctaggtttcaagatttggtttggcctgtaccagcatccccaactaaat

SEQ ID NO: 108945 - DNA, 120 bp, synthetic construct
  source 1..120: mol_type = other DNA
acaccatgtaaatagaccggtgctcccaacttgttttatctgtatgggtcagatccttgattaagcaatttttctttcaaacctccctggctgcacaaattaggccagtactctctaact

SEQ ID NO: 108946 - DNA, 120 bp, synthetic construct
  source 1..120: mol_type = other DNA
atttgagaaaccaagattttgcaatcaatgaggatccctgaggtaaatcaagagaactggtgtctattcctgtttgcctttctttactactctttttatctcccagctcatgcctctcct

SEQ ID NO: 108947 - DNA, 120 bp, synthetic construct
  source 1..120: mol_type = other DNA
tcaggaagcatccatggcccagcttctccattcaacatcaacaatgtctgaacaagatggttcagcagggaccaccactatcgttttaaagtaattaactggagtggagattttatcatc

SEQ ID NO: 108948 - DNA, 120 bp, synthetic construct
  source 1..120: mol_type = other DNA
gctgtaatcttgaaaacctcggctcttgtcctactcctgactgatcatccaaagcattctagtctagaaatgtggctggtaccattcaccacactgacaaaactgtcaaaactacttttt

SEQ ID NO: 108949 - DNA, 120 bp, synthetic construct
  source 1..120: mol_type = other DNA
tttagttgatcagactcagagttcacccagtactgtttctctggtggcaattgtttaacataggtagctgcctgaggtggtggtaactgttgggaaaaacaacaagccaatctaagaatt

SEQ ID NO: 108950 - DNA, 120 bp, synthetic construct
  source 1..120: mol_type = other DNA
gagccatgactgccctaatacactccagcctgggtgacagaatgagaccctatctccaacaaacaaacaaaccaaaataaaacaaaatcccatgatccaaatatatgctgtctacaagag

SEQ ID NO: 108951 - DNA, 120 bp, synthetic construct
  source 1..120: mol_type = other DNA
ggaaggctggggtgggtggattgcttgtacccaggagtttgaggccagcctaggcaacatagcatggccctcatcacaaataaataaataaataacaaaaatgaaaatatacgaaaattt

SEQ ID NO: 108952 - DNA, 120 bp, synthetic construct
  source 1..120: mol_type = other DNA
tattttctattttctttccagtgcctcaacactgatgagtaagtggctcctcaatttcaaggggaatcacttcaggagtgtttgaatgaggaaaaactaaatccttataccctctctctc

SEQ ID NO: 108953 - DNA, 120 bp, synthetic construct
  source 1..120: mol_type = other DNA
ccccatctcctctgagtttggaaaaatctttcagttgccctgttccaaaaagcctctcccaaatatggacacgtggcaaaatatctgtggagtggggaaaaggttcttttttaaagcaat

SEQ ID NO: 108954 - DNA, 120 bp, synthetic construct
  source 1..120: mol_type = other DNA
atgggaccaatataattaacttttgttcctcagaatattccattagagtaaaagatggcttcacagtggtagaaggtatttacaaatcataactgacaaagggcttgtcaatcgaggaaa

SEQ ID NO: 108955 - DNA, 120 bp, synthetic construct
  source 1..120: mol_type = other DNA
aaagtatatgtttattccagtggcctagcaattccactcctaagtacaaccccagagtaaatttattacagatactccccctggcatggataacagtgtccctagctgcaatgtttgtag

SEQ ID NO: 108956 - DNA, 120 bp, synthetic construct
  source 1..120: mol_type = other DNA
accagtaacctcctagctggcaagtcaagtgaacccgtggcctcactctatagactcctctgtcctttcggagtcttttctgttgacttgtggttctactttcccttgacttctccagat

SEQ ID NO: 108957 - DNA, 120 bp, synthetic construct
  source 1..120: mol_type = other DNA
caacaatcccaagataggtaccattattatgctcttttacagaggagaaaacagaaatcttcagagccagagcagcatttaggccctcatctttactcctgaatttcattgtggaggggt

SEQ ID NO: 108958 - DNA, 120 bp, synthetic construct
  source 1..120: mol_type = other DNA
tctcaaaaaaaaaatcacaatttgactgcgtaaattctgagcgattccttctaaaatgccttagcacacgcagaggccacctgacctgatgccagcctgccccctttccctataccgtgt

SEQ ID NO: 108959 - DNA, 120 bp, synthetic construct
  source 1..120: mol_type = other DNA
tcgttggttacaaaatccactctcatgtatgaagtgtgctctagctgtgaaatcctttcttggaggtgagatcatttctctcttataacccatatcactgactttgtgctcctgtttaac

SEQ ID NO: 108960 - DNA, 120 bp, synthetic construct
  source 1..120: mol_type = other DNA
tatgcttttccccctcacttagcccttagagaagagatcaggatgtgccaccctccaaatgcccacattttggcacaagaatattttgaactgaaggctatgaaaaagaaagcagacaca

SEQ ID NO: 108961 - DNA, 120 bp, synthetic construct
  source 1..120: mol_type = other DNA
aacctaagagggtagatgaagttgtttcctctcctacacttgtgacctataagtggtaacccgatgcctactcatggagatgggcatcactgtgaccatgggacagatgatcaaacttgg

SEQ ID NO: 108962 - DNA, 120 bp, synthetic construct
  source 1..120: mol_type = other DNA
tttgtacctgggaaaaagcaccagtctctgctgatgtcagaaagccacctgctgttacagggacctgggcacagcttgcttcagtttggaaacttctgcaataatctcctgaatgactag

SEQ ID NO: 108963 - DNA, 120 bp, synthetic construct
  source 1..120: mol_type = other DNA
tagctgtagaattcttttaaaatagggattttcccccctagtacaatttaaaatactgcaaaactgtggacaaaagaatggaaaaggcctggtgcggtggctcacgcctgtaatcccagc

SEQ ID NO: 108964 - DNA, 120 bp, synthetic construct
  source 1..120: mol_type = other DNA
ataagctattgattggctatacattgctatttgtatcacacattctaggaacagaaaggcagccagtcaggaacaaaattcctttaaaacaattgcccctggccaggcacagtggctccc

SEQ ID NO: 108965 - DNA, 120 bp, synthetic construct
  source 1..120: mol_type = other DNA
aacatggccattgatttatgtattgtctaaggctgctatcatcccataaggacagaattgagtagctgtgacaaataccacacggctcaaagacaaaatatccactacctggctgatgcc

SEQ ID NO: 108966 - DNA, 120 bp, synthetic construct
  source 1..120: mol_type = other DNA
cacaatctttatcttagcctgaatattccctttctatgaatcccaggtcttgagacaaactcaaccaattgtcaaccagaaaatgtttaaattcccctatagcctggaagcccaaccccc

SEQ ID NO: 108967 - DNA, 120 bp, synthetic construct
  source 1..120: mol_type = other DNA
aacaacatttgggggagcatatcattgtgcaagtcacaacactagacagtgttgattaaaagatacagtgacctccctcatccattctccaactgtacctgccagcaggaaaaattgaca

SEQ ID NO: 108968 - DNA, 120 bp, synthetic construct
  source 1..120: mol_type = other DNA
aacaaaattctccttgcagttaggttttttccctgacatttacactatataccaggaaaggccagccagagcacttaacacagccaaagactggccatagaatctgccacataggtaata

SEQ ID NO: 108969 - DNA, 120 bp, synthetic construct
  source 1..120: mol_type = other DNA
attttacccatcttagtctctgctctttcctggtgcttagcgtagtgcttggaacagcgtcagctcaaggctgaatagaatgttcattgaacaaaggtacacaaaggaagaaaactgaaa

SEQ ID NO: 108970 - DNA, 120 bp, synthetic construct
  source 1..120: mol_type = other DNA
tatgatgcagcacaaaggccctctccagcggctagtgccatgctcttggacttcccagtctccagaactgtgagctaaataaacttgtatttttttttttttttgagatggagtttcact

SEQ ID NO: 108971 - DNA, 120 bp, synthetic construct
  source 1..120: mol_type = other DNA
ttgagttgagcctctagggctctgtcagtgttcagtagggtaagtatgttaccattacatgtggttgaatgaggttcacgaagggagcaaagaacaaacattgatatgggttataggaat

SEQ ID NO: 108972 - DNA, 120 bp, synthetic construct
  source 1..120: mol_type = other DNA
aataaataatggtacacctctatagggcacttaccatggatggaacttacaggactaggttctaggtgagtcagtgagttagtggtgagttaatgttaaggcctagggcattactgttca

SEQ ID NO: 108973 - DNA, 120 bp, synthetic construct
  source 1..120: mol_type = other DNA
agtctgagaccaacctgggcaacatggtaaaaccccaaatcttaaaaaatggaaaaaattagttgggcatggtggcatgcgcctatagtaccagctactcaggaggctgaagtgagaaga

SEQ ID NO: 108974 - DNA, 120 bp, synthetic construct
  source 1..120: mol_type = other DNA
caaagtgctgggattacaggcatgagccactgcacccagccaaaatgttgctatttcagctcagagttgagatggatttatataacacacacacataattctgctattgataaggattaa

SEQ ID NO: 108975 - DNA, 120 bp, synthetic construct
  source 1..120: mol_type = other DNA
aacttgggaacagggaaataatgatattgaattctattccatctactgtactaaaaacaatttacaggctgggcacactggctcacttctgtaatcccagcactttaggaggctgaggtg

SEQ ID NO: 108976 - DNA, 120 bp, synthetic construct
  source 1..120: mol_type = other DNA
ctggctggtaaataccatcccccctgaaaggaaccccacaggttacacctaggacttcttgtgctagaaacaatgaagtttttaaacctacctaagtttatagccaaaggatataggagt

SEQ ID NO: 108977 - DNA, 120 bp, synthetic construct
  source 1..120: mol_type = other DNA
agattacaatgagctatgatcgtgctactatagtacagcctgggtgatggggtgagaccatgtcttgggggaaaaaaacacgtcaggccaatactaatccaaatcaacaatttactatac

SEQ ID NO: 108978 - DNA, 120 bp, synthetic construct
  source 1..120: mol_type = other DNA
atggggagaaaggtgacgcacacctgggcaggaaggtattgttcagtgtgactatctgctaaatccctggggctccatccagctaagataaaatgtgatggttcccattctcagtagaca

SEQ ID NO: 108979 - DNA, 120 bp, synthetic construct
  source 1..120: mol_type = other DNA
aggactgatgtaataatgtgtgatgtgtcacttgacacagcaaggtcagggtttttcctataactcttctgcttgtattaattacaggaagtaaggaggaatctggattccctggcctgc

SEQ ID NO: 108980 - DNA, 120 bp, synthetic construct
  source 1..120: mol_type = other DNA
ctagctcagaacacactcaggtgcatctgccatacagggtccttctaagggtatgtctaagctattgctatcacgtgcatttactatagacttaatttcctctgatggtctatgaaattc

SEQ ID NO: 108981 - DNA, 120 bp, synthetic construct
  source 1..120: mol_type = other DNA
agcctaagaaaagataaagtattaaatatcaagaaagttttaagactagattgggtggtggctcacggctgtaatcctagaactttgggaggctgagactggcaggttgctttgagccca

SEQ ID NO: 108982 - DNA, 120 bp, synthetic construct
  source 1..120: mol_type = other DNA
aataagagctccaacatttcattacaaggatttaatgagataagacatttaaaatactgacacaggctgggtgccgtggcttataattgtaatcccagcactttgggaggctgaggcagg

SEQ ID NO: 108983 - DNA, 120 bp, synthetic construct
  source 1..120: mol_type = other DNA
aaacaggatttccaacttaaaatgtctttcctgttttcagaaaaagaaatgctgttctctgtacctaccgttgaagccatagatgatctctgtgctccctcgtgcctcctctctgatttg

SEQ ID NO: 108984 - DNA, 120 bp, synthetic construct
  source 1..120: mol_type = other DNA
gaattgcttgaacctgggaggcggagattgcagtgagccgagatcgggccactgcccttatagcctgggtgacagagtgagactctgtttaaaaaaaaaaaattaaaataaataagttaa

SEQ ID NO: 108985 - DNA, 120 bp, synthetic construct
  source 1..120: mol_type = other DNA
actgtgtttccaataaattgcacatgtgattaacatttgtttatttttgtagagatgggggtctcactatgttgcccaggctggtcttgaacccttgggctcaaatgatcctcctgcttt

SEQ ID NO: 108986 - DNA, 120 bp, synthetic construct
  source 1..120: mol_type = other DNA
actatagtcaatctgttgtgtgatcaaatagtaggtctttttaattctttttgttttttttgtacccattaaccatccctacctcccctgcagacccccactaccctccccagcctctgg

SEQ ID NO: 108987 - DNA, 120 bp, synthetic construct
  source 1..120: mol_type = other DNA
cttctgcatatggatatccagttttttattcttttactgtctctgtatattttcagacaagattgggtgtgctcgaagactgggcgtggtggcttacacctgtaatcccagtactatggg

SEQ ID NO: 108988 - DNA, 120 bp, synthetic construct
  source 1..120: mol_type = other DNA
agacttgtagaggtacttccttgatggtcttggacaagatctaggagaattctttgaattaccaagcagagactcttgttctcttcccttactttctcccaaacaaacagaatctctctc

SEQ ID NO: 108989 - DNA, 120 bp, synthetic construct
  source 1..120: mol_type = other DNA
tattttttactatctcggcaaggggagtgtggcaggagaacagagtgatgatggggagaaggtcagcaggaaaacatatgagcaagtaatctgcatcataaataagttcaagggaaggta

SEQ ID NO: 108990 - DNA, 120 bp, synthetic construct
  source 1..120: mol_type = other DNA
aatgggggcctcacaactctgcccagtgccctatcctgctgtggctgagttggcatccaagatgcaagacaaagtcctccccactcttccttctctcctcaagaggaaggaaggagtgtc

SEQ ID NO: 108991 - DNA, 120 bp, synthetic construct; identical to SEQ ID NO: 10828
  source 1..120: mol_type = other DNA

SEQ ID NO: 108992 - DNA, 120 bp, synthetic construct; identical to SEQ ID NO: 10829
  source 1..120: mol_type = other DNA

SEQ ID NO: 108993 - DNA, 120 bp, synthetic construct
  source 1..120: mol_type = other DNA
gtgaactcctacccgtccttcgaaactttcaatctggtcacccagtggcctcgtgactgaacctacccacccactggcggcgttgctggcctcccaggcgagtggatctgttgaggggga

SEQ ID NO: 108994 - DNA, 120 bp, synthetic construct
  source 1..120: mol_type = other DNA
gagaggaggaggaatggggaggaggaagaaggggagggagagggaggagaagagaggaatggagagggagggaaagagaggaggaatggggaggagggggagggaggagaggagggtgaa

SEQ ID NO: 108995 - DNA, 120 bp, synthetic construct
  source 1..120: mol_type = other DNA
cctctacaaaaatagaaattaaaaaaattaataaatgggggagagcggtgggagccctgccttgcccatagcagtgttaagtggcagcttgtgcaactgttgaatgcctactgtgtgcag

SEQ ID NO: 108996 - DNA, 120 bp, synthetic construct; identical to SEQ ID NO: 23624
  source 1..120: mol_type = other DNA

SEQ ID NO: 108997 - DNA, 120 bp, synthetic construct; identical to SEQ ID NO: 12845
  source 1..120: mol_type = other DNA

SEQ ID NO: 108998 - DNA, 120 bp, synthetic construct
  source 1..120: mol_type = other DNA
ggttgaactagtttacagtcccaccaacagtgtaaaagtgttcctatttctccacatcctctccagcacctgttgtttcctgactttttaatgattgccattctaacgggtgtgagatga

SEQ ID NO: 108999 - DNA, 120 bp, synthetic construct
  source 1..120: mol_type = other DNA
caaggaaataaaagaggacacaaacaaatggaagaacattccatgctcatgggtaggaagaatcaatatcgtgaaaatggccatactgcccaaggtaatttacagattcaatgccatccc

SEQ ID NO: 109000 - DNA, 120 bp, synthetic construct; identical to SEQ ID NO: 12846
  source 1..120: mol_type = other DNA

SEQ ID NO: 109001 - DNA, 120 bp, synthetic construct
  source 1..120: mol_type = other DNA
gattgaattcgcaacctactcatctgacaaagggctaatatccagaatctacaatgaactcaaacaaatttacaagaaaaaaacaaacaaccccatcaaaaagtgggcgaaggacatgaa

SEQ ID NO: 109002 - DNA, 120 bp, synthetic construct; identical to SEQ ID NO: 12847
  source 1..120: mol_type = other DNA

SEQ ID NO: 109003 - DNA, 120 bp, synthetic construct; identical to SEQ ID NO: 12848
  source 1..120: mol_type = other DNA

SEQ ID NO: 109004 - DNA, 120 bp, synthetic construct; identical to SEQ ID NO: 12849
  source 1..120: mol_type = other DNA

SEQ ID NO: 109005 - DNA, 120 bp, synthetic construct
  source 1..120: mol_type = other DNA
tactagctgcagagaagaaatatttaacttttcaatctctagcctttcttttcagaaagggagaaaatcggcataagacagggatgccctctctcaccactcctattcaacatagtgttg

SEQ ID NO: 109006 - DNA, 120 bp, synthetic construct
  source 1..120: mol_type = other DNA
ttccctatttaataaatggtgctgggaaaactggctagccatatgtaggaagctgaaactggatcccttccttacaccttatacaaaaatcaattcaagatggattaaagacttaaacgt

SEQ ID NO: 109007 - DNA, 120 bp, synthetic construct
  source 1..120: mol_type = other DNA
gttcatgtcctttgtagggacatggatgaaattggaaatcatcattctcagtaaactgtcgcaagatcaaaaaaccaaacaccgcatattctcactcgtaggtgggaactgaacaatgag

SEQ ID NO: 109008 - DNA, 120 bp, synthetic construct; identical to SEQ ID NO: 12850
  source 1..120: mol_type = other DNA

SEQ ID NO: 109009 - DNA, 120 bp, synthetic construct; identical to SEQ ID NO: 12851
  source 1..120: mol_type = other DNA

SEQ ID NO: 109010 - DNA, 120 bp, synthetic construct
  source 1..120: mol_type = other DNA
gtaaattaggtattgatgggacgtatctcaaaataataagagctatctatgacaaccccacagccaatatcatactgaatgggcaaaaactggaagcattccctttgaaaactggcacaa

SEQ ID NO: 109011 - DNA, 120 bp, synthetic construct
  source 1..120: mol_type = other DNA
aaggacctcatgtctaaaacaccaaaagtaatggcaacaaaagccaaaattgacaaatgggatctaattaaactaaagagcttctgcacagcaaaagaaactaccatcagagtgaacaga

SEQ ID NO: 109012 - DNA, 120 bp, synthetic construct
  source 1..120: mol_type = other DNA
atcgcaaggacaaaaaaccaaacaccgcatgttctcactcataggtgggaattgaacaatgagaacacatggacacaggaatgagaacatcacactctggggactgttgtggggtggggt

SEQ ID NO: 109013 - DNA, 120 bp, synthetic construct
  source 1..120: mol_type = other DNA
gagaacacgtggtgtttggtttttttgtccttgcgatagtttgctgagaatgatggtttccagcttcatccatgtccctacaaaggacatgaactcatccttttttatggctgcatagta

SEQ ID NO: 109014 - DNA, 120 bp, synthetic construct
  source 1..120: mol_type = other DNA
agcaccatttgttaaacagggaatcctttccccatttcttgctttcatcaggtttgtcaaagatcagatggttgtagatgtgtggtattatttctgagggcactgttctgttccgttgat

SEQ ID NO: 109015 - DNA, 120 bp, synthetic construct
  source 1..120: mol_type = other DNA
actggcttaaaaaacggcgcaccacgcgacaatatcccacacctggctcggagggtcctacgcccacggaatctcgcggattgctagcacagcagtctgagatcaaactgcaaggcggca

SEQ ID NO: 109016 - DNA, 120 bp, synthetic construct
  source 1..120: mol_type = other DNA
cctcaggagccgatgcgatcaactggaagaaagggtatcagcaacggaagatgaaatgaatgaaatgaagcgagaagggaagtttagagaaaaaagaataaaaagaaatgagcaaagcct

SEQ ID NO: 109017 - DNA, 120 bp, synthetic construct
  source 1..120: mol_type = other DNA
gacacacataggctcaaaataaaaggatggaggaagatctaccaagcaaatggaaaacaaaaaaaggcaggggttgcaatcctagtctctgataaagcagactttaaaccaacaaagatc

SEQ ID NO: 109018 - DNA, 120 bp, synthetic construct
  source 1..120: mol_type = other DNA
tagaagaaatggatacattcctcgacacatacactctcccaagactaaaccaggaagaagttgaatctctgaatacaccaataacaggagctgaaattgtggcaataatcaatagcttac

SEQ ID NO: 109019 - DNA, 120 bp, synthetic construct
  source 1..120: mol_type = other DNA
cacaactgcttcaaagagaataaaatacctaggaatccaacttacaagggatgtgaagcacctcttcaaggagaactacaaaccactgctcaaggaaataaaagaggatacaaacaaatg

SEQ ID NO: 109020 - DNA, 120 bp, synthetic construct
  source 1..120: mol_type = other DNA
atctacaatgaactcaaacaaatttacaagaaaaaaagaaacaaccccatcaaaaagtgggcaaaggacatgaacagacacttctcaaaagaagacatttatgcagccaaaaaacacatg

SEQ ID NO: 109021 - DNA, 120 bp, synthetic construct
  source 1..120: mol_type = other DNA
catgtaccctaaaacttaaagtataataaaaaaaaaagtgcttataaaatatgagaacagagcaacggtaagtgcaatcttctataaacaaagaatttaataaaagagacggaaataaaa

SEQ ID NO: 109022 - DNA, 120 bp, synthetic construct; identical to SEQ ID NO: 12852
  source 1..120: mol_type = other DNA

SEQ ID NO: 109023 - DNA, 120 bp, synthetic construct
  source 1..120: mol_type = other DNA
cgccttggtctcccaaagtgctgggattacaggtgtgagccaccgtgcctggccagttttgtttttttttgtttttttgtttttgtttttgtttttgagatggagttttgctcttattgc

SEQ ID NO: 109024 - DNA, 120 bp, synthetic construct
  source 1..120: mol_type = other DNA
agtctgaccaacatggagaaaccctgtctctactaaaaataaaaaattagctgggcgtggaggtgcatgcctgtaatcacagctactcgggaggctgatgcaggagaatcacttgaaccc

SEQ ID NO: 109025 - DNA, 120 bp, synthetic construct
  source 1..120: mol_type = other DNA
caaatcatctaagcagacaggcccagctgggttcagatcattccctttttgtccaatcacaggtcagaacagttgtccatgcttcaatcatggagaaccaattaagtctgcataaaaggc

SEQ ID NO: 109026 - DNA, 120 bp, synthetic construct; identical to SEQ ID NO: 12655
  source 1..120: mol_type = other DNA

SEQ ID NO: 109027 - DNA, 120 bp, synthetic construct; identical to SEQ ID NO: 12656
  source 1..120: mol_type = other DNA

SEQ ID NO: 109028 - DNA, 120 bp, synthetic construct; identical to SEQ ID NO: 12657
  source 1..120: mol_type = other DNA

SEQ ID NO: 109029 - DNA, 120 bp, synthetic construct
  source 1..120: mol_type = other DNA
tgaagtgcttagctgactcacatctactctttctttttctcttttttttttttttgttttttttgtgatggagtttcgctcttgttgcccaggctggggtgcaatggtgcgatctcggct

SEQ ID NO: 109030 - DNA, 120 bp, synthetic construct
  source 1..120: mol_type = other DNA
cctccccaaagagtacgttgtgtagtggggtagagtggaaaatcaatccaagaaaagtagcaaacggacccaaagatgaagaggaagaaaagaaacagcaacacgaaacgaaaaaaaaag

SEQ ID NO: 109031 - DNA, 120 bp, synthetic construct; identical to SEQ ID NO: 3442
  source 1..120: mol_type = other DNA

SEQ ID NO: 109032 - DNA, 120 bp, synthetic construct
  source 1..120: mol_type = other DNA
ctgggattacaggcgtgagccaccgcgcccagctgaggattgaatttttcaatcccatctatatgatctcatatatgtcactttgtactgagaccatgtcatcatctattaagtgtgatt

SEQ ID NO: 109033 - DNA, 120 bp, synthetic construct
  source 1..120: mol_type = other DNA
atggggagcttccagatatctgaacccgtggaagctgacaggaaggtcagcaacaactcatctatgtgctaggagtgcaccccaaccccacagagacagaagctcccatgctcaggatcc

SEQ ID NO: 109034 - DNA, 120 bp, synthetic construct
  source 1..120: mol_type = other DNA
gatcacttgagcacaggaggtggagtctgcagtgagccacaatcgtgccactgcactccagcctgggcgacagagtaagaccatatttcaaaaaaaaatatatatatatatatgttttaa

SEQ ID NO: 109035 - DNA, 120 bp, synthetic construct; identical to SEQ ID NO: 7045
  source 1..120: mol_type = other DNA

SEQ ID NO: 109036 - DNA, 120 bp, synthetic construct; identical to SEQ ID NO: 7046
  source 1..120: mol_type = other DNA

SEQ ID NO: 109037 - DNA, 120 bp, synthetic construct; identical to SEQ ID NO: 7047
  source 1..120: mol_type = other DNA

SEQ ID NO: 109038 - DNA, 120 bp, synthetic construct; identical to SEQ ID NO: 25308
  source 1..120: mol_type = other DNA

SEQ ID NO: 109039 - DNA, 120 bp, synthetic construct; identical to SEQ ID NO: 25309
  source 1..120: mol_type = other DNA

SEQ ID NO: 109040 - DNA, 120 bp, synthetic construct
  source 1..120: mol_type = other DNA
aacctaccaaccaataaaagccctgaaaagatggattcacagccaaattctattagatgtacaaagaagagctggtaccaatcctgctgaaactattccaaaaaattgaggagggactcc

SEQ ID NO: 109041 - DNA, 120 bp, synthetic construct; identical to SEQ ID NO: 25311
  source 1..120: mol_type = other DNA

SEQ ID NO: 109042 - DNA, 120 bp, synthetic construct
  source 1..120: mol_type = other DNA
gtaatcccaaccacctgggaggctgaagcaggagaatcgcttgaacccaggaagtggaggaggttatatatatatgagacatatatacacacacacacacacacaaatataaaatatgtg

SEQ ID NO: 109043 - DNA, 120 bp, synthetic construct
  source 1..120: mol_type = other DNA
cctcagcctccggaagtgctgggattataggcacgagccactgcacccggctggttttccatgttaaaatgtctttagaaggtagtcatttaaaagagtttacaaatacattttagagaa

SEQ ID NO: 109044 - DNA, 120 bp, synthetic construct; identical to SEQ ID NO: 7847
  source 1..120: mol_type = other DNA

SEQ ID NO: 109045 - DNA, 120 bp, synthetic construct
  source 1..120: mol_type = other DNA
ggattgtttgaggccaggagtataagaccagcctgggcaacatggtgaaaccatgtttctacaaaaaatttaaaaattagctgggcatggtggttgtgtacctatagttgcagctacttg

SEQ ID NO: 109046 - DNA, 120 bp, synthetic construct
  source 1..120: mol_type = other DNA
caggctggtctcaaactcctggactcaagaaatccaccctcctcagtctcccaaagtgctgggattataggtgtgagacaccatacccagacagaatatgtttttaaaatatttttgact

SEQ ID NO: 109047 - DNA, 120 bp, synthetic construct; identical to SEQ ID NO: 25402
  source 1..120: mol_type = other DNA

SEQ ID NO: 109048 - DNA, 120 bp, synthetic construct; identical to SEQ ID NO: 25403
  source 1..120: mol_type = other DNA

SEQ ID NO: 109049 - DNA, 120 bp, synthetic construct
  source 1..120: mol_type = other DNA
ccaccttggcctcccaaagtgctgagattacaggcgtgagccaccacacccggccacagtaattctaatctttctaccctagttataagctcaacttggtaaataaaatattttaggtag

SEQ ID NO: 109050 - DNA, 120 bp, synthetic construct
  source 1..120: mol_type = other DNA
cggcattattcacaatagcaaagacttggaaccaacccaaatgtccaaaaatgatagactggattaagaaaatgtggcacatatacaccatggaatactatgcagccataaaaaatgatg

SEQ ID NO: 109051 - DNA, 120 bp, synthetic construct; identical to SEQ ID NO: 22542
  source 1..120: mol_type = other DNA

SEQ ID NO: 109052 - DNA, 120 bp, synthetic construct; identical to SEQ ID NO: 6857
  source 1..120: mol_type = other DNA

SEQ ID NO: 109053 - DNA, 120 bp, synthetic construct; identical to SEQ ID NO: 6858
  source 1..120: mol_type = other DNA

SEQ ID NO: 109054 - DNA, 120 bp, synthetic construct; identical to SEQ ID NO: 6859
  source 1..120: mol_type = other DNA

SEQ ID NO: 109055 - DNA, 120 bp, synthetic construct
  source 1..120: mol_type = other DNA
cagtgagccaagatcgtgccactgcactccagcctgggcgagagagcaagactcctctcaaaaaagaaaaaaaaaaaaaagaaaaaaaaaaggaagttatcataatctttgttcctgttc

SEQ ID NO: 109056 - DNA, 120 bp, synthetic construct; identical to SEQ ID NO: 6860
  source 1..120: mol_type = other DNA

SEQ ID NO: 109057 - DNA, 120 bp, synthetic construct; identical to SEQ ID NO: 6861
  source 1..120: mol_type = other DNA

SEQ ID NO: 109058 - DNA, 120 bp, synthetic construct
  source 1..120: mol_type = other DNA
ttcgagaccaccctggccaacatgacgaaaccccgtctctactaaaaatataaaaactagcagggcatggtggccggcgcctgtaatcccagctactcgggaggctgaggcagaagaatt

SEQ ID NO: 109059 - DNA, 120 bp, synthetic construct; identical to SEQ ID NO: 6862
  source 1..120: mol_type = other DNA

SEQ ID NO: 109060 - DNA, 120 bp, synthetic construct
  source 1..120: mol_type = other DNA
gcaccactacactccaacctggctgacagagcgagactgtctcaaaaaaaaacaaacaaacaggtctggtgtacccagaatggaggcaccacgagttgctgaagaaggaaactttattca

SEQ ID NO: 109061 - DNA, 120 bp, synthetic construct
  source 1..120: mol_type = other DNA
aatcacttgaacacgggaggcagaggttgtgatgagccaagatcgcgccattgcacaacagcctgggcaataagaacaaaactctgtctcaaaaaaaaaaaaaagaaacaaaaaaaaata

SEQ ID NO: 109062 - DNA, 120 bp, synthetic construct; identical to SEQ ID NO: 6863
  source 1..120: mol_type = other DNA

SEQ ID NO: 109063 - DNA, 120 bp, synthetic construct; identical to SEQ ID NO: 6864
  source 1..120: mol_type = other DNA

SEQ ID NO: 109064 - DNA, 120 bp, synthetic construct; identical to SEQ ID NO: 6865
  source 1..120: mol_type = other DNA

SEQ ID NO: 109065 - DNA, 120 bp, synthetic construct; identical to SEQ ID NO: 6866
  source 1..120: mol_type = other DNA

SEQ ID NO: 109066 - DNA, 120 bp, synthetic construct; identical to SEQ ID NO: 28239
  source 1..120: mol_type = other DNA

SEQ ID NO: 109067 - DNA, 120 bp, synthetic construct; identical to SEQ ID NO: 28240
  source 1..120: mol_type = other DNA

SEQ ID NO: 109068 - DNA, 120 bp, synthetic construct; identical to SEQ ID NO: 28241
  source 1..120: mol_type = other DNA

SEQ ID NO: 109069 - DNA, 120 bp, synthetic construct
  source 1..120: mol_type = other DNA
tttagagaaaaaagaataaaaagaaacaaacaaagcctccaagaaatatgggactatgtgaaaagatcaaatctacgtctgattggtgtacctgaaagtgactgggagaatggaaccaag

SEQ ID NO: 109070 - DNA, 120 bp, synthetic construct
  source 1..120: mol_type = other DNA
gaaaacaaaaaaaggcaggggttgcaatcctattctctgataaaacagactttaaaccaacaaagatcaaaagagacaaagaaggccattacataatggtaaagggatcaattcaacaag

SEQ ID NO: 109071 - DNA, 120 bp, synthetic construct
  source 1..120: mol_type = other DNA
gggctggggtcctcctgtgctatttgtacaaataaacctgaggcaggaaaaaaaaaaaaaagaaatacctaaaatcagagcagaactgaaggaaatagagacccaaaaaaacccttcaga

SEQ ID NO: 109072 - DNA, 120 bp, synthetic construct
  source 1..120: mol_type = other DNA
caatttatagattcaatgccatccccatcaagctaccaatgtctttcttcacagaattggaaaaaactactttaaagttcatatggaaccaaaaaagagcccgcatcgccaagtcaatcc

SEQ ID NO: 109073 - DNA, 120 bp, synthetic construct
  source 1..120: mol_type = other DNA
acccagccatcccattactgggtatatacccaaaggattataaatcatgctgctataaagacacatgcacacgtatgtttattgtggcactattcacagtagcaaagacttggaaccaac

SEQ ID NO: 109074 - DNA, 120 bp, synthetic construct; identical to SEQ ID NO: 28243
  source 1..120: mol_type = other DNA

SEQ ID NO: 109075 - DNA, 120 bp, synthetic construct; identical to SEQ ID NO: 5823
  source 1..120: mol_type = other DNA

SEQ ID NO: 109076 - DNA, 120 bp, synthetic construct; identical to SEQ ID NO: 28245
  source 1..120: mol_type = other DNA

SEQ ID NO: 109077 - DNA, 120 bp, synthetic construct
  source 1..120: mol_type = other DNA
cctaattgaatactctttatttccttctcctgcctaattgccctggccagaacttccaacactatgttgaataggagtggtgagagagggcatccctgtcttgtgccagttttcaaaggg

SEQ ID NO: 109078 - DNA, 120 bp, synthetic construct
  source 1..120: mol_type = other DNA
agtgaacaggcaacctacaaaatgggagaaaatttttgcaacctactcatcggacaaagggctaatatccagaatctacaaagaactgaaacaaatttataggaaaaaaacaaacaaccc

SEQ ID NO: 109079 - DNA, 120 bp, synthetic construct; identical to SEQ ID NO: 28246
  source 1..120: mol_type = other DNA

SEQ ID NO: 109080 - DNA, 120 bp, synthetic construct; identical to SEQ ID NO: 5824
  source 1..120: mol_type = other DNA

SEQ ID NO: 109081 - DNA, 120 bp, synthetic construct; identical to SEQ ID NO: 9471
  source 1..120: mol_type = other DNA

SEQ ID NO: 109082 - DNA, 120 bp, synthetic construct; identical to SEQ ID NO: 78133
  source 1..120: mol_type = other DNA

SEQ ID NO: 109083 - DNA, 120 bp, synthetic construct; identical to SEQ ID NO: 9472
  source 1..120: mol_type = other DNA

SEQ ID NO: 109084 - DNA, 120 bp, synthetic construct; identical to SEQ ID NO: 9459
  source 1..120: mol_type = other DNA

SEQ ID NO: 109085 - DNA, 120 bp, synthetic construct
  source 1..120: mol_type = other DNA
actccctgggacagtaagagggaggagagagagagagagagagaagagagaggagagagagaatgtgtgaacgtgtagcaagatgatttattctcaaggctgagagccaaaaaaagagaa

SEQ ID NO: 109086 - DNA, 120 bp, synthetic construct; identical to SEQ ID NO: 9460
  source 1..120: mol_type = other DNA

SEQ ID NO: 109087 - DNA, 120 bp, synthetic construct; identical to SEQ ID NO: 9461
  source 1..120: mol_type = other DNA

SEQ ID NO: 109088 - DNA, 120 bp, synthetic construct; identical to SEQ ID NO: 9462
  source 1..120: mol_type = other DNA

SEQ ID NO: 109089 - DNA, 120 bp, synthetic construct
  source 1..120: mol_type = other DNA
accgcgcccggctaattttttgtatttttagtagagacggggtttcaccttgttagccaggatggtctcgatctcctgacctcatgatccacccgcctcggcctcccaaagtgctgggat

SEQ ID NO: 109090 - DNA, 120 bp, synthetic construct; identical to SEQ ID NO: 9463
  source 1..120: mol_type = other DNA

SEQ ID NO: 109091 - DNA, 120 bp, synthetic construct; identical to SEQ ID NO: 9464
  source 1..120: mol_type = other DNA

SEQ ID NO: 109092 - DNA, 120 bp, synthetic construct
  source 1..120: mol_type = other DNA
ttccaagtatgaatgacgggtaatgataagcataagccccctaaggaaaaaaaagcactgcttaagtgctagcatttactgaaacaagccacagaaatggctgttattcccaatcttcca

SEQ ID NO: 109093 - DNA, 120 bp, synthetic construct
  source 1..120: mol_type = other DNA
gaaatcctgtctctactaaaaatacaaaaattagctgggtatggtggcacacccttgtaatcccagctacttgggaggctgaggcacgaaaatcacttgaacctgggagatggaggttgc

SEQ ID NO: 109094 - DNA, 120 bp, synthetic construct; identical to SEQ ID NO: 9467
  source 1..120: mol_type = other DNA

SEQ ID NO: 109095 - DNA, 120 bp, synthetic construct; identical to SEQ ID NO: 9468
  source 1..120: mol_type = other DNA

SEQ ID NO: 109096 - DNA, 120 bp, synthetic construct; identical to SEQ ID NO: 9469
  source 1..120: mol_type = other DNA

SEQ ID NO: 109097 - DNA, 120 bp, synthetic construct; identical to SEQ ID NO: 9470
  source 1..120: mol_type = other DNA

SEQ ID NO: 109098 - DNA, 120 bp, synthetic construct
  source 1..120: mol_type = other DNA
aactatctgatctttgacaaacctgagaaaaacaagcaatgggaaaggattccgtatttaataaatggtgctgggaaaactggctagccatatgtaaaaagctgaaactggatcccttcc

SEQ ID NO: 109099 - DNA, 120 bp, synthetic construct
  source 1..120: mol_type = other DNA
gtaaactatcgcaagaacaaaaaaccaaaaactgcatattctcactcataggtgggaattgaacaatgagaacacatggacacaggaaggggaacatcacactctggggactgttgtggg

SEQ ID NO: 109100 - DNA, 120 bp, synthetic construct
  source 1..120: mol_type = other DNA
ggaaaactggctagccatacgcagaaaactgaaactggatcctttccttacaccttaaacaaaataccatttgacctagcaatcccattactgggtatatacccaaaggattataaatca

SEQ ID NO: 109101 - DNA, 120 bp, synthetic construct; identical to SEQ ID NO: 14359
  source 1..120: mol_type = other DNA

SEQ ID NO: 109102 - DNA, 120 bp, synthetic construct; identical to SEQ ID NO: 14360
  source 1..120: mol_type = other DNA

SEQ ID NO: 109103 - DNA, 120 bp, synthetic construct; identical to SEQ ID NO: 14361
  source 1..120: mol_type = other DNA

SEQ ID NO: 109104 - DNA, 120 bp, synthetic construct
  source 1..120: mol_type = other DNA
ctcactgtggttttgatttgcatttctctgatggccagtgatgatgagcattttttcgagtgttttttggcagcataaatatcttcttttgagaagtgtctgttcatatcctttgcccac

SEQ ID NO: 109105 - DNA, 120 bp, synthetic construct
  source 1..120: mol_type = other DNA
caaaatctccttaagctgataagcaacttcagcaaagtctcaggatacaaaatcaatgtgcaaaaatcacaagcattcttatacaccaataacagacaaacagagagccaaatcatgagt

SEQ ID NO: 109106 - DNA, 120 bp, synthetic construct
  source 1..120: mol_type = other DNA
caatgttcaattcctacctatgagtgagaacatgcagtgtttggttttttgtccttgtgatagtttgctgagaatgatggtttccagcttcatccatgtccctacaaaggacatgaactc

SEQ ID NO: 109107 - DNA, 120 bp, synthetic construct
  source 1..120: mol_type = other DNA
agatcagatagttgtagatatgtggcattatttctgagggctctgttctgttccattggcctatatctctgttttagtaccagtaccatgctgtttggttactgtagccttgtaatatag

SEQ ID NO: 109108 - DNA, 120 bp, synthetic construct; identical to SEQ ID NO: 14362
  source 1..120: mol_type = other DNA

SEQ ID NO: 109109 - DNA, 120 bp, synthetic construct; identical to SEQ ID NO: 18803
  source 1..120: mol_type = other DNA

SEQ ID NO: 109110 - DNA, 120 bp, synthetic construct; identical to SEQ ID NO: 18804
  source 1..120: mol_type = other DNA

SEQ ID NO: 109111 - DNA, 120 bp, synthetic construct
  source 1..120: mol_type = other DNA
catataaatctagggccgggcgtggtggctcacacctgtaatcccagcactttgggaggccgaggcgggcagatcatgagatcaggagattgagacccccatccttgctgacatggtgaa

SEQ ID NO: 109112 - DNA, 120 bp, synthetic construct; identical to SEQ ID NO: 18805
  source 1..120: mol_type = other DNA

SEQ ID NO: 109113 - DNA, 120 bp, synthetic construct
  source 1..120: mol_type = other DNA
gccgcccatcgtctgggaggtgaggagcgcctctgcccggccacccatcatctggtaggtgaggagcgcctctgcctggccgccaccccatctaggaagtgaggagcgtctctgcctggc

SEQ ID NO: 109114 - DNA, 120 bp, synthetic construct
  source 1..120: mol_type = other DNA
gacgatggtggttttgtagaaaagaaaaggaggaaatgtggagaaaagaaagagagaacagattgttactgtgtctgtgtagaaagaagtagacataggggactccattttgttctgtac

SEQ ID NO: 109115 - DNA, 120 bp, synthetic construct
  source 1..120: mol_type = other DNA
agttacatgagtaagttctttagtggtgatttgtgagatcctggtgcacccatcaatgaagcagtatacactgcaccatatttgttgtcttttatcccttgtcccctcccactcttcccc

SEQ ID NO: 109116 - DNA, 120 bp, synthetic construct
  source 1..120: mol_type = other DNA
tccttcgcccactttttgatggggttgtttgtttttttcttgtaaatttgtttgagttcattgtagattctggatatcagccctttgtcagatgagtaggttgcgaaaattttctcccat

SEQ ID NO: 109117 - DNA, 120 bp, synthetic construct
  source 1..120: mol_type = other DNA
ttggtgtataagaatgcttgtgatttttgtacattgattttgtatcctgagactttgctgaagttgcttatcagcttaaggagattttgggctgagacaatggggttttctcgatataca

SEQ ID NO: 109118 - DNA, 120 bp, synthetic construct
  source 1..120: mol_type = other DNA
tgggatcggtgatgatatcccctttatcattttttattgcgtctatttgattcttctctctttttttctttattagtcttgctagcggtctatcaattttgttgatcctttcaaaaaacc

SEQ ID NO: 109119 - DNA, 120 bp, synthetic construct
  source 1..120: mol_type = other DNA
actgatgggtcctgactctttatccaatttgccagtctatgtcttttaattggagaatttagtccatttacatttaaagttaatattgttatgtgtgaatttgatcctgtcattatgatg

SEQ ID NO: 109120 - DNA, 120 bp, synthetic construct
  source 1..120: mol_type = other DNA
agaccagcctgaccaacatggagaaacccgtctttactaaaaataaaaaagttagtcaggtgtggtggtgcatgcttgtaatcccagctactcaggaggctgaggcatgagaatcgcttg

SEQ ID NO: 109121 - DNA, 120 bp, synthetic construct
  source 1..120: mol_type = other DNA
caccatcccatctaggaagtgaggagcgcctcttcccggccgccatcccatctaggaagcgaggagcgcctcttccccgccgcccattgtctgagatgtggggagcgcctctgccccgcc

SEQ ID NO: 109122 - DNA, 120 bp, synthetic construct
  source 1..120: mol_type = other DNA
aaaaaaaaataaataaaaaaataaaaaaaaaagagcaaaactccgcctcaaaaaaaaaaaaaaaaaaaaaaaaagaaaggagcgggatgttagcggcctggaaagcagtccagcttggct

SEQ ID NO: 109123 - DNA, 120 bp, synthetic construct
  source 1..120: mol_type = other DNA
cgaaaatcacttgaacctagaaggtggaggctgcggtgagctgaaatcacgccactgcactccagcctgggcaaaagactgagactccatctaaataaatatatatattatataaatata

SEQ ID NO: 109124 - DNA, 120 bp, synthetic construct; identical to SEQ ID NO: 18627
  source 1..120: mol_type = other DNA

SEQ ID NO: 109125 - DNA, 120 bp, synthetic construct; identical to SEQ ID NO: 18628
  source 1..120: mol_type = other DNA

SEQ ID NO: 109126 - DNA, 120 bp, synthetic construct
  source 1..120: mol_type = other DNA
aagccttcttgctctagatttttggaaggaaagctttcttaagaaagaacggaaaagagagaagaaccaaatagacgcaataaaaaatgataaaggggttatcaccactgatcccacaga

SEQ ID NO: 109127 - DNA, 120 bp, synthetic construct
  source 1..120: mol_type = other DNA
ggcaaaaactggaagcattccctttgaaaactggcacaagacagggatgccctctctcaccactcctattcaacatagtgttggaagttctggccagggcaatcatgcaggagaaggaaa

SEQ ID NO: 109128 - DNA, 120 bp, synthetic construct
  source 1..120: mol_type = other DNA
ttaattcaagatggattaaagacttaaacattagatctaaaaccataaaaaccctagaagaaaacttaggcattaccattgaggacataggcatgggcaaggacttcgtgtctaaaacat

SEQ ID NO: 109129 - DNA, 120 bp, synthetic construct
  source 1..120: mol_type = other DNA
gtgcacatgtaccctaaaactttaataataataaaataaaataaaataaaagaacagaccagatgcagtggctcacaccagtaatcccagcactttgtgaggccaaggtaggaggatggc

SEQ ID NO: 109130 - DNA, 120 bp, synthetic construct
  source 1..120: mol_type = other DNA
tatttctgggttctctatcctgttccattggtctgtgggtctgttcttgtaccagtaccatgctgttttggttactgtactcctgtaatataatttgaagttggatagcatgatgcctcc

SEQ ID NO: 109131 - DNA, 120 bp, synthetic construct
  source 1..120: mol_type = other DNA
tggcctcagcctcccgagtgctgggactataggtgcgtgtcaccatgtccggctaattttttgtatttttagtagagacagtgtttcactgtgttagccaggatggtctcaatctcctga

SEQ ID NO: 109132 - DNA, 120 bp, synthetic construct; identical to SEQ ID NO: 26573
  source 1..120: mol_type = other DNA

SEQ ID NO: 109133 - DNA, 120 bp, synthetic construct
  source 1..120: mol_type = other DNA
ggcagagacgctcctcacttcctagatgtgatggtggccgggaagaggcgctcctcacttcccagatgggatggcggcggggcagagacgctcctcactttccagactgggcagccaggc

SEQ ID NO: 109134 - DNA, 120 bp, synthetic construct
  source 1..120: mol_type = other DNA
cctacgttgtgatgatcggtcactgtcccccatcacccctagatgggacggtctagttgcaggaaaacaagctcctctacattatggggaattgtataattatttcattacatattacaa

SEQ ID NO: 109135 - DNA, 120 bp, synthetic construct; identical to SEQ ID NO: 18492
  source 1..120: mol_type = other DNA

SEQ ID NO: 109136 - DNA, 120 bp, synthetic construct; identical to SEQ ID NO: 18493
  source 1..120: mol_type = other DNA

SEQ ID NO: 109137 - DNA, 120 bp, synthetic construct; identical to SEQ ID NO: 18494
  source 1..120: mol_type = other DNA

SEQ ID NO: 109138 - DNA, 120 bp, synthetic construct; identical to SEQ ID NO: 18495
  source 1..120: mol_type = other DNA

SEQ ID NO: 109139 - DNA, 120 bp, synthetic construct; identical to SEQ ID NO: 18496
  source 1..120: mol_type = other DNA

SEQ ID NO: 109140 - DNA, 120 bp, synthetic construct; identical to SEQ ID NO: 18497
  source 1..120: mol_type = other DNA

SEQ ID NO: 109141 - DNA, 120 bp, synthetic construct
  source 1..120: mol_type = other DNA
ctatattccagcctgggtgacacaacaagattctgaaaaaagaaagagagagagagagagaaagaaagagagagagagagaaagagagagagagagaaagagagagagagagaaagagag

SEQ ID NO: 109142 - DNA, 120 bp, synthetic construct; identical to SEQ ID NO: 18499
  source 1..120: mol_type = other DNA

SEQ ID NO: 109143 - DNA, 120 bp, synthetic construct; identical to SEQ ID NO: 18500
  source 1..120: mol_type = other DNA

SEQ ID NO: 109144 - DNA, 120 bp, synthetic construct; identical to SEQ ID NO: 18501
  source 1..120: mol_type = other DNA

SEQ ID NO: 109145 - DNA, 120 bp, synthetic construct
  source 1..120: mol_type = other DNA
tgaaatgttgatttgcactgtttgcccatatctatgagcttgcaaacttagtcttttctttcttttttttttttgagatggagtctctctctgtcgcccaggctggagcacagtggcgcc

SEQ ID NO: 109146 - DNA, 120 bp, synthetic construct
  source 1..120: mol_type = other DNA
cctgaggactcgccacactgacttccacaatggttgaactagtttacagtcccaccaacagtgtaaaattgttcctatttctccacatcctctccagcacctgttgtttcctgactgttt

SEQ ID NO: 109147 - DNA, 120 bp, synthetic construct
  source 1..120: mol_type = other DNA
cgcgggctcttttttggttccatatgaactttaaagtagttttttccaattctgtgaagaaagtcattggtagcttgatggggatggcattgaatctgtaaataaccttgggcagtatgg

SEQ ID NO: 109148 - DNA, 120 bp, synthetic construct
  source 1..120: mol_type = other DNA
atccatctggtcctggactctttttggttggtaaactattgattattgccacaatttcagctcctgttattggtctattcagagattcaacttcttcctggtttagtcttgggagggtgt

SEQ ID NO: 109149 - DNA, 120 bp, synthetic construct
  source 1..120: mol_type = other DNA
gggtgctcctgtattgggtgcatatatatttaggatagttagctcttcttgtttaattgatctctttaccattatgtaatggccttgtctcttttgatctttgctggtttaaagtctgtt

SEQ ID NO: 109150 - DNA, 120 bp, synthetic construct
  source 1..120: mol_type = other DNA
tgaggcttctgcattcttcacgtagttctcgagccttggttttcagctccatcagctcctttaagcacttctctgtattggttattctagttttacattcttctaaatttttttcaaagt

SEQ ID NO: 109151 - DNA, 120 bp, synthetic construct
  source 1..120: mol_type = other DNA
attttccaggtgcgtccgtcacccctttctttgactaggaaagggaactccctgaccccttgcgcttcccagatgaggcaatgcctcgccctgcttcggctcacgcacggtgcgcgcacc

SEQ ID NO: 109152 - DNA, 120 bp, synthetic construct; identical to SEQ ID NO: 31400
  source 1..120: mol_type = other DNA

SEQ ID NO: 109153 - DNA, 120 bp, synthetic construct
  source 1..120: mol_type = other DNA
ctgcactccagcctgggcaacagagcaagactccatcttaaaaaataaataaataaatagagagagagagagagagagagagagaggggggggggagagagagagagagagagagagaga

SEQ ID NO: 109154 - DNA, 120 bp, synthetic construct
  source 1..120: mol_type = other DNA
acacaggctaaattaaagcattggctttcccaatctgtagcctgcagacagcagatcctgggacttctcagcctccacaatcacatgagccaattcctcataatctctcatatatatata

SEQ ID NO: 109155 - DNA, 120 bp, synthetic construct
  source 1..120: mol_type = other DNA
gactagtgctgcaataaacatacatgtgcatgtgtctttacagcagcatgatttataatcctttgggtatatacccagtaatgggatggctgggtcaaatggtatttctagttctagatc

SEQ ID NO: 109156 - DNA, 120 bp, synthetic construct
  source 1..120: mol_type = other DNA
ctccagctttgttcttttggtttaggattgacttggcaatgctggctcttttttggttccatatgaactttaaagtagttttttccaattctgtgaagaaagtcattggtagcttgatgg

SEQ ID NO: 109157 - DNA, 120 bp, synthetic construct
  source 1..120: mol_type = other DNA
ttagggatattggtctaaaattctctttttttgttgtgtctctgcccagctttggtatcaggatgatgctggcctcataaaatgagttagggaggattccctctttttctattgattgga

SEQ ID NO: 109158 - DNA, 120 bp, synthetic construct
  source 1..120: mol_type = other DNA
aaacaccgcatgttctcactcataggaattgaacaatgagaacacttggacacaggaaggggaacatcacacaccgaggcctgttgtggggtggggggaggggggagggatagcattaga

SEQ ID NO: 109159 - DNA, 120 bp, synthetic construct
  source 1..120: mol_type = other DNA
gacccaaagagtgagcagtagcaagatttattgcaaagaacaaaagaccaaagcttccacactgtggaaggggacccaagcgggttaccaatgctggctcgggtagcctgcttttattct

SEQ ID NO: 109160 - DNA, 120 bp, synthetic construct
  source 1..120: mol_type = other DNA
agaaggaatggtaccagctcctccttgtacctctgttagaattcggctgtgaatccattttagccaaggtaatttatagattcaatgccatccccatcaagctaccaatgactttcttca

SEQ ID NO: 109161 - DNA, 120 bp, synthetic construct
  source 1..120: mol_type = other DNA
gagaggatgtggagaaataggaacacttttacactgttggtgggactgtaaactagttcaaccattgtggaagacagtgtggcgattcctcggggatctagaactagaaataccatttga

SEQ ID NO: 109162 - DNA, 120 bp, synthetic construct; identical to SEQ ID NO: 13191
  source 1..120: mol_type = other DNA

SEQ ID NO: 109163 - DNA, 120 bp, synthetic construct; identical to SEQ ID NO: 24647
  source 1..120: mol_type = other DNA

SEQ ID NO: 109164 - DNA, 120 bp, synthetic construct; identical to SEQ ID NO: 24648
  source 1..120: mol_type = other DNA

SEQ ID NO: 109165 - DNA, 120 bp, synthetic construct; identical to SEQ ID NO: 24649
  source 1..120: mol_type = other DNA

SEQ ID NO: 109166 - DNA, 120 bp, synthetic construct
  source 1..120: mol_type = other DNA
aacaacaacaaaaaaacaaacagcagcgagcaggaggcctaagaaaccaaaaatacaggttcctgaaaatcagtagatgagcctggctaagattttggtgaaactcgagtcctcttttgg

SEQ ID NO: 109167 - DNA, 120 bp, synthetic construct; identical to SEQ ID NO: 32887
  source 1..120: mol_type = other DNA

SEQ ID NO: 109168 - DNA, 120 bp, synthetic construct; identical to SEQ ID NO: 32888
  source 1..120: mol_type = other DNA

SEQ ID NO: 109169 - DNA, 120 bp, synthetic construct
  source 1..120: mol_type = other DNA
acccctgatttgtaggttttcaactttaaaatatatgctataaaataagttcatttaagtaggctaggcatggtggctcatgtctgtaatcctagcactttgggaggccgaggcaggtgg

SEQ ID NO: 109170 - DNA, 120 bp, synthetic construct
  source 1..120: mol_type = other DNA
attacatggataagtcctttagtggtgatttctgagattttggtgcacctgagcagtgtacattctacccaatgtgtagtattttgtctctcaacccctcccactttttccctagagtct

SEQ ID NO: 109171 - DNA, 120 bp, synthetic construct
  source 1..120: mol_type = other DNA
tcatgtttttagcactctgtttctcatccgaaaataggagactgaaccaaataaactctaatgttctttttttattattattatactttaagttttagggtacatgtgcacattgtgcag

SEQ ID NO: 109172 - DNA, 120 bp, synthetic construct
  source 1..120: mol_type = other DNA
ctcgctgattgctagcacagcagtctgagatcaaactgcaaggcggcagcgaggctgggggaggggcgcccgccattgcccaggcttgcctaggtaaacaaagcagccaggaagctccaa

SEQ ID NO: 109173 - DNA, 120 bp, synthetic construct
  source 1..120: mol_type = other DNA
tacccccaaccccgtgctctctgaaacgtgtgctgtgtcaactcagagttaaatggattaagggcggtgcaagatgtgctttgttaaacagatgcttgaaggcagcatgctccttaagag

SEQ ID NO: 109174 - DNA, 120 bp, synthetic construct
  source 1..120: mol_type = other DNA
gtacgtctacagtcagccttacagtaagcttgtgcgctcggaagaagctagggtgataatagggcaaactaaaagtaaaattaaaagtaaatatgcctcttatctcagctttattaaaat

SEQ ID NO: 109175 - DNA, 120 bp, synthetic construct
  source 1..120: mol_type = other DNA
gagagcctcccacagttgaggccagatacaagtctttttcgataaaaatgctaaaagatatgaaagagggagtaaaacagtatggacccaactctccttatatgaggacattattagatt

SEQ ID NO: 109176 - DNA, 120 bp, synthetic construct
  source 1..120: mol_type = other DNA
ccattgtcgggaaatgagcaaaggggccagcctcaggccccacaacaaactggggcattcccaattcagccatttgttcctcagggttttcagggacaacaacccccactgtcccaagtg

SEQ ID NO: 109177 - DNA, 120 bp, synthetic construct
  source 1..120: mol_type = other DNA
tcaaaaaatacagaagttttagtttgggaagaatgtgtggccaatagtgcggtgatattacaaaacaatgaattcggaactattatagattgggcacctcgaggtcaattctaccacaat

SEQ ID NO: 109178 - DNA, 120 bp, synthetic construct
  source 1..120: mol_type = other DNA
atgggattaattgcagtcacagctacggctgctgtagcaggagttgcattgcattcttctgttcagtcagtaaactttgttaatgattggcaaaataattctacaagattgtggaattca

SEQ ID NO: 109179 - DNA, 120 bp, synthetic construct
  source 1..120: mol_type = other DNA
tgaccatcccccagcccgacacccgtaaagggtctgtgctgaggaggattagtaaaagaggaaggaatgcctcttgcagttgagacaagaggaaggcatctgtctcctgcctgtccctgg

SEQ ID NO: 109180 - DNA, 120 bp, synthetic construct
  source 1..120: mol_type = other DNA
aagagctcctgaaggaagcactaaacatggaaaggaactaccggtaccagccgctgcaaaatcatgccaaaatgtaaagaccatctagactaggaagaaactgcatgaactaacgagcaa

SEQ ID NO: 109181 - DNA, 120 bp, synthetic construct
  source 1..120: mol_type = other DNA
gaaatacatagcactaaatgcccacaagagaaagcaggaaagatccaaaattgacaccctaacatcacaattaaaagaactagaaaagcaagagcaaacacattcaaaagctagcagaag

SEQ ID NO: 109182 - DNA, 120 bp, synthetic construct
  source 1..120: mol_type = other DNA
cccctcatgctaaaaactctcaataaattaggcattgatgggacgtatttcaaaataataagagctatctatgacaaacccacagccaatatcatactgaatgggcaaaaactggaagca

SEQ ID NO: 109183 - DNA, 120 bp, synthetic construct
  source 1..120: mol_type = other DNA
cctcagaaataacgccgcatatctacaactatctgatctttgacaaacctgaaaaaaacaagcaatggggaaaggattccctatttaataaatggtgctgggaaaactggctagccatat

SEQ ID NO: 109184 - DNA, 120 bp, synthetic construct
  source 1..120: mol_type = other DNA
gaacaaaaaaccaaacaccacatattctcactcataggtgggaattgaacaatgagatcacctggacacaggaaggggaatatcacactctggtgactgttgtggggtggggggaggggg

SEQ ID NO: 109185 - DNA, 120 bp, synthetic construct
  source 1..120: mol_type = other DNA
cgagttacaggagtaaattcaaaccaaaggcaaagaagttaaaacctttgaaaaaaatttagatgaatgcataactagaataaccaatacagagaagtgcttaaaggagctgatggagct

SEQ ID NO: 109186 - DNA, 120 bp, synthetic construct
  source 1..120: mol_type = other DNA
actaaatgctccaatggaaagacacagactggcaaattggataaagagtcaagacccatcagtgtgctgtattcaggaaacccatctcacgtgcagagacacacataggctcaaaataaa

SEQ ID NO: 109187 - DNA, 120 bp, synthetic construct
  source 1..120: mol_type = other DNA
aacatcacaattaaaagaactagaaaagcaagagcaaacacattcaaaaactagcagaaggcaagaaataactaaaatcagagcagaactgaaggaaatagagacacaaaaaacccttca

SEQ ID NO: 109188 - DNA, 120 bp, synthetic construct
  source 1..120: mol_type = other DNA
cctggcccatgataaaaaataaataaataaataattattattttcttctcccattttctttttactagcaaagaaaatatctaggccgggcgcggtggctcacgcctgtaatcccagcac

SEQ ID NO: 109189 - DNA, 120 bp, synthetic construct
  source 1..120: mol_type = other DNA
attaaccattcttttttcttttctttttttttttttctttgagtcagggtcttgttctgtcacccaggctgctggattgcagcagcacaagcatggctcactgaaacctcaacctcctcg

SEQ ID NO: 109190 - DNA, 120 bp, synthetic construct; identical to SEQ ID NO: 7038
  source 1..120: mol_type = other DNA

SEQ ID NO: 109191 - DNA, 120 bp, synthetic construct; identical to SEQ ID NO: 7039
  source 1..120: mol_type = other DNA

SEQ ID NO: 109192 - DNA, 120 bp, synthetic construct
  source 1..120: mol_type = other DNA
taggaggctaaggcaggaggatcgcttgaactcaggagtttgaaaccagcctgggcaacgtggcgaaaccccgtctctactttttagtattttagtatttttaaaaaacacttttaaaaa

SEQ ID NO: 109193 - DNA, 120 bp, synthetic construct; identical to SEQ ID NO: 26487
  source 1..120: mol_type = other DNA

SEQ ID NO: 109194 - DNA, 120 bp, synthetic construct
  source 1..120: mol_type = other DNA
cgcagtaaacatacgtgtgcatgtgtctttatagacagcatgatttatagtcatttgggtatatacccagtaatgggatggctgggtcaaatggtatttctagttctagatccctgagga

SEQ ID NO: 109195 - DNA, 120 bp, synthetic construct
  source 1..120: mol_type = other DNA
gagacttagactcccacacattaataatgggagactttaacaccccactgtcaactatttgttgtatttgattaaatactggcaggctccgtagtgtcctctagttgtccagggtatagt

SEQ ID NO: 109196 - DNA, 120 bp, synthetic construct; identical to SEQ ID NO: 31857
  source 1..120: mol_type = other DNA

SEQ ID NO: 109197 - DNA, 120 bp, synthetic construct; identical to SEQ ID NO: 31858
  source 1..120: mol_type = other DNA

SEQ ID NO: 109198 - DNA, 120 bp, synthetic construct
  source 1..120: mol_type = other DNA
aaaccacatgattatctcaatagacgcagaaaaggcctttgacaaaattcaacaacccttcatgctaaaagctctcaataaattaggtattgatgggacgtatctcaaaataagagctat

SEQ ID NO: 109199 - DNA, 120 bp, synthetic construct
  source 1..120: mol_type = other DNA
actggtaccaaaacagagatatagatcaatggaacagaacagagccctcagaaacaatgccacatatctacaaccatctaatctttgacaaacctgacaaaaacaagaaattgggaaagg

SEQ ID NO: 109200 - DNA, 120 bp, synthetic construct
  source 1..120: mol_type = other DNA
aggacaaaaaaccaaacaccacgtgttctcactcatagatgggaattgaacaatgagaacacatggacacaggaaggggaccgtcacacgccggggactgttgtggggtggggggagggg

SEQ ID NO: 109201 - DNA, 120 bp, synthetic construct
  source 1..120: mol_type = other DNA
tttatagattcaatgccatccccatcaagctaccaatgactttcttcacagacttggaaaaaactactttaaagttcatatggaaccaaaaaagagcccgcaatgcccagtcaattctaa

SEQ ID NO: 109202 - DNA, 120 bp, synthetic construct
  source 1..120: mol_type = other DNA
gtaaactagttcaaccattgtggaagtcagtgtggtgattcctcagggatctagaactagaaataccatttgacccagccatcgcattactgggtatatacccaaaggattataaatcat

SEQ ID NO: 109203 - DNA, 120 bp, synthetic construct
  source 1..120: mol_type = other DNA
ccatgtgttctcattgttcagttcccacctatgagtgagaacgtgcagtgtttggttttctctccttgtgataggttgctgagaatgatggtttccagcttcatccatgtccctacaaag

SEQ ID NO: 109204 - DNA, 120 bp, synthetic construct
  source 1..120: mol_type = other DNA
cctaggttttcttctagggtttttatggttttaggtctaacatttaagtctttaatccatcttgaattaatttttgtataaggtgtaaggaagggatccagtttcaactttctacatatg

SEQ ID NO: 109205 - DNA, 120 bp, synthetic construct
  source 1..120: mol_type = other DNA
atttgggcactcttttttttattattatactttaagttttagggtacatgtggacaacgtgcaggtttcttacatacgtatacatgtgccatggtggtgtgctgcacccattaactcgtc

SEQ ID NO: 109206 - DNA, 120 bp, synthetic construct
  source 1..120: mol_type = other DNA
gaatagtgccgcaataaacatacatgtgcatgtgtctttatggcagcatgatttatagtcctttgggtatatacccagtaatgggattgttgggtcaaatggtatttctagttctagatc

SEQ ID NO: 109207 - DNA, 120 bp, synthetic construct
  source 1..120: mol_type = other DNA
tattggtgtataagaatgcttatgatttttccacattgatttttgtatcctgagacttgttgtagttgcttatcagcttaaggagattttgggctgagatgatggggttttctagatata

SEQ ID NO: 109208 - DNA, 120 bp, synthetic construct
  source 1..120: mol_type = other DNA
ggttctggatattagccctttgtcagatgagtaggttgtgaaaattttcttccattttgtaggttgcctgttcactctgatggtagtttcttttgctgtgcagaagctctttagtttaat

SEQ ID NO: 109209 - DNA, 120 bp, synthetic construct; identical to SEQ ID NO: 21739
  source 1..120: mol_type = other DNA

SEQ ID NO: 109210 - DNA, 120 bp, synthetic construct
  source 1..120: mol_type = other DNA
gctcctggattcattaactttttgaagggttttttatgtctctatttccctcagttctgctctgattttagttatttcttgccttctgctagttttcgaaggtgtttgctcttgcttttc

SEQ ID NO: 109211 - DNA, 120 bp, synthetic construct
  source 1..120: mol_type = other DNA
ttaattagagcattcagcccatttacctttaaggttaatattgttatgtgtgaatttgatcctgtcattatgatgttagctggttattttgcttgttacttgatgcagttacttcctagc

SEQ ID NO: 109212 - DNA, 120 bp, synthetic construct
  source 1..120: mol_type = other DNA
ggatctaattaaactgaagagcttctgcacagtaaaagaaactaccatcagagtgaacaggcaacctacaaaatgggagaaaattttcgcaacctactcatctgacaaagggctaatatc

SEQ ID NO: 109213 - DNA, 120 bp, synthetic construct; identical to SEQ ID NO: 21740
  source 1..120: mol_type = other DNA

SEQ ID NO: 109214 - DNA, 120 bp, synthetic construct
  source 1..120: mol_type = other DNA
tgtgttgtctgatatggtagccactagccacatgtggttactgagcacttgcagtgtggctagttgcaattgatgtgtgctgtaaatgcaaaatacacactgaatttcaaagacttagtc

SEQ ID NO: 109215 - DNA, 120 bp, synthetic construct; identical to SEQ ID NO: 22012
  source 1..120: mol_type = other DNA

SEQ ID NO: 109216 - DNA, 120 bp, synthetic construct; identical to SEQ ID NO: 25505
  source 1..120: mol_type = other DNA

SEQ ID NO: 109217 - DNA, 120 bp, synthetic construct
  source 1..120: mol_type = other DNA
gggtatatacccaaaggattataaatcatgctgctataaagacacatgcacacgtatgtttattgcggcactattcgtaatagcaaagacttggaaccaacccaaatgtccatgaatgat

SEQ ID NO: 109218 - DNA, 120 bp, synthetic construct; identical to SEQ ID NO: 25506
  source 1..120: mol_type = other DNA

SEQ ID NO: 109219 - DNA, 120 bp, synthetic construct
  source 1..120: mol_type = other DNA
ccaaatctatctctgattggtgtacctgaaagtgatggggagaatggaaccaagttggaaaacactctgcaggatattatccaggagaacttccccaatctagcaaggcaggccaacatt

SEQ ID NO: 109220 - DNA, 120 bp, synthetic construct
  source 1..120: mol_type = other DNA
gaaactgcatcaactaacgagcaaaataaccagctaacatcataatgacaggatccaattcacacataacaatattaactttaaatgtaaatggactaaatgctccaattaaaagacaca

SEQ ID NO: 109221 - DNA, 120 bp, synthetic construct
  source 1..120: mol_type = other DNA
aacacattcaaaagctagcagaaggcaagaaataactaagatcagagcagaacggaaggaaatagagacacaaaaaacccttcaaaaaattaatgaatccaggagctggttttttgaaag

SEQ ID NO: 109222 - DNA, 120 bp, synthetic construct
  source 1..120: mol_type = other DNA
agaaactggaagcattccctttgaaaactggcacaagacagggctgccctctctcaccactcctattcaacatagtgttggaagttctggccagggcaattaggcaggagaaggaaataa

SEQ ID NO: 109223 - DNA, 120 bp, synthetic construct
  source 1..120: mol_type = other DNA
agccaaaattgacaaatgggatctagttaaactaaagagcttctgcacagcaaaagaaactaccatcagagtgaacaggcaacccacaaaatgggggaaaattttcgcaacctactcttc

SEQ ID NO: 109224 - DNA, 120 bp, synthetic construct
  source 1..120: mol_type = other DNA
tagcattgggagatatacctaatgctagatgacgagttagtgggtgcaatgcaccaacatggcacatgtatacatatgtaactaacctgcaccttgtgcacgtgtaccctaaaacttaaa

SEQ ID NO: 109225 - DNA, 120 bp, synthetic construct
  source 1..120: mol_type = other DNA
acgcctagctaattttctatttttatttttatttttgtagagacgaggtcttcctatgttgtccaggctggtcttgaactcctgggctcaagcaatctgcctgtcttggcctctcaaaat

SEQ ID NO: 109226 - DNA, 120 bp, synthetic construct; identical to SEQ ID NO: 20623
  source 1..120: mol_type = other DNA

SEQ ID NO: 109227 - DNA, 120 bp, synthetic construct; identical to SEQ ID NO: 20624
  source 1..120: mol_type = other DNA

SEQ ID NO: 109228 - DNA, 120 bp, synthetic construct
  source 1..120: mol_type = other DNA
ttattcagcaaatgttttattttgtatctgctatatacttgataatgtgctaggcatggggttatgaataaagttccctcgggtgcagtggctcacacctgtaatcccagcacttcggga

SEQ ID NO: 109229 - DNA, 120 bp, synthetic construct
  source 1..120: mol_type = other DNA
ccgcagtttttgtgtccctgggtacttgagattagggagtggtgatgactcttaaggagcatgctgccttcaagcatctgtttaacaaagcacatcttgcaccgcccttaatccatttaa

SEQ ID NO: 109230 - DNA, 120 bp, synthetic construct
  source 1..120: mol_type = other DNA
aagataaaaacaagtgttggcaagactgtaattgaaattggcttctcatacactaaaaatagtaatataggctgggcgcggtggctcatgcctataatcccagcactttgggaggccgag

SEQ ID NO: 109231 - DNA, 120 bp, synthetic construct; identical to SEQ ID NO: 12937
  source 1..120: mol_type = other DNA

SEQ ID NO: 109232 - DNA, 120 bp, synthetic construct; identical to SEQ ID NO: 25025
  source 1..120: mol_type = other DNA

SEQ ID NO: 109233 - DNA, 120 bp, synthetic construct
  source 1..120: mol_type = other DNA
tcttggactcctggcctcaagtgatccgcccacctcagcttcccaaagtgctgggactaccagtgtgagccaccgtgcccagccgagggtcagcgtattttttgacaaattcacccatag

SEQ ID NO: 109234 - DNA, 120 bp, synthetic construct
  source 1..120: mol_type = other DNA
tatatacaatttttatttgtcaatttaaaaaaggggggagttagggatatctaagggttggccccaactttagaggcaggcatgggcctttgtgccctgccagggtaaaatctgactcta

SEQ ID NO: 109235 - DNA, 120 bp, synthetic construct
  source 1..120: mol_type = other DNA
ctcagccacctaaagtgttgggattataggcatgagccactgcacccggccttgtgttccttctttacttcactttttcttccttgtaagtgttcaggtcaattcctcttgattgtaaaa

SEQ ID NO: 109236 - DNA, 120 bp, synthetic construct; identical to SEQ ID NO: 17726
  source 1..120: mol_type = other DNA

SEQ ID NO: 109237 - DNA, 120 bp, synthetic construct; identical to SEQ ID NO: 17727
  source 1..120: mol_type = other DNA

SEQ ID NO: 109238 - DNA, 120 bp, synthetic construct
  source 1..120: mol_type = other DNA
agctcacaatctcttttaaatgtttaaatcacaacatgtttctgctatatttttttgagacagggtctggctttgtccccaggatggaatgcagtggtgcaatcttggctcacctggtct

SEQ ID NO: 109239 - DNA, 120 bp, synthetic construct
  source 1..120: mol_type = other DNA
aagccaggagtttgagaccagcctgggcaacacagtgagacccccatctctacaaaaataattaaaataaagaattagctgagactggtggtgtgcacctttagtcccagctagtcagga

SEQ ID NO: 109240 - DNA, 120 bp, synthetic construct
  source 1..120: mol_type = other DNA
cagagatcccagcactgtactccaacctggatgacaaagcaagactccatctcaaaaaagaaaggaaaagaaaagaaaaaaaagtaggaaaggagaggagaggaaagaagaaaggagagg

SEQ ID NO: 109241 - DNA, 120 bp, synthetic construct; identical to SEQ ID NO: 11791
  source 1..120: mol_type = other DNA

SEQ ID NO: 109242 - DNA, 120 bp, synthetic construct; identical to SEQ ID NO: 7598
  source 1..120: mol_type = other DNA

SEQ ID NO: 109243 - DNA, 120 bp, synthetic construct
  source 1..120: mol_type = other DNA
ttccaaactttcatggttaaaacccacataggctcacttcagaagacactaccgaagatcaacatcaccctgcctggtcttatcagttgccccaattacttcatggtatattttgctttg

SEQ ID NO: 109244 - DNA, 120 bp, synthetic construct; identical to SEQ ID NO: 19264
  source 1..120: mol_type = other DNA

SEQ ID NO: 109245 - DNA, 120 bp, synthetic construct; identical to SEQ ID NO: 19265
  source 1..120: mol_type = other DNA

SEQ ID NO: 109246 - DNA, 120 bp, synthetic construct
  source 1..120: mol_type = other DNA
ccaaggcctataaacctgctattctttaaccggcagcttcacaggtcaacgtgggaaatacacagccagacacacaggcgtttgatttttaccaaatctgcagccatgtggtgcctctgg

SEQ ID NO: 109247 - DNA, 120 bp, synthetic construct
  source 1..120: mol_type = other DNA
gtcagtggggagagacggaaccgagggagaggtcagggtcagtgaggagagacaggaaccgagggagaggtcaaggtcagtggaggagagacaggaaccgagtgagaggtcaaggtcagt

SEQ ID NO: 109248 - DNA, 120 bp, synthetic construct
  source 1..120: mol_type = other DNA
aaccgagtgagaggtcaaggtcagtggggagagacaggaaccgagggagaggtcagggtcagaggaggagagacgggaaccgagggagaggtcaaggtcagtgaggagagacaggaaccg

SEQ ID NO: 109249 - DNA, 120 bp, synthetic construct
  source 1..120: mol_type = other DNA
ttcaggggccaaggagggaggatcgcttgagcccaggagttgaggccagcttaggcaacacagagacacttgtctctttgaaaagaaaaaaaaaaaaaaaaaagctaaaatccttcaaat

SEQ ID NO: 109250 - DNA, 120 bp, synthetic construct
  source 1..120: mol_type = other DNA
gctcggcatccgagctggaaaggggctgcacaggaagcaaggccagaggaaggatgggcatggtacgcggcacctcccagaacacagcggggcgtgggctcatgtgtatttcatgaagaa

SEQ ID NO: 109251 - DNA, 120 bp, synthetic construct; identical to SEQ ID NO: 19268
  source 1..120: mol_type = other DNA

SEQ ID NO: 109252 - DNA, 120 bp, synthetic construct
  source 1..120: mol_type = other DNA
aggaaattagcttcaactgttggctttgccagttcctgatctctgatggcaaaggctcagttgaaggagcagttttggagaacatattctacaaaccactgatcggtgtgtttttatgag

SEQ ID NO: 109253 - DNA, 120 bp, synthetic construct; identical to SEQ ID NO: 12539
  source 1..120: mol_type = other DNA

SEQ ID NO: 109254 - DNA, 120 bp, synthetic construct; identical to SEQ ID NO: 12540
  source 1..120: mol_type = other DNA

SEQ ID NO: 109255 - DNA, 120 bp, synthetic construct; identical to SEQ ID NO: 19889
  source 1..120: mol_type = other DNA

SEQ ID NO: 109256 - DNA, 120 bp, synthetic construct; identical to SEQ ID NO: 19890
  source 1..120: mol_type = other DNA

SEQ ID NO: 109257 - DNA, 120 bp, synthetic construct; identical to SEQ ID NO: 26231
  source 1..120: mol_type = other DNA

SEQ ID NO: 109258 - DNA, 120 bp, synthetic construct; identical to SEQ ID NO: 26232
  source 1..120: mol_type = other DNA

SEQ ID NO: 109259 - DNA, 120 bp, synthetic construct; identical to SEQ ID NO: 26233
  source 1..120: mol_type = other DNA

SEQ ID NO: 109260 - DNA, 120 bp, synthetic construct; identical to SEQ ID NO: 26234
  source 1..120: mol_type = other DNA

SEQ ID NO: 109261 - DNA, 120 bp, synthetic construct; identical to SEQ ID NO: 26229
  source 1..120: mol_type = other DNA

SEQ ID NO: 109262 - DNA, 120 bp, synthetic construct; identical to SEQ ID NO: 26230
  source 1..120: mol_type = other DNA

SEQ ID NO: 109263 - DNA, 120 bp, synthetic construct; identical to SEQ ID NO: 16475
  source 1..120: mol_type = other DNA

SEQ ID NO: 109264 - DNA, 120 bp, synthetic construct; identical to SEQ ID NO: 16476
  source 1..120: mol_type = other DNA

SEQ ID NO: 109265 - DNA, 120 bp, synthetic construct; identical to SEQ ID NO: 5473
  source 1..120: mol_type = other DNA

SEQ ID NO: 109266 - DNA, 120 bp, synthetic construct
  source 1..120: mol_type = other DNA
tgctctgtggccaagctgatgtttgcggcatcccagcctgcctccaggtgttgctggaacagctcattcctccccttccctgagctgcatgttcccacaccgcgtggcaagcaaacatct

SEQ ID NO: 109267 - DNA, 120 bp, synthetic construct
  source 1..120: mol_type = other DNA
tcttcggaggggctacttttcccagtgagcacggccagctccttagcagcctggcagagctgtccttgggccaccttggtcccctagctgagctgctcaaggctcagccatcaaggctca

SEQ ID NO: 109268 - DNA, 120 bp, synthetic construct; identical to SEQ ID NO: 26256
  source 1..120: mol_type = other DNA

SEQ ID NO: 109269 - DNA, 120 bp, synthetic construct; identical to SEQ ID NO: 26257
  source 1..120: mol_type = other DNA

SEQ ID NO: 109270 - DNA, 120 bp, synthetic construct; identical to SEQ ID NO: 26258
  source 1..120: mol_type = other DNA

SEQ ID NO: 109271 - DNA, 120 bp, synthetic construct; identical to SEQ ID NO: 26259
  source 1..120: mol_type = other DNA

SEQ ID NO: 109272 - DNA, 120 bp, synthetic construct; identical to SEQ ID NO: 26260
  source 1..120: mol_type = other DNA

SEQ ID NO: 109273 - DNA, 120 bp, synthetic construct
  source 1..120: mol_type = other DNA
agttacagaattgaaggactgatgccatctattctctcccccaaacgacaaaattcttcttagttcagtagacattcaaacttattctgacgaggtccttcaccaatgcacactgtctcc

SEQ ID NO: 109274 - DNA, 120 bp, synthetic construct
  source 1..120: mol_type = other DNA
aatagtctttccatggaactaagcataacaatttttttttttttttttgagacggagtttcgctcttgtcatccaggctggaatgcagtggaacgtttggctcactgcaacctctgcctc

SEQ ID NO: 109275 - DNA, 120 bp, synthetic construct
  source 1..120: mol_type = other DNA
aagataatggagttaggtcagtgagggatatttcctaaattccccacttcttttcctctagcagttctgggaaacttctcagcagctatcatataaggaaagtatctcgctaggagaagc

SEQ ID NO: 109276 - DNA, 120 bp, synthetic construct
  source 1..120: mol_type = other DNA
ggaaagtgtgtggctcaagtagtgtcactggaaaaggagtgggtggcagagcatgttgtagtgattgtacccttcaaataataacctccatacacaattgagttggtagaatttgttaat

SEQ ID NO: 109277 - DNA, 120 bp, synthetic construct
  source 1..120: mol_type = other DNA
tctaagagcgagttggaatagtctcactgacattccttaggaaaagaattcccaatttatgtattctcaaatatgaattaaaatggtatattcagaaactatacacatctgtaaactaag

SEQ ID NO: 109278 - DNA, 120 bp, synthetic construct
  source 1..120: mol_type = other DNA
tgtgtactgaactttcacactagaaatccgtttaaaaaggagtcattgcagggagtttaaaaaggagtcatccgtttaaaaaggagtcatcagctaccagagcatgccgagtcacggaaa

SEQ ID NO: 109279 - DNA, 120 bp, synthetic construct
  source 1..120: mol_type = other DNA
agtttttttgagaagtcctcaggtaaacaaacctgtttatttacttatttaatttttttgagacagagtctcgctctgttgcccagggtggagtgcagtggctcgatgatctcagctcac

SEQ ID NO: 109280 - DNA, 120 bp, synthetic construct
  source 1..120: mol_type = other DNA
gtaggaaattagtaactacggagctcagagttctgttcacccagaatacagttttcctgtttcaaaaaagaaatgaacgcagttgttctcagaaagggctgatatttggccgggtgcagt

SEQ ID NO: 109281 - DNA, 120 bp, synthetic construct
  source 1..120: mol_type = other DNA
tacttttcacattgctgttagaaaagtgaccatggacatttcccaccataattgccacttaaaatttgtgtattgctccagacatcacaggtctgatatccatgcccagtggcaagcagg

SEQ ID NO: 109282 - DNA, 120 bp, synthetic construct
  source 1..120: mol_type = other DNA
catatttctctctgctttgttttcattgccttgcgtttctggctgtggttgtttttggtcagacggaaggtgcctgatgtccaggaaagataagaaggttctcaagacccagagaggact

SEQ ID NO: 109283 - DNA, 120 bp, synthetic construct
  source 1..120: mol_type = other DNA
ccagtctgacagcaggaaattgacagaaacgaacagccccaagccccagggcacatggaggcactcacctcaggcacgacatttcagcaggagccaaaatcaaaataaataatattttat

SEQ ID NO: 109284 - DNA, 120 bp, synthetic construct
  source 1..120: mol_type = other DNA
gggggaaaggaagtcaaagaggaattctggggtacagagagacacatgcagtgtcacagagacaagaacaagcatgttgtccatcatagataagttaatgtcaagatgtgtgggtacaaa

SEQ ID NO: 109285 - DNA, 120 bp, synthetic construct
  source 1..120: mol_type = other DNA
tcttgaagaagatgcatacaaaattgtaaacacagaagtactagtaccccatccagggcccccatgaagagcatagcagatccttccctggtcttgaacagttctttttgttatgtgact

SEQ ID NO: 109286 - DNA, 120 bp, synthetic construct
  source 1..120: mol_type = other DNA
ttgtatttttttaagtagagacggggttttgccatgttggccgcctgcctcagactcccaaagtgttgggattacaaggatgagccaccgtgcccagccattacaattcattttttatgt

SEQ ID NO: 109287 - DNA, 120 bp, synthetic construct
  source 1..120: mol_type = other DNA
ctagggcaggtctatggagattcacacacttgaacttggtcgtctgaattgccaaggaggtgggaagatttcttctttaaaaaacaaaacaaaacaaaacaaaagcagccctgtgtgcaa

SEQ ID NO: 109288 - DNA, 120 bp, synthetic construct
  source 1..120: mol_type = other DNA
tgagctgagatagcaccattgcactccagcctgggggacagagcaagactctgtccaaaaaaaaaaaaaaaagaaactgtttcttggactgttcttggactggcctttgcagtggcagtg

SEQ ID NO: 109289 - DNA, 120 bp, synthetic construct
  source 1..120: mol_type = other DNA
tgagaggtacaggcaagcagtcacggtggaggctttgggacaaggctgtggccttcaggacagtgaacaggagggaggggtaaggttgctaagtgactggtcaagctgatcatcaccagt

SEQ ID NO: 109290 - DNA, 120 bp, synthetic construct
  source 1..120: mol_type = other DNA
gaggtggttgacaagacctgtcctacaaagatgtcacagaggaaaactcagccacaacaacagttacaattctcatcacaagaccttatgtgtgaatcaggttttgacacacaccaagtg

SEQ ID NO: 109291 - DNA, 120 bp, synthetic construct
  source 1..120: mol_type = other DNA
tcaggaacatttagaaataaatcaaaagttagatctttacaaagattcaaagcaaagcaactcagtaggagcaagggacctgcatagaacccgaggtcctacctgcgtctttggccacct

SEQ ID NO: 109292 - DNA, 120 bp, synthetic construct
  source 1..120: mol_type = other DNA
tgtcccagtgcaaggccacattgcttagggtacatgtgaatctccctcccacctttaaaaaaatcagttttacaattatcttatgcatagcacaaagagattgatggatgctgccatctg

SEQ ID NO: 109293 - DNA, 120 bp, synthetic construct
  source 1..120: mol_type = other DNA
ttgcagctttttgtaaacttgctttgcaatttctctttctttctttcttttttttttttttttttgatggaatctcactctgtcgcccaggctggagtgcagtggcacaatctcggctca

SEQ ID NO: 109294 - DNA, 120 bp, synthetic construct; identical to SEQ ID NO: 17852
  source 1..120: mol_type = other DNA

SEQ ID NO: 109295 - DNA, 120 bp, synthetic construct; identical to SEQ ID NO: 17853
  source 1..120: mol_type = other DNA

SEQ ID NO: 109296 - DNA, 120 bp, synthetic construct
  source 1..120: mol_type = other DNA
tttgggaacatgagggatgtgtaagtgtggggagttggctcccttccctaccccaaagtagctctctctttgggctgccattgcctgaaattccagcattaaagaaaactaccttcctca

SEQ ID NO: 109297 - DNA, 120 bp, synthetic construct
  source 1..120: mol_type = other DNA
acttctcattgccgtttattctgtttctctttgacaatttcacaccacttacgcagtcaaaaccttaattactcaagcagtctcccagggatgcctaaggcctgactgattccagaagaa

SEQ ID NO: 109298 - DNA, 120 bp, synthetic construct
  source 1..120: mol_type = other DNA
tgaatttaaaaataccaagttggggaatgctaacctgcagcctgagtttttagcctaaagggtggatcagctgtgattttccctaattttccctgctgtaaaatgctctgaacccagaaa

SEQ ID NO: 109299 - DNA, 120 bp, synthetic construct
  source 1..120: mol_type = other DNA
tattaatgtcatgctgtggatctaatccagcttaaattctgcccagactggtaattaagatttaggacttaacgctgatgcccttctctgacctcacacaggtccaaaggatcagaagca

SEQ ID NO: 109300 - DNA, 120 bp, synthetic construct
  source 1..120: mol_type = other DNA
gaagactgaaaagacataatctgtcttctggcctctcaagaggacctacagcccatcccaggtcacagcccacccgggtcacagcccaccccaggtcacagcccacccgggtcacagccc

SEQ ID NO: 109301 - DNA, 120 bp, synthetic construct
  source 1..120: mol_type = other DNA
catcaaatgacaatcaagtaatttcaaaaggaaacaataaaaccaacacaaatagacagcaaatcaccaaggtttgcacaggctggactggagagcaaagcactcgcttccctttgagcc

SEQ ID NO: 109302 - DNA, 120 bp, synthetic construct
  source 1..120: mol_type = other DNA
ggctaggaactggctaatagaaatggcgcatggatgtctcctacctatttggggtttttggtgactgcaacttagctacctacacatgtgaagacaaaaacatagtaagtgaaaaatcag

SEQ ID NO: 109303 - DNA, 120 bp, synthetic construct
  source 1..120: mol_type = other DNA
cctcacatgatccacccgccttggcctcccaaagagctgagatcacaggtgtgagacaccatgcctggcctggccccacaattttctgcaagaacctcttctattttctgtactgccact

SEQ ID NO: 109304 - DNA, 120 bp, synthetic construct
  source 1..120: mol_type = other DNA
gctggctttttctatcaagacttgcacataacaatggctgaaaacaagctggcccaggaatagagaagtgtgagttgttaagaaggttggtttctgagaatgccctcttctaagctttct

SEQ ID NO: 109305 - DNA, 120 bp, synthetic construct
  source 1..120: mol_type = other DNA
agttcgtatcctctattcagagggaggctgaagttcccagggcatctcccaagagtgatgggaattatggaacgctggtgccgcccgaagcagtaaacatggaatctggccttcttcatg

SEQ ID NO: 109306 - DNA, 120 bp, synthetic construct
  source 1..120: mol_type = other DNA
ctgtgttcccgaagtgtgcagggtcatgggggcacaggtcggaagccatagggactcctgccttgcctttccaatgaattgaagagatttcatgatagaaatgaagagaatagagaaaat

SEQ ID NO: 109307 - DNA, 120 bp, synthetic construct
  source 1..120: mol_type = other DNA
gactttgagtaggtcacttaacctctcttagcttccatttcctcctgtgtaaaagcagactgttaaaaccgctacttcctaaaggctgtcgtgggaattaaagtatgacacatgcttatc

SEQ ID NO: 109308 - DNA, 120 bp, synthetic construct
  source 1..120: mol_type = other DNA
atcttgtgggcagaggaggagggctgccttaacagtcattttcatggactatggacaggaagagactgacatgcccaggattaaagagcccgggatgggctttcagactttgaaacaagt

SEQ ID NO: 109309 - DNA, 120 bp, synthetic construct
  source 1..120: mol_type = other DNA
gagatcgggccattgcactccagcctggacaacaggagcgaaactccatctcaaaaaagaagaagaagaaaaagaagaaagaagaagaagaagaagaagaagaagaagaagaagaagaag

SEQ ID NO: 109310 - DNA, 120 bp, synthetic construct
  source 1..120: mol_type = other DNA
gagagcaagaaaaactttctgacccctagtttacagtctcacagagtaacactgtatgctaaaaaggacatcattgagacagcgggggaaatgggaatatgagctgtatgtgcgataata

SEQ ID NO: 109311 - DNA, 120 bp, synthetic construct
  source 1..120: mol_type = other DNA
cctggtccttccaggtctcccactcactaattcttggccccttagaggaaaaagttcccttagagaagacaaatcagcttattttattcaacagttcagtaacaaaggaaatgaaatgct

SEQ ID NO: 109312 - DNA, 120 bp, synthetic construct
  source 1..120: mol_type = other DNA
ttctgtgaaaggctagtttcatctgttttcccctgggtccctcctagaaagatgggagttttcttcccttggaatgtcattttgcctggttaagcccagaaacagattccctgtaagagc

SEQ ID NO: 109313 - DNA, 120 bp, synthetic construct
  source 1..120: mol_type = other DNA
ctcacctatttgcgaaactcttcaacatgcctctccaagtttcatcaaaatgctcagacgactctaaacatcccccgagaggaatttctgaggtctttcagattccattaaaacatcaac

SEQ ID NO: 109314 - DNA, 120 bp, synthetic construct
  source 1..120: mol_type = other DNA
aacaagtttgaatgtacacaattttcaagcaaatgatggttatatccttcaaccacgtagcacagtcgttggagttggagtttcacatacattctgaatggcctgtgaggtgtctgagag

SEQ ID NO: 109315 - DNA, 120 bp, synthetic construct; identical to SEQ ID NO: 11751
  source 1..120: mol_type = other DNA

SEQ ID NO: 109316 - DNA, 120 bp, synthetic construct; identical to SEQ ID NO: 11752
  source 1..120: mol_type = other DNA

SEQ ID NO: 109317 - DNA, 120 bp, synthetic construct
  source 1..120: mol_type = other DNA
gcggagtgtgacgaggagggcgggagggagggatgcgggagggggagggggaggggggccggccggccgtgggggtggggcgatagtgacatcaccccggagtcggtttttaagcggcgg

SEQ ID NO: 109318 - DNA, 120 bp, synthetic construct
  source 1..120: mol_type = other DNA
gagacctggacgcgccagatggacttcatcatgtcgtgcgtgggcttcgccgtgggcttgggcaacgtgtggcgcttcccctacctgtgctacaagaacggcggaggtgagttcccccgc

SEQ ID NO: 109319 - DNA, 120 bp, synthetic construct; identical to SEQ ID NO: 2786
  source 1..120: mol_type = other DNA

SEQ ID NO: 109320 - DNA, 120 bp, synthetic construct
  source 1..120: mol_type = other DNA
gggcttccaggggtacgtggggactataaaagtgtgattgtgacaccatgtggctatattataatacagtcatgtgtcatgacttaatgatagggatgtgttctgagaaatgcaccttta

SEQ ID NO: 109321 - DNA, 120 bp, synthetic construct
  source 1..120: mol_type = other DNA
aatgtgagtgagggggagagaatgtgagtgagggggagtgaatgtgagtgagggggagtgaatgtgagtgagggggagtgaatgtgagtgaggggggagtgaatgtgagtgagggggagt

SEQ ID NO: 109322 - DNA, 120 bp, synthetic construct
  source 1..120: mol_type = other DNA
aatgtgagtgaggggggagtgaatgtgagtgagggggagtgaatgtgagtgacggggagtgaatgtgagtgagggggagtgaatgtgagtgacggggagtgaatgtgaaggcctaggaca

SEQ ID NO: 109323 - DNA, 120 bp, synthetic construct
  source 1..120: mol_type = other DNA
tcctgaccttgtgatccgcccgcctcggcctcccaaagtgctgggattacaggcgtgagccattgcacccggaccttttttttaaaactcttactttttcataataacacagcttaaaac

SEQ ID NO: 109324 - DNA, 120 bp, synthetic construct
  source 1..120: mol_type = other DNA
gctctaatgattataggaggggtatgggagggaccggtggatttctttctttctttctttcttttttttttttttttagtagagatggggtttcaccatgttggccaggctggtctcgaa

SEQ ID NO: 109325 - DNA, 120 bp, synthetic construct; identical to SEQ ID NO: 19683
  source 1..120: mol_type = other DNA

SEQ ID NO: 109326 - DNA, 120 bp, synthetic construct; identical to SEQ ID NO: 24870
  source 1..120: mol_type = other DNA

SEQ ID NO: 109327 - DNA, 120 bp, synthetic construct
  source 1..120: mol_type = other DNA
atttgcatttctctgatagccagtgatggtgagcgttttttcatgtgttttttggctgcataaatgtcttcttttgagaagtgtctgttcatgtcctttgcccactttttgatggggttg

SEQ ID NO: 109328 - DNA, 120 bp, synthetic construct
  source 1..120: mol_type = other DNA
ttgtagttctccttgaagagttccttcacgtcccttgtaagttggattcctaggtattttgttctctttgaaacaattgtgaatgggagttcactcatgatttggctctctgtttgtctg

SEQ ID NO: 109329 - DNA, 120 bp, synthetic construct
  source 1..120: mol_type = other DNA
tccttgtacctctgtagaattcggctgtgaatccatctggtcctggtctctttttggttggtaagctattgattattgccacaatttcagctcctgttattggtctattcagagattcaa

SEQ ID NO: 109330 - DNA, 120 bp, synthetic construct
  source 1..120: mol_type = other DNA
gcctgctttggcctcccaaagtgctgggattacaggcatgagccaccatgcccagccataaataccttttgaggtcatcttttcttgtaggttgtatactgctttataattttttttttt

SEQ ID NO: 109331 - DNA, 120 bp, synthetic construct
  source 1..120: mol_type = other DNA
catggtagctcatggcttttgtaattccagcactttgggaggctgaggagggaggatcacttgagcacaggagtttgagaccagcctgggcaacaaagcaagaccccacctctaaaaaaa

SEQ ID NO: 109332 - DNA, 120 bp, synthetic construct; identical to SEQ ID NO: 14222
  source 1..120: mol_type = other DNA

SEQ ID NO: 109333 - DNA, 120 bp, synthetic construct; identical to SEQ ID NO: 14223
  source 1..120: mol_type = other DNA

SEQ ID NO: 109334 - DNA, 120 bp, synthetic construct
  source 1..120: mol_type = other DNA
agcggatctcttggcagaaactctacaagccagaagagagtgggggccaacattcagcattcttaaagaaaagaattttcaacccagaatttcgtacccacccaagctaagcttcataag

SEQ ID NO: 109335 - DNA, 120 bp, synthetic construct
  source 1..120: mol_type = other DNA
actgaacaacctgctcctgaatgactactgggtacataactaaatgaaggcagaaataaagatgttctttgaaaccaacgagaacaaagacacaacataccagaatctctgggacacatt

SEQ ID NO: 109336 - DNA, 120 bp, synthetic construct
  source 1..120: mol_type = other DNA
ctcaataaaatactggcaaaccgaatccagcagcacatcaaaaagcttatccaccatgatcaagtgggcttcatccctgggatgcaaggctggttcaacattcgcaaatcaataaatgta

SEQ ID NO: 109337 - DNA, 120 bp, synthetic construct
  source 1..120: mol_type = other DNA
acaaggctacagtaaccaaaacagcatggtactggtaccaaaacagagagatacatcaatggaacagaacagagccctcagaaataatgctgcatatctacaaccatctgatctttgaca

SEQ ID NO: 109338 - DNA, 120 bp, synthetic construct
  source 1..120: mol_type = other DNA
tcaaccattgtggaagtcagtgtggcgattccttaggaatctagaactagaaataccatttgacccagccatcgcattactgggtatatacccaaaggattataaatcatgctgctataa

SEQ ID NO: 109339 - DNA, 120 bp, synthetic construct; identical to SEQ ID NO: 20484
  source 1..120: mol_type = other DNA

SEQ ID NO: 109340 - DNA, 120 bp, synthetic construct
  source 1..120: mol_type = other DNA
ggtcaaatggtgtttccagttctagatccctgaggaatggccacactgacttccacaatggttgaactagtttacagtcccaccaacagtgtaaaagtgttcctatttctccacatcctc

SEQ ID NO: 109341 - DNA, 120 bp, synthetic construct
  source 1..120: mol_type = other DNA
ttggtgatgcaggctcttttttggttccatatgaactttaaagtacttttttccaattctgtgaagagaggcattggtggcttgatggggatggcattgaatctgtaaattaccttgggc

SEQ ID NO: 109342 - DNA, 120 bp, synthetic construct
  source 1..120: mol_type = other DNA
tattgaggatttttcatcaatgttcatcaaggatattggtctaaaattctcttttttggttgtgtctctgcttggctttggtatcagaatgatgctggcttcataaaatgagttagggag

SEQ ID NO: 109343 - DNA, 120 bp, synthetic construct
  source 1..120: mol_type = other DNA
ttccatgtagttgaggggttttgagtgagattcttaatcctgagttctagtttgattgcactgtggtctgagagatagtttgttataatttctgttcttttacatttgctgaggagagct

SEQ ID NO: 109344 - DNA, 120 bp, synthetic construct
  source 1..120: mol_type = other DNA
gaaattctgggttgaaaattcttttctttaagaatgttgaacattggcccccactctcttctggcttgtagggtttctgccgagagatccgctgttagtctgatgggcttccctttgagg

SEQ ID NO: 109345 - DNA, 120 bp, synthetic construct
  source 1..120: mol_type = other DNA
ggtcaggggtcagggacccacttggggaggcagtctgcccgttctcagatctccagctgcgtgctgggagaaccactgctctcttcaaagctgtcagacagggacatttaagtctgcaaa

SEQ ID NO: 109346 - DNA, 120 bp, synthetic construct; identical to SEQ ID NO: 20485
  source 1..120: mol_type = other DNA

SEQ ID NO: 109347 - DNA, 120 bp, synthetic construct
  source 1..120: mol_type = other DNA
ccaacccccaaccccgccccgtcgtctctccctatccctttctgtttcttttctttctttctttctttcctttctttctttttcttttcttttcttttctcttccttcctttcttccttc

SEQ ID NO: 109348 - DNA, 120 bp, synthetic construct; identical to SEQ ID NO: 19847
  source 1..120: mol_type = other DNA

SEQ ID NO: 109349 - DNA, 120 bp, synthetic construct; identical to SEQ ID NO: 7404
  source 1..120: mol_type = other DNA

SEQ ID NO: 109350 - DNA, 120 bp, synthetic construct; identical to SEQ ID NO: 21032
  source 1..120: mol_type = other DNA

SEQ ID NO: 109351 - DNA, 120 bp, synthetic construct; identical to SEQ ID NO: 21033
  source 1..120: mol_type = other DNA

SEQ ID NO: 109352 - DNA, 120 bp, synthetic construct; identical to SEQ ID NO: 26106
  source 1..120: mol_type = other DNA

SEQ ID NO: 109353 - DNA, 120 bp, synthetic construct; identical to SEQ ID NO: 26107
  source 1..120: mol_type = other DNA

SEQ ID NO: 109354 - DNA, 120 bp, synthetic construct
  source 1..120: mol_type = other DNA
atttggactcgcggactagctttcggagccacctaaaggaaatctcaggcggccctagtgccctcagctccgtgggagcagcagagacgccagagtatctctgtccgggctcctgaggga

SEQ ID NO: 109355 - DNA, 120 bp, synthetic construct
  source 1..120: mol_type = other DNA
gagtccacggacttgctgctgaggcggaagggcatcaggcggcagaaggtgccgggagagtagggaatctgcgtgcgggccctctgcgaggggaccaccgtctccccgggagacagccag

SEQ ID NO: 109356 - DNA, 120 bp, synthetic construct; identical to SEQ ID NO: 26101
  source 1..120: mol_type = other DNA

SEQ ID NO: 109357 - DNA, 120 bp, synthetic construct; identical to SEQ ID NO: 26102
  source 1..120: mol_type = other DNA

SEQ ID NO: 109358 - DNA, 120 bp, synthetic construct; identical to SEQ ID NO: 26103
  source 1..120: mol_type = other DNA

SEQ ID NO: 109359 - DNA, 120 bp, synthetic construct; identical to SEQ ID NO: 26104
  source 1..120: mol_type = other DNA

SEQ ID NO: 109360 - DNA, 120 bp, synthetic construct; identical to SEQ ID NO: 26105
  source 1..120: mol_type = other DNA

SEQ ID NO: 109361 - DNA, 120 bp, synthetic construct; identical to SEQ ID NO: 26108
  source 1..120: mol_type = other DNA

SEQ ID NO: 109362 - DNA, 120 bp, synthetic construct; identical to SEQ ID NO: 26109
  source 1..120: mol_type = other DNA

SEQ ID NO: 109363 - DNA, 120 bp, synthetic construct; identical to SEQ ID NO: 26110
  source 1..120: mol_type = other DNA

SEQ ID NO: 109364 - DNA, 120 bp, synthetic construct; identical to SEQ ID NO: 26111
  source 1..120: mol_type = other DNA

SEQ ID NO: 109365 - DNA, 120 bp, synthetic construct; identical to SEQ ID NO: 26112
  source 1..120: mol_type = other DNA

SEQ ID NO: 109366 - DNA, 120 bp, synthetic construct; identical to SEQ ID NO: 26113
  source 1..120: mol_type = other DNA

SEQ ID NO: 109367 - DNA, 120 bp, synthetic construct; identical to SEQ ID NO: 26114
  source 1..120: mol_type = other DNA

SEQ ID NO: 109368 - DNA, 120 bp, synthetic construct; identical to SEQ ID NO: 3972
  source 1..120: mol_type = other DNA

SEQ ID NO: 109369 - DNA, 120 bp, synthetic construct; identical to SEQ ID NO: 15823
  source 1..120: mol_type = other DNA

SEQ ID NO: 109370 - DNA, 120 bp, synthetic construct; identical to SEQ ID NO: 15824
  source 1..120: mol_type = other DNA

SEQ ID NO: 109371 - DNA, 120 bp, synthetic construct; identical to SEQ ID NO: 21031
  source 1..120: mol_type = other DNA

SEQ ID NO: 109372 - DNA, 120 bp, synthetic construct
  source 1..120: mol_type = other DNA
cctagtaatgggatggctgggtcaaatggtatttctagttctagatccctgaggaaccgccacactgacttccacaatggttgaactagtttacagtcccaccaacagtgtaaaagtgtt

SEQ ID NO: 109373 - DNA, 120 bp, synthetic construct; identical to SEQ ID NO: 35368
  source 1..120: mol_type = other DNA

SEQ ID NO: 109374 - DNA, 120 bp, synthetic construct
  source 1..120: mol_type = other DNA
aattcaagaccagcctgggcaacatggtgaaacctcatctcttaaaaaaaaaaaaaaaagcaaaaattagcagggtgtggtgacacatgctagctacttgggaggctaaggtgggaggat

SEQ ID NO: 109375 - DNA, 120 bp, synthetic construct
  source 1..120: mol_type = other DNA
ctcactagggagtgccagacattgggtgcaggtcagtgggtgcgcgcaccatgtgcgagccgaagcagggcgaggcactgcctcacttgggaagcgcaaggggtcagggagttccctttc

SEQ ID NO: 109376 - DNA, 120 bp, synthetic construct
  source 1..120: mol_type = other DNA
aggaacgcagctcctcaccagcaatggaacaaagctggacagagaatgactttgatgagctgagagaagaaggcttcagacgatcaaattactctgagctacgggaggacattcaaacca

SEQ ID NO: 109377 - DNA, 120 bp, synthetic construct
  source 1..120: mol_type = other DNA
atcaggcctgccctaaaagagctcctgaaggaaacactaaacatagaaaggaacaaccggtaccagccactgcaaaatcatgccaaaatgtaaagaccatcgagactaggaagaaactgc

SEQ ID NO: 109378 - DNA, 120 bp, synthetic construct
  source 1..120: mol_type = other DNA
acgcattcaaagcagtgtgtagagggaaatttatagcattaaatgcccacaagagaaagcaggaaagatccaaaattgacaccctaacatcacaattaaaagaactagaaaagcaagagc

SEQ ID NO: 109379 - DNA, 120 bp, synthetic construct
  source 1..120: mol_type = other DNA
tagatgcagaaaaggcctttgacaaaactcaacaaccttcatgctaaaaactctcaataaattaggtattgatgggacgtatctcaaaataataacagctatctatgacaaacccacagg

SEQ ID NO: 109380 - DNA, 120 bp, synthetic construct
  source 1..120: mol_type = other DNA
atctacaactatctgatctttgacaaacctgagaaaaacaagcaatggggaaaggattccctatttaataaatggtgctgggaaaactgcctagccatatgtagaaagctgaaactggat

SEQ ID NO: 109381 - DNA, 120 bp, synthetic construct
  source 1..120: mol_type = other DNA
tactatgcagccataaaaaaatgatgagttcatgtcctttgtagggacatggatgaaactggaaatcatcattctcagtaaactatcgcaagaacaaaaaaccaaacgctgcatattctc

SEQ ID NO: 109382 - DNA, 120 bp, synthetic construct
  source 1..120: mol_type = other DNA
atggaccagaacagaaagtccagaaatatatacaggtagtggatgaaagagaaggcatctcaaatcagtggggtcaatatggacattttagtcactggtgttgggacaatttggtagcca

SEQ ID NO: 109383 - DNA, 120 bp, synthetic construct; identical to SEQ ID NO: 22552
  source 1..120: mol_type = other DNA

SEQ ID NO: 109384 - DNA, 120 bp, synthetic construct; identical to SEQ ID NO: 22553
  source 1..120: mol_type = other DNA

SEQ ID NO: 109385 - DNA, 120 bp, synthetic construct; identical to SEQ ID NO: 22554
  source 1..120: mol_type = other DNA

SEQ ID NO: 109386 - DNA, 120 bp, synthetic construct; identical to SEQ ID NO: 24782
  source 1..120: mol_type = other DNA

SEQ ID NO: 109387 - DNA, 120 bp, synthetic construct; identical to SEQ ID NO: 24783
  source 1..120: mol_type = other DNA

SEQ ID NO: 109388 - DNA, 120 bp, synthetic construct
  source 1..120: mol_type = other DNA
ctgcagacccagaaaaaatgagcttctggaatcaggacaaagttttagaaaattgttaggcatcctcaaaagcatgcaattatcatggagtaataagaaaacaactggaaagccaccaag

SEQ ID NO: 109389 - DNA, 120 bp, synthetic construct
  source 1..120: mol_type = other DNA
cggagaatgactttgacgagttgagagaagaaggcttcagacgatcaaactaccctgagctaaaggagaaagttcgaacccatggcaaaaaagttaaaaaccttgaaaaaaaattagaca

SEQ ID NO: 109390 - DNA, 120 bp, synthetic construct
  source 1..120: mol_type = other DNA
catcaactaacaagcaaaataaccagctaacatcacaatgacaggatcaaattcacacataacaatattaaccttaaatgtaaatgggctaaatgctccaatttaaagacacagactggc

SEQ ID NO: 109391 - DNA, 120 bp, synthetic construct
  source 1..120: mol_type = other DNA
cacaaacaaatggaagaacattccatgctcatgtgtaggaagaatcaatattgtgaaaatggccataatgcccaaggcaatttataaattcaatgccatccccatcaagctaccaatgac

SEQ ID NO: 109392 - DNA, 120 bp, synthetic construct
  source 1..120: mol_type = other DNA
tatacaccagtaacagacagagagccaaagcatgagtgaactcccattcacaactgcttcaaagacaataaaatacctaggaatccaacttacaagggatgtgaaggacctcttcaagga

SEQ ID NO: 109393 - DNA, 120 bp, synthetic construct
  source 1..120: mol_type = other DNA
gattaaggaaatgtggcacatatacaccatggaattctatggagccataaaaaaggatgagttcatgtcctttgtagggacatggatgaagctggaaaccatcattctcagcaaactatc

SEQ ID NO: 109394 - DNA, 120 bp, synthetic construct; identical to SEQ ID NO: 24785
  source 1..120: mol_type = other DNA

SEQ ID NO: 109395 - DNA, 120 bp, synthetic construct; identical to SEQ ID NO: 24786
  source 1..120: mol_type = other DNA

SEQ ID NO: 109396 - DNA, 120 bp, synthetic construct
  source 1..120: mol_type = other DNA
caagtgatatgcccaccttggcctcccaaagtgctgggattataggtgtgagccaccatgcccggccaaagcctcaataatataaagatgtaatctctcccccaaataaattaatcagag

SEQ ID NO: 109397 - DNA, 120 bp, synthetic construct; identical to SEQ ID NO: 25704
  source 1..120: mol_type = other DNA

SEQ ID NO: 109398 - DNA, 120 bp, synthetic construct; identical to SEQ ID NO: 25705
  source 1..120: mol_type = other DNA

SEQ ID NO: 109399 - DNA, 120 bp, synthetic construct
  source 1..120: mol_type = other DNA
tatgtgtatgtatacacacacacacacacacacacacacacacaccatcgacagaatactactcagccataaaaaggaatgaaataatggcattcacagcaacctggaaggagtcggaga

SEQ ID NO: 109400 - DNA, 120 bp, synthetic construct; identical to SEQ ID NO: 25706
  source 1..120: mol_type = other DNA

SEQ ID NO: 109401 - DNA, 120 bp, synthetic construct
  source 1..120: mol_type = other DNA
ggttccaagtctttgctattgtgaatagtgccgcaataaacatacgtgtgcatgtgtctttatagcagcatgatttatactcatttgggtatatacccagtaatgggatggctgggtcaa

SEQ ID NO: 109402 - DNA, 120 bp, synthetic construct
  source 1..120: mol_type = other DNA
ttccattgatctatatctctgttttggtaccagtaccatgctgttttggttactgtagccttgtagtatagtttgaagtcaggtagtgtgatgcctccagctttattcttttggcttagg

SEQ ID NO: 109403 - DNA, 120 bp, synthetic construct
  source 1..120: mol_type = other DNA
tggataagctttttgatgtgctgctggattcggtttgccagtattttattgaggatttttgcatcaatgttcatcaaggatattggtctaaaattctcttttttggttgtgtctcaggca

SEQ ID NO: 109404 - DNA, 120 bp, synthetic construct
  source 1..120: mol_type = other DNA
atccgcccgcctcagcctcccaaagtgctgggattacaggcatgagccaccgtgactggcctaagctttactttctaaaaattatatcaaaattggtatttctctattatgtaatcataa

SEQ ID NO: 109405 - DNA, 120 bp, synthetic construct; identical to SEQ ID NO: 25707
  source 1..120: mol_type = other DNA

SEQ ID NO: 109406 - DNA, 120 bp, synthetic construct; identical to SEQ ID NO: 25708
  source 1..120: mol_type = other DNA

SEQ ID NO: 109407 - DNA, 120 bp, synthetic construct; identical to SEQ ID NO: 25709
  source 1..120: mol_type = other DNA

SEQ ID NO: 109408 - DNA, 120 bp, synthetic construct; identical to SEQ ID NO: 25710
  source 1..120: mol_type = other DNA

SEQ ID NO: 109409 - DNA, 120 bp, synthetic construct; identical to SEQ ID NO: 25711
  source 1..120: mol_type = other DNA

SEQ ID NO: 109410 - DNA, 120 bp, synthetic construct
  source 1..120: mol_type = other DNA
cagttccaatgatgcttctgcatttttgagtatctaaatagcaacatcccactctcagtacaaattttctgtcttagtccgttttgtgttgctataacagaataccggagactgagtaat

SEQ ID NO: 109411 - DNA, 120 bp, synthetic construct; identical to SEQ ID NO: 25691
  source 1..120: mol_type = other DNA

SEQ ID NO: 109412 - DNA, 120 bp, synthetic construct; identical to SEQ ID NO: 25692
  source 1..120: mol_type = other DNA

SEQ ID NO: 109413 - DNA, 120 bp, synthetic construct; identical to SEQ ID NO: 25693
  source 1..120: mol_type = other DNA

SEQ ID NO: 109414 - DNA, 120 bp, synthetic construct
  source 1..120: mol_type = other DNA
taaataattaattttttatgtcttgccagttcctggaaccagcttgatattctttgtgtagaagctagcctgaagccagcagacaggaataggcagaagcagaataatactgcaggactc

SEQ ID NO: 109415 - DNA, 120 bp, synthetic construct
  source 1..120: mol_type = other DNA
aatcaatgtgtctctattttactttactttttttttttttggagacagggtctcattttgtcacccaagctggagtgaagtggtgtgacctcagctcattgcagcctcaacctcctgagt

SEQ ID NO: 109416 - DNA, 120 bp, synthetic construct; identical to SEQ ID NO: 25696
  source 1..120: mol_type = other DNA

SEQ ID NO: 109417 - DNA, 120 bp, synthetic construct; identical to SEQ ID NO: 25697
  source 1..120: mol_type = other DNA

SEQ ID NO: 109418 - DNA, 120 bp, synthetic construct; identical to SEQ ID NO: 25698
  source 1..120: mol_type = other DNA

SEQ ID NO: 109419 - DNA, 120 bp, synthetic construct
  source 1..120: mol_type = other DNA
gtgcatatatctgtatgtacatattcatcacatgcaagtacatatgtgtgtctgaatatatatgtatatttatgtgtgtgtgtatagatatatatatatacatacacacacatcaggcat

SEQ ID NO: 109420 - DNA, 120 bp, synthetic construct
  source 1..120: mol_type = other DNA
ttgtaatcctagcactttgcgatgtcaagttgggaggatcccttcagctcaggattttaagaccagcctgggcaacatagagagactctgtctcaaaaaaaaaaaaagtcatttctagga

SEQ ID NO: 109421 - DNA, 120 bp, synthetic construct; identical to SEQ ID NO: 25699
  source 1..120: mol_type = other DNA

SEQ ID NO: 109422 - DNA, 120 bp, synthetic construct; identical to SEQ ID NO: 25700
  source 1..120: mol_type = other DNA

SEQ ID NO: 109423 - DNA, 120 bp, synthetic construct; identical to SEQ ID NO: 25701
  source 1..120: mol_type = other DNA

SEQ ID NO: 109424 - DNA, 120 bp, synthetic construct; identical to SEQ ID NO: 25702
  source 1..120: mol_type = other DNA

SEQ ID NO: 109425 - DNA, 120 bp, synthetic construct
  source 1..120: mol_type = other DNA
ggaaaaagaagaactcaatccaatgttagcaaaaggaaggaaataataaagtctagagcagaaggccgggtgcaatggctcacgactgtaatcccagcactttgggaggccgaggcaggc

SEQ ID NO: 109426 - DNA, 120 bp, synthetic construct; identical to SEQ ID NO: 25703
  source 1..120: mol_type = other DNA

SEQ ID NO: 109427 - DNA, 120 bp, synthetic construct
  source 1..120: mol_type = other DNA
tgttagaaggaaaactaacaaacagaaaggaatagcatcaacattaaccaaaagatcatctacaccaaaaccccatctgtaggtcaacaatgtcaaagaacaaaggtagataaaaccaaa

SEQ ID NO: 109428 - DNA, 120 bp, synthetic construct
  source 1..120: mol_type = other DNA
atcatcctgataccaaagcctggcagggacacaacaacaacaaaaaagggaattttagaccaatatccctatgaacattgatacaaaaatcctcaataagatactgacaaactgaatcca

SEQ ID NO: 109429 - DNA, 120 bp, synthetic construct
  source 1..120: mol_type = other DNA
tatcaacattgaaaacatcaaaaaaattaaacacttcttcttttgtccaaaaaaaaaaagaaagaaaaaagggaatcctccctaactcattttatgaggccagcatcatcctggtaccaa

SEQ ID NO: 109430 - DNA, 120 bp, synthetic construct
  source 1..120: mol_type = other DNA
aatcaatgtgcaaaaatcacaagcattcctatacaccattaatagacaaacagagagccaaatcatgagtgaactcccattcacaattgctacaaagagaataaaatacctaggaatcca

SEQ ID NO: 109431 - DNA, 120 bp, synthetic construct; identical to SEQ ID NO: 25712
  source 1..120: mol_type = other DNA

SEQ ID NO: 109432 - DNA, 120 bp, synthetic construct; identical to SEQ ID NO: 25713
  source 1..120: mol_type = other DNA

SEQ ID NO: 109433 - DNA, 120 bp, synthetic construct; identical to SEQ ID NO: 24528
  source 1..120: mol_type = other DNA

SEQ ID NO: 109434 - DNA, 120 bp, synthetic construct
  source 1..120: mol_type = other DNA
tctctgatgaccagtgatgatgagcattttttcatgtgttttttggctgcataaatttcttcttttgagaagtgtctgttcatgtccttcacccactttttgatggggttgtttgttttt

SEQ ID NO: 109435 - DNA, 120 bp, synthetic construct
  source 1..120: mol_type = other DNA
ttatttccttgagcagtggtttgtagttctccgtgaagaggtccttcacgtcccttgtaagttggattcctaggtattttattctctttgaagcacttgtgaatggcagttcactcatga

SEQ ID NO: 109436 - DNA, 120 bp, synthetic construct
  source 1..120: mol_type = other DNA
ttcggctgtgaatccatctggtcctggaccctttttggttggtaagctattgattattgccacaatttcagctcctgttattggtctattcagagattcaacttcttcctggtttagtct

SEQ ID NO: 109437 - DNA, 120 bp, synthetic construct
  source 1..120: mol_type = other DNA
gtgggagtctaagtctctttgtaggtcactcaggacttgctttatgaatctgggtgcacttgtgttgggtgcatatatatttaggatagttagctcttcttgttgaatttatccctttac

SEQ ID NO: 109438 - DNA, 120 bp, synthetic construct
  source 1..120: mol_type = other DNA
tttccagcttggttccattctccccatcactttcaggtacaccaatcagacgtagatttggtcttttcacatagtcccatatttcttggaggctttattcatttctttttattctttttt

SEQ ID NO: 109439 - DNA, 120 bp, synthetic construct; identical to SEQ ID NO: 24529
  source 1..120: mol_type = other DNA

SEQ ID NO: 109440 - DNA, 120 bp, synthetic construct
  source 1..120: mol_type = other DNA
tgccacaaaagtggtgcctttccaaaaccacttgtaaagtattggtttttgggactatgatgaaaaaacgttagaagggccaggtgcggtggctcatgcctgtaatcccagcactttgaa

SEQ ID NO: 109441 - DNA, 120 bp, synthetic construct; identical to SEQ ID NO: 24530
  source 1..120: mol_type = other DNA

SEQ ID NO: 109442 - DNA, 120 bp, synthetic construct; identical to SEQ ID NO: 24531
  source 1..120: mol_type = other DNA

SEQ ID NO: 109443 - DNA, 120 bp, synthetic construct
  source 1..120: mol_type = other DNA
taaattcacttgtgtaatttcattctgggataacgcagaataagttatttttaatttctcaaaaaaattcgatgccctctctcaccattcctattcaacatagtgttggaagttctggcc

SEQ ID NO: 109444 - DNA, 120 bp, synthetic construct
  source 1..120: mol_type = other DNA
acaaaaatcaattcaagatggattaaagacttaaacattagacctaaaaccataaaaccctagaagaaaacctaggcattaccattcaggacataggcatgggcaaggacttcatgtcta

SEQ ID NO: 109445 - DNA, 120 bp, synthetic construct
  source 1..120: mol_type = other DNA
ctggttcaacatacacaaatcaataaatgtaatccagcatataaaacgaaccaaaggcaaaaatcacatgattatctcaatagatgcagaaaaggccttcaacaaaattcaaagcccttc

SEQ ID NO: 109446 - DNA, 120 bp, synthetic construct
  source 1..120: mol_type = other DNA
tatgtagaaagctgaaatgggatcccttccttacaccttatacaaaaatcaattcaagatggattaaagacttaaatgttagacctaaaaccataaaaaccctagaagaaaacctaggca

SEQ ID NO: 109447 - DNA, 120 bp, synthetic construct
  source 1..120: mol_type = other DNA
attaggaaaagaggaagtcaaattgtccctgtttgcagatgacatgattgtatatttagaaaaccccatcgtctcagcccaaaatctccttaagctcataagcaacttcagcaaagtccc

SEQ ID NO: 109448 - DNA, 120 bp, synthetic construct
  source 1..120: mol_type = other DNA
tgatcttttcaaaaaaccagctcctggattcattgattttttgaagggattttatgtctctatttccttcagttctgctctgatcttagttatttcttgccttctgctagcttttgaatg

SEQ ID NO: 109449 - DNA, 120 bp, synthetic construct
  source 1..120: mol_type = other DNA
atagatgaatggataaagaaaatgtggtacatatacaggatggagtaatattcagccataaaaaaaagaatgagggggaggagccaagatggccaaataggaacagctccggtccacagc

SEQ ID NO: 109450 - DNA, 120 bp, synthetic construct
  source 1..120: mol_type = other DNA
tagcagaaggcaagaaataactaaaatcagagcagaactgaaggaaatagagacataaaaaacccttcaaaaaattaatgaatccaggagctggttttttgaaaggatcaacaaaattga

SEQ ID NO: 109451 - DNA, 120 bp, synthetic construct
  source 1..120: mol_type = other DNA
gtgtcggaagttctggccagggcaatcaggcaggagaaggaaataaaaggtattcaattaggaaaagaggaagtcaaattgtccctgtttgcagatgacatgattgtttatctagaaaac

SEQ ID NO: 109452 - DNA, 120 bp, synthetic construct
  source 1..120: mol_type = other DNA
acaacctactcatctgacaaagggctaatatccagaatctacaatgaactcaaacaaatttacaagaaaaaaacaaacaaccccatcaaaaagtgggcaaaggacatgaacagacacttc

SEQ ID NO: 109453 - DNA, 120 bp, synthetic construct; identical to SEQ ID NO: 12744
  source 1..120: mol_type = other DNA

SEQ ID NO: 109454 - DNA, 120 bp, synthetic construct
  source 1..120: mol_type = other DNA
tagactccttatttctttgatgtcttcttaactggatgaaggcagccaagggtgggagtagagggaagagttaattggcaaacataaaaaacaggtgtctcaaagtcacataaccacctc

SEQ ID NO: 109455 - DNA, 120 bp, synthetic construct
  source 1..120: mol_type = other DNA
catgtccttcacccacttcttgatggggtcgtttgtcttttgtaaatttgtttgagttcattgtagattttgggtattagccttttgtcagatgagtaggttgcaaaaattttctcccat

SEQ ID NO: 109456 - DNA, 120 bp, synthetic construct
  source 1..120: mol_type = other DNA
cattgattttgtattctgagactttgctgaagttgcttatcaacttgaggaaattttgggctgagatgatggggttttctagatatacaatcatgtgatctgcaaacagggacaatttga

SEQ ID NO: 109457 - DNA, 120 bp, synthetic construct
  source 1..120: mol_type = other DNA
aggtgtttatagtattctctgatggtagtttgtatttctgtgggatcggtggttatatcctctttatcattttttattgcatctatttgattcttctctgttttcttctttattagtctt

SEQ ID NO: 109458 - DNA, 120 bp, synthetic construct
  source 1..120: mol_type = other DNA
aggtaatggccttctttgtctcttttgatctttgttggtataaagtctgttttatcagagactaggattgcaacccctgcctttttttgttttccatttgcttggtagatcttcctccat

SEQ ID NO: 109459 - DNA, 120 bp, synthetic construct
  source 1..120: mol_type = other DNA
actgataacctttcttccagttgatcctatcagctactgaggcttctgcatttgtcatgtggctctcttgccttggttttcagctccatcaagtcctttaagaacttctctgcattggtt

SEQ ID NO: 109460 - DNA, 120 bp, synthetic construct
  source 1..120: mol_type = other DNA
aatggtggccgcccctcccccagcctcgctgccaccttgcagtttgatcttggatggctgtgcttgcaatgagcgagactctgtgggcataggaccctccaagccaggtgcaggatataa

SEQ ID NO: 109461 - DNA, 120 bp, synthetic construct
  source 1..120: mol_type = other DNA
tgaggaacaaagtgtccacctttttttcctgaatattttatctgaagatctaggagagagatgtgaaatagtatttttctggggaagtaggggaaatacaaagaaaagtaatgacttcag

SEQ ID NO: 109462 - DNA, 120 bp, synthetic construct
  source 1..120: mol_type = other DNA
ggagttcacttagaggtacacatgtatgggtttctgtattcaaccatatgttgatatatactcacatatatgtaagtgataatatcctgtttgttacttccacatttatgcactatccct

SEQ ID NO: 109463 - DNA, 120 bp, synthetic construct
  source 1..120: mol_type = other DNA
ctagtctttaaagtaggactttaatgactctcaaaataacaatttctctcatacattgactccaaaactttagttgttgaatttattctgcagatatggccacataaaaccaaaatggca

SEQ ID NO: 109464 - DNA, 120 bp, synthetic construct
  source 1..120: mol_type = other DNA
gtaatctccttaggctagaatttgtgtctgtctttcctacttttgtttccagcattgacctagcagagtggtaacgacatagtagaccctgagtgaatgttagtgaatggttgattgatt

SEQ ID NO: 109465 - DNA, 120 bp, synthetic construct
  source 1..120: mol_type = other DNA
gctaaatgagaagccaagactcagaaaagttaagaaattttcctgaagtcatctacattgtgaattgaaaaccctggaacccaagacaaagcctttaaatccccatatggaagtcttgag

SEQ ID NO: 109466 - DNA, 120 bp, synthetic construct
  source 1..120: mol_type = other DNA
acaaatgtaattcaggagcataaaaaaagatgagagaaaccttaataatagtagctaacatttatcaagcatttactatatgccagacattgatttagtgttttacttttgctaacagat

SEQ ID NO: 109467 - DNA, 120 bp, synthetic construct
  source 1..120: mol_type = other DNA
gaccaagcctgtgactcattggcattcctgaaagaggagaaagagtaagcaacttggaaaatgtctttgaggataaagtccatgaaaaatttcccagtcttgctagagaggtggatatgc

SEQ ID NO: 109468 - DNA, 120 bp, synthetic construct
  source 1..120: mol_type = other DNA
tacatagaaactcaataaattggaaagttccaacatagtagcattatagttgctgcactttttttgagacagggcctctgtcacccaggctggagtgcagtggcataatcttggctcact

SEQ ID NO: 109469 - DNA, 120 bp, synthetic construct
  source 1..120: mol_type = other DNA
ctgtagttatgtccccgcctttatttctgttattagtaatttgtgccttccctcatcttcttaggtaacctggctgggtcaattttattaatctttctaaagaattaacttgtggttttg

SEQ ID NO: 109470 - DNA, 120 bp, synthetic construct
  source 1..120: mol_type = other DNA
tggaatgtttttctccacttctttacttttttaaaaaattacactttaagttctgggatacatgtgcagaatgtgcacatttgttacataggtaaacacatgccatggtggtttgctgca

SEQ ID NO: 109471 - DNA, 120 bp, synthetic construct
  source 1..120: mol_type = other DNA
gcaggagctttttagtttaattagatcccatttgtcaatctgggtttttgttgccattgctttttgtgttttagtcatgaagtatttgtccatgcctatgtcctgaatggtattgcctag

SEQ ID NO: 109472 - DNA, 120 bp, synthetic construct
  source 1..120: mol_type = other DNA
gctgagacaatggggttttctaaatatacaatcatatcatctgcaaacaaagacaatttgacttcctctcttcttatttgagtatcttttatttatttctcttgcctgattgccctggcc

SEQ ID NO: 109473 - DNA, 120 bp, synthetic construct
  source 1..120: mol_type = other DNA
ggcatctcttaaagaaaggcagcagccccagtcacgggcttatatataaaattccctctatctgggacagagcacctgggagaaggggcagctgtgggcgcagcttcagcagacttaaac

SEQ ID NO: 109474 - DNA, 120 bp, synthetic construct
  source 1..120: mol_type = other DNA
ttgtcattgtgcaaacatcttagcgtgtacatacataaacctagatattatagcctactacacacctaagcttatggtataggctattactttgatgctaccaaaacctgtacattattg

SEQ ID NO: 109475 - DNA, 120 bp, synthetic construct
  source 1..120: mol_type = other DNA
tgctttttagttttgcagattttaattcatatatcctgaatctcagatatcctgttttcagtcttgtgcagtatactgatgtgtttaccaaaggcattcttcatttctgctacgatgttg

SEQ ID NO: 109476 - DNA, 120 bp, synthetic construct
  source 1..120: mol_type = other DNA
ttctgttcatgagtctctactgctataagctgtgacactttgtaatcacctatttgtctctccaatcttgaaggcagtcgattgccattggtcctcacctcttttacagatccagaaaga

SEQ ID NO: 109477 - DNA, 120 bp, synthetic construct
  source 1..120: mol_type = other DNA
tatagttagacttgcttttactatcttacattattatggtgattttccccttttttaatgctcccttaaaattctttcttatactttttgaatgtatatgcctatctctctcataacaag

SEQ ID NO: 109478 - DNA, 120 bp, synthetic construct
  source 1..120: mol_type = other DNA
ttcctgaaaggcctcaattttttttcttgtctttgatattcataaattttaatatacttcttccaaatatgtctgtgttcttacttatctcttgtgttgagcattcaatgggcactctca

SEQ ID NO: 109479 - DNA, 120 bp, synthetic construct
  source 1..120: mol_type = other DNA
gtagtattgtgaccgagagacaaaggtaaatttgaagataggtttgtgatttcataatggagacctttgaatgctagaagctaccccctccctttgtaaagaacaacattaggtaaatga

SEQ ID NO: 109480 - DNA, 120 bp, synthetic construct
  source 1..120: mol_type = other DNA
aaaaacttggcccagatctgactttaaagtaccttcacttttattgtatcacatacgatctcagtccacagatgggttcctgatttagccaagaatatagtaaagtgagtgtaaagtaga

SEQ ID NO: 109481 - DNA, 120 bp, synthetic construct
  source 1..120: mol_type = other DNA
gtgtatacccatcctatgttcgttttatccaacttcttatcattcctaagtatattaagtaaagtaatagctattaatatgttgacgtcattagcagaaaaataactttgcaaatgatta

SEQ ID NO: 109482 - DNA, 120 bp, synthetic construct
  source 1..120: mol_type = other DNA
gtccctctgtgatagtaaacacatgcataaattaattctataaagtgttattgcattttctcaaaatacattgaagttctgtagtcaaagtaatcaatagagagccaaaactgtttttga

SEQ ID NO: 109483 - DNA, 120 bp, synthetic construct
  source 1..120: mol_type = other DNA
atcatgccgtctgatttcaaactatactacaggactatagtaaccaaaacagcatggtactagtagaaaaacagacacataaaccaatggaacaaaatagagagcccagaaattaggccg

SEQ ID NO: 109484 - DNA, 120 bp, synthetic construct
  source 1..120: mol_type = other DNA
gatcatgtcttttgtggaaacatggatggagctggaagctatcatctttagcaaactaacacaggaagagaaaaccaaatacttcatgttctcacttataagtgggagctaaatgatgag

SEQ ID NO: 109485 - DNA, 120 bp, synthetic construct
  source 1..120: mol_type = other DNA
atgataatacagatactcttaagaaatgcataaaatatatgaatatacatgtgtacttattgatgtgcatgaagatacactaatatatccaacaagaataagcacatccattattttata

SEQ ID NO: 109486 - DNA, 120 bp, synthetic construct
  source 1..120: mol_type = other DNA
gctttttgtgaataaattaactaggaaaattagaagaatggcaacaatatacatcatagaaaggcatagattacaaagagagtatatacacaatacctgtccagaagatgtggtataagc

SEQ ID NO: 109487 - DNA, 120 bp, synthetic construct
  source 1..120: mol_type = other DNA
gatacttgggaggaattatgcaaaaaataggatttgagtcatgcaggcaaactctttaaatttttactggaaaagacatgagagacagagttatggaaaagaaagcatttggtggaggca

SEQ ID NO: 109488 - DNA, 120 bp, synthetic construct
  source 1..120: mol_type = other DNA
cctctgtacctgcctcaactacatagcttagcagactaactgctatattacagttgctcaatgaatgtttcttgagtaaatcagttgagttccaaagctaatccaagttgtgcgtttgac

SEQ ID NO: 109489 - DNA, 120 bp, synthetic construct
  source 1..120: mol_type = other DNA
cctcaccagaaattgaccatgctggcacccttatctcagacttctcacccttcagaactgtgagaaataaatgtttgttgtttaagccatccgttccatcataatttgtgatagcagtct

SEQ ID NO: 109490 - DNA, 120 bp, synthetic construct
  source 1..120: mol_type = other DNA
aagcatgtctacacaacagcctacaaagaggtgtttatagcagccttattgataattgccataagttagaagcaaccaaggtgtccttcaatatgagaataggtaaagcgaccttggtac

SEQ ID NO: 109491 - DNA, 120 bp, synthetic construct
  source 1..120: mol_type = other DNA
tatttctttcttttttctttcttttcttttttttttttttttaagatggagtctcgcactgtcacccaggttggagtgcagtggtgtgatctcgtctcactgcaaccgccgcctcctggg

SEQ ID NO: 109492 - DNA, 120 bp, synthetic construct
  source 1..120: mol_type = other DNA
tttgtatatcttctttgcagaaatgtctatgtaagtccttgacccatttttaaattgggttgttctttgttgttgtttccttggaaaagtccatatattctagatattaactcctcatca

SEQ ID NO: 109493 - DNA, 120 bp, synthetic construct
  source 1..120: mol_type = other DNA
gcctagccaagttacctgttgagtctttctagtgaatttttcagttcagttactttataattcaactccagaatttctgtttggttcttcatagtttataatctgttaatattgctattt

SEQ ID NO: 109494 - DNA, 120 bp, synthetic construct
  source 1..120: mol_type = other DNA
gaggtacagaaaccttgtaattggttctgaagttctcacagaggcatttagtacatatgttgttaatattgtgtcttgctgttgaggttccagggctgttctgctctcttgctgatgtca

SEQ ID NO: 109495 - DNA, 120 bp, synthetic construct
  source 1..120: mol_type = other DNA
aggggcagcatgatctatttctgatttgtaaaggacttctttagctactttgttgagaagagactgttaggcagatgtgcacagaagtagaaacatggctcaggaggctcttgcaataat

SEQ ID NO: 109496 - DNA, 120 bp, synthetic construct
  source 1..120: mol_type = other DNA
tgagaatgtactgccactcccctcccagttagccaatgctattcatatggaaataaagaatagctcaccatcatggccatctgagaacatgatgtagctttctataaatcagttaatgag

SEQ ID NO: 109497 - DNA, 120 bp, synthetic construct
  source 1..120: mol_type = other DNA
aaatactgaagatattttgttgtcttcattttatgttggatttctccaataacagctcagggaaaacattttctggttcatatttgtgtttttccctattagtaatttttttctagataa

SEQ ID NO: 109498 - DNA, 120 bp, synthetic construct
  source 1..120: mol_type = other DNA
cctctgtccatctatttttatcgttagtatgaaacttcttgaagacagatgccatggtttattctttttcaagtaactttcttatttctggctctgagcttcatgtcaggttcatgttag

SEQ ID NO: 109499 - DNA, 120 bp, synthetic construct
  source 1..120: mol_type = other DNA
cacattacagttaatgtagccagttcaaggatgatatgattctacctctttccatcatagtgctatgccttgcatggtcttggcttcatgatccaaattgtggcaacgtatttccaggca

SEQ ID NO: 109500 - DNA, 120 bp, synthetic construct
  source 1..120: mol_type = other DNA
ctattcatcttccagattcgttttacctgtcattctcatgttgatgtcttctctgatctattcccgcaacctccaagcaaagttgatcatatcctttgtctttgtgacaactcaggacct

SEQ ID NO: 109501 - DNA, 120 bp, synthetic construct
  source 1..120: mol_type = other DNA
ccatctgaactggatgataaacctgccggtaagaatatctgacattttctatatttggattgaacagggccaactgcagaacttaagtgtgcatgaatttgagaacacacaggcagccct

SEQ ID NO: 109502 - DNA, 120 bp, synthetic construct
  source 1..120: mol_type = other DNA
aataatctccacatgccaagagtggggccaggtagagataattgaattttgggggcggtttcccccatactgttctcgtggtaatgaagaagtctcacaagatctgatgattttataaat

SEQ ID NO: 109503 - DNA, 120 bp, synthetic construct
  source 1..120: mol_type = other DNA
tttaccctgggatctctgttttctaaaatgtacgtggatattggatatgtagatctaagtaagtacaaccagaacaaggtaccatgataacgtctttctaagcacacatgcgaaaaacat

SEQ ID NO: 109504 - DNA, 120 bp, synthetic construct
  source 1..120: mol_type = other DNA
ccccacacaactttccagctgaatcctttttttattcctctttagaaccaagcacctaggaaaatatcagctaaattagctaagatatctcaccttctcacctcccatccacttctaaat

SEQ ID NO: 109505 - DNA, 120 bp, synthetic construct
  source 1..120: mol_type = other DNA
tagacatatgccttagagtagctacacattatgtacattatttctactcattcaactccagtttcatcactgctttatcacgaagagtacagaaatacgtggtaaatgtccttaggttaa

SEQ ID NO: 109506 - DNA, 120 bp, synthetic construct
  source 1..120: mol_type = other DNA
tctaggtagtttgttatcaagtcaatgttatcttatattagtgagttttcttatagattagagtaatggcaccatttaatcgtgccacaaacttctgtggtgtgtgtttctgtatgcata

SEQ ID NO: 109507 - DNA, 120 bp, synthetic construct
  source 1..120: mol_type = other DNA
tgcaagaatatgtgcacagcacagcctccactgctcagcctgagggttttttcaaggacccccacctgagtacttcctcagtatccttggagcacttcagatcccccagtgtagctactg

SEQ ID NO: 109508 - DNA, 120 bp, synthetic construct
  source 1..120: mol_type = other DNA
tgatcctcccaccttagcctggcaaagtgctggaattacaggcttgagccactgtgcctgacttcaaaaatagtttgtcagtatacattgcatatgaaactgagagcaagaatctagcta

SEQ ID NO: 109509 - DNA, 120 bp, synthetic construct
  source 1..120: mol_type = other DNA
attccccaaagtccacatgaaagaaataaatattttaagatttttttggggggcagctagagagatggatcaagtcactgtcaaggggaaccccatcaatcttgcagaacacctttgagc

SEQ ID NO: 109510 - DNA, 120 bp, synthetic construct
  source 1..120: mol_type = other DNA
acagacagccacaccatgatagtggaagacttcaacaactcactgacagtgttagatatcgaagcagaaaattaaaatgtaaattttggacttaaactcaactctcaaccaactggatcc

SEQ ID NO: 109511 - DNA, 120 bp, synthetic construct
  source 1..120: mol_type = other DNA
cagaaaaaaagtgaaaacctgaacagaccgataacaagttatcaaattgaattagtaataaaaaacctactgaccaaaaaaaaagccctggaccagatggattctcagccaaattctact

SEQ ID NO: 109512 - DNA, 120 bp, synthetic construct
  source 1..120: mol_type = other DNA
agcagcttctgccaaatgagagaaagtgaacaagttttcagattccactaagaaaatcattgagaaagcatatctgcatgagcaggtttttaatgcagatgaaagtgtcctatcctgggg

SEQ ID NO: 109513 - DNA, 120 bp, synthetic construct
  source 1..120: mol_type = other DNA
agtgcctgcgaactagtgtcagatgatggggaaggagacatagaagcagcagtgccagaaacaaattgttattaggcaatctagcagaaggattctgataattcaagactgtttttggct

SEQ ID NO: 109514 - DNA, 120 bp, synthetic construct
  source 1..120: mol_type = other DNA
tgtagagactgcagaactgcataactgaaactttatacccattgactaacaactccctgcttccccttccccttaatcactggcaataaccattctactctttgcttctgtgagtgttac

SEQ ID NO: 109515 - DNA, 120 bp, synthetic construct
  source 1..120: mol_type = other DNA
gcctggctggtctcaaactcctgacctcaggtgatccaatttgtcttggcctcccaaagtgctgggattacaggttatcagccactgactgacatatataaaattgtatttttatcatgt

SEQ ID NO: 109516 - DNA, 120 bp, synthetic construct
  source 1..120: mol_type = other DNA
gtccccttccatctttccccttctgagcctcctaaatccaccacatcaatctgtatgtctttgtatcttcatggcttagctcccaatgataagtgagaacatacagtatttggttttcca

SEQ ID NO: 109517 - DNA, 120 bp, synthetic construct
  source 1..120: mol_type = other DNA
tgctctggcataaaatggcaggactgtgttgaatagaagtgatgagaatggccattcttcctttgttcctgaaagctttctgtttttcactcttgaatttaatgctagctgtgagctttt

SEQ ID NO: 109518 - DNA, 120 bp, synthetic construct
  source 1..120: mol_type = other DNA
aggttgttagtttaagataattctttactttttactagcataattatgtgatatttatcagtgtgtactgagagcaaacaatgccagatgctactagtgaccataaattagagaaataac

SEQ ID NO: 109519 - DNA, 120 bp, synthetic construct
  source 1..120: mol_type = other DNA
gcagccaacctatatccttaatgctttactgcttagaaatttcttccatcagatgttctaagtcattgctctttttttttattttggagacagagtctcactctgtggcccaggctggag

SEQ ID NO: 109520 - DNA, 120 bp, synthetic construct
  source 1..120: mol_type = other DNA
tccaagctcttgtaagctctgctcattacctagttccaaagtcaagtccacattttcaggtatccttatagcaatgtcccacttcttggtaacaattttctgtgttaggccattctggca

SEQ ID NO: 109521 - DNA, 120 bp, synthetic construct
  source 1..120: mol_type = other DNA
aattttttttaacttggtcattctgccctaagctatgggccaggagctatgggaatgcttacatactagttcaagctgccttctttattttccgtagcctccaaaggtctggtatatgct

SEQ ID NO: 109522 - DNA, 120 bp, synthetic construct
  source 1..120: mol_type = other DNA
cctctgtgctgtcaggagagttggaaatgcttatttcaggcatggtgggaagcccctttattgactcagtagatttcttgcaaactgctaaaatttcattgctgaccctttcttgatttt

SEQ ID NO: 109523 - DNA, 120 bp, synthetic construct
  source 1..120: mol_type = other DNA
atatttcattccttcatttattcaacaagtagtaccaggaactgtactatgccctggtaataaaacattacctctatttttcaagaacctagtgggtgatgctgagaaatatatagacaa

SEQ ID NO: 109524 - DNA, 120 bp, synthetic construct
  source 1..120: mol_type = other DNA
ctataaggagcggggttgactgtgatccaaacagaacagagaggataatgaagttgtaaaaataggacaattgtagacataatctctattatgaacagtttttgtaggtgtgaccctaag

SEQ ID NO: 109525 - DNA, 120 bp, synthetic construct
  source 1..120: mol_type = other DNA
ttatcccctggctgctttccttgtatcttaagacagagggttaataatattgccaaatttactgagaaagtatgttatggtagaagagctgtatactagagaaacaggaggtctgagtcc

SEQ ID NO: 109526 - DNA, 120 bp, synthetic construct
  source 1..120: mol_type = other DNA
tggaaaatattgaaagaatatatttaaaagctgtgaacagcctgtggtattgcaggctattctcactctttgtgttatgtgtttatagaattttaaatcttacatgacttacgttcacaa

SEQ ID NO: 109527 - DNA, 120 bp, synthetic construct
  source 1..120: mol_type = other DNA
tactgaagcaggagaccaagcttccagataatctctttgttgatcttaagataaaagtttaaaatcgaaaaataatgttttgactcccagtaacctagcctgagctttttcctagagaag

SEQ ID NO: 109528 - DNA, 120 bp, synthetic construct
  source 1..120: mol_type = other DNA
gtgggaagcaaggggaggaagaacattaggacaaatacctaatgcattcaggggttaaaacctagatgacagtttgataggtgcagcaaaccaccatggcacatgtatatgtatgtaaca

SEQ ID NO: 109529 - DNA, 120 bp, synthetic construct
  source 1..120: mol_type = other DNA
aagtccaaaactcttagtcttaaccaccactgtaatcttggatggatcataagagttacataaatggcattagccaaaagtgactaaacaacttttatctacagttcatatcgatgttca

SEQ ID NO: 109530 - DNA, 120 bp, synthetic construct
  source 1..120: mol_type = other DNA
ctctagactgatcctatgtcacacccttagttcaaaagccttcttggttgtaaggacaggccagtttcttgacaacaaggttagtcactgtacaaagtatacaaaagatggcagcagagt

SEQ ID NO: 109531 - DNA, 120 bp, synthetic construct
  source 1..120: mol_type = other DNA
gggtcagtaattccattcatgagtactcatcctcatgaccttatcactttctagaggcctgacttcataaagtcttcatatacgagattagttttcaatctatgaatttgggggccacaa

SEQ ID NO: 109532 - DNA, 120 bp, synthetic construct
  source 1..120: mol_type = other DNA
atgggaaccagtctgtggaaacaatggaataacttacatctcaccctgtctagcaggttgcaaatcttcaagtggcaataaaaagcctatagtgagtattagtttttactttcctctcct

SEQ ID NO: 109533 - DNA, 120 bp, synthetic construct
  source 1..120: mol_type = other DNA
atcctggactttttgaagaaaggccacaactttaataaacttgcacaaatatggcccaaagactacttaaaagcccacatcttagtcatggcaacaatgaatcttttgtgcagttgtttc

SEQ ID NO: 109534 - DNA, 120 bp, synthetic construct
  source 1..120: mol_type = other DNA
tgactgaactaatttacattcctaccaacataggataagcattccctttcttctgcagccttgccagcgtctgtttttttaatgttttgaaccagtcagcccttctgactggtgtgagat

SEQ ID NO: 109535 - DNA, 120 bp, synthetic construct; identical to SEQ ID NO: 12740
  source 1..120: mol_type = other DNA

SEQ ID NO: 109536 - DNA, 120 bp, synthetic construct
  source 1..120: mol_type = other DNA
ttttgatggggttttttgtttttttcttgtaaatctgttggagttaattgtagattctggatattagccctttgtcagatgagtaggttgtgaaaattttctcccattttgtaggttgcc

SEQ ID NO: 109537 - DNA, 120 bp, synthetic construct
  source 1..120: mol_type = other DNA
gtgtataggaatgcttgtgatttttgtacattgattttgtatcctgagactttgctgaagttgcttatcagtttaaggagattttgggctgagacaatggggttttctagatatacaatc

SEQ ID NO: 109538 - DNA, 120 bp, synthetic construct
  source 1..120: mol_type = other DNA
ttctagattttctagtttatttgcgtagaggtgtttgtagtattctctgatggtagtttgtatttctgtgggatcggtggtgatatcccctttatcgttttttattgtgtctattagatt

SEQ ID NO: 109539 - DNA, 120 bp, synthetic construct
  source 1..120: mol_type = other DNA
tgctcctgtattgggtgcatatatatttaggatagttagctcttcttgttgaattgatccctttaccattatgtaatggccttctttgtctcttttgatctttgttgttttaaagtctgt

SEQ ID NO: 109540 - DNA, 120 bp, synthetic construct
  source 1..120: mol_type = other DNA
ccatcactttcaggtacaccaatcagacgtagatttggtcttttcacatagtcccatatttcttggaggctttgctcgtttctttttattcttttttctctaaacttcccttctcacttc

SEQ ID NO: 109541 - DNA, 120 bp, synthetic construct
  source 1..120: mol_type = other DNA
taatcaagcctgggcaatggcgggcgcccctcccccagcctcgctgccgccttgcagtttgatctcagactgctgtgctagcaatcagcgagactccatgggcgtaggaccctccaagac

SEQ ID NO: 109542 - DNA, 120 bp, synthetic construct; identical to SEQ ID NO: 12741
  source 1..120: mol_type = other DNA

SEQ ID NO: 109543 - DNA, 120 bp, synthetic construct
  source 1..120: mol_type = other DNA
tgattactcccaaactgctaaattatctgaattctttggataattcctcctcagggcatgtctctgaaacttagagattgtccaaaagagtatgtgctctgcagagggtaaaagggaatg

SEQ ID NO: 109544 - DNA, 120 bp, synthetic construct
  source 1..120: mol_type = other DNA
tctcagttgtaaaagaatcgccctaggatcctaaaagaacttgttgaattttgagttgccttacatcctaatgagagatgccttgcatctctcagggtaaatctattgatttcactaaaa

SEQ ID NO: 109545 - DNA, 120 bp, synthetic construct
  source 1..120: mol_type = other DNA
ctcatgagtttgaaaaaacactgttccatcatcgatgataacaatatcatatctgtttcagaaattgattaaatcagcattacaacttgtcaaaaatatttaactcttgctagcctttga

SEQ ID NO: 109546 - DNA, 120 bp, synthetic construct
  source 1..120: mol_type = other DNA
tttgctttattttattatatttatttatttatttttgagagacagtcttgctctgtcacccaggctggagtgcagtagcacaaccttggattgctgcaaccctccgcctcccaggttcaa

SEQ ID NO: 109547 - DNA, 120 bp, synthetic construct
  source 1..120: mol_type = other DNA
tgaggaggtttcatgagaaaaactaggaaagagcgttgtcctcaaactaataaagcatatgtcaaaaagagcataagtaactgtgtcaagggctgctgagagttcacaggagttgaacct

SEQ ID NO: 109548 - DNA, 120 bp, synthetic construct
  source 1..120: mol_type = other DNA
aatcatcagagaaatgaaaattaaagctacagtgagattccattttataccagtcagaacggccattactaaaaagtcaaaaagcaagatactggtaagaatgttgaggaaaaggaatgc

SEQ ID NO: 109549 - DNA, 120 bp, synthetic construct
  source 1..120: mol_type = other DNA
tcttttttttcagaaaaataagaatatttcctcccagtaggcagagtgaagggcctaacttctaaactgtggcatgatttaggcaaggcctaaagctagcttgggaagcgtgggaatctg

SEQ ID NO: 109550 - DNA, 120 bp, synthetic construct
  source 1..120: mol_type = other DNA
ttagttgcaccatcttaaggacagttctctactggcgtgtccctaaaattcttcatcaaattacctttgcctagaaccaggagtgaatctcagagttcattaaaacagcagtggaagcag

SEQ ID NO: 109551 - DNA, 120 bp, synthetic construct
  source 1..120: mol_type = other DNA
atgttccctaaactgacatcttctcttctcctattacaggaggaattctagctccaatatattttggggctctgattgatacaacgtgtataaagtggtccaccaacaactgtggcacac

SEQ ID NO: 109552 - DNA, 120 bp, synthetic construct
  source 1..120: mol_type = other DNA
tacagccatggtagaagacagtctggaagtttcttacaaagaaaaacacaggcttatgatactgttaagtaatcatgcacctaggtatttacctaagttagatgaaaacatgaccccaca

SEQ ID NO: 109553 - DNA, 120 bp, synthetic construct
  source 1..120: mol_type = other DNA
ggttcatcaattgtaacaaagttacacactaatacaaactgttaatgataggggaaactgtatgtgtggggcggggagtatatgggacttcatactttctgtacagtttttctgtaaatc

SEQ ID NO: 109554 - DNA, 120 bp, synthetic construct
  source 1..120: mol_type = other DNA
gtatttccaggacacctggcaagatgctcctcagaatttccccaaagcaatgaccacaacttcaagtattaatgtaacattttgagatggctttataatggtttgagtataaaaagaccc

SEQ ID NO: 109555 - DNA, 120 bp, synthetic construct
  source 1..120: mol_type = other DNA
cccaatataaccacaaatatcctaaaaaataaaaagaggaggtcagaaggatgtgatgtgagaaagactcagtctattgttgctgggtttgaagatggaagaaaggggccaggagccgag

SEQ ID NO: 109556 - DNA, 120 bp, synthetic construct
  source 1..120: mol_type = other DNA
ctactgagggcatcttgatggcttccaagtttcatgtttctttgatgatatatatgaagatgtttgattctgttatattaaccctggatcctgtgtcctgaaaccttgcaataattgctt

SEQ ID NO: 109557 - DNA, 120 bp, synthetic construct; identical to SEQ ID NO: 12742
  source 1..120: mol_type = other DNA

SEQ ID NO: 109558 - DNA, 120 bp, synthetic construct; identical to SEQ ID NO: 12743
  source 1..120: mol_type = other DNA

SEQ ID NO: 109559 - DNA, 120 bp, synthetic construct
  source 1..120: mol_type = other DNA
caaaaattcatttttctattaatcagaccacacacacacagagagagagagagagagacagaaagacagagagacagagagacagagaaagacagagacagagacagagagacagagacc

SEQ ID NO: 109560 - DNA, 120 bp, synthetic construct
  source 1..120: mol_type = other DNA
ccaactgggagaagaaaggaggagttggcagtgcctagaatactcaccaaattagtttggagacagacatcatttccaggaactatttctccattgcaattaaatccatgcacattgggt

SEQ ID NO: 109561 - DNA, 120 bp, synthetic construct
  source 1..120: mol_type = other DNA
agttcggcttacacccagaaatcaacaagaacagcttggaggatagaagcaagatggagttggttaggtcagctctctttcagtctcggttatagttttgcagtgaaaatttcataagca

SEQ ID NO: 109562 - DNA, 120 bp, synthetic construct
  source 1..120: mol_type = other DNA
aggatctgtaggctttgtaattatgggtgcttttatagtagcaagtattggtctgttttttcctgttttgaactcctttgagcattttttctaaaactgatctggtggtgacatatttcc

SEQ ID NO: 109563 - DNA, 120 bp, synthetic construct
  source 1..120: mol_type = other DNA
ttcacagggttctctgggggttgattattaccaggcttttaccgcttttctttactacaccacagctgcttcttatgggcactataacagttcctggctctctttctcagttttttattt

SEQ ID NO: 109564 - DNA, 120 bp, synthetic construct
  source 1..120: mol_type = other DNA
gcattttctgagtttcctgaatctgtgatatagtgtctgacattaatttaagagaaattcttagtaatttttttttttttgagatggagtctcactctgttgcccaggctggagtgcaat

SEQ ID NO: 109565 - DNA, 120 bp, synthetic construct
  source 1..120: mol_type = other DNA
cagtaacctctggattataaatttcaaacatacttctcagtttctcctcccagctgtaggtggggcaggatggcttaacagggcttgagttgtatatttttctcgttttatgaagaaggc

SEQ ID NO: 109566 - DNA, 120 bp, synthetic construct
  source 1..120: mol_type = other DNA
agtaaagagaaatgcctagtgtctattttattaaacaaacaaacacagagtttgaactataatactaaggcctgaagtctagcttggatatatgctacaataatatctgttactcacata

SEQ ID NO: 109567 - DNA, 120 bp, synthetic construct
  source 1..120: mol_type = other DNA
gaattactataccaggctccctatttctttgatttcactttaactggataagtaggagtgggcgggtggaggggtggaaaatatgtttcaaagtcacttaatcacctcactttcctccat

SEQ ID NO: 109568 - DNA, 120 bp, synthetic construct
  source 1..120: mol_type = other DNA
ttcaagtgattctcctgcctgagcttccagagtagctgagattacaggcatgtaccaccacacccagctaattttgtatttttggcagaaatggggtttctctgtgttggtcaggctggt

SEQ ID NO: 109569 - DNA, 120 bp, synthetic construct
  source 1..120: mol_type = other DNA
cttgagaccaccaaattattgatttttttcctcactttacctacaaaacacatacaaaaagtggaataattgaacttctcttagagatacataggtatgggtttctccattcatgagtgt

SEQ ID NO: 109570 - DNA, 120 bp, synthetic construct
  source 1..120: mol_type = other DNA
ttcagtgttcccagcaactttatggaacataattattgcaaaacgtgagaatcaattgtacatataacctatatcatacatattatataatcagtatcctattacaaatcggatgcttat

SEQ ID NO: 109571 - DNA, 120 bp, synthetic construct
  source 1..120: mol_type = other DNA
gctactgccctccagcccgggagacagagcaagactccgtctcaaaaaaaaaaaataaaaaagcataccagatttctggataaggggacaaaggttataagcagaatcttgccttttctt

SEQ ID NO: 109572 - DNA, 120 bp, synthetic construct
  source 1..120: mol_type = other DNA
ttttttgatgaataaaggtttatttatttttaactttttaatttttaatttttgtgggtatgtagtaggtatgtatgtttatggggtacatgagatgatttggtacaggcatgcaatgtg

SEQ ID NO: 109573 - DNA, 120 bp, synthetic construct
  source 1..120: mol_type = other DNA
gatgtgatcctgtttgtcaatttttctttggttgcctgtgtttctggggtaagaaatttgctcaagaaatttttgcccagatgaacgtcctggagagtttccccaatattttattgaggt

SEQ ID NO: 109574 - DNA, 120 bp, synthetic construct
  source 1..120: mol_type = other DNA
gagactggggcctaataaaaaggagcgtctatacaggagcttaaatgggctgtaccttgtagcattctgaggacaggtctgacttctgagaagggaaagtggtaaaagtagtgtccagtc

SEQ ID NO: 109575 - DNA, 120 bp, synthetic construct
  source 1..120: mol_type = other DNA
agtgagttgagcatagtttgtgattttgagggcctctaaaagtactaaagcagcggcagccgctgcacgcggacatgagggctaggctaaaacagtaaggtcaagttgtttggacagaaa

SEQ ID NO: 109576 - DNA, 120 bp, synthetic construct
  source 1..120: mol_type = other DNA
ggggataactaaaaaagagtgcataaaagagtattgtctaagttggcaccagagttggggagttttaagaggtttagaagcctggctgtcaatacccacaacagttatggaggcaaggga

SEQ ID NO: 109577 - DNA, 120 bp, synthetic construct
  source 1..120: mol_type = other DNA
caggtgtgaggaggggaggcgataaaaagtttatagggtggaggagcagaggctgaggaagaattgggaactagctcggcctggcgaggaggggagaggtcagatgggtctgtagaaaag

SEQ ID NO: 109578 - DNA, 120 bp, synthetic construct
  source 1..120: mol_type = other DNA
gaagttggagaagagagtaaaaagaggccgcttaccggatttgaaattggtgagatgtttcttgggctggtcggtctgaggacctgaggtcgtagatggatctttctcacggagcaaaga

SEQ ID NO: 109579 - DNA, 120 bp, synthetic construct
  source 1..120: mol_type = other DNA
aggaggaagagagacaaacacacagtagaaggaacaatcctggaaaactgatataggccatatcactctgaagtgtgttgtcagtaggcacatatgaaaatgtttcgtgtgtataaatcg

SEQ ID NO: 109580 - DNA, 120 bp, synthetic construct
  source 1..120: mol_type = other DNA
cttgactctgaaaaataaaaccaatcagcaaatgttttaaacaaaatcttatacaagattatttcagtcttctattagtttggtccatgcaattaactccatgttctgctcaatattgga

SEQ ID NO: 109581 - DNA, 120 bp, synthetic construct
  source 1..120: mol_type = other DNA
aactaagtttatctctcaaaattggcccttataatttcacagacgcatgtcttctgtgacagtccctgggattagaggggttcagcagttttaatttctggcactgtgtctcatgaatgc

SEQ ID NO: 109582 - DNA, 120 bp, synthetic construct
  source 1..120: mol_type = other DNA
tgtcaggccacaatagcagaacctgagggaaaaaaattacagaagctattgacaaagttgaaggagaaagttattatctcaatccttctcaaagggaagagaaagctgaaagcagtggga

SEQ ID NO: 109583 - DNA, 120 bp, synthetic construct
  source 1..120: mol_type = other DNA
caaaaattacacaaagatgaccatgttttgggttataagctttataaccctcatgccaaatttggacaccttataatatttagcagggataaatattaaactgcttgatcaagaaatcta

SEQ ID NO: 109584 - DNA, 120 bp, synthetic construct
  source 1..120: mol_type = other DNA
aagctccactgaatcctaggtctccaaaaggaaagagattcatgagactaggacatgtaatgcttttacggtgcacttggctacaaagacatttctctaagtgtctaaaccacacccttt

SEQ ID NO: 109585 - DNA, 120 bp, synthetic construct
  source 1..120: mol_type = other DNA
ccttttacagaggcaggaatttaatcaactcagtagcctttttccccataatttggaacttttctttggctttgaccatgttgagtagagttggtcaaacctaacgggaaaaagactgaa

SEQ ID NO: 109586 - DNA, 120 bp, synthetic construct
  source 1..120: mol_type = other DNA
ttttggtgggttttggccagctcctttactgcaacctgttttatcagcaaggtctttgtgacctatattttgtgctgaacttctgtctcatcctgtgacttagaatgccttaattgtcgg

SEQ ID NO: 109587 - DNA, 120 bp, synthetic construct
  source 1..120: mol_type = other DNA
aagaaataagatttccagaataatcccttaaagcatatttggaatagaagctaggagttaggaagatagcagtgtatgtaaggcacattacctgcagtccaataaagaagccaggccggg

SEQ ID NO: 109588 - DNA, 120 bp, synthetic construct
  source 1..120: mol_type = other DNA
ctcgtgaaagatggagccaaggtctgaattcaggcagtctgattccaaattccatgctctcaactctgtttcacattgctaaagtaactgtggacttttgtgctattagtacctttaagc

SEQ ID NO: 109589 - DNA, 120 bp, synthetic construct
  source 1..120: mol_type = other DNA
ttggcaagaccatgtttctttctgaaaattctagggacaatacacttctttgttttctccagtttctagaggctgtctgaattccttggctcatggcccttttccgtgttcaaagctagt

SEQ ID NO: 109590 - DNA, 120 bp, synthetic construct
  source 1..120: mol_type = other DNA
ttctatacatcctctgaaatctaggtggaggttcccaaacttcacttcttgacttctgtgcacctgtaagctcaacaccatgtggaagctgccaaggcatggggcttttaccttctgaag

SEQ ID NO: 109591 - DNA, 120 bp, synthetic construct
  source 1..120: mol_type = other DNA
gttccaaagctgcttccccattatcaggtatcctgtagcaatgcccctcagtaccaatttactgtattattccattctcctgctgctaggaagaaacactgaagactgggtaatttataa

SEQ ID NO: 109592 - DNA, 120 bp, synthetic construct
  source 1..120: mol_type = other DNA
tcattctttctgttttttgttttgttttgtttttttgagatggagtctcgctctgttatccaggctggagtgcagtggtgctgtctcagctcactgcaacctctgcctccctggttcatg

SEQ ID NO: 109593 - DNA, 120 bp, synthetic construct
  source 1..120: mol_type = other DNA
gtctgagaacaaatgctatcacttctttttgaaaataaattggataagatatattttatggcttagaatgtggtctttcttggtgaatgttccatgtgagcttaagaatgtctattctac

SEQ ID NO: 109594 - DNA, 120 bp, synthetic construct
  source 1..120: mol_type = other DNA
cttacacaagcctagatagattagcctgctagacacctaggctatatgttatagcctattgctttgaggctacaaacctttacagcctgttattgtactaaatactgcaggaattgtaac

SEQ ID NO: 109595 - DNA, 120 bp, synthetic construct
  source 1..120: mol_type = other DNA
ctgtgctggcatggtttctgagaagtcaaatgcaattcttatctttgttcctatataggtaaggataggtattttattttccctctggtttcttttgggacttttttccccttgtctttg

SEQ ID NO: 109596 - DNA, 120 bp, synthetic construct
  source 1..120: mol_type = other DNA
gctggtcttgaactcctgacctcacaatccaccagcttcatcttcccaaagtgtcaatttttaaaaaaatgtttttctccctaggcaggataggatggctagagtgggctgtaattgaat

SEQ ID NO: 109597 - DNA, 120 bp, synthetic construct
  source 1..120: mol_type = other DNA
ggagtttggtgtacagattatttcagcactcagataataatcatagttaccaacaggtacttttttagatttcaccctcctcctaccctccaccctcaagtaggcctcagcatctattgt

SEQ ID NO: 109598 - DNA, 120 bp, synthetic construct
  source 1..120: mol_type = other DNA
actcccttccctgttgccttttaatgttttcttatactttttgaattgatatatttatctctcttacaacaaggcaaatactgtagcatattgctatggtctgaatatttgtactgtctc

SEQ ID NO: 109599 - DNA, 120 bp, synthetic construct
  source 1..120: mol_type = other DNA
aaattacagttttaatgttctcttacctcaatacttcaaaagtattattcatccacggggctcatgcctataatcccagcactttgggaggctgacgtgggtggatcacaagatcaggag

SEQ ID NO: 109600 - DNA, 120 bp, synthetic construct
  source 1..120: mol_type = other DNA
ctggccaaggttgtgaaaccccctctctactaaaatacaaaaattagccaggcatggtggcatatacccctgtagtaccagttacctgggaagctgagacaggaggatcacttgaaccta

SEQ ID NO: 109601 - DNA, 120 bp, synthetic construct
  source 1..120: mol_type = other DNA
aagaagctcacctgtgactaccgcatttgtctcaacttctccttgtgtaaactcaccccagcaacacagggcaaggatatagatgcttcagtttgttcttttgtgttaaatgtttacaag

SEQ ID NO: 109602 - DNA, 120 bp, synthetic construct
  source 1..120: mol_type = other DNA
tcaaaattctggtcagtgattccaacatatgtgccatctatgggttggtttttgttgattgtcatttctcatgagaatatctcacattttcctggaccttcacatgtggataattttgaa

SEQ ID NO: 109603 - DNA, 120 bp, synthetic construct
  source 1..120: mol_type = other DNA
tagaaatttatcaagcttactgtgaagctagcacttcatgttcctggaggtatttagaaagcctcgcatatgcccagggtagtagactcacttgtaaaacacctgagaagaccataagct

SEQ ID NO: 109604 - DNA, 120 bp, synthetic construct
  source 1..120: mol_type = other DNA
ggaagcagctagaatgggaatcatcatgtacaagtgctgtcccataggattaataactaatttcttgtcagaaactatggagactagtgaatgatatatttaataaggggctgatattca

SEQ ID NO: 109605 - DNA, 120 bp, synthetic construct
  source 1..120: mol_type = other DNA
ccctaatgtaataatgcatccaaattggttcatcagtgtaaacaaatgtaccacaccaatagaaggtaaacataatagtaggggaaactgtgtgtggatagagggaatatgtggaagctc

SEQ ID NO: 109606 - DNA, 120 bp, synthetic construct
  source 1..120: mol_type = other DNA
tagaaaatcacacacacacacacacacacacacacacacacatattacttgtgtttctgtacaccgggaataagcattgaaaaataattaaaggagtaaatccatttatcatagcatctc

SEQ ID NO: 109607 - DNA, 120 bp, synthetic construct
  source 1..120: mol_type = other DNA
ttttgttcacacttataagtgagaacgtgcaatatttgattttctgttcctgtgttagtttgcttaggataatggccaccagcttcatccatgttgctggaatacaattgctgggttgaa

SEQ ID NO: 109608 - DNA, 120 bp, synthetic construct
  source 1..120: mol_type = other DNA
ttgttgcctgtgctttgggtgtcatactcaagaaattattgtcaaatcaaatgttctgaagcattttctctgtattttcttctaagagtgtaaggtcttacatttaggcatttaatccca

SEQ ID NO: 109609 - DNA, 120 bp, synthetic construct
  source 1..120: mol_type = other DNA
tcctaagtgttttatcttttttatgatctagtgagattttcttaatttccttttgaaatgttcattggtagtgcatagaaacacttcttaattttgaatgttgatttgtgtcctgcaact

SEQ ID NO: 109610 - DNA, 120 bp, synthetic construct
  source 1..120: mol_type = other DNA
aactttccctttagtgctgcttccactgcatcacataagttttggtttcttgtgttttcattttcatttttcctcagatattttattaattcttgttattcctcctttgacccattggtt

SEQ ID NO: 109611 - DNA, 120 bp, synthetic construct
  source 1..120: mol_type = other DNA
gcactgccattcccctcccagttagccagggctattcacatggaaataaagaaaatagctcaccatcatggccatctgagaacagtgtctagcttcctataaatcagttaatgaaattag

SEQ ID NO: 109612 - DNA, 120 bp, synthetic construct
  source 1..120: mol_type = other DNA
agtgaggatgttgaaaaactctggtcctacacaaactcatggtttgcaaattaactttttaggaaactttatctcccttgtctcaaggtgccccagtgtgaagaaaggttgagggaggac

SEQ ID NO: 109613 - DNA, 120 bp, synthetic construct
  source 1..120: mol_type = other DNA
gatgttgataggttttatgaaatactacatcttttgtttgtttgtttttgtttttcaaggcagagtctccctctgtcgcccatgctcgtgcagtgccctgatgtcatctcacagcaacct

SEQ ID NO: 109614 - DNA, 120 bp, synthetic construct
  source 1..120: mol_type = other DNA
tgtaaatttttaattatattttaaatttataacaacactttattgttgtcttattatttttagtctgccagttctgattctatggctgcaacatgccattttacctctaaatatactaac

SEQ ID NO: 109615 - DNA, 120 bp, synthetic construct
  source 1..120: mol_type = other DNA
cagctctgagccatttattatcagctacttgtaaattagcagtagaattttatttttatacttgtaagtgggcagttaccttttgagaggaatacctataggtatgcatagagaaatgga

SEQ ID NO: 109616 - DNA, 120 bp, synthetic construct
  source 1..120: mol_type = other DNA
agaatatgccttaaatgcaactaccccagcttcatcttccattgctccccacatttgaggaccacattctaggcttacagttctctaatgtgccataatatgtcatatctttgcatctgt

SEQ ID NO: 109617 - DNA, 120 bp, synthetic construct
  source 1..120: mol_type = other DNA
actcttaggataaaagcaaggtgataacccactttgttcatggtgtattgaagtatctttcttagtggacactcccatttcaccccctctcatcacctgttctgaaatacatgctgggaa

SEQ ID NO: 109618 - DNA, 120 bp, synthetic construct
  source 1..120: mol_type = other DNA
tctggagattaattttcaatacatattaaagaacaaaaatatacttgcctactttcttgattaatcttaaggaaatcatcagtaatgttcacaaggacatttcataatcacagccatgac

SEQ ID NO: 109619 - DNA, 120 bp, synthetic construct
  source 1..120: mol_type = other DNA
taatacttacaggtagtttgaatgcaataggaatgattggtccagtcattggctttgcactgggatctctgtttgctaaaatgtacgtggatattggatatgtagatctgagtaagtaca

SEQ ID NO: 109620 - DNA, 120 bp, synthetic construct
  source 1..120: mol_type = other DNA
aaagtatttatctttagctaatattagtagatccaactggggtttagatttcctctttctgcctctcctccatctgcaccctctcttttcctcagcaaacacactgaagtctctcccatc

SEQ ID NO: 109621 - DNA, 120 bp, synthetic construct
  source 1..120: mol_type = other DNA
atatcttccatgttagacatgtggcttagtgtagctacacgttatgtacatcatttttactcatttgctctactttaatcattgcttttaacactgagtacaaagtaagtgttgaaggtc

SEQ ID NO: 109622 - DNA, 120 bp, synthetic construct
  source 1..120: mol_type = other DNA
ctctacctcccaaaaatacaattgaaccttgaacagcacagatttgaactgtgcaggtccacttatacatagtttttttgataaatgtattggaaacatttttcgagatttgtgacgaca

SEQ ID NO: 109623 - DNA, 120 bp, synthetic construct
  source 1..120: mol_type = other DNA
agcagctcctgccacttaggagtaacagaaaagttctaaatggcataaagaaagtcattgaggagaaaggacatctacctgagcaggtttttaatccgatgaaagtgccctattctggaa

SEQ ID NO: 109624 - DNA, 120 bp, synthetic construct
  source 1..120: mol_type = other DNA
cattcaagaggtaacaggcacaacagaggaattaacagaagacaacttgatggagataagtgcttctgaactaatgtcagatgatgaggaagaagacatggaagaagcagcgacagaaac

SEQ ID NO: 109625 - DNA, 120 bp, synthetic construct
  source 1..120: mol_type = other DNA
ctacaggcacaatgttgtacagcggatctctagagcttactcatcttgtataaatgaaactttttatacccattgactgggaactccctatttcccctttcccacaaccactggaaatca

SEQ ID NO: 109626 - DNA, 120 bp, synthetic construct
  source 1..120: mol_type = other DNA
aggctcgcactcttgtcttttggtcacttctcactgtgtcccctcagcttctgtctctgtatggcctggcttttcctaggttatgattatagagtgaggattattataatattggaataa

SEQ ID NO: 109627 - DNA, 120 bp, synthetic construct
  source 1..120: mol_type = other DNA
tccgtatgttgccttttcactctgttgattatttcttttgctgggtagaagctttttagtttgaccagttccatttgtctaattttgcttttattgcctgtgcttttggtggtacatcca

SEQ ID NO: 109628 - DNA, 120 bp, synthetic construct
  source 1..120: mol_type = other DNA
gaatagctatgttgaattctctgtttgaaagattacatatgtctgtttcaccaggattgttccctggtgccttatttaatttgtttggtgaggtcatgttttcctggctcatcttagtgc

SEQ ID NO: 109629 - DNA, 120 bp, synthetic construct
  source 1..120: mol_type = other DNA
accccaaaagccttcttgttgctctgttctactgtagctgagctgctacctaaggtgcaagacaaagtcgcctttatttttccaccacttctcttaaacagaaggagtctttcaccgcaa

SEQ ID NO: 109630 - DNA, 120 bp, synthetic construct
  source 1..120: mol_type = other DNA
catctttattctctgtagttcccaggtgtctggcatatgctgggtcctctcagtacttcgagacagatgagatagaagctaatctattgggtagcacttggaaaggttgaaatgttgaat

SEQ ID NO: 109631 - DNA, 120 bp, synthetic construct
  source 1..120: mol_type = other DNA
ttaagccagagggaagagctgtgtcaagtgttcacatgccagtttaaactgctagtttttcccaattgtatggtataatactgaggaggagaatggcaagaggatgtctccaattatctt

SEQ ID NO: 109632 - DNA, 120 bp, synthetic construct
  source 1..120: mol_type = other DNA
gtttcagagataacaaaatatgaaaagaagaaaatagtgttttagaattgaaagtaaacatttggtttactttcttcatctatggaggactgcaatcattatcattatttcccagaacct

SEQ ID NO: 109633 - DNA, 120 bp, synthetic construct
  source 1..120: mol_type = other DNA
gtgcctctgtccaatataagccaaatgggctaatggagtaccattgagaagcaataatcaagagaatgatctggcagctgtcagagcaagatatatcaaatggtaaggtattgacagcag

SEQ ID NO: 109634 - DNA, 120 bp, synthetic construct
  source 1..120: mol_type = other DNA
gtgctgggattacaggcgtgagccaccatgcccagccaattaatggattttctaaacctataaggaccagggttgactgtgagcccaaaaagaataaagaagataataaggtgcaaaaaa

SEQ ID NO: 109635 - DNA, 120 bp, synthetic construct
  source 1..120: mol_type = other DNA
gtctcaaactttacaaaatttctccatcttgtaatatcatcgttgttctgcatttgaagttgcatctcatgttaggtgaatttaattccataggtgaaattcacctaattctataggtga

SEQ ID NO: 109636 - DNA, 120 bp, synthetic construct
  source 1..120: mol_type = other DNA
taaatattcttagccactgcctttttcttgtgaggaagccaagccctcataattggccaaaataaattatttttgtctctcatgtgggtatacttgtcccttacctccaccctagtgtgc

SEQ ID NO: 109637 - DNA, 120 bp, synthetic construct
  source 1..120: mol_type = other DNA
agatgggaaagtgagatttagagaaacacacacattatatggctagcaatgttaagattaagacacaaatttgagctattagaggtatcagatgtcattaaataaaattattcataatgt

SEQ ID NO: 109638 - DNA, 120 bp, synthetic construct
  source 1..120: mol_type = other DNA
gaaccagtctgtgggaacaatggaataacttacctgtcaccttgtctagcaggatgcaaatcctcaagtggtattaaaaagcatacagtgagtattagttttcactttttctcctctcct

SEQ ID NO: 109639 - DNA, 120 bp, synthetic construct
  source 1..120: mol_type = other DNA
cacatttgtggcccaaagactatacttaaaagcccacatctcatattcatcagctatagtatctttcagtaagagtaccccatttaatccctggtcctgtgttgtccagtagtgaagacc

SEQ ID NO: 109640 - DNA, 120 bp, synthetic construct
  source 1..120: mol_type = other DNA
cttgaatgttgcttttgcctgcttaaatagaattctggcaccactgcctggctctatttcctctgcactctgtcccattttcatgagtggctaagttttgtcccgtttcaaactatattt

SEQ ID NO: 109641 - DNA, 120 bp, synthetic construct
  source 1..120: mol_type = other DNA
aaacatttagcaaccaggtataaatacaaacttcaatttgtaatgaaattctaatgctttcaattcacccacagcatggcttttgacctggtatttcatgatacccttgtagggcataag

SEQ ID NO: 109642 - DNA, 120 bp, synthetic construct
  source 1..120: mol_type = other DNA
accctgcctgcaaattttcttaaattcataccataaatattccacaagtatagcttcatcttaatataaaatgtcaattcagaaggagaagccttctgtatttccaaattacagattcat

SEQ ID NO: 109643 - DNA, 120 bp, synthetic construct
  source 1..120: mol_type = other DNA
aggtacgaagtacaatgacagagctagcgtgatccagattatattgttcacaggaaaggctttggagcttattctaagtgtgttcagaagccccagagggtttaagcattagtattacct

SEQ ID NO: 109644 - DNA, 120 bp, synthetic construct
  source 1..120: mol_type = other DNA
agttgtgaaacatggattatattgtgcagtggtaaagtctggggtttaatgttcccatcacccgaatcgtgtactttatattcaataggtagtatttcttccctcccactcccttccacc

SEQ ID NO: 109645 - DNA, 120 bp, synthetic construct
  source 1..120: mol_type = other DNA
tttccttttgagggtgtagtcataatttctttgcctagatcattgtccagaaaagtttttcctaggtttacccctaggatttttatagtttcaggccttacaattacgtctttcatcctt

SEQ ID NO: 109646 - DNA, 120 bp, synthetic construct
  source 1..120: mol_type = other DNA
tgataggacttccaatactacgttgaatacgagtagtgaaagtgggcatcctcatcttgggtccattcttagaagtaatgcttacgattttcccccattcagtatgttattgactgtggt

SEQ ID NO: 109647 - DNA, 120 bp, synthetic construct
  source 1..120: mol_type = other DNA
gctagctttgggtgcagtttattcttgttttactagttctgtgagacgtgacattagattgttaattttatatctttctgtctttttgttgtgggcatttaatgctacaaacttccctct

SEQ ID NO: 109648 - DNA, 120 bp, synthetic construct
  source 1..120: mol_type = other DNA
gccatgatctgcctagtgctgtcagtggattattgaaagaccccactactgttgtattgctatctattttgttttccttaggcccagtagtgtttgttttatgaattggggtgctccaat

SEQ ID NO: 109649 - DNA, 120 bp, synthetic construct
  source 1..120: mol_type = other DNA
tggatgtctggatctgtagtaagtcagggaagtttttgggagttattctttcaaacaagtttcccacacttttaactttttcttcttctccctctggaataccaatgattcataagtttg

SEQ ID NO: 109650 - DNA, 120 bp, synthetic construct
  source 1..120: mol_type = other DNA
gacaatgcagaaaagagggaaagcaattacagaggaagatgaaaagagtttaaccaggacacagagtttttctctgtacaagaagggaaattttctatgtgggtaaaaggcaggtaaatg

SEQ ID NO: 109651 - DNA, 120 bp, synthetic construct
  source 1..120: mol_type = other DNA
aagactcagatctggaagtggtaaaaatgaaagatcaatgagaacttctacatttcaggcccattgatgtggaggttgtggaaggaaaaagcctacaggagagagttacatggagtgtca

SEQ ID NO: 109652 - DNA, 120 bp, synthetic construct
  source 1..120: mol_type = other DNA
ccaagtctcctgcatgccaccccttcccctgggtgaaaatacagctcaataacaaatttcagtttaccttgtgtgtgtagtataccgacaaagtgtaacttctgaaaatcaagtacagtg

SEQ ID NO: 109653 - DNA, 120 bp, synthetic construct
  source 1..120: mol_type = other DNA
acagtcccccagaatcttaactaatttcagcattaacccaaaagtccacagtccaaagtctcatctgagagaagtcaagtcccttccacctatgcacttgtaaaaacaaaagcaagctag

SEQ ID NO: 109654 - DNA, 120 bp, synthetic construct
  source 1..120: mol_type = other DNA
atgtcctaaagacattttccccattgtcttgggaattaacattcagctttcaaatttcaggtattcaaatttctgcagccagcttgaatttctcctcagaaaatggggttttcttttcta

SEQ ID NO: 109655 - DNA, 120 bp, synthetic construct
  source 1..120: mol_type = other DNA
attgtcctcagtgtagttttgtgccctcagctgtgctaacaaagtgctgctgtcctttgtcaaagcagggccaaaacacactttctgtttattgtctctcctaatagataactattttag

SEQ ID NO: 109656 - DNA, 120 bp, synthetic construct
  source 1..120: mol_type = other DNA
tattatcactcaggtgtttaccttttaaaacagttgaaaatgtaactttatataacgtgggaaattcacttaagagtattcattctaccagggagaggaatgatgctgataaatgttttg

SEQ ID NO: 109657 - DNA, 120 bp, synthetic construct
  source 1..120: mol_type = other DNA
acttgttgttaaataatgtctagtctaacctctgtgagtggtcctttgtaagaattgtaaacattatgtgcttattcctgggaagtaggaaaagggcatcattcatctagggattggtgc

SEQ ID NO: 109658 - DNA, 120 bp, synthetic construct
  source 1..120: mol_type = other DNA
tttctaagggtcgctgtgattttttgaaatctgcaaatttctcacccattatctcagtaccagtttgcttcagatgcattggcctcagacaacattcccttgtgaatctactatttctca

SEQ ID NO: 109659 - DNA, 120 bp, synthetic construct
  source 1..120: mol_type = other DNA
tccctctgtatatagggagagaagagtagatcaaatacatctgtgacattaccatatgatttaagcctttgcgatttctaataattttgattcctgggtggatgtaagccaaaccaatgg

SEQ ID NO: 109660 - DNA, 120 bp, synthetic construct
  source 1..120: mol_type = other DNA
cattcccactagtagtgtataagcgttcccttttctccactatgtcttcagtatctgttattttttgacccactaaaaatagccattctgacttgtgtgggatggtatctgattgtagtt

SEQ ID NO: 109661 - DNA, 120 bp, synthetic construct
  source 1..120: mol_type = other DNA
tttcctgtcattgctggaggtgatgtaaaatggtactggagtgttggaagacagagtgaaattttcttacaaagcaaatagagttattgtacgattaagccatcatgttcccaggtattt

SEQ ID NO: 109662 - DNA, 120 bp, synthetic construct
  source 1..120: mol_type = other DNA
attccaaatgggagaaattggccaaaacaaaggggttacaagccccatgcaagttcagaacccaacagggcagtcattaaatcttaaagctccaaaatgatctcctttgactccatgtca

SEQ ID NO: 109663 - DNA, 120 bp, synthetic construct
  source 1..120: mol_type = other DNA
ccaggctggtgataggaggggcctccattaaggtctctaaaatgtcctagagatattttccccactgtcttggctattaacatttggatcctctttacttatgcaaatttctacagcagg

SEQ ID NO: 109664 - DNA, 120 bp, synthetic construct
  source 1..120: mol_type = other DNA
cttgtagaaaaagcaaaacaatgggcaacaaaatcagtagtttcttggggctcagtgtggagaaggctggaatgagtaggcctagcacaaggaatttttagggcagtgaaactattctat

SEQ ID NO: 109665 - DNA, 120 bp, synthetic construct
  source 1..120: mol_type = other DNA
ttaaatttaaaataattatagaaaatctttccctaaatgggagatttctttcctccctccctccccttccttctttccttccttcccttcctttcttcctcccccttcccttccccttcc

SEQ ID NO: 109666 - DNA, 120 bp, synthetic construct
  source 1..120: mol_type = other DNA
tttcccatatcttgcctgctcccgcatacatgcatagccttccccattatcaacatctcccatcaggatggtacatttgttacaattgacaaaccagattgacacatctttatcactcag

SEQ ID NO: 109667 - DNA, 120 bp, synthetic construct
  source 1..120: mol_type = other DNA
tgttgtttaaatgtgcatttgcttgatttccttgatgacataagatgtgaagcatctttttcttttttttttttttttttgagacagagtatcactctgtcgcccaggctggagtgcagt

SEQ ID NO: 109668 - DNA, 120 bp, synthetic construct
  source 1..120: mol_type = other DNA
ctacagatccattgactgtatttaagtgggtctatttctgggctatttattctttccacttacctattcgtatattattttaccaaagtcacactgtcttggttgctgtagcttcatagt

SEQ ID NO: 109669 - DNA, 120 bp, synthetic construct
  source 1..120: mol_type = other DNA
attagctatttttgagaacttctgcacctgtatttgtgagatgtatcgctctgtagttttcttttcttgtaatgtttgtctgctttgggtattaggataatgctgacctcataggagaca

SEQ ID NO: 109670 - DNA, 120 bp, synthetic construct
  source 1..120: mol_type = other DNA
tttatttatttatttatttatttatttatttattttgagaccgtcttgctctgttaccaaggctggagtgcagcagtacgatgtcactcactgcaacctctgcttcctgggttcaaacaa

SEQ ID NO: 109671 - DNA, 120 bp, synthetic construct
  source 1..120: mol_type = other DNA
gatgtagtaggttacatctgttatactgttggttgatagtgttgttgagttcaactatgtctgattgaattttgcctggtgaatccgtgcatttctgatagaggcatgttgaagtctcca

SEQ ID NO: 109672 - DNA, 120 bp, synthetic construct
  source 1..120: mol_type = other DNA
ttctcccatcttggccccccagagtgctgggattacaggcatgagccaccatgcctggcttattttggtcttttaattggtgtatttatatcattgacattcaaagtgattactgatata

SEQ ID NO: 109673 - DNA, 120 bp, synthetic construct
  source 1..120: mol_type = other DNA
ttcttggtgttttttgagcttcctggatctgtggtttggtgtctgacattaattcaataaaaattttctgtacttattatttgaaatctttattttgttcctttcattttccccttcaag

SEQ ID NO: 109674 - DNA, 120 bp, synthetic construct
  source 1..120: mol_type = other DNA
attttgtaccttctgctggaacagatagtaaaacatgtaatttggacatgcaagacaatgctgctgccaactaacattgcattgattcattaagatgttatttttgaggtgttcctggtc

SEQ ID NO: 109675 - DNA, 120 bp, synthetic construct
  source 1..120: mol_type = other DNA
aagtttcttttttttaattattttttaattattatactttaagttctagggtacatgtgcacacgtgcaggtttgttacatacgtatacatgtgccatgttggtgtgctgcacccgttaa

SEQ ID NO: 109676 - DNA, 120 bp, synthetic construct; identical to SEQ ID NO: 12738
  source 1..120: mol_type = other DNA

SEQ ID NO: 109677 - DNA, 120 bp, synthetic construct
  source 1..120: mol_type = other DNA
acaatataaaattatatttaccatgatttcaatgctaaatgttctcatgtgtagttaagaattgaaaacaggccgggcgcggtggctcacgcctgtaatcccagcactttgggaggccga

SEQ ID NO: 109678 - DNA, 120 bp, synthetic construct
  source 1..120: mol_type = other DNA
gatccccatagggttattacctatttaatgactgactgtgctgtcaacccactctgatgttttccacacaaaccccagggaaggaagactagaaaatttcaactgatgtcttatgtccat

SEQ ID NO: 109679 - DNA, 120 bp, synthetic construct
  source 1..120: mol_type = other DNA
tccacctcctgggttcaagcgaatcttctgcctcagcctcccaaggttgggactacaggcgcgcgccaccatgcctggctaatttatttatatatatatatatagtatatataatatata

SEQ ID NO: 109680 - DNA, 120 bp, synthetic construct; identical to SEQ ID NO: 15656
  source 1..120: mol_type = other DNA

SEQ ID NO: 109681 - DNA, 120 bp, synthetic construct; identical to SEQ ID NO: 15657
  source 1..120: mol_type = other DNA

SEQ ID NO: 109682 - DNA, 120 bp, synthetic construct
  source 1..120: mol_type = other DNA
cacctgtgaattccttgatttacttcaggtagagcagagctatgagaaggctatagtcccagcttaggatttcattccgcagagagttaaaatctcaatttttcgttgtctgtcacctag

SEQ ID NO: 109683 - DNA, 120 bp, synthetic construct
  source 1..120: mol_type = other DNA
agtcactttgatcaagacagcacagaggcctcatactaaagcaagcctctgaacatgctccttattaattaacagctgcaggcatttggaatgttctgtccgaatggtgttaacagcctc

SEQ ID NO: 109684 - DNA, 120 bp, synthetic construct; identical to SEQ ID NO: 15658
  source 1..120: mol_type = other DNA

SEQ ID NO: 109685 - DNA, 120 bp, synthetic construct
  source 1..120: mol_type = other DNA
gtgtcctcactttttaatgattgccattctaactggtgtgagatggtatctcattgtggttttgatttgcatttctctgatggccagtgatgatgagcattttttcatgtgttttttggc

SEQ ID NO: 109686 - DNA, 120 bp, synthetic construct
  source 1..120: mol_type = other DNA
ggcgatgggggctcttttttggttccatctgaactttaaagtagttttttccaattctgtgaagaaagtcattggtagcttgatggggatggcattgaatctataaattaccttgggcag

SEQ ID NO: 109687 - DNA, 120 bp, synthetic construct
  source 1..120: mol_type = other DNA
tggcatcaatgttcatcaaggatattggtctaaaattttcttttttggttgtgtctctgcccagctttggtgtcagaatgatgctggcctcataaaatgagttagggaggattccctctt

SEQ ID NO: 109688 - DNA, 120 bp, synthetic construct
  source 1..120: mol_type = other DNA
gaggagagctttacttccaagtatgtggtcaattttggaataggtgtggtgtggtgctgaaaaaaacgtatattctgttgatttggggtggagagttctgtagatgtctattaggtccgc

SEQ ID NO: 109689 - DNA, 120 bp, synthetic construct
  source 1..120: mol_type = other DNA
ttacgcctaactactctttgagtccatatggttctaagaacttcagtcccaaatctttttcctcacagaccactgcagtaatcaaagatggatggttgcaagtagtttgaactagggcag

SEQ ID NO: 109690 - DNA, 120 bp, synthetic construct; identical to SEQ ID NO: 15659
  source 1..120: mol_type = other DNA

SEQ ID NO: 109691 - DNA, 120 bp, synthetic construct
  source 1..120: mol_type = other DNA
agaaatgaccacacaccaaagggcttaaaaaatagtttattcccagccaaacactgcatgttctcactcataggtggaaattgaacaatgagaacgcttggacacagggcagggaacatc

SEQ ID NO: 109692 - DNA, 120 bp, synthetic construct
  source 1..120: mol_type = other DNA
ctccacctgtcccctcacctgtgccctcctcacttgtcagcccagaagctagatgccagctaatcgcaattttttactgttggtggccactcaggcttcgacaaatgtccttgtcacagc

SEQ ID NO: 109693 - DNA, 120 bp, synthetic construct
  source 1..120: mol_type = other DNA
tgtccttgcgatagtttactgagaatgatgatttccaatttcatccatgtccctacaaaggacatgaactcatcattttttatggctgtacagtattccatggtgtatatgtgccacatt

SEQ ID NO: 109694 - DNA, 120 bp, synthetic construct
  source 1..120: mol_type = other DNA
agtatagtttgaagtcaggtagtgtgatgcctccagctttgttcttttggcttaggattgacttggtgatgcgggctcttttttggttctatatgaactttaaagtagttttttccaatt

SEQ ID NO: 109695 - DNA, 120 bp, synthetic construct
  source 1..120: mol_type = other DNA
tgaataaataaattgaaagagacagttttaattttaaaaatgtcagctggttacggtggctcatgcctgtaatcccagcactttgggtggatcacctgaggtgtaatcccagcaccgaga

SEQ ID NO: 109696 - DNA, 120 bp, synthetic construct; identical to SEQ ID NO: 31590
  source 1..120: mol_type = other DNA

SEQ ID NO: 109697 - DNA, 120 bp, synthetic construct
  source 1..120: mol_type = other DNA
tacatggaaacaaaacaacctgctcctgaatgactactgggtacataactaaatgaaggcagaaataaagatgttctttgaaaccaacgagaacaaagacacaacataccagaatctctg

SEQ ID NO: 109698 - DNA, 120 bp, synthetic construct
  source 1..120: mol_type = other DNA
tgtatctcaaaataataagagctatctctgacaaacccacagccaatatcatactgaatgggcaaaaactggaagcattccctttgaaaactggcacaagacagggatgccctctctcac

SEQ ID NO: 109699 - DNA, 120 bp, synthetic construct
  source 1..120: mol_type = other DNA
ccttatacaaaagttaattcaagatggattaaagacttatatgttagacctaaaaccataaaaaccctagaagaaaacctaggcattaccattcaggacataggcatgggcaaggacttc

SEQ ID NO: 109700 - DNA, 120 bp, synthetic construct
  source 1..120: mol_type = other DNA
ggtggaaattgaacaatgagaacacatggacacagaaaggggaacatcacactctggggactgttgtggggtggggggaggggggagggatagctttaggagatatacctaatgctaaat

SEQ ID NO: 109701 - DNA, 120 bp, synthetic construct; identical to SEQ ID NO: 26921
  source 1..120: mol_type = other DNA

SEQ ID NO: 109702 - DNA, 120 bp, synthetic construct
  source 1..120: mol_type = other DNA
gagggttgtgaagaacctcttcaaggagaactacaaaccactgctcaacgaaataaaagaggatacaaacaaatggaagaacattccatgctcatgggtaggaagaatcaatatcgtgaa

SEQ ID NO: 109703 - DNA, 120 bp, synthetic construct; identical to SEQ ID NO: 26909
  source 1..120: mol_type = other DNA

SEQ ID NO: 109704 - DNA, 120 bp, synthetic construct; identical to SEQ ID NO: 11104
  source 1..120: mol_type = other DNA

SEQ ID NO: 109705 - DNA, 120 bp, synthetic construct; identical to SEQ ID NO: 17904
  source 1..120: mol_type = other DNA

SEQ ID NO: 109706 - DNA, 120 bp, synthetic construct; identical to SEQ ID NO: 17905
  source 1..120: mol_type = other DNA

SEQ ID NO: 109707 - DNA, 120 bp, synthetic construct
  source 1..120: mol_type = other DNA
atcaagctaccagtgactttattcacagaactggaaaaaactactttaaacttcatatagaaccaagcctgcatagccaagacaatcctaagcaaaaagaacaaagctggaggcatcaag

SEQ ID NO: 109708 - DNA, 120 bp, synthetic construct
  source 1..120: mol_type = other DNA
cttttttttttttttttttttgagatcgagaccatcctggccaacatggtgaaaccccgtctctacgaaaaatacaaaaaattagtcaggcgtggtggcaggcacctgtagtcctagcta

SEQ ID NO: 109709 - DNA, 120 bp, synthetic construct; identical to SEQ ID NO: 17906
  source 1..120: mol_type = other DNA

SEQ ID NO: 109710 - DNA, 120 bp, synthetic construct; identical to SEQ ID NO: 17907
  source 1..120: mol_type = other DNA

SEQ ID NO: 109711 - DNA, 120 bp, synthetic construct; identical to SEQ ID NO: 11061
  source 1..120: mol_type = other DNA

SEQ ID NO: 109712 - DNA, 120 bp, synthetic construct; identical to SEQ ID NO: 25331
  source 1..120: mol_type = other DNA

SEQ ID NO: 109713 - DNA, 120 bp, synthetic construct; identical to SEQ ID NO: 25332
  source 1..120: mol_type = other DNA

SEQ ID NO: 109714 - DNA, 120 bp, synthetic construct; identical to SEQ ID NO: 25333
  source 1..120: mol_type = other DNA

SEQ ID NO: 109715 - DNA, 120 bp, synthetic construct
  source 1..120: mol_type = other DNA
acctcgtgatccgccggcctcggcctcccaaagtgctgggattacaggcatgagccactgtgcccagcctatatgtatatatatatatatatatatatatatatattttttttttttttt

SEQ ID NO: 109716 - DNA, 120 bp, synthetic construct
  source 1..120: mol_type = other DNA
tcctgagtagctgggactgtaggtgtgcgccagcatgcccagctaatttttgtatttttttaaattttagtagagacagtgtttcaccctgttggccaggatagtctcgatctcttgacc

SEQ ID NO: 109717 - DNA, 120 bp, synthetic construct
  source 1..120: mol_type = other DNA
atgggagtgaagaacattctaggccgggagaatataaatgccctggacagaggccctgaagtcaggaaaggcatatgcactgggggaatcacaagaagctacaggtgtggctgcaatgtg

SEQ ID NO: 109718 - DNA, 120 bp, synthetic construct
  source 1..120: mol_type = other DNA
gattgtgtacacattatgggccaagagctatgctagatcctgggagaaatacaaagatgaaccagattccatttctgtctcagggagcctaaaattcagtcatgcacatgcttagattgt

SEQ ID NO: 109719 - DNA, 120 bp, synthetic construct; identical to SEQ ID NO: 27173
  source 1..120: mol_type = other DNA

SEQ ID NO: 109720 - DNA, 120 bp, synthetic construct; identical to SEQ ID NO: 27174
  source 1..120: mol_type = other DNA

SEQ ID NO: 109721 - DNA, 120 bp, synthetic construct; identical to SEQ ID NO: 27175
  source 1..120: mol_type = other DNA

SEQ ID NO: 109722 - DNA, 120 bp, synthetic construct; identical to SEQ ID NO: 27176
  source 1..120: mol_type = other DNA

SEQ ID NO: 109723 - DNA, 120 bp, synthetic construct; identical to SEQ ID NO: 27177
  source 1..120: mol_type = other DNA

SEQ ID NO: 109724 - DNA, 120 bp, synthetic construct; identical to SEQ ID NO: 27178
  source 1..120: mol_type = other DNA

SEQ ID NO: 109725 - DNA, 120 bp, synthetic construct; identical to SEQ ID NO: 27179
  source 1..120: mol_type = other DNA

SEQ ID NO: 109726 - DNA, 120 bp, synthetic construct; identical to SEQ ID NO: 27180
  source 1..120: mol_type = other DNA

SEQ ID NO: 109727 - DNA, 120 bp, synthetic construct; identical to SEQ ID NO: 27181
  source 1..120: mol_type = other DNA

SEQ ID NO: 109728 - DNA, 120 bp, synthetic construct
  source 1..120: mol_type = other DNA
aggccatccctggataaaccaacatgttccagagcaggagcaagtagaaagatcaagattcatctgttctcattgttcagctctcacttgtaagtgagaacatgcagtgtttggttttct

SEQ ID NO: 109729 - DNA, 120 bp, synthetic construct; identical to SEQ ID NO: 35418
  source 1..120: mol_type = other DNA

SEQ ID NO: 109730 - DNA, 120 bp, synthetic construct
  source 1..120: mol_type = other DNA
cactcaaccggccccaaaccaacaggacccaaactaaaaataataagctacctgccccctcggctcgcgtgcgcgcgcgcgagatctctctctctctctctgtctctctctcacacacac

SEQ ID NO: 109731 - DNA, 120 bp, synthetic construct; identical to SEQ ID NO: 11129
  source 1..120: mol_type = other DNA

SEQ ID NO: 109732 - DNA, 120 bp, synthetic construct; identical to SEQ ID NO: 11130
  source 1..120: mol_type = other DNA

SEQ ID NO: 109733 - DNA, 120 bp, synthetic construct; identical to SEQ ID NO: 31902
  source 1..120: mol_type = other DNA

SEQ ID NO: 109734 - DNA, 120 bp, synthetic construct
  source 1..120: mol_type = other DNA
ctcaagtaatccacccacctaggcctcccaaagtgctgggattacatgcatgagccactgcgcttgtccaagaaaggtaattttgtaattagtatgggatgagttagtttgttctcttta

SEQ ID NO: 109735 - DNA, 120 bp, synthetic construct; identical to SEQ ID NO: 23309
  source 1..120: mol_type = other DNA

SEQ ID NO: 109736 - DNA, 120 bp, synthetic construct; identical to SEQ ID NO: 23310
  source 1..120: mol_type = other DNA

SEQ ID NO: 109737 - DNA, 120 bp, synthetic construct
  source 1..120: mol_type = other DNA
ccggccgccccgtctgagaagtgaggagcccctccgcccagcaaccaccccgtccgggaagtaaggagcgtctccgcccagcagccgccccgtctgggagggaggtggggggcagcccct

SEQ ID NO: 109738 - DNA, 120 bp, synthetic construct; identical to SEQ ID NO: 18992
  source 1..120: mol_type = other DNA

SEQ ID NO: 109739 - DNA, 120 bp, synthetic construct
  source 1..120: mol_type = other DNA
tttcattttttcccgattattttcaatctgcagttggttgaatctgcagatgctgaactcatggttatgaagggaccatacacatacacatttgtacatatatgtgcacactctcatata

SEQ ID NO: 109740 - DNA, 120 bp, synthetic construct
  source 1..120: mol_type = other DNA
taccaagaattcagaatatgtaagtgcttaaatttagtttaatttgtggggggtcgggggaagagaagggggggttccagtataaaaggtgcaacagttttggcttctagcccaacagtt

SEQ ID NO: 109741 - DNA, 120 bp, synthetic construct
  source 1..120: mol_type = other DNA
gatctgcgcatcaaagctagcgaggcgagcgaagtttggccgggggttggactttccttcccggaggcggcacccaaacagctaccccgtgcggaaacccaaacttctgctgccacttgg

SEQ ID NO: 109742 - DNA, 120 bp, synthetic construct
  source 1..120: mol_type = other DNA
ggaatgcggtccgtacagctggggctgtgggtgaggagcgggagcctagtgattgacagattccttcttcgttctttctttgccttcgggattagcatttttatcgagtatttttagact

SEQ ID NO: 109743 - DNA, 120 bp, synthetic construct
  source 1..120: mol_type = other DNA
aataaatgccacatatggtgggagtgcggacttaaattttttttaactgggtggatccagtcaataaagggggagggaaggcggtgtgctgtctggggaagtctctgggcgtgtgatcgg

SEQ ID NO: 109744 - DNA, 120 bp, synthetic construct
  source 1..120: mol_type = other DNA
cctgtggccttctcgtgactttgttaggactgaggcatcttctgcctgcctggataggactgaatacaaaagtagattttttttttcatcttttttttcagttagggaaacccagttgct

SEQ ID NO: 109745 - DNA, 120 bp, synthetic construct
  source 1..120: mol_type = other DNA
tgccagtttataagaatggaatcaaagcatttgccgctgaatgagagttggtgtgtgagcgttatatgaggaataaggagctcggcacacttaaaacttagttttctggtagacactggt

SEQ ID NO: 109746 - DNA, 120 bp, synthetic construct
  source 1..120: mol_type = other DNA
gagaagctcccagcctgtgagaagcttacacatcagtaagggaaacatgaatagggcattatttgagtatctaactgctatctctttctcattcccagctaccagtagaaatatgagatc

SEQ ID NO: 109747 - DNA, 120 bp, synthetic construct
  source 1..120: mol_type = other DNA
gtaagttagtactgcaaactgaaattcaggtttccttggtgggaacagggactttagatgtatcagctcagaatatgacagggagtgttaataaaaagtggacaacttggctgggcacgg

SEQ ID NO: 109748 - DNA, 120 bp, synthetic construct
  source 1..120: mol_type = other DNA
gcgtgagctccttaatgaaataaataagaccaagcagggcttgcttcaaattggaatcagctttcattcctgttaaccttattctcccacctttattcacctctccttcagcttcctgta

SEQ ID NO: 109749 - DNA, 120 bp, synthetic construct
  source 1..120: mol_type = other DNA
ctatagcatactatccactgttggttatctaagacccttcctataaacagcagcctgccacagtggcaactgctgtagaatgttttggcagagactcagtttaaaatgaaaacacagtag

SEQ ID NO: 109750 - DNA, 120 bp, synthetic construct
  source 1..120: mol_type = other DNA
tccctcttccttgcctcttccttactctgtgagtctaaatcagtgaaatttaactacaaaggaatatgaaaataatgctaggatgaagatgtggaggctgtgcctcttgagatgcagtga

SEQ ID NO: 109751 - DNA, 120 bp, synthetic construct
  source 1..120: mol_type = other DNA
gctaagcccaaatgtggagtaatgaatccagaaaggactttttgagtagttacaagtggctgaaagcaggcactggtgatggaaattgggtttttccttttgcttcaaatcttcctggtt

SEQ ID NO: 109752 - DNA, 120 bp, synthetic construct
  source 1..120: mol_type = other DNA
tcacagagcattctcctttggagagtctcagttgatataggaaaaggatctacttcaacacacacagagaacatacagacatgccacttgttgatgtaaggcttggcaggctattgaaag

SEQ ID NO: 109753 - DNA, 120 bp, synthetic construct
  source 1..120: mol_type = other DNA
ctaggggtgggctgagatcttgggctgggtctctctgagcttccacattccattgtgaaaccaagaggtcagggaatcctaaactcaaacctggacttattaaagtattggtcaaggcag

SEQ ID NO: 109754 - DNA, 120 bp, synthetic construct
  source 1..120: mol_type = other DNA
caaacttcgtactttgtgtttggaccttgctctgtaagtgtccaggagattttaaagcaggggagtggcacggtgaaagccaccactctatcgtttcttgtttcatttcctcctcttacc

SEQ ID NO: 109755 - DNA, 120 bp, synthetic construct
  source 1..120: mol_type = other DNA
tccccaacttactgcggtggtgactgtggacatgttgtttaacttatttgagcttccttttcctcatcagtaaaatgggaaaaacaatgacctccctcaaggagggatgttattgaagtt

SEQ ID NO: 109756 - DNA, 120 bp, synthetic construct
  source 1..120: mol_type = other DNA
ctggagctggatttgccactgaagctctacaccttctagaatctagggtgactacataatttatcaaacaaaccaggatgtttccaagagtgaaaaggggcagcattattaattatggcc

SEQ ID NO: 109757 - DNA, 120 bp, synthetic construct
  source 1..120: mol_type = other DNA
cagagaacatgtaagggctgtgctgtttcactcctgctttgggctctcagggtttgtttccgcgatcatccaaacctcatcctccttctcttgccccagataatttattggaagtctgga

SEQ ID NO: 109758 - DNA, 120 bp, synthetic construct
  source 1..120: mol_type = other DNA
acatgcagtcaatgacagaaataatggaccctcagaagcctctcgaggtcaagggcccaggctattcctttgactcatcagggtgattagtatggaggtaggtgcttagtaaattttatt

SEQ ID NO: 109759 - DNA, 120 bp, synthetic construct
  source 1..120: mol_type = other DNA
tttcattccaattcagagaaaacagagcctgtcccaaggcctcgtgttttgttttcctattgatctaggagctgggataacttggaaccccagggaacatctcagagttaattagttttt

SEQ ID NO: 109760 - DNA, 120 bp, synthetic construct
  source 1..120: mol_type = other DNA
catgattactggagcccccaggttctaaaaagtgttgaattagcaagtgaacaaataaaatgagacccaaagaaactgtgatcttagcatcctgttttctgggtgaggttgagggtcctt

SEQ ID NO: 109761 - DNA, 120 bp, synthetic construct
  source 1..120: mol_type = other DNA
tcaaacctgggttagactctgtgctaatggcttttttcatgaacctcagacagccggaaagtatattctttgaggattatgatcgactaggatgctcgggaatctttaaagagaagcact

SEQ ID NO: 109762 - DNA, 120 bp, synthetic construct
  source 1..120: mol_type = other DNA
tgccctgaggtttggagttccagttccctcctatctctgggtcagtggtttctcaacatctttgaagtagtgaaaccatctgtagttggttatttctgctcagaaactcacagtacaaag

SEQ ID NO: 109763 - DNA, 120 bp, synthetic construct
  source 1..120: mol_type = other DNA
acagagcatggagagtggaatgggacacatggatcaaggaacgtggacctgagcaagcaaaagcaagtcactcgggtcccactatcacattgcatatcttctcctttttttttttttttt

SEQ ID NO: 109764 - DNA, 120 bp, synthetic construct
  source 1..120: mol_type = other DNA
gtttccagtaaacatctcctccctttttactttaccttttaattttgtgtttatggtctctgtgctttgaaattgtttttgctgtgatgccagccctgcctgaaatgggtggagcaagcc

SEQ ID NO: 109765 - DNA, 120 bp, synthetic construct
  source 1..120: mol_type = other DNA
tgtaatcccagcactttgggagccgaggtgggcgaatcacgaggtcaggagttcgagaccagcccgaccaatatggtgaaaccctgcctctactaaaaatacaaaaatgagccaggtgtg

SEQ ID NO: 109766 - DNA, 120 bp, synthetic construct
  source 1..120: mol_type = other DNA
aaaagaatgaattcttttccaactgatgtcactgggaaagggggacaccactactttcctgcgtactgcactttacagtttacaaagcactttcccacacgtcatttcgtttcatctccc

SEQ ID NO: 109767 - DNA, 120 bp, synthetic construct
  source 1..120: mol_type = other DNA
cccatctccctgttttctggggatttaaatcagctttgacttgggtctgaaagtaacccgtgacagcagtaagcctctcgatctgttgtttgcagtgtttcagctaaaatattataaaca

SEQ ID NO: 109768 - DNA, 120 bp, synthetic construct
  source 1..120: mol_type = other DNA
ctagaaggtaatagccttctagaattgtccatttgcataagcatttttatgcttattgctgtaatcagtgtgtcagtcaaacgggaaggaggaactacatcaggtatttagcacaaaggg

SEQ ID NO: 109769 - DNA, 120 bp, synthetic construct
  source 1..120: mol_type = other DNA
ttcttctgttaaacagctaaaaatatcaaatcatggggttgctgtgacggttaaatgtaataacaggcacgatgttccatatatgttgggtcttctggagctttggggaaggaggtgtgg

SEQ ID NO: 109770 - DNA, 120 bp, synthetic construct
  source 1..120: mol_type = other DNA
tggttcctatcttcttgcctctggcagcacctaaaagaagcctcttgggccaatgagaggatggactgtcccccacctgcagagttctgtgaagtggtgcggacgtctttgttgatctca

SEQ ID NO: 109771 - DNA, 120 bp, synthetic construct
  source 1..120: mol_type = other DNA
ctttaaccctttaatcagacccttccagggtgctcctgacttgatgttccagagcgtttggagtcaagagttgcactcttttttcttgcattaaatgcacttgagttttaacccagtctc

SEQ ID NO: 109772 - DNA, 120 bp, synthetic construct
  source 1..120: mol_type = other DNA
cttgggctcccaaagtgctgggattacaggtgtaaaccactgcatccggcccatcttgaaattcttaataattttctctttgacctagtgttttggagcatgagcatggatagaggagat

SEQ ID NO: 109773 - DNA, 120 bp, synthetic construct
  source 1..120: mol_type = other DNA
tttagtaccatgattgatactttttttttttttgccttttgcacaaagggttccatattttcattttgcactgggccccacaaattatgcagccaaccctgactggcatcctggggctgg

SEQ ID NO: 109774 - DNA, 120 bp, synthetic construct
  source 1..120: mol_type = other DNA
actagttgtttgatgttgggcaggttgttcaagcctcctggagccttggtttacccatctataaaatgggtataatggtaattatcttatagcatggtcatgagcgtgaaatgagagcag

SEQ ID NO: 109775 - DNA, 120 bp, synthetic construct
  source 1..120: mol_type = other DNA
gcaaaccacagagtacatttgaggcccagatctgcttatttcgagggtggggccgcgtttttctcctgccacagtgagctaattaaagaaaacaagcttcgggagttgggagagaactgt

SEQ ID NO: 109776 - DNA, 120 bp, synthetic construct
  source 1..120: mol_type = other DNA
tacattggagaactgggggaatatgtaatacttgtgcagaaatgttttgattcatgtactcagaagatgggatctggatgacacctccagcctattgattcccaagtaaggtgtgatgac

SEQ ID NO: 109777 - DNA, 120 bp, synthetic construct
  source 1..120: mol_type = other DNA
ccatgtcactgacttagtttctgataggtttgtattgggtaggaaagaaaggaatgggacatttacgtgtacactgaggcagaagaaagaatgggactttccaatccaggctctaccttt

SEQ ID NO: 109778 - DNA, 120 bp, synthetic construct
  source 1..120: mol_type = other DNA
gttatactctcagtaactgaggtgagatccgtaggcaaggaatgacaagatcgagattgattagctacatgaccttaggaaagtgacctaaaggttgttcacattcagagtcctcatctt

SEQ ID NO: 109779 - DNA, 120 bp, synthetic construct
  source 1..120: mol_type = other DNA
ttgaatggactgggaagatctggatataccatgtttctgtaggcatgatacgtggtcccttagcttggtatttaaagttctttggaagtgaccgctttctggatttacctctgtgcagcc

SEQ ID NO: 109780 - DNA, 120 bp, synthetic construct
  source 1..120: mol_type = other DNA
gttttcctaagcacatagcacaacaaggagctggaacagagctgcaacaatgaggagggtttcctccaactgtcagtgcttctggatccaccgtttcggctttgacattaccgtgagtga

SEQ ID NO: 109781 - DNA, 120 bp, synthetic construct
  source 1..120: mol_type = other DNA
ctagataaatgtataaactgcattgcaggaatgaagccgtttccattaagaactggggtctatgtcctgggatccagttcttctcccccttttagtactgaaagctgcttcccatctgaa

SEQ ID NO: 109782 - DNA, 120 bp, synthetic construct
  source 1..120: mol_type = other DNA
tgtatataccagtgataaatattagtcactctggcagcagaatgagtttcctgtgctgcatttttggcacttccagaaaagggaaagcctttctctctgacagggcacaggagggagaaa

SEQ ID NO: 109783 - DNA, 120 bp, synthetic construct
  source 1..120: mol_type = other DNA
cttcctggcttcactctctggcatcaaaacttatcagtcctacatctcagtcttttgcaaggtgacacttatctgattacctaattcacacgaaggtgttaatggtggtaatggcatagt

SEQ ID NO: 109784 - DNA, 120 bp, synthetic construct
  source 1..120: mol_type = other DNA
ttccatagggatatggcctgatagaggaggagccatttgattttgactattgttgaaattgagtggggaattttgggtttgttttaggttttggaagggaggattatctgaggcttgagg

SEQ ID NO: 109785 - DNA, 120 bp, synthetic construct
  source 1..120: mol_type = other DNA
ggactctgttctctgcactgggctcgttctaaaacggagcatttggtccttgcagcctgccttgtggtttatgacttagtagattgaaaatgacagttgtgctctattttcatttggaaa

SEQ ID NO: 109786 - DNA, 120 bp, synthetic construct
  source 1..120: mol_type = other DNA
acacaaagaaggaaaagcgagagggggaaacacacttaatggacaagggatgagtaaaacccaatggactgagaaaaccccagagctgaacttcacatgaccccgcgtgctgcctgcagt

SEQ ID NO: 109787 - DNA, 120 bp, synthetic construct
  source 1..120: mol_type = other DNA
ctacgtgacagtattgacttcatagtgttgttgtgaggcttgaagaagatacaagagggaagaggagcgttccttgccgtgcagatgcaaatgctcattgttacttgttctgcctctctg

SEQ ID NO: 109788 - DNA, 120 bp, synthetic construct
  source 1..120: mol_type = other DNA
gttgtaccattttacagtctcaccaccaatgtatgagggttccagttctccccatccttgtcaacacttgttattgtctgttttattttagccattctagtggatgtgaggtggtatctc

SEQ ID NO: 109789 - DNA, 120 bp, synthetic construct
  source 1..120: mol_type = other DNA
gatgataggcgtgagccaccacacccggctagccatttctaattgggttgtctttctactgttgaattataagagttccttatatattctggatataaattcctttatcagatacatggt

SEQ ID NO: 109790 - DNA, 120 bp, synthetic construct
  source 1..120: mol_type = other DNA
ccacccatgtgggcctcccaaagtgctgggattacaggcataagccactgcgcccggccttaaaatatatttttcaaaatctacattgttcaaaaaaagaatctgtggtaactctcagaa

SEQ ID NO: 109791 - DNA, 120 bp, synthetic construct
  source 1..120: mol_type = other DNA
tgacatgcctctgagactgcctgcccgatggaaatatccagcatgtatgagggaggtcctggccaaaactgaacagcttctcatggaattgggcccctcatcacctacggttatgtgtgg

SEQ ID NO: 109792 - DNA, 120 bp, synthetic construct
  source 1..120: mol_type = other DNA
aagttgcactgacaatctttgaattcctggaactcatgccatgagcacttccaggagcaccttagtgcttcattacaaagatgatgagacgtaggaaagtctttttttttttcccacgga

SEQ ID NO: 109793 - DNA, 120 bp, synthetic construct
  source 1..120: mol_type = other DNA
agatgtttaacaacagagagaaatccacccgaaggactttttacatctctctaacatctcctgttcagtttatctcagctggcctttgctgagcaccagttagttgccttgtgcatcctt

SEQ ID NO: 109794 - DNA, 120 bp, synthetic construct
  source 1..120: mol_type = other DNA
tcaggaggtgagaaagcagataaatgcaatgtttatcttgaaagaagttgtcaactacttggaaatccccaagcttacttcctccaggaagccattctggactacttcacccagttctca

SEQ ID NO: 109795 - DNA, 120 bp, synthetic construct
  source 1..120: mol_type = other DNA
taatgataacatagaagcacatagtactaagcacatgtaatgagaatgtacagaactctctagtaagagtctgaaatttggccgggtgcagtggctcatgcctgtaatcccagcactttg

SEQ ID NO: 109796 - DNA, 120 bp, synthetic construct
  source 1..120: mol_type = other DNA
gtaaggcttcacagtctctcaatgtgatgtgggtgtcctgagtcgtgaacatcccattgtgcaggataaaatgctggtttctgagctgtctttcaagacacaacccaaatgctgtctttg

SEQ ID NO: 109797 - DNA, 120 bp, synthetic construct
  source 1..120: mol_type = other DNA
gaaataacataggttggatttttctagtaacttcaaggggtaaagactttgaattttttttttggagacagagtctcgctttgtcacccaagctggagtgcagtggtgcgatcacagctc

SEQ ID NO: 109798 - DNA, 120 bp, synthetic construct
  source 1..120: mol_type = other DNA
gtgggaatctcaccctggccctaccaggtaagaaattgggcctgggaaattgggaagggaatttttcaagcttcatggctgctccaggacttgaactaagactttcctttagagcaagct

SEQ ID NO: 109799 - DNA, 120 bp, synthetic construct
  source 1..120: mol_type = other DNA
aacaaaacagaccttcagccatttagtctatacaccgagagaatggtttctacagtatgcctgatttctctgggtctttctaacacatccatgtatgtgcttgtcagcttctagtgcctc

SEQ ID NO: 109800 - DNA, 120 bp, synthetic construct
  source 1..120: mol_type = other DNA
gagctggctcttaaacttgttttcaagccaggacttacctgactttcttaggaaagtaatcactccatagacaaggataggtttttttcacagagcaatgatgttccctgtggtccctat

SEQ ID NO: 109801 - DNA, 120 bp, synthetic construct
  source 1..120: mol_type = other DNA
ggagtttgcagtgagccaagattgtgccatcgcactccagcttgggcaacaagagcaaaactccgtctcaaaaaaaaggaaaaaagaattctaacatgtttgagattgactgcaattcct

SEQ ID NO: 109802 - DNA, 120 bp, synthetic construct
  source 1..120: mol_type = other DNA
cagccatccacctctgcagtttacacagcttgttgatctccacagtgagaattaacttcacaacctgggtccaagaggctggaggattgtcagtctttagaaaaaaaaaaatctattatc

SEQ ID NO: 109803 - DNA, 120 bp, synthetic construct
  source 1..120: mol_type = other DNA
tgtgacctggcctcaggaccactcttgtagcccaccgtgggtggatgaagccggtgggaacagaatgataggagttaaccactttttaggcgttattgggccttttcactttaatagctt

SEQ ID NO: 109804 - DNA, 120 bp, synthetic construct
  source 1..120: mol_type = other DNA
agggaattgcgtagtttttttcttttcttttctgggttcatcttaccagcagtcgtgtttgagaatgtgcacagctcaccttcgttcagccctttacagtttacctccatagccttcttt

SEQ ID NO: 109805 - DNA, 120 bp, synthetic construct
  source 1..120: mol_type = other DNA
tatgttttggcgtgagcagtagggtcatcgtggtggtcagtttttccactgccatcaaatgggatccatttagctctcagacagacaaggtatagggctggactctgtgccgtgggctaa

SEQ ID NO: 109806 - DNA, 120 bp, synthetic construct
  source 1..120: mol_type = other DNA
aaaatagaatccaccttccctatcactcaccccttttaaaatgtgactaactctgagctaaccaagccttggccagacgtggatatggttatgcacggactccgttttgtggtttgtcat

SEQ ID NO: 109807 - DNA, 120 bp, synthetic construct
  source 1..120: mol_type = other DNA
agccttctaaaagtattttggtgtgcaccattagcactgtgtcttaaaggcgatgtgcaccttgagcacagagtgttgagtgcgtggtggatggatgtcatttgcgttttacagatgcgg

SEQ ID NO: 109808 - DNA, 120 bp, synthetic construct
  source 1..120: mol_type = other DNA
cgagctatattacattcttctttatcatactgagtctgaagttgatgtgtcctttatacttgtggcacatctcagtttgcactgtccacatttcaagtgctgccatgtggctggtggcca

SEQ ID NO: 109809 - DNA, 120 bp, synthetic construct
  source 1..120: mol_type = other DNA
aagtacttctcaagccttcaagcaactgagactttctgctcggggaatccccaaggatttggggaggctggaattgagcaagctcttgaatgcatgcatggattcatgcagtcactcact

SEQ ID NO: 109810 - DNA, 120 bp, synthetic construct
  source 1..120: mol_type = other DNA
gtgcttcttcaggacactacctggctaagaacactgcattaacaggagatagagatccagtgtgtgtgaaccttgtgaaaacatctctgtctgttcctccaatctcccccttctgtctta

SEQ ID NO: 109811 - DNA, 120 bp, synthetic construct
  source 1..120: mol_type = other DNA
actccaaggcagaccattgcattttctttcattctgataaactccttgagttgaacagaaatcagactccccgtaacttctgctccacagtttaaaacagcccaccatgaagccttatgt

SEQ ID NO: 109812 - DNA, 120 bp, synthetic construct
  source 1..120: mol_type = other DNA
gagagtagtgccgactcaaatattccccagaagagagcactttttcaacagtctgaaaagtggcagggacctttggaatgatctgttttaaccttttcattttctgaatgaggcaactga

SEQ ID NO: 109813 - DNA, 120 bp, synthetic construct
  source 1..120: mol_type = other DNA
gttgggaaattactaaaggcgcgactctggctctcaaagactctgaagtccaggatcgagaagaactgtgtttacacggagttgtcaaggatcattctgccaatgataacctattatcgt

SEQ ID NO: 109814 - DNA, 120 bp, synthetic construct
  source 1..120: mol_type = other DNA
gaagcattgccctgccttggcctgttggtggtggggtatgtgtgtgtgttttcatcgtattataaaaacgtgaaacatttgaattacgggcaagtggtattctaccagatttaataaacg

SEQ ID NO: 109815 - DNA, 120 bp, synthetic construct
  source 1..120: mol_type = other DNA
gattataggcatgagccactgcacccggcccagagtcagttattcttagagcaggtgttttggcttttgtctttaatgcttccctccccactttaacataactgtaatatataattattg

SEQ ID NO: 109816 - DNA, 120 bp, synthetic construct
  source 1..120: mol_type = other DNA
ttttcaacaaatgtttttggtgggtaattttacctttgttgatcaccagctttgtttggggtgcatcatttctctcaagccgaattttctctggtaatctggccagaaggcccatagggt

SEQ ID NO: 109817 - DNA, 120 bp, synthetic construct
  source 1..120: mol_type = other DNA
catgccaggcatcataatttgtgtttgtctagatcaataagagcagctttaaccaaaaagtccagctgagaatttataaatacccctcacctcctcccctccctggaagatgtgaaaaca

SEQ ID NO: 109818 - DNA, 120 bp, synthetic construct
  source 1..120: mol_type = other DNA
ccctcctaagccaggtacgattccagctatgttaaaaggccctgggaaatgttaactgatcaaaaatgctgggtaagtagaattattatttcaccctgaccaacttcagtcagattagca

SEQ ID NO: 109819 - DNA, 120 bp, synthetic construct
  source 1..120: mol_type = other DNA
tattaataatgacaccaggtcaacacatgcgaacccaactgtcctgaacaaacgggggtttgtggttgcgctacaaaacccaggcttcagtctcttcgagttctgttttgatttggaagg

SEQ ID NO: 109820 - DNA, 120 bp, synthetic construct
  source 1..120: mol_type = other DNA
caaaaatcacagaacagcctccattcagctccatacatggcagaactttctaacagagctctgtaccttgtggttgttggactagatgatctgtgagctgtttttcattacctggaaagt

SEQ ID NO: 109821 - DNA, 120 bp, synthetic construct
  source 1..120: mol_type = other DNA
cctggtaacggcagaggctgctggcatcttaagacattcaaaaaccactgtgctaagtaacagtggagatatattgatctcaacatttcaaggagaaaagagcttgtgaaataggcttgt

SEQ ID NO: 109822 - DNA, 120 bp, synthetic construct
  source 1..120: mol_type = other DNA
gcctagggagtttttttgtttttgttttttgagatggagtctcgcactgtcgcctgggctagagtgcatagtgtgatctcggctcctgccgccacacacagatcataatgtgatctgcaa

SEQ ID NO: 109823 - DNA, 120 bp, synthetic construct
  source 1..120: mol_type = other DNA
ttaaatagtgatttaactatataaatatagtttgctaccatgtttgctatgtgccaggcttgatggtgcttgtagggcacagaagaggttcctgtcctagccagtggttgatgtgttcag

SEQ ID NO: 109824 - DNA, 120 bp, synthetic construct
  source 1..120: mol_type = other DNA
tgacatcttacagtgtcctgaccttgcacaagcttgttccagtaataacgttaaaattcaggagtggatgttcggcaacatcattgggcaggattttctggttcgtgaatgaaaggttat

SEQ ID NO: 109825 - DNA, 120 bp, synthetic construct
  source 1..120: mol_type = other DNA
cacttatatggaatctcaggtcatacagagacattgtctctgtgttttatattttcctttgaggacatctccatttaagtagctgatgcctgagcggggagagaagaatgagccttttcc

SEQ ID NO: 109826 - DNA, 120 bp, synthetic construct
  source 1..120: mol_type = other DNA
ttcctggagtagaaaaaaaacaacataggagctcactcagaaggatccctgggtaaatgccatcctttcctgggccccagtttcctcacgtgttcagggggaaaagaaggtggtggtgaa

SEQ ID NO: 109827 - DNA, 120 bp, synthetic construct
  source 1..120: mol_type = other DNA
caaatatttgttgagcaagtttattgcaaatcgctgtatttaatgtctgcctacaaccttagccacagatgactctctctccctggtatggcaagtgggcagagcttcctcattcaaaaa

SEQ ID NO: 109828 - DNA, 120 bp, synthetic construct
  source 1..120: mol_type = other DNA
tggaaccctttgcttgttcctgattgtagctgttttagggatgcagctttcagacaagggccacttagttgatgaggccggcttaatcgaggagggctgttgccaccctgacattgttaa

SEQ ID NO: 109829 - DNA, 120 bp, synthetic construct
  source 1..120: mol_type = other DNA
acccgttgcatgttatgcagcacttgtgacattgttttatctctctagccggtgactcataattaaggaagtcaaaactgtgcaattaacacaaaacctcctcatttgccctcttcacct

SEQ ID NO: 109830 - DNA, 120 bp, synthetic construct
  source 1..120: mol_type = other DNA
gccaggccttatatctcagtcttaagacattcatatattagtggaaggcccagatttgtgtttcagttctaccttgccacctctaagcctgttttcttttctttggagaagagggtctaa

SEQ ID NO: 109831 - DNA, 120 bp, synthetic construct
  source 1..120: mol_type = other DNA
catcttacagtggtttaggacactagaactgatttttcctctttagctgtaattttgagacctttaacaaatttctccccatccctctgttccctttacacttttcagcctctagtatct

SEQ ID NO: 109832 - DNA, 120 bp, synthetic construct
  source 1..120: mol_type = other DNA
atcaaaaatttttcatctgtaaaatgggagtgatgagatactcagcctgcaggatccctttatccagtgagttactgagtgagaagtgctgggtaaacgcttgctctgaggtgtaaattg

SEQ ID NO: 109833 - DNA, 120 bp, synthetic construct
  source 1..120: mol_type = other DNA
gggcacttgtcatggacctgagccggctgctctggagaactagcagagggaaagagaggactaaatataatgggaagaagtgaagaagaggccagctgctggtctggaggatggcatagg

SEQ ID NO: 109834 - DNA, 120 bp, synthetic construct
  source 1..120: mol_type = other DNA
aaagaggcaattgtgaggactccttctcacactgcagtaatttgctgagtgaccttgaacaaggatcttaatgcatcagagtctgtttcctcaaccccaaaatgaagggattggaccaga

SEQ ID NO: 109835 - DNA, 120 bp, synthetic construct
  source 1..120: mol_type = other DNA
aaaaaaaaaaatgtaattgcaggtgagtgaacacggggatagtagggtagcttgattgctgttcaaagggaaagagatggggaggatatgaaactctgagggcagatgggcatatatctg

SEQ ID NO: 109836 - DNA, 120 bp, synthetic construct
  source 1..120: mol_type = other DNA
tacgagaggacaggcagagacatacaatggcagtctgtcccttctgctcacattccactggccaatgcaagtcaatagtctaccccaaagtcacgggacaagaaaatacatgccactcat

SEQ ID NO: 109837 - DNA, 120 bp, synthetic construct
  source 1..120: mol_type = other DNA
acctaatttcctgccacaggaaattgttctgctagggaagaatatatttaaggattaaaaccttctgtcagaggaacttgagggagttgctagagaaagacctttgggggtctctcatca

SEQ ID NO: 109838 - DNA, 120 bp, synthetic construct
  source 1..120: mol_type = other DNA
aaagagatgtgttgttgaggacctaccgtgttccttactttgccggccactatcatagtaagcaggcagtaatagttacatgacaatactgacaatagattcctgccactttctggaata

SEQ ID NO: 109839 - DNA, 120 bp, synthetic construct
  source 1..120: mol_type = other DNA
ccccaggcaatgactgatccctgctttctgtcactagattaagattagtgtgccttttactttagtttaaattaccttataattttacacgaacagaatcatgcctggcttctttcacgc

SEQ ID NO: 109840 - DNA, 120 bp, synthetic construct
  source 1..120: mol_type = other DNA
aaaaaaaaaaaagaagattgaattgttaatattgagttttcagagttctagaaacaggtctattatcaaatatacgctttgcaaatattttctcttagttagtgcttgcctttttattcc

SEQ ID NO: 109841 - DNA, 120 bp, synthetic construct
  source 1..120: mol_type = other DNA
tttggggagtatctgctgtgatagagaataataacgctaatttgtgggtgtttatgaagcactttcaaatggaaaccaagcttcaggaggtcggggggcagaataccccattttatagat

SEQ ID NO: 109842 - DNA, 120 bp, synthetic construct
  source 1..120: mol_type = other DNA
ccatcacctcctctgagatgccctgtccagtccttcagcaaagtggggtgccatggtcatacactcttggggttccttgttattttcgttcaggacactttcattgtgtgtaattgtagg

SEQ ID NO: 109843 - DNA, 120 bp, synthetic construct
  source 1..120: mol_type = other DNA
ggaggttgcagtgagccgagatcatgccactgcactccagcctgagtgacagagcaacaccctgtatcaaaagtaaaaaaaaaaaaaaaaaaaaaaaaatccctttaatttccgtctttc

SEQ ID NO: 109844 - DNA, 120 bp, synthetic construct
  source 1..120: mol_type = other DNA
tgctctgatctcctggacctctggatctgggagaaatgaggggagagagagctttccaagtgtctgaaagtaggaggccggactctgcagaaagcaagcacaatccacatttccctctct

SEQ ID NO: 109845 - DNA, 120 bp, synthetic construct
  source 1..120: mol_type = other DNA
tgggtgggaattgaagtgactttgagttttcactctgcagggagaaatgggctttgccgtcaaagactgcaaatgtttttagaagcccctcatttacatgcaaataacgtgtgaatcacc

SEQ ID NO: 109846 - DNA, 120 bp, synthetic construct
  source 1..120: mol_type = other DNA
agctcctacagccacggatgctagcatcatggtgtgcatgtgtgatgtctttgcaaaaggtgtctcagagccaagctgtgaaggccttttaacagaccaccttccttctgattcccagag

SEQ ID NO: 109847 - DNA, 120 bp, synthetic construct
  source 1..120: mol_type = other DNA
gggcttatttctctcctgctacatctccagatgtttcccatatcatttgttataggaccaaattggctccagaccagcagcttcttgaattgaaccccagctgccacatagaatgtgtac

SEQ ID NO: 109848 - DNA, 120 bp, synthetic construct
  source 1..120: mol_type = other DNA
ttgtttcttctccctcctcttcctccttgtgcctccctttactctgtcccctctcccttcttcctttcttctcattaagtgtgcctgcagggtcctgttgtgaacatgagtgatttatct

SEQ ID NO: 109849 - DNA, 120 bp, synthetic construct
  source 1..120: mol_type = other DNA
tcaagtaattgtccagcctcagccttcaccacttacggcttatttttttttttttttttttctgtagagacagggtctccctatatcacccaggctggtctcaaactcctgggctcaagt

SEQ ID NO: 109850 - DNA, 120 bp, synthetic construct
  source 1..120: mol_type = other DNA
gtcaccacggaatggggaaacttgagaacagtggtggcaggaaagacaaccatatgccaggtttgtatttcccctggggggcgggtagacgtgagtgaatgaaaattcccccaaacttta

SEQ ID NO: 109851 - DNA, 120 bp, synthetic construct
  source 1..120: mol_type = other DNA
tatcaccatgagtgccgggctttgcagagggaaggtcagattcctgatatgaaaggactgagttattaaaaacaaactgaaggctagaagcgaagttaacacttgagaaattaaaggcca

SEQ ID NO: 109852 - DNA, 120 bp, synthetic construct
  source 1..120: mol_type = other DNA
ataactttataaggcagaagcgttgtgatttttcattttacagattaggaaaccggggaacacattggtgaactcatgtgtcccagattcacagctagtgaatggagaaggtggctttga

SEQ ID NO: 109853 - DNA, 120 bp, synthetic construct
  source 1..120: mol_type = other DNA
agtgtctgcttagcgccctcttgcctatagaataaagttgtttgtgggttttgattggggaggttttctgatgacagcttcataaagattaatctggccactgtgtggaatctaaattct

SEQ ID NO: 109854 - DNA, 120 bp, synthetic construct
  source 1..120: mol_type = other DNA
cagtcagtgcgtcccaaaccctaggatggaggcaagcacacagggagctcttcctaggaaaaaatggggacatctcaggacatctgattatttcctttaaagagattattatgaaattac

SEQ ID NO: 109855 - DNA, 120 bp, synthetic construct
  source 1..120: mol_type = other DNA
gaaggtgtgaatcgggggcaagttgccccgtgagtcagggttaggattctgggtgagactccacgctgacaggcccggcttcccctctgcttcatgagcccctgtgcccatgtgtgagca

SEQ ID NO: 109856 - DNA, 120 bp, synthetic construct
  source 1..120: mol_type = other DNA
gttccttgctttcgatttataggagaaagttaatttccccccttgcctccccacctcttcctttacgggatttgaatctcttgcacatgtttttaataggcatcccttaatccaagtgtt

SEQ ID NO: 109857 - DNA, 120 bp, synthetic construct
  source 1..120: mol_type = other DNA
gaaagaaatgagggcatatttagtgttttgggtttttttttttttggtgtgtggcagagtcttgctctatcccccaggctggagtgcagtggcgtgatcttggctcactgcaacctctgc

SEQ ID NO: 109858 - DNA, 120 bp, synthetic construct
  source 1..120: mol_type = other DNA
tatatgttcaagctgacccgtgccagagaatgatctaggtggtcagctttattgtagctttattgtcttctagtgtaccacagtgattgtacggactacaaaactgaggttacagaagga

SEQ ID NO: 109859 - DNA, 120 bp, synthetic construct
  source 1..120: mol_type = other DNA
agaagacatctggcaatatccgcagcctttttttattgccacaacttgagagggtgttatggatgtatactactagcacctagtgggtaggggccaggatgctgctaaacatcctgcaat

SEQ ID NO: 109860 - DNA, 120 bp, synthetic construct
  source 1..120: mol_type = other DNA
ttcagcagatggatggaattcaggtaggcatcaagcagagtgtcgtaggctaagggctcgcgcccagcagtcagtgcagtgcagagaagcagttggaagaggttggcccagggcgcaggg

SEQ ID NO: 109861 - DNA, 120 bp, synthetic construct
  source 1..120: mol_type = other DNA
tcttcaggtttggcccagcccctccttgaagactccttccatccagtcaaggccaagcaggcggggcagggcctttatgagctaaataaataaataaataaataaataaataaataaaaa

SEQ ID NO: 109862 - DNA, 120 bp, synthetic construct
  source 1..120: mol_type = other DNA
tctatgagaaaggcaacatatgaaatctattttttttttttttttggagacagagtcttgctttatccaggctggagtgcaatggcacaatcttgcctcactgcaacctctgcctcctgg

SEQ ID NO: 109863 - DNA, 120 bp, synthetic construct
  source 1..120: mol_type = other DNA
ttacttcaaaaaagatacttattctgggtggcataccactgtttgattgattgattgatttagagatagggtcttgctatgttgcccaggcccagtcgcaaactcttgggctcaagctat

SEQ ID NO: 109864 - DNA, 120 bp, synthetic construct
  source 1..120: mol_type = other DNA
aatgttttagaaaaatgcattgagggaagaaaaaaataagggcatagcgttaaaccatccctgcaataaagggctccttggggtgtctgctgcatcagaaggagccctgcaggtttactg

SEQ ID NO: 109865 - DNA, 120 bp, synthetic construct
  source 1..120: mol_type = other DNA
gtccagtctaacctgaatctctgtaggaagaggcgtgcggctctactacatcggaggggaggtcttcgcagagtgcctcagtgacagcgctatttttgtccagtctcccaactgtaacca

SEQ ID NO: 109866 - DNA, 120 bp, synthetic construct
  source 1..120: mol_type = other DNA
ctggacagcaagatcaggcaggtggctgatcccatctaaggcctctttcctcaggaaaccaaggcagaaagccccagccaaagtccacttttcacaggacgtgcagccactgtgtaggca

SEQ ID NO: 109867 - DNA, 120 bp, synthetic construct
  source 1..120: mol_type = other DNA
taagcgtcaccccggctcaccttttggctatttccagcatgtgcttttgtctttatttttctggttgacacattcctggcactcaggcagtaagacttcaaacgacatttattttaaact

SEQ ID NO: 109868 - DNA, 120 bp, synthetic construct
  source 1..120: mol_type = other DNA
gaaagaccaaagatcagagagaggccaaggcctggcaggcaggaggggccgggccaacagcagatgatgaggaattgcagaacgatgtttgctggcaccgaacagctgtaggcactgtaa

SEQ ID NO: 109869 - DNA, 120 bp, synthetic construct
  source 1..120: mol_type = other DNA
taaacatggccctgatatagtcaggtctacctggtctgcttggttgaatctctcaggccatcctgctttgggtttagagaatccagtcccttttctttccactcacggaccaaagtttgc

SEQ ID NO: 109870 - DNA, 120 bp, synthetic construct
  source 1..120: mol_type = other DNA
ttcccagaacagccttgtcgtcctcctgcctcttgggccaaggagagtaaggtttcagctcttctctctgtgaggtggctgaaagcagggcccagggcccacacctctcacctccagctg

SEQ ID NO: 109871 - DNA, 120 bp, synthetic construct
  source 1..120: mol_type = other DNA
ttggaactctactcaacccattgttgtcaaggaagaagaaatctttctccctcaactgaaggggtgcacccacctgttttctgaaacacacgagcaaacccagaggtggatgttatgaac

SEQ ID NO: 109872 - DNA, 120 bp, synthetic construct
  source 1..120: mol_type = other DNA
ggcaaatgaaaagggctattaaaatatttttacacctttgaaaattgcaggcttggtacaaagaggtctgtcatcttccccctgggatataagatgatctagctcccggtagaggatcac

SEQ ID NO: 109873 - DNA, 120 bp, synthetic construct
  source 1..120: mol_type = other DNA
attctggtgatccagtgatctatggaagtcgtgtcttactccaggtgaagggggaaaaaaaaagcctatactttggcaggttatgaactttgaatgtgatgaaatgacacgtttggctgc

SEQ ID NO: 109874 - DNA, 120 bp, synthetic construct
  source 1..120: mol_type = other DNA
gggactttgactcttaggaagagcacacatgagggcaaggctgctggcagacgtctccattgtccttatgttgtctgtgttgtatttttttttttttattgaccatggtgattatttttt

SEQ ID NO: 109875 - DNA, 120 bp, synthetic construct
  source 1..120: mol_type = other DNA
atttcttaaaaccattcagacagataactatttaattttttttaagaaagttggaaaggtctctcctcccaaggacagtggctggaagagttggggcacagccagttctgaatgttggtg

SEQ ID NO: 109876 - DNA, 120 bp, synthetic construct
  source 1..120: mol_type = other DNA
catgctcagtggcttctcgacaagttggcagcaacaacacggccctggtcgtcgtcgccgctgcggtaacggagcggtttgggtggcggagcctgcgttcgcgccttcccgctctcctcg

SEQ ID NO: 109877 - DNA, 120 bp, synthetic construct
  source 1..120: mol_type = other DNA
agtgaaattggtgtagggtggagggcggtggctccatcacttgtcccaaactgctgttaggatttctcaaactagattttcaaagacacaagtgtgtttagttaacctgaaaggtttatt

SEQ ID NO: 109878 - DNA, 120 bp, synthetic construct
  source 1..120: mol_type = other DNA
agaagtggctttttctttgctttccaggtttttgggcgagttttaaagaagtattgcatcttcgttttttttatttttgaagtgggagtgtatgtttctgtttaggtcactgccttcatt

SEQ ID NO: 109879 - DNA, 120 bp, synthetic construct
  source 1..120: mol_type = other DNA
cattgttttctacagttaaaggacttacaccagcataacacagcatttttttttttttttttttttgagatggaggctcgctctgttgtccaggctggagtgcagaggcgcgatctccac

SEQ ID NO: 109880 - DNA, 120 bp, synthetic construct
  source 1..120: mol_type = other DNA
tgcttttttactcccaatgtttagggcaacggtcttttcttctctcctgtctccctccctccctccctttctccctttttcttctttttcttctttttctttttttttttctgagacgga

SEQ ID NO: 109881 - DNA, 120 bp, synthetic construct
  source 1..120: mol_type = other DNA
cacatctaacttaacgggtcttttgaaagtattgccacatttgctttgcttctgtgtctgtctctttcttttctctcccccttcctgtcacctattcctttctcctctgtttctttcttc

SEQ ID NO: 109882 - DNA, 120 bp, synthetic construct
  source 1..120: mol_type = other DNA
gcttatccttactgctttatttatctattttttagagacaggttgcccaggatggagtgcagtaacatcatcatagccctctataaccttcaacttctgggttcaagagatcttgcctca

SEQ ID NO: 109883 - DNA, 120 bp, synthetic construct
  source 1..120: mol_type = other DNA
ttgatacatccccctttgaaggaataagctagatgacttgaaactctgcttcagttaaaagttttatgaaatgaggccgggtgcggtgactcacgcctgtaatctcagcactttgggagg

SEQ ID NO: 109884 - DNA, 120 bp, synthetic construct
  source 1..120: mol_type = other DNA
acttaaagacttttctgatgagatgggtggtgatattaaggaatgtgattaaaaaaaatatgttgggctgggcacgatgatgcacacccatatttctagcactgtgggaggcggaggtgg

SEQ ID NO: 109885 - DNA, 120 bp, synthetic construct
  source 1..120: mol_type = other DNA
tatagcccgcataaaagctatttggtgtctttaataatgaagagtataaataaaggtccaacttggccaacatgacgaaaccctttctctactaaacatacaaaaattagctgggcatgg

SEQ ID NO: 109886 - DNA, 120 bp, synthetic construct; identical to SEQ ID NO: 19028
  source 1..120: mol_type = other DNA

SEQ ID NO: 109887 - DNA, 120 bp, synthetic construct
  source 1..120: mol_type = other DNA
atctagaaatgggtcgtcttttatttgtcccccctttttcacccttcatatttcagttggttaaagactccagtcttttctacctagaaatagctcactgatttccccctcccctccttg

SEQ ID NO: 109888 - DNA, 120 bp, synthetic construct
  source 1..120: mol_type = other DNA
cttctcctgccatttaaggacatatgtagaaatggagcctttgtcagtctaatttctgagcgatgacagcagtgcccccagttgatctgtgatgaatgtgtattatatcctaagcagaaa

SEQ ID NO: 109889 - DNA, 120 bp, synthetic construct
  source 1..120: mol_type = other DNA
ctgagcttaagtgatccaaccatgtcggcctcttaaagtgctgggattacaggcatgagccactgtacccggacttggttgttttgttttttatttttgagaccaaatcttactctgtca

SEQ ID NO: 109890 - DNA, 120 bp, synthetic construct
  source 1..120: mol_type = other DNA
gaggtcattatcatttgtattcaaagcaacttggtattaaaacaaactttgagataccgttaaggccccagcatagcataaattttagaaatgatgacatttgatggtgagattgtggtg

SEQ ID NO: 109891 - DNA, 120 bp, synthetic construct
  source 1..120: mol_type = other DNA
caaagtgctgggattacaggtgtgagccaccgtgcctggccacaattaagcatgttaatatttcaacagtagcttttttactgaacactatgtatcagacacgttatgcagaatttttcc

SEQ ID NO: 109892 - DNA, 120 bp, synthetic construct
  source 1..120: mol_type = other DNA
tgcaaccatcaccattatcaatttttaggactttttcattataacaaagaaacaccatacccattagcagtcattcctcattccccttcctcccaggccctggcaaccactgatttactt

SEQ ID NO: 109893 - DNA, 120 bp, synthetic construct
  source 1..120: mol_type = other DNA
gctgatcctcataagtaatcctttaaaaaagtgctggtaagattttcctttagggtgactagtaaagtcagtaagacttgattgagcatgccactatcataatgagaagacctaacttta

SEQ ID NO: 109894 - DNA, 120 bp, synthetic construct
  source 1..120: mol_type = other DNA
acacttcgcaagaactacctttagcactttggtattcatttttgtagcctgttgttttcttttttttttttttcctagacggagtcttgctctgtcacccaggctggagtacagtggcgt

SEQ ID NO: 109895 - DNA, 120 bp, synthetic construct
  source 1..120: mol_type = other DNA
ctaggtggctggtcggaaaggatttcctcatgtgatctatgcccgtctctggaggtggcctgatcttcacaaaaatgaactaaaacatgttaaatattgtcagtatgcgtttgacttaaa

SEQ ID NO: 109896 - DNA, 120 bp, synthetic construct
  source 1..120: mol_type = other DNA
agaaaatctcacagagccagtttaaatggatgttaaatacccagaatatttggtaatttggaatcacatataacatatcctttaaaaataccagtattctaattttccttcatttcagcc

SEQ ID NO: 109897 - DNA, 120 bp, synthetic construct
  source 1..120: mol_type = other DNA
tagtggcactgcactccagcctggttgacaaagcgagactctgtctcaaaaaaaaaaaaaaaaggaaccactgtcatcttagaaaggtgtgctcttgttctggagggcagttagtagtag

SEQ ID NO: 109898 - DNA, 120 bp, synthetic construct
  source 1..120: mol_type = other DNA
taggtgctgtgtcctggttgctggtgatgataaagaacacagacctaaggtgggcccagtggtttcagcttttttgtcacctatagagaatatattctttgaccctcttagaacattttt

SEQ ID NO: 109899 - DNA, 120 bp, synthetic construct
  source 1..120: mol_type = other DNA
taggcaatacatggtccataaatcaaaatactataaaaaggtatacagtgaaaagaagtgctcccacccctgcccccattcccccctacctcaggtaatcactttttttagtttctggtg

SEQ ID NO: 109900 - DNA, 120 bp, synthetic construct
  source 1..120: mol_type = other DNA
agaggaactttggaatgggatttataggtcttcagaatatcatcttcatgacttttgatgcatgaacatacttcttaagaggtttttaagaggttgtacatagaaacttgcacaatggat

SEQ ID NO: 109901 - DNA, 120 bp, synthetic construct
  source 1..120: mol_type = other DNA
ctggacacattttccagccattcggtttttgcctgccttatgtatttaggtgattattcttctaggtttatcaagaaactgaggagtacctttttaggattgttgctggaggctgttgaa

SEQ ID NO: 109902 - DNA, 120 bp, synthetic construct
  source 1..120: mol_type = other DNA
tgtgtaattaaaaaaaaaaagtgtttcagaaagatccttcttttctgccatgtcataggagggagaggggctgctaggttcaggtttttgggggcatgatcatatgacctggttctgtta

SEQ ID NO: 109903 - DNA, 120 bp, synthetic construct
  source 1..120: mol_type = other DNA
tatttattgggtagattttaataatcgaataccgtaaatactgtaagttttagaacttgtgtcaaaatgttcccttatgtggtggcatgcgcctgtagtcccagctgctccgggggctga

SEQ ID NO: 109904 - DNA, 120 bp, synthetic construct
  source 1..120: mol_type = other DNA
gtaggacagtaagcaatatcataggatggtttttgaatagaatacaagccaagagaagcttgattctcttggtatattacatacagagagggcaattaatttcttgtacatctgggaata

SEQ ID NO: 109905 - DNA, 120 bp, synthetic construct
  source 1..120: mol_type = other DNA
gaaaaaagtaggcagcctttataaaagcaaattaacccatgtgggccttaatttttagacagcactaccacctggactggaagtaggactgcaccatacacacctaatttgcctcaccac

SEQ ID NO: 109906 - DNA, 120 bp, synthetic construct
  source 1..120: mol_type = other DNA
aatgtaatttttaatggctgcctaggccgtcatagtgttgaagggtgctgggtttggacctttaacaggctgtgtgaccattgacaagttatttcacctcattaagcctcaagagtaata

SEQ ID NO: 109907 - DNA, 120 bp, synthetic construct
  source 1..120: mol_type = other DNA
taaaactaggtttcaaaatagaacagctgtaaaactatagcttaaaaagccaggaaagaatcttaagtacatgccgaaaagaaaaataattcactctattcaggatctctggttaactgg

SEQ ID NO: 109908 - DNA, 120 bp, synthetic construct
  source 1..120: mol_type = other DNA
ttatggggcacatgagatgttttgatacaggcatataatgcatgataatcacatcatggaagatggggtatacatcccttcaagcatttatcttttgtgttacaatctatactctgttag

SEQ ID NO: 109909 - DNA, 120 bp, synthetic construct
  source 1..120: mol_type = other DNA
gccatattacagtgacaccagagtgtgagaaccagggttactgtgctggctagcagtagatgtcatagtttaataaactttttgctgatttaagaggcaaatacttgttctggttaggga

SEQ ID NO: 109910 - DNA, 120 bp, synthetic construct
  source 1..120: mol_type = other DNA
gacctcttgatctgcccgcctcggcctcccaaagtgctgggattacaggcgtgatctaccgtgcctggccctcattttctttttacctagctttataaatacttgtttaaaacaatttaa

SEQ ID NO: 109911 - DNA, 120 bp, synthetic construct
  source 1..120: mol_type = other DNA
ttgctttcgcttcctctttgaaatctgttcagtcttcacatagataaaaggttattcaggtcccatcttttcagatgggatgtcccctaccatccagtctgaagtgttcttcccaatcat

SEQ ID NO: 109912 - DNA, 120 bp, synthetic construct
  source 1..120: mol_type = other DNA
aatccagttgttttgggtgcattacatttccatctcccctccctttaccctttcttttaggaaaaactgtgttgtggagtgcaagtgaaagccttatatctttctcatgggaggatgttc

SEQ ID NO: 109913 - DNA, 120 bp, synthetic construct
  source 1..120: mol_type = other DNA
ccactgcaccccagcctgggtgacagagtgagactccatttcaaaaaaaaaaaaaaaaaaagtttatataatgaaatggaaatgcttacagtgaaatattacaggaacattccattttag

SEQ ID NO: 109914 - DNA, 120 bp, synthetic construct
  source 1..120: mol_type = other DNA
gacagagaagctgggcgtgcacctggagatgctgttcataagatctacccaagtgcatatataaaggttagttacaattttatttgaatattttagacttaaagctctatttgttgtcaa

SEQ ID NO: 109915 - DNA, 120 bp, synthetic construct
  source 1..120: mol_type = other DNA
aaccacatgtacctatcatccagctgcaacaattatcagcactttaccaatctttaatgtgtttctcccccaacttttttttcctggagtcgttgaaagccaattccaaacagcatagtc

SEQ ID NO: 109916 - DNA, 120 bp, synthetic construct
  source 1..120: mol_type = other DNA
ttgcagtttttttccacaagtaatttctgtattggttatttatgctgtattattattatttttgagacagagtcttgctctgtcacccaggctagagtacagtggtgccatcttggctca

SEQ ID NO: 109917 - DNA, 120 bp, synthetic construct
  source 1..120: mol_type = other DNA
tcagtttggagaggatgactattttaaatagtttttctgttatttgtatgtggttgaagcagagagagaaggtgattatgtatacccacttaacccatcttgactcagaagtctcttgtt

SEQ ID NO: 109918 - DNA, 120 bp, synthetic construct
  source 1..120: mol_type = other DNA
gtttcatgcatccactggaagtcttggaacatatcccccatagataagggaggaatactgtataccttaaaatttaaccattggcattttcttcattcgtttttttgggtagcagtaact

SEQ ID NO: 109919 - DNA, 120 bp, synthetic construct
  source 1..120: mol_type = other DNA
aaatggctgcaccactttacattctcactagcagggtgtgagggttccaatttctctacattctcatcagtacttgttatctgtcttttttattttagccattgtagtaggtgtgaagta

SEQ ID NO: 109920 - DNA, 120 bp, synthetic construct
  source 1..120: mol_type = other DNA
gaggtttgctgaggtgcccaatgaatcatttttactgcatctacagatgcaagtcataaagtttaatccgtgtgggtaacctgtaatatgtgctgctgatgttagcatagattcaggctg

SEQ ID NO: 109921 - DNA, 120 bp, synthetic construct
  source 1..120: mol_type = other DNA
ataaaataatgcaacaataaaataaacaatgggcagaatagactgggcatagtgattgactcctataatcccagcacttcgggaggtcaaggtaggaggattgcttgagcgcaggagtag

SEQ ID NO: 109922 - DNA, 120 bp, synthetic construct
  source 1..120: mol_type = other DNA
gtaatgccttccaaatgtcatagcctagaagttctgaaacgaatggactgtgagaaatttgaggaagtagtggtttcacttctgggtgttgtgggctttctgatttctagaacctgactt

SEQ ID NO: 109923 - DNA, 120 bp, synthetic construct
  source 1..120: mol_type = other DNA
aatataagggtagatatggcaaccccttccttactatgccagttcttcacttggttgataaaagtaaaattatttattaacgccttaactcatcctgaaagataaatgactacgggggag

SEQ ID NO: 109924 - DNA, 120 bp, synthetic construct
  source 1..120: mol_type = other DNA
ggcagcagccgtggcaggaaacatccctggcccaggatcagtaggtggaatagctccagctatcagtaagtatgcttttcattcttttttaaaggtataatagttgatatttttatcttg

SEQ ID NO: 109925 - DNA, 120 bp, synthetic construct
  source 1..120: mol_type = other DNA
tagttatgtcttattctgaactaggctgtttagacagtaaggtttttagaagcaacctgtggacacgcactacctcttaaaaacaagttgtttcttatcccttcacctccacttctaaag

SEQ ID NO: 109926 - DNA, 120 bp, synthetic construct
  source 1..120: mol_type = other DNA
gaataatccagtattgctgattttaaaggcagagaagttctcaaagttaattcacctatgttattttgtgtacaagttgttattgttgaacatacttcaaaaataatgtgccatgtgggt

SEQ ID NO: 109927 - DNA, 120 bp, synthetic construct
  source 1..120: mol_type = other DNA
tttttttcttttgcacttttgagtccaatctcagtgatgaggtaccttctactaaatgacaggcaacagccagttctattgggcagctttgtttttttccctcacactctaccgggactt

SEQ ID NO: 109928 - DNA, 120 bp, synthetic construct
  source 1..120: mol_type = other DNA
aagtgctgggattacgggcgtgagccactgtccctggcctcattgttcccttttctactttaaggaaagttttcatgtttaatcatctggggaaagtatgtgaaaaatatttgttaagaa

SEQ ID NO: 109929 - DNA, 120 bp, synthetic construct
  source 1..120: mol_type = other DNA
tgagacatgtgagtaaactgaactcatattagctgtgctgcatttcagacttaaaatccatttttgtggggcagggtgtggtgtgtaaaggggggtgtttgtaatacaagttgaaggcaa

SEQ ID NO: 109930 - DNA, 120 bp, synthetic construct
  source 1..120: mol_type = other DNA
gaggatatactagatggtaacatttctttctgtgcttggctatctttgtggacttcaggggcttctaaaacagacaggactgtgttgcctttactaaatggtctgagacagctatggttt

SEQ ID NO: 109931 - DNA, 120 bp, synthetic construct
  source 1..120: mol_type = other DNA
aatcatttctctctgttgatgtggatacttttcacaccgtttatttaaatgctttctcaataggtccagagccagtgttcttgttcaacctgaaagtaatggctctgggttgggccagac

SEQ ID NO: 109932 - DNA, 120 bp, synthetic construct
  source 1..120: mol_type = other DNA
catggagttggcaaactttcttcaagtattgagttctgttcaatgcattggacatgtgatttaagggaaaagtgtgaatgcttatagatgatgaaaacctggtgggctgcagagcccagt

SEQ ID NO: 109933 - DNA, 120 bp, synthetic construct; identical to SEQ ID NO: 27033
  source 1..120: mol_type = other DNA

SEQ ID NO: 109934 - DNA, 120 bp, synthetic construct; identical to SEQ ID NO: 28070
  source 1..120: mol_type = other DNA

SEQ ID NO: 109935 - DNA, 120 bp, synthetic construct
  source 1..120: mol_type = other DNA
gaaaactggctagccatatgtagaaagctgaaactggatcccttccttacaccttatacaaaaatcaattcaagatggattaaagacttaaacgttagacctaaaacaataaaaacccta

SEQ ID NO: 109936 - DNA, 120 bp, synthetic construct
  source 1..120: mol_type = other DNA
aaatcatcattctcagtaatctatcgcaagaacaaaaaaccaaacactgcatattctcacttataggtgggaactgaacaatgagatcacatggacacaggaaggggaatatcacactct

SEQ ID NO: 109937 - DNA, 120 bp, synthetic construct
  source 1..120: mol_type = other DNA
atcccatttgtcaattttgtcttttgttgccattgctgttggtgttttagacatgaagtccttgcccatgcctatgtcctgaatgataatgcctaggttttcttccagggcttttatggt

SEQ ID NO: 109938 - DNA, 120 bp, synthetic construct
  source 1..120: mol_type = other DNA
aaaaactctcaataaattaggtattggtgggacgtatctcaaaataataacagctatctatgacaaacccacagccaatatcatactgaatgggcaaaaactggaagcattccctttgaa

SEQ ID NO: 109939 - DNA, 120 bp, synthetic construct
  source 1..120: mol_type = other DNA
acgagaacaaagacacaacataccagaatctctgggacacattcaaagcagtgtgtagagggaaatttatagcactaaatgcccacaagagaaagcaggaaagatccaaaagtgactcct

SEQ ID NO: 109940 - DNA, 120 bp, synthetic construct
  source 1..120: mol_type = other DNA
agctggttattttgctcgttagttgatgcagtttcttcctagccttgaaggtctttacaatttggcatgtttttgcagtggctggtaccggttgttcctttccatgtttagtgcttcctt

SEQ ID NO: 109941 - DNA, 120 bp, synthetic construct
  source 1..120: mol_type = other DNA
ctcaagaactacatgaagaatgcagaagcctcaggagccgatgcgatcaactggaagaaagggtatcagtgatggaagacgaaatgaatgaaatgaagcgagaaaggaagtttagagaaa

SEQ ID NO: 109942 - DNA, 120 bp, synthetic construct
  source 1..120: mol_type = other DNA
cagtctctgataaaacagacttcaaaccaacaaagatcaaaagagacaaagaagaccattacataatggtaaagggatcaattcaacaagaagagctaactatcctaaatatatatgcac

SEQ ID NO: 109943 - DNA, 120 bp, synthetic construct
  source 1..120: mol_type = other DNA
caaactaccatcagagaatacgacaaacacctctacgcaaataaactagaaaatctagaagaaatggataaattcctcgacacatacaccctcccaagagtaaaccaggaagaagttgac

SEQ ID NO: 109944 - DNA, 120 bp, synthetic construct
  source 1..120: mol_type = other DNA
gctgaagttgcttatcagcttaaggagattttgggctgagacgatggggttttctagatatacaatcatgtcatctgcaaacagggacaatttgacttcctcttttcctaattgaataac

SEQ ID NO: 109945 - DNA, 120 bp, synthetic construct
  source 1..120: mol_type = other DNA
catgggcaaggacttcatgtctaaaacaccaagagcaatggcaacaaaagccaaaattgacaaatgggatctaattaaactaaagagcttctgcacagcaaaagaaactaccatcagagt

SEQ ID NO: 109946 - DNA, 120 bp, synthetic construct; identical to SEQ ID NO: 28071
  source 1..120: mol_type = other DNA

SEQ ID NO: 109947 - DNA, 120 bp, synthetic construct
  source 1..120: mol_type = other DNA
aataaataaaaggtagctaatatagacggaagagtaacattgactgtggtaactgtaatacgtgcatgaattagaagacatttatgcagccaaaaaacacatgaaaaaatgctcatcatc

SEQ ID NO: 109948 - DNA, 120 bp, synthetic construct; identical to SEQ ID NO: 35270
  source 1..120: mol_type = other DNA

SEQ ID NO: 109949 - DNA, 120 bp, synthetic construct; identical to SEQ ID NO: 35271
  source 1..120: mol_type = other DNA

SEQ ID NO: 109950 - DNA, 120 bp, synthetic construct
  source 1..120: mol_type = other DNA
ctggcatacaatgtgttaaggagccacccaatgatgaacagattaacaggaaacagaatgggtggaggataaaactgcaagacagcttaggcttcaaaggaagagctttatacatgacag

SEQ ID NO: 109951 - DNA, 120 bp, synthetic construct; identical to SEQ ID NO: 21997
  source 1..120: mol_type = other DNA

SEQ ID NO: 109952 - DNA, 120 bp, synthetic construct
  source 1..120: mol_type = other DNA
accactggctcaacgaaataaaagaggatacagacaaatggaagaacattccatactcctgaataggaggaatcgatatcatgaaaatggccatactgcccagggtaatttatagattca

SEQ ID NO: 109953 - DNA, 120 bp, synthetic construct
  source 1..120: mol_type = other DNA
caacaagcgggcaaaggatatgaacagacacttctcaaaagaagacatttattcagccaacagacacatgaaaaaatgctcatcatcactggccatcagagaaatgcaaatcaaaaccac

SEQ ID NO: 109954 - DNA, 120 bp, synthetic construct; identical to SEQ ID NO: 23622
  source 1..120: mol_type = other DNA

SEQ ID NO: 109955 - DNA, 120 bp, synthetic construct; identical to SEQ ID NO: 23623
  source 1..120: mol_type = other DNA

SEQ ID NO: 109956 - DNA, 120 bp, synthetic construct; identical to SEQ ID NO: 24282
  source 1..120: mol_type = other DNA

SEQ ID NO: 109957 - DNA, 120 bp, synthetic construct; identical to SEQ ID NO: 24283
  source 1..120: mol_type = other DNA

SEQ ID NO: 109958 - DNA, 120 bp, synthetic construct; identical to SEQ ID NO: 24284
  source 1..120: mol_type = other DNA

SEQ ID NO: 109959 - DNA, 120 bp, synthetic construct
  source 1..120: mol_type = other DNA
ccttagattattttcaatcaggcaagtaaaataaataaaagacatgcatactgtaaagaaagtagtccaggcacggtggctcacgcgtataatctcagcactttgggaggcagaggtggg

SEQ ID NO: 109960 - DNA, 120 bp, synthetic construct; identical to SEQ ID NO: 24285
  source 1..120: mol_type = other DNA

SEQ ID NO: 109961 - DNA, 120 bp, synthetic construct
  source 1..120: mol_type = other DNA
caagattctgtctcaaaaaaaaaaaaaaaaaaaaagttggacgcagtgtggctcacgcctgtaatcccagcactttaggcagctgaggtgggcagatcacctgaggtcaggagttcaaga

SEQ ID NO: 109962 - DNA, 120 bp, synthetic construct; identical to SEQ ID NO: 24286
  source 1..120: mol_type = other DNA

SEQ ID NO: 109963 - DNA, 120 bp, synthetic construct
  source 1..120: mol_type = other DNA
caccagtaattctaacattttgagacaccaaggtgaaagaatcacttgaggccaggagtctgagaccagcttgggcaacacagtgagatcctacctctacaaaaaatttaaaaattaggc

SEQ ID NO: 109964 - DNA, 120 bp, synthetic construct; identical to SEQ ID NO: 33964
  source 1..120: mol_type = other DNA

SEQ ID NO: 109965 - DNA, 120 bp, synthetic construct; identical to SEQ ID NO: 33965
  source 1..120: mol_type = other DNA

SEQ ID NO: 109966 - DNA, 120 bp, synthetic construct
  source 1..120: mol_type = other DNA
ctgaaacaggaggatcacttgaggccagaagttcgagaccatcctaggcaacacagtgagaccttgtctccacgttaaaaaaaaaaaaaaaaagagaagaagaagaaaaatgactccaac

SEQ ID NO: 109967 - DNA, 120 bp, synthetic construct; identical to SEQ ID NO: 33966
  source 1..120: mol_type = other DNA

SEQ ID NO: 109968 - DNA, 120 bp, synthetic construct; identical to SEQ ID NO: 6619
  source 1..120: mol_type = other DNA

SEQ ID NO: 109969 - DNA, 120 bp, synthetic construct
  source 1..120: mol_type = other DNA
gtaatccacctgcctcagcctcccaaagtgctgggattacaggcgtgagccacgggtgcctggccaaggactgaattttttgttttgttttgttttgtttttttgagacagagtctcact

SEQ ID NO: 109970 - DNA, 120 bp, synthetic construct; identical to SEQ ID NO: 24848
  source 1..120: mol_type = other DNA

SEQ ID NO: 109971 - DNA, 120 bp, synthetic construct
  source 1..120: mol_type = other DNA
cacacacacacacacacaccagaatactattcagctacaaaaaagctataaaaaagctgaatagtattctggtgtgtgtgtgtgtgtgtgtctctgtgtgtgtgtgtctgtgtgtgtgtg

SEQ ID NO: 109972 - DNA, 120 bp, synthetic construct
  source 1..120: mol_type = other DNA
aacaacgagaacacatggacacaggaaggggaacatcacacaccggggccggctgtgtggtggggggagggacagcattaggagatatacctaatgttaaatgacgaggtaatgggtgca

SEQ ID NO: 109973 - DNA, 120 bp, synthetic construct; identical to SEQ ID NO: 25036
  source 1..120: mol_type = other DNA

SEQ ID NO: 109974 - DNA, 120 bp, synthetic construct; identical to SEQ ID NO: 25037
  source 1..120: mol_type = other DNA

SEQ ID NO: 109975 - DNA, 120 bp, synthetic construct; identical to SEQ ID NO: 2863
  source 1..120: mol_type = other DNA

SEQ ID NO: 109976 - DNA, 120 bp, synthetic construct
  source 1..120: mol_type = other DNA
gattcttccacctcagccaggtgtagtggaacatgcctgaagtcccagctactcaggaggctgcagtgggaggatagcttgaatccaggagtttgagactgcagtgagctatgattgtgc

SEQ ID NO: 109977 - DNA, 120 bp, synthetic construct; identical to SEQ ID NO: 16260
  source 1..120: mol_type = other DNA

SEQ ID NO: 109978 - DNA, 120 bp, synthetic construct; identical to SEQ ID NO: 16261
  source 1..120: mol_type = other DNA

SEQ ID NO: 109979 - DNA, 120 bp, synthetic construct
  source 1..120: mol_type = other DNA
tctcaatttcctggactcaagcaatcctcccacctcagcctcccaaaatgctaggattagaagcatgagtgaccacatctggactgtcaccaatttttaactgtctgtcaactaaacagc

SEQ ID NO: 109980 - DNA, 120 bp, synthetic construct
  source 1..120: mol_type = other DNA
atgagttctagtgagtcctcctggcaaatcatccaacctaagagtcgtcttggccaggcacagtggctcaagcctgtaaccccagcactttgggaggcccaggcaggcagatcacttgag

SEQ ID NO: 109981 - DNA, 120 bp, synthetic construct; identical to SEQ ID NO: 16263
  source 1..120: mol_type = other DNA

SEQ ID NO: 109982 - DNA, 120 bp, synthetic construct; identical to SEQ ID NO: 16264
  source 1..120: mol_type = other DNA

SEQ ID NO: 109983 - DNA, 120 bp, synthetic construct
  source 1..120: mol_type = other DNA
atacacatatatatacacatatacacacacacacacatatatatatacacacacatttactatacttcaggttctagggtacatgtgcacaacatgcaggtttgttgcatatgtatacat

SEQ ID NO: 109984 - DNA, 120 bp, synthetic construct
  source 1..120: mol_type = other DNA
taagtctttaatccatcttgaattaattcaagcctagccaacatggcaaaatcctgtctctataaaaatacaaaaattagcagggcgtggtggcaggttcttgtaattccagctactggg

SEQ ID NO: 109985 - DNA, 120 bp, synthetic construct
  source 1..120: mol_type = other DNA
tttcaggtggacgcattcacattttctctccccaactccctctactttcctgcatgtccatgtctctaaaatcataaagaggaagagttcattcttgtaagttgaaaacacatcttttct

SEQ ID NO: 109986 - DNA, 120 bp, synthetic construct
  source 1..120: mol_type = other DNA
actcatcattttttatggctgcatagtattccatggtgtatatgtgccacattttcttaatccagactatcattgttggacatttgggttggttccaagtctttgctattgtgaatagtg

SEQ ID NO: 109987 - DNA, 120 bp, synthetic construct
  source 1..120: mol_type = other DNA
tggcttaggattgacttggcaatgcgggctcttttttggttccatatgaactttaaagtagttttttccaattctgtgaagaaagtcattggtagcttgatggggatggcattgaatctg

SEQ ID NO: 109988 - DNA, 120 bp, synthetic construct; identical to SEQ ID NO: 50654
  source 1..120: mol_type = other DNA

SEQ ID NO: 109989 - DNA, 120 bp, synthetic construct
  source 1..120: mol_type = other DNA
agagctttacttccaactatgtggtcaattttggaataggtgtggtgtggtgctgaaaaaaatgtatattctgttgatttggggtggagagttctgtagatgtctattaggtctgcttgg

SEQ ID NO: 109990 - DNA, 120 bp, synthetic construct
  source 1..120: mol_type = other DNA
tgttgaatattggcccccactctcttctggcttgtagggtttctgccgagagatccgctgttagtctgatgggctttcctttgagggtaacccgacctttctctctggctgcccttaaca

SEQ ID NO: 109991 - DNA, 120 bp, synthetic construct
  source 1..120: mol_type = other DNA
acttaagtgtccctgtctgacagctttgaagagagcagtggttctcccagcacgcagctggagatctgagaacgggcagactgcctcctcaagtgggtccctgacccctgacccccgagc

SEQ ID NO: 109992 - DNA, 120 bp, synthetic construct; identical to SEQ ID NO: 16249
  source 1..120: mol_type = other DNA

SEQ ID NO: 109993 - DNA, 120 bp, synthetic construct; identical to SEQ ID NO: 16250
  source 1..120: mol_type = other DNA

SEQ ID NO: 109994 - DNA, 120 bp, synthetic construct; identical to SEQ ID NO: 16251
  source 1..120: mol_type = other DNA

SEQ ID NO: 109995 - DNA, 120 bp, synthetic construct; identical to SEQ ID NO: 16252
  source 1..120: mol_type = other DNA

SEQ ID NO: 109996 - DNA, 120 bp, synthetic construct
  source 1..120: mol_type = other DNA
cacctgtaatcccagctactcaggaggctgaggcaggagaatcacttgaactcagagggcagaggctgcagtgagccgagattgcgccactgcactccagcctgggcaacagagtgaaac

SEQ ID NO: 109997 - DNA, 120 bp, synthetic construct; identical to SEQ ID NO: 16253
  source 1..120: mol_type = other DNA

SEQ ID NO: 109998 - DNA, 120 bp, synthetic construct; identical to SEQ ID NO: 16254
  source 1..120: mol_type = other DNA

SEQ ID NO: 109999 - DNA, 120 bp, synthetic construct
  source 1..120: mol_type = other DNA
tcccaaagtgctgggattacaggcgtgagccaccgcgcccggcctattttaacttctaacactgtaactctggcagttgttgcttttacaaaatacaggatcaaaacctttgaaaatgaa

SEQ ID NO: 110000 - DNA, 120 bp, synthetic construct; identical to SEQ ID NO: 16255
  source 1..120: mol_type = other DNA

SEQ ID NO: 110001 - DNA, 120 bp, synthetic construct; identical to SEQ ID NO: 16256
  source 1..120: mol_type = other DNA

SEQ ID NO: 110002 - DNA, 120 bp, synthetic construct
  source 1..120: mol_type = other DNA
gccactgcactccagcgtgggcaacagagaccatgtctccaaaaaaaaaagggggggggcgcggagggggaagcattcttggccatgcacagtggctcatgtctataatcccaacacttt

SEQ ID NO: 110003 - DNA, 120 bp, synthetic construct; identical to SEQ ID NO: 16257
  source 1..120: mol_type = other DNA

SEQ ID NO: 110004 - DNA, 120 bp, synthetic construct; identical to SEQ ID NO: 16258
  source 1..120: mol_type = other DNA

SEQ ID NO: 110005 - DNA, 120 bp, synthetic construct
  source 1..120: mol_type = other DNA
caagcaatcctcctgcctcagcctccaagtagctgggactacaggtgcatgccaccacgcccgacttatttttttttcctttttttttttttttttaatagaaacagggtttcaccatgt

SEQ ID NO: 110006 - DNA, 120 bp, synthetic construct
  source 1..120: mol_type = other DNA
ctcaaaaaaacatttctaaaaaccaaagaggaaaaaaatcctttttttttttttttgagacagagtctggctctgttgcccaggcaatggtgtgatctcggctcactgcaacctcggcct

SEQ ID NO: 110007 - DNA, 120 bp, synthetic construct; identical to SEQ ID NO: 16259
  source 1..120: mol_type = other DNA

SEQ ID NO: 110008 - DNA, 120 bp, synthetic construct
  source 1..120: mol_type = other DNA
ataagtcaagactcggttatccagtgagactagcaaattaaaaaaaataaaatattccagccaggcacagtggctcatgcctgtaatcccaacactttgggaggctaaggtgggtggatt

SEQ ID NO: 110009 - DNA, 120 bp, synthetic construct; identical to SEQ ID NO: 8874
  source 1..120: mol_type = other DNA

SEQ ID NO: 110010 - DNA, 120 bp, synthetic construct
  source 1..120: mol_type = other DNA
agtctatgtgtggcccaagacaattcttccaatgtggcccagggaagccaaaagattggcacccctgctctatgtactgtatgattttatttatacgtcattctggaaaaagctaagtta

SEQ ID NO: 110011 - DNA, 120 bp, synthetic construct; identical to SEQ ID NO: 4126
  source 1..120: mol_type = other DNA

SEQ ID NO: 110012 - DNA, 120 bp, synthetic construct; identical to SEQ ID NO: 17326
  source 1..120: mol_type = other DNA

SEQ ID NO: 110013 - DNA, 120 bp, synthetic construct; identical to SEQ ID NO: 17327
  source 1..120: mol_type = other DNA

SEQ ID NO: 110014 - DNA, 120 bp, synthetic construct; identical to SEQ ID NO: 2916
  source 1..120: mol_type = other DNA

SEQ ID NO: 110015 - DNA, 120 bp, synthetic construct
  source 1..120: mol_type = other DNA
gggaggcagaggttgcagtgaaccgagattgcatcactgcactctagccttggcgactgagtgagactccatctcaaaaaaaaaaaaaaaaaaaatcgaggttttcctaattaagtacat

SEQ ID NO: 110016 - DNA, 120 bp, synthetic construct
  source 1..120: mol_type = other DNA
gggctcaaactctgtacgcgtttactaagcatattgactgaagaaatctggaaacctagtaccgcggcaccatatcgttaccccaaaggaaaatgcatgcacgctgtcagagatgacgaa

SEQ ID NO: 110017 - DNA, 120 bp, synthetic construct
  source 1..120: mol_type = other DNA
cacctgtcatcgcttctcggtggatccctgaaatgttgagttgtggagtctgggcagctgagatcgggcagggctggtttcttgtaggcccaggcttccgtgtagagggccaagtgatgc

SEQ ID NO: 110018 - DNA, 120 bp, synthetic construct
  source 1..120: mol_type = other DNA
cagaattgttctttagattctgattttttaaatgacagcactttggtttggagggttaatgacttaccccaggtcatatgccacaccatgggtaacaccaagagtagagctcagatctcc

SEQ ID NO: 110019 - DNA, 120 bp, synthetic construct
  source 1..120: mol_type = other DNA
aaattcctatcgctaccttatctgactttgaaaaagtcatggggaaaacttggctaccttgtgccaactgctagcttgttttcaagatattataatcttgaatagatggaggatgaactt

SEQ ID NO: 110020 - DNA, 120 bp, synthetic construct
  source 1..120: mol_type = other DNA
caatttttctgccctgtcacttattcccttgctcccagataatcttcgaaaaaccaagatgagtttaattaacactcagaggacttgacaaagacactcactcccaaaccagcttgcgtt

SEQ ID NO: 110021 - DNA, 120 bp, synthetic construct
  source 1..120: mol_type = other DNA
tcctttaaagtagatgcagtggactgaatgtttgtgtttccccaagttcatatgttgcaaccgtagtgcccagtgtgatgatatttggagttggagcttgtaagaggtaattaggtgatg

SEQ ID NO: 110022 - DNA, 120 bp, synthetic construct
  source 1..120: mol_type = other DNA
cttgtgtaagttaaagatggcagagtgagtgagctgtgaagggtgggaagatatagaacagtttgtttagcatgccttgaggatcagagctcacagtggaaaggttgggaaggaaagaag

SEQ ID NO: 110023 - DNA, 120 bp, synthetic construct
  source 1..120: mol_type = other DNA
ttccccctctggctcagtgggccatggccggcagcgacagtcaacagtgctacctgtgcgttagcaacaagtatggcctcattatttaaaaacttagttattcccatttcacagatattg

SEQ ID NO: 110024 - DNA, 120 bp, synthetic construct
  source 1..120: mol_type = other DNA
taaagctaagtttcctatctggattgtagacagctatgggcagtaacatgggctttgttatattagtaatagggccccggccaggtgcagtggctcacacctgtaatcctagcactttgg

SEQ ID NO: 110025 - DNA, 120 bp, synthetic construct
  source 1..120: mol_type = other DNA
cgagtctagttgcctctggaaaattcagtagccaagccatagtgtatttgcatattgtaaatgtgaagtggatgggtgtgaggaatgaatcatatatagtacaggacagcgtgatgctac

SEQ ID NO: 110026 - DNA, 120 bp, synthetic construct; identical to SEQ ID NO: 22938
  source 1..120: mol_type = other DNA

SEQ ID NO: 110027 - DNA, 120 bp, synthetic construct; identical to SEQ ID NO: 22939
  source 1..120: mol_type = other DNA

SEQ ID NO: 110028 - DNA, 120 bp, synthetic construct
  source 1..120: mol_type = other DNA
caaacctagctaatgatcagaattgcccaggtgtttgtttaaatgaagattcccagcttcagcccagagagattccataatggctctggttaggtttgggtgttggtttttgttgttgtt

SEQ ID NO: 110029 - DNA, 120 bp, synthetic construct
  source 1..120: mol_type = other DNA
cattttgtgtgctaaactgatcaaaggaagaaaagatgagatggaagatcataaaggctttgttcctcccacaaacatcagcagagacctgcatttaagtcaggcctggatggcttagaa

SEQ ID NO: 110030 - DNA, 120 bp, synthetic construct
  source 1..120: mol_type = other DNA
tggccaacatggtaaaatcctgtctctactaaaaatataaaaattagccaggtgtagtggcgcgcgtctgtaatcccagctactcgggaggctgaggcaggagaattgcttgaatccggg

SEQ ID NO: 110031 - DNA, 120 bp, synthetic construct
  source 1..120: mol_type = other DNA
tgtgtcgaacatgcgttttccatgtggggagtcaggggagttccatcttaaattgcactgtgcttgctggatgctcttcaggacaatttaggaagcaggaaagaatttacaaagttctga

SEQ ID NO: 110032 - DNA, 120 bp, synthetic construct
  source 1..120: mol_type = other DNA
ttgtttgtttgtttgtttgtttcaataaagaaagagtttaattgcagtaaggcaggccgcgcaggagatggcgttcttattcaaatcggtctctctgaaggctcagaggttaggggtttt

SEQ ID NO: 110033 - DNA, 120 bp, synthetic construct
  source 1..120: mol_type = other DNA
aaacgtagctgtcaatgtctcattcccgaagacttccagatgcctggatctttagagttctccacctcaccccgagttgattacacaaatgttcctggggctttgcttagtgccctgctc

SEQ ID NO: 110034 - DNA, 120 bp, synthetic construct
  source 1..120: mol_type = other DNA
aaagtaaagcgagtttttgtacttcgaagtctgggacataaaatcttcaagacgtcagcatcagtgacacgatggtgacagaggccagcattgcttgttgtatctttttccatcctgttc

SEQ ID NO: 110035 - DNA, 120 bp, synthetic construct
  source 1..120: mol_type = other DNA
agtatggccaagaccattagctgccttcctcagtgttccttctccccttctccctagtaatagaaccctgacttttacctggccgtatggtcactcaaaataaaggactacatttcccac

SEQ ID NO: 110036 - DNA, 120 bp, synthetic construct
  source 1..120: mol_type = other DNA
aacagctacattgtagtgtacattttcttttcaaatcatataactatggtgcatttaaagattttcttcttcagaaaagagagaagaatcaaatagacgcaataaaaaatgataaagggg

SEQ ID NO: 110037 - DNA, 120 bp, synthetic construct
  source 1..120: mol_type = other DNA
aattaggaagaggaagtcaaattgtccctgtttgcagatcacatgattgtatatctagaaaaccccattgtctcagcccaaaatctccttaagctgataagcaacttcagcaaagtctca

SEQ ID NO: 110038 - DNA, 120 bp, synthetic construct
  source 1..120: mol_type = other DNA
atttacaagaaaaaaacaaacaaccccatcaaaaagtgggcaaaggacatgaacagacacttctcaaaagaagacatttatgcagccaaaagacacatgaaaaaatgctcaccatcactg

SEQ ID NO: 110039 - DNA, 120 bp, synthetic construct
  source 1..120: mol_type = other DNA
agcgattctcccacctcagcctcctgagtagctgggattacaggcacgcgtcatcacacctggctaattttttttattttcggtagagaaggggttttaccatgttgcccaggctggttt

SEQ ID NO: 110040 - DNA, 120 bp, synthetic construct; identical to SEQ ID NO: 25385
  source 1..120: mol_type = other DNA

SEQ ID NO: 110041 - DNA, 120 bp, synthetic construct; identical to SEQ ID NO: 19413
  source 1..120: mol_type = other DNA

SEQ ID NO: 110042 - DNA, 120 bp, synthetic construct
  source 1..120: mol_type = other DNA
ataggtgagtgggtgaatgggtgagtgggtggatgggtgagtgggtggatgggtgggtgatggatggatggatggtgggtgatggatggatggtgggtgatggatggatgggtgagtggg

SEQ ID NO: 110043 - DNA, 120 bp, synthetic construct; identical to SEQ ID NO: 19414
  source 1..120: mol_type = other DNA

SEQ ID NO: 110044 - DNA, 120 bp, synthetic construct; identical to SEQ ID NO: 19415
  source 1..120: mol_type = other DNA

SEQ ID NO: 110045 - DNA, 120 bp, synthetic construct
  source 1..120: mol_type = other DNA
ataagaactgagtgaagtcgtatgatttaatttaattagaaatatttttctatcatccacagccacagccaggcacggtggctcatgcctgtaatcccagtactttgggaggccaaggca

SEQ ID NO: 110046 - DNA, 120 bp, synthetic construct; identical to SEQ ID NO: 25922
  source 1..120: mol_type = other DNA

SEQ ID NO: 110047 - DNA, 120 bp, synthetic construct; identical to SEQ ID NO: 12388
  source 1..120: mol_type = other DNA

SEQ ID NO: 110048 - DNA, 120 bp, synthetic construct; identical to SEQ ID NO: 18298
  source 1..120: mol_type = other DNA

SEQ ID NO: 110049 - DNA, 120 bp, synthetic construct
  source 1..120: mol_type = other DNA
tcttggtctcaagtgatcctcttgcctcagcttcccatagtgctgagattacaggcatgagtcactgctcctggtctgtaaaattcttagttctagttcttacaagattctaaggcttca

SEQ ID NO: 110050 - DNA, 120 bp, synthetic construct
  source 1..120: mol_type = other DNA
actgcctcttcaagtgggtccctgacccctgaccccagagcagcctaactgggaggcaccccccagcaggggcacactgacacctcacacggcagggtattccaacagacctgcagctga

SEQ ID NO: 110051 - DNA, 120 bp, synthetic construct
  source 1..120: mol_type = other DNA
ggatctctcggcagaaaccctacaagccagaagagagtgggggccaatattcaacattcttaaagaaaagaattttcaacccagaatttcatatccagccaagctaagcttcataagtga

SEQ ID NO: 110052 - DNA, 120 bp, synthetic construct
  source 1..120: mol_type = other DNA
gaccacatacttcgaagtaaagctctcctcagcaaatgtaaaagaacagaaattataacaaactatctctcagaccacagtgcaatcaaactagaactcaggattaagaatctcactcaa

SEQ ID NO: 110053 - DNA, 120 bp, synthetic construct
  source 1..120: mol_type = other DNA
cattttatgaggccagcatcattctgataccaaagctgggcagagacacaacaaaaaaagagaattttagaccaatatccttgatgaacatcgatgcaaaaatcctcaataaaatactgg

SEQ ID NO: 110054 - DNA, 120 bp, synthetic construct
  source 1..120: mol_type = other DNA
agaattggaaaaaactactttaaagttcatatggaaccaaaaaagagcccgcatcgccaagtcaatcctaagccaaaagaacaaagctggaggcatcacactacctgacttcaaacttta

SEQ ID NO: 110055 - DNA, 120 bp, synthetic construct
  source 1..120: mol_type = other DNA
cattgttggtgggactgtaaactagctcaaccattgtggaagtcagtgtggcgattcctcagggatctagaactagaaataccatttgacccagccatcccattactgggtatataccca

SEQ ID NO: 110056 - DNA, 120 bp, synthetic construct; identical to SEQ ID NO: 28122
  source 1..120: mol_type = other DNA

SEQ ID NO: 110057 - DNA, 120 bp, synthetic construct
  source 1..120: mol_type = other DNA
cggtgtggcgattcctcagggatctagaactagaaataccatttgacccagccatcccattactgggtatatacccaaatgattataaatcatgctgctataaagacacatgcacacgta

SEQ ID NO: 110058 - DNA, 120 bp, synthetic construct
  source 1..120: mol_type = other DNA
acattcaattaagattgttaacgtacaaagaactcttacaaactaattaaaaagaaatagtactggctaggcacagtggcagacgcctgtcatcccagcactttgggaggctgagacagg

SEQ ID NO: 110059 - DNA, 120 bp, synthetic construct
  source 1..120: mol_type = other DNA
cagttggacttgtggaaaatttaattcttgaagcagatgctgtgtgccccgaatgcttcttccccctggcccttcaactctgatttagttgagtatttcaagaatgacccaatttatgta

SEQ ID NO: 110060 - DNA, 120 bp, synthetic construct
  source 1..120: mol_type = other DNA
aaaggatcctcctgcctcagcctcccaaagtgctaggattacaggcatgagtcaccacgcctggttcacaatttctttttgtttttaccaaaggcaggtatattcctgaaattttttgtt

SEQ ID NO: 110061 - DNA, 120 bp, synthetic construct
  source 1..120: mol_type = other DNA
tcagcctcccaaagtgctaggattacaggcatgagccaccatacttggcccttttttttttttttttttttttttttttgagacagagtcttgctctgtctcacaggctggtgtgcagtg

SEQ ID NO: 110062 - DNA, 120 bp, synthetic construct
  source 1..120: mol_type = other DNA
cgggaggcagaggttgcagtgagccactgcactccagtctgggtggcagagcgagactccgtctcaaaaagaaaaaaattaaaaaacaaaaagaaacctggttctatattttgtttaaat

SEQ ID NO: 110063 - DNA, 120 bp, synthetic construct
  source 1..120: mol_type = other DNA
taaaaatatatatatactatgtacatataagccatttagcaaccctagatgcttaataaagaatactggaggcccggtgtggtggctcacacctgtaatcccagcactttgggaggccga

SEQ ID NO: 110064 - DNA, 120 bp, synthetic construct
  source 1..120: mol_type = other DNA
aaatataacacagtgaaatgaaaggattgagagaaatgaaaaatatacacgccacaaatgtgggagggcgataaccactcgtagaaagcgtgagaagttactacaagcggtcctcccggc

SEQ ID NO: 110065 - DNA, 120 bp, synthetic construct; identical to SEQ ID NO: 1393
  source 1..120: mol_type = other DNA

SEQ ID NO: 110066 - DNA, 120 bp, synthetic construct; identical to SEQ ID NO: 1394
  source 1..120: mol_type = other DNA

SEQ ID NO: 110067 - DNA, 120 bp, synthetic construct
  source 1..120: mol_type = other DNA
gccaatatggtgaaaccttgtctctactaaaaatacaaaaattagccgggcatggtgtcacgtgtctataatcccagctactcgggaggctgaggcagaaaaattgcttgaacctgggag

SEQ ID NO: 110068 - DNA, 120 bp, synthetic construct; identical to SEQ ID NO: 1395
  source 1..120: mol_type = other DNA

SEQ ID NO: 110069 - DNA, 120 bp, synthetic construct; identical to SEQ ID NO: 1396
  source 1..120: mol_type = other DNA

SEQ ID NO: 110070 - DNA, 120 bp, synthetic construct
  source 1..120: mol_type = other DNA
ctatgaatattagtgtataagacttcatatagccaaggctggcagatcgcttgagcccaggagtttgagaccagcctgggaaacatggtgaaacctctatttttattttaaaatcaaaaa

SEQ ID NO: 110071 - DNA, 120 bp, synthetic construct; identical to SEQ ID NO: 1397
  source 1..120: mol_type = other DNA

SEQ ID NO: 110072 - DNA, 120 bp, synthetic construct; identical to SEQ ID NO: 1398
  source 1..120: mol_type = other DNA

SEQ ID NO: 110073 - DNA, 120 bp, synthetic construct
  source 1..120: mol_type = other DNA
tcctgacctcaggtgatccacccacctcggcctcccaaagtgttgggattacaggcgtgaaccaccatgcctggccagttctgttatttttaaaacccaagtttccctggtcatatcttg

SEQ ID NO: 110074 - DNA, 120 bp, synthetic construct
  source 1..120: mol_type = other DNA
ctggccttgattttgtgatttctttatttcttcaggaccacccttcattttctactgtttgcttcctttttttttgagatggagtctcactctgtcactcaggctggagtgcagtgatct

SEQ ID NO: 110075 - DNA, 120 bp, synthetic construct
  source 1..120: mol_type = other DNA
atcacttgaggtcaggagttcgagaccagttttgccaagatgatgaaagcccatgtctactaaaaatacaaaaattagcccagcttgatggtgggcgcctataatcccagctatttgaga

SEQ ID NO: 110076 - DNA, 120 bp, synthetic construct
  source 1..120: mol_type = other DNA
tcctgttgggttttttttttttttgggggttttttttgtttttttttgtttttttttcccagacaaggtctcaatttgttacccaggctggagtgcagcggcgccatctccactcactgc

SEQ ID NO: 110077 - DNA, 120 bp, synthetic construct
  source 1..120: mol_type = other DNA
tctctcagtgacttgcacagtgctagcagatagtgctaaaaaattatttattattattattattttgttattgttgttgttgttgttagacagggtcttcctctgtcacccaggctagag

SEQ ID NO: 110078 - DNA, 120 bp, synthetic construct; identical to SEQ ID NO: 1399
  source 1..120: mol_type = other DNA

SEQ ID NO: 110079 - DNA, 120 bp, synthetic construct; identical to SEQ ID NO: 1400
  source 1..120: mol_type = other DNA

SEQ ID NO: 110080 - DNA, 120 bp, synthetic construct
  source 1..120: mol_type = other DNA
aatcccagtactttgggaggctgaggcgagcaaatcacgaggtcaggagttcaagaccagcctggcccacatggtgaaaccccgtctttattaaaaatacaaaaattagctgtgcacagt

SEQ ID NO: 110081 - DNA, 120 bp, synthetic construct
  source 1..120: mol_type = other DNA
tcatgaaagtataaagaattagatgggaatgataaatgctaaaatcaggacatgtgttccatttgtgaatggaaggcagggagaaggtgccgtttggaaggagtacccaagagccgtaag

SEQ ID NO: 110082 - DNA, 120 bp, synthetic construct; identical to SEQ ID NO: 1402
  source 1..120: mol_type = other DNA

SEQ ID NO: 110083 - DNA, 120 bp, synthetic construct; identical to SEQ ID NO: 1401
  source 1..120: mol_type = other DNA

SEQ ID NO: 110084 - DNA, 120 bp, synthetic construct; identical to SEQ ID NO: 1403
  source 1..120: mol_type = other DNA

SEQ ID NO: 110085 - DNA, 120 bp, synthetic construct; identical to SEQ ID NO: 1404
  source 1..120: mol_type = other DNA

SEQ ID NO: 110086 - DNA, 120 bp, synthetic construct
  source 1..120: mol_type = other DNA
cagaggtagctgggactacaggtgcctgccaccacgcctgtctaattttttgtatttttttgtaaagacagggtttcactgtgttagccaggatggtctcaatctcctgaccccgtgatc

SEQ ID NO: 110087 - DNA, 120 bp, synthetic construct
  source 1..120: mol_type = other DNA
acctataatcccagtactttgggaggtagaggcaggtggatcacttgaggttaggagttcaggaccagcctggccaacatggtgactactccatttctactaaatacacaaaacttagcc

SEQ ID NO: 110088 - DNA, 120 bp, synthetic construct; identical to SEQ ID NO: 1405
  source 1..120: mol_type = other DNA

SEQ ID NO: 110089 - DNA, 120 bp, synthetic construct; identical to SEQ ID NO: 1406
  source 1..120: mol_type = other DNA

SEQ ID NO: 110090 - DNA, 120 bp, synthetic construct
  source 1..120: mol_type = other DNA
ttcaagtgattctcctgcctcagcttcccgagtagctgtgattacagccatatgccaccacgcccagccagttttgtgttttgttttgttttttgttttttttttttgagagggtgtctt

SEQ ID NO: 110091 - DNA, 120 bp, synthetic construct
  source 1..120: mol_type = other DNA
ggtgatccaactgtctcggcctcccaaagtgctgggattacaggcgtgagccactgtgcctagcctgagccaccacgccggcctaatttttaaattttttgtagagacagggtctcatta

SEQ ID NO: 110092 - DNA, 120 bp, synthetic construct
  source 1..120: mol_type = other DNA
gaattcgtcaagcctctggttctaatttctcatttgcaggaaatgctggcatagagcagcactaaatgacaccactaaagaaacgatcagacagatctggaatgtgaagcgttatagaag

SEQ ID NO: 110093 - DNA, 120 bp, synthetic construct
  source 1..120: mol_type = other DNA
gaccaccctggcctcccaaagtgctgggattacagccgtgagccaccgcacacggcctctctatttatttctatacatagcttttcacattatattatgtttatatattgtttatatctg

SEQ ID NO: 110094 - DNA, 120 bp, synthetic construct
  source 1..120: mol_type = other DNA
atccacctgcctcggcctcccaaagtgctgggattacaagcttgagccactacgcctgacccagagttaactttttaaaaaagtttttatgaacttaagtcttgtgatgtttgaaataat

SEQ ID NO: 110095 - DNA, 120 bp, synthetic construct
  source 1..120: mol_type = other DNA
tgtttgtgtatacatttattgtgaatttttaaaaaacatgtaattaaggccaggcatggtggctcatacctgtaatcctagcactttgagaggctgaggtgggtggatcacctgaggtcg

SEQ ID NO: 110096 - DNA, 120 bp, synthetic construct
  source 1..120: mol_type = other DNA
tagggtttttatggttttaggtctaacatttaagtctttaatccatcttgaattaatttttgtataaggtgtaaggaagggatccagtttcagctttctacatatggctagccagtttcc

SEQ ID NO: 110097 - DNA, 120 bp, synthetic construct
  source 1..120: mol_type = other DNA
tcatttattgagagtttttagcatgaaggattgttgaattttgtcaaaggccttttctgcatctattgagataatcatgtggtttttgtctttggttctgtttatatgctggattacatt

SEQ ID NO: 110098 - DNA, 120 bp, synthetic construct
  source 1..120: mol_type = other DNA
acattcaaagcagtgtgtagagggaaatttatagcactaaatgcccacaagagaaagcaggaaagatccaaaattgacaccctaacatcacaattaaaagaactagaaaagcaagagcaa

SEQ ID NO: 110099 - DNA, 120 bp, synthetic construct
  source 1..120: mol_type = other DNA
ggcctcccaaggtgccgggattgcagacggagtctcgttcactcagtgctcagtgttgcctaggctggagtgcagtggcgtgatctcggctcgctgcaacctccacctcccagccgcctg

SEQ ID NO: 110100 - DNA, 120 bp, synthetic construct
  source 1..120: mol_type = other DNA
aaatccccctctgcaagaaacacccaagaatgatcaattaaaaaaaaaaaaaaaagaaagaaaaccatctaacctactggaggaggagaggtcacgtggagcagaaccgaagtcccctag

SEQ ID NO: 110101 - DNA, 120 bp, synthetic construct; identical to SEQ ID NO: 14440
  source 1..120: mol_type = other DNA

SEQ ID NO: 110102 - DNA, 120 bp, synthetic construct; identical to SEQ ID NO: 14441
  source 1..120: mol_type = other DNA

SEQ ID NO: 110103 - DNA, 120 bp, synthetic construct; identical to SEQ ID NO: 28593
  source 1..120: mol_type = other DNA

SEQ ID NO: 110104 - DNA, 120 bp, synthetic construct; identical to SEQ ID NO: 28594
  source 1..120: mol_type = other DNA

SEQ ID NO: 110105 - DNA, 120 bp, synthetic construct; identical to SEQ ID NO: 28595
  source 1..120: mol_type = other DNA

SEQ ID NO: 110106 - DNA, 120 bp, synthetic construct; identical to SEQ ID NO: 28596
  source 1..120: mol_type = other DNA

SEQ ID NO: 110107 - DNA, 120 bp, synthetic construct; identical to SEQ ID NO: 28597
  source 1..120: mol_type = other DNA

SEQ ID NO: 110108 - DNA, 120 bp, synthetic construct; identical to SEQ ID NO: 28598
  source 1..120: mol_type = other DNA

SEQ ID NO: 110109 - DNA, 120 bp, synthetic construct
  source 1..120: mol_type = other DNA
atggccgagctcctcctccttcctgaggcctcacgggcatctttctagaggatggccgagctcctccttcctaaggcctcacaaggggcatctttctagaggatcgccgagctcctcctc

SEQ ID NO: 110110 - DNA, 120 bp, synthetic construct
  source 1..120: mol_type = other DNA
cctcctccttcctgaggactcacgggcgtctttctagaggatctccgagctcctcctccttcctgaggcctcacgggcatctttctagaggatggccgagctcctcctccttcctgaggc

SEQ ID NO: 110111 - DNA, 120 bp, synthetic construct
  source 1..120: mol_type = other DNA
catctttctagaggattgccgagctcctcctccttcctgaggcctcacgaggggcatctttctagaggatctccgagctcctcctccttcctgaggcctcacgggcatctttctagagga

SEQ ID NO: 110112 - DNA, 120 bp, synthetic construct; identical to SEQ ID NO: 28599
  source 1..120: mol_type = other DNA

SEQ ID NO: 110113 - DNA, 120 bp, synthetic construct; identical to SEQ ID NO: 28600
  source 1..120: mol_type = other DNA

SEQ ID NO: 110114 - DNA, 120 bp, synthetic construct; identical to SEQ ID NO: 28601
  source 1..120: mol_type = other DNA

SEQ ID NO: 110115 - DNA, 120 bp, synthetic construct
  source 1..120: mol_type = other DNA
ggccgaggcgggtggatcacctgaggtcaagagtttgagaccagcctggacaatatagtgaaaccctgtcactagtaaaaatacaaaaaattagctgggcgtggtggtggatgcctgtaa

SEQ ID NO: 110116 - DNA, 120 bp, synthetic construct; identical to SEQ ID NO: 28602
  source 1..120: mol_type = other DNA

SEQ ID NO: 110117 - DNA, 120 bp, synthetic construct; identical to SEQ ID NO: 28603
  source 1..120: mol_type = other DNA

SEQ ID NO: 110118 - DNA, 120 bp, synthetic construct; identical to SEQ ID NO: 28604
  source 1..120: mol_type = other DNA

SEQ ID NO: 110119 - DNA, 120 bp, synthetic construct; identical to SEQ ID NO: 28605
  source 1..120: mol_type = other DNA

SEQ ID NO: 110120 - DNA, 120 bp, synthetic construct; identical to SEQ ID NO: 28606
  source 1..120: mol_type = other DNA

SEQ ID NO: 110121 - DNA, 120 bp, synthetic construct; identical to SEQ ID NO: 28610
  source 1..120: mol_type = other DNA

SEQ ID NO: 110122 - DNA, 120 bp, synthetic construct; identical to SEQ ID NO: 28611
  source 1..120: mol_type = other DNA

SEQ ID NO: 110123 - DNA, 120 bp, synthetic construct; identical to SEQ ID NO: 28591
  source 1..120: mol_type = other DNA

SEQ ID NO: 110124 - DNA, 120 bp, synthetic construct
  source 1..120: mol_type = other DNA
acacgaggctctcactgtgttctcggaggaggtgtcattttcctgccctgagacacgaggctctgactgcgttttcggaggaggtgttattttcatgccgtcctcactttgggggtgagg

SEQ ID NO: 110125 - DNA, 120 bp, synthetic construct; identical to SEQ ID NO: 28592
  source 1..120: mol_type = other DNA

SEQ ID NO: 110126 - DNA, 120 bp, synthetic construct; identical to SEQ ID NO: 28607
  source 1..120: mol_type = other DNA

SEQ ID NO: 110127 - DNA, 120 bp, synthetic construct; identical to SEQ ID NO: 28608
  source 1..120: mol_type = other DNA

SEQ ID NO: 110128 - DNA, 120 bp, synthetic construct; identical to SEQ ID NO: 28609
  source 1..120: mol_type = other DNA

SEQ ID NO: 110129 - DNA, 120 bp, synthetic construct; identical to SEQ ID NO: 28580
  source 1..120: mol_type = other DNA

SEQ ID NO: 110130 - DNA, 120 bp, synthetic construct; identical to SEQ ID NO: 28581
  source 1..120: mol_type = other DNA

SEQ ID NO: 110131 - DNA, 120 bp, synthetic construct; identical to SEQ ID NO: 28582
  source 1..120: mol_type = other DNA

SEQ ID NO: 110132 - DNA, 120 bp, synthetic construct; identical to SEQ ID NO: 28583
  source 1..120: mol_type = other DNA

SEQ ID NO: 110133 - DNA, 120 bp, synthetic construct; identical to SEQ ID NO: 28584
  source 1..120: mol_type = other DNA

SEQ ID NO: 110134 - DNA, 120 bp, synthetic construct; identical to SEQ ID NO: 28585
  source 1..120: mol_type = other DNA

SEQ ID NO: 110135 - DNA, 120 bp, synthetic construct; identical to SEQ ID NO: 28586
  source 1..120: mol_type = other DNA

SEQ ID NO: 110136 - DNA, 120 bp, synthetic construct
  source 1..120: mol_type = other DNA
aattcccgtggtgaaaacttggatgaaatatcttagagtcattcaatgggagacacacacacacaaatacacacacacacatacatacacacacacacacacacatagacactcacataa

SEQ ID NO: 110137 - DNA, 120 bp, synthetic construct; identical to SEQ ID NO: 28588
  source 1..120: mol_type = other DNA

SEQ ID NO: 110138 - DNA, 120 bp, synthetic construct; identical to SEQ ID NO: 28589
  source 1..120: mol_type = other DNA

SEQ ID NO: 110139 - DNA, 120 bp, synthetic construct
  source 1..120: mol_type = other DNA
aagctctcccaaaagcccagggctgtttgaggcccccaaaatgcgccttgggatcttttttttttaaattatactttaagttttagggtacatgtgcacaacgtgcatgtttgttacata

SEQ ID NO: 110140 - DNA, 120 bp, synthetic construct; identical to SEQ ID NO: 22317
  source 1..120: mol_type = other DNA

SEQ ID NO: 110141 - DNA, 120 bp, synthetic construct
  source 1..120: mol_type = other DNA
taagacctccatctcaacaaaaaatttaaaaaaaaattagccaggtgtggtggtgtgtgcctgtagtcccaactacttaggaggcttagatgggaggattgcttgagcccaggaagttga

SEQ ID NO: 110142 - DNA, 120 bp, synthetic construct; identical to SEQ ID NO: 21481
  source 1..120: mol_type = other DNA

SEQ ID NO: 110143 - DNA, 120 bp, synthetic construct; identical to SEQ ID NO: 21482
  source 1..120: mol_type = other DNA

SEQ ID NO: 110144 - DNA, 120 bp, synthetic construct; identical to SEQ ID NO: 21483
  source 1..120: mol_type = other DNA

SEQ ID NO: 110145 - DNA, 120 bp, synthetic construct; identical to SEQ ID NO: 21484
  source 1..120: mol_type = other DNA

SEQ ID NO: 110146 - DNA, 120 bp, synthetic construct; identical to SEQ ID NO: 21485
  source 1..120: mol_type = other DNA

SEQ ID NO: 110147 - DNA, 120 bp, synthetic construct; identical to SEQ ID NO: 21486
  source 1..120: mol_type = other DNA

SEQ ID NO: 110148 - DNA, 120 bp, synthetic construct
  source 1..120: mol_type = other DNA
agcaagaccctgtctcaaaaaaaaaaaaaaaaaaaaaaaaaaaaaaaaaaaaaaacccgaccagaagagagaggcctgctaaagtcggaactgtgtgcaggaaatttgaaggggaaggat

SEQ ID NO: 110149 - DNA, 120 bp, synthetic construct; identical to SEQ ID NO: 33584
  source 1..120: mol_type = other DNA

SEQ ID NO: 110150 - DNA, 120 bp, synthetic construct; identical to SEQ ID NO: 33585
  source 1..120: mol_type = other DNA

SEQ ID NO: 110151 - DNA, 120 bp, synthetic construct
  source 1..120: mol_type = other DNA
tatttctggttttatccctagtagcaccttaatccttgacactgccttctagcattctctgtgttcatgctagaaccacccaagtggataaaggggaccttacttctctattgttccttc

SEQ ID NO: 110152 - DNA, 120 bp, synthetic construct
  source 1..120: mol_type = other DNA
tatttctcctcatcctctccagcatctgttgcttcctgactttttaatgatggccattctaactccagcttgggctgcagagcgagaatgtctcaaaaaaaaaaaaaaatcttaataaaa

SEQ ID NO: 110153 - DNA, 120 bp, synthetic construct; identical to SEQ ID NO: 17376
  source 1..120: mol_type = other DNA

SEQ ID NO: 110154 - DNA, 120 bp, synthetic construct
  source 1..120: mol_type = other DNA
gattactttgatgaaaatatcttagtaggaacatgaaaacatgggtgcatataaaatagtggtcttcacagccaggtgcagtggctcacgcctataatcccagcacttcaggaggccaag

SEQ ID NO: 110155 - DNA, 120 bp, synthetic construct
  source 1..120: mol_type = other DNA
tgggttgctgagtgtgggggtgatggtgaaacaaaatgcagaaaaggtaaaaattgaagaagcagagttaaaagtagctagcggtctggcctaagagacaggaagtggcccagactgaga

SEQ ID NO: 110156 - DNA, 120 bp, synthetic construct
  source 1..120: mol_type = other DNA
ggacagaaagttaggaggcgggagcagagaggagcgagggggtggggccagagagatgggcggggtcaggtttggggaggaaaggtggggaagagaaaggaccacagggatggaggtgaa

SEQ ID NO: 110157 - DNA, 120 bp, synthetic construct; identical to SEQ ID NO: 18408
  source 1..120: mol_type = other DNA

SEQ ID NO: 110158 - DNA, 120 bp, synthetic construct; identical to SEQ ID NO: 18409
  source 1..120: mol_type = other DNA

SEQ ID NO: 110159 - DNA, 120 bp, synthetic construct; identical to SEQ ID NO: 18410
  source 1..120: mol_type = other DNA

SEQ ID NO: 110160 - DNA, 120 bp, synthetic construct; identical to SEQ ID NO: 9705
  source 1..120: mol_type = other DNA

SEQ ID NO: 110161 - DNA, 120 bp, synthetic construct; identical to SEQ ID NO: 9706
  source 1..120: mol_type = other DNA

SEQ ID NO: 110162 - DNA, 120 bp, synthetic construct; identical to SEQ ID NO: 9707
  source 1..120: mol_type = other DNA

SEQ ID NO: 110163 - DNA, 120 bp, synthetic construct; identical to SEQ ID NO: 9708
  source 1..120: mol_type = other DNA

SEQ ID NO: 110164 - DNA, 120 bp, synthetic construct; identical to SEQ ID NO: 9713
  source 1..120: mol_type = other DNA

SEQ ID NO: 110165 - DNA, 120 bp, synthetic construct; identical to SEQ ID NO: 9714
  source 1..120: mol_type = other DNA

SEQ ID NO: 110166 - DNA, 120 bp, synthetic construct; identical to SEQ ID NO: 9715
  source 1..120: mol_type = other DNA

SEQ ID NO: 110167 - DNA, 120 bp, synthetic construct; identical to SEQ ID NO: 9716
  source 1..120: mol_type = other DNA

SEQ ID NO: 110168 - DNA, 120 bp, synthetic construct; identical to SEQ ID NO: 9717
  source 1..120: mol_type = other DNA

SEQ ID NO: 110169 - DNA, 120 bp, synthetic construct; identical to SEQ ID NO: 9718
  source 1..120: mol_type = other DNA

SEQ ID NO: 110170 - DNA, 120 bp, synthetic construct
  source 1..120: mol_type = other DNA
taaggctatagtaaacaaaacagcatggtactggtaccaaaacagagagatagaccaatggaacagaacagagccctcagaaataatgctgcatatctacaactatctcatctttgacaa

SEQ ID NO: 110171 - DNA, 120 bp, synthetic construct
  source 1..120: mol_type = other DNA
aaaaaaggatgagttcatgtcctttgtagggacatggatgaagctggaaaccatcattctcagcaaactatcgcaaggacagaaaatcaaacacagcatgttctcactcataggtgggaa

SEQ ID NO: 110172 - DNA, 120 bp, synthetic construct; identical to SEQ ID NO: 9719
  source 1..120: mol_type = other DNA

SEQ ID NO: 110173 - DNA, 120 bp, synthetic construct; identical to SEQ ID NO: 9720
  source 1..120: mol_type = other DNA

SEQ ID NO: 110174 - DNA, 120 bp, synthetic construct
  source 1..120: mol_type = other DNA
taaagggtctgtgctgaggaggattagtaaaagaggaaggaatgcctctttgcagttgagataagaggaaggcatctgtctcctgctcgtccctgggcaatggaatgtctccgtgtaaaa

SEQ ID NO: 110175 - DNA, 120 bp, synthetic construct; identical to SEQ ID NO: 9721
  source 1..120: mol_type = other DNA

SEQ ID NO: 110176 - DNA, 120 bp, synthetic construct; identical to SEQ ID NO: 9709
  source 1..120: mol_type = other DNA

SEQ ID NO: 110177 - DNA, 120 bp, synthetic construct
  source 1..120: mol_type = other DNA
catcgtctccggcccagggaaagccatcgtctccggcccagggaaagccatcgtctccggcccagggaaagccatcgtctccggcccagggaaagccatcgtctctagcctagggaaagc

SEQ ID NO: 110178 - DNA, 120 bp, synthetic construct
  source 1..120: mol_type = other DNA
gtctccggcccagggaaagccatcgtctccggcccagggaaagccatcgtctccggcccagggaaagccatcgtctccggcccagggaaagccatcgtctctagcccagggaaagccatc

SEQ ID NO: 110179 - DNA, 120 bp, synthetic construct; identical to SEQ ID NO: 9710
  source 1..120: mol_type = other DNA

SEQ ID NO: 110180 - DNA, 120 bp, synthetic construct; identical to SEQ ID NO: 9722
  source 1..120: mol_type = other DNA

SEQ ID NO: 110181 - DNA, 120 bp, synthetic construct; identical to SEQ ID NO: 9723
  source 1..120: mol_type = other DNA

SEQ ID NO: 110182 - DNA, 120 bp, synthetic construct; identical to SEQ ID NO: 9724
  source 1..120: mol_type = other DNA

SEQ ID NO: 110183 - DNA, 120 bp, synthetic construct; identical to SEQ ID NO: 9725
  source 1..120: mol_type = other DNA

SEQ ID NO: 110184 - DNA, 120 bp, synthetic construct; identical to SEQ ID NO: 9726
  source 1..120: mol_type = other DNA

SEQ ID NO: 110185 - DNA, 120 bp, synthetic construct; identical to SEQ ID NO: 9727
  source 1..120: mol_type = other DNA

SEQ ID NO: 110186 - DNA, 120 bp, synthetic construct; identical to SEQ ID NO: 9728
  source 1..120: mol_type = other DNA

SEQ ID NO: 110187 - DNA, 120 bp, synthetic construct; identical to SEQ ID NO: 9729
  source 1..120: mol_type = other DNA

SEQ ID NO: 110188 - DNA, 120 bp, synthetic construct; identical to SEQ ID NO: 9732
  source 1..120: mol_type = other DNA

SEQ ID NO: 110189 - DNA, 120 bp, synthetic construct; identical to SEQ ID NO: 9733
  source 1..120: mol_type = other DNA

SEQ ID NO: 110190 - DNA, 120 bp, synthetic construct; identical to SEQ ID NO: 9734
  source 1..120: mol_type = other DNA

SEQ ID NO: 110191 - DNA, 120 bp, synthetic construct; identical to SEQ ID NO: 9735
  source 1..120: mol_type = other DNA

SEQ ID NO: 110192 - DNA, 120 bp, synthetic construct
  source 1..120: mol_type = other DNA
attagatatatatactaatgctatccctccccactccccccaccccacaacagtccccagagtgtgctgttccccttcctgtgtccatgtgttctcattgttcaattcccacctacgagt

SEQ ID NO: 110193 - DNA, 120 bp, synthetic construct; identical to SEQ ID NO: 9736
  source 1..120: mol_type = other DNA

SEQ ID NO: 110194 - DNA, 120 bp, synthetic construct; identical to SEQ ID NO: 9737
  source 1..120: mol_type = other DNA

SEQ ID NO: 110195 - DNA, 120 bp, synthetic construct
  source 1..120: mol_type = other DNA
gcccggccagccgccccatccgggaggtgaggggcgcctctgcccggccgcccctactgggaagtgaggagcccctctgcccggccaccaccccgtctgggaggtgtacccaacagttca

SEQ ID NO: 110196 - DNA, 120 bp, synthetic construct; identical to SEQ ID NO: 9738
  source 1..120: mol_type = other DNA

SEQ ID NO: 110197 - DNA, 120 bp, synthetic construct; identical to SEQ ID NO: 9741
  source 1..120: mol_type = other DNA

SEQ ID NO: 110198 - DNA, 120 bp, synthetic construct
  source 1..120: mol_type = other DNA
tcggtctcccaaagtgttgggattacaggcgtgagccaccgcacccagccaagtctttaaagtataaaaccttaaggttcatatccttcacccactttttgatgggtttttttttcttgt

SEQ ID NO: 110199 - DNA, 120 bp, synthetic construct
  source 1..120: mol_type = other DNA
aagttgcttatcagcttaaggagattttgggctgagatgatcgggttttctagatatacaatcatgtcatctgcaaacagggacaatttgacttcctcttttcctaattgaatgcccttt

SEQ ID NO: 110200 - DNA, 120 bp, synthetic construct
  source 1..120: mol_type = other DNA
gtcttgggagagtgtatgtgtcgagcaatttatccatttcttctagattttctagtttatctgcgtagaggtgtttatagtattctctgatggtagtttgtatttctgtgggatcggtgg

SEQ ID NO: 110201 - DNA, 120 bp, synthetic construct
  source 1..120: mol_type = other DNA
aggaaggggaacatcacacaccagggactgttgtggggttgggggaggggggagggatagcattaggatatatacctaatgctaaatgacgagttaatgggtgcagcacactaacatggc

SEQ ID NO: 110202 - DNA, 120 bp, synthetic construct; identical to SEQ ID NO: 9711
  source 1..120: mol_type = other DNA

SEQ ID NO: 110203 - DNA, 120 bp, synthetic construct; identical to SEQ ID NO: 9712
  source 1..120: mol_type = other DNA

SEQ ID NO: 110204 - DNA, 120 bp, synthetic construct; identical to SEQ ID NO: 9742
  source 1..120: mol_type = other DNA

SEQ ID NO: 110205 - DNA, 120 bp, synthetic construct; identical to SEQ ID NO: 9743
  source 1..120: mol_type = other DNA

SEQ ID NO: 110206 - DNA, 120 bp, synthetic construct; identical to SEQ ID NO: 9744
  source 1..120: mol_type = other DNA

SEQ ID NO: 110207 - DNA, 120 bp, synthetic construct; identical to SEQ ID NO: 9745
  source 1..120: mol_type = other DNA

SEQ ID NO: 110208 - DNA, 120 bp, synthetic construct; identical to SEQ ID NO: 9730
  source 1..120: mol_type = other DNA

SEQ ID NO: 110209 - DNA, 120 bp, synthetic construct; identical to SEQ ID NO: 9731
  source 1..120: mol_type = other DNA

SEQ ID NO: 110210 - DNA, 120 bp, synthetic construct; identical to SEQ ID NO: 9739
  source 1..120: mol_type = other DNA

SEQ ID NO: 110211 - DNA, 120 bp, synthetic construct; identical to SEQ ID NO: 9740
  source 1..120: mol_type = other DNA

SEQ ID NO: 110212 - DNA, 120 bp, synthetic construct; identical to SEQ ID NO: 341
  source 1..120: mol_type = other DNA

SEQ ID NO: 110213 - DNA, 120 bp, synthetic construct; identical to SEQ ID NO: 9746
  source 1..120: mol_type = other DNA

SEQ ID NO: 110214 - DNA, 120 bp, synthetic construct; identical to SEQ ID NO: 9747
  source 1..120: mol_type = other DNA

SEQ ID NO: 110215 - DNA, 120 bp, synthetic construct; identical to SEQ ID NO: 9701
  source 1..120: mol_type = other DNA

SEQ ID NO: 110216 - DNA, 120 bp, synthetic construct; identical to SEQ ID NO: 9702
  source 1..120: mol_type = other DNA

SEQ ID NO: 110217 - DNA, 120 bp, synthetic construct; identical to SEQ ID NO: 9703
  source 1..120: mol_type = other DNA

SEQ ID NO: 110218 - DNA, 120 bp, synthetic construct; identical to SEQ ID NO: 9704
  source 1..120: mol_type = other DNA

SEQ ID NO: 110219 - DNA, 120 bp, synthetic construct
  source 1..120: mol_type = other DNA
caactcaaggtgccatctattatgagaggtccccttcatctatgtaaaaaaaaaaaaaaaaaaaaaagaggagccaagatggccgaataggaacagctccagtctacagctcccagcgtg

SEQ ID NO: 110220 - DNA, 120 bp, synthetic construct
  source 1..120: mol_type = other DNA
ggtcctgcctgttagaaggaaaactaacaaacagaaagcacatccacaccaaaaacccatctgtacatcaccatcatcaaagaccaaaagtagataaaaccacaaagatggggaaaaaac

SEQ ID NO: 110221 - DNA, 120 bp, synthetic construct
  source 1..120: mol_type = other DNA
caacattcttaaaaagaattttcaacccagaatttcatatccagccaaactaagcttcataagtgaaggagaaataaaatactttacagacaagcaaatgctgagagattttgtcaccac

SEQ ID NO: 110222 - DNA, 120 bp, synthetic construct
  source 1..120: mol_type = other DNA
ctcaactacatggaaactgaacaacctgctcctgaatgactactggatacataacgaaatgaaggcagaaataaagatgttctttgaaaccaacaagaacaaagacacaacataccagaa

SEQ ID NO: 110223 - DNA, 120 bp, synthetic construct
  source 1..120: mol_type = other DNA
caaatccagcagcacatcaaaaagcttatccaccatgatcaagtgggtttcatccctgggatgcaaggctggttcaatatacgcaaatcaataaatgtaatccagcatataaacagagcc

SEQ ID NO: 110224 - DNA, 120 bp, synthetic construct
  source 1..120: mol_type = other DNA
agtcctcagaaataacgccacatatctacaactatctgatctttgacaaacctgacaaaagaagcaatggggaaaggattccctatttaataaatggtgctgcgaaaactggctagccat

SEQ ID NO: 110225 - DNA, 120 bp, synthetic construct
  source 1..120: mol_type = other DNA
acccaaaggattataaatcatgctgctataaagacacatgcacacgtatgtttattgcggcattattcacaatagcaaagacttggaaccaacccaaatgtccaacaatgatagatcgga

SEQ ID NO: 110226 - DNA, 120 bp, synthetic construct; identical to SEQ ID NO: 17322
  source 1..120: mol_type = other DNA

SEQ ID NO: 110227 - DNA, 120 bp, synthetic construct
  source 1..120: mol_type = other DNA
aaattttacaaaggataaaaggaaaggcagccgcctctcacactctaggagccaatgtcctccttctcttatttctgtagcttcagcttctcacctaggaatgagatatggctaaatgtg

SEQ ID NO: 110228 - DNA, 120 bp, synthetic construct; identical to SEQ ID NO: 22349
  source 1..120: mol_type = other DNA

SEQ ID NO: 110229 - DNA, 120 bp, synthetic construct
  source 1..120: mol_type = other DNA
tggcacatatacaccatggaatactatgcagccataaaaaatgatgagttcgtgtcctttgtagggacatggatgaaattggaaatcatcattctcagtaaactattgcaagaccaaaaa

SEQ ID NO: 110230 - DNA, 120 bp, synthetic construct; identical to SEQ ID NO: 28115
  source 1..120: mol_type = other DNA

SEQ ID NO: 110231 - DNA, 120 bp, synthetic construct
  source 1..120: mol_type = other DNA
agcttctgcacagcaaaagaaactaccatcagagtgaacaggcaacctacagaatgggagaaaatttttaattagaatttatattaatttacttcttgcatgtttgtttggctggcggtg

SEQ ID NO: 110232 - DNA, 120 bp, synthetic construct
  source 1..120: mol_type = other DNA
ccctgaggaattgccacactgtcttccacaatggttgaactagtttacagtcccatcaacagtgtaaaagtgttcctatttctccacatcctctccagcacctgttgtttcctgactttt

SEQ ID NO: 110233 - DNA, 120 bp, synthetic construct; identical to SEQ ID NO: 28116
  source 1..120: mol_type = other DNA

SEQ ID NO: 110234 - DNA, 120 bp, synthetic construct
  source 1..120: mol_type = other DNA
gtattgttttccgtaatagctgtatcaatttgcatccttgccaacagtgtgcaagagttcccttttcttttttttttttttttttttttttagtatttattgatcattcttgggtgtttc

SEQ ID NO: 110235 - DNA, 120 bp, synthetic construct; identical to SEQ ID NO: 5586
  source 1..120: mol_type = other DNA

SEQ ID NO: 110236 - DNA, 120 bp, synthetic construct; identical to SEQ ID NO: 26984
  source 1..120: mol_type = other DNA

SEQ ID NO: 110237 - DNA, 120 bp, synthetic construct
  source 1..120: mol_type = other DNA
ccagcacctgtcgtttcctgacaatttaatgatcgccattctaactggtgtgagatggtatctcattgtggttttgatttgcatttctctgatggccagtgatgatgagcattttttcat

SEQ ID NO: 110238 - DNA, 120 bp, synthetic construct
  source 1..120: mol_type = other DNA
atacaaacaaatggaagaacattccatgctcatgggtaggaagaatcaatattgtgaaaatggccatactgcccaaggtaatttacagattcaatgccatccccatcaagctaccaatga

SEQ ID NO: 110239 - DNA, 120 bp, synthetic construct
  source 1..120: mol_type = other DNA
atggtaccagcgcctccttgtacctctggtagaattcggctgtgaatccatctggtcctgtactctttttggttggtaaactattgattattgccacaatttcagctcctgttattggtc

SEQ ID NO: 110240 - DNA, 120 bp, synthetic construct
  source 1..120: mol_type = other DNA
agatgtctattaggtccgcttggtgcagagctgagttgaattcctgggtatccttgttgactttctgtctcgttgatctgtctaatgttgacagtggggtgttaaagtctcccattatta

SEQ ID NO: 110241 - DNA, 120 bp, synthetic construct
  source 1..120: mol_type = other DNA
tttctccctagctgcccttaacattttttccttcatttcaaccttggtgaatctgacaattatgtgtcttggggttgctcttctcgaggattatctttgtggttttctctgtatttcctt

SEQ ID NO: 110242 - DNA, 120 bp, synthetic construct
  source 1..120: mol_type = other DNA
tcagtgtgcccctgctggggttgcctcccagttagcctgctcgggggtcaggggtcagggacccacttgaggaggcagtctgcccgttctcagatctccagctgcgtgctgggagaacca

SEQ ID NO: 110243 - DNA, 120 bp, synthetic construct; identical to SEQ ID NO: 30010
  source 1..120: mol_type = other DNA

SEQ ID NO: 110244 - DNA, 120 bp, synthetic construct
  source 1..120: mol_type = other DNA
gttatgttcattagtattctaaattaatttgattttttttgcattctttaatttcttgccccccctccccccccccaccttttttttttgagacggagtcttgctctgttgccaggctgg

SEQ ID NO: 110245 - DNA, 120 bp, synthetic construct; identical to SEQ ID NO: 30012
  source 1..120: mol_type = other DNA

SEQ ID NO: 110246 - DNA, 120 bp, synthetic construct; identical to SEQ ID NO: 30013
  source 1..120: mol_type = other DNA

SEQ ID NO: 110247 - DNA, 120 bp, synthetic construct; identical to SEQ ID NO: 30014
  source 1..120: mol_type = other DNA

SEQ ID NO: 110248 - DNA, 120 bp, synthetic construct
  source 1..120: mol_type = other DNA
tagccctttgtcagatgagtaggttgcaaaaattttctcccatgttataggttgcctgttcactctgatggtagtttcttttgctgtgcagaagctcttgagtttaattagatcccattt

SEQ ID NO: 110249 - DNA, 120 bp, synthetic construct
  source 1..120: mol_type = other DNA
gagggcatccctgtcttgtgccagttttcaaagggaatgcttccagtttttgcccattcagtatgatattggctgtgggtttgccatagatagctcttattattttgaaatacgtcccat

SEQ ID NO: 110250 - DNA, 120 bp, synthetic construct
  source 1..120: mol_type = other DNA
agactcccacacattaataatgggatactttaacaccccactgtcaacattagacagatcaacgagacagaaagtcaacaaggatacccaggaattgaactcagctctgcaccaagcgga

SEQ ID NO: 110251 - DNA, 120 bp, synthetic construct; identical to SEQ ID NO: 30015
  source 1..120: mol_type = other DNA

SEQ ID NO: 110252 - DNA, 120 bp, synthetic construct; identical to SEQ ID NO: 30016
  source 1..120: mol_type = other DNA

SEQ ID NO: 110253 - DNA, 120 bp, synthetic construct; identical to SEQ ID NO: 30017
  source 1..120: mol_type = other DNA

SEQ ID NO: 110254 - DNA, 120 bp, synthetic construct; identical to SEQ ID NO: 30018
  source 1..120: mol_type = other DNA

SEQ ID NO: 110255 - DNA, 120 bp, synthetic construct
  source 1..120: mol_type = other DNA
ccccagactcgcctcccagccgcgagcatctaggctacgagaggggagaggggccgcatctccgcaacactgagtccccagagaacacgacaggggtagcagatgcgcgcgcaccactgt

SEQ ID NO: 110256 - DNA, 120 bp, synthetic construct; identical to SEQ ID NO: 22248
  source 1..120: mol_type = other DNA

SEQ ID NO: 110257 - DNA, 120 bp, synthetic construct; identical to SEQ ID NO: 22287
  source 1..120: mol_type = other DNA

SEQ ID NO: 110258 - DNA, 120 bp, synthetic construct; identical to SEQ ID NO: 22288
  source 1..120: mol_type = other DNA

SEQ ID NO: 110259 - DNA, 120 bp, synthetic construct; identical to SEQ ID NO: 9185
  source 1..120: mol_type = other DNA

SEQ ID NO: 110260 - DNA, 120 bp, synthetic construct; identical to SEQ ID NO: 9186
  source 1..120: mol_type = other DNA

SEQ ID NO: 110261 - DNA, 120 bp, synthetic construct
  source 1..120: mol_type = other DNA
tctctgcagagtttccaggcagcacagggcatcacatggtgagggtgctggctcagcttcctctttcttcttcttctttttttttatttttttattattatactttaagttttagggtac

SEQ ID NO: 110262 - DNA, 120 bp, synthetic construct; identical to SEQ ID NO: 31754
  source 1..120: mol_type = other DNA

SEQ ID NO: 110263 - DNA, 120 bp, synthetic construct; identical to SEQ ID NO: 31755
  source 1..120: mol_type = other DNA

SEQ ID NO: 110264 - DNA, 120 bp, synthetic construct
  source 1..120: mol_type = other DNA
tttgtcagatgagtaggttgcgaaaattttctcccattttgtaggttgcctgttcactctgatggtagtttcttttgctgtgcagaagctctttagtttaatcagatcccatttgtcaat

SEQ ID NO: 110265 - DNA, 120 bp, synthetic construct
  source 1..120: mol_type = other DNA
atgatttggctctctgtttgtctgttgttggtgtataagaatgcttgtgatttttacacattgattttgtatcctgagactttgctgaagttgcttatcagcttaaggagattttgggct

SEQ ID NO: 110266 - DNA, 120 bp, synthetic construct
  source 1..120: mol_type = other DNA
tctggttctggactctttttggttggtaagctattgattattgccacaacttcagctcctgttattggtctattcagagattcaacttcttcctggtttagtcttgggagagtgtatgtg

SEQ ID NO: 110267 - DNA, 120 bp, synthetic construct
  source 1..120: mol_type = other DNA
cgttgatctgtctaatgttgacagtggggtgttaaagtctcccattattaatgtgtgggagtctaagtctctttgtaggtcactcaggacttgctttatgaatcttggtgctcctgtatt

SEQ ID NO: 110268 - DNA, 120 bp, synthetic construct
  source 1..120: mol_type = other DNA
gtatctttgtggcgttgtctgtatttcctgaatctgaacgttggcctgccttgctagattagggaagttctcctggataatatcttgcagagtgttttccaacttggttccattctcccc

SEQ ID NO: 110269 - DNA, 120 bp, synthetic construct
  source 1..120: mol_type = other DNA
agttcgagcttcccggctgctttgtttacctaatgaagcctgggcaatggcgggcgcccctcccccagcctagctgccaccttgcagttggatctcagactgctgtgctagcaatcagcg

SEQ ID NO: 110270 - DNA, 120 bp, synthetic construct; identical to SEQ ID NO: 31756
  source 1..120: mol_type = other DNA

SEQ ID NO: 110271 - DNA, 120 bp, synthetic construct
  source 1..120: mol_type = other DNA
atagcaagaccctatctgtacaaaaacttcaaaaaaaaaaataaataaaacaattagctgggtgtggtggcatgcacctgtagtcccagctactcagaggctgaggtgggaggattcttg

SEQ ID NO: 110272 - DNA, 120 bp, synthetic construct; identical to SEQ ID NO: 16547
  source 1..120: mol_type = other DNA

SEQ ID NO: 110273 - DNA, 120 bp, synthetic construct
  source 1..120: mol_type = other DNA
ggtggggggaggggggagggatagcattgggagatatacctaatgctagatgacgagttagtgggtgcagcgcaccagcatggcacatgtatatatatgtaactaacctgcacaatgtgc

SEQ ID NO: 110274 - DNA, 120 bp, synthetic construct
  source 1..120: mol_type = other DNA
gcagagcttgtagtgagccaagatcacgctattgcactccagcctgggcgacagagcgagactctgtctcaaaaaaataaatataaatacatagacacaaagtggataacatatacactg

SEQ ID NO: 110275 - DNA, 120 bp, synthetic construct; identical to SEQ ID NO: 31513
  source 1..120: mol_type = other DNA

SEQ ID NO: 110276 - DNA, 120 bp, synthetic construct
  source 1..120: mol_type = other DNA
tctgtcaccagactggagtgctgtggcatgatctcggatcactgcagcctctccctcccaggttcaagcgattcttctgcctcaggctcccaaatagctgggactgtgggcatgcaccac

SEQ ID NO: 110277 - DNA, 120 bp, synthetic construct
  source 1..120: mol_type = other DNA
aattgtggcaataatcaatagcttaccaacgaaaaagagtccaggaccagatggactcacagccgaattctaccagagatacaaggaggaactggtaccattccttctgaaactattcca

SEQ ID NO: 110278 - DNA, 120 bp, synthetic construct
  source 1..120: mol_type = other DNA
aacattccatgctcatgggtaggaagaatcaatatcatgaaaatggccatactgcccaaggtaatttatagattcaatgccatcccaatcaagctaccaatgactttcttcaaagaattg

SEQ ID NO: 110279 - DNA, 120 bp, synthetic construct
  source 1..120: mol_type = other DNA
ataaatcatgctgctataaagacacatgcacacgtatgtttattgcggcactattcacaatagcaaagacttggaaccaagccaaatgtgcaacaatcatagactggattaagaaaatgt

SEQ ID NO: 110280 - DNA, 120 bp, synthetic construct; identical to SEQ ID NO: 31514
  source 1..120: mol_type = other DNA

SEQ ID NO: 110281 - DNA, 120 bp, synthetic construct; identical to SEQ ID NO: 31515
  source 1..120: mol_type = other DNA

SEQ ID NO: 110282 - DNA, 120 bp, synthetic construct
  source 1..120: mol_type = other DNA
tccctgaggaatcgccacactgacttccacaatggttgaactagtttacagtcccactgacagtgtaaaagtgttcctattcctccacatcctctccaggacctgttgtttcctgacttt

SEQ ID NO: 110283 - DNA, 120 bp, synthetic construct
  source 1..120: mol_type = other DNA
gagggcatcctgtcttgtgccagttttcaaagggaatgcttccagtttttgccaattcagtataatattggctgtgggtttgtcacagatagctcttattattttgagatatgtcccatc

SEQ ID NO: 110284 - DNA, 120 bp, synthetic construct
  source 1..120: mol_type = other DNA
tctggtatattgtgtctttgttctcgttgctttcaaagaacatctttatttctgcctttatttcattacgtaccgagtagtcattcaggagcaggttgttcagtctccatgtagttgagc

SEQ ID NO: 110285 - DNA, 120 bp, synthetic construct
  source 1..120: mol_type = other DNA
gtgctagcaatcagggagactccatgggcatgggaccctccgagccatgtgcaggatataatctcctggtgtgccattttttaagcccgtgggaaaagcacagtattcgggtgggagtga

SEQ ID NO: 110286 - DNA, 120 bp, synthetic construct; identical to SEQ ID NO: 31516
  source 1..120: mol_type = other DNA

SEQ ID NO: 110287 - DNA, 120 bp, synthetic construct; identical to SEQ ID NO: 31505
  source 1..120: mol_type = other DNA

SEQ ID NO: 110288 - DNA, 120 bp, synthetic construct; identical to SEQ ID NO: 31506
  source 1..120: mol_type = other DNA

SEQ ID NO: 110289 - DNA, 120 bp, synthetic construct; identical to SEQ ID NO: 31507
  source 1..120: mol_type = other DNA

SEQ ID NO: 110290 - DNA, 120 bp, synthetic construct; identical to SEQ ID NO: 31508
  source 1..120: mol_type = other DNA

SEQ ID NO: 110291 - DNA, 120 bp, synthetic construct
  source 1..120: mol_type = other DNA
ccctgtttgcagacgacatgattgtatatctagaaaaccccattgtctcagcccaaaatctccttaagctgataagcaacttcagcaaagtctcaggatacaaaatcaatgcacaaaaat

SEQ ID NO: 110292 - DNA, 120 bp, synthetic construct
  source 1..120: mol_type = other DNA
gagtgaacaggcaacctacaaaatgggagaaaatttttgcaacctactcacctgacaaagggctaatatccagaatctacaatgaactcaaacaaatttacaagaaaaaaacaaacaacc

SEQ ID NO: 110293 - DNA, 120 bp, synthetic construct
  source 1..120: mol_type = other DNA
cagaggctgaactaatttgcattcccaccagcagtgtataagcattcccttttcttcacaacttcttcagcatcgttattctttgagtttttaataataaccatctggctgatgtgagag

SEQ ID NO: 110294 - DNA, 120 bp, synthetic construct
  source 1..120: mol_type = other DNA
tcatgtgttttttggctgcacaaatgtcttcttttgagaagtgtctgttcatgtccttcacccactttttgatggggttgtttgtttttttcttgtaaatttgtttgagttcattgtaga

SEQ ID NO: 110295 - DNA, 120 bp, synthetic construct
  source 1..120: mol_type = other DNA
ctgaagttgcttatcagcttaaggagattttgggctgagatgatggggttttctagatatacaatcatgtcatctgcaaacagggacaatttgacttcctcttttcgtaatcgaataccc

SEQ ID NO: 110296 - DNA, 120 bp, synthetic construct
  source 1..120: mol_type = other DNA
catataaccaatgggcattactagttgaacctaaagtcgcattgtaacttaaatgtcatccaattatgctggaggcatcacactacctgacttcaaactatactacaaggctacagtaac

SEQ ID NO: 110297 - DNA, 120 bp, synthetic construct
  source 1..120: mol_type = other DNA
acgtatgtttattgcggcattattcacaatagcagcgacttggaaccaacccaaatgtccaacattgatagactggattaagaaaatgtggcaaatatacaccatggaatactatgcagc

SEQ ID NO: 110298 - DNA, 120 bp, synthetic construct
  source 1..120: mol_type = other DNA
aggttttcttctagggtttttatggtttaaggtctaatttgcagccataaaaaatgatgagttcatgtcctttgtagggacatggatgaaattggaaatcatcattctcagtaaactatc

SEQ ID NO: 110299 - DNA, 120 bp, synthetic construct
  source 1..120: mol_type = other DNA
aatatttaggcttctcagaatgcctttattaaaagaacatttttcaaccattttggaagacagtgtgtcaattccttagggatctagaactagaaataccatttgacccagccatcccat

SEQ ID NO: 110300 - DNA, 120 bp, synthetic construct; identical to SEQ ID NO: 31511
  source 1..120: mol_type = other DNA

SEQ ID NO: 110301 - DNA, 120 bp, synthetic construct
  source 1..120: mol_type = other DNA
tatacaccatggaatactatgcagccataaaaaatgatgagtccatgtcctttgtagggatatggataaagctggaaaccatcattctgagcaaactatcgcaaggacaaagaaccaaac

SEQ ID NO: 110302 - DNA, 120 bp, synthetic construct
  source 1..120: mol_type = other DNA
tatacttttttttccttttaactggttgtaaatatttgtcttcccaccagcttagaagtctctagaacttcttttgagaagtgtctgttcatgtccttcacccactttttgatggggttg

SEQ ID NO: 110303 - DNA, 120 bp, synthetic construct
  source 1..120: mol_type = other DNA
gcaattgtgaatgggagttcactcatgatttggctctctgtttctctgttgttggtgtataagaatgcttgtgattttttgtacattgattttgtatcctgagactttgctgaagttgct

SEQ ID NO: 110304 - DNA, 120 bp, synthetic construct; identical to SEQ ID NO: 20170
  source 1..120: mol_type = other DNA

SEQ ID NO: 110305 - DNA, 120 bp, synthetic construct; identical to SEQ ID NO: 20171
  source 1..120: mol_type = other DNA

SEQ ID NO: 110306 - DNA, 120 bp, synthetic construct; identical to SEQ ID NO: 20172
  source 1..120: mol_type = other DNA

SEQ ID NO: 110307 - DNA, 120 bp, synthetic construct; identical to SEQ ID NO: 20173
  source 1..120: mol_type = other DNA

SEQ ID NO: 110308 - DNA, 120 bp, synthetic construct; identical to SEQ ID NO: 20174
  source 1..120: mol_type = other DNA

SEQ ID NO: 110309 - DNA, 120 bp, synthetic construct; identical to SEQ ID NO: 20175
  source 1..120: mol_type = other DNA

SEQ ID NO: 110310 - DNA, 120 bp, synthetic construct; identical to SEQ ID NO: 20176
  source 1..120: mol_type = other DNA

SEQ ID NO: 110311 - DNA, 120 bp, synthetic construct; identical to SEQ ID NO: 20177
  source 1..120: mol_type = other DNA

SEQ ID NO: 110312 - DNA, 120 bp, synthetic construct; identical to SEQ ID NO: 20178
  source 1..120: mol_type = other DNA

SEQ ID NO: 110313 - DNA, 120 bp, synthetic construct
  source 1..120: mol_type = other DNA
tcctttgaggaggatcgtgtgtactaagtgaggtttaacccttacagtcctttgaggagaatcatgtgtactaagtgagggttaacccttacagtcctttgaggaggatcgtgtgtacta

SEQ ID NO: 110314 - DNA, 120 bp, synthetic construct; identical to SEQ ID NO: 20181
  source 1..120: mol_type = other DNA

SEQ ID NO: 110315 - DNA, 120 bp, synthetic construct; identical to SEQ ID NO: 20182
  source 1..120: mol_type = other DNA

SEQ ID NO: 110316 - DNA, 120 bp, synthetic construct; identical to SEQ ID NO: 20183
  source 1..120: mol_type = other DNA

SEQ ID NO: 110317 - DNA, 120 bp, synthetic construct; identical to SEQ ID NO: 20184
  source 1..120: mol_type = other DNA

SEQ ID NO: 110318 - DNA, 120 bp, synthetic construct; identical to SEQ ID NO: 20185
  source 1..120: mol_type = other DNA

SEQ ID NO: 110319 - DNA, 120 bp, synthetic construct; identical to SEQ ID NO: 20186
  source 1..120: mol_type = other DNA

SEQ ID NO: 110320 - DNA, 120 bp, synthetic construct; identical to SEQ ID NO: 20187
  source 1..120: mol_type = other DNA

SEQ ID NO: 110321 - DNA, 120 bp, synthetic construct; identical to SEQ ID NO: 20188
  source 1..120: mol_type = other DNA

SEQ ID NO: 110322 - DNA, 120 bp, synthetic construct; identical to SEQ ID NO: 20189
  source 1..120: mol_type = other DNA

SEQ ID NO: 110323 - DNA, 120 bp, synthetic construct; identical to SEQ ID NO: 20190
  source 1..120: mol_type = other DNA

SEQ ID NO: 110324 - DNA, 120 bp, synthetic construct; identical to SEQ ID NO: 20179
  source 1..120: mol_type = other DNA

SEQ ID NO: 110325 - DNA, 120 bp, synthetic construct
  source 1..120: mol_type = other DNA
ctgtcactcggtgcagggtatggagagctccttggtaatagtggatgcgtgctgtcactcgggtgcagggtgtggagagctccttgataataatggacacgtgctgtcactcgggtgcag

SEQ ID NO: 110326 - DNA, 120 bp, synthetic construct
  source 1..120: mol_type = other DNA
gatgtgtgctgtcactcgggtgcagggtatggagagctccttgataataatggacacgtgctgtcactcggtgcagggtatggagagctccttggtaatagtggatgcgtgctgtcactc

SEQ ID NO: 110327 - DNA, 120 bp, synthetic construct
  source 1..120: mol_type = other DNA
gtaatagtggacacgtgctgtcactcgggtgcagggtatggagagctccttggtaagagtggacacgtgctgtcactcgggtgcagggtatggagagctccttgataataatggacacgt

SEQ ID NO: 110328 - DNA, 120 bp, synthetic construct; identical to SEQ ID NO: 20180
  source 1..120: mol_type = other DNA

SEQ ID NO: 110329 - DNA, 120 bp, synthetic construct; identical to SEQ ID NO: 20191
  source 1..120: mol_type = other DNA

SEQ ID NO: 110330 - DNA, 120 bp, synthetic construct
  source 1..120: mol_type = other DNA
ttgtagtattctttgatggtagtttgcatttctgtgggatcggtggtgatatcccttttatcattttttattgcatctatttgattcttctctcttttcttctttattagtcttgctagc

SEQ ID NO: 110331 - DNA, 120 bp, synthetic construct
  source 1..120: mol_type = other DNA
ttagacatgaagtccttgcccatgcctatgtcctgaatggtaatgcctaggttttcttctagggtttttatggttttaggtctaatgtttaagtctttaatccatcttgaattaattttt

SEQ ID NO: 110332 - DNA, 120 bp, synthetic construct
  source 1..120: mol_type = other DNA
aaactctggggactgtagtggggtgggggaaggggagagggatagcattaggagatatacctaatgctaaatgacaagttaatgggtgcagcacaccaacatggcacatgtatacatatg

SEQ ID NO: 110333 - DNA, 120 bp, synthetic construct; identical to SEQ ID NO: 20192
  source 1..120: mol_type = other DNA

SEQ ID NO: 110334 - DNA, 120 bp, synthetic construct; identical to SEQ ID NO: 20195
  source 1..120: mol_type = other DNA

SEQ ID NO: 110335 - DNA, 120 bp, synthetic construct; identical to SEQ ID NO: 20196
  source 1..120: mol_type = other DNA

SEQ ID NO: 110336 - DNA, 120 bp, synthetic construct; identical to SEQ ID NO: 20197
  source 1..120: mol_type = other DNA

SEQ ID NO: 110337 - DNA, 120 bp, synthetic construct; identical to SEQ ID NO: 20198
  source 1..120: mol_type = other DNA

SEQ ID NO: 110338 - DNA, 120 bp, synthetic construct; identical to SEQ ID NO: 20199
  source 1..120: mol_type = other DNA

SEQ ID NO: 110339 - DNA, 120 bp, synthetic construct
  source 1..120: mol_type = other DNA
gaagcacgagtccttcctgaaaattaggcaataaatacgccgaaagagcctgtcgaggtcaaatatcccttatctgaaatgcttgagaccagaagtgtttgggatttcagattttggaat

SEQ ID NO: 110340 - DNA, 120 bp, synthetic construct
  source 1..120: mol_type = other DNA
gcatcaggccagcattggagaaggctgggattctggaacatttagcatgaggccagcattggagaaggttgggattctggaacatttagcgtccggccagcattggagaaggttgggatt

SEQ ID NO: 110341 - DNA, 120 bp, synthetic construct; identical to SEQ ID NO: 20203
  source 1..120: mol_type = other DNA

SEQ ID NO: 110342 - DNA, 120 bp, synthetic construct; identical to SEQ ID NO: 20204
  source 1..120: mol_type = other DNA

SEQ ID NO: 110343 - DNA, 120 bp, synthetic construct; identical to SEQ ID NO: 20205
  source 1..120: mol_type = other DNA

SEQ ID NO: 110344 - DNA, 120 bp, synthetic construct; identical to SEQ ID NO: 20193
  source 1..120: mol_type = other DNA

SEQ ID NO: 110345 - DNA, 120 bp, synthetic construct
  source 1..120: mol_type = other DNA
ctctctgtctctctctgtctctgcctatctctgtctctctctgtctctctctgtctctgtttctctctgtctctgtctctgtctctctctgtctctctctgtctctctctgtctctctct

SEQ ID NO: 110346 - DNA, 120 bp, synthetic construct; identical to SEQ ID NO: 20194
  source 1..120: mol_type = other DNA

SEQ ID NO: 110347 - DNA, 120 bp, synthetic construct; identical to SEQ ID NO: 20202
  source 1..120: mol_type = other DNA

SEQ ID NO: 110348 - DNA, 120 bp, synthetic construct
  source 1..120: mol_type = other DNA
gtggactcgcacttttccccctgttctgggcacgcctggcccagctctgtaggacagcagcagcttcctctcactgggacttttaatttgggaagcaggacatgcataggaagagtggac

SEQ ID NO: 110349 - DNA, 120 bp, synthetic construct
  source 1..120: mol_type = other DNA
aagcaggacatgcataggaagagtggactggcacttttcccctgttctgggcacgcctggcccagctctgtaggacagtggcagcttcctctcactgggacttttaatttgggaagcagg

SEQ ID NO: 110350 - DNA, 120 bp, synthetic construct
  source 1..120: mol_type = other DNA
gagtggactcgcacttttcccctgttctgggcacgcctggcccagctctgtaggacagcggcagcttcctctcactgggacttttaatttgggaagcaggacatgcataggaagagtgga

SEQ ID NO: 110351 - DNA, 120 bp, synthetic construct
  source 1..120: mol_type = other DNA
gagtggactggcactttccccctgttctgggcacgcctggcccagctctgtaggacagcagcagcttcctctcactgggacttttaatttgggaagcaggacatgcataggaagagtgga

SEQ ID NO: 110352 - DNA, 120 bp, synthetic construct; identical to SEQ ID NO: 20160
  source 1..120: mol_type = other DNA

SEQ ID NO: 110353 - DNA, 120 bp, synthetic construct; identical to SEQ ID NO: 20161
  source 1..120: mol_type = other DNA

SEQ ID NO: 110354 - DNA, 120 bp, synthetic construct
  source 1..120: mol_type = other DNA
catcccagggataaagcctacctaattgtgtggataagctttttgatatgctgctggattcagtttgttaatatttgaggattttttttaattatttaagttgtagggtacatgtgcaca

SEQ ID NO: 110355 - DNA, 120 bp, synthetic construct; identical to SEQ ID NO: 20162
  source 1..120: mol_type = other DNA

SEQ ID NO: 110356 - DNA, 120 bp, synthetic construct; identical to SEQ ID NO: 20163
  source 1..120: mol_type = other DNA

SEQ ID NO: 110357 - DNA, 120 bp, synthetic construct; identical to SEQ ID NO: 20164
  source 1..120: mol_type = other DNA

SEQ ID NO: 110358 - DNA, 120 bp, synthetic construct; identical to SEQ ID NO: 20165
  source 1..120: mol_type = other DNA

SEQ ID NO: 110359 - DNA, 120 bp, synthetic construct; identical to SEQ ID NO: 20166
  source 1..120: mol_type = other DNA

SEQ ID NO: 110360 - DNA, 120 bp, synthetic construct; identical to SEQ ID NO: 20167
  source 1..120: mol_type = other DNA

SEQ ID NO: 110361 - DNA, 120 bp, synthetic construct; identical to SEQ ID NO: 20168
  source 1..120: mol_type = other DNA

SEQ ID NO: 110362 - DNA, 120 bp, synthetic construct
  source 1..120: mol_type = other DNA
ataaggacagagagaagggtggtctggaaagtgatttacaagggtagagagaagggtgctctggagagggatttatatgggcagagagaagggtggtctgtagagggatttataaggaca

SEQ ID NO: 110363 - DNA, 120 bp, synthetic construct
  source 1..120: mol_type = other DNA
gacttggggggtctggagagggatttattcataaaggcagagagaagggtgatctagaaagggatttatatgggcagagagaagggtggtctggagaaggatttataagggcagagagaa

SEQ ID NO: 110364 - DNA, 120 bp, synthetic construct; identical to SEQ ID NO: 20169
  source 1..120: mol_type = other DNA

SEQ ID NO: 110365 - DNA, 120 bp, synthetic construct; identical to SEQ ID NO: 15384
  source 1..120: mol_type = other DNA

SEQ ID NO: 110366 - DNA, 120 bp, synthetic construct; identical to SEQ ID NO: 15385
  source 1..120: mol_type = other DNA

SEQ ID NO: 110367 - DNA, 120 bp, synthetic construct; identical to SEQ ID NO: 28971
  source 1..120: mol_type = other DNA

SEQ ID NO: 110368 - DNA, 120 bp, synthetic construct; identical to SEQ ID NO: 28972
  source 1..120: mol_type = other DNA

SEQ ID NO: 110369 - DNA, 120 bp, synthetic construct; identical to SEQ ID NO: 34110
  source 1..120: mol_type = other DNA

SEQ ID NO: 110370 - DNA, 120 bp, synthetic construct
  source 1..120: mol_type = other DNA
taggttaggcatttgaattgattttattgtaggagaggtcatagactgaatatttttaagaataaaggtaaatcggatggttgccgggtctgtgtggatagaagtagacatgggagactt

SEQ ID NO: 110371 - DNA, 120 bp, synthetic construct
  source 1..120: mol_type = other DNA
cactattgaaatgtatgagagtgaagaaaatacaacctcttttttaaaatttgtatgtgggggggaggggggaggaggggggatcacttttgtgcctagttaaacctccaggcttttaac

SEQ ID NO: 110372 - DNA, 120 bp, synthetic construct; identical to SEQ ID NO: 26987
  source 1..120: mol_type = other DNA

SEQ ID NO: 110373 - DNA, 120 bp, synthetic construct
  source 1..120: mol_type = other DNA
atggtatctcattgtggttttgatttgcatttctctgatggccagtgatgatgagcattttttcatgtgtcttttggctgcataaatgtcttcttttgagatgtgtctgttcatatcctt

SEQ ID NO: 110374 - DNA, 120 bp, synthetic construct
  source 1..120: mol_type = other DNA
ctccttgaagaggtccttcacgtcccttgtaagttggattcctaggtattttattctctttgaagcaattgtgaatgggagttcactcacgatttggctctctgtttgtctgttattggt

SEQ ID NO: 110375 - DNA, 120 bp, synthetic construct
  source 1..120: mol_type = other DNA
aaaccgccattgtcatcatggccggttctcaatgagctgttgggtacacctcccagatggggtggtggccgggcagaggggctcctcacttcccagtaggggcggccgggcagaggcgcc

SEQ ID NO: 110376 - DNA, 120 bp, synthetic construct; identical to SEQ ID NO: 26988
  source 1..120: mol_type = other DNA

SEQ ID NO: 110377 - DNA, 120 bp, synthetic construct; identical to SEQ ID NO: 26989
  source 1..120: mol_type = other DNA

SEQ ID NO: 110378 - DNA, 120 bp, synthetic construct
  source 1..120: mol_type = other DNA
agctgagatcgcaccgctgcactccagcctggcaacagagtgagactccgtctcaaaaagaaaaaaaataaaagctttcaagttttgctctgtctttagaaaaatactctgaaaatgttc

SEQ ID NO: 110379 - DNA, 120 bp, synthetic construct
  source 1..120: mol_type = other DNA
gcccgttctcaatgagctgttgagtacacctcccagatggggtggtggccgggcagaggggctcctcacttcccagtaggggcggccgggcagaggcgcctctcacctcccggacggggc

SEQ ID NO: 110380 - DNA, 120 bp, synthetic construct
  source 1..120: mol_type = other DNA
gactccgtctgccatcccagcacctcaggaggccgaggctggcggatcactcgcggttaggagctggagaccagcccggccaacacagcgaaaccccgtctccaccaaaaaaatatgaaa

SEQ ID NO: 110381 - DNA, 120 bp, synthetic construct; identical to SEQ ID NO: 26009
  source 1..120: mol_type = other DNA

SEQ ID NO: 110382 - DNA, 120 bp, synthetic construct
  source 1..120: mol_type = other DNA
ttcagctcagcatcactgatcattagagaaatgtaaatcaagaccacgatgagataccatctcatgccagtcagaatggcaattattaaaaagtcaagaaacaatggatgctggcaaggc

SEQ ID NO: 110383 - DNA, 120 bp, synthetic construct
  source 1..120: mol_type = other DNA
tagcataataccttctgtgtgtgtgcgtgtgtcaaggtttctctctgttgcccaggctggacacagacacacacacacacacacacaaacaaacacacactatatatataatttaagaca

SEQ ID NO: 110384 - DNA, 120 bp, synthetic construct; identical to SEQ ID NO: 8812
  source 1..120: mol_type = other DNA

SEQ ID NO: 110385 - DNA, 120 bp, synthetic construct; identical to SEQ ID NO: 8813
  source 1..120: mol_type = other DNA

SEQ ID NO: 110386 - DNA, 120 bp, synthetic construct
  source 1..120: mol_type = other DNA
agacgctcctcacttcccagatggggcggctgccgggcagaggggctcctcacttctcagacgaggcggttgccgggcagagggtctcctcacttctcagacggggcggccgggcagaga

SEQ ID NO: 110387 - DNA, 120 bp, synthetic construct
  source 1..120: mol_type = other DNA
ttttttcctcagctgtgtccagtctgctgatgagactgttagaggaactcttcatttttgataccacgccttttttttttttttttttttcctcagacggagccttgctctgtcacctag

SEQ ID NO: 110388 - DNA, 120 bp, synthetic construct; identical to SEQ ID NO: 16017
  source 1..120: mol_type = other DNA

SEQ ID NO: 110389 - DNA, 120 bp, synthetic construct; identical to SEQ ID NO: 16018
  source 1..120: mol_type = other DNA

SEQ ID NO: 110390 - DNA, 120 bp, synthetic construct
  source 1..120: mol_type = other DNA
cgcctcggcctcccaaagtgctgggattacaggccaccgtgcccggcctgttattttcttaatttaaatatttgttgatatttgataacaagatttgaccatcctagtgttgtatattta

SEQ ID NO: 110391 - DNA, 120 bp, synthetic construct
  source 1..120: mol_type = other DNA
gtgagatggtatctcattgtggttttgatttgcatttctctgatggccagcgatgatgagcattttttcatgtgtcttttggctgcataaatgtcttcttttgagaagtgtctgttcata

SEQ ID NO: 110392 - DNA, 120 bp, synthetic construct
  source 1..120: mol_type = other DNA
gtagtttttttccaatttgtgaagaaagtcattggtagcttgatggggatggcattgaatctataaattaccttgggcagtatggccattttcacgatattgattcttcctacccatgag

SEQ ID NO: 110393 - DNA, 120 bp, synthetic construct
  source 1..120: mol_type = other DNA
taccagttcctccttgtacctgtcgtagaattcggctgtgaatccatctggtcctggactctttttggttggtaagctattgattattgccacaatttcagatcctgttattggtctatt

SEQ ID NO: 110394 - DNA, 120 bp, synthetic construct
  source 1..120: mol_type = other DNA
ggtggaaagttctgtagatgtctattagatctgcttggtgcagagctgagttcaattcctgggtatccttgttgactttctgtctcgttgatctgtctaatgttgacagtggggtgttaa

SEQ ID NO: 110395 - DNA, 120 bp, synthetic construct
  source 1..120: mol_type = other DNA
cttgctagattggggacgttctcctggataatatcctgtagagtgttttccaacttggttccattctccccgtcactttcaggtacaccaatcagatgcagatttggtcttttcatatag

SEQ ID NO: 110396 - DNA, 120 bp, synthetic construct; identical to SEQ ID NO: 16008
  source 1..120: mol_type = other DNA

SEQ ID NO: 110397 - DNA, 120 bp, synthetic construct; identical to SEQ ID NO: 16009
  source 1..120: mol_type = other DNA

SEQ ID NO: 110398 - DNA, 120 bp, synthetic construct; identical to SEQ ID NO: 16010
  source 1..120: mol_type = other DNA

SEQ ID NO: 110399 - DNA, 120 bp, synthetic construct; identical to SEQ ID NO: 16011
  source 1..120: mol_type = other DNA

SEQ ID NO: 110400 - DNA, 120 bp, synthetic construct; identical to SEQ ID NO: 16012
  source 1..120: mol_type = other DNA

SEQ ID NO: 110401 - DNA, 120 bp, synthetic construct; identical to SEQ ID NO: 16013
  source 1..120: mol_type = other DNA

SEQ ID NO: 110402 - DNA, 120 bp, synthetic construct
  source 1..120: mol_type = other DNA
acttttttggaattactgctaggcttcagtattgaatgtcacagagcaagttgtccaggaggcagattctggtatatgacctcttggtgtttgaagacagaactcctaagaattccctct

SEQ ID NO: 110403 - DNA, 120 bp, synthetic construct
  source 1..120: mol_type = other DNA
ctatccatccacccaccatctatccatccacccaccatccatccacctacccaccatccatccatccacccaccatccatccatccaccatccatccatccacccatccatcaatttcat

SEQ ID NO: 110404 - DNA, 120 bp, synthetic construct
  source 1..120: mol_type = other DNA
cgtcatccatctacccaccccacccacacatccggcatttctaagagctcatagagtagtggatacagttgtgcaaatgaatttagaaaatgatttgtacctaaagtcatcacgttcatc

SEQ ID NO: 110405 - DNA, 120 bp, synthetic construct
  source 1..120: mol_type = other DNA
atcgcgccactgcattctagcctgggtgacagagcaagacttcatctaaaaataaataaacaaacagatggtttctaaccaaactggccttaccggatacctccagttctctctttctta

SEQ ID NO: 110406 - DNA, 120 bp, synthetic construct; identical to SEQ ID NO: 16014
  source 1..120: mol_type = other DNA

SEQ ID NO: 110407 - DNA, 120 bp, synthetic construct; identical to SEQ ID NO: 16015
  source 1..120: mol_type = other DNA

SEQ ID NO: 110408 - DNA, 120 bp, synthetic construct; identical to SEQ ID NO: 16016
  source 1..120: mol_type = other DNA

SEQ ID NO: 110409 - DNA, 120 bp, synthetic construct
  source 1..120: mol_type = other DNA
cgagtaggcgcacgccaccgtgcccagctaatattggtattttttttttttttttttttagtagagacgatttcaccatgttggccaggctggtcttgaactcctgacctcaagtgatct

SEQ ID NO: 110410 - DNA, 120 bp, synthetic construct
  source 1..120: mol_type = other DNA
atgagcatttcttcatgtgttttttgactgcataaatgtcttcttttgagaagtgtctgttcatgtccttcgcccactttttgatggggttgtttgtttttttcttgtaaatttgtttga

SEQ ID NO: 110411 - DNA, 120 bp, synthetic construct
  source 1..120: mol_type = other DNA
cctaggtattttattctctttgaagcaattgtgaatgggagttcacccatgatttggctctctgtttgtctgttgttggtgtataagaatgcttgtgatttttgtacattgattttgtat

SEQ ID NO: 110412 - DNA, 120 bp, synthetic construct
  source 1..120: mol_type = other DNA
cttgggagagtgtatgtgtcgaggaatgtatccatttcttctagattttctagtttatttgcgtagaggtgtttgtagtattctctgatggtagtttgtatttctgtgggatcggtggtg

SEQ ID NO: 110413 - DNA, 120 bp, synthetic construct
  source 1..120: mol_type = other DNA
gatagttagctcctcttgttgaattgatccctttaccattatgtaatggccttctttgtttcttttgatctttgttggtttaaagtctgttttatcagagactaggattgcaacccctgc

SEQ ID NO: 110414 - DNA, 120 bp, synthetic construct
  source 1..120: mol_type = other DNA
agatttggtcttttcacatagtcccatatttcttggaggctttgctcatttctttttattcttttttctctaaacttcccttctcgcttcatttcattcatttcatcttccattgttgat

SEQ ID NO: 110415 - DNA, 120 bp, synthetic construct
  source 1..120: mol_type = other DNA
accctccgagccaggtgtgggatatagtctcgtggtgcgccgtttcttaagccggtctgaaaagcgcaatattcgggtgggagtgacccgattttccaggtgcatccgtcacccctttct

SEQ ID NO: 110416 - DNA, 120 bp, synthetic construct; identical to SEQ ID NO: 32932
  source 1..120: mol_type = other DNA

SEQ ID NO: 110417 - DNA, 120 bp, synthetic construct; identical to SEQ ID NO: 32933
  source 1..120: mol_type = other DNA

SEQ ID NO: 110418 - DNA, 120 bp, synthetic construct; identical to SEQ ID NO: 32934
  source 1..120: mol_type = other DNA

SEQ ID NO: 110419 - DNA, 120 bp, synthetic construct
  source 1..120: mol_type = other DNA
ctgggatattttccccagggaagagaaagcagttctggctttttcctctacacaccccaaacttgcaggaaaaacgcggctttggcctggagaaagcacgagatcgtgacgttttcacga

SEQ ID NO: 110420 - DNA, 120 bp, synthetic construct
  source 1..120: mol_type = other DNA
aagacagtgacagagagaagagagagagagagacaggagagaggggagagagaagacagagagagagagagagagagagagacagtgacagagggaagatagagagagagagaaggaaga

SEQ ID NO: 110421 - DNA, 120 bp, synthetic construct
  source 1..120: mol_type = other DNA
tcagcctctcaaagtgttgggattacaggcgtgaagcaccacgtccagccactgttatgttttatagtcaactcacacgatctgagatattctatgtaatctgttcaaccttcgttttat

SEQ ID NO: 110422 - DNA, 120 bp, synthetic construct; identical to SEQ ID NO: 522
  source 1..120: mol_type = other DNA

SEQ ID NO: 110423 - DNA, 120 bp, synthetic construct
  source 1..120: mol_type = other DNA
gcggaggttgtaatgagccgagatcgcgacattgcactccagcctggacgacagagtgagactccgtcacaaaaaacaaaaaacaaaacaagaaccaaaaaaaacacataaaaaacaaac

SEQ ID NO: 110424 - DNA, 120 bp, synthetic construct
  source 1..120: mol_type = other DNA
ccaaggtgctgggatcacaggcgtgagccaccacgcccagccaaaaagttgttttaaaattttttcgagagataggatctcgcttagttgcccaggctggtcttgaactcctgggctcaa

SEQ ID NO: 110425 - DNA, 120 bp, synthetic construct
  source 1..120: mol_type = other DNA
ctggtggacatcacatgggcttatttttaccagcgaaggttacgtgaaggacaaaacgcactcagccagcaacggaaactcaacagttcaaacagcactggggaacatgtcagttaaaga

SEQ ID NO: 110426 - DNA, 120 bp, synthetic construct
  source 1..120: mol_type = other DNA
aaagattacataaaatctgtcccaaaacgtctaagaaatattcagtaattaaaaataagtctgattaagatgctttaccaggatacatgaatgaactaaggtggtatatgcttttaaaaa

SEQ ID NO: 110427 - DNA, 120 bp, synthetic construct; identical to SEQ ID NO: 28786
  source 1..120: mol_type = other DNA

SEQ ID NO: 110428 - DNA, 120 bp, synthetic construct
  source 1..120: mol_type = other DNA
ccggccgccatcccatctaggaagtgaggagcgcctcttcccagccgccatcacatctaggaagtgaggagcgtctctgcccggccgcccatagtctgagatgtggggagcgcctctgcc

SEQ ID NO: 110429 - DNA, 120 bp, synthetic construct
  source 1..120: mol_type = other DNA
cctgttgatctgtgaccttacccccaaccctgtgctgtgtccactcagggttaaatggattaagggcggtgcaggatgtgctttgttaaacagatgcttgaaggcagcatgctcgttaag

SEQ ID NO: 110430 - DNA, 120 bp, synthetic construct
  source 1..120: mol_type = other DNA
atcacttgagccctggagttcaagaccagcctaggtaatatggtgagaccccatctgtacaaaaaataaaataaattgaaaagtgcagcctccctctgctgtgtgctagctcagcacatg

SEQ ID NO: 110431 - DNA, 120 bp, synthetic construct
  source 1..120: mol_type = other DNA
cctgtaatcctgggacttggggagaccgaggcaagaggatcgcttgagctcaggagttcaagaccaccctgggcaagatggcaaaaccccatcgctacaaaaaatacaaaattagccatg

SEQ ID NO: 110432 - DNA, 120 bp, synthetic construct
  source 1..120: mol_type = other DNA
cagatcaccaggtcaagagatcgagaccatcctggctaacacggtgaaacttcatctctattaaaaaaaaataccctctcccctctcccgacggtctccctctccctctctttccacggt

SEQ ID NO: 110433 - DNA, 120 bp, synthetic construct
  source 1..120: mol_type = other DNA
ggccagccgccccgtccgggaggtgaggagtgcctctgcccagccgtccctactgggaagtgaggagcccctctgcccggccagccgccccgtccaggagggaggtcagggggtcagccc

SEQ ID NO: 110434 - DNA, 120 bp, synthetic construct
  source 1..120: mol_type = other DNA
ggcgcctgtagtcccagctactcgggaggctgaggcaggagaatggcatgaatccaggaggcggagcttgcagtgagccgagactgtgccactgcactccagcctggacgacagagcgag

SEQ ID NO: 110435 - DNA, 120 bp, synthetic construct
  source 1..120: mol_type = other DNA
gtatacactcactcagtgcaatcaagtcttgttttacaaatattaatacaaaagctgcagagcattttagtcttgacctttattggaagcctccaaaggttatatttcgacccagccaaa

SEQ ID NO: 110436 - DNA, 120 bp, synthetic construct; identical to SEQ ID NO: 12957
  source 1..120: mol_type = other DNA

SEQ ID NO: 110437 - DNA, 120 bp, synthetic construct; identical to SEQ ID NO: 12958
  source 1..120: mol_type = other DNA

SEQ ID NO: 110438 - DNA, 120 bp, synthetic construct; identical to SEQ ID NO: 28175
  source 1..120: mol_type = other DNA

SEQ ID NO: 110439 - DNA, 120 bp, synthetic construct; identical to SEQ ID NO: 28176
  source 1..120: mol_type = other DNA

SEQ ID NO: 110440 - DNA, 120 bp, synthetic construct; identical to SEQ ID NO: 28177
  source 1..120: mol_type = other DNA

SEQ ID NO: 110441 - DNA, 120 bp, synthetic construct; identical to SEQ ID NO: 28178
  source 1..120: mol_type = other DNA

SEQ ID NO: 110442 - DNA, 120 bp, synthetic construct
  source 1..120: mol_type = other DNA
aagaagatgactagttagagaccagcctgggcaacagagtgagaccttgtctctaaaaaaaaatttataaattatccaggcatggtggtgtatacctgtagtcccagctactcaagaggc

SEQ ID NO: 110443 - DNA, 120 bp, synthetic construct
  source 1..120: mol_type = other DNA
gagaaagcaaggcacggggcggggggcgggggggcaggggtgcagaaaaggctcaagtcatgtttttcattaaaaaatagtgctctttattataaattactgaaatgtttcttttctgaa

SEQ ID NO: 110444 - DNA, 120 bp, synthetic construct; identical to SEQ ID NO: 20516
  source 1..120: mol_type = other DNA

SEQ ID NO: 110445 - DNA, 120 bp, synthetic construct
  source 1..120: mol_type = other DNA
actcaaatctgcagttctcttgactgattagtatcccttttttgtgtttgtttgtttgttttgttttgttttttaaagacagggtctggctctgtgcccaggttggagggcagtgccacg

SEQ ID NO: 110446 - DNA, 120 bp, synthetic construct
  source 1..120: mol_type = other DNA
ctcactgacaccagctgcaaaaggatgtgaaccagtgtttcttgagcacctactctgtaccaggcaccacaaagggctctttacaagctttacctcttttaaaaatttcacaaataaatt

SEQ ID NO: 110447 - DNA, 120 bp, synthetic construct; identical to SEQ ID NO: 4832
  source 1..120: mol_type = other DNA

SEQ ID NO: 110448 - DNA, 120 bp, synthetic construct
  source 1..120: mol_type = other DNA
tttcttcctccatcacccagtcttaagtatcgctttacggccgtgcagtagtgaacacaatggtcttctaggagacactcttgaaatctggctgcctgtgtcgacccctaatgaacagaa

SEQ ID NO: 110449 - DNA, 120 bp, synthetic construct
  source 1..120: mol_type = other DNA
tccagatctcagggtgtagggctgggaataggaccagacactgaggccaggtgacctctgcccagggtcccctattccccatgcacagtgagtgcagagatgaccagcagtggaggtgga

SEQ ID NO: 110450 - DNA, 120 bp, synthetic construct
  source 1..120: mol_type = other DNA
agctcatacctggtggccccagacccaggacacctgttggaccagaaccaggaacgggctcccaaacactaaatcctaaatggaatggacacacgccatgtcacagggccatacaccttt

SEQ ID NO: 110451 - DNA, 120 bp, synthetic construct
  source 1..120: mol_type = other DNA
agaagcagagacggaagcttccagatgccgagaaagtgggcccaagcaggactgggaggaggtgggacaggctcacacacacatgctcgctcacgcacacacaggcgtgcacaccacctg

SEQ ID NO: 110452 - DNA, 120 bp, synthetic construct
  source 1..120: mol_type = other DNA
ctcaccccaattacagttcctgccatggccaggcagcataggcggaagggcagatggggcgccccggggaaaacagatctccggccacatccaaaacacaccagccacaggcgggtgaga

SEQ ID NO: 110453 - DNA, 120 bp, synthetic construct
  source 1..120: mol_type = other DNA
taattagccaccagtcccatgccccagcctgctttggggtaaaatgggtacatttaaacacaagatgcagacagtccttcaacctggggagctgccattctgaaaagaaccaaattatct

SEQ ID NO: 110454 - DNA, 120 bp, synthetic construct
  source 1..120: mol_type = other DNA
aattggcacggagcatctcggcaacccatcaatgaacaggactcaggggcacaggagggctggaaaggaaggcttgctcctttccaggaacagaataacaacaggtaaggcttgaacaaa

SEQ ID NO: 110455 - DNA, 120 bp, synthetic construct
  source 1..120: mol_type = other DNA
ccagctgcctgacacctggtggcagccccgaacataatctcacccgctccacccctttacagcgccctcacccctgggaggcaccaccactcacctgcgctccctctcgctgatcacgtt

SEQ ID NO: 110456 - DNA, 120 bp, synthetic construct
  source 1..120: mol_type = other DNA
gacacagggagggggaagggtacccgcctgctccccagtcgcccacgcctccattttcccccaaatctagtacgcttgcagacgctgcgcctcagggtagggtcaccatccacacttctg

SEQ ID NO: 110457 - DNA, 120 bp, synthetic construct
  source 1..120: mol_type = other DNA
tggcagagtggggccaagtttttgtttccctaaagccctcggaatgtcatcaaacctgtgactctcctgccgttgacaacacgtgtaattactgctaattaatcacagatgcagatggtg

SEQ ID NO: 110458 - DNA, 120 bp, synthetic construct
  source 1..120: mol_type = other DNA
tgagcccccgcccaccacggagccctcccaggggtgtagggcccggtggcggcgcgcttgggcttttctagccattgacgaaccccgtcctgtttttcggagttttgagggctcagaggg

SEQ ID NO: 110459 - DNA, 120 bp, synthetic construct
  source 1..120: mol_type = other DNA
ctggattactgtactgtcctcctacaggaaattcccttattttttttaaattttcttgtagagatgggatctcactgtgttgcccagggtggtctcaaactactgggctcaagtaatcct

SEQ ID NO: 110460 - DNA, 120 bp, synthetic construct; identical to SEQ ID NO: 26012
  source 1..120: mol_type = other DNA

SEQ ID NO: 110461 - DNA, 120 bp, synthetic construct; identical to SEQ ID NO: 11146
  source 1..120: mol_type = other DNA

SEQ ID NO: 110462 - DNA, 120 bp, synthetic construct; identical to SEQ ID NO: 11147
  source 1..120: mol_type = other DNA

SEQ ID NO: 110463 - DNA, 120 bp, synthetic construct
  source 1..120: mol_type = other DNA
cattttttcatgtgttttttggctgcataaatgtcttcttttgagaagtgtctgttcatgtccctcgcccactttttgatggggttgtttgtttttttcttgtaaatttgtttgagttca

SEQ ID NO: 110464 - DNA, 120 bp, synthetic construct
  source 1..120: mol_type = other DNA
ggctctctgtttgtctgttgttggtgtataggaatgcttgtgatttttgtacattgattttgtatcctgagactttgctgaagttgcttatcagcttaaggagattttgggctgagacga

SEQ ID NO: 110465 - DNA, 120 bp, synthetic construct
  source 1..120: mol_type = other DNA
gtgtctatttgattcttctctctttttttctttattagtcttgctagcggtctatcaattttgttgatcctttcaaaaaaccagctcctggattcattgattttttgaagggttttttgt

SEQ ID NO: 110466 - DNA, 120 bp, synthetic construct
  source 1..120: mol_type = other DNA
ctttgttggtttaaagtctgttttatcagagactaggattgcaagccctgcctttttttgttttccatttgcttggtagatcttcctccatccttttattttgagcctatgtgtgtctct

SEQ ID NO: 110467 - DNA, 120 bp, synthetic construct
  source 1..120: mol_type = other DNA
cgcatcggctcctgaggcttctgcattcttcaggtagttcttgagccttggttttcagctccatcagctcctttaagcacttctctgtattggttattctagttatacattcttctaaat

SEQ ID NO: 110468 - DNA, 120 bp, synthetic construct
  source 1..120: mol_type = other DNA
aatgcctcgccctgcttcggctcgcacacggtgcgcgcactcactggcctgcgcccactgtctggcactccctagtgagatgaacccggtacctcagatggaaatgcagaaatcacccgt

SEQ ID NO: 110469 - DNA, 120 bp, synthetic construct; identical to SEQ ID NO: 25270
  source 1..120: mol_type = other DNA

SEQ ID NO: 110470 - DNA, 120 bp, synthetic construct; identical to SEQ ID NO: 25271
  source 1..120: mol_type = other DNA

SEQ ID NO: 110471 - DNA, 120 bp, synthetic construct; identical to SEQ ID NO: 25272
  source 1..120: mol_type = other DNA

SEQ ID NO: 110472 - DNA, 120 bp, synthetic construct; identical to SEQ ID NO: 25273
  source 1..120: mol_type = other DNA

SEQ ID NO: 110473 - DNA, 120 bp, synthetic construct; identical to SEQ ID NO: 25274
  source 1..120: mol_type = other DNA

SEQ ID NO: 110474 - DNA, 120 bp, synthetic construct
  source 1..120: mol_type = other DNA
tcacttcctagatgggatggcggcggccgggaagaggcgctcctcacttccttgacgggatgactgccgggaagaggcgctcctcacttccttgacgggatgactgccgggaagaggcac

SEQ ID NO: 110475 - DNA, 120 bp, synthetic construct; identical to SEQ ID NO: 25275
  source 1..120: mol_type = other DNA

SEQ ID NO: 110476 - DNA, 120 bp, synthetic construct; identical to SEQ ID NO: 25276
  source 1..120: mol_type = other DNA

SEQ ID NO: 110477 - DNA, 120 bp, synthetic construct; identical to SEQ ID NO: 25277
  source 1..120: mol_type = other DNA

SEQ ID NO: 110478 - DNA, 120 bp, synthetic construct; identical to SEQ ID NO: 25278
  source 1..120: mol_type = other DNA

SEQ ID NO: 110479 - DNA, 120 bp, synthetic construct; identical to SEQ ID NO: 25279
  source 1..120: mol_type = other DNA

SEQ ID NO: 110480 - DNA, 120 bp, synthetic construct; identical to SEQ ID NO: 25280
  source 1..120: mol_type = other DNA

SEQ ID NO: 110481 - DNA, 120 bp, synthetic construct; identical to SEQ ID NO: 25262
  source 1..120: mol_type = other DNA

SEQ ID NO: 110482 - DNA, 120 bp, synthetic construct; identical to SEQ ID NO: 25263
  source 1..120: mol_type = other DNA

SEQ ID NO: 110483 - DNA, 120 bp, synthetic construct
  source 1..120: mol_type = other DNA
tcagagggcaggtgaagagtgaggctagaaggagttgttggctgcttctgggaaggtggaggtggcatttcccaaatactgcctttgcaaaagctggaaagagccgcaccccaggtgagg

SEQ ID NO: 110484 - DNA, 120 bp, synthetic construct
  source 1..120: mol_type = other DNA
ccagatcaccctccaccccctccttcagcccagatcaccctccaccccctcccccagcccagatcaccctccaccccctccctgagcccagatcaccctccaccccctcccccatcccag

SEQ ID NO: 110485 - DNA, 120 bp, synthetic construct; identical to SEQ ID NO: 25260
  source 1..120: mol_type = other DNA

SEQ ID NO: 110486 - DNA, 120 bp, synthetic construct; identical to SEQ ID NO: 25261
  source 1..120: mol_type = other DNA

SEQ ID NO: 110487 - DNA, 120 bp, synthetic construct
  source 1..120: mol_type = other DNA
gaacttcttttgttttggaggctatagaggcccataggggagtgaggggctctgtatttgtcaactggggctgctgtaaggaaacaccacagaccaggaggcttcaataacagtatttct

SEQ ID NO: 110488 - DNA, 120 bp, synthetic construct
  source 1..120: mol_type = other DNA
gtttctgtgggcagatttggggtggggcaatttctaatagagggtaaaactggggccaaggcctatttgggggacagatgtgagaacaggcatcctctggtgtaaccaggacggggctag

SEQ ID NO: 110489 - DNA, 120 bp, synthetic construct
  source 1..120: mol_type = other DNA
ccttcccctccagaggagacaccattatggccgcccacacaatgaggcgattgtgcacagcagcccctctgagcccagaaacatggcgcaggcctgattttcatgaataatcagactcct

SEQ ID NO: 110490 - DNA, 120 bp, synthetic construct; identical to SEQ ID NO: 25264
  source 1..120: mol_type = other DNA

SEQ ID NO: 110491 - DNA, 120 bp, synthetic construct; identical to SEQ ID NO: 25265
  source 1..120: mol_type = other DNA

SEQ ID NO: 110492 - DNA, 120 bp, synthetic construct
  source 1..120: mol_type = other DNA
cagatacagagatacacatgcacatacatacacatgcacacacatacaggtacacagagatacacacagatgcacacacaggcacacagagatatacacacatgcacacacccacatgca

SEQ ID NO: 110493 - DNA, 120 bp, synthetic construct; identical to SEQ ID NO: 25266
  source 1..120: mol_type = other DNA

SEQ ID NO: 110494 - DNA, 120 bp, synthetic construct
  source 1..120: mol_type = other DNA
tctcttccttccttccttcctccctccctttctctaccctcccttgcttccttcctctcctttccctctcttcctctatcccttccttccttccttccttccttccttatttcttgcctg

SEQ ID NO: 110495 - DNA, 120 bp, synthetic construct
  source 1..120: mol_type = other DNA
accttcacaatagcccaggatggaacgtacagactgaccaggaaacaaacccttgcttttcttcccacctatgggtgaatttgggcaagttaccacgtgacgttgtgcctctggtctccc

SEQ ID NO: 110496 - DNA, 120 bp, synthetic construct
  source 1..120: mol_type = other DNA
caaagtgctgggattacaggcatgagccactgtgctcggcctggaaggttcttctgttccccctcttttctgctggccaaagtctatgatgcttttccgttttcacctcaaacacacatc

SEQ ID NO: 110497 - DNA, 120 bp, synthetic construct; identical to SEQ ID NO: 25267
  source 1..120: mol_type = other DNA

SEQ ID NO: 110498 - DNA, 120 bp, synthetic construct; identical to SEQ ID NO: 25268
  source 1..120: mol_type = other DNA

SEQ ID NO: 110499 - DNA, 120 bp, synthetic construct; identical to SEQ ID NO: 25269
  source 1..120: mol_type = other DNA

SEQ ID NO: 110500 - DNA, 120 bp, synthetic construct; identical to SEQ ID NO: 11141
  source 1..120: mol_type = other DNA

SEQ ID NO: 110501 - DNA, 120 bp, synthetic construct; identical to SEQ ID NO: 11142
  source 1..120: mol_type = other DNA

SEQ ID NO: 110502 - DNA, 120 bp, synthetic construct
  source 1..120: mol_type = other DNA
tgttgaggaatttatccatttcttctagattttctagtttatttctgtagaggtgtttgtagtattctctgatggtagtttgtatttctgtgggatcggtggtgatatcccctttatcat

SEQ ID NO: 110503 - DNA, 120 bp, synthetic construct
  source 1..120: mol_type = other DNA
tcactcaggacttgctttatgaacctgggtgctcctgtattgggtgcatgtatatttaggatagttagctcttcttgtttaattgatccctttaccattatgtaatggccttctttgtat

SEQ ID NO: 110504 - DNA, 120 bp, synthetic construct
  source 1..120: mol_type = other DNA
acattagacctaaaaccataaaaaccctagaagaaaacctaggcattaccatttaggacataggcatgggcaaggacttcatgtctaaaacaccaaaagcaatggaacaaaagccaaaat

SEQ ID NO: 110505 - DNA, 120 bp, synthetic construct
  source 1..120: mol_type = other DNA
tttattgcggcactattcacaatagcaaagacttggaaccaacccaaatgtccaacagggatagactggattaagaaaatgtggcacatatacaccatggaatactatgcagccataaaa

SEQ ID NO: 110506 - DNA, 120 bp, synthetic construct; identical to SEQ ID NO: 11143
  source 1..120: mol_type = other DNA

SEQ ID NO: 110507 - DNA, 120 bp, synthetic construct; identical to SEQ ID NO: 11144
  source 1..120: mol_type = other DNA

SEQ ID NO: 110508 - DNA, 120 bp, synthetic construct
  source 1..120: mol_type = other DNA
actgggtacccgcccctatctgcctaggcatttggctgcctcctgtcactgtcacaccactttggaaaaagttattgcaatttcttataaaactaaacattttcctaaatcattctacca

SEQ ID NO: 110509 - DNA, 120 bp, synthetic construct; identical to SEQ ID NO: 11145
  source 1..120: mol_type = other DNA

SEQ ID NO: 110510 - DNA, 120 bp, synthetic construct
  source 1..120: mol_type = other DNA
tttgtgcataatactccattaaatagctgcactaaaatttatttaaaatgaccaccattgcattaattcacaatagtcaaaatattgaaacagcttaagtgtccaatggtggctgaatgg

SEQ ID NO: 110511 - DNA, 120 bp, synthetic construct
  source 1..120: mol_type = other DNA
tgtaaatttgtttgagttcattgtagattctggatattagccctttatcagatgtatagattgcaaaaattttctcccactctgtaggttgcctgttcactctgatggtggtttcttttg

SEQ ID NO: 110512 - DNA, 120 bp, synthetic construct
  source 1..120: mol_type = other DNA
gggtggagagtgctgtagatgtctattaggtctgcttgatgcagagctgagttcaattcctggatatccttgttaactttctgtctcgttgatctgtctaatgttgacagtggggtgtta

SEQ ID NO: 110513 - DNA, 120 bp, synthetic construct
  source 1..120: mol_type = other DNA
gaatctgacaattatgtgtcttggagttgctcttctcgaggagtatctttgtggcgttctctgtatttcctgaatctgaatgttggcctgccttactagattggggaagttctcctggat

SEQ ID NO: 110514 - DNA, 120 bp, synthetic construct
  source 1..120: mol_type = other DNA
cccattaactcgtcatttagcattaggtttatctcctaatgccatccctcccccttcccccaccccacaacagtccccagagtgtgatgttccccttcctgtgtccatgtgttctcattg

SEQ ID NO: 110515 - DNA, 120 bp, synthetic construct
  source 1..120: mol_type = other DNA
tctagggtttttatggttttaggtctaacgtttaagtctttaatccatcttgaattgatttttgtataaggtgtaaggaagggatccagtttcagctttctacatatggctagccaattt

SEQ ID NO: 110516 - DNA, 120 bp, synthetic construct; identical to SEQ ID NO: 11136
  source 1..120: mol_type = other DNA

SEQ ID NO: 110517 - DNA, 120 bp, synthetic construct; identical to SEQ ID NO: 11137
  source 1..120: mol_type = other DNA

SEQ ID NO: 110518 - DNA, 120 bp, synthetic construct
  source 1..120: mol_type = other DNA
gcggaaggccgcagggtcctctgcctaggaaaaccagagacctttgttcacttgtttatctgctgaccttccctccactattgtccaatgaccctgccaaatccccctctgtgagaaaca

SEQ ID NO: 110519 - DNA, 120 bp, synthetic construct
  source 1..120: mol_type = other DNA
gctggtgggaatgcaaaatggcatagccaccttggaaaacagtttggtagtttcttacaaaactaagtatccactcaccatataatctagtgctcatgctccttggtatttacccaaaca

SEQ ID NO: 110520 - DNA, 120 bp, synthetic construct
  source 1..120: mol_type = other DNA
aacaatgaaaacacatggacacagggaggggaacatcacacaccagggcctgttgggggttggggggctaggggagggataacatcaggagagatacctaatgtaggtgatgggttgttg

SEQ ID NO: 110521 - DNA, 120 bp, synthetic construct; identical to SEQ ID NO: 11138
  source 1..120: mol_type = other DNA

SEQ ID NO: 110522 - DNA, 120 bp, synthetic construct; identical to SEQ ID NO: 11139
  source 1..120: mol_type = other DNA

SEQ ID NO: 110523 - DNA, 120 bp, synthetic construct
  source 1..120: mol_type = other DNA
aaattttcgcaacctactcatctctcaaagggctaatatccagaatctacaatgaactcaaacaaatttacaagaaaaaagcaaacaaccccatcaaaaagtgggcaaaggatatgaaca

SEQ ID NO: 110524 - DNA, 120 bp, synthetic construct; identical to SEQ ID NO: 11140
  source 1..120: mol_type = other DNA

SEQ ID NO: 110525 - DNA, 120 bp, synthetic construct; identical to SEQ ID NO: 15249
  source 1..120: mol_type = other DNA

SEQ ID NO: 110526 - DNA, 120 bp, synthetic construct; identical to SEQ ID NO: 15250
  source 1..120: mol_type = other DNA

SEQ ID NO: 110527 - DNA, 120 bp, synthetic construct; identical to SEQ ID NO: 15251
  source 1..120: mol_type = other DNA

SEQ ID NO: 110528 - DNA, 120 bp, synthetic construct; identical to SEQ ID NO: 15252
  source 1..120: mol_type = other DNA

SEQ ID NO: 110529 - DNA, 120 bp, synthetic construct; identical to SEQ ID NO: 15253
  source 1..120: mol_type = other DNA

SEQ ID NO: 110530 - DNA, 120 bp, synthetic construct; identical to SEQ ID NO: 15254
  source 1..120: mol_type = other DNA

SEQ ID NO: 110531 - DNA, 120 bp, synthetic construct; identical to SEQ ID NO: 15255
  source 1..120: mol_type = other DNA

SEQ ID NO: 110532 - DNA, 120 bp, synthetic construct; identical to SEQ ID NO: 15256
  source 1..120: mol_type = other DNA

SEQ ID NO: 110533 - DNA, 120 bp, synthetic construct; identical to SEQ ID NO: 15257
  source 1..120: mol_type = other DNA

SEQ ID NO: 110534 - DNA, 120 bp, synthetic construct; identical to SEQ ID NO: 15258
  source 1..120: mol_type = other DNA

SEQ ID NO: 110535 - DNA, 120 bp, synthetic construct; identical to SEQ ID NO: 15259
  source 1..120: mol_type = other DNA

SEQ ID NO: 110536 - DNA, 120 bp, synthetic construct; identical to SEQ ID NO: 15260
  source 1..120: mol_type = other DNA

SEQ ID NO: 110537 - DNA, 120 bp, synthetic construct
  source 1..120: mol_type = other DNA
aggtggaggttgcagtgagctgagattgtgccactgcatgccagctttccagccttggtgagagacagagcaagactccatctcaaaaaaaaaaaaaaaaaaaaaaaaagaggaagtgaa

SEQ ID NO: 110538 - DNA, 120 bp, synthetic construct
  source 1..120: mol_type = other DNA
tagctgggattacaggcacgcaccaccacacctggctaatttttgtatttttaatagagaatgggtttcactatgtttgccaagctggtctcaaactcctgacctcaggtgatcagccct

SEQ ID NO: 110539 - DNA, 120 bp, synthetic construct
  source 1..120: mol_type = other DNA
ctatttgaatttctttcttctttaaattttttattttattttattattattatactttaagttttagggtacatgtgcacaatgtgcaggttagttacatatgtatacatgtgccatgct

SEQ ID NO: 110540 - DNA, 120 bp, synthetic construct
  source 1..120: mol_type = other DNA
tagatgctggatattagccctttgtcagacgagtaggttgtgaaaattttctcccattttgtaggttgcctgttcactctgatggtagtttcttttgctgtgcagaagctctttagttta

SEQ ID NO: 110541 - DNA, 120 bp, synthetic construct
  source 1..120: mol_type = other DNA
ggaagaagttgaatctctgaatagaccaataacaggctctgaaattgtggcaataatcaatagcttaccaaccaaaaagagtccaggaccagatggattcagagctgaattctaccagag

SEQ ID NO: 110542 - DNA, 120 bp, synthetic construct
  source 1..120: mol_type = other DNA
tctaggaatccaacttacaagggacgtgaaggacctcttcaaggagaactacaaaccactgctcaatgaaataaaagaggatacaaagcaatggaagaacattccatgctcatgggtagg

SEQ ID NO: 110543 - DNA, 120 bp, synthetic construct
  source 1..120: mol_type = other DNA
gatggcgccactgcactccagcctgggcaacagaccgagactccgtctcaaaaagaaaaacaacaacaatgacctcgacaatagcaacaacacaccatgacagcaacggctgacatttcc

SEQ ID NO: 110544 - DNA, 120 bp, synthetic construct; identical to SEQ ID NO: 15262
  source 1..120: mol_type = other DNA

SEQ ID NO: 110545 - DNA, 120 bp, synthetic construct; identical to SEQ ID NO: 15263
  source 1..120: mol_type = other DNA

SEQ ID NO: 110546 - DNA, 120 bp, synthetic construct; identical to SEQ ID NO: 15264
  source 1..120: mol_type = other DNA

SEQ ID NO: 110547 - DNA, 120 bp, synthetic construct; identical to SEQ ID NO: 15265
  source 1..120: mol_type = other DNA

SEQ ID NO: 110548 - DNA, 120 bp, synthetic construct; identical to SEQ ID NO: 15266
  source 1..120: mol_type = other DNA

SEQ ID NO: 110549 - DNA, 120 bp, synthetic construct; identical to SEQ ID NO: 15267
  source 1..120: mol_type = other DNA

SEQ ID NO: 110550 - DNA, 120 bp, synthetic construct; identical to SEQ ID NO: 15268
  source 1..120: mol_type = other DNA

SEQ ID NO: 110551 - DNA, 120 bp, synthetic construct; identical to SEQ ID NO: 15269
  source 1..120: mol_type = other DNA

SEQ ID NO: 110552 - DNA, 120 bp, synthetic construct; identical to SEQ ID NO: 15270
  source 1..120: mol_type = other DNA

SEQ ID NO: 110553 - DNA, 120 bp, synthetic construct; identical to SEQ ID NO: 15271
  source 1..120: mol_type = other DNA

SEQ ID NO: 110554 - DNA, 120 bp, synthetic construct; identical to SEQ ID NO: 15272
  source 1..120: mol_type = other DNA

SEQ ID NO: 110555 - DNA, 120 bp, synthetic construct; identical to SEQ ID NO: 15273
  source 1..120: mol_type = other DNA

SEQ ID NO: 110556 - DNA, 120 bp, synthetic construct; identical to SEQ ID NO: 15274
  source 1..120: mol_type = other DNA

SEQ ID NO: 110557 - DNA, 120 bp, synthetic construct; identical to SEQ ID NO: 12409
  source 1..120: mol_type = other DNA

SEQ ID NO: 110558 - DNA, 120 bp, synthetic construct; identical to SEQ ID NO: 12410
  source 1..120: mol_type = other DNA

SEQ ID NO: 110559 - DNA, 120 bp, synthetic construct; identical to SEQ ID NO: 12411
  source 1..120: mol_type = other DNA

SEQ ID NO: 110560 - DNA, 120 bp, synthetic construct; identical to SEQ ID NO: 12412
  source 1..120: mol_type = other DNA

SEQ ID NO: 110561 - DNA, 120 bp, synthetic construct; identical to SEQ ID NO: 12413
  source 1..120: mol_type = other DNA

SEQ ID NO: 110562 - DNA, 120 bp, synthetic construct
  source 1..120: mol_type = other DNA
aatgggatggctgggtcaaatggtatttccagttccagatccctgaggaatcgccacactgacttccacaatggttgaactagtttacagtcccaccaacagtgtaaaagtgttcctatt

SEQ ID NO: 110563 - DNA, 120 bp, synthetic construct
  source 1..120: mol_type = other DNA
aaggttgcagtgagccaagattgcgccactgcactccagcctgggtgacaagagggagactctgtctcccaaaaaaaaaaaaaaaaaaaaaaaaagttgaggactgctacattatagaac

SEQ ID NO: 110564 - DNA, 120 bp, synthetic construct
  source 1..120: mol_type = other DNA
gatcaaatgagatcacatatcagaaagtgctttattttattttatttttgagacagagtctctgtaacccaggttggagtgcagtggtgcaatcttggttcactgcaacctttgcctccc

SEQ ID NO: 110565 - DNA, 120 bp, synthetic construct; identical to SEQ ID NO: 20482
  source 1..120: mol_type = other DNA

SEQ ID NO: 110566 - DNA, 120 bp, synthetic construct
  source 1..120: mol_type = other DNA
cagctccaggctcctcctttatagaaagcaaacatctgtattcctcacattgcaaaagtctttgccacagtgacgcttctgatcactgaaacttcttggaagaaaagtttaagagtttaa

SEQ ID NO: 110567 - DNA, 120 bp, synthetic construct
  source 1..120: mol_type = other DNA
gggctccagccgccgggccttgcgcgcctgcttcttgcggcgcggccggtacttgtagttggggtggtcgcgcaagtgctgcacgcgcagccgttcggcttcctccacgaagggccgctt

SEQ ID NO: 110568 - DNA, 120 bp, synthetic construct
  source 1..120: mol_type = other DNA
tcaatcaccttcctgcaaacaaggtttttctcattaaaacccttgtataaattttgcttattaaaaacctgggcatggtgactcatacctgtaatcccagcactttggggggctgacgtg

SEQ ID NO: 110569 - DNA, 120 bp, synthetic construct
  source 1..120: mol_type = other DNA
tctgatactatgttgcatcacagagctttggaacatttgtgctgtacatagtgtcactgtcctgatgcttagatgatgtaaggttttggtgactattctcaggtcaaatcataccctttg

SEQ ID NO: 110570 - DNA, 120 bp, synthetic construct; identical to SEQ ID NO: 12751
  source 1..120: mol_type = other DNA

SEQ ID NO: 110571 - DNA, 120 bp, synthetic construct; identical to SEQ ID NO: 11716
  source 1..120: mol_type = other DNA

SEQ ID NO: 110572 - DNA, 120 bp, synthetic construct; identical to SEQ ID NO: 11717
  source 1..120: mol_type = other DNA

SEQ ID NO: 110573 - DNA, 120 bp, synthetic construct
  source 1..120: mol_type = other DNA
aaaccttatccaccatgatcaagtgggcttcacccctgggatgcaaggctggttcaacatgcgcaaatcaataaacggaatccagcatataaacagaaccaaagacaaaaaccacatgat

SEQ ID NO: 110574 - DNA, 120 bp, synthetic construct
  source 1..120: mol_type = other DNA
tgccaagtcaatcctaagccaaaagaacaaagctggaggcatcacgctacctgacttcaaactatactacaaggctacagtaaccaaaacagcatggtaccactaccaaaacagagatat

SEQ ID NO: 110575 - DNA, 120 bp, synthetic construct
  source 1..120: mol_type = other DNA
attataaatcatgctgctataaagacacatgcacacgtatgttcattgtggcactattcacaatagcaaagacttggaaccaacccaaatgtccaacaatcatagactggattaagaaaa

SEQ ID NO: 110576 - DNA, 120 bp, synthetic construct
  source 1..120: mol_type = other DNA
cttgcctcgtcagcgtccgcgtttttcccggccccccccaacccccccggacaggacccccttgagcttgtccctcagctgccaccatgagcggtaaggatgagtccactccaagcttag

SEQ ID NO: 110577 - DNA, 120 bp, synthetic construct; identical to SEQ ID NO: 22057
  source 1..120: mol_type = other DNA

SEQ ID NO: 110578 - DNA, 120 bp, synthetic construct; identical to SEQ ID NO: 22058
  source 1..120: mol_type = other DNA

SEQ ID NO: 110579 - DNA, 120 bp, synthetic construct; identical to SEQ ID NO: 22059
  source 1..120: mol_type = other DNA

SEQ ID NO: 110580 - DNA, 120 bp, synthetic construct; identical to SEQ ID NO: 22060
  source 1..120: mol_type = other DNA

SEQ ID NO: 110581 - DNA, 120 bp, synthetic construct; identical to SEQ ID NO: 22050
  source 1..120: mol_type = other DNA

SEQ ID NO: 110582 - DNA, 120 bp, synthetic construct
  source 1..120: mol_type = other DNA
aagtgtctgttcatatccttcgcccactttttgatggggttgtttgtttttttcttgtaaatttgtttgagttaattgtagattctggatattagccctttgtcagatgagtaggttgcg

SEQ ID NO: 110583 - DNA, 120 bp, synthetic construct; identical to SEQ ID NO: 22051
  source 1..120: mol_type = other DNA

SEQ ID NO: 110584 - DNA, 120 bp, synthetic construct; identical to SEQ ID NO: 22052
  source 1..120: mol_type = other DNA

SEQ ID NO: 110585 - DNA, 120 bp, synthetic construct; identical to SEQ ID NO: 22053
  source 1..120: mol_type = other DNA

SEQ ID NO: 110586 - DNA, 120 bp, synthetic construct; identical to SEQ ID NO: 22054
  source 1..120: mol_type = other DNA

SEQ ID NO: 110587 - DNA, 120 bp, synthetic construct; identical to SEQ ID NO: 22055
  source 1..120: mol_type = other DNA

SEQ ID NO: 110588 - DNA, 120 bp, synthetic construct
  source 1..120: mol_type = other DNA
cttgcactgctctagataaatacctgagactaggtaatttataaagaaaagaggtttaatggcgtttctagttctagatccttgaggaatcgccacactgacttccacaatggttgaact

SEQ ID NO: 110589 - DNA, 120 bp, synthetic construct
  source 1..120: mol_type = other DNA
tcagatagttgtagatacgcagcgttatttctgagggctctgttctgttccgttgatctatatctccgttttggtaccagtaccatgctgttttggttactgtagccctgtagtatagtt

SEQ ID NO: 110590 - DNA, 120 bp, synthetic construct
  source 1..120: mol_type = other DNA
tattaaaccagccttgcatcccaaggatgaagcccacttgatcatggtggataagctttttgatgtgctgctggattcgttttgccagtattttattgaggatttttgcatcaatgttca

SEQ ID NO: 110591 - DNA, 120 bp, synthetic construct
  source 1..120: mol_type = other DNA
gctgaggagagctttacttcccagtatgtggtcaattttggaataggtgtggtgctgaaaaaaatgtatattctgttgatttggggtggagagttctgtagatgtctattaggtccgctt

SEQ ID NO: 110592 - DNA, 120 bp, synthetic construct
  source 1..120: mol_type = other DNA
gtttctgctgagagatccgctgttagtctgatgggcttccctttgagggtaacccgagctttctctctggctgcccttaacattttttccttcatttcaactttggtgaatctgacaatt

SEQ ID NO: 110593 - DNA, 120 bp, synthetic construct
  source 1..120: mol_type = other DNA
cccagaggtggagcctagagagacaggcaggcctccttgagctgtggtgggctccacccagttcgcgcttcccggctgctttgtttacctaagcaagcctgggcaatggcgggcgcccct

SEQ ID NO: 110594 - DNA, 120 bp, synthetic construct; identical to SEQ ID NO: 22056
  source 1..120: mol_type = other DNA

SEQ ID NO: 110595 - DNA, 120 bp, synthetic construct; identical to SEQ ID NO: 22054
  source 1..120: mol_type = other DNA

SEQ ID NO: 110596 - DNA, 120 bp, synthetic construct; identical to SEQ ID NO: 22055
  source 1..120: mol_type = other DNA

SEQ ID NO: 110597 - DNA, 120 bp, synthetic construct; identical to SEQ ID NO: 33822
  source 1..120: mol_type = other DNA

SEQ ID NO: 110598 - DNA, 120 bp, synthetic construct; identical to SEQ ID NO: 33823
  source 1..120: mol_type = other DNA

SEQ ID NO: 110599 - DNA, 120 bp, synthetic construct; identical to SEQ ID NO: 33824
  source 1..120: mol_type = other DNA

SEQ ID NO: 110600 - DNA, 120 bp, synthetic construct; identical to SEQ ID NO: 33825
  source 1..120: mol_type = other DNA

SEQ ID NO: 110601 - DNA, 120 bp, synthetic construct; identical to SEQ ID NO: 33826
  source 1..120: mol_type = other DNA

SEQ ID NO: 110602 - DNA, 120 bp, synthetic construct; identical to SEQ ID NO: 33827
  source 1..120: mol_type = other DNA

SEQ ID NO: 110603 - DNA, 120 bp, synthetic construct; identical to SEQ ID NO: 33828
  source 1..120: mol_type = other DNA

SEQ ID NO: 110604 - DNA, 120 bp, synthetic construct; identical to SEQ ID NO: 33829
  source 1..120: mol_type = other DNA

SEQ ID NO: 110605 - DNA, 120 bp, synthetic construct; identical to SEQ ID NO: 33830
  source 1..120: mol_type = other DNA

SEQ ID NO: 110606 - DNA, 120 bp, synthetic construct; identical to SEQ ID NO: 33831
  source 1..120: mol_type = other DNA

SEQ ID NO: 110607 - DNA, 120 bp, synthetic construct
  source 1..120: mol_type = other DNA
cggctaatttttgtatttttagtagagtcagagtttcaccatgttggtcaggctggtctcaaactcctgacctggtgatccacccgcctcggcctcccaaagtactgggattacaggcgt

SEQ ID NO: 110608 - DNA, 120 bp, synthetic construct
  source 1..120: mol_type = other DNA
ttgcactccagcctgggcaacaagagtgaaactccgtctaaaaagagagagagagaaagacagaaggaaagaaagaaagagagagagagagaaagacagaaggaaagaaagagacagaaa

SEQ ID NO: 110609 - DNA, 120 bp, synthetic construct
  source 1..120: mol_type = other DNA
tttttatttccttctaggttcacctactgaaataccattcagttcaaaacaggaggatatgtctgaattattaggtaaggaagcccctcctatcaacctctggcctgtacgtgaagaggg

SEQ ID NO: 110610 - DNA, 120 bp, synthetic construct
  source 1..120: mol_type = other DNA
tgcagtaagctgagatcgcagcattgccctcctgcctggcaacagagcgagactctgtctcaaaaaaaaaaaaaaagacacagatgaaactcattgtaataatattttatttcacgtgat

SEQ ID NO: 110611 - DNA, 120 bp, synthetic construct
  source 1..120: mol_type = other DNA
ttcctgggtcctgaccaactaaacctagaaggaagcagcagctcttacccccatccacacccccagatttcttctaggtagaaagctgaaagcattgacagtgagaattcaaatccctgt

SEQ ID NO: 110612 - DNA, 120 bp, synthetic construct
  source 1..120: mol_type = other DNA
tgtggattgtgttacattcgctatgtttcttcaggagataaatattccttgttcttaggatatccaggaattgaactcagctcttcaccaagaggacctaatagacatctacagaactct

SEQ ID NO: 110613 - DNA, 120 bp, synthetic construct; identical to SEQ ID NO: 13962
  source 1..120: mol_type = other DNA

SEQ ID NO: 110614 - DNA, 120 bp, synthetic construct; identical to SEQ ID NO: 13963
  source 1..120: mol_type = other DNA

SEQ ID NO: 110615 - DNA, 120 bp, synthetic construct; identical to SEQ ID NO: 21977
  source 1..120: mol_type = other DNA

SEQ ID NO: 110616 - DNA, 120 bp, synthetic construct; identical to SEQ ID NO: 21978
  source 1..120: mol_type = other DNA

SEQ ID NO: 110617 - DNA, 120 bp, synthetic construct; identical to SEQ ID NO: 21979
  source 1..120: mol_type = other DNA

SEQ ID NO: 110618 - DNA, 120 bp, synthetic construct
  source 1..120: mol_type = other DNA
ttctcctggctctgtcctccagatattatccttcctcgcttcaaatactgttttctttgtcttgtagactgtaaatgctattgttgcagcaggtgttttctctctgctcattttcaaatg

SEQ ID NO: 110619 - DNA, 120 bp, synthetic construct
  source 1..120: mol_type = other DNA
tttttttgtctttttttttcctttttttaattattattatactttaagttttagggtacatgtgcacaatgtgcaggttagttacatatgtatacatgtgccatgctggtgtgctgcacc

SEQ ID NO: 110620 - DNA, 120 bp, synthetic construct; identical to SEQ ID NO: 21980
  source 1..120: mol_type = other DNA

SEQ ID NO: 110621 - DNA, 120 bp, synthetic construct; identical to SEQ ID NO: 21981
  source 1..120: mol_type = other DNA

SEQ ID NO: 110622 - DNA, 120 bp, synthetic construct
  source 1..120: mol_type = other DNA
tgtatatatagaatatatgtgtgtgtgtgtgtgtatatatatatatagagagagagagagagagagagagagagagagagtaagctgggtgtgatggtgtgtgcctgtaatcccagctac

SEQ ID NO: 110623 - DNA, 120 bp, synthetic construct
  source 1..120: mol_type = other DNA
atatgggccacattttcttaatccagtctatcattgacggacatttgggttggttccaagtctttgctattgtgaatagtgccgcaataaacatacgtgtgcatgtgtctttatagcagc

SEQ ID NO: 110624 - DNA, 120 bp, synthetic construct
  source 1..120: mol_type = other DNA
aaactattttagttgtttcttacttttaattgttaagtatatcccattggtgggggggggggggtggggggtggggggatgtgacagagagagagatatatatttctgtattggtattgc

SEQ ID NO: 110625 - DNA, 120 bp, synthetic construct; identical to SEQ ID NO: 21982
  source 1..120: mol_type = other DNA

SEQ ID NO: 110626 - DNA, 120 bp, synthetic construct
  source 1..120: mol_type = other DNA
catgtgccatgctggtgtgctgcacccattaactcgtcatttagcattaggtatatctcctaatgctatccctccccacttcccctaccccacaacagtccccagagtgtgatgttcccc

SEQ ID NO: 110627 - DNA, 120 bp, synthetic construct
  source 1..120: mol_type = other DNA
ttttctcccattttgtaggttgcctgttcactctgatggtagtttcttttgctgtgcagaagctctttagtttaatgagatcccatttgtcaattttggcttttgttgccgttgcttttg

SEQ ID NO: 110628 - DNA, 120 bp, synthetic construct
  source 1..120: mol_type = other DNA
ccttcatgctaaaaactctcaataaatacggtattgatgggacgtatctcaaaataataagagctatctatctatgacaaacccacagccaatatcatactgaatgggcaaaaactggaa

SEQ ID NO: 110629 - DNA, 120 bp, synthetic construct; identical to SEQ ID NO: 21983
  source 1..120: mol_type = other DNA

SEQ ID NO: 110630 - DNA, 120 bp, synthetic construct; identical to SEQ ID NO: 21984
  source 1..120: mol_type = other DNA

SEQ ID NO: 110631 - DNA, 120 bp, synthetic construct
  source 1..120: mol_type = other DNA
agaacttcagattaaagacttaaatgttagacctaaaaccataaaaaccctagaagaaaacctacgcattaccattcaggacataggcatgggcaaggacttcatgtctaaaacaccaaa

SEQ ID NO: 110632 - DNA, 120 bp, synthetic construct
  source 1..120: mol_type = other DNA
tggatgaaattggaaatcatcattctcagtaaactatcgcaaggacaaaaaaccaaacaccgcatgttctcactcataggtgggaattaacaatgagaacacatggacacaggaagggga

SEQ ID NO: 110633 - DNA, 120 bp, synthetic construct
  source 1..120: mol_type = other DNA
gcatccttgttatgtttcagatcttggaggaaaggctttcaggttttccccattcagtgtgatactacctgtgggtctgtcatatatggcgtttactgtgttgaggtatgtttcttctat

SEQ ID NO: 110634 - DNA, 120 bp, synthetic construct
  source 1..120: mol_type = other DNA
ggtatctcactaagtcatgtgctcctaatgtccactggctctgagcccagcatagcatcataacttgccaaagaattacagtccatgtggtgtagactgcctttcaagtttatttagtac

SEQ ID NO: 110635 - DNA, 120 bp, synthetic construct
  source 1..120: mol_type = other DNA
ccctcccccctccccccaccccacaacagtccccagagtgtgatgttccccttcctgtgtccatgtgttctcattgttcagttcccacctatgagtgagaatatgcagtgtttggttttt

SEQ ID NO: 110636 - DNA, 120 bp, synthetic construct
  source 1..120: mol_type = other DNA
catatgtatacatgtgccatgttggtgtgctgcacccattaactcatcagttaacattaggtatatctcctaatgctatccctctccacttcccacaccccacaacaggccccggtatgt

SEQ ID NO: 110637 - DNA, 120 bp, synthetic construct
  source 1..120: mol_type = other DNA
tttgtagattctggatattagccctttgtcagatgagtagattgcaaaaattttctcccattctgtaggttgcctgttcactctgacggtagtttcttttgctgtgcagaagctcttcag

SEQ ID NO: 110638 - DNA, 120 bp, synthetic construct
  source 1..120: mol_type = other DNA
agaatgcttgtgatttttgtacattgattttgtatcctgagactttgctgaagttgcttctcagcttaaggagattttgggctgagacagtggggttttctagatatacaatcatgtcat

SEQ ID NO: 110639 - DNA, 120 bp, synthetic construct
  source 1..120: mol_type = other DNA
gtctatttgattcttctctcttttcttctttattagtcttgctagtggtctctcaattttgttgatcttttcaaaaaatcagctcctggattcattgatattttgaagggttttttgtgt

SEQ ID NO: 110640 - DNA, 120 bp, synthetic construct
  source 1..120: mol_type = other DNA
ctcattgttcaattcccacctgtgagtgagaacatgcagtgtttggttgtctgtccttgagatagttggctgagaacgatggtttccagtttcatccatgtccctacaaaggacatgaac

SEQ ID NO: 110641 - DNA, 120 bp, synthetic construct
  source 1..120: mol_type = other DNA
tatgtcctgaatggtattgcctaggttttcttctagggtttttatggttttaggtctaacatttaagtctttaatccatcttgaattaatttttgtataaggtgtgaggaagggatccag

SEQ ID NO: 110642 - DNA, 120 bp, synthetic construct
  source 1..120: mol_type = other DNA
catccatgtccctacagaggacatgaactcatcattttttatggctgcatagtattccatggtgtatatgtcccacattttcttaatccagtctatcgttgttggacatttaggttggtt

SEQ ID NO: 110643 - DNA, 120 bp, synthetic construct
  source 1..120: mol_type = other DNA
tcctcttttatttccttgagcagtggtttttagttctccttgaagaggtccttcacatcccttgtaagttggattcctaggtattttattctctttgaagcaattgtgaatgggagttca

SEQ ID NO: 110644 - DNA, 120 bp, synthetic construct; identical to SEQ ID NO: 21974
  source 1..120: mol_type = other DNA

SEQ ID NO: 110645 - DNA, 120 bp, synthetic construct; identical to SEQ ID NO: 104221
  source 1..120: mol_type = other DNA

SEQ ID NO: 110646 - DNA, 120 bp, synthetic construct; identical to SEQ ID NO: 69276
  source 1..120: mol_type = other DNA

SEQ ID NO: 110647 - DNA, 120 bp, synthetic construct
  source 1..120: mol_type = other DNA
tcagaatgatgctggcctcataaaatgagttagggaggattccctctttttctattgattggaatagtttccgaaggaatggtaccagttcctccatgtacctctggtagaattcggctg

SEQ ID NO: 110648 - DNA, 120 bp, synthetic construct
  source 1..120: mol_type = other DNA
ccttgttgactttctgtctcgttgatctgtctaatgttgacagtggggtgttaaagtctcccattattaatgtgtgggagtctaagtctctttgtaagtcactgaggacttgctttatga

SEQ ID NO: 110649 - DNA, 120 bp, synthetic construct
  source 1..120: mol_type = other DNA
tcactttcaggtacaccaatcagacatagatttggtcttttcacatagtcccatagttcttggaggctttgctcatttctttttattcttttttctctaaacttcccttctcgcttcatt

SEQ ID NO: 110650 - DNA, 120 bp, synthetic construct
  source 1..120: mol_type = other DNA
ggaactccctgacccctcgcgcttcccaggtgaggcaatgcctcgccctgctttggctcacgcacggtgcgcgcacccactggcctgcgcccactgtctggcactccctagtgagatgaa

SEQ ID NO: 110651 - DNA, 120 bp, synthetic construct; identical to SEQ ID NO: 21975
  source 1..120: mol_type = other DNA

SEQ ID NO: 110652 - DNA, 120 bp, synthetic construct
  source 1..120: mol_type = other DNA
gctttttccttgtaaatttgtttgagttcattgtagattctggatattagccctttgtcagatgagtaggttgtgaaaattttctcccattttgtgggttgcctgttcactctgatggta

SEQ ID NO: 110653 - DNA, 120 bp, synthetic construct
  source 1..120: mol_type = other DNA
tcctgagactttgctaaagttgcttatcagcttaacgagattttgggatgagacaatggggttttctagatatacaatcatgttgtctgcaaacagggacaatttgacttcctcttttcc

SEQ ID NO: 110654 - DNA, 120 bp, synthetic construct
  source 1..120: mol_type = other DNA
ttcagagattcaacttcttcctggtttagtcttgggagagtgtatgtgtcgaggaaaggaacaaccggtaccagccgctgtaaaatcatgccaaaatgtagagaccatcgagactaggaa

SEQ ID NO: 110655 - DNA, 120 bp, synthetic construct
  source 1..120: mol_type = other DNA
aacatcacaattaaaagaactagaaaagcaagagcaaacacattcaaaagccagcagacggcaagaaataactaaaatcagagcagaactgaaggaaatagagacacaaaaaacccttca

SEQ ID NO: 110656 - DNA, 120 bp, synthetic construct
  source 1..120: mol_type = other DNA
atgcgagcacacggcgcaggactggcaggcagctccacctgcagccctggtgcgggatccactaggtgaagccagctgggctcctgagtctggtggggacgtggagtctttatatctagt

SEQ ID NO: 110657 - DNA, 120 bp, synthetic construct
  source 1..120: mol_type = other DNA
cttccttacacctgatacaaaaattaagtcaagatggattaaagacttaaatgttagacctaaaaccataaaaaccctagaagaaaacctaggcaataccattcaggacataggcatggg

SEQ ID NO: 110658 - DNA, 120 bp, synthetic construct; identical to SEQ ID NO: 7985
  source 1..120: mol_type = other DNA

SEQ ID NO: 110659 - DNA, 120 bp, synthetic construct; identical to SEQ ID NO: 10139
  source 1..120: mol_type = other DNA

SEQ ID NO: 110660 - DNA, 120 bp, synthetic construct
  source 1..120: mol_type = other DNA
ctgatggccagtgatggtgagcattttttcatgtgttttttggctgcataaatgtcttcttttgagaagtgtctgttcatatccttcgcccactttttgatggggttgtttttttcttgt

SEQ ID NO: 110661 - DNA, 120 bp, synthetic construct
  source 1..120: mol_type = other DNA
tgtttggttttttgttcttgcgatagtttactgagaatgatgatttccagtttcatccatgtctctacaaaggatgtgaactcatcattttttatggcttcatactattccatggtgtat

SEQ ID NO: 110662 - DNA, 120 bp, synthetic construct
  source 1..120: mol_type = other DNA
tttggtaccagtaccatgctgttttggttactgtagccttgtagtatagtttgaagtcaggtagcgtgatgcctccagctttgttcttttggcttaggattgacttggcaatgcgggctc

SEQ ID NO: 110663 - DNA, 120 bp, synthetic construct
  source 1..120: mol_type = other DNA
tggcctcataaaatgagttagggaggattccctctttttctattgattggaatagtttcagaaggaatggtaccagctcctccttgtacgtctggtagaattcggctgtgaatccatctg

SEQ ID NO: 110664 - DNA, 120 bp, synthetic construct
  source 1..120: mol_type = other DNA
tgtttactttctgtctcgttgatctgtctgtgttgacagtggggtgttaaagtctcccattattattgtgtgggagtctaagtctctttgtaggtcactcaggacttgctttatgaatct

SEQ ID NO: 110665 - DNA, 120 bp, synthetic construct
  source 1..120: mol_type = other DNA
agattggggaagttctcctggataatatcctgcagaatgttttccaacttggttccattctccccgtcactttcaggtacaccaatcagacgtagatttggtcttttcacatagtcccat

SEQ ID NO: 110666 - DNA, 120 bp, synthetic construct
  source 1..120: mol_type = other DNA
cgcctttcagtttgatctcagactgctgtgctagcaatcagcgagactctgtgggggtaggaccctccgagccatgtgtgggatataatctcctggtgctccgttttttaagccgattgg

SEQ ID NO: 110667 - DNA, 120 bp, synthetic construct; identical to SEQ ID NO: 35384
  source 1..120: mol_type = other DNA

SEQ ID NO: 110668 - DNA, 120 bp, synthetic construct; identical to SEQ ID NO: 35385
  source 1..120: mol_type = other DNA

SEQ ID NO: 110669 - DNA, 120 bp, synthetic construct
  source 1..120: mol_type = other DNA
tgttgtggcctcatgctaaaaatgtttttttttctatttcttttttcttttcttgaggtggggtctcactctgtcagccaggctgagagtgcagtggcacaatcttggctcactgcaacc

SEQ ID NO: 110670 - DNA, 120 bp, synthetic construct
  source 1..120: mol_type = other DNA
ttcgtcaaagataaaaagtttaaaatgcttgatatcacgaaatagggtcatgggtcattgtaaaataagtcattcatttaaccaaagcagtaactcaaagatttcaaaaaagaaaaaaaa

SEQ ID NO: 110671 - DNA, 120 bp, synthetic construct; identical to SEQ ID NO: 35386
  source 1..120: mol_type = other DNA

SEQ ID NO: 110672 - DNA, 120 bp, synthetic construct
  source 1..120: mol_type = other DNA
tgaagcacagagtagggatctatggggaagaagaagaggagcgtgggtagggtcacctgtgagtccaaactgcaccattttgtcagttctttgctattttgcagaccttggtcaaagtga

SEQ ID NO: 110673 - DNA, 120 bp, synthetic construct; identical to SEQ ID NO: 35387
  source 1..120: mol_type = other DNA

SEQ ID NO: 110674 - DNA, 120 bp, synthetic construct; identical to SEQ ID NO: 35388
  source 1..120: mol_type = other DNA

SEQ ID NO: 110675 - DNA, 120 bp, synthetic construct
  source 1..120: mol_type = other DNA
ctgatgggcctttaggttgattcaatatctttgctattgtgaatagtgctgtcaagaacatacgcatgcgtatgtcttaatggtagaatgatatatatcgtttgggtatatatccagtaa

SEQ ID NO: 110676 - DNA, 120 bp, synthetic construct; identical to SEQ ID NO: 35389
  source 1..120: mol_type = other DNA

SEQ ID NO: 110677 - DNA, 120 bp, synthetic construct
  source 1..120: mol_type = other DNA
gaaggaagggagggagggaggaaggaagggagggagggaaggagggagggagggagggaggaaaggagaagaggagagaagagaggagacgagcttaaacctaaattggtagaaagcttc

SEQ ID NO: 110678 - DNA, 120 bp, synthetic construct
  source 1..120: mol_type = other DNA
tttagagatcgtctcctctcttctctcctcttctcctttcctccctccctccctccctccttccctccctcccttccttcctccctcccttccttcctttctttcttccttacttccttg

SEQ ID NO: 110679 - DNA, 120 bp, synthetic construct; identical to SEQ ID NO: 2236
  source 1..120: mol_type = other DNA

SEQ ID NO: 110680 - DNA, 120 bp, synthetic construct
  source 1..120: mol_type = other DNA
ttagctcttgcttataaatggaaaaaggtggtattccattttctgttcccacgtgagttcgcttagagtaatggcctccagctccatccatgttgctgcaaaagacatgatctcgttttt

SEQ ID NO: 110681 - DNA, 120 bp, synthetic construct
  source 1..120: mol_type = other DNA
ctggttttcctttctcctgtaagagacagcaccgagttcagtgacccacaactgctctgctcttgctcttccagcttccagagatgctctttacaccacactgccactgcctaggatagg

SEQ ID NO: 110682 - DNA, 120 bp, synthetic construct
  source 1..120: mol_type = other DNA
tttcccgctaaccgatgtgtatccaccaagcagttttctttttcagtataaatattatattgtttgacattttaagacacatggtaatcaaaatctatagccttaattaaatgatgactt

SEQ ID NO: 110683 - DNA, 120 bp, synthetic construct
  source 1..120: mol_type = other DNA
gaccacgcccgagagaacagaatcaaccccgaccaaatggaggaggaggaattcatagaaataacgactgaaagacctaaaaagtagcaagaagctacatccctcaaacttcggcaatga

SEQ ID NO: 110684 - DNA, 120 bp, synthetic construct
  source 1..120: mol_type = other DNA
tggattgtttgtccattgtatatattggttcttcaatgtcagcggcaggcttttgtaggttttgaatcttcgcagtggcccggagctcttgccctccctgtatataccctcctggtgaca

SEQ ID NO: 110685 - DNA, 120 bp, synthetic construct
  source 1..120: mol_type = other DNA
ggaaactcttatacttctgaaataacttgtgtatgttattaattataacttttatgttaaattcttgtatgctacagaagtaaccaaaatttacttgtcaatggtggttttaataatggc

SEQ ID NO: 110686 - DNA, 120 bp, synthetic construct
  source 1..120: mol_type = other DNA
acacagatggaagaaaacacttttttagaccttgaagaaaaaatttttggcctgtcatagtggctcatgcctgtaatcctagcactttgggaggctgaagcaggtggatcacttgaggtc

SEQ ID NO: 110687 - DNA, 120 bp, synthetic construct
  source 1..120: mol_type = other DNA
cacattgttcttattcactgattacctaatttcataaataacttttaaataagcttcgaattagacaaaaagtattttcctttaagatcacatttctttcttacagaaaaatgttatcct

SEQ ID NO: 110688 - DNA, 120 bp, synthetic construct
  source 1..120: mol_type = other DNA
acctaagggttcctttaatatgcacatttagggctatctagctgacaattgcctagggcaataaaataggttatgaagaaattgtaaatctaaaatacaaggaaaaaataaaggccttag

SEQ ID NO: 110689 - DNA, 120 bp, synthetic construct; identical to SEQ ID NO: 35404
  source 1..120: mol_type = other DNA

SEQ ID NO: 110690 - DNA, 120 bp, synthetic construct
  source 1..120: mol_type = other DNA
ataccactttttattgaaatagctggcacatgaatatacctggttacaatgcttggccgaatgagaaatgcaatgccattttatgtaattgcacttaatatgcatgagtctcacacttaa

SEQ ID NO: 110691 - DNA, 120 bp, synthetic construct; identical to SEQ ID NO: 35405
  source 1..120: mol_type = other DNA

SEQ ID NO: 110692 - DNA, 120 bp, synthetic construct; identical to SEQ ID NO: 2119
  source 1..120: mol_type = other DNA

SEQ ID NO: 110693 - DNA, 120 bp, synthetic construct
  source 1..120: mol_type = other DNA
gagttcaggggatgttggagagatcattaggtaaaacaagaaggtcttctcaggatacatgagggagttaaataaaaatgcaggagcaattacaatttcagttatttgtaactgttcctt

SEQ ID NO: 110694 - DNA, 120 bp, synthetic construct; identical to SEQ ID NO: 35406
  source 1..120: mol_type = other DNA

SEQ ID NO: 110695 - DNA, 120 bp, synthetic construct; identical to SEQ ID NO: 110684
  source 1..120: mol_type = other DNA

SEQ ID NO: 110696 - DNA, 120 bp, synthetic construct; identical to SEQ ID NO: 35407
  source 1..120: mol_type = other DNA

SEQ ID NO: 110697 - DNA, 120 bp, synthetic construct; identical to SEQ ID NO: 2118
  source 1..120: mol_type = other DNA

SEQ ID NO: 110698 - DNA, 120 bp, synthetic construct; identical to SEQ ID NO: 35415
  source 1..120: mol_type = other DNA

SEQ ID NO: 110699 - DNA, 120 bp, synthetic construct; identical to SEQ ID NO: 35416
  source 1..120: mol_type = other DNA

SEQ ID NO: 110700 - DNA, 120 bp, synthetic construct; identical to SEQ ID NO: 35417
  source 1..120: mol_type = other DNA

SEQ ID NO: 110701 - DNA, 120 bp, synthetic construct
  source 1..120: mol_type = other DNA
agaccatttacttttgggctactgccaggcaaatttcaacccatgttcttttacccaatgtccgtgtagttcaagtttcctatctccaatctgaaataatggccttcagtctgtcaaaac

SEQ ID NO: 110702 - DNA, 120 bp, synthetic construct
  source 1..120: mol_type = other DNA
cgctgagtctttctaatcttccttttctacagacccatctgacctctcccttcctccccaggctactccctgccaggccgagctaggtcccaattcttcctcagcctctgctactccacc

SEQ ID NO: 110703 - DNA, 120 bp, synthetic construct
  source 1..120: mol_type = other DNA
taaaactccccaactctggtgccaacttagacaatactcttttaagcactcctttttagttatccccacctgcccagttcccttattaggctgagacactaactaaattatctgcttccc

SEQ ID NO: 110704 - DNA, 120 bp, synthetic construct
  source 1..120: mol_type = other DNA
gaattcaggcctgtcctcggaatgctacagggtacagcccatttaagctcccgtacagacgctccttattaggccccagtctcattcgagacaccagaccaacttagactgtgccccaga

SEQ ID NO: 110705 - DNA, 120 bp, synthetic construct
  source 1..120: mol_type = other DNA
gcatgaaactcagcactttggaaggccaaattgggcggatcacctgaggtcagaagctcgagaccagcctggccaatatggtgaaactttgtgtttactaaaaatacaaaaattagctgg

SEQ ID NO: 110706 - DNA, 120 bp, synthetic construct
  source 1..120: mol_type = other DNA
catgatattgattcttcctatccataagcatggaatgttcttccatttgtctgtgtcctcttttatttcattgagcagtggtttgtagttctccttgaagaggtccttcacatcccttgt

SEQ ID NO: 110707 - DNA, 120 bp, synthetic construct
  source 1..120: mol_type = other DNA
agctttttgatgtgctgctggattcggtttgccagtattttattgaggatttttgcgttgatgttcatcagggatattggtctaaaattctctttgttgtgtctctgccaggctttggta

SEQ ID NO: 110708 - DNA, 120 bp, synthetic construct
  source 1..120: mol_type = other DNA
ctcggcctcccaaagtgctgggattacaggcgtgagccaccgcgcctggtccctatacatatatagttatatatacctatagttatttttagttatatcaaaataactatatgtatatgt

SEQ ID NO: 110709 - DNA, 120 bp, synthetic construct
  source 1..120: mol_type = other DNA
tatagtgtgtatagcgtatatatacagtatactgtatagtgtgtatagcgtatatatagtatactgtatagcgtatagagtatatatatagtatactgtatagtgtatagagtatatata

SEQ ID NO: 110710 - DNA, 120 bp, synthetic construct
  source 1..120: mol_type = other DNA
gctgagatcacgccactgcactccagcctgggtgacagagcgagactccatctctctctctctctatatatatacgtgtatatatatatataatatatttaatattgcatacatatttat

SEQ ID NO: 110711 - DNA, 120 bp, synthetic construct; identical to SEQ ID NO: 24883
  source 1..120: mol_type = other DNA

SEQ ID NO: 110712 - DNA, 120 bp, synthetic construct; identical to SEQ ID NO: 5228
  source 1..120: mol_type = other DNA

SEQ ID NO: 110713 - DNA, 120 bp, synthetic construct; identical to SEQ ID NO: 9362
  source 1..120: mol_type = other DNA

SEQ ID NO: 110714 - DNA, 120 bp, synthetic construct
  source 1..120: mol_type = other DNA
tgtcctttgcccactttttgatggggttgtatgtttttttcttgtaaatttgtttgagttcattgtagattctggatattagccctttgtcagatgagtaggttgcgaaaattttctccc

SEQ ID NO: 110715 - DNA, 120 bp, synthetic construct
  source 1..120: mol_type = other DNA
ccattttcacgatattgattcttcctacccatgagcatggaatgttcttccatttgtttgtatcctcttttatttccttgagcagtggtttgtagttctccttgaagaggtccttcacat

SEQ ID NO: 110716 - DNA, 120 bp, synthetic construct
  source 1..120: mol_type = other DNA
taaactgttgattattgccacaatttcagctcctgttattggtctattcagagattcagcttcttcctggtttagtcttgggagagtgtatgtgtcgaggaatgtatccatttcttctag

SEQ ID NO: 110717 - DNA, 120 bp, synthetic construct
  source 1..120: mol_type = other DNA
agagctgagttcaattcctgggtatccttgttgactgtctgtctcgttgatctgtctaatgttgacagtggggtgttaaagtctcccattattaatgtgtgggagtctaagtctctttgt

SEQ ID NO: 110718 - DNA, 120 bp, synthetic construct
  source 1..120: mol_type = other DNA
ttgtggcgttctctgtatttcctgaatctgaacgttggcctgccttgctaggttggggaagttctcctggataatatcctgcagagtgttttccaacttggttccattctccgcatcact

SEQ ID NO: 110719 - DNA, 120 bp, synthetic construct
  source 1..120: mol_type = other DNA
agggacccacttgaggaggcagtctgcccgttctcagatctccagctgcctgctgggagaaccactgctctcttcaaagctgtcagacagggacatttaagtctgcagaggttactgctg

SEQ ID NO: 110720 - DNA, 120 bp, synthetic construct
  source 1..120: mol_type = other DNA
agaggttgcagtgagccgagaatgtgctagtgcactccagcctgggcaacaagagtgaaactccatctcagaaaaacaaacaagcaaaatatcatgcactatatttctgaaaaggaaaaa

SEQ ID NO: 110721 - DNA, 120 bp, synthetic construct
  source 1..120: mol_type = other DNA
ggcctcccaaagtgctgggattacaggtgtgagccaccatgcctggcctaaaatagtgaaatcatatttaactgaacatttgttaattctgtttttttcaaggttgttgagatactgagt

SEQ ID NO: 110722 - DNA, 120 bp, synthetic construct; identical to SEQ ID NO: 7201
  source 1..120: mol_type = other DNA

SEQ ID NO: 110723 - DNA, 120 bp, synthetic construct; identical to SEQ ID NO: 17355
  source 1..120: mol_type = other DNA

SEQ ID NO: 110724 - DNA, 120 bp, synthetic construct
  source 1..120: mol_type = other DNA
gtacttccagttctagatccttgaggaatcgccacactgacttccacaatggttgaactagtttacagtcccaccaacagtgtaaaagtgttcctatttctccacatcctctccagcacc

SEQ ID NO: 110725 - DNA, 120 bp, synthetic construct
  source 1..120: mol_type = other DNA
ttggtagcttgatggggatggcattgaatctaaaattaccttgggcagtatggccattttcacgatattgattcttcctacccatgagcatggaatgttcttccatttgtttgtatcctc

SEQ ID NO: 110726 - DNA, 120 bp, synthetic construct
  source 1..120: mol_type = other DNA
ccaaagccgggcagagacacaacaaaaaaagataattttagaccaatatccttgatgaacattgatgcaaaaatcctcaataaaatactggcaaaccgaatccagcagcacatcaaaaag

SEQ ID NO: 110727 - DNA, 120 bp, synthetic construct; identical to SEQ ID NO: 17356
  source 1..120: mol_type = other DNA

SEQ ID NO: 110728 - DNA, 120 bp, synthetic construct
  source 1..120: mol_type = other DNA
agcgcctcttcccggccgccatcccatctaggaagtgaggagcgtctctgccgggccgcccatcgtctgagatgtggggagcacctttgccccgccgccccatctgggatgtgaggagcg

SEQ ID NO: 110729 - DNA, 120 bp, synthetic construct; identical to SEQ ID NO: 17357
  source 1..120: mol_type = other DNA

SEQ ID NO: 110730 - DNA, 120 bp, synthetic construct; identical to SEQ ID NO: 22064
  source 1..120: mol_type = other DNA

SEQ ID NO: 110731 - DNA, 120 bp, synthetic construct; identical to SEQ ID NO: 22065
  source 1..120: mol_type = other DNA

SEQ ID NO: 110732 - DNA, 120 bp, synthetic construct
  source 1..120: mol_type = other DNA
aaagttgaagaggagggaacacaaacattttttatgagaccagcattaccctgataacaaagacagaaaaggatactacaaggttgacagatatttttaaggtgcaaatgatgtattgtt

SEQ ID NO: 110733 - DNA, 120 bp, synthetic construct; identical to SEQ ID NO: 32510
  source 1..120: mol_type = other DNA

SEQ ID NO: 110734 - DNA, 120 bp, synthetic construct; identical to SEQ ID NO: 32288
  source 1..120: mol_type = other DNA

SEQ ID NO: 110735 - DNA, 120 bp, synthetic construct; identical to SEQ ID NO: 32289
  source 1..120: mol_type = other DNA

SEQ ID NO: 110736 - DNA, 120 bp, synthetic construct; identical to SEQ ID NO: 32290
  source 1..120: mol_type = other DNA

SEQ ID NO: 110737 - DNA, 120 bp, synthetic construct
  source 1..120: mol_type = other DNA
ggatgatgttctggtctcttctgagacttcccatcatagaaggctctccactggatttggaaaagtggaactaataataaaaagaaaggagagaatcaagctctgtgggttgggactgag

SEQ ID NO: 110738 - DNA, 120 bp, synthetic construct
  source 1..120: mol_type = other DNA
ccagttaaacatgagtgggaggaagcacacagagctccctgagcaagacagagagagtcatgcggttcctgagtgcagcatgctgcggctgggctggagcagagagggagagccagtcct

SEQ ID NO: 110739 - DNA, 120 bp, synthetic construct; identical to SEQ ID NO: 32291
  source 1..120: mol_type = other DNA

SEQ ID NO: 110740 - DNA, 120 bp, synthetic construct; identical to SEQ ID NO: 32292
  source 1..120: mol_type = other DNA

SEQ ID NO: 110741 - DNA, 120 bp, synthetic construct
  source 1..120: mol_type = other DNA
tatccaacacccacgtgaaaaccagcaatctagcagccccgaaaagtaggaaagcctgtgtaaacacagcccaggtgctttccttccttgagctgtgtactcagcaggtgctggaagccc

SEQ ID NO: 110742 - DNA, 120 bp, synthetic construct; identical to SEQ ID NO: 32293
  source 1..120: mol_type = other DNA

SEQ ID NO: 110743 - DNA, 120 bp, synthetic construct; identical to SEQ ID NO: 32294
  source 1..120: mol_type = other DNA

SEQ ID NO: 110744 - DNA, 120 bp, synthetic construct
  source 1..120: mol_type = other DNA
acactaggcccctctaggcctgtctaaggggttggaatgtcagagtctcctggctcacggcaccactgatggctccctcacacacgccactttgcctccttttcaattctctgtctgcat

SEQ ID NO: 110745 - DNA, 120 bp, synthetic construct; identical to SEQ ID NO: 32295
  source 1..120: mol_type = other DNA

SEQ ID NO: 110746 - DNA, 120 bp, synthetic construct; identical to SEQ ID NO: 32459
  source 1..120: mol_type = other DNA

SEQ ID NO: 110747 - DNA, 120 bp, synthetic construct
  source 1..120: mol_type = other DNA
gctaatggaaacctgtggaagaaagaattttgcaggtctgcctgtggaatccataattcttttcagaggcagcgctattacaaaaaaaaaaaaaaagtgtgaggatgtccccaagcagaa

SEQ ID NO: 110748 - DNA, 120 bp, synthetic construct; identical to SEQ ID NO: 32296
  source 1..120: mol_type = other DNA

SEQ ID NO: 110749 - DNA, 120 bp, synthetic construct; identical to SEQ ID NO: 2670
  source 1..120: mol_type = other DNA

SEQ ID NO: 110750 - DNA, 120 bp, synthetic construct; identical to SEQ ID NO: 2230
  source 1..120: mol_type = other DNA

SEQ ID NO: 110751 - DNA, 120 bp, synthetic construct
  source 1..120: mol_type = other DNA
gcagtgaggccaacaatagagagacccacggagacctcccacaggaacctcacagagatatctcgtacagagtgagaacactgggacctctcactgccacagaaagagacacactgcagc

SEQ ID NO: 110752 - DNA, 120 bp, synthetic construct
  source 1..120: mol_type = other DNA
atacacgtagccccaggactgctccctggggaaaggtggcgacttacaagggcccagcagctgagctggggtcacacagcaaatctcccctggctcctgacatccttgcttgttccagag

SEQ ID NO: 110753 - DNA, 120 bp, synthetic construct
  source 1..120: mol_type = other DNA
cagagagtccccatcccactgcctctccctttctcgcactctggagtggcagtggggacagaccttccagctctgtgcatgtgtaggtgggggctagggggtcaggggggcagcctttat

SEQ ID NO: 110754 - DNA, 120 bp, synthetic construct
  source 1..120: mol_type = other DNA
aaaatgtcactttgccatgcgcaccatgcctcgaaggtaaatcagcacaaacagaagtttcaagccccagtctgtgggtttccctgcaaccacaggcacctcttctactcagaacatggc

SEQ ID NO: 110755 - DNA, 120 bp, synthetic construct
  source 1..120: mol_type = other DNA
catgatcattccaagatgggattcctcgcggtgccctctggaactgcttccatgcaggtgaggaggccagaagactctctggcatgtgatcagatgctttggtcagcacctgctttctca

SEQ ID NO: 110756 - DNA, 120 bp, synthetic construct
  source 1..120: mol_type = other DNA
tcctgcttttccatccctgattaagaacactggagtagcttgccctgcatcgcagaataaagtgcaagctctctccctacctgaaactcagcaccctgaatggcctttgttgaggagaca

SEQ ID NO: 110757 - DNA, 120 bp, synthetic construct
  source 1..120: mol_type = other DNA
tgagggacggtgcccagtggaagtgccactgagtcacagtgagatggagttatcagtgtggagtcccgcaggggaggagcagtgaagccttttggaggaggcagagagcaggccagagga

SEQ ID NO: 110758 - DNA, 120 bp, synthetic construct
  source 1..120: mol_type = other DNA
gggaacagctgtccaactctgctaaggctgattcctctttgagaccacctcagtcctttctccccacagggcagttgtgaggactgtgggggtggggggtccgtgtgtggaagccctttg

SEQ ID NO: 110759 - DNA, 120 bp, synthetic construct
  source 1..120: mol_type = other DNA
gacctcatattgaaaatccctctgtgtgtgtgtgtgtgtgtgtgtgtgtgtgtgtgtgtatttttattttatttgtgtgtgttatttttattttattttattttattttattttatttta

SEQ ID NO: 110760 - DNA, 120 bp, synthetic construct
  source 1..120: mol_type = other DNA
ggatccccagctttgggggtggggaggggctgtgctccagtctccccctcccctgcccctctccctccccctccccctcctgctgcacctccccctccctctgcccctccccctcccact

SEQ ID NO: 110761 - DNA, 120 bp, synthetic construct
  source 1..120: mol_type = other DNA
ggtgactgccattactgcgggtctagccggtggttttcccccaccagtgctagggagactgggtggtttgcgctgggcagaattcccacagtgcagtacagaggctgtggcagatatacc

SEQ ID NO: 110762 - DNA, 120 bp, synthetic construct
  source 1..120: mol_type = other DNA
tgcccacttaatagactacagtatagtatagacctaacttttatatgcactgagaaaccaaaaattctgtgtgatttgccttattgccatatttgttttattgcagaactggccaccaga

SEQ ID NO: 110763 - DNA, 120 bp, synthetic construct
  source 1..120: mol_type = other DNA
ttcattgacaatttacctggtcacccaagagctctgatggagaactacaagaaaattaaagctgtttgcatgcctgctaatacaacatccattctgcagcccatggatcaatgagtaatt

SEQ ID NO: 110764 - DNA, 120 bp, synthetic construct
  source 1..120: mol_type = other DNA
ctcattgtcttttggaacatggtttgtgatgccccaaaacaatgacaatagtaatatcaatgatcactgatcacagattaccataacagatataataataacaaaacatttgaaatattg

SEQ ID NO: 110765 - DNA, 120 bp, synthetic construct; identical to SEQ ID NO: 110732
  source 1..120: mol_type = other DNA

SEQ ID NO: 110766 - DNA, 120 bp, synthetic construct; identical to SEQ ID NO: 32510
  source 1..120: mol_type = other DNA

SEQ ID NO: 110767 - DNA, 120 bp, synthetic construct; identical to SEQ ID NO: 32288
  source 1..120: mol_type = other DNA

SEQ ID NO: 110768 - DNA, 120 bp, synthetic construct; identical to SEQ ID NO: 32289
  source 1..120: mol_type = other DNA

SEQ ID NO: 110769 - DNA, 120 bp, synthetic construct; identical to SEQ ID NO: 32290
  source 1..120: mol_type = other DNA

SEQ ID NO: 110770 - DNA, 120 bp, synthetic construct; identical to SEQ ID NO: 110737
  source 1..120: mol_type = other DNA

SEQ ID NO: 110771 - DNA, 120 bp, synthetic construct
  source 1..120: mol_type = other DNA
aggaccggctctccctctctgccccagcccagccgcagcatgctgcactcaggaaccgcatggctctctctgtcttgctcagggagctctgtgtgcttcctcccactcttgtttaaatgg

SEQ ID NO: 110772 - DNA, 120 bp, synthetic construct; identical to SEQ ID NO: 32291
  source 1..120: mol_type = other DNA

SEQ ID NO: 110773 - DNA, 120 bp, synthetic construct; identical to SEQ ID NO: 32292
  source 1..120: mol_type = other DNA

SEQ ID NO: 110774 - DNA, 120 bp, synthetic construct; identical to SEQ ID NO: 32461
  source 1..120: mol_type = other DNA

SEQ ID NO: 110775 - DNA, 120 bp, synthetic construct; identical to SEQ ID NO: 32293
  source 1..120: mol_type = other DNA

SEQ ID NO: 110776 - DNA, 120 bp, synthetic construct
  source 1..120: mol_type = other DNA
ctggagaaaaacaagtccccaagaaaaaattcactctatgtagagaaaaaatattttctctcatgttagtaaatgcagaacatttaatattccacaatatatatggttttttatttataa

SEQ ID NO: 110777 - DNA, 120 bp, synthetic construct; identical to SEQ ID NO: 110744
  source 1..120: mol_type = other DNA

SEQ ID NO: 110778 - DNA, 120 bp, synthetic construct; identical to SEQ ID NO: 32295
  source 1..120: mol_type = other DNA

SEQ ID NO: 110779 - DNA, 120 bp, synthetic construct; identical to SEQ ID NO: 32462
  source 1..120: mol_type = other DNA

SEQ ID NO: 110780 - DNA, 120 bp, synthetic construct
  source 1..120: mol_type = other DNA
ataatcttggctcactgcaacctccgcctctggagttcaagagattctcctgcttcagcctcctgagtagctgggattataggtgtgcactaccatgttcggctaatttttgtattttta

SEQ ID NO: 110781 - DNA, 120 bp, synthetic construct; identical to SEQ ID NO: 32296
  source 1..120: mol_type = other DNA

SEQ ID NO: 110782 - DNA, 120 bp, synthetic construct; identical to SEQ ID NO: 32452
  source 1..120: mol_type = other DNA

SEQ ID NO: 110783 - DNA, 120 bp, synthetic construct; identical to SEQ ID NO: 32453
  source 1..120: mol_type = other DNA

SEQ ID NO: 110784 - DNA, 120 bp, synthetic construct
  source 1..120: mol_type = other DNA
gctgtttgacagcattttacccacagtagagcttccttcaaatcggagacaatcctctcaaaccctgccactgctttatccactaagtttatgcaattttctaaatactctgttgtcatt

SEQ ID NO: 110785 - DNA, 120 bp, synthetic construct; identical to SEQ ID NO: 32289
  source 1..120: mol_type = other DNA

SEQ ID NO: 110786 - DNA, 120 bp, synthetic construct
  source 1..120: mol_type = other DNA
gtagggagagcatcaggaaaaatagctaatgcatgctgggtttaatacctaagtgatgggttgataggtgcagcaaatcaccatggtacatatttgcctatgtaagaaaactgcatgtcc

SEQ ID NO: 110787 - DNA, 120 bp, synthetic construct; identical to SEQ ID NO: 32509
  source 1..120: mol_type = other DNA

SEQ ID NO: 110788 - DNA, 120 bp, synthetic construct; identical to SEQ ID NO: 32454
  source 1..120: mol_type = other DNA

SEQ ID NO: 110789 - DNA, 120 bp, synthetic construct; identical to SEQ ID NO: 32455
  source 1..120: mol_type = other DNA

SEQ ID NO: 110790 - DNA, 120 bp, synthetic construct; identical to SEQ ID NO: 32456
  source 1..120: mol_type = other DNA

SEQ ID NO: 110791 - DNA, 120 bp, synthetic construct; identical to SEQ ID NO: 32457
  source 1..120: mol_type = other DNA

SEQ ID NO: 110792 - DNA, 120 bp, synthetic construct
  source 1..120: mol_type = other DNA
cttatggcagccagaaggagcaaactggtgcacgaggagcccagaaacccaaactgtcaaggctcatgcaagaaccaaaggccaatgtttccccctattcacaagagtgagaagtctagg

SEQ ID NO: 110793 - DNA, 120 bp, synthetic construct; identical to SEQ ID NO: 32458
  source 1..120: mol_type = other DNA

SEQ ID NO: 110794 - DNA, 120 bp, synthetic construct
  source 1..120: mol_type = other DNA
ttagacaggcctagaggggcctagtgtctcatcctggccacaccccagggtctgtctctgctccagctcccagatcacagacccctagaaaaaccacatttacccccaacacagagggcc

SEQ ID NO: 110795 - DNA, 120 bp, synthetic construct; identical to SEQ ID NO: 32295
  source 1..120: mol_type = other DNA

SEQ ID NO: 110796 - DNA, 120 bp, synthetic construct; identical to SEQ ID NO: 32459
  source 1..120: mol_type = other DNA

SEQ ID NO: 110797 - DNA, 120 bp, synthetic construct; identical to SEQ ID NO: 32460
  source 1..120: mol_type = other DNA

SEQ ID NO: 110798 - DNA, 120 bp, synthetic construct; identical to SEQ ID NO: 32296
  source 1..120: mol_type = other DNA

SEQ ID NO: 110799 - DNA, 120 bp, synthetic construct
  source 1..120: mol_type = other DNA
tttggaacatggtttgtgatgccccaaaacaatgacaatagtaatatcaatgatcactgatcacagattaccataacagatataataataacaaaacatttgaaatattgcaagaattac

SEQ ID NO: 110800 - DNA, 120 bp, synthetic construct; identical to SEQ ID NO: 32510
  source 1..120: mol_type = other DNA

SEQ ID NO: 110801 - DNA, 120 bp, synthetic construct; identical to SEQ ID NO: 110784
  source 1..120: mol_type = other DNA

SEQ ID NO: 110802 - DNA, 120 bp, synthetic construct; identical to SEQ ID NO: 32289
  source 1..120: mol_type = other DNA

SEQ ID NO: 110803 - DNA, 120 bp, synthetic construct; identical to SEQ ID NO: 32290
  source 1..120: mol_type = other DNA

SEQ ID NO: 110804 - DNA, 120 bp, synthetic construct; identical to SEQ ID NO: 110737
  source 1..120: mol_type = other DNA

SEQ ID NO: 110805 - DNA, 120 bp, synthetic construct; identical to SEQ ID NO: 110771
  source 1..120: mol_type = other DNA

SEQ ID NO: 110806 - DNA, 120 bp, synthetic construct; identical to SEQ ID NO: 32291
  source 1..120: mol_type = other DNA

SEQ ID NO: 110807 - DNA, 120 bp, synthetic construct; identical to SEQ ID NO: 32292
  source 1..120: mol_type = other DNA

SEQ ID NO: 110808 - DNA, 120 bp, synthetic construct; identical to SEQ ID NO: 32461
  source 1..120: mol_type = other DNA

SEQ ID NO: 110809 - DNA, 120 bp, synthetic construct; identical to SEQ ID NO: 32293
  source 1..120: mol_type = other DNA

SEQ ID NO: 110810 - DNA, 120 bp, synthetic construct; identical to SEQ ID NO: 110776
  source 1..120: mol_type = other DNA

SEQ ID NO: 110811 - DNA, 120 bp, synthetic construct; identical to SEQ ID NO: 110744
  source 1..120: mol_type = other DNA

SEQ ID NO: 110812 - DNA, 120 bp, synthetic construct; identical to SEQ ID NO: 32295
  source 1..120: mol_type = other DNA

SEQ ID NO: 110813 - DNA, 120 bp, synthetic construct; identical to SEQ ID NO: 32462
  source 1..120: mol_type = other DNA

SEQ ID NO: 110814 - DNA, 120 bp, synthetic construct
  source 1..120: mol_type = other DNA
accatgttggccagctggactcgaactcctgacctcaggtgatccacccgcctcggcctcccaaagtgctgagattataggcatgagccactgtgcccaaccaaaaatttttaagtgagg

SEQ ID NO: 110815 - DNA, 120 bp, synthetic construct
  source 1..120: mol_type = other DNA
atgcctgtaatcccagcacttcgggaggctgaggcgggaggatcacgaggtcaggagatcgagaccaccctggctaacaaggtgaaacccagtctctgctaaaaatacaaaaaaattaac

SEQ ID NO: 110816 - DNA, 120 bp, synthetic construct
  source 1..120: mol_type = other DNA
accccggaacttaaaataaatacataagtacataaatagaattttaaaaaaatcttaattgtatgtgggtaggtccctttgattcaaagtgagatagaaggatgggcgcagtggctcatg

SEQ ID NO: 110817 - DNA, 120 bp, synthetic construct
  source 1..120: mol_type = other DNA
gaagagaaaggtaaggagctctcagtccagacccacagagcttgattctcttctttctttttattattagttccacctttccaaatccagtggagacttctgcgatgggaagtctcagga

SEQ ID NO: 110818 - DNA, 120 bp, synthetic construct
  source 1..120: mol_type = other DNA
caattttttaactttttacatagctacagaaatcaagacagtgtggtattggcagggggacagacagttcaataaaacagaattgagaactcagaaatagttccatacaagtacaaccaa

SEQ ID NO: 110819 - DNA, 120 bp, synthetic construct
  source 1..120: mol_type = other DNA
agagagacattaaaataagacagcaggcccggcacggtggctcacgcctgtaatcccagcactttgggaggccaaggcgggcggatcacaaggtcaggagaacaagaccatcctggctaa

SEQ ID NO: 110820 - DNA, 120 bp, synthetic construct; identical to SEQ ID NO: 1884
  source 1..120: mol_type = other DNA

SEQ ID NO: 110821 - DNA, 120 bp, synthetic construct
  source 1..120: mol_type = other DNA
gcgtactgagtagctggggattacaggcgcccgccaccacgcctggctaattttcgtatttttagtagagatggggtttcaccatggccaggctggtctcaaactcttgactttaggtga

SEQ ID NO: 110822 - DNA, 120 bp, synthetic construct
  source 1..120: mol_type = other DNA
ttgggatctcacaggaggctgagtgtatgtttctttagggaagaccatggggaattagaccctggaacccacccatctgtgtccaaagccacatggccccgacggtaatagcaaggcata

SEQ ID NO: 110823 - DNA, 120 bp, synthetic construct
  source 1..120: mol_type = other DNA
tcctcccctgcgggactccactctgttaacaccatctcactgtgactcagtggcacttccactggacaccgtccctcaaagcttgtctccacgtgaggatttggcggcttctgtcccagc

SEQ ID NO: 110824 - DNA, 120 bp, synthetic construct; identical to SEQ ID NO: 32727
  source 1..120: mol_type = other DNA

SEQ ID NO: 110825 - DNA, 120 bp, synthetic construct
  source 1..120: mol_type = other DNA
agcacgcctactgggaacatgcaggcttcccaggagctatgtgacctcatgtcagccagaaggagtaacatggggcacaaggagcccaggaacccaaactgtcaaggctcatgcaagagc

SEQ ID NO: 110826 - DNA, 120 bp, synthetic construct
  source 1..120: mol_type = other DNA
tagaggaaaagtattttctctcatgttagtacacgcagaacatttaatattccacaatatatacggttttttattcataagagggtgatggcttttatttgtgctgtgcttggtgtgggc

SEQ ID NO: 110827 - DNA, 120 bp, synthetic construct
  source 1..120: mol_type = other DNA
taacagttcctcccagtctgtcaggcctgggcagcaccgtcctgtctcaggactcagaaagtccagtcctgcgatgggacggtgctgcccagggtgggtggccggggcctgacagcagtc

SEQ ID NO: 110828 - DNA, 120 bp, synthetic construct
  source 1..120: mol_type = other DNA
gggaagcaccatccctgtcccaatccaccacaaatttctgcccaggagacacatagggaagggaggacggggcctccctgctggctgacactggaaacgcgggacctggaagaagaggga

SEQ ID NO: 110829 - DNA, 120 bp, synthetic construct; identical to SEQ ID NO: 32726
  source 1..120: mol_type = other DNA

SEQ ID NO: 110830 - DNA, 120 bp, synthetic construct; identical to SEQ ID NO: 110825
  source 1..120: mol_type = other DNA

SEQ ID NO: 110831 - DNA, 120 bp, synthetic construct; identical to SEQ ID NO: 32727
  source 1..120: mol_type = other DNA

SEQ ID NO: 110832 - DNA, 120 bp, synthetic construct; identical to SEQ ID NO: 32728
  source 1..120: mol_type = other DNA

SEQ ID NO: 110833 - DNA, 120 bp, synthetic construct; identical to SEQ ID NO: 32729
  source 1..120: mol_type = other DNA

SEQ ID NO: 110834 - DNA, 120 bp, synthetic construct; identical to SEQ ID NO: 32720
  source 1..120: mol_type = other DNA

SEQ ID NO: 110835 - DNA, 120 bp, synthetic construct
  source 1..120: mol_type = other DNA
tctgttggagtcggtggcttgaggttacctatttcatagcctttgaaaatctgtagttgactctgaaattttggctatgtaccagggatttttattttcagaatctcgttcgtcctcaac

SEQ ID NO: 110836 - DNA, 120 bp, synthetic construct; identical to SEQ ID NO: 32719
  source 1..120: mol_type = other DNA

SEQ ID NO: 110837 - DNA, 120 bp, synthetic construct
  source 1..120: mol_type = other DNA
taccatagacaaaacaataacctcaatctaacctcatgtctttattaaaaaaaaaaaggatcagccgggcgcggtggctcatgcctgtaatcccagcacttcgggaggctgaggcgggag

SEQ ID NO: 110838 - DNA, 120 bp, synthetic construct; identical to SEQ ID NO: 110817
  source 1..120: mol_type = other DNA

SEQ ID NO: 110839 - DNA, 120 bp, synthetic construct; identical to SEQ ID NO: 32730
  source 1..120: mol_type = other DNA

SEQ ID NO: 110840 - DNA, 120 bp, synthetic construct; identical to SEQ ID NO: 32731
  source 1..120: mol_type = other DNA

SEQ ID NO: 110841 - DNA, 120 bp, synthetic construct; identical to SEQ ID NO: 32732
  source 1..120: mol_type = other DNA

SEQ ID NO: 110842 - DNA, 120 bp, synthetic construct
  source 1..120: mol_type = other DNA
tgtcctctgaatgtatgtatgacaactgtagagtaagagatgaaagcatgtgataaactaatataagagccctcagaaataacgccgcatatctacaactatctgatctttgacaaacct

SEQ ID NO: 110843 - DNA, 120 bp, synthetic construct
  source 1..120: mol_type = other DNA
ctaaagggctataaatcatgctgctataaagacacatgcacacgtatgtttattgcggcactattcacaatagcaaagacttggaaccaacccaaatgtccaacaatgatagactggatt

SEQ ID NO: 110844 - DNA, 120 bp, synthetic construct
  source 1..120: mol_type = other DNA
ggagattgcagtgagccgagatcatgccactgcactccagcctaggcgacagagtgagattaagtatatatatatatatatatatacacacacacacacacacacacacacatatacaca

SEQ ID NO: 110845 - DNA, 120 bp, synthetic construct; identical to SEQ ID NO: 29145
  source 1..120: mol_type = other DNA

SEQ ID NO: 110846 - DNA, 120 bp, synthetic construct
  source 1..120: mol_type = other DNA
attaactcgtcgtttagcattagttatatctcctaatgctatccctcgcccctcccccaactccacaacaggccccagagtgtgatggtccccttcctgtgtccatgtgttctcattgtt

SEQ ID NO: 110847 - DNA, 120 bp, synthetic construct
  source 1..120: mol_type = other DNA
taaggtgtaaggaagggatccagtttcagctttctacatatggctagccagttttcccagcaccatttattaaatagggaatcctttccccattgcttgtttttgtcaggtttgtccaaa

SEQ ID NO: 110848 - DNA, 120 bp, synthetic construct
  source 1..120: mol_type = other DNA
ccagttttcaaagggaatgcttccagtttttgcctattcagtatgatactggctgtgggtttgtcatagatagctcttattattttgagatatgtcccatcaatacctaatttattgaga

SEQ ID NO: 110849 - DNA, 120 bp, synthetic construct
  source 1..120: mol_type = other DNA
ttgaatgtgtttgctcttgcttttctagttcttttaattgtgttgttagggtgtcaattttggatctttcctgctttctcttgtgggcatttagtgctataaatttccctctacacactg

SEQ ID NO: 110850 - DNA, 120 bp, synthetic construct
  source 1..120: mol_type = other DNA
gtttgccagtctgtgtcttttaattggagcatttagtccatttacatttaaagttaatatcgttatgtgtgaatttgatcctgtcattatgatgttagctggttattttgctcattagtt

SEQ ID NO: 110851 - DNA, 120 bp, synthetic construct
  source 1..120: mol_type = other DNA
aaagttttcaacttctttgcctttggtttgaatttcctcccgtagctcggagtagtttgatcgtctgaagccttcctctctcaacttgtcaaagtcattctccgtccagctttgttctgt

SEQ ID NO: 110852 - DNA, 120 bp, synthetic construct
  source 1..120: mol_type = other DNA
ggaattgccacactgacttccacaatggttgaactggtttatagtcccaccaacagtgtaaaagtgttcctatttctccacatcctctccagcacctgttgtttcctgactttttaatga

SEQ ID NO: 110853 - DNA, 120 bp, synthetic construct
  source 1..120: mol_type = other DNA
tagcttgatggggatggcattgaatctataaattaccttgggcagtatggccattttcacgatattgattcttcctacccatgagcatggaatgttcttccatttctttgtatctttatt

SEQ ID NO: 110854 - DNA, 120 bp, synthetic construct
  source 1..120: mol_type = other DNA
ctttttgatgtgctgctggattcggtttgccagtattttattgaggatttttgcatcaatgttcatcaaggagattggtctaaaattctcttttttggttgtgtctctgccaggctttgg

SEQ ID NO: 110855 - DNA, 120 bp, synthetic construct
  source 1..120: mol_type = other DNA
tgattgcactgtggtctgagagacagtttgttataatttctgttcttttacatttgctgaggagagctttacttccaactatgtggtcaattttggaataggtatggtgtggtgctgaga

SEQ ID NO: 110856 - DNA, 120 bp, synthetic construct
  source 1..120: mol_type = other DNA
tctgacaattatgtgtcttggagttgctcttctcgaggagtatctttgttttgttgtctgtatttcctgaatctgaatgttggcctgccttgctggattggggaagttctcctggataat

SEQ ID NO: 110857 - DNA, 120 bp, synthetic construct; identical to SEQ ID NO: 25779
  source 1..120: mol_type = other DNA

SEQ ID NO: 110858 - DNA, 120 bp, synthetic construct
  source 1..120: mol_type = other DNA
ggggggctgacccccctaccttcctcctggatggggcggctggctgggcggggggctgacccccccacttccttcccggatggggcggctggccgggcagaggggctcctcacttcccag

SEQ ID NO: 110859 - DNA, 120 bp, synthetic construct
  source 1..120: mol_type = other DNA
ggaaagagagggagagggagaccgtggggagagggagaggggggagagggaaggggagagggagaggggggagagggaaagggagagggagagggagagagagagggagaggggggagag

SEQ ID NO: 110860 - DNA, 120 bp, synthetic construct
  source 1..120: mol_type = other DNA
agtacaaagtctccatatagtcagcagtcctaaacagcccaggagaggggacctctataataatggaatgccagtaaccaaaacagcatggtactggtaccaaaacagagatatagatca

SEQ ID NO: 110861 - DNA, 120 bp, synthetic construct
  source 1..120: mol_type = other DNA
tactgggtatatacccaaaggactataaatcatgctgctataaagacacatgcacacgtatgtttattgtggcactattcacaatagcaaaaacttggaaccaacccaaatgtccaacaa

SEQ ID NO: 110862 - DNA, 120 bp, synthetic construct
  source 1..120: mol_type = other DNA
tcaaaagcaaatttgttacttcctaggtactatgggggtacaggcattggataaatacacccgttccaaatgggagaaattggtcaaaattaaagggctaaaggccccatgcaagtccaa

SEQ ID NO: 110863 - DNA, 120 bp, synthetic construct
  source 1..120: mol_type = other DNA
gggttgtttgtttttttcttgtaaagatagtcaaatcttaaagcttcaaaatgatctcctttgatccatgcctcacatccaggtcacactgatgcaagagaggggttcccatggtcttgg

SEQ ID NO: 110864 - DNA, 120 bp, synthetic construct
  source 1..120: mol_type = other DNA
gtgtagtcatgaagaagaacagggcttacctcaaaatatctggtatactctgcaataaaagtatcatcactggccatcagagaaatgcaaatcaaaaccacaatgagatatcatctcaca

SEQ ID NO: 110865 - DNA, 120 bp, synthetic construct
  source 1..120: mol_type = other DNA
ttggtagatcttcctccatcactttgttttgagcctatgtgtgtctctgtacatgagattttgagatgagtttcctgaatacagcacactgatgggtcttgactctttatccagtttgcc

SEQ ID NO: 110866 - DNA, 120 bp, synthetic construct
  source 1..120: mol_type = other DNA
gacaccccactgtcaacattagacagatcaacgagacacaaagttaacaaggatatccaggaattgaactcagctctgcaccaagcagacctaatagacatctacagaactctccacccc

SEQ ID NO: 110867 - DNA, 120 bp, synthetic construct
  source 1..120: mol_type = other DNA
ccttgtagtatagtttgaagtcaggtagcgtggtgcctccgggtttgttcttttggcttaggattgacttggcgatgcgggctcttttttggttccatatgaactttaaagtagtttttt

SEQ ID NO: 110868 - DNA, 120 bp, synthetic construct
  source 1..120: mol_type = other DNA
tctgcatctattgagataatcatacggtatttgtctttggttctgtttatatgctgaattacatttattgatttgcgtatgttgaaccagccttgcatcccagggatgaagcccacttga

SEQ ID NO: 110869 - DNA, 120 bp, synthetic construct
  source 1..120: mol_type = other DNA
cagtgctataaatttccctctacacactgctttgaatatgtcccagagattctggtatgttgtgtctttgttctcgttggtttcaaagaacatctttatttctgccttcatttcattatg

SEQ ID NO: 110870 - DNA, 120 bp, synthetic construct
  source 1..120: mol_type = other DNA
tttagtccatttacatttaaagttaatattgttatgtgtgaatttgatcctgtcatcttgatgttatctggttattttgctcattagttcatgcagtttcttccagccttcatgatcttt

SEQ ID NO: 110871 - DNA, 120 bp, synthetic construct; identical to SEQ ID NO: 7599
  source 1..120: mol_type = other DNA

SEQ ID NO: 110872 - DNA, 120 bp, synthetic construct
  source 1..120: mol_type = other DNA
gacccggcaaccatccgatttctcaattttttccccacccttcccgcctttctattccacaaaaccgccattgtcatcatggcccatccccagtgagccgctgggcacacctcccagacg

SEQ ID NO: 110873 - DNA, 120 bp, synthetic construct
  source 1..120: mol_type = other DNA
attgagcactgagtgaacgagactccatctgcaatcccggcacctcgggaggccgaggctggcggatcactcgtggctaggagctggagaccagcccggccaacacagcgaaaccccgtc

SEQ ID NO: 110874 - DNA, 120 bp, synthetic construct
  source 1..120: mol_type = other DNA
ctaatagtactgccagaaggtaagacaggagagaacagcagaaaaacaatactcaaaaatatgatagcttttttcatgtgtcttttggctacataaatgtcttcttttgagaagtgtctg

SEQ ID NO: 110875 - DNA, 120 bp, synthetic construct
  source 1..120: mol_type = other DNA
agcacagacttggaaccaacccaaatgtccaacagtgacagactggattaagaaaatgtggcacatatacaccgtggcatactatgcagccataaaaaatgatgagttcatgtcctttgt

SEQ ID NO: 110876 - DNA, 120 bp, synthetic construct
  source 1..120: mol_type = other DNA
tttacatttaaaattttaatctaaaactttttaatataaaatttaaatccggttttcggggagagccaagatggccgaataggaacagctccggtctccagctcccagcgtgagcgacgc

SEQ ID NO: 110877 - DNA, 120 bp, synthetic construct
  source 1..120: mol_type = other DNA
gcgcctctcctcctccaaaggaatgcagttcctcaccagcaatggaacaaagctggacggagaacgacttcgacgagctgagagaagaaggcttcagacgatcaaattactctgagctac

SEQ ID NO: 110878 - DNA, 120 bp, synthetic construct
  source 1..120: mol_type = other DNA
aatattaattttaaatgtaaatggactaaatgctccaattaaaagacacagactggcaaattggataaagagtcaagacccatcagtgtgctgtattcaggaaacccatctcacgtgcag

SEQ ID NO: 110879 - DNA, 120 bp, synthetic construct
  source 1..120: mol_type = other DNA
ctctaacatcacaattaaaagaactagaaaagcaagagcaaacacatccaaaagctagcagaaggcaagaaataactaaaatcagagcagaactgaaggaaatagagacacaaaaaaccc

SEQ ID NO: 110880 - DNA, 120 bp, synthetic construct
  source 1..120: mol_type = other DNA
caaaattcaacaacacttcatgctaaaaactctcaataaattaggtattgatgggacgtatttcaaaataataagagctatctgtgacaaacccaaagccaatatcatactgaatgggca

SEQ ID NO: 110881 - DNA, 120 bp, synthetic construct
  source 1..120: mol_type = other DNA
ctgggaaaactggctagccatatgtagaaagctgaaactggatcccttccttacaccttatacaaaaatcaattccagatggattaaagaattaaatgttagacctaaaaccataaaaac

SEQ ID NO: 110882 - DNA, 120 bp, synthetic construct
  source 1..120: mol_type = other DNA
aacaatgagatcacatggacacaggaaggggaacatcacactctggggactgttgtggggtggggggaggggggagggatagcagtgggagatacacctaatgctagatgacgagttagt

SEQ ID NO: 110883 - DNA, 120 bp, synthetic construct
  source 1..120: mol_type = other DNA
cacttactgtgtgcttttaagattaagtgaatatgtgggtgtgagctttatttctgaataaatctagaaaagaggcgggagcagtggctcacacctgtgatcccaacactttgagagact

SEQ ID NO: 110884 - DNA, 120 bp, synthetic construct; identical to SEQ ID NO: 14565
  source 1..120: mol_type = other DNA

SEQ ID NO: 110885 - DNA, 120 bp, synthetic construct
  source 1..120: mol_type = other DNA
taaaaataggcaaaaaacatggctgtcacagcctttgattgtcgtattaatcatataaaaatcagtgttatacgtatgtttattgcagcactattcacaatagcaaagacttggaaccaa

SEQ ID NO: 110886 - DNA, 120 bp, synthetic construct; identical to SEQ ID NO: 31931
  source 1..120: mol_type = other DNA

SEQ ID NO: 110887 - DNA, 120 bp, synthetic construct; identical to SEQ ID NO: 31932
  source 1..120: mol_type = other DNA

SEQ ID NO: 110888 - DNA, 120 bp, synthetic construct; identical to SEQ ID NO: 31933
  source 1..120: mol_type = other DNA

SEQ ID NO: 110889 - DNA, 120 bp, synthetic construct; identical to SEQ ID NO: 31934
  source 1..120: mol_type = other DNA

SEQ ID NO: 110890 - DNA, 120 bp, synthetic construct; identical to SEQ ID NO: 31935
  source 1..120: mol_type = other DNA

SEQ ID NO: 110891 - DNA, 120 bp, synthetic construct; identical to SEQ ID NO: 31936
  source 1..120: mol_type = other DNA

SEQ ID NO: 110892 - DNA, 120 bp, synthetic construct; identical to SEQ ID NO: 23379
  source 1..120: mol_type = other DNA

SEQ ID NO: 110893 - DNA, 120 bp, synthetic construct; identical to SEQ ID NO: 23380
  source 1..120: mol_type = other DNA

SEQ ID NO: 110894 - DNA, 120 bp, synthetic construct; identical to SEQ ID NO: 23381
  source 1..120: mol_type = other DNA

SEQ ID NO: 110895 - DNA, 120 bp, synthetic construct; identical to SEQ ID NO: 23382
  source 1..120: mol_type = other DNA

SEQ ID NO: 110896 - DNA, 120 bp, synthetic construct; identical to SEQ ID NO: 23383
  source 1..120: mol_type = other DNA

SEQ ID NO: 110897 - DNA, 120 bp, synthetic construct
  source 1..120: mol_type = other DNA
tcaagtgatccgcccgcctcagcctcccaaagtgctaggataacaggtgtgagccaccgtgcccggctactgaatggtttcttttttttttttttttttttttttttaattgatcattct

SEQ ID NO: 110898 - DNA, 120 bp, synthetic construct
  source 1..120: mol_type = other DNA
cctcacttttcagacggtgtggctgccgggtggaggggctcctcacttctcagacggggcggttgccaggcagagggtctcctcacttctcagacggggcggccgggcagagacgctcct

SEQ ID NO: 110899 - DNA, 120 bp, synthetic construct; identical to SEQ ID NO: 12920
  source 1..120: mol_type = other DNA

SEQ ID NO: 110900 - DNA, 120 bp, synthetic construct
  source 1..120: mol_type = other DNA
gttattaaaaagtctcacgtttgctgttcttcgtgcctctaagtccattctttgggtttgtacagtgagtgtgtttctcatttcacgtccccccccccccccatattttttatagctata

SEQ ID NO: 110901 - DNA, 120 bp, synthetic construct
  source 1..120: mol_type = other DNA
aaacaaacaaacaaacaaaaaaagaaattctagaggaagagaatagacccttgatttggatgggaagatcaaatggctcatgcctgtaatcccagcactttgggaggccaaagcaggcgg

SEQ ID NO: 110902 - DNA, 120 bp, synthetic construct
  source 1..120: mol_type = other DNA
tggaaatgcagataaactaaaaccactaagaagacatatttcttagttttgagaagaaggtccttttaggccaggcgtggtggctcacgcatataatcccagcactttgggcggatcacc

SEQ ID NO: 110903 - DNA, 120 bp, synthetic construct
  source 1..120: mol_type = other DNA
tgaggcaggagaatcacttgaacccagggggcagaggttgcagtgagccgagattgcgccactgcactccagcctggcaacagagcaagactccatctcaaaaaaaaaaaaaaaaaaaaa

SEQ ID NO: 110904 - DNA, 120 bp, synthetic construct; identical to SEQ ID NO: 21900
  source 1..120: mol_type = other DNA

SEQ ID NO: 110905 - DNA, 120 bp, synthetic construct
  source 1..120: mol_type = other DNA
attatggttttgatttgcatttctctgatggccagtgatgatgagcattttttcatgatgatgagcattttggctacataaatgtcttcttttgagaagtgtctgttcatatccttcacc

SEQ ID NO: 110906 - DNA, 120 bp, synthetic construct
  source 1..120: mol_type = other DNA
aaagtagttttttccaattctgtgaagaaagtcattggtagcttgatggggatggcattgaatctataaattaccttgggcagtatggccattttcacgatattgattcttcctacccat

SEQ ID NO: 110907 - DNA, 120 bp, synthetic construct; identical to SEQ ID NO: 21901
  source 1..120: mol_type = other DNA

SEQ ID NO: 110908 - DNA, 120 bp, synthetic construct; identical to SEQ ID NO: 12107
  source 1..120: mol_type = other DNA

SEQ ID NO: 110909 - DNA, 120 bp, synthetic construct; identical to SEQ ID NO: 12108
  source 1..120: mol_type = other DNA

SEQ ID NO: 110910 - DNA, 120 bp, synthetic construct
  source 1..120: mol_type = other DNA
gaggtgggaggatcacttgaacccagaagttggaggatacagtgagctttgatcaattgtgccactgcattccagcttggacaatagagcaagactctgtctctaaacaaattaattaaa

SEQ ID NO: 110911 - DNA, 120 bp, synthetic construct
  source 1..120: mol_type = other DNA
cctgtctcaacctcccaggtagctgagattacgggcacatgccaccacgcctggctaacttttgtatttttagtagagacagggtttcaccatgttggccaggctggtctcaaactcctg

SEQ ID NO: 110912 - DNA, 120 bp, synthetic construct
  source 1..120: mol_type = other DNA
ctgaggttgggagttcaagaccagcctgaccaacatggagaataataataagccgagatcacgccattgtactccagcctgggcagcgagagtgaaactccatctcaaaaagaaagagag

SEQ ID NO: 110913 - DNA, 120 bp, synthetic construct; identical to SEQ ID NO: 29105
  source 1..120: mol_type = other DNA

SEQ ID NO: 110914 - DNA, 120 bp, synthetic construct; identical to SEQ ID NO: 29106
  source 1..120: mol_type = other DNA

SEQ ID NO: 110915 - DNA, 120 bp, synthetic construct
  source 1..120: mol_type = other DNA
tcaccagcctgatgttataaaacgagtgtcatggccgggcatggtggctcacacctgtaatcccagcactttaggaggccaaggcgggtggatcatgaggtctggagttcgagaccagcc

SEQ ID NO: 110916 - DNA, 120 bp, synthetic construct
  source 1..120: mol_type = other DNA
gcgatcttggctccctgcaacctgcgcaccatgagttcaagtgattctccagcgccctctcctgagtagctgcgattacaggtatccaccaccatgcctggctaattttttgtattttta

SEQ ID NO: 110917 - DNA, 120 bp, synthetic construct
  source 1..120: mol_type = other DNA
atgtacaagagtgagattatcatgtacaagagtgagattatcatgtacaagagtgagattatcatgtacaagagtgagattatcatgtacaagagatcccaggaatactgacttgatgaa

SEQ ID NO: 110918 - DNA, 120 bp, synthetic construct
  source 1..120: mol_type = other DNA
ttcaggctgggtgcggtggctcacacctgtaaccccagaactttgggaggccaaggcaggcggatcacttgaggccaggagtttgagaccagcctggccaacatggtgaaaccctgtctc

SEQ ID NO: 110919 - DNA, 120 bp, synthetic construct
  source 1..120: mol_type = other DNA
ggatgagaaagcttggtttcgggctaggtgcagtggctcacgcctgagatcctagcacgttgggaggctgaggcaagaggactgcttgaactcaggactttgaggctgcagtgagctatg

SEQ ID NO: 110920 - DNA, 120 bp, synthetic construct
  source 1..120: mol_type = other DNA
ggcttggagaagccagcagtctgcgaggctggggaggatggagagtggtttggggttttgggttgggctctagtgtgatcaactgcagaagcattacaccatggcctggtttctttactc

SEQ ID NO: 110921 - DNA, 120 bp, synthetic construct
  source 1..120: mol_type = other DNA
taatgtttcttactgacttttctaaacctaagtgtctccatccatagtgggggataccaaggccatggtcacaccctgatgtgtgactgtctcatgaggaaatgatgggaattcctttat

SEQ ID NO: 110922 - DNA, 120 bp, synthetic construct
  source 1..120: mol_type = other DNA
actgttgggctcacgtgatcctcctgactccacctctcaaaaagtactgggatcacaggcttgagcagccactcccggctattcttggtctttttatgatttgtcagcatctccctcagg

SEQ ID NO: 110923 - DNA, 120 bp, synthetic construct
  source 1..120: mol_type = other DNA
tgcagtaagctaaggtcgagccactgcactccagcctgggtgacagagtgagactttttctcaaaaaaaaaaaaaaaaagccaaaaaaacaaactccaatgccagtgtacaaataaaaga

SEQ ID NO: 110924 - DNA, 120 bp, synthetic construct
  source 1..120: mol_type = other DNA
atatcaatgtattcaattgcttttatttttttgagacagacttgccctgtcccccaagctagagtgcagtggtgagatcatagctcaccacagcctccatatcctgggctcaagcgatcc

SEQ ID NO: 110925 - DNA, 120 bp, synthetic construct; identical to SEQ ID NO: 29107
  source 1..120: mol_type = other DNA

SEQ ID NO: 110926 - DNA, 120 bp, synthetic construct; identical to SEQ ID NO: 1615
  source 1..120: mol_type = other DNA

SEQ ID NO: 110927 - DNA, 120 bp, synthetic construct
  source 1..120: mol_type = other DNA
cccccaaattctggtcatagaaatttttatttgctgtttaggtttgtgactgaattgtgagaattcagttgtgatttttaacatgtcttagatatatatactaacatgtctaatatatac

SEQ ID NO: 110928 - DNA, 120 bp, synthetic construct
  source 1..120: mol_type = other DNA
gtcggacgtacagacgggtgcctgtagtcccagctgcttgggaggctgaggcaggagaatttgtttgaacccagaggtgaaagttggagggagccgaggttgtgccactgcactccagcc

SEQ ID NO: 110929 - DNA, 120 bp, synthetic construct
  source 1..120: mol_type = other DNA
gcgcccaccaccatgcctggctaattttttgtatttttagtagagacggggtttcactgtgttagccaggatggtctcgatctcctgacctcatgatctgcccaccttggcctcccaaag

SEQ ID NO: 110930 - DNA, 120 bp, synthetic construct; identical to SEQ ID NO: 29108
  source 1..120: mol_type = other DNA

SEQ ID NO: 110931 - DNA, 120 bp, synthetic construct; identical to SEQ ID NO: 29109
  source 1..120: mol_type = other DNA

SEQ ID NO: 110932 - DNA, 120 bp, synthetic construct; identical to SEQ ID NO: 29110
  source 1..120: mol_type = other DNA

SEQ ID NO: 110933 - DNA, 120 bp, synthetic construct
  source 1..120: mol_type = other DNA
gcctcccaaagtgctggggttacaggcgtgagccaccacgcctggcttttttttttaaagcttttttgtaagtcagccagcaagaacacaggaggaagtactcaaatctcccttacacag

SEQ ID NO: 110934 - DNA, 120 bp, synthetic construct; identical to SEQ ID NO: 29601
  source 1..120: mol_type = other DNA

SEQ ID NO: 110935 - DNA, 120 bp, synthetic construct
  source 1..120: mol_type = other DNA
attggtctcccaaaatgctgggattacaggcgtgagccactgtgcccagcccctcccatacctcttttggccaaggcagtacaattcagagaatcttgccagggaagactggtaaatgga

SEQ ID NO: 110936 - DNA, 120 bp, synthetic construct; identical to SEQ ID NO: 1535
  source 1..120: mol_type = other DNA

SEQ ID NO: 110937 - DNA, 120 bp, synthetic construct
  source 1..120: mol_type = other DNA
gaggcggagcctgcagtgagcagagatcgcgccactgcactccagcctgggtgaaagcgcgagactccatcacaaaagaaaaaaaaaaaaagaaagttcctgcaacagttcaagctgtga

SEQ ID NO: 110938 - DNA, 120 bp, synthetic construct
  source 1..120: mol_type = other DNA
ttattagctttggaagataatcctgtgctgttttttatgtagaaaaaaacatacggctgggtgcagtgctcacacctacaatcccagcagttttggaggtcatggcgggaggatcacttg

SEQ ID NO: 110939 - DNA, 120 bp, synthetic construct
  source 1..120: mol_type = other DNA
tttatgtatatataacaactataactctcatcaaaaaactctacaggaacagcatgttttcaaaagtacaacaatttccaaactatttgaaataaacctattaataattcaatggccaac

SEQ ID NO: 110940 - DNA, 120 bp, synthetic construct
  source 1..120: mol_type = other DNA
gttagaaacagatctagcacggttacaagtttagatctgaagtgacacaaaaggccccagctgtgatgaagtccaaagccacattctctgagggtgccctactccctgggaagacccacc

SEQ ID NO: 110941 - DNA, 120 bp, synthetic construct; identical to SEQ ID NO: 68667
  source 1..120: mol_type = other DNA

SEQ ID NO: 110942 - DNA, 120 bp, synthetic construct; identical to SEQ ID NO: 29602
  source 1..120: mol_type = other DNA

SEQ ID NO: 110943 - DNA, 120 bp, synthetic construct; identical to SEQ ID NO: 68665
  source 1..120: mol_type = other DNA

SEQ ID NO: 110944 - DNA, 120 bp, synthetic construct; identical to SEQ ID NO: 68664
  source 1..120: mol_type = other DNA

SEQ ID NO: 110945 - DNA, 120 bp, synthetic construct
  source 1..120: mol_type = other DNA
gcagtggtgcagtcatagctcactgcagcctcaaagtcctgagttcaagcaatcctcttgcctcagcctcccaacgtgctgggatctcaggcgggagccacagcgcctggcccaaaacca

SEQ ID NO: 110946 - DNA, 120 bp, synthetic construct
  source 1..120: mol_type = other DNA
tgcctcagcctctcaggtagctgggattacaggtgcctgccataatgcccagctccattttgtacttttaatagagacagggtttcaccatgttggccaggctggtctcaaacccctggc

SEQ ID NO: 110947 - DNA, 120 bp, synthetic construct
  source 1..120: mol_type = other DNA
ttttctttcccatcctgatccctctcccaccagactggactctgaaacgggcatgtacagagaagaggagaccccaacacgcttcaagctttgagtggagaggacacagcctctgctggg

SEQ ID NO: 110948 - DNA, 120 bp, synthetic construct
  source 1..120: mol_type = other DNA
tgaggtcaggagtttaagagcagcctggccaacatggtgaaaccgcatctctactaaaaatacaaaaaattagacggggccaggtgccatggctcatgcctgtaatcccagcactttggg

SEQ ID NO: 110949 - DNA, 120 bp, synthetic construct
  source 1..120: mol_type = other DNA
ctgtttgagcttgggagttcaagaccatcctggacgacagggtgaaacatcgtctctaccaaaaatacaaaaaattagacacccgtggtggcgtgcgccaatagtcccagatacttggga

SEQ ID NO: 110950 - DNA, 120 bp, synthetic construct
  source 1..120: mol_type = other DNA
tggtatttagcagatgcccttgtggtttaaactgtagctttagatataaaatccactcctggtcaggtgcggtggctgacgcctgtaatcccagcactctgggaggctgaggtaggcaga

SEQ ID NO: 110951 - DNA, 120 bp, synthetic construct; identical to SEQ ID NO: 1536
  source 1..120: mol_type = other DNA

SEQ ID NO: 110952 - DNA, 120 bp, synthetic construct; identical to SEQ ID NO: 1537
  source 1..120: mol_type = other DNA

SEQ ID NO: 110953 - DNA, 120 bp, synthetic construct; identical to SEQ ID NO: 1538
  source 1..120: mol_type = other DNA

SEQ ID NO: 110954 - DNA, 120 bp, synthetic construct
  source 1..120: mol_type = other DNA
gccaagaaaagagttttaattggcttacattccatgggctgtacaggacgcatgattctgacatctgctcagcttctggggaggtcttaggaaacttacaatcatggcagaaggtgaagg

SEQ ID NO: 110955 - DNA, 120 bp, synthetic construct; identical to SEQ ID NO: 1539
  source 1..120: mol_type = other DNA

SEQ ID NO: 110956 - DNA, 120 bp, synthetic construct
  source 1..120: mol_type = other DNA
tacagtggcaagcctcatagctcactgcagcctcaacctcccaggctcaagtaatccccccaaggagctgggactacaggcatgcaccaccatgcctggctttttttttttttttttttt

SEQ ID NO: 110957 - DNA, 120 bp, synthetic construct; identical to SEQ ID NO: 1540
  source 1..120: mol_type = other DNA

SEQ ID NO: 110958 - DNA, 120 bp, synthetic construct; identical to SEQ ID NO: 1541
  source 1..120: mol_type = other DNA

SEQ ID NO: 110959 - DNA, 120 bp, synthetic construct
  source 1..120: mol_type = other DNA
agggtttcgccgtgttgcccaggctggtctcaagcagtcctcctaggttcaagcaatcttccggcctcagcctcccaaagttctgggcttacagacctgagccattgtgcctgactaaca

SEQ ID NO: 110960 - DNA, 120 bp, synthetic construct
  source 1..120: mol_type = other DNA
atcaggaggatcgcttgaacccaggaggcggaggttgcagtgagccgagatcacaccactgcactgcagcctgggtaacagagcaagactctgtctaaataaataaataaataaagaaat

SEQ ID NO: 110961 - DNA, 120 bp, synthetic construct; identical to SEQ ID NO: 1542
  source 1..120: mol_type = other DNA

SEQ ID NO: 110962 - DNA, 120 bp, synthetic construct
  source 1..120: mol_type = other DNA
tcctgcctcagcctcccgagtagttgggattacaggcatgcaccaccacgcctggctttttttttttttttttttttttttttttgtatttttttagtagagacagggtttctccatgtt

SEQ ID NO: 110963 - DNA, 120 bp, synthetic construct; identical to SEQ ID NO: 1543
  source 1..120: mol_type = other DNA

SEQ ID NO: 110964 - DNA, 120 bp, synthetic construct
  source 1..120: mol_type = other DNA
tcactatagcttctgcctcccaggttcaagtgattcttctgcctcagcctcccaagtaggtgggattacagacaccagccaccatgccgggctaatttttgtatttttagtagagatggg

SEQ ID NO: 110965 - DNA, 120 bp, synthetic construct
  source 1..120: mol_type = other DNA
ttgtttgtttgtttgttgttgagacagagtcttcctccgtcaaccaggctgaatagagtgcagtggtacaatcacaggtcactgcagcctcaaactcaagcaatcctcccacctcaggct

SEQ ID NO: 110966 - DNA, 120 bp, synthetic construct
  source 1..120: mol_type = other DNA
aggcaattctgcctcagcctcctgagtagctgggattacaggcatgtgccaccacacctggataatttttgtatttttagtagagacaaggtttcactacattggccagtctggtctcaa

SEQ ID NO: 110967 - DNA, 120 bp, synthetic construct; identical to SEQ ID NO: 1544
  source 1..120: mol_type = other DNA

SEQ ID NO: 110968 - DNA, 120 bp, synthetic construct
  source 1..120: mol_type = other DNA
ggatcccttgaatccaggattttgaggctgcagtgaactatgatcacatcactgcactctagcctgggtgacagggcaagaccctgtctcaaaaaaaaaaaaaaaaaaaatagatctgag

SEQ ID NO: 110969 - DNA, 120 bp, synthetic construct
  source 1..120: mol_type = other DNA
taaacatttaattttatttttagagaaggggtctcactatgttgcccaggctgttcttgaactgctgggctcaagcaatcctcccatctcagccttccaaagtgctgagattacaagcat

SEQ ID NO: 110970 - DNA, 120 bp, synthetic construct
  source 1..120: mol_type = other DNA
aaggacagaaaaccaaacaccgcatgttctcactcataggtgggaattgaacaatgaaaacacttggacacagggtggggaacatcacacaccagggcctgttgtgcggtggagggaggg

SEQ ID NO: 110971 - DNA, 120 bp, synthetic construct; identical to SEQ ID NO: 1545
  source 1..120: mol_type = other DNA

SEQ ID NO: 110972 - DNA, 120 bp, synthetic construct
  source 1..120: mol_type = other DNA
gtgatcctcctgccttagcctcctgagtagctgggatgcaggtgtgtgctgccacacccaactaattttttttaaattttaatattttcttttagagatagagtctggctgtttcactca

SEQ ID NO: 110973 - DNA, 120 bp, synthetic construct
  source 1..120: mol_type = other DNA
gaggctgaggcaggagaatcgcttgaacctggaaggcagaggttgcagtaagccaagatcgtgctgctgcactccagcctgggcaacacagtgagactccaaaaaaaaaaggaaagaaag

SEQ ID NO: 110974 - DNA, 120 bp, synthetic construct
  source 1..120: mol_type = other DNA
gcctaatttgtgtgctgtttgcttttttttttttttgagacagagtctcactcaagtcaccaggctggatggagtgcagtggtgcaatctcagctcactgcaacctccgcctcccaggtt

SEQ ID NO: 110975 - DNA, 120 bp, synthetic construct
  source 1..120: mol_type = other DNA
gtcagaactcagctatgtctgacatcagagaccacgattttttttttttttttgaaatggagtcttgctcttgtcacccaggctggagtgtaatgggacgatctcagctcactgcaacct

SEQ ID NO: 110976 - DNA, 120 bp, synthetic construct; identical to SEQ ID NO: 1546
  source 1..120: mol_type = other DNA

SEQ ID NO: 110977 - DNA, 120 bp, synthetic construct; identical to SEQ ID NO: 1547
  source 1..120: mol_type = other DNA

SEQ ID NO: 110978 - DNA, 120 bp, synthetic construct
  source 1..120: mol_type = other DNA
aagctgtgggccaggcacagtggctgatgcctgtaatcccagcactttgggaagctgaggtgggtggatcacttaaggtcaggagttcgagaccagcttagccaacatggtgaaccccca

SEQ ID NO: 110979 - DNA, 120 bp, synthetic construct
  source 1..120: mol_type = other DNA
aagaatgagtgaatagagcaagaattcactcattaccacagggagggcaccaagccattcatgaggcatctgcccccatgacccaaacacctcccacttggcctcatctccaatactggg

SEQ ID NO: 110980 - DNA, 120 bp, synthetic construct; identical to SEQ ID NO: 1548
  source 1..120: mol_type = other DNA

SEQ ID NO: 110981 - DNA, 120 bp, synthetic construct
  source 1..120: mol_type = other DNA
tttctttcattctttctttttgacagggtcttgcctggctgcccagacaacagtgcagtggtgcaatcacagctcactgcagccttgaactcctcagttccagtgattctcctgcctcgg

SEQ ID NO: 110982 - DNA, 120 bp, synthetic construct
  source 1..120: mol_type = other DNA
gcctgcctcgacctcccaaagtgctgccaaaatattagcattttgaccaggcacagtggttcacatctgtaatcccagcactttgtgaggctgaggcaggcagatcacctgaggtcagga

SEQ ID NO: 110983 - DNA, 120 bp, synthetic construct
  source 1..120: mol_type = other DNA
tcttttcttttttttttttttctttgagacatagtctcactcactctgtcacccaggctggagtgcagtggcgccatcttggctcactgcaaccgccatctctcaggttgaggtgattct

SEQ ID NO: 110984 - DNA, 120 bp, synthetic construct; identical to SEQ ID NO: 1549
  source 1..120: mol_type = other DNA

SEQ ID NO: 110985 - DNA, 120 bp, synthetic construct
  source 1..120: mol_type = other DNA
gtcttgaagtcctgacctcaagggctccacccgccttggcctcccaaagtgctgggattacaggtgtgagccactgtgcccagacaacagctattttttgggggggcgggggacagagtc

SEQ ID NO: 110986 - DNA, 120 bp, synthetic construct; identical to SEQ ID NO: 1550
  source 1..120: mol_type = other DNA

SEQ ID NO: 110987 - DNA, 120 bp, synthetic construct; identical to SEQ ID NO: 1551
  source 1..120: mol_type = other DNA

SEQ ID NO: 110988 - DNA, 120 bp, synthetic construct
  source 1..120: mol_type = other DNA
ctggtcttgaactcctgtccttgtgatctgcctgctttggcttcccaaaatgctgggattatagttgtgagccactgcaccctgccagttgtttttttttttttaagaaactgaatttta

SEQ ID NO: 110989 - DNA, 120 bp, synthetic construct
  source 1..120: mol_type = other DNA
atggagcaagattccgactcaaaaaaaaaaaaaaaaaaaaaaaaggccaggcatggtggcttatgcctgtaatcccagcagtttgggaggccgaagtgggtggatcacctgaggtcagga

SEQ ID NO: 110990 - DNA, 120 bp, synthetic construct; identical to SEQ ID NO: 1552
  source 1..120: mol_type = other DNA

SEQ ID NO: 110991 - DNA, 120 bp, synthetic construct
  source 1..120: mol_type = other DNA
ccgcggacggggcgcgggcggacgatggaactccacatcctggagcaccggctgcaagttgccagcgtcgccaaggagagtatcccgctgttcacctacggcctgatcaaacttgccttc

SEQ ID NO: 110992 - DNA, 120 bp, synthetic construct
  source 1..120: mol_type = other DNA
gaaggccttggaaggtaaaagagggaatcacacacacacacacatacacacacacacacacacacacacacactctctctctctctctctctctctgtctgtctctctctctctctctct

SEQ ID NO: 110993 - DNA, 120 bp, synthetic construct
  source 1..120: mol_type = other DNA
agccgggcttgacgttccaaagcttggaggtaacagaacagccttgtttttcctagccttggccctcagccctgggcagccccctggctgatttctcggccaccattcaaatgagaatga

SEQ ID NO: 110994 - DNA, 120 bp, synthetic construct
  source 1..120: mol_type = other DNA
tgaactcccgacctcaggtgatccactggcctcgacctcccaaagtgctgggattacaggcgtgagccaccgcgcccggcccgtttacagttttgtcagtcactctatagcatcaaatca

SEQ ID NO: 110995 - DNA, 120 bp, synthetic construct
  source 1..120: mol_type = other DNA
aggaggtggcactagatcttagagcttttttttgtttgtttttaagagatggggtctctgttgcccaggctgaagtacagtggcaccatcatagctcactgcagcctcgaactcctaggc

SEQ ID NO: 110996 - DNA, 120 bp, synthetic construct
  source 1..120: mol_type = other DNA
agtgatctgctaccagagctgttttcttctcccagggatacttggtccttatcactcccatctagacggttacttccttttttttttgaaacggagtcttgctctgtcacccaggctgga

SEQ ID NO: 110997 - DNA, 120 bp, synthetic construct
  source 1..120: mol_type = other DNA
ctcagcataaagccagaaggcaagaccctgggtaggtctgtccgatgagcttcccttgtcctctgtggtaaccctgaggctctgtgacctagctgagggccctctgtggcccacctcacc

SEQ ID NO: 110998 - DNA, 120 bp, synthetic construct; identical to SEQ ID NO: 110933
  source 1..120: mol_type = other DNA

SEQ ID NO: 110999 - DNA, 120 bp, synthetic construct; identical to SEQ ID NO: 29601
  source 1..120: mol_type = other DNA

SEQ ID NO: 111000 - DNA, 120 bp, synthetic construct; identical to SEQ ID NO: 110935
  source 1..120: mol_type = other DNA

SEQ ID NO: 111001 - DNA, 120 bp, synthetic construct; identical to SEQ ID NO: 1535
  source 1..120: mol_type = other DNA

SEQ ID NO: 111002 - DNA, 120 bp, synthetic construct
  source 1..120: mol_type = other DNA
tgacagcgcaagaccccaactccaaaaagaaaaaagaaaaatcacaaagaattgcatggcagagtgcctgtctttcacagctttaactgctgaaggaactttcttttttttttttttttt

SEQ ID NO: 111003 - DNA, 120 bp, synthetic construct; identical to SEQ ID NO: 110938
  source 1..120: mol_type = other DNA

SEQ ID NO: 111004 - DNA, 120 bp, synthetic construct; identical to SEQ ID NO: 110939
  source 1..120: mol_type = other DNA

SEQ ID NO: 111005 - DNA, 120 bp, synthetic construct; identical to SEQ ID NO: 110940
  source 1..120: mol_type = other DNA

SEQ ID NO: 111006 - DNA, 120 bp, synthetic construct; identical to SEQ ID NO: 68667
  source 1..120: mol_type = other DNA

SEQ ID NO: 111007 - DNA, 120 bp, synthetic construct
  source 1..120: mol_type = other DNA
agatgcctgtagaaggcagggtcctggcaaaatatcaatgtattcaattgctttttttttttttttgagacagacttgccctgtcccctaagctggagtgcagtggtgagatcatagctc

SEQ ID NO: 111008 - DNA, 120 bp, synthetic construct; identical to SEQ ID NO: 68665
  source 1..120: mol_type = other DNA

SEQ ID NO: 111009 - DNA, 120 bp, synthetic construct; identical to SEQ ID NO: 68664
  source 1..120: mol_type = other DNA

SEQ ID NO: 111010 - DNA, 120 bp, synthetic construct; identical to SEQ ID NO: 110945
  source 1..120: mol_type = other DNA

SEQ ID NO: 111011 - DNA, 120 bp, synthetic construct; identical to SEQ ID NO: 110946
  source 1..120: mol_type = other DNA

SEQ ID NO: 111012 - DNA, 120 bp, synthetic construct; identical to SEQ ID NO: 110947
  source 1..120: mol_type = other DNA

SEQ ID NO: 111013 - DNA, 120 bp, synthetic construct
  source 1..120: mol_type = other DNA
aaaaaatttttttaattaaatataaaagagtttcatgacattcagagaccatccaaagaacctgtgggttctggccaggcacagtggctcacgcctgtaatcccagcgctttgggaggcc

SEQ ID NO: 111014 - DNA, 120 bp, synthetic construct
  source 1..120: mol_type = other DNA
agtgagccgagatcacgacactacactccagcctgggcgacagagtgagtctccgactcaaaaaaaaaaaaaaaaaaagtgccagacagcccaggtttggtctgatatgttcagaaaaaa

SEQ ID NO: 111015 - DNA, 120 bp, synthetic construct
  source 1..120: mol_type = other DNA
tctctctctttttttttcctaatattttgagacagagtttcgctcttgtcacccaggctgcagtgcagtggctccatctcggctcactgcaacctctgcctcccaggttcaagcgattct

SEQ ID NO: 111016 - DNA, 120 bp, synthetic construct
  source 1..120: mol_type = other DNA
gcaatctctgccttccgggttcaagcgattctcttgcctcagcctcctgagtagctgggactacaggcccacaccaccacgcctggctaatttttgtatttttagtagagacagggtttc

SEQ ID NO: 111017 - DNA, 120 bp, synthetic construct
  source 1..120: mol_type = other DNA
cggatcacttgaggccaggagttgaagaccagcctgaccaacacggcaaaaccccatctccgctaaaaatacaaaaattagccaggcatggtggtgcacacctgtaatcctagctactca

SEQ ID NO: 111018 - DNA, 120 bp, synthetic construct
  source 1..120: mol_type = other DNA
caccacaccctgctaatttgtgtattttttgtagagatgaggtcttgctatgttgcccaggctagtttcaaactcctggcctcagtcaatcctcccaccttggcctcccaaagtgctggg

SEQ ID NO: 111019 - DNA, 120 bp, synthetic construct; identical to SEQ ID NO: 110933
  source 1..120: mol_type = other DNA

SEQ ID NO: 111020 - DNA, 120 bp, synthetic construct; identical to SEQ ID NO: 29601
  source 1..120: mol_type = other DNA

SEQ ID NO: 111021 - DNA, 120 bp, synthetic construct; identical to SEQ ID NO: 110935
  source 1..120: mol_type = other DNA

SEQ ID NO: 111022 - DNA, 120 bp, synthetic construct; identical to SEQ ID NO: 1535
  source 1..120: mol_type = other DNA

SEQ ID NO: 111023 - DNA, 120 bp, synthetic construct
  source 1..120: mol_type = other DNA
gtagtcccagctactccggaggctgaggcaggagaatggtgtgaacccaggaggcggagcctgcagtgagcagagatcgcgccactgcactccagcctgggtgaaagcgcgagactccat

SEQ ID NO: 111024 - DNA, 120 bp, synthetic construct; identical to SEQ ID NO: 110938
  source 1..120: mol_type = other DNA

SEQ ID NO: 111025 - DNA, 120 bp, synthetic construct; identical to SEQ ID NO: 110939
  source 1..120: mol_type = other DNA

SEQ ID NO: 111026 - DNA, 120 bp, synthetic construct
  source 1..120: mol_type = other DNA
cacattagaaacagatctagcacagttacaagtttagatctgaagtgacacaaaagaccctagctgtgatgaagtccaaagccacattctctgagggtgccctactccctgggaagaccc

SEQ ID NO: 111027 - DNA, 120 bp, synthetic construct
  source 1..120: mol_type = other DNA
ttgggtttttgtctccatcctgaaggagtgggagacgctcttgatcaggtctctgtccagcagagccctcctgaggaaggcatggctctctgcagggtgggtgccagtcctgagctagga

SEQ ID NO: 111028 - DNA, 120 bp, synthetic construct
  source 1..120: mol_type = other DNA
cacccagacagaaaacacaaatgcaaagtcaagtggagggcatttggaaggagcagtgaagccaagccaggaaacaccaagatggcgagccagtgtggttgtagagattgtagagagggt

SEQ ID NO: 111029 - DNA, 120 bp, synthetic construct
  source 1..120: mol_type = other DNA
cttgcctcagcctcccaaagtgctgggattacaggcctgagccaccatgcacagcctgagtttctttttagaaataacagtctaagatactataatcctgtcttttttgtacacagagta

SEQ ID NO: 111030 - DNA, 120 bp, synthetic construct
  source 1..120: mol_type = other DNA
agacacagtgctgacgtctgtaatctcagcactttgggaggccaaggcgggtggatcacctgaggtcaggtgttcgggaccaatctggccaacatggcaaaaccccgtctctactaaaaa

SEQ ID NO: 111031 - DNA, 120 bp, synthetic construct
  source 1..120: mol_type = other DNA
aaaactctgcgtcaaaagaaaaaccaaggctgggcacagtagctcatccctgtagttccagctactcgggaggctgagacaggagaactgcttaaacccaggaggcagaggttgcagtga

SEQ ID NO: 111032 - DNA, 120 bp, synthetic construct; identical to SEQ ID NO: 110946
  source 1..120: mol_type = other DNA

SEQ ID NO: 111033 - DNA, 120 bp, synthetic construct; identical to SEQ ID NO: 110947
  source 1..120: mol_type = other DNA

SEQ ID NO: 111034 - DNA, 120 bp, synthetic construct; identical to SEQ ID NO: 111013
  source 1..120: mol_type = other DNA

SEQ ID NO: 111035 - DNA, 120 bp, synthetic construct
  source 1..120: mol_type = other DNA
tttttttttttttttttttgagtcggagtctcactctgtcgcccaggctggagtgtagtgtcgtgatctcggctcactggaacctccaccttcccggttcaagtgattctcctgcctcag

SEQ ID NO: 111036 - DNA, 120 bp, synthetic construct; identical to SEQ ID NO: 111015
  source 1..120: mol_type = other DNA

SEQ ID NO: 111037 - DNA, 120 bp, synthetic construct; identical to SEQ ID NO: 111016
  source 1..120: mol_type = other DNA

SEQ ID NO: 111038 - DNA, 120 bp, synthetic construct
  source 1..120: mol_type = other DNA
aactggcttcaattattcgatgagacttatatgtattacttaaatgaggttaaatttaacctttaaaaaatgatttattgtggctgggcacagtggctcacacctgtaatcccagcactt

SEQ ID NO: 111039 - DNA, 120 bp, synthetic construct; identical to SEQ ID NO: 111018
  source 1..120: mol_type = other DNA

SEQ ID NO: 111040 - DNA, 120 bp, synthetic construct
  source 1..120: mol_type = other DNA
cattttttttgttgagacggagtctcgctctgttgtccaggctggagtggagtggtgcgctctcggctcactgcaacctctgcctcctgggttcaagcaattctcctgcctcagcctcct

SEQ ID NO: 111041 - DNA, 120 bp, synthetic construct; identical to SEQ ID NO: 29604
  source 1..120: mol_type = other DNA

SEQ ID NO: 111042 - DNA, 120 bp, synthetic construct; identical to SEQ ID NO: 68657
  source 1..120: mol_type = other DNA

SEQ ID NO: 111043 - DNA, 120 bp, synthetic construct; identical to SEQ ID NO: 68658
  source 1..120: mol_type = other DNA

SEQ ID NO: 111044 - DNA, 120 bp, synthetic construct
  source 1..120: mol_type = other DNA
aggctgcagtgagctgtgatccaccactgcattcccggctgggcatcagagtgaggcctgtctctaagaaaaaaacccttcactccccaaaaaaagggatttgcaaataccagcctttca

SEQ ID NO: 111045 - DNA, 120 bp, synthetic construct; identical to SEQ ID NO: 68660
  source 1..120: mol_type = other DNA

SEQ ID NO: 111046 - DNA, 120 bp, synthetic construct; identical to SEQ ID NO: 68661
  source 1..120: mol_type = other DNA

SEQ ID NO: 111047 - DNA, 120 bp, synthetic construct; identical to SEQ ID NO: 68662
  source 1..120: mol_type = other DNA

SEQ ID NO: 111048 - DNA, 120 bp, synthetic construct; identical to SEQ ID NO: 68663
  source 1..120: mol_type = other DNA

SEQ ID NO: 111049 - DNA, 120 bp, synthetic construct
  source 1..120: mol_type = other DNA
cactgcccttcagcctgggcaacagagcaagactgtgtctcacaaaacaaaaacaaaaacaaaaacaaaaaaaaactgtaggagcatctggtgggaggtggtggagggagaactgtgggt

SEQ ID NO: 111050 - DNA, 120 bp, synthetic construct; identical to SEQ ID NO: 68665
  source 1..120: mol_type = other DNA

SEQ ID NO: 111051 - DNA, 120 bp, synthetic construct; identical to SEQ ID NO: 29602
  source 1..120: mol_type = other DNA

SEQ ID NO: 111052 - DNA, 120 bp, synthetic construct; identical to SEQ ID NO: 68667
  source 1..120: mol_type = other DNA

SEQ ID NO: 111053 - DNA, 120 bp, synthetic construct; identical to SEQ ID NO: 68668
  source 1..120: mol_type = other DNA

SEQ ID NO: 111054 - DNA, 120 bp, synthetic construct; identical to SEQ ID NO: 68669
  source 1..120: mol_type = other DNA

SEQ ID NO: 111055 - DNA, 120 bp, synthetic construct; identical to SEQ ID NO: 68670
  source 1..120: mol_type = other DNA

SEQ ID NO: 111056 - DNA, 120 bp, synthetic construct; identical to SEQ ID NO: 68671
  source 1..120: mol_type = other DNA

SEQ ID NO: 111057 - DNA, 120 bp, synthetic construct; identical to SEQ ID NO: 68672
  source 1..120: mol_type = other DNA

SEQ ID NO: 111058 - DNA, 120 bp, synthetic construct; identical to SEQ ID NO: 68673
  source 1..120: mol_type = other DNA

SEQ ID NO: 111059 - DNA, 120 bp, synthetic construct; identical to SEQ ID NO: 68674
  source 1..120: mol_type = other DNA

SEQ ID NO: 111060 - DNA, 120 bp, synthetic construct; identical to SEQ ID NO: 68675
  source 1..120: mol_type = other DNA

SEQ ID NO: 111061 - DNA, 120 bp, synthetic construct
  source 1..120: mol_type = other DNA
acttttttttttttttttgacggagtttcactcttgtcacccaggctggagtgcaatggtatgaactcagctcactgcaacctccacctcctaggttcaagtgattctgctgcctcagcc

SEQ ID NO: 111062 - DNA, 120 bp, synthetic construct
  source 1..120: mol_type = other DNA
ttccttcaaccagaagggccattagtctgttttcacactgctataaagaactatgagaaactgggtaatttatgaagaaaagaggtttaattgactcacagttctgcaggctgtacagga

SEQ ID NO: 111063 - DNA, 120 bp, synthetic construct
  source 1..120: mol_type = other DNA
acaagcctctgcttccttcagtacctgtttatgaaataagctgaggtacttccctggggaatttcctttctctttctttctttcgagatggagtcttgctctggcgcccaggctagagtg

SEQ ID NO: 111064 - DNA, 120 bp, synthetic construct
  source 1..120: mol_type = other DNA
cgcccgccaccatgcctggctaattttttgtatttttagtagagacggggtttcactgtgttagccaggatggtctcgatctcctgacctcgtgatctgcccgccttggcctcccaaagt

SEQ ID NO: 111065 - DNA, 120 bp, synthetic construct
  source 1..120: mol_type = other DNA
gccactgcactccagcctgggagacagagcaagactgtctccaaaacaaacaaacaaaaaaaccctgtagcttgagccttctcttctattgtttttctttaaaaaataaaaattaaaaat

SEQ ID NO: 111066 - DNA, 120 bp, synthetic construct
  source 1..120: mol_type = other DNA
taaaccaataaattagatagtatatattagacgtgttagtatatatatctgagacatgttaaaaatcacaactgaattctcacaattcagtcacagacctaaacagcaaataaaaatttc

SEQ ID NO: 111067 - DNA, 120 bp, synthetic construct; identical to SEQ ID NO: 1615
  source 1..120: mol_type = other DNA

SEQ ID NO: 111068 - DNA, 120 bp, synthetic construct; identical to SEQ ID NO: 1643
  source 1..120: mol_type = other DNA

SEQ ID NO: 111069 - DNA, 120 bp, synthetic construct
  source 1..120: mol_type = other DNA
gtctgtctcaaaaaaataaaagaaattgaatacattgatattttgccaggaccctgccttctacaggcatctagtctaatgggactggcagtaaccaaggcagatgagctaatcccagtg

SEQ ID NO: 111070 - DNA, 120 bp, synthetic construct
  source 1..120: mol_type = other DNA
tcccaagtagctgggattacagatgcacaccaccacgcccagctaatttttctatttttagtagagacggggtttggccatgttggccaggctggtctcgaactgctgacctcaggtgat

SEQ ID NO: 111071 - DNA, 120 bp, synthetic construct
  source 1..120: mol_type = other DNA
tagaaacagggtctcactatgttgcccaggttgttctcaaactgttgggctcacgtgatcctcctgactccacctctcaaaaagtactgggatcacaggcttgagcagccactcccggct

SEQ ID NO: 111072 - DNA, 120 bp, synthetic construct
  source 1..120: mol_type = other DNA
aacttaatgtctcttactgacttttctaaacctaagtgtctccatccatagtgggggatcccaaggccatggtcacaccctgatgtgactgtctcatgaggaaatgatgggaattccttt

SEQ ID NO: 111073 - DNA, 120 bp, synthetic construct; identical to SEQ ID NO: 88443
  source 1..120: mol_type = other DNA

SEQ ID NO: 111074 - DNA, 120 bp, synthetic construct
  source 1..120: mol_type = other DNA
gcagtcatagctcactgcagtctcaaagtcctgagttcaagcaatcctcttgcctcagcctcccagcgtgctaggatctcaggcgtgagccactgcacctggcccgaaaccaagctttct

SEQ ID NO: 111075 - DNA, 120 bp, synthetic construct
  source 1..120: mol_type = other DNA
gtgcggtggctcacacctgtaaccccagaactttgggaggccaaggcaggcggatcacttgaggccaggagtttgagaccagcctggccaacatggtgaaaccctgtctctactaaaagt

SEQ ID NO: 111076 - DNA, 120 bp, synthetic construct
  source 1..120: mol_type = other DNA
ccaaaagcatcttcggggactccacatccctctgttccctgtcccagcagaggctgtgtcctctccactcaaagcctgaagcatgttggggtctcttcatctctgtacatgcccatttca

SEQ ID NO: 111077 - DNA, 120 bp, synthetic construct
  source 1..120: mol_type = other DNA
ctcttttattttttatcaaaaaaaatttttttgacacaatatcttgctgtgttgcccagacgggagtgcagtggcaagatcatggctcactgcagcttctaactcctgggctcaagtgat

SEQ ID NO: 111078 - DNA, 120 bp, synthetic construct
  source 1..120: mol_type = other DNA
cgtctctagtaaaaatacagaaaaaatgagctgggcgtgggggtgcacatctgtaatcccagctacttaggaggccgaggcaggagaatcgcttgaacctggaaggcagaggttgcagtg

SEQ ID NO: 111079 - DNA, 120 bp, synthetic construct
  source 1..120: mol_type = other DNA
tccctctccctgccacagagttgtcttcagtaatttcattcccttttttcctgagggttcactgggtttctgggtcccagaaggggaagttctcttcaaggtacagaaaccacaactcca

SEQ ID NO: 111080 - DNA, 120 bp, synthetic construct
  source 1..120: mol_type = other DNA
catagcaggccaggcgcggtggctcacacctgcaatcccagcactctgggggaggccgagacgggcggatcacttgaagccacacagaaatcgaaagaaggagtttgagtccagcctggc

SEQ ID NO: 111081 - DNA, 120 bp, synthetic construct
  source 1..120: mol_type = other DNA
aagccaggtgcagtggctcacgcctgtaatcccagcactttgggaggccgaggccggcggatcatgaggtcaggaaatcaagaccatcctggccaacatggtgaaaccccgtctctacta

SEQ ID NO: 111082 - DNA, 120 bp, synthetic construct
  source 1..120: mol_type = other DNA
tcctgagtagctgagtctacaggcatgcaccaccacacctggataattattttttttttgtagaagtgggggtctcgctgtgttgcccaggctgtccttgaactcctggcctcaagggat

SEQ ID NO: 111083 - DNA, 120 bp, synthetic construct; identical to SEQ ID NO: 110933
  source 1..120: mol_type = other DNA

SEQ ID NO: 111084 - DNA, 120 bp, synthetic construct; identical to SEQ ID NO: 29601
  source 1..120: mol_type = other DNA

SEQ ID NO: 111085 - DNA, 120 bp, synthetic construct; identical to SEQ ID NO: 110935
  source 1..120: mol_type = other DNA

SEQ ID NO: 111086 - DNA, 120 bp, synthetic construct
  source 1..120: mol_type = other DNA
ctttccatggcccacgtcaatgccggtatttctgtctgttgcacatttgatttccttgttgttggcatttagaaggccccccgtttcccagatcacaccacgggcatggaccgcagagat

SEQ ID NO: 111087 - DNA, 120 bp, synthetic construct; identical to SEQ ID NO: 110937
  source 1..120: mol_type = other DNA

SEQ ID NO: 111088 - DNA, 120 bp, synthetic construct; identical to SEQ ID NO: 110938
  source 1..120: mol_type = other DNA

SEQ ID NO: 111089 - DNA, 120 bp, synthetic construct; identical to SEQ ID NO: 110939
  source 1..120: mol_type = other DNA

SEQ ID NO: 111090 - DNA, 120 bp, synthetic construct
  source 1..120: mol_type = other DNA
tctagcacggttacaagtttagatctgaagtgacacaaaaggccccagctgtgatgaagtccaaagccacattctctgagggtgccctactccctgggaagacccacccaaagtcctggc

SEQ ID NO: 111091 - DNA, 120 bp, synthetic construct; identical to SEQ ID NO: 68667
  source 1..120: mol_type = other DNA

SEQ ID NO: 111092 - DNA, 120 bp, synthetic construct; identical to SEQ ID NO: 29602
  source 1..120: mol_type = other DNA

SEQ ID NO: 111093 - DNA, 120 bp, synthetic construct; identical to SEQ ID NO: 68665
  source 1..120: mol_type = other DNA

SEQ ID NO: 111094 - DNA, 120 bp, synthetic construct
  source 1..120: mol_type = other DNA
ctccctccaccacctcccaccagatgctcctacagttttttttgtttttgtttttgtttttttttgtgagacacagtcttgctctgttgcccaggctggagggcagtgtctcgatcttga

SEQ ID NO: 111095 - DNA, 120 bp, synthetic construct; identical to SEQ ID NO: 68663
  source 1..120: mol_type = other DNA

SEQ ID NO: 111096 - DNA, 120 bp, synthetic construct
  source 1..120: mol_type = other DNA
ctccttcctgacctctgacccttcttttgtttcttctttttttttttttttttttttgagatagcatgtcactctgtcacccagactggagtgcagtagcacgatctcggctcactgcaa

SEQ ID NO: 111097 - DNA, 120 bp, synthetic construct
  source 1..120: mol_type = other DNA
tagagtttcttagccaaactggaggggctggctttaggtgatccgtggactccctgaaattggggacaccattggaaatatgtgtgaactcatgggcagtttcctatgatttccagtcct

SEQ ID NO: 111098 - DNA, 120 bp, synthetic construct; identical to SEQ ID NO: 29603
  source 1..120: mol_type = other DNA

SEQ ID NO: 111099 - DNA, 120 bp, synthetic construct
  source 1..120: mol_type = other DNA
aagcgaggcccagatcatatttcaccacgctcagaaaaccttgccagctcatttcagtccacagtgactttgctttctttaggatctctcttgcactgcccaactcagagaatttcaaat

SEQ ID NO: 111100 - DNA, 120 bp, synthetic construct
  source 1..120: mol_type = other DNA
ttggcctctcaaagtgctggaattacacgcgtgagccattgagcccaaccagataagatgatctttaagggcccttcccatggcaccataatccaagtcagcgagactgtggctatagca

SEQ ID NO: 111101 - DNA, 120 bp, synthetic construct
  source 1..120: mol_type = other DNA
tattttctttaaagatgacgagcagcatcttatttgcgttaacacaagtcatccacataacaaatatagataagaaaagtggccaggtgtggtggctcatgcctctaatcctagtacttt

SEQ ID NO: 111102 - DNA, 120 bp, synthetic construct; identical to SEQ ID NO: 29604
  source 1..120: mol_type = other DNA

SEQ ID NO: 111103 - DNA, 120 bp, synthetic construct
  source 1..120: mol_type = other DNA
ttgacctcccaggctcaagcaatcctcctgcttcagcctcccaagtagctgggacatgggcatgcatcatcacagctggctaattaaaaacattttttttgttgagacggagtctcgctc

SEQ ID NO: 111104 - DNA, 120 bp, synthetic construct; identical to SEQ ID NO: 110933
  source 1..120: mol_type = other DNA

SEQ ID NO: 111105 - DNA, 120 bp, synthetic construct; identical to SEQ ID NO: 29601
  source 1..120: mol_type = other DNA

SEQ ID NO: 111106 - DNA, 120 bp, synthetic construct; identical to SEQ ID NO: 110935
  source 1..120: mol_type = other DNA

SEQ ID NO: 111107 - DNA, 120 bp, synthetic construct; identical to SEQ ID NO: 1535
  source 1..120: mol_type = other DNA

SEQ ID NO: 111108 - DNA, 120 bp, synthetic construct
  source 1..120: mol_type = other DNA
tcagaattgcatcacataggctgggcgcagtggctcacgcctgtaatcctagcactttgggaggccaaggcggagagatcacgaggtcaggagatcgagaccatcctggctaacacagtg

SEQ ID NO: 111109 - DNA, 120 bp, synthetic construct
  source 1..120: mol_type = other DNA
ttgcagggagccgaggttgtgccactgcactccagcctgggagacagagcaagactgtctccaaaacaaacaaacaaaaaaaccctgtagcttgagccttctcttctattgtttttcttt

SEQ ID NO: 111110 - DNA, 120 bp, synthetic construct; identical to SEQ ID NO: 111066
  source 1..120: mol_type = other DNA

SEQ ID NO: 111111 - DNA, 120 bp, synthetic construct; identical to SEQ ID NO: 1615
  source 1..120: mol_type = other DNA

SEQ ID NO: 111112 - DNA, 120 bp, synthetic construct; identical to SEQ ID NO: 1643
  source 1..120: mol_type = other DNA

SEQ ID NO: 111113 - DNA, 120 bp, synthetic construct; identical to SEQ ID NO: 111069
  source 1..120: mol_type = other DNA

SEQ ID NO: 111114 - DNA, 120 bp, synthetic construct; identical to SEQ ID NO: 111070
  source 1..120: mol_type = other DNA

SEQ ID NO: 111115 - DNA, 120 bp, synthetic construct
  source 1..120: mol_type = other DNA
cccctgaggagctgggactaggcacatgccaccatgctcaactaatttttgaaatgtttgtagaaacagggtctcactatgttgcccaggttgttctcaaactgttgggctcacgtgatc

SEQ ID NO: 111116 - DNA, 120 bp, synthetic construct; identical to SEQ ID NO: 111072
  source 1..120: mol_type = other DNA

SEQ ID NO: 111117 - DNA, 120 bp, synthetic construct; identical to SEQ ID NO: 88443
  source 1..120: mol_type = other DNA

SEQ ID NO: 111118 - DNA, 120 bp, synthetic construct; identical to SEQ ID NO: 111074
  source 1..120: mol_type = other DNA

SEQ ID NO: 111119 - DNA, 120 bp, synthetic construct
  source 1..120: mol_type = other DNA
caaagttctgggattacaggtgtgagccactgcacccagcctgaatttctccattcttcccacacaccctcctcaggttctccttcctgaccgctgacccttcttttcttttttcttttc

SEQ ID NO: 111120 - DNA, 120 bp, synthetic construct
  source 1..120: mol_type = other DNA
acagagtgggaaagaaaactagggtaagcagaaatgatgaaaccttataagagtgagattatcatgtacaagagtgagattatcacgtacaagagtgagattatcacgtacaagagtgag

SEQ ID NO: 111121 - DNA, 120 bp, synthetic construct
  source 1..120: mol_type = other DNA
ctgcgcaccatgagttcaagtgattctccagcgccctctcctgagtagctgcgattacaggcatccaccatgcctggctaattttttgtatttttagtagagatggggtttcaccatgtt

SEQ ID NO: 111122 - DNA, 120 bp, synthetic construct
  source 1..120: mol_type = other DNA
ggcctctgcccagaagccatgacattctggtcaccagcctgatgttataaaacgagtgtcatggccgggcatggtggctcacacctgtaatcccagcactttaggaggccaaggcgggtg

SEQ ID NO: 111123 - DNA, 120 bp, synthetic construct
  source 1..120: mol_type = other DNA
actgcactccagcctgagtgacacagcaagaccctgcttcaaaaaaaaaaaaaaaaaaaattactggacacaattattgtgccagacccctaggttaacagtgaggattcagtgggagaa

SEQ ID NO: 111124 - DNA, 120 bp, synthetic construct
  source 1..120: mol_type = other DNA
tagtagagattgggcggggtggggggtggggtgcgggtttcaccgtgtggcccaagctggtctcaaactcctgacctcaagtgatcctcccgcttcagcctccccaggtgctgggattac

SEQ ID NO: 111125 - DNA, 120 bp, synthetic construct
  source 1..120: mol_type = other DNA
agagttttaccacgttggccaggctggtctcaaactcctgacctcaggcgatccatgcacctcggcctcccaaagtgctgggattccaggcttgagccaccgcccctggcccatcttcac

SEQ ID NO: 111126 - DNA, 120 bp, synthetic construct; identical to SEQ ID NO: 29238
  source 1..120: mol_type = other DNA

SEQ ID NO: 111127 - DNA, 120 bp, synthetic construct
  source 1..120: mol_type = other DNA
tgtaacctccacctcctgggttcaagtgattctcgtgcctaagcctcccaagtagctggaattacagacgtgccatcatgcccagctaatatttgtattttagtagagacagagtttcgc

SEQ ID NO: 111128 - DNA, 120 bp, synthetic construct
  source 1..120: mol_type = other DNA
ttttttttttttttagaaaatccatacagtgagggctgggcacggtggcccacatctgtagtcccagcactttgggaggccaaggcaggtggatttgaggccaggagttcgagaccagcc

SEQ ID NO: 111129 - DNA, 120 bp, synthetic construct
  source 1..120: mol_type = other DNA
caggggttcaaggctgcagtgagctgtgatccaccactgcattcccggctgggcatcagagtgaggcctgtctctaagaaaaaaacccttcactccccaaaaaaagggatttgcaaatac

SEQ ID NO: 111130 - DNA, 120 bp, synthetic construct
  source 1..120: mol_type = other DNA
aatcacttgaactcatggtgcgcaggttgcagggagccaagatcgcaccattgtgctccagcctgggcaacaagagcaaaactccatctcaaaaaaaataacctgcgagtgagttcccac

SEQ ID NO: 111131 - DNA, 120 bp, synthetic construct; identical to SEQ ID NO: 29239
  source 1..120: mol_type = other DNA

SEQ ID NO: 111132 - DNA, 120 bp, synthetic construct
  source 1..120: mol_type = other DNA
gatcacgctactgcactcccaaaaaaaaaaaaaagaaaaaagaaaagaagggtcagcggtcaggaaggagaacctgaggagggtgtgtgggaagaatggagaaattcaggctgggtgcag

SEQ ID NO: 111133 - DNA, 120 bp, synthetic construct
  source 1..120: mol_type = other DNA
tgggataagaaagcttggtttcgggccaggtgcagtggctcctgcctgagatcccagcatgttgggaggctgaggcaagaggattgcttgaactcaggactttgaggctgcagtgagcta

SEQ ID NO: 111134 - DNA, 120 bp, synthetic construct
  source 1..120: mol_type = other DNA
tgtttcgcaacaacaacaacaacaacaaaaaaaaaaaaaaaaaaaaaaaaagggactcagagagccagggaccagggaaggatatgaggaagtgttctgaggacagagaaacgggagaat

SEQ ID NO: 111135 - DNA, 120 bp, synthetic construct
  source 1..120: mol_type = other DNA
caaggctgggcacagtagctcatgcatgtaatcccagctactcgggaggctgagacaggagaatcgcttaaacccgggaggcagaggttgcagtgagccaagatcaggccactgcattcc

SEQ ID NO: 111136 - DNA, 120 bp, synthetic construct
  source 1..120: mol_type = other DNA
gagattatagatgtcagccactgtgcccgaccagctcccatggtcttgagtcttggcacccacaaattttttttttgtgagacacagtctagctctgctccccaggatggagtgcagtgg

SEQ ID NO: 111137 - DNA, 120 bp, synthetic construct
  source 1..120: mol_type = other DNA
tgttgtttctaaacagaaactcaggctgggcacagtggcatacgcctgtaatcccagcactttgggaggccgaggcaggcagattacctgaggtcagcagttcgagaccagcctggccaa

SEQ ID NO: 111138 - DNA, 120 bp, synthetic construct
  source 1..120: mol_type = other DNA
attcaattgcttttatttttttgagacagacttgccctgtcccccaagctagagtgcagtggtgagatcatagctcaccacagcctccatatcctgggctcaagcgatcctcccacctca

SEQ ID NO: 111139 - DNA, 120 bp, synthetic construct; identical to SEQ ID NO: 29240
  source 1..120: mol_type = other DNA

SEQ ID NO: 111140 - DNA, 120 bp, synthetic construct
  source 1..120: mol_type = other DNA
tggttacaagtctggatcttaagagacacaaaaggccccagctgtgatgaagtccaaagccacattctctgagggtgccctactccctgggcagacccacccaaagtccttgctatgaag

SEQ ID NO: 111141 - DNA, 120 bp, synthetic construct; identical to SEQ ID NO: 111066
  source 1..120: mol_type = other DNA

SEQ ID NO: 111142 - DNA, 120 bp, synthetic construct
  source 1..120: mol_type = other DNA
cctccgggttcaaacaaattctcctgcctcagcctcccaagtagctgggactacaggcacccgtctgtacgtccgactaacttttgtaaaaatagtagagacaaggtttcaccatgttgg

SEQ ID NO: 111143 - DNA, 120 bp, synthetic construct; identical to SEQ ID NO: 111064
  source 1..120: mol_type = other DNA

SEQ ID NO: 111144 - DNA, 120 bp, synthetic construct; identical to SEQ ID NO: 29241
  source 1..120: mol_type = other DNA

SEQ ID NO: 111145 - DNA, 120 bp, synthetic construct
  source 1..120: mol_type = other DNA
tcctgcgttttcagtctggcatggaaaagcccccatgcaactggtagtaaagatatcaataagcaccaggaggtatctaaatccaccaggagccataggcatcacgttgacgtccattta

SEQ ID NO: 111146 - DNA, 120 bp, synthetic construct
  source 1..120: mol_type = other DNA
gaggtggcataggattgactaagacgaaggaagggggccaggtgcggtagctcacccctgtaacaccaacactttgggaggccgaggcgggcagatcacctgaggtcagcagttcaagac

SEQ ID NO: 111147 - DNA, 120 bp, synthetic construct
  source 1..120: mol_type = other DNA
gatcccagccccccgcgtaggtcccttggctgcaaaaggaagagggagtgtttggatgaatctgatgatgagccagagaaggagctcgcccctgagcctgaggagacctgggtggcggag

SEQ ID NO: 111148 - DNA, 120 bp, synthetic construct
  source 1..120: mol_type = other DNA
gcaggagaataactggaatccgggagatagatgttgcagtcagctgagattgcaccactacactccagcctgggtgacaaagcaagattctgtctcgaaacaaaaaaaaaaagagggcct

SEQ ID NO: 111149 - DNA, 120 bp, synthetic construct
  source 1..120: mol_type = other DNA
tccccaggttctccttcctgacctctgacccttcttttgtttcttctttttttttttttttttttttgagatagcatgtcactctgtcacccagactggagtgcagtagcacgatctcgg

SEQ ID NO: 111150 - DNA, 120 bp, synthetic construct
  source 1..120: mol_type = other DNA
gcagagttttgctctgtcacccaggctggagtgcagtggtgcagtcatagctcactgcagcctcaaagtcctgagttcaagcaatcctcttgcctcagcctcccaacgtgctgggatctc

SEQ ID NO: 111151 - DNA, 120 bp, synthetic construct
  source 1..120: mol_type = other DNA
ttcaacaggctgcttggtaggaggacaccccagagagcacctccaatcctgttctttctaaaaagaggaaacttccaataaccacacttttccaatgggaataatatgccccagtgggtg

SEQ ID NO: 111152 - DNA, 120 bp, synthetic construct
  source 1..120: mol_type = other DNA
aggctggggaggatggagagtggtttggggtttggggtcggggtctaacgtgatcagttgcagaagcattacacggtggcctggtttctttactcagcccctggggtagatcccagcccc

SEQ ID NO: 111153 - DNA, 120 bp, synthetic construct
  source 1..120: mol_type = other DNA
gcaggacagggtttccgtgagagcagcagggcagtgaggagaagtgtgcctcccgggggaaagtctcaggattgtggctgcgggtgaggtggatgggagaggggagaatgactttcactg

SEQ ID NO: 111154 - DNA, 120 bp, synthetic construct
  source 1..120: mol_type = other DNA
atgctcaacgaatttttgaaatcttcgtagaaacagggtctcgctgtgttgcccaggttgttctccaactgttgggctcatgtgatcctcctgtctccacctctcaaaaagtactgggat

SEQ ID NO: 111155 - DNA, 120 bp, synthetic construct
  source 1..120: mol_type = other DNA
aaaaatagaaaaatcagtcgggcatgttggtgtgcacctgttatccaagctacttgggaggctgaggcatgagaaccccttgaacccaggaggtggaggttgcagtaagctaaggttgag

SEQ ID NO: 111156 - DNA, 120 bp, synthetic construct
  source 1..120: mol_type = other DNA
ccacttgactttgcattcgtgttttctgtctgggtgtcccacacacatgtggttctgaagggaagcacccattccttgaagtcggttcaccccacagcctctgtgatgccttccctcatc

SEQ ID NO: 111157 - DNA, 120 bp, synthetic construct; identical to SEQ ID NO: 29753
  source 1..120: mol_type = other DNA

SEQ ID NO: 111158 - DNA, 120 bp, synthetic construct; identical to SEQ ID NO: 111026
  source 1..120: mol_type = other DNA

SEQ ID NO: 111159 - DNA, 120 bp, synthetic construct
  source 1..120: mol_type = other DNA
ggtttgtgactgaattgtgagaattcagttgtgatttttaacatgtcttagatatatatactaacatgtctaatatatactatctattttattgatttatttcgaaaaagatgggcaaag

SEQ ID NO: 111160 - DNA, 120 bp, synthetic construct; identical to SEQ ID NO: 111082
  source 1..120: mol_type = other DNA

SEQ ID NO: 111161 - DNA, 120 bp, synthetic construct; identical to SEQ ID NO: 111081
  source 1..120: mol_type = other DNA

SEQ ID NO: 111162 - DNA, 120 bp, synthetic construct
  source 1..120: mol_type = other DNA
ctgggggaggccgagacgggtggatcacttgaagccacacagaaatcgaaagaaggagtttgagtccagcctggccagtatggcgaaactctgtctctactaaaatacaaatattagctg

SEQ ID NO: 111163 - DNA, 120 bp, synthetic construct
  source 1..120: mol_type = other DNA
cacatctgtagtcccagcactttgggaggccaaggcaggtggatttgaggccaggagttcgagaccagcctgggcaacatggcgaaaccccatctctaccacaaatacgaaaattagctg

SEQ ID NO: 111164 - DNA, 120 bp, synthetic construct
  source 1..120: mol_type = other DNA
atccctttttttggggagtgaagggtttttttttttagagagaggcctcactctgatgcccagcctggaatgcagtggtggatcacagctcactgcagccttgaacccctggccgcaaga

SEQ ID NO: 111165 - DNA, 120 bp, synthetic construct
  source 1..120: mol_type = other DNA
gagttcaagtgattctccagctccctctcctgagtagctgcgattacaggcatccaccaccatgcctggctaattttttgtatttttagtagagatggggtttcaccatgttgtccaagc

SEQ ID NO: 111166 - DNA, 120 bp, synthetic construct; identical to SEQ ID NO: 110917
  source 1..120: mol_type = other DNA

SEQ ID NO: 111167 - DNA, 120 bp, synthetic construct
  source 1..120: mol_type = other DNA
aggagaacctgaggagggtgtgtgggaagaatggagaaattcaggctgggtgtggtggcttacacctgtaaccccagaactttgggaggccaaggcaggcggatcacttgaggccaggag

SEQ ID NO: 111168 - DNA, 120 bp, synthetic construct
  source 1..120: mol_type = other DNA
agatcctagcacgttgggaggctgaggcaagaggattgcttgaactcaggactttgaggctgcagtgagctatgactgcaccactgcactccagcctgggtgacacagcaaaaccctgtg

SEQ ID NO: 111169 - DNA, 120 bp, synthetic construct; identical to SEQ ID NO: 110920
  source 1..120: mol_type = other DNA

SEQ ID NO: 111170 - DNA, 120 bp, synthetic construct
  source 1..120: mol_type = other DNA
aacctaagtgtttccatccatagtgagggataccaaggccatggtcacaccctgatgtgactgtctcatgaggaaatgatgggaattcctttatgactctgcagtggtccctccgtgtct

SEQ ID NO: 111171 - DNA, 120 bp, synthetic construct
  source 1..120: mol_type = other DNA
tcgctgtgttgcccaggttgttctccaactgttgggctcatgtgatcctcctgtctccacctctcaaaaagtactgggatcacaggcttgagccgccactcccggctattctttgtcttt

SEQ ID NO: 111172 - DNA, 120 bp, synthetic construct
  source 1..120: mol_type = other DNA
tggcattggagtttgtttttttggctttttttttttttttttttttttttgagaaaaagtctcactctgtcacccaggctggagtgcagtggctcgaccttagcttactgcaacctccac

SEQ ID NO: 111173 - DNA, 120 bp, synthetic construct
  source 1..120: mol_type = other DNA
tcccacctcagcttctttattagctccgactacagggctgtgccaccacacctggactgtttgtttgtttgtttgtttgattattgagatagagtcttgctctgcctctcaggctggaat

SEQ ID NO: 111174 - DNA, 120 bp, synthetic construct; identical to SEQ ID NO: 1614
  source 1..120: mol_type = other DNA

SEQ ID NO: 111175 - DNA, 120 bp, synthetic construct; identical to SEQ ID NO: 1615
  source 1..120: mol_type = other DNA

SEQ ID NO: 111176 - DNA, 120 bp, synthetic construct; identical to SEQ ID NO: 111066
  source 1..120: mol_type = other DNA

SEQ ID NO: 111177 - DNA, 120 bp, synthetic construct
  source 1..120: mol_type = other DNA
cagctgggactacaggcacccgtctgtacgtccgactaacttttgtaaaaatagtagagacaaggtttcaccatgttggccaggctggtctcgaactcctgacttcaagtgatccaccca

SEQ ID NO: 111178 - DNA, 120 bp, synthetic construct
  source 1..120: mol_type = other DNA
gcctagtgggggctggtggccttaacctgtggcatttgaggtaacatcagggagttgacatcagaattgcatcacataggctgggcgcagtggctcacgcctgtaatcctagcactttgg

SEQ ID NO: 111179 - DNA, 120 bp, synthetic construct
  source 1..120: mol_type = other DNA
atgaggtggggaagtcctccacaagcctctgcttccttcagtacctgtttatgaaataagctgaggtacttccctggggaatttcctttctctttctttctttcgagatggagtcttgct

SEQ ID NO: 111180 - DNA, 120 bp, synthetic construct; identical to SEQ ID NO: 111062
  source 1..120: mol_type = other DNA

SEQ ID NO: 111181 - DNA, 120 bp, synthetic construct
  source 1..120: mol_type = other DNA
ttacagatctacaaacctcacccccaccctcctgccaacaccttccactcctcattcttgagggattagggatggaggtcatgcttctgcttcgacttcatgctgagcagggcactgagt

SEQ ID NO: 111182 - DNA, 120 bp, synthetic construct; identical to SEQ ID NO: 68675
  source 1..120: mol_type = other DNA

SEQ ID NO: 111183 - DNA, 120 bp, synthetic construct
  source 1..120: mol_type = other DNA
ttgcagtgagctgagttagtaccattgcactccagcctgggtgacaagagtgaaactccgtcaaaaaaaaaaaaaaagttgaaccagatttggtctgatgcagttacagatctacaaacc

SEQ ID NO: 111184 - DNA, 120 bp, synthetic construct
  source 1..120: mol_type = other DNA
gactcacagttctgcaggctgtacagaaagcgtggctggggaggcctcaggaaactgacaatcacggcagaaggcgaaggggaagcaggcacgtctggccatgttggagcaggagagaca

SEQ ID NO: 111185 - DNA, 120 bp, synthetic construct
  source 1..120: mol_type = other DNA
ctactcagaagtctgatgcaggagaattgctaaaacccaggagggggaggttatattgagctgagattgcaccactgcactctagcctgggcgacagagcaagactccgtctcgaaagaa

SEQ ID NO: 111186 - DNA, 120 bp, synthetic construct
  source 1..120: mol_type = other DNA
atcagggagttgacatcagaattgcatcacataggctgggcgcggtggctcacacctgtaatcctagcactttgggaggccaaggcgggcagatcacgaggtcaggagatcgagaccatc

SEQ ID NO: 111187 - DNA, 120 bp, synthetic construct
  source 1..120: mol_type = other DNA
tttgaacccagaggtgaaagttgcagggagccgaggttgtgccactgcactccagcctgggagacagagcaagactgtctccaaaacaaacaaacaaaaaaaccctgtagcttgagcctt

SEQ ID NO: 111188 - DNA, 120 bp, synthetic construct; identical to SEQ ID NO: 111066
  source 1..120: mol_type = other DNA

SEQ ID NO: 111189 - DNA, 120 bp, synthetic construct
  source 1..120: mol_type = other DNA
ctgcttcataccaaggactttgggtgggtctgcccagggagtagggcaccctcagagaatgtggctttggactttatcacagctggggccttttgtgtcacttaagatctaaacttgtaa

SEQ ID NO: 111190 - DNA, 120 bp, synthetic construct; identical to SEQ ID NO: 1646
  source 1..120: mol_type = other DNA

SEQ ID NO: 111191 - DNA, 120 bp, synthetic construct
  source 1..120: mol_type = other DNA
agcacaagaattgtgtgaacccaggaggcggaggttgcagtgagttgagattgggccactccattccagcctgagaggcagaacaagactctgtctcaataaacaaacaaacaaacaaac

SEQ ID NO: 111192 - DNA, 120 bp, synthetic construct
  source 1..120: mol_type = other DNA
ttggcttttttttttttttttttttttttttttgagaaaaagtctcactctgtcacccaggctggagtacagtggctcgaccttagcttactgcaacctccacctcctgggttcaaaggg

SEQ ID NO: 111193 - DNA, 120 bp, synthetic construct; identical to SEQ ID NO: 111171
  source 1..120: mol_type = other DNA

SEQ ID NO: 111194 - DNA, 120 bp, synthetic construct
  source 1..120: mol_type = other DNA
cctcccggggggaaagtctcaggattgtggccgcgggtgaggtggatgggagaggggagaatgactttcactgggcaagggagagaggctcctgctctgagactcccctgagaagaggcc

SEQ ID NO: 111195 - DNA, 120 bp, synthetic construct; identical to SEQ ID NO: 110920
  source 1..120: mol_type = other DNA

SEQ ID NO: 111196 - DNA, 120 bp, synthetic construct
  source 1..120: mol_type = other DNA
gagtgcagtggtgcagtcatagctcactgcagcctcaaagtcctgagttcaagcaatcctcttgcctcagcctcccaacgtgctagcatctcaggcgtgagccactgcacctggcccgaa

SEQ ID NO: 111197 - DNA, 120 bp, synthetic construct
  source 1..120: mol_type = other DNA
cacatccatctcctggattccatttattcttctgcctcagcctctcaggtagctgggattacaggtgcctgccataatgcccagctcaattttgtacttttagtagagacagggtttcac

SEQ ID NO: 111198 - DNA, 120 bp, synthetic construct
  source 1..120: mol_type = other DNA
ttgtcctggagatcctgggtgaatggtatctcctgccactgtcccaacctcagaccattgtccaaaagcatcttcagggactccacatccctctattccctgtcccagcagaggctgtgt

SEQ ID NO: 111199 - DNA, 120 bp, synthetic construct
  source 1..120: mol_type = other DNA
agcccagccgggaacccgcaggttttttggatggtctctgaatgtcatgtaactcttttattttttatcaaaaaaaaattttttgacacagtatcttgctgtgttgcccagactggagtg

SEQ ID NO: 111200 - DNA, 120 bp, synthetic construct
  source 1..120: mol_type = other DNA
acttgggaggctgaggcaggagaatcacttgaacctggaagtcagaggttgcagtgagccaagattgcatcactgcactccagcctgggtgacagagcgagacaccatcgcaaaaaaaaa

SEQ ID NO: 111201 - DNA, 120 bp, synthetic construct; identical to SEQ ID NO: 1647
  source 1..120: mol_type = other DNA

SEQ ID NO: 111202 - DNA, 120 bp, synthetic construct
  source 1..120: mol_type = other DNA
aatttaggatgagtgtttaagaatgcatagcaggccaggcgcggtggctcacacctgtaatcccagcactctgggggaggccgagacgggtggatcacttgaagccacacagaaatcgaa

SEQ ID NO: 111203 - DNA, 120 bp, synthetic construct
  source 1..120: mol_type = other DNA
gcctgtaatcccagcactttgggaggccgaggccggcggatcatgaggtcaggaaatcaagaccatcctggccaacatggtgaaaccccgtctctactaaaacacaaaaaattagctggg

SEQ ID NO: 111204 - DNA, 120 bp, synthetic construct; identical to SEQ ID NO: 29321
  source 1..120: mol_type = other DNA

SEQ ID NO: 111205 - DNA, 120 bp, synthetic construct
  source 1..120: mol_type = other DNA
tgtaattccagcaaaagaagagccgaggcagggtgatcacgaggtcaggagttcaagaccagccgggcaaacatggtgaaaccccgtctctactgaaaatacaaaaattagccaggtgtg

SEQ ID NO: 111206 - DNA, 120 bp, synthetic construct
  source 1..120: mol_type = other DNA
ttcaagaccatcctggccaacatggtgacattccatctctactaaaaatacaaaaagtcagcggggtttggtgttgggtgcctgtaatcccagctactcgggaggctgaggcaggataat

SEQ ID NO: 111207 - DNA, 120 bp, synthetic construct
  source 1..120: mol_type = other DNA
tgtgggccaggctggtcttgaactcctgacctcaggtgatccacccaccttggcctcccaaagtgctgggattacaggcatagccactgtgcctggctgacttctagagtttcaataaca

SEQ ID NO: 111208 - DNA, 120 bp, synthetic construct
  source 1..120: mol_type = other DNA
gatccgcccacctcagcctcccaaagtgctgggattacagtcctgagccaccgcgcctggactttttttttttttttttttttttgagaggggttggggagacatattctctgctagtga

SEQ ID NO: 111209 - DNA, 120 bp, synthetic construct
  source 1..120: mol_type = other DNA
atgtcctcctttagaacacacatcctctttaaagtaacatacaaacatgccaaaacaagataaaaaattccatctgaattctcacatttcaaacatacactaaatatcaaataaaaattt

SEQ ID NO: 111210 - DNA, 120 bp, synthetic construct
  source 1..120: mol_type = other DNA
gggctcagattggcacagaattctttgtgaaatatgagtgccacagactgtaacagatagcttcatgcacactatgcattttattggtttgtttggaaaatgttggccattgaattatta

SEQ ID NO: 111211 - DNA, 120 bp, synthetic construct
  source 1..120: mol_type = other DNA
cgaactcagtatttatgattatttttgaggcagggtctcactctgtcgcccgggctggagtgcagtggcaggatcagggctccctgcagcaccgacctcccaggctccagcgatcctccc

SEQ ID NO: 111212 - DNA, 120 bp, synthetic construct
  source 1..120: mol_type = other DNA
gctgggattacaggcatgagccaccacgtctggcgtattttttatatttttaatagagacgagggtcttgctatgttgcccaggcctgtctcaaactcctggcctcaagtgatcctcctg

SEQ ID NO: 111213 - DNA, 120 bp, synthetic construct; identical to SEQ ID NO: 29322
  source 1..120: mol_type = other DNA

SEQ ID NO: 111214 - DNA, 120 bp, synthetic construct; identical to SEQ ID NO: 68637
  source 1..120: mol_type = other DNA

SEQ ID NO: 111215 - DNA, 120 bp, synthetic construct
  source 1..120: mol_type = other DNA
accactgcagagtcataaaggaattcccatcatttcctcatgagacagtcacacatcagggtgtgaccatggccttgggatccctcactatggatggagacacttaggtttagaaaagtc

SEQ ID NO: 111216 - DNA, 120 bp, synthetic construct
  source 1..120: mol_type = other DNA
tcatcatcagattcatccaaacattccctcttccttttccagccaagggacctacgtggggggctgggatctaccccaggggctgagtaaagaaaccaggccaccgtgtaatgcttctgc

SEQ ID NO: 111217 - DNA, 120 bp, synthetic construct
  source 1..120: mol_type = other DNA
ggtggatgatgaagtgtcgggaccatcaggtgaggggactggaggaagaagaggtggcataggattgactaagacgaaggaagggggccaggtgcggtagctcacccctgtaacaccaac

SEQ ID NO: 111218 - DNA, 120 bp, synthetic construct
  source 1..120: mol_type = other DNA
tccgtaatatagattcataaataaaccatttccttcaatggtataaataaataaaccactgctataaatggtggaattttctgagttaagagcaatacatatgatacaaaacttgatata

SEQ ID NO: 111219 - DNA, 120 bp, synthetic construct; identical to SEQ ID NO: 29603
  source 1..120: mol_type = other DNA

SEQ ID NO: 111220 - DNA, 120 bp, synthetic construct; identical to SEQ ID NO: 111099
  source 1..120: mol_type = other DNA

SEQ ID NO: 111221 - DNA, 120 bp, synthetic construct; identical to SEQ ID NO: 68658
  source 1..120: mol_type = other DNA

SEQ ID NO: 111222 - DNA, 120 bp, synthetic construct; identical to SEQ ID NO: 68657
  source 1..120: mol_type = other DNA

SEQ ID NO: 111223 - DNA, 120 bp, synthetic construct
  source 1..120: mol_type = other DNA
aaggtcttactgtgttgtttaagctgctctcaaactcctgggctcaagtgatcctcccacctcggcctcccaaagcattggaattacaggtgtgagccacctcactgagccctccacctt

SEQ ID NO: 111224 - DNA, 120 bp, synthetic construct; identical to SEQ ID NO: 111040
  source 1..120: mol_type = other DNA

SEQ ID NO: 111225 - DNA, 120 bp, synthetic construct; identical to SEQ ID NO: 110933
  source 1..120: mol_type = other DNA

SEQ ID NO: 111226 - DNA, 120 bp, synthetic construct; identical to SEQ ID NO: 29601
  source 1..120: mol_type = other DNA

SEQ ID NO: 111227 - DNA, 120 bp, synthetic construct; identical to SEQ ID NO: 110935
  source 1..120: mol_type = other DNA

SEQ ID NO: 111228 - DNA, 120 bp, synthetic construct; identical to SEQ ID NO: 1535
  source 1..120: mol_type = other DNA

SEQ ID NO: 111229 - DNA, 120 bp, synthetic construct; identical to SEQ ID NO: 110937
  source 1..120: mol_type = other DNA

SEQ ID NO: 111230 - DNA, 120 bp, synthetic construct; identical to SEQ ID NO: 110938
  source 1..120: mol_type = other DNA

SEQ ID NO: 111231 - DNA, 120 bp, synthetic construct; identical to SEQ ID NO: 110939
  source 1..120: mol_type = other DNA

SEQ ID NO: 111232 - DNA, 120 bp, synthetic construct; identical to SEQ ID NO: 110940
  source 1..120: mol_type = other DNA

SEQ ID NO: 111233 - DNA, 120 bp, synthetic construct; identical to SEQ ID NO: 68667
  source 1..120: mol_type = other DNA

SEQ ID NO: 111234 - DNA, 120 bp, synthetic construct; identical to SEQ ID NO: 111007
  source 1..120: mol_type = other DNA

SEQ ID NO: 111235 - DNA, 120 bp, synthetic construct; identical to SEQ ID NO: 68665
  source 1..120: mol_type = other DNA

SEQ ID NO: 111236 - DNA, 120 bp, synthetic construct; identical to SEQ ID NO: 68664
  source 1..120: mol_type = other DNA

SEQ ID NO: 111237 - DNA, 120 bp, synthetic construct; identical to SEQ ID NO: 110945
  source 1..120: mol_type = other DNA

SEQ ID NO: 111238 - DNA, 120 bp, synthetic construct; identical to SEQ ID NO: 110946
  source 1..120: mol_type = other DNA

SEQ ID NO: 111239 - DNA, 120 bp, synthetic construct; identical to SEQ ID NO: 110947
  source 1..120: mol_type = other DNA

SEQ ID NO: 111240 - DNA, 120 bp, synthetic construct; identical to SEQ ID NO: 111013
  source 1..120: mol_type = other DNA

SEQ ID NO: 111241 - DNA, 120 bp, synthetic construct; identical to SEQ ID NO: 111014
  source 1..120: mol_type = other DNA

SEQ ID NO: 111242 - DNA, 120 bp, synthetic construct; identical to SEQ ID NO: 111015
  source 1..120: mol_type = other DNA

SEQ ID NO: 111243 - DNA, 120 bp, synthetic construct; identical to SEQ ID NO: 111016
  source 1..120: mol_type = other DNA

SEQ ID NO: 111244 - DNA, 120 bp, synthetic construct; identical to SEQ ID NO: 111017
  source 1..120: mol_type = other DNA

SEQ ID NO: 111245 - DNA, 120 bp, synthetic construct; identical to SEQ ID NO: 111018
  source 1..120: mol_type = other DNA

SEQ ID NO: 111246 - DNA, 120 bp, synthetic construct; identical to SEQ ID NO: 17767
  source 1..120: mol_type = other DNA

SEQ ID NO: 111247 - DNA, 120 bp, synthetic construct; identical to SEQ ID NO: 17768
  source 1..120: mol_type = other DNA

SEQ ID NO: 111248 - DNA, 120 bp, synthetic construct
  source 1..120: mol_type = other DNA
gtgttttagacatgaagtccttgcccatgcctatgtcctgaatggtattgcctaggttttcttctagggtttttatggttttaggtctaacatttaagtctttaatccatcttgaattaa

SEQ ID NO: 111249 - DNA, 120 bp, synthetic construct; identical to SEQ ID NO: 17769
  source 1..120: mol_type = other DNA

SEQ ID NO: 111250 - DNA, 120 bp, synthetic construct; identical to SEQ ID NO: 17770
  source 1..120: mol_type = other DNA

SEQ ID NO: 111251 - DNA, 120 bp, synthetic construct; identical to SEQ ID NO: 17771
  source 1..120: mol_type = other DNA

SEQ ID NO: 111252 - DNA, 120 bp, synthetic construct; identical to SEQ ID NO: 23644
  source 1..120: mol_type = other DNA

SEQ ID NO: 111253 - DNA, 120 bp, synthetic construct; identical to SEQ ID NO: 23645
  source 1..120: mol_type = other DNA

SEQ ID NO: 111254 - DNA, 120 bp, synthetic construct
  source 1..120: mol_type = other DNA
cgcacctgtagtgccagcttttcaggaggctgaagtgggagaatctcttgagcctaggagtttgagttcagcttgggcagcattgcaagagcccagtctcaaaaatattaggtcaataag

SEQ ID NO: 111255 - DNA, 120 bp, synthetic construct
  source 1..120: mol_type = other DNA
atggatttgcctagtctaggtatttttatgtaaatggcatcatacaacatgtgaccttttgtttggcttttttcatttagcaaaatgttatcaaggtctgtccctgttgtagcatgtatt

SEQ ID NO: 111256 - DNA, 120 bp, synthetic construct
  source 1..120: mol_type = other DNA
gtaccactctaactcattgtgtttcatggctgcatagtaatattgcataatataaatataccattcattcatcaaagttagcagatattgactgttaggtgccaggcactgctctaagcg

SEQ ID NO: 111257 - DNA, 120 bp, synthetic construct
  source 1..120: mol_type = other DNA
ttattttagaaacaggtctagctctgttgcccaggttgtagggcaacaatggtgcaatcacagctcactgcagcctccacctcctgggctcaagtgattttcatgcctcagccttccgag

SEQ ID NO: 111258 - DNA, 120 bp, synthetic construct
  source 1..120: mol_type = other DNA
cctcagccttccaggtagctgggactataggcatttgccaccgccccccattagtttttgtatttttttgtagaggcggcgtttcaccatgttggccaggctggtcttgaactcctgaac

SEQ ID NO: 111259 - DNA, 120 bp, synthetic construct; identical to SEQ ID NO: 23650
  source 1..120: mol_type = other DNA

SEQ ID NO: 111260 - DNA, 120 bp, synthetic construct; identical to SEQ ID NO: 23651
  source 1..120: mol_type = other DNA

SEQ ID NO: 111261 - DNA, 120 bp, synthetic construct; identical to SEQ ID NO: 23652
  source 1..120: mol_type = other DNA

SEQ ID NO: 111262 - DNA, 120 bp, synthetic construct
  source 1..120: mol_type = other DNA
taaaacattaggggaggctgggcacagtggctcatgcctgtaatctcagcactttgggaggccgaggcagtcgaatcatgaggtcaggagatcgagactatcctggccaacatagttaaa

SEQ ID NO: 111263 - DNA, 120 bp, synthetic construct; identical to SEQ ID NO: 23653
  source 1..120: mol_type = other DNA

SEQ ID NO: 111264 - DNA, 120 bp, synthetic construct; identical to SEQ ID NO: 23654
  source 1..120: mol_type = other DNA

SEQ ID NO: 111265 - DNA, 120 bp, synthetic construct; identical to SEQ ID NO: 23655
  source 1..120: mol_type = other DNA

SEQ ID NO: 111266 - DNA, 120 bp, synthetic construct
  source 1..120: mol_type = other DNA
agatgtgccaccacgctcggctaatttttgtatttttagtagaggcggagttttaccatgttgaccaggctgttctcgaactcctgacctcaggggatccatccacggcctcccaaagtg

SEQ ID NO: 111267 - DNA, 120 bp, synthetic construct; identical to SEQ ID NO: 23656
  source 1..120: mol_type = other DNA

SEQ ID NO: 111268 - DNA, 120 bp, synthetic construct; identical to SEQ ID NO: 23657
  source 1..120: mol_type = other DNA

SEQ ID NO: 111269 - DNA, 120 bp, synthetic construct
  source 1..120: mol_type = other DNA
ggctgatccccccacctccctcccggacggggcggctggccaggcggggggctgacccccccatctccctcctggacggggtggctgcccggcagagatgctcctcacttcccagacggg

SEQ ID NO: 111270 - DNA, 120 bp, synthetic construct; identical to SEQ ID NO: 23658
  source 1..120: mol_type = other DNA

SEQ ID NO: 111271 - DNA, 120 bp, synthetic construct
  source 1..120: mol_type = other DNA
atgaactcaaacaaatatacaagaaaaaaaaaatcccatcaacaagtgggcgaaggatatgaacagacacttctcaaaagaagacatttatgcagccaaaagacacatgaaaaaatgctc

SEQ ID NO: 111272 - DNA, 120 bp, synthetic construct; identical to SEQ ID NO: 26496
  source 1..120: mol_type = other DNA

SEQ ID NO: 111273 - DNA, 120 bp, synthetic construct; identical to SEQ ID NO: 26497
  source 1..120: mol_type = other DNA

SEQ ID NO: 111274 - DNA, 120 bp, synthetic construct; identical to SEQ ID NO: 26498
  source 1..120: mol_type = other DNA

SEQ ID NO: 111275 - DNA, 120 bp, synthetic construct; identical to SEQ ID NO: 26499
  source 1..120: mol_type = other DNA

SEQ ID NO: 111276 - DNA, 120 bp, synthetic construct; identical to SEQ ID NO: 26500
  source 1..120: mol_type = other DNA

SEQ ID NO: 111277 - DNA, 120 bp, synthetic construct
  source 1..120: mol_type = other DNA
gtctacatttttttgtaatcctttaagccagtaatttataaacaattaaaaatatgaactggagctgggcgcagtggctcatgcctgtaatcccatcagtttgggaggctgaggtgggca

SEQ ID NO: 111278 - DNA, 120 bp, synthetic construct; identical to SEQ ID NO: 26501
  source 1..120: mol_type = other DNA

SEQ ID NO: 111279 - DNA, 120 bp, synthetic construct
  source 1..120: mol_type = other DNA
tattttttaattttttatagaaatgggggttttgccatgttgaccaggctggtcttgaactcctggcctcaaatgatcctcctgcctcagcctctcaaagtgttgggattataagcatga

SEQ ID NO: 111280 - DNA, 120 bp, synthetic construct; identical to SEQ ID NO: 22008
  source 1..120: mol_type = other DNA

SEQ ID NO: 111281 - DNA, 120 bp, synthetic construct
  source 1..120: mol_type = other DNA
agccattgggcgtgtgaccgtgcaggggtcgtgtgacagctgctggccagctaggaatgatttttacattttcttcctttttttttaattattatactttaagttctagggtacatgtgc

SEQ ID NO: 111282 - DNA, 120 bp, synthetic construct; identical to SEQ ID NO: 17156
  source 1..120: mol_type = other DNA

SEQ ID NO: 111283 - DNA, 120 bp, synthetic construct; identical to SEQ ID NO: 17157
  source 1..120: mol_type = other DNA

SEQ ID NO: 111284 - DNA, 120 bp, synthetic construct; identical to SEQ ID NO: 17158
  source 1..120: mol_type = other DNA

SEQ ID NO: 111285 - DNA, 120 bp, synthetic construct; identical to SEQ ID NO: 22033
  source 1..120: mol_type = other DNA

SEQ ID NO: 111286 - DNA, 120 bp, synthetic construct
  source 1..120: mol_type = other DNA
gtgctggagaggatgtggagaaacaggaacacttttacactgttggtgggactgtaaactagttcaaccattgtggaagtcagtgtggcgattcctcagggatctagaactagaaatacc

SEQ ID NO: 111287 - DNA, 120 bp, synthetic construct; identical to SEQ ID NO: 22034
  source 1..120: mol_type = other DNA

SEQ ID NO: 111288 - DNA, 120 bp, synthetic construct; identical to SEQ ID NO: 22035
  source 1..120: mol_type = other DNA

SEQ ID NO: 111289 - DNA, 120 bp, synthetic construct
  source 1..120: mol_type = other DNA
caatcagagcagaactgaaggaaatagagacacaaaaaatccttcaaaaaattaatgaatccaggagctggttttttgaaaagatcaacaaaattgatagaccgctagcaagactaataa

SEQ ID NO: 111290 - DNA, 120 bp, synthetic construct
  source 1..120: mol_type = other DNA
tcaggatacaaaatcaatgtacaaaaatcacaagcattcttatacaccaataacagacaaacagagagccaaatcatgagtgaactcccattcacaactgcttcaaagagaataaaatac

SEQ ID NO: 111291 - DNA, 120 bp, synthetic construct
  source 1..120: mol_type = other DNA
tctactcatctgacaaagggctaatatccagaatctacaatgaactcaaacaaatttacaagaaaaaaacaaacaaccccatcaaaaagtgggcaaaggatatgaacagacacttctcaa

SEQ ID NO: 111292 - DNA, 120 bp, synthetic construct
  source 1..120: mol_type = other DNA
tgtattttcaaagaaccaacttttgattcatttattctccatagtctatgtttctttttttggagacagggtctcattctgtcgcccaggctggagtgcagtggtgccatcatggctcat

SEQ ID NO: 111293 - DNA, 120 bp, synthetic construct
  source 1..120: mol_type = other DNA
tcgccattctaactggtgtgagatggtatctcattgtggttttgatttgatagtttaaaaaaatttttttgtagtgatgggatctcattctgttgcaaggctggttattttttcttgtat

SEQ ID NO: 111294 - DNA, 120 bp, synthetic construct; identical to SEQ ID NO: 11878
  source 1..120: mol_type = other DNA

SEQ ID NO: 111295 - DNA, 120 bp, synthetic construct; identical to SEQ ID NO: 11879
  source 1..120: mol_type = other DNA

SEQ ID NO: 111296 - DNA, 120 bp, synthetic construct
  source 1..120: mol_type = other DNA
ggcacaggctgcagtgaaccgaaataacgtggccgcactccagcctgggtaacagagcaagaccctgtcttaaaaaaaaaaaagaaagaaaagaaagaaagaaagaaaaagaaagaaaga

SEQ ID NO: 111297 - DNA, 120 bp, synthetic construct
  source 1..120: mol_type = other DNA
cctggccgcccatcgtctgggatgtggggagcgtctctgccccgctgccccgtctgagaggtgaagagcgcctctgcccggccgccccgtctgggaagtgaggagcccctctgcccggcc

SEQ ID NO: 111298 - DNA, 120 bp, synthetic construct
  source 1..120: mol_type = other DNA
ctcactaccaacggaacaaagctggaaagaaaatgactttgacgagttgagagaagaaggcttcagacgatcaaactactccgagctacaggaggaaattcaaaccaaaggcaaagaagt

SEQ ID NO: 111299 - DNA, 120 bp, synthetic construct
  source 1..120: mol_type = other DNA
actggaaaattggataaagagtcaagacccatcagtgtgctgtaatcaggaaacccatctcacgtgcagagacacacataggctcaaaataaaaggatggaggaagatctaccaagcaaa

SEQ ID NO: 111300 - DNA, 120 bp, synthetic construct
  source 1..120: mol_type = other DNA
gatcaacaaaattgatagactgctagcaagattaataaaaaagaaaagaaagaagaatcaaatagatgcaataaaaaatgataaaggggatatcaccactgatcccacagaaatacaaac

SEQ ID NO: 111301 - DNA, 120 bp, synthetic construct
  source 1..120: mol_type = other DNA
acagacaaaagagagccaaatcatgagtgaactcccattcacaattgcttcaaagagaataaaatacctaggaatccaacttacaagggatgtgaaggacctcttcaaggagaactacaa

SEQ ID NO: 111302 - DNA, 120 bp, synthetic construct
  source 1..120: mol_type = other DNA
aaaattgacaaatgggatctaactaaactaaagagcttctgcacagcaaaaggaactaccatcagagtgaacaggcaacctacaaaatgggagaaaattttcgcaacctactcatctgac

SEQ ID NO: 111303 - DNA, 120 bp, synthetic construct; identical to SEQ ID NO: 24535
  source 1..120: mol_type = other DNA

SEQ ID NO: 111304 - DNA, 120 bp, synthetic construct
  source 1..120: mol_type = other DNA
ctgcacccattaactcgtcatttagcattaggtgtatctcctaatgctatccctccccccaccccccaccccacaacagtcgccagtgtgtgatgttccccttcctgtggccatgtgttc

SEQ ID NO: 111305 - DNA, 120 bp, synthetic construct
  source 1..120: mol_type = other DNA
aaaaaaaaaaaaaagaattaccgtgactcctgtctagttagatcctcaatgcaactttgaaaaacaacgaaaaaagggccgggcatggtggctcatgcctgtaatcccagcactttggga

SEQ ID NO: 111306 - DNA, 120 bp, synthetic construct
  source 1..120: mol_type = other DNA
gaatcgccacactgacttccacaatggttgaactagtccacagtcccaccaacagtaaaactgttcctgtttctccacatcctctccagcacctgttgtttcctgactttttaatgatca

SEQ ID NO: 111307 - DNA, 120 bp, synthetic construct
  source 1..120: mol_type = other DNA
aagttgcctgtcagcttaaggagattttgggctgaggcaatggggttttctagatatacaatcatgtcatctgcaaacagggacaatttgacttcctcttttcctaattgaatacccttt

SEQ ID NO: 111308 - DNA, 120 bp, synthetic construct
  source 1..120: mol_type = other DNA
cttagagacctacaaagatacttagactcccacacaataataatgggagactttaacaccccactatcaacattagacagatcagtgagacagaaagttaacaaggatatccaggtattg

SEQ ID NO: 111309 - DNA, 120 bp, synthetic construct
  source 1..120: mol_type = other DNA
caggatattatccaggagaacttccccaatctagcaaggcaggccaacattcaaattcaggaaatacagagaacgccacaaagatactcgtcgagaagagcaactccaagacacgtaatt

SEQ ID NO: 111310 - DNA, 120 bp, synthetic construct
  source 1..120: mol_type = other DNA
cctggccatgtgaggtgtcagtctgcccctactggggggtccctcccagttaggctactcgagggtcagggacccacttgaggaggcagtgtgtccgttctcagatctccagctgcatgc

SEQ ID NO: 111311 - DNA, 120 bp, synthetic construct
  source 1..120: mol_type = other DNA
tttccagtttgatccatgtccctacaaaggacatgaactcttcattttttatggctgcatagtattccatggtggatatgtgccacattttcttaatccagtctatcattgttggacatt

SEQ ID NO: 111312 - DNA, 120 bp, synthetic construct
  source 1..120: mol_type = other DNA
gtttcagctttctacatatggctagccagttttcccagcaccatttattaaatagggaatcctttcccgaaaactggcacaagacagggatgccctctctcaccactcctattcaacata

SEQ ID NO: 111313 - DNA, 120 bp, synthetic construct
  source 1..120: mol_type = other DNA
gaataaccaagcaaaaggcagcagaatcctctgtagacttaaatgtctgcagcttcgaagagagtagtggttctcccagcacgcagctggaggtctgagaacagaaagactgcctcctca

SEQ ID NO: 111314 - DNA, 120 bp, synthetic construct; identical to SEQ ID NO: 111309
  source 1..120: mol_type = other DNA

SEQ ID NO: 111315 - DNA, 120 bp, synthetic construct
  source 1..120: mol_type = other DNA
gcccacaagagaaagcaggaaagatctaaaattgacaccctaacatcacaattaaaagaactagagaagcaagagcaaacacattcaaaagctagcagaaggcaagaaataactaagatc

SEQ ID NO: 111316 - DNA, 120 bp, synthetic construct
  source 1..120: mol_type = other DNA
aatggagcttgtagaactgaaaggtgctctgggtgagtcagtgagtgagtgttgagtgaatgtgaaggcctaggacattaccatacactactatcaactttataaacatagtacacttag

SEQ ID NO: 111317 - DNA, 120 bp, synthetic construct
  source 1..120: mol_type = other DNA
ttaatccagtctatcattgttggacatttgggttggttccaagtctttgctattgtgaataatgccgcaataaacatacgtgtgcatgtgtctttatagcagcatgatttatactcattt

SEQ ID NO: 111318 - DNA, 120 bp, synthetic construct
  source 1..120: mol_type = other DNA
gcaattctcctgtctcagcctcccgagtagctgggattacaggcatgcaccactacacctggctaatttttttgtatttttagtagagacagggtttcaccatgttggccaggctggtct

SEQ ID NO: 111319 - DNA, 120 bp, synthetic construct
  source 1..120: mol_type = other DNA
atcaccattctaactggtgtgacatggtatctcattgtggtttcgatttgcatttctctgatggccagtgatggtgagcattttttcatgtgtctcttggctgcataaatgtcttcttgt

SEQ ID NO: 111320 - DNA, 120 bp, synthetic construct; identical to SEQ ID NO: 111319
  source 1..120: mol_type = other DNA

SEQ ID NO: 111321 - DNA, 120 bp, synthetic construct; identical to SEQ ID NO: 31500
  source 1..120: mol_type = other DNA

SEQ ID NO: 111322 - DNA, 120 bp, synthetic construct
  source 1..120: mol_type = other DNA
cagggatctagaactagaaataccatttgacccagccatcccattactggatgtatacccaaagaactctaaatcatgctgctataaagtaatctttgaagaaactgtagtcaggcagta

SEQ ID NO: 111323 - DNA, 120 bp, synthetic construct
  source 1..120: mol_type = other DNA
attcaaaagctagcagaaggcaagaaataactaagatcagagcagaactgaagaagacagagacacaaaaaacccttcaaaaaattaatgaatccaggacctggttttttgaaaagatca

SEQ ID NO: 111324 - DNA, 120 bp, synthetic construct; identical to SEQ ID NO: 6372
  source 1..120: mol_type = other DNA

SEQ ID NO: 111325 - DNA, 120 bp, synthetic construct; identical to SEQ ID NO: 34024
  source 1..120: mol_type = other DNA

SEQ ID NO: 111326 - DNA, 120 bp, synthetic construct; identical to SEQ ID NO: 34023
  source 1..120: mol_type = other DNA

SEQ ID NO: 111327 - DNA, 120 bp, synthetic construct; identical to SEQ ID NO: 34022
  source 1..120: mol_type = other DNA

SEQ ID NO: 111328 - DNA, 120 bp, synthetic construct; identical to SEQ ID NO: 34023
  source 1..120: mol_type = other DNA

SEQ ID NO: 111329 - DNA, 120 bp, synthetic construct
  source 1..120: mol_type = other DNA
aaaccatttctcaaagaaatggttccttcttccccatggtccttatgtcagtttcctatttgctgctgtaacaaatcacacaaatctaatggcttaaaacaacacacatcgggccgggcg

SEQ ID NO: 111330 - DNA, 120 bp, synthetic construct; identical to SEQ ID NO: 27107
  source 1..120: mol_type = other DNA

SEQ ID NO: 111331 - DNA, 120 bp, synthetic construct; identical to SEQ ID NO: 27108
  source 1..120: mol_type = other DNA

SEQ ID NO: 111332 - DNA, 120 bp, synthetic construct; identical to SEQ ID NO: 22540
  source 1..120: mol_type = other DNA

SEQ ID NO: 111333 - DNA, 120 bp, synthetic construct
  source 1..120: mol_type = other DNA
cgcttgaacctgggaggtcgagtttgcagtgagcagagattgggccattgtgctacagcctggctggcagagcgagactctgtctccaaaaaaaaaaaaaaaaaaaaaaaatatatatat

SEQ ID NO: 111334 - DNA, 120 bp, synthetic construct; identical to SEQ ID NO: 18812
  source 1..120: mol_type = other DNA

SEQ ID NO: 111335 - DNA, 120 bp, synthetic construct; identical to SEQ ID NO: 4302
  source 1..120: mol_type = other DNA

SEQ ID NO: 111336 - DNA, 120 bp, synthetic construct
  source 1..120: mol_type = other DNA
attattttatgttccaggatacatgtgcaggatgtggaagtttgttacataaacatgtacgatggtagtctgctgcacccatcaacccattacctaggtattaggcccagcatgcattag

SEQ ID NO: 111337 - DNA, 120 bp, synthetic construct
  source 1..120: mol_type = other DNA
taaaatctctgtattactttaaaattttaactttgatcttcacataaaatccaaaattttatggccaggcccggtggctcatgcctgtaatcctagcactttgggaggccaaggcggacg

SEQ ID NO: 111338 - DNA, 120 bp, synthetic construct; identical to SEQ ID NO: 17167
  source 1..120: mol_type = other DNA

SEQ ID NO: 111339 - DNA, 120 bp, synthetic construct; identical to SEQ ID NO: 17168
  source 1..120: mol_type = other DNA

SEQ ID NO: 111340 - DNA, 120 bp, synthetic construct; identical to SEQ ID NO: 17169
  source 1..120: mol_type = other DNA

SEQ ID NO: 111341 - DNA, 120 bp, synthetic construct; identical to SEQ ID NO: 17170
  source 1..120: mol_type = other DNA

SEQ ID NO: 111342 - DNA, 120 bp, synthetic construct; identical to SEQ ID NO: 17171
  source 1..120: mol_type = other DNA

SEQ ID NO: 111343 - DNA, 120 bp, synthetic construct
  source 1..120: mol_type = other DNA
tgatgcggtttgaaccagagtggcaacaatggcgattgtgagaggcagttggattacatatgtattttgaaggtagagctatcagaatttcctcataaattccaggaggggtatgaaaga

SEQ ID NO: 111344 - DNA, 120 bp, synthetic construct
  source 1..120: mol_type = other DNA
catccaccaatccatccacccacccatccaccaatccatccatccatccaccctcccacccacccaccaatccatccatccatccatccatccacccacccacccatccaccaatccatc

SEQ ID NO: 111345 - DNA, 120 bp, synthetic construct
  source 1..120: mol_type = other DNA
tatcattaagttagaaggcaataaagacaaaagcaacaaaatatgtttggaaattaagaaatacactcttagccaggcgtggtggctcacgcctgtaatcccagcactttgggaggtcag

SEQ ID NO: 111346 - DNA, 120 bp, synthetic construct
  source 1..120: mol_type = other DNA
agagtgtgatattccccttcctgtgtccatgtgatctcattgttcaattcccgcctatgagtgagaatatgcggtgtttggttttttgttcttgcgatagtttactgagaatgatggttt

SEQ ID NO: 111347 - DNA, 120 bp, synthetic construct; identical to SEQ ID NO: 52122
  source 1..120: mol_type = other DNA

SEQ ID NO: 111348 - DNA, 120 bp, synthetic construct
  source 1..120: mol_type = other DNA
tgatattggctgtgggtttgtcatagatagctcttattattttgaaatacgtcccatcaatacctaatttattgacagtttttagcatgaagcgttgttgaattttgtcaaaggcttttt

SEQ ID NO: 111349 - DNA, 120 bp, synthetic construct
  source 1..120: mol_type = other DNA
tgaatgcgtcccagagattctggtatgtggtgtctttgttctcgttggtttcaaagaacatctttatttctgccttcattttgttatgtacccagtagtcattcaggagcaggttgttca

SEQ ID NO: 111350 - DNA, 120 bp, synthetic construct
  source 1..120: mol_type = other DNA
atggtctttacattttggcatgattttgcagcggctggtatcggttgttcctttccatgtttagcgcttccttcaggagctcttttagggcaggcctggtggtgacaaaatctctcagca

SEQ ID NO: 111351 - DNA, 120 bp, synthetic construct
  source 1..120: mol_type = other DNA
gttccgttgctggtgaggaactgcgttcctttggaggaggagaggcgctctgcgttttagagtttccagtttttctgttctgttttttccccatctttgtggttttatctacttttggtc

SEQ ID NO: 111352 - DNA, 120 bp, synthetic construct
  source 1..120: mol_type = other DNA
gctcacgctgggagctgtagaccggagctgttcctattcggccatcttgataaatgactatttcttaaaatttactttagagaggaagataaaaatgcccattatctgcagatgatatca

SEQ ID NO: 111353 - DNA, 120 bp, synthetic construct; identical to SEQ ID NO: 27035
  source 1..120: mol_type = other DNA

SEQ ID NO: 111354 - DNA, 120 bp, synthetic construct
  source 1..120: mol_type = other DNA
acctctgagccacactgtgatgtcccttagctgctgctcagggacaaggaggcaacaaaccaaggtgcacagggcgccagagggcaaagtagtcagttgtggttatcacagaaagccaat

SEQ ID NO: 111355 - DNA, 120 bp, synthetic construct; identical to SEQ ID NO: 27036
  source 1..120: mol_type = other DNA

SEQ ID NO: 111356 - DNA, 120 bp, synthetic construct; identical to SEQ ID NO: 27037
  source 1..120: mol_type = other DNA

SEQ ID NO: 111357 - DNA, 120 bp, synthetic construct; identical to SEQ ID NO: 27038
  source 1..120: mol_type = other DNA

SEQ ID NO: 111358 - DNA, 120 bp, synthetic construct; identical to SEQ ID NO: 27039
  source 1..120: mol_type = other DNA

SEQ ID NO: 111359 - DNA, 120 bp, synthetic construct; identical to SEQ ID NO: 27040
  source 1..120: mol_type = other DNA

SEQ ID NO: 111360 - DNA, 120 bp, synthetic construct
  source 1..120: mol_type = other DNA
tggctagtatttcagtttttttggaaagtttttctatttttttatctttattagtcagtttttatgttttattttcttttattatactttaaggtttagggtacatgtgcacaacgtgca

SEQ ID NO: 111361 - DNA, 120 bp, synthetic construct
  source 1..120: mol_type = other DNA
gcagattgcaaaaattttctcccattctgtaggttgcctgttcactctgatggtagttaattttgctgtgcagaagctctccagtttaattagatcccatttgtcaattttggcttttgt

SEQ ID NO: 111362 - DNA, 120 bp, synthetic construct
  source 1..120: mol_type = other DNA
ctattaattattgcctcaatttcagagcctgttattggtctattcagagattcaacttcttcctggtttaggcttgggagtttgtatgtgtctaggaatttatccatttcttctaaattt

SEQ ID NO: 111363 - DNA, 120 bp, synthetic construct
  source 1..120: mol_type = other DNA
attactgggtatatacccaaaggattataaaccatgctgctataaaggcacacgctcacgtatggttattgcggcactattcacaatagcaaagacttggaaccaacccaaatgtgcaac

SEQ ID NO: 111364 - DNA, 120 bp, synthetic construct
  source 1..120: mol_type = other DNA
cccaagctggccttgaactcctggcttcccaccaccgtgccccaatgggctgggattacaggcatgaacactccatgcctgactgaaaaaaaaaatacatatatatatattttatatata

SEQ ID NO: 111365 - DNA, 120 bp, synthetic construct; identical to SEQ ID NO: 25944
  source 1..120: mol_type = other DNA

SEQ ID NO: 111366 - DNA, 120 bp, synthetic construct
  source 1..120: mol_type = other DNA
ataaatatacgtgtgcatgtgtcttcatagcagcatgatttatagtcctttgggtatatacccagtaatgggatggctgggtcaaatggtatttctagttctagatccctgaggaattgc

SEQ ID NO: 111367 - DNA, 120 bp, synthetic construct; identical to SEQ ID NO: 25945
  source 1..120: mol_type = other DNA

SEQ ID NO: 111368 - DNA, 120 bp, synthetic construct
  source 1..120: mol_type = other DNA
ccacctctgggggcagggcacagacaaacaaaaagacagcagtaacctctgcagacttaagtgtccctgtctgacagctttgaagagagcagtagttctcccagcacgcagatggagatc

SEQ ID NO: 111369 - DNA, 120 bp, synthetic construct; identical to SEQ ID NO: 43774
  source 1..120: mol_type = other DNA

SEQ ID NO: 111370 - DNA, 120 bp, synthetic construct
  source 1..120: mol_type = other DNA
cattacataatggtaaagggatcaattcaacaagaggagctaactatcctaaatatttatgcacccaatacaggagcacccagattcataaagcaagtcctcagtgacctacaaagagac

SEQ ID NO: 111371 - DNA, 120 bp, synthetic construct
  source 1..120: mol_type = other DNA
gttgaatctctgaatagaccaataacaggctctgaaattgtggcaataatcaatagtttaccaaccaaaaagagtccaggaccagatggattcacagccgaattctaccagaggtacatg

SEQ ID NO: 111372 - DNA, 120 bp, synthetic construct
  source 1..120: mol_type = other DNA
aaattgtccctgtttgcagacgacatgattgtatatctagaaaaccccatcgtctcagcccaaaatctccttaagctgataagcaacttcagcaaagtctcaggatacaaaatcaatgta

SEQ ID NO: 111373 - DNA, 120 bp, synthetic construct
  source 1..120: mol_type = other DNA
gcaacaaaagacaaaattgacaaatgggatctaattaaactaaagagcttctgcacagcaaaagaaactaccatcagagtgaacaggcaacctacatcatgggagaaaattttcgcaacc

SEQ ID NO: 111374 - DNA, 120 bp, synthetic construct; identical to SEQ ID NO: 25946
  source 1..120: mol_type = other DNA

SEQ ID NO: 111375 - DNA, 120 bp, synthetic construct
  source 1..120: mol_type = other DNA
tacatcaccatcatcaaagaccaaaagtagataaaaccacaaagatggggaaaagatagagcagaaaaactggaaactctaaaaagcagagcgcctctcctcctgcaaaggaacgcagtt

SEQ ID NO: 111376 - DNA, 120 bp, synthetic construct; identical to SEQ ID NO: 25947
  source 1..120: mol_type = other DNA

SEQ ID NO: 111377 - DNA, 120 bp, synthetic construct
  source 1..120: mol_type = other DNA
tgggcatttttttcatatatctgttggccattaatatgtcttcttttaagaaatatctattcaacttgtagagtttctgctgagagatccactgttagtctgatgggcttccctttgtgg

SEQ ID NO: 111378 - DNA, 120 bp, synthetic construct
  source 1..120: mol_type = other DNA
tggtctttgatgatggtgatgtacagatgggtttttagtgtggatgtcctttctgttcgttagttttccttctaacagacaggacccttagctgcacgtctgttggagtttcctagaggt

SEQ ID NO: 111379 - DNA, 120 bp, synthetic construct
  source 1..120: mol_type = other DNA
tttaacaccccgctgtcaacattagacagatcaatgagacagaaagttaacaagaatacccaggaattgaactcagctctgcaccaagaggacctaatagacatctaaagaactctccac

SEQ ID NO: 111380 - DNA, 120 bp, synthetic construct
  source 1..120: mol_type = other DNA
tgaggccagcatcatcctgataccaaagctgggcagagacacaaccaaaaaagagaattttagaccaatatccttgatgaacattgatgcaaaaatcctcaataaaatactggcaaactg

SEQ ID NO: 111381 - DNA, 120 bp, synthetic construct
  source 1..120: mol_type = other DNA
catcgtcaaggcaatcctaagtcaaaagaacaaagctggaggcatcacactacctgacttcaaacgatactacaaggctacagtaaccaaaacagcatggtactggtaccaaaacagaga

SEQ ID NO: 111382 - DNA, 120 bp, synthetic construct
  source 1..120: mol_type = other DNA
aggactataaatcatgctgctatgaagacacatgcacatgtatgtttattgtggcactattcacaatatgaaagacttggaaccaacccaaatgtccaacaatgatagactggattaagg

SEQ ID NO: 111383 - DNA, 120 bp, synthetic construct
  source 1..120: mol_type = other DNA
gaaaaaaatttagatgaatgtataactagaataaccaatacagagaagtacttaaaggagctgatggagctgaaagccaaggctcgagaactacgtgaagaatgcagaagcctcaggagc

SEQ ID NO: 111384 - DNA, 120 bp, synthetic construct
  source 1..120: mol_type = other DNA
ctttacagacaagcaaatgctcagcgattttgtcaccaccaggcctgccctaaaagagctcctcaaggaagcactaaacatggaaaggaacaactggtaccagccactgcaaaatcatgc

SEQ ID NO: 111385 - DNA, 120 bp, synthetic construct
  source 1..120: mol_type = other DNA
tggaaccaaaaaagagcccgcatcgccaagtcaatcctaagccaaatgaacaaagctggaggcatcactctacctgacttcaaactatactacaaggctacagtaaccaaaacagcatgg

SEQ ID NO: 111386 - DNA, 120 bp, synthetic construct
  source 1..120: mol_type = other DNA
tccttgcgatagtttactgagaatgatgatttccaatttcatccatgtcgctataaaggacatgaactcatcattttttatggctgcatagtattccatggtgtatatgtgccacatttt

SEQ ID NO: 111387 - DNA, 120 bp, synthetic construct
  source 1..120: mol_type = other DNA
ttctcacttatttgtgggagataaaaattaaaacaattgaactatggaaagagagagtagaaggatggttactagatgctgggaagcatagtggggtgggggaagcagtggagatggtta

SEQ ID NO: 111388 - DNA, 120 bp, synthetic construct
  source 1..120: mol_type = other DNA
gagacacaaccaaaaaagagaattttagaccaatatccctgatgaacattgatgcaaaaattctcaataaaataatggcaaactgaatccagcagcacatcaaaaagcttatccaccatg

SEQ ID NO: 111389 - DNA, 120 bp, synthetic construct
  source 1..120: mol_type = other DNA
ggaatctcttggtctgcggattgcaaaaactatgggaaaagcgtagtatctgggctggatagcacagtcctgtgtctggaattggtgggttcttggtctcactgacttcaagaatgaagc

SEQ ID NO: 111390 - DNA, 120 bp, synthetic construct
  source 1..120: mol_type = other DNA
gtttacaatccctgagttagatataaagactctccacgtccccaccagactcaggagcccagctgacttcacctagtggatcccgcaccggggctgcaggtggagctgcctgccagtccc

SEQ ID NO: 111391 - DNA, 120 bp, synthetic construct; identical to SEQ ID NO: 11699
  source 1..120: mol_type = other DNA

SEQ ID NO: 111392 - DNA, 120 bp, synthetic construct; identical to SEQ ID NO: 11700
  source 1..120: mol_type = other DNA

SEQ ID NO: 111393 - DNA, 120 bp, synthetic construct
  source 1..120: mol_type = other DNA
ctttgtttgagttcattgtagattctggatattagccctttgtcagatgagtaggttgcaaaaattttctcccattctgtaggttgcctgttcactctgatggtagtttcttttgctctg

SEQ ID NO: 111394 - DNA, 120 bp, synthetic construct
  source 1..120: mol_type = other DNA
gtttgtaactcaaaggataaatgcttgagggaatggatactccaatccccataatgtgcttattacacattgcatggatgacccaaatcatctcatgtacctcataaatatatacaccca

SEQ ID NO: 111395 - DNA, 120 bp, synthetic construct
  source 1..120: mol_type = other DNA
tagttctagatccctgaggaatcaccacactgacttccacaacggttgaactagtttacattctcaccaatagtgtgaaagtgttcctatttctccacgtcctctccagcacctgttgtt

SEQ ID NO: 111396 - DNA, 120 bp, synthetic construct
  source 1..120: mol_type = other DNA
ctagattttctagtttatttgcgtagaggtgtttatagtattctctgatggtagtttgtatttctgtgggattggtactgatatcccctttgtcattttttattgcatctatttgattgt

SEQ ID NO: 111397 - DNA, 120 bp, synthetic construct
  source 1..120: mol_type = other DNA
gtttaaagtctgttttatccgatactagggttgcaacccctgcctttttttgttttccatttgcttggtagatcttcctccatccctttattttgagcctatgtgtgtctctgcatgtga

SEQ ID NO: 111398 - DNA, 120 bp, synthetic construct
  source 1..120: mol_type = other DNA
accaatcagatgtagatttggtcttttcacacagtcccatatttcttggagggtttgttcgtttctttttattcttttttctctaaacttctcttctcacttcatttcattcatttcgtc

SEQ ID NO: 111399 - DNA, 120 bp, synthetic construct; identical to SEQ ID NO: 11701
  source 1..120: mol_type = other DNA

SEQ ID NO: 111400 - DNA, 120 bp, synthetic construct; identical to SEQ ID NO: 11702
  source 1..120: mol_type = other DNA

SEQ ID NO: 111401 - DNA, 120 bp, synthetic construct; identical to SEQ ID NO: 11703
  source 1..120: mol_type = other DNA

SEQ ID NO: 111402 - DNA, 120 bp, synthetic construct
  source 1..120: mol_type = other DNA
ttctttttattatactttaagttttagggttcatgtgcacaacgtgcaggttagttacatatgtatatatgtgccatgttggtgtgctgcacccattaactcatcatttaacattaggaa

SEQ ID NO: 111403 - DNA, 120 bp, synthetic construct
  source 1..120: mol_type = other DNA
tctcccattctgtaggttgcctgttcactctgatggtagtttcttttgctgtccagaagctctttagtttaattagatcccatttgtcaattttgtctttgttgccattgcttttggtgt

SEQ ID NO: 111404 - DNA, 120 bp, synthetic construct
  source 1..120: mol_type = other DNA
ttaccaaagaatggggaaaaaacttttttcaagttggaaggtaccagagtgattagctggtctaacctactcattttacagattagaaaactgagatatggccgggcgcggtggctcacg

SEQ ID NO: 111405 - DNA, 120 bp, synthetic construct; identical to SEQ ID NO: 19385
  source 1..120: mol_type = other DNA

SEQ ID NO: 111406 - DNA, 120 bp, synthetic construct; identical to SEQ ID NO: 19386
  source 1..120: mol_type = other DNA

SEQ ID NO: 111407 - DNA, 120 bp, synthetic construct; identical to SEQ ID NO: 19387
  source 1..120: mol_type = other DNA

SEQ ID NO: 111408 - DNA, 120 bp, synthetic construct; identical to SEQ ID NO: 19388
  source 1..120: mol_type = other DNA

SEQ ID NO: 111409 - DNA, 120 bp, synthetic construct; identical to SEQ ID NO: 19389
  source 1..120: mol_type = other DNA

SEQ ID NO: 111410 - DNA, 120 bp, synthetic construct; identical to SEQ ID NO: 19390
  source 1..120: mol_type = other DNA

SEQ ID NO: 111411 - DNA, 120 bp, synthetic construct; identical to SEQ ID NO: 19391
  source 1..120: mol_type = other DNA

SEQ ID NO: 111412 - DNA, 120 bp, synthetic construct; identical to SEQ ID NO: 19392
  source 1..120: mol_type = other DNA

SEQ ID NO: 111413 - DNA, 120 bp, synthetic construct
  source 1..120: mol_type = other DNA
agatggtggctggtactggggtgaaactcatggtagctgtgagaagttatctggtcttagatacattaatatttggaagatgtatctacaggatttcctgacagagtgaacacagagcat

SEQ ID NO: 111414 - DNA, 120 bp, synthetic construct
  source 1..120: mol_type = other DNA
catcatctaatccaccaagggcctgaacagaacaaaaaggcggaggaagggcaaattctctctctctctctctctccttgaggtgaaacattcaacttcggtccttagacattcccactc

SEQ ID NO: 111415 - DNA, 120 bp, synthetic construct
  source 1..120: mol_type = other DNA
tttgtagggacatggatgaaattggaaatcatcattctcagtgaactactgcaaggacaaaaaaccaaacaccgcatgttctcactcatagatgggaattgaacaatgagaacacatgga

SEQ ID NO: 111416 - DNA, 120 bp, synthetic construct; identical to SEQ ID NO: 13285
  source 1..120: mol_type = other DNA

SEQ ID NO: 111417 - DNA, 120 bp, synthetic construct; identical to SEQ ID NO: 20570
  source 1..120: mol_type = other DNA

SEQ ID NO: 111418 - DNA, 120 bp, synthetic construct
  source 1..120: mol_type = other DNA
ccggccgccatcccatctaggaagtgaggagcgtctctgcccggcagcccatcgtctgagatgtggggagcgcctctgccccgccgccccgtccgggaggtgaggggcgcctctgcccgg

SEQ ID NO: 111419 - DNA, 120 bp, synthetic construct; identical to SEQ ID NO: 20571
  source 1..120: mol_type = other DNA

SEQ ID NO: 111420 - DNA, 120 bp, synthetic construct; identical to SEQ ID NO: 20572
  source 1..120: mol_type = other DNA

SEQ ID NO: 111421 - DNA, 120 bp, synthetic construct; identical to SEQ ID NO: 4584
  source 1..120: mol_type = other DNA

SEQ ID NO: 111422 - DNA, 120 bp, synthetic construct
  source 1..120: mol_type = other DNA
ggccgcccttggctgcgccgctgtcgcagaggaaggcggccgccagtagcagagcccagcacgttgcgggtgcccagttcatcttcgtggggctaaacctgcgggaagagagggaaaggg

SEQ ID NO: 111423 - DNA, 120 bp, synthetic construct
  source 1..120: mol_type = other DNA
cgggcagtcgcggaggcgcatccctggtgagccggtgggaggggaaaaggatgtcgcgtcccccatccttgcggcctcccgtcctccgtcaccagccccctccgtctcctgcatcacaag

SEQ ID NO: 111424 - DNA, 120 bp, synthetic construct
  source 1..120: mol_type = other DNA
catcataggtctgcacactcgggttgagtcccccttccccatcacacacaggacagccagcagtgagctgcttaccccaaggagtcaagggggttcttgggcaacccctggtgctggagc

SEQ ID NO: 111425 - DNA, 120 bp, synthetic construct
  source 1..120: mol_type = other DNA
aatgggaaaaggaagggggaggcggtgctccagctgattttatgattccagaagccttctatcttaagatgtataggatgtatcttagggtgtataagagaagcgcaagagaaacattta

SEQ ID NO: 111426 - DNA, 120 bp, synthetic construct
  source 1..120: mol_type = other DNA
tctaccagaacaaaaaatagctttaaaaaatataagataaaaagccattcatagtctggcacgatggctcatgcctgtaatcctagcactttgggaggccgagtcgggcagatcacctga

SEQ ID NO: 111427 - DNA, 120 bp, synthetic construct; identical to SEQ ID NO: 35695
  source 1..120: mol_type = other DNA

SEQ ID NO: 111428 - DNA, 120 bp, synthetic construct
  source 1..120: mol_type = other DNA
gataaacaaaatgtggcatatacacacaatggaatactattcagccataaaaaggaatgaagttctttttttttttttttttattatactctaagttttagggtacatgtgcaggttagt

SEQ ID NO: 111429 - DNA, 120 bp, synthetic construct; identical to SEQ ID NO: 70191
  source 1..120: mol_type = other DNA

SEQ ID NO: 111430 - DNA, 120 bp, synthetic construct; identical to SEQ ID NO: 91814
  source 1..120: mol_type = other DNA

SEQ ID NO: 111431 - DNA, 120 bp, synthetic construct
  source 1..120: mol_type = other DNA
tacacactgctttgaatgtgtcccagagattctggtatgtggtgtctttgttctcgttggggaaacccttaatctcataattgaacagatattgttctggtcgaccattctccatgatag

SEQ ID NO: 111432 - DNA, 120 bp, synthetic construct; identical to SEQ ID NO: 35693
  source 1..120: mol_type = other DNA

SEQ ID NO: 111433 - DNA, 120 bp, synthetic construct
  source 1..120: mol_type = other DNA
gtataagcaagggatccagtttcagctttctacatatggctagcaagttttcccagcaccatttattaaatagggaatcctttccccattgcttgtttttctcaggtttgtcaaagatca

SEQ ID NO: 111434 - DNA, 120 bp, synthetic construct
  source 1..120: mol_type = other DNA
atgatagactggattaagaaaatgtggcacatatacaccatggaatactatgcagccataaaaaatgatgagttcatgtcctttgtagggacatggatgaaattggaaatcatcattcgt

SEQ ID NO: 111435 - DNA, 120 bp, synthetic construct
  source 1..120: mol_type = other DNA
tctagttccagatccctgaggaatcgccacactgatttccacaatggttgaactagtttacagtcccaccaacagtgtaaaagtgttcctatttctccacatcctctccagcacctgttg

SEQ ID NO: 111436 - DNA, 120 bp, synthetic construct
  source 1..120: mol_type = other DNA
tgtgggctcttttttggttccatatgaactttaaagtagttttttccaattctgtgaagaaagtcattggtagcttgatggggatggcattgaatctataaataaccttgggcagtatgg

SEQ ID NO: 111437 - DNA, 120 bp, synthetic construct
  source 1..120: mol_type = other DNA
gctgaggagtgttttacttccaagtatgtggtcaattttggaataggtgtggtgtggtactgaaaagaatgtatattctgttgatttggggtggagagttctgtagatgtctattaggtc

SEQ ID NO: 111438 - DNA, 120 bp, synthetic construct
  source 1..120: mol_type = other DNA
caattatgtgtcttggagttgctcttcttgaggagtatctttgtggcgttctctatttcctgaattcgaatgttggcctgccttgctagattggggaagttctcctggataatatcctgc

SEQ ID NO: 111439 - DNA, 120 bp, synthetic construct
  source 1..120: mol_type = other DNA
gaaccaaaaaagagcctacattgccaagtcaatcctaaggcaaaagaacaaagctggaggcatcacgctacctgacttcaaactatactacaaggctacagtaaccaaaacagcatggta

SEQ ID NO: 111440 - DNA, 120 bp, synthetic construct
  source 1..120: mol_type = other DNA
tggtagactggattaagaaaatgtggcacatatacaccatggaattctatacagccataaaaatgatgagttcatgtcctttgtagggacatggatgaaactggaaaccatcattctcag

SEQ ID NO: 111441 - DNA, 120 bp, synthetic construct; identical to SEQ ID NO: 33023
  source 1..120: mol_type = other DNA

SEQ ID NO: 111442 - DNA, 120 bp, synthetic construct; identical to SEQ ID NO: 14403
  source 1..120: mol_type = other DNA

SEQ ID NO: 111443 - DNA, 120 bp, synthetic construct; identical to SEQ ID NO: 20540
  source 1..120: mol_type = other DNA

SEQ ID NO: 111444 - DNA, 120 bp, synthetic construct
  source 1..120: mol_type = other DNA
ctggcaaccaccccgtctgagaagtgaggagcctctccgcccggcagccgccccgtcccggaggtgaggggcgcctctgcccggccgcccctactgggaagtgaggagcccctctgcccg

SEQ ID NO: 111445 - DNA, 120 bp, synthetic construct; identical to SEQ ID NO: 20541
  source 1..120: mol_type = other DNA

SEQ ID NO: 111446 - DNA, 120 bp, synthetic construct; identical to SEQ ID NO: 19770
  source 1..120: mol_type = other DNA

SEQ ID NO: 111447 - DNA, 120 bp, synthetic construct; identical to SEQ ID NO: 32748
  source 1..120: mol_type = other DNA

SEQ ID NO: 111448 - DNA, 120 bp, synthetic construct
  source 1..120: mol_type = other DNA
tgttcctatttctccacatcctctccagcacctgttgtttcctgacttttgaatgactgccattctaactggtgtgagatggtatctcattatggttttgatttgcatttctctcatggc

SEQ ID NO: 111449 - DNA, 120 bp, synthetic construct
  source 1..120: mol_type = other DNA
taggtatttcattctctttgaaggaattgtgaatgggagttcactcatgatttggctctctgtttgtctgttattggtgtataagaatgcttgtgatttttgtacattgattttgtatcc

SEQ ID NO: 111450 - DNA, 120 bp, synthetic construct
  source 1..120: mol_type = other DNA
tggtctattcagagattcaacttcttcctggtttagtcttggaagggtgtatgtgtcgaggaatttatccatttcttctagattttctagtttatttgcgtagaggtgtttgtagtattc

SEQ ID NO: 111451 - DNA, 120 bp, synthetic construct
  source 1..120: mol_type = other DNA
agtctctttgtaggtcactcaggacttgctttatgattctgggtgctcctgtattgggtgcatatatatttaggatagttagctcttcttgttgaattgatccctttaccattatgtaat

SEQ ID NO: 111452 - DNA, 120 bp, synthetic construct
  source 1..120: mol_type = other DNA
ggttccattctccccgtcactttcaggtgcaccaatcagacgtagatttggtcttttcacatagtcccatatttcttggaggctttgtttgtttctttttattcttttttctctaaactt

SEQ ID NO: 111453 - DNA, 120 bp, synthetic construct
  source 1..120: mol_type = other DNA
ccagctgcgtgctgggagaaccactgctctcttcaaagctgttagacagggacatttaagtctgcagaggttactgctgtctttttgtttgtctgtgccctgcccccagaggtggagcct

SEQ ID NO: 111454 - DNA, 120 bp, synthetic construct; identical to SEQ ID NO: 32749
  source 1..120: mol_type = other DNA

SEQ ID NO: 111455 - DNA, 120 bp, synthetic construct; identical to SEQ ID NO: 32750
  source 1..120: mol_type = other DNA

SEQ ID NO: 111456 - DNA, 120 bp, synthetic construct; identical to SEQ ID NO: 32751
  source 1..120: mol_type = other DNA

SEQ ID NO: 111457 - DNA, 120 bp, synthetic construct; identical to SEQ ID NO: 32752
  source 1..120: mol_type = other DNA

SEQ ID NO: 111458 - DNA, 120 bp, synthetic construct; identical to SEQ ID NO: 14512
  source 1..120: mol_type = other DNA

SEQ ID NO: 111459 - DNA, 120 bp, synthetic construct
  source 1..120: mol_type = other DNA
ctatcccaaaacctataagaactaatgataattcccgccctttgctgactccttttttggactcagcccactagcacccaggtgaaataaacagccttgttgctcacacaaagcctgttt

SEQ ID NO: 111460 - DNA, 120 bp, synthetic construct; identical to SEQ ID NO: 14513
  source 1..120: mol_type = other DNA

SEQ ID NO: 111461 - DNA, 120 bp, synthetic construct; identical to SEQ ID NO: 22351
  source 1..120: mol_type = other DNA

SEQ ID NO: 111462 - DNA, 120 bp, synthetic construct
  source 1..120: mol_type = other DNA
tggcctatgtgtctgtttctatgccagtaccatgctgttttgattactgtacctttgtagtatatttcaaaatcaggtagtgcattctcaattattacagaaaaagcctgtgggtgttaa

SEQ ID NO: 111463 - DNA, 120 bp, synthetic construct; identical to SEQ ID NO: 14285
  source 1..120: mol_type = other DNA

SEQ ID NO: 111464 - DNA, 120 bp, synthetic construct
  source 1..120: mol_type = other DNA
ctgcctcccaggttcaagcgattctcctgcttcagccccccaagtagctgggattacaggtgcccgccaccacacccaggtaatttttgtatttttagtagagatggggtttcaccatgt

SEQ ID NO: 111465 - DNA, 120 bp, synthetic construct; identical to SEQ ID NO: 31763
  source 1..120: mol_type = other DNA

SEQ ID NO: 111466 - DNA, 120 bp, synthetic construct; identical to SEQ ID NO: 15281
  source 1..120: mol_type = other DNA

SEQ ID NO: 111467 - DNA, 120 bp, synthetic construct
  source 1..120: mol_type = other DNA
ctccttgaactcttgggctcaagagttctgagccgatctaccttagcctcctgagtagctgggactacaggcacacactaccatgcccagctaatcttttaaaaaattactatgaaatgt

SEQ ID NO: 111468 - DNA, 120 bp, synthetic construct; identical to SEQ ID NO: 27369
  source 1..120: mol_type = other DNA

SEQ ID NO: 111469 - DNA, 120 bp, synthetic construct
  source 1..120: mol_type = other DNA
ggcccgttctcaatgagctgttgggtacacctcccagacggggtggtggccgggcagaggggctcctcacttcccagtaggggcggccgggcagaggcgcccctcacatcccggacgggg

SEQ ID NO: 111470 - DNA, 120 bp, synthetic construct
  source 1..120: mol_type = other DNA
cctccagctccgtccaagttgctgcaaaaggtattatttcgttcctttttgtggctgagtagtattccatggtgtatatataccacattttctttatccactcattgcttgatgggcagt

SEQ ID NO: 111471 - DNA, 120 bp, synthetic construct
  source 1..120: mol_type = other DNA
gtacagtgtgtatatagtgtgtgtgtacacacatagtgtgtatatagtgtgtgtacacacatagtgtctgtagtgtgtgtacacacatagtgtgtatatagtgtgtgtgtacacatagtg

SEQ ID NO: 111472 - DNA, 120 bp, synthetic construct
  source 1..120: mol_type = other DNA
atatggaggagtgtgtatatatagtgtgtatgtgtatatgtatatacacacgtatatacacatgcatatagtctgtatacgtatatataggttaaaaaacaaaaatatacataaaatatt

SEQ ID NO: 111473 - DNA, 120 bp, synthetic construct; identical to SEQ ID NO: 22486
  source 1..120: mol_type = other DNA

SEQ ID NO: 111474 - DNA, 120 bp, synthetic construct
  source 1..120: mol_type = other DNA
cttcctgagtagctggaactcttgggcaccaccatgaccggttacattttttttctattttttttttgtagcgatgggggtctcactttgttgcccaggctggtctcaaactcttggcct

SEQ ID NO: 111475 - DNA, 120 bp, synthetic construct; identical to SEQ ID NO: 17993
  source 1..120: mol_type = other DNA

SEQ ID NO: 111476 - DNA, 120 bp, synthetic construct
  source 1..120: mol_type = other DNA
agacacatgcatgtgcatgctcattgcagcacgtattcacaacagtcaagacatgaactcaacctaaatatccatcaatggtggactggataaagaaaatgtggcatatatacaccatgg

SEQ ID NO: 111477 - DNA, 120 bp, synthetic construct; identical to SEQ ID NO: 20446
  source 1..120: mol_type = other DNA

SEQ ID NO: 111478 - DNA, 120 bp, synthetic construct
  source 1..120: mol_type = other DNA
agatcacatggacacaggaaggggaatatcacactctgggaactgtggtggtctctgtgttggtttttcttatagcattgggagatatacctaatgctagatgacacgttagtgggtgca

SEQ ID NO: 111479 - DNA, 120 bp, synthetic construct
  source 1..120: mol_type = other DNA
gggtcacttctccaattagccatctgcccatcaatccctgcatgtgcttctgaaagccccaatgggaacgagaggcacccaggcctttcccttcctgcaacccccacagcaacaacccat

SEQ ID NO: 111480 - DNA, 120 bp, synthetic construct
  source 1..120: mol_type = other DNA
aggtccaggtgggaggtgggcaggggccggcccagtgcccgcagggccagccacagctgctgggcagcctgggcaaagtctccctgtggatgagggttttccaggtgagaaaagtgaggt

SEQ ID NO: 111481 - DNA, 120 bp, synthetic construct
  source 1..120: mol_type = other DNA
ctcctgcctggagctgaccgggtcactcaggatgtttgtgtccagctaggtgaatgttgggcagaaggtaactcccaacccggctgagacaagggaactttatcttggagcactagggag

SEQ ID NO: 111482 - DNA, 120 bp, synthetic construct; identical to SEQ ID NO: 23838
  source 1..120: mol_type = other DNA

SEQ ID NO: 111483 - DNA, 120 bp, synthetic construct; identical to SEQ ID NO: 5536
  source 1..120: mol_type = other DNA

SEQ ID NO: 111484 - DNA, 120 bp, synthetic construct; identical to SEQ ID NO: 26617
  source 1..120: mol_type = other DNA

SEQ ID NO: 111485 - DNA, 120 bp, synthetic construct; identical to SEQ ID NO: 26982
  source 1..120: mol_type = other DNA

SEQ ID NO: 111486 - DNA, 120 bp, synthetic construct
  source 1..120: mol_type = other DNA
cagaactcaaggaaatagagacacaaaaaacccttcaaaaaatcagtgaatccaggagctggttttttgaaaggatcaacaaaattgatagaccgctagcaagactaataaagaaaaaaa

SEQ ID NO: 111487 - DNA, 120 bp, synthetic construct
  source 1..120: mol_type = other DNA
cactcctattcaacatagtgttggaagttctggccagggcaatgaggcaggagaaggaaataaagggtattcaattaggaaaagaggaagtcaaattgtccctgtttgcagacgacatga

SEQ ID NO: 111488 - DNA, 120 bp, synthetic construct
  source 1..120: mol_type = other DNA
agaaaacctaggcattaccattcaggacataggcatgggcaaggacttcatatccaaaacaccaaaagcaatggcaacaaaagacaaaattgacaaatgggatctaattaaactaaagag

SEQ ID NO: 111489 - DNA, 120 bp, synthetic construct
  source 1..120: mol_type = other DNA
gactgtggtggggtggggggaggggggagggatagcattgggagatatacctaatgctagatgacgagttagtgggtgcagcgcaccagcatggcacgtgtatacatatgtaagtaacct

SEQ ID NO: 111490 - DNA, 120 bp, synthetic construct; identical to SEQ ID NO: 13024
  source 1..120: mol_type = other DNA

SEQ ID NO: 111491 - DNA, 120 bp, synthetic construct; identical to SEQ ID NO: 13025
  source 1..120: mol_type = other DNA

SEQ ID NO: 111492 - DNA, 120 bp, synthetic construct
  source 1..120: mol_type = other DNA
cccaaggtaatttacagattcaatgccatccccataaagctaccaatgcctttcttcacagaattggaaaaaactactttaaagttcatatggaaccaaaaaagagcccgcatcgccaag

SEQ ID NO: 111493 - DNA, 120 bp, synthetic construct; identical to SEQ ID NO: 13026
  source 1..120: mol_type = other DNA

SEQ ID NO: 111494 - DNA, 120 bp, synthetic construct
  source 1..120: mol_type = other DNA
cattgcttctttttctcaggtttgtcaaagatcagacagttgtagatatgtggcgttatttctgagggctctgttctgttccattgatctatatctctgttttggtaccagtaccatgct

SEQ ID NO: 111495 - DNA, 120 bp, synthetic construct
  source 1..120: mol_type = other DNA
agaacaaaaaaccaaacaccgcatattctcactcataggtgggaattgaacaatgagatcacatggacacaggaaggggaatatcacactctggggactgttgtggggtgggtggagagg

SEQ ID NO: 111496 - DNA, 120 bp, synthetic construct; identical to SEQ ID NO: 9275
  source 1..120: mol_type = other DNA

SEQ ID NO: 111497 - DNA, 120 bp, synthetic construct; identical to SEQ ID NO: 24074
  source 1..120: mol_type = other DNA

SEQ ID NO: 111498 - DNA, 120 bp, synthetic construct
  source 1..120: mol_type = other DNA
aagcctcccaaagtgctgggattacaggtatgagtcacggtgcctggccccatttgttgaatactatccaaagtcactcccatgtgttatctaatttaaatatttacaggaactgctata

SEQ ID NO: 111499 - DNA, 120 bp, synthetic construct; identical to SEQ ID NO: 22710
  source 1..120: mol_type = other DNA

SEQ ID NO: 111500 - DNA, 120 bp, synthetic construct; identical to SEQ ID NO: 18518
  source 1..120: mol_type = other DNA

SEQ ID NO: 111501 - DNA, 120 bp, synthetic construct; identical to SEQ ID NO: 9416
  source 1..120: mol_type = other DNA

SEQ ID NO: 111502 - DNA, 120 bp, synthetic construct; identical to SEQ ID NO: 9417
  source 1..120: mol_type = other DNA

SEQ ID NO: 111503 - DNA, 120 bp, synthetic construct
  source 1..120: mol_type = other DNA
tacggttggtgatgatgttatcgttgaagtacatctgcttgttttttttttgttgttgttgttgttattgttgttgttgttttgagacagagtctcgccccgtcacccaggctggagtgc

SEQ ID NO: 111504 - DNA, 120 bp, synthetic construct; identical to SEQ ID NO: 33746
  source 1..120: mol_type = other DNA

SEQ ID NO: 111505 - DNA, 120 bp, synthetic construct; identical to SEQ ID NO: 33747
  source 1..120: mol_type = other DNA

SEQ ID NO: 111506 - DNA, 120 bp, synthetic construct; identical to SEQ ID NO: 34935
  source 1..120: mol_type = other DNA

SEQ ID NO: 111507 - DNA, 120 bp, synthetic construct; identical to SEQ ID NO: 34936
  source 1..120: mol_type = other DNA

SEQ ID NO: 111508 - DNA, 120 bp, synthetic construct
  source 1..120: mol_type = other DNA
cagtcaccttcgcggcgagaaagagggtggaggcaggaattcgggccaggctctcccggagctggccaggactggccgagcccgaccccgcactaacccgcgagagaggtagggcagcga

SEQ ID NO: 111509 - DNA, 120 bp, synthetic construct
  source 1..120: mol_type = other DNA
acttgggaccttgaagatctgctaagagtagttgttactattcccttttttttttagttggagtctcgctctgttggagactcccgggctggagtgcagtggcgcggtctcggctcactg

SEQ ID NO: 111510 - DNA, 120 bp, synthetic construct
  source 1..120: mol_type = other DNA
aaagtcagtagatgatgggtgaaaagatccaacagttcagaagaggaaccatttgagtggtcagagcagaagacagcctttgccaccagatttgagagaaataggaagaagcgttaaaaa

SEQ ID NO: 111511 - DNA, 120 bp, synthetic construct
  source 1..120: mol_type = other DNA
gtaatcccagcactttgggaggccgaggtgggcagattgcctgagctcaggagttcccaaccagcttgggcaagatgaaaccccatctctactaaaatacaaaaaaattagctgggtgtg

SEQ ID NO: 111512 - DNA, 120 bp, synthetic construct
  source 1..120: mol_type = other DNA
ggcattaacgaagacactgaagaatatcacctaagtgattattttgaacagtatggaaaaactgaagtgattgaaatcatgactgaccaaggcagtggcaagaaaaggggctttgccttt

SEQ ID NO: 111513 - DNA, 120 bp, synthetic construct
  source 1..120: mol_type = other DNA
aaagcacttctcagaggaaaaatcctataagtaaccttatatgctttctttttaaagtgaaaattagtaagctaagcattcaacaaatatagaagacaattaaaggaaaatggcagagta

SEQ ID NO: 111514 - DNA, 120 bp, synthetic construct
  source 1..120: mol_type = other DNA
aaataataataataataataatttgtagaggcagggtttccctgtgttgcccaggctggtctcaaactccttgcctctggcaatcttcccaccttggccttccaaagtgttgggattaca

SEQ ID NO: 111515 - DNA, 120 bp, synthetic construct
  source 1..120: mol_type = other DNA
ttgagagacagggtctacatgtaggaatggaatcggtagatcataggatgattctatgttcaattttttgaggaagcaccatactgtttactgtagaattaccactacaggcgcctgcca

SEQ ID NO: 111516 - DNA, 120 bp, synthetic construct
  source 1..120: mol_type = other DNA
tttgtttttttaatggagacgggattttactatgttagtcagtctggtctcaaactcctgaactcctgatctcaagtgatccacttgctttggcctccaaaagtgctgggattacaggca

SEQ ID NO: 111517 - DNA, 120 bp, synthetic construct
  source 1..120: mol_type = other DNA
cacttgagctcaagagtttgaagctgcagggagccataattgagccactgtacaccagcctggacaacagagtgagaccttatctaaaaaaaaaaaaaaaagactgagaaaagaacaagt

SEQ ID NO: 111518 - DNA, 120 bp, synthetic construct
  source 1..120: mol_type = other DNA
ctaaattattgtatttttgtaaaagaagtactattaagtcattttaaaagttggataaagccgggcgcagtggctcacgcctgtaatcccagcactttgggaggctgagccaggtggatt

SEQ ID NO: 111519 - DNA, 120 bp, synthetic construct
  source 1..120: mol_type = other DNA
aagaaactgagtcaaatgtaggagcaaataaaatgtttgctttaactgttacataatgtatattgagaatgcagaaggagccgggcgcagtgactcacgcctataatcccagcactttgg

SEQ ID NO: 111520 - DNA, 120 bp, synthetic construct
  source 1..120: mol_type = other DNA
caaaaaaaaaaaaaaaaaaaggaagatggagaccagtggcagtgccaacagtgccaagagatgggtggtgtgggtggggagtgggctttagccttctgtaatcaccatcagttacttccc

SEQ ID NO: 111521 - DNA, 120 bp, synthetic construct
  source 1..120: mol_type = other DNA
acagggtttgcagcctaggagtaataggctgtaacagctggatttgtataagtacactctatggtgcatgcaagatgatgaaattgccaaatcatgcatttctcgaaacatatccccatc

SEQ ID NO: 111522 - DNA, 120 bp, synthetic construct
  source 1..120: mol_type = other DNA
ggagaattgcttgaacccagaaggcagaggttgcagtgagttgagatcacgccattgcactccaccatgggtgatagaggaagactccatctcgggggaaaaaaaaaaaaaaaaaaaaaa

SEQ ID NO: 111523 - DNA, 120 bp, synthetic construct
  source 1..120: mol_type = other DNA
tctgattgcaagcaatatgaacataagttttttttttgtttgttttgtttttttgaagacagaatcttgctgtcacccaggctggagagcggtgacgcgatctcggctcactgtaacctc

SEQ ID NO: 111524 - DNA, 120 bp, synthetic construct
  source 1..120: mol_type = other DNA
tttgaccaatggctctttctaccttactggctgctccttctcagcctcctttgtggtttcccctttatttctgttagcatgctcaaccttttctctatctacactcacaagatctcatta

SEQ ID NO: 111525 - DNA, 120 bp, synthetic construct
  source 1..120: mol_type = other DNA
cactacaggcttttttgagcaaccagaggtctccatttaataaagtcagaacttgtctcttctttttttttttttttgaggcggagtcttgctctgtcgcccaagctggagtgcagtggt

SEQ ID NO: 111526 - DNA, 120 bp, synthetic construct
  source 1..120: mol_type = other DNA
ccttggcctcccagagtgctgggattataggtgtcagccactgcacccagccttgacctcatcttctattatttctcttgcccactctgtgccagccatactaacctttttagctgttcc

SEQ ID NO: 111527 - DNA, 120 bp, synthetic construct
  source 1..120: mol_type = other DNA
ttaccattccttccccttattcctttgggacttgagatgaaggcccatctctgcctcactactctatttactattattattattttttgagacagattctcgctgttgcccaggctggag

SEQ ID NO: 111528 - DNA, 120 bp, synthetic construct
  source 1..120: mol_type = other DNA
acaggcgtgagccactgcgccccaccccattttggtgtgatctcagctcactgcaacctacccctcccaagttcaagtgattctcctacctcagcctcttgagtagctgggattacaggg

SEQ ID NO: 111529 - DNA, 120 bp, synthetic construct
  source 1..120: mol_type = other DNA
attttcaaactgtttccccagaagtaaagaacatttgtattgtgctcagtggtggaaatgtagacttaacctcctccataacttgggtgaagcaggctgaaaggccagcttcttatcagt

SEQ ID NO: 111530 - DNA, 120 bp, synthetic construct
  source 1..120: mol_type = other DNA
gtctggatctactgacataagatggcctgtagcaatgaggctgtgcattcctaaaggacaaaagcaaagaagctatttaggaatttacaggccaaagtcttcatttattgcccagtccat

SEQ ID NO: 111531 - DNA, 120 bp, synthetic construct; identical to SEQ ID NO: 29528
  source 1..120: mol_type = other DNA

SEQ ID NO: 111532 - DNA, 120 bp, synthetic construct
  source 1..120: mol_type = other DNA
tttatttatttatttattttattttttgagatggagttttgctcttgttcctcaggctggagtacaacggtgtgatctcagctcactgcaacctccgcctcctgagttcaagcaattctt

SEQ ID NO: 111533 - DNA, 120 bp, synthetic construct; identical to SEQ ID NO: 5996
  source 1..120: mol_type = other DNA

SEQ ID NO: 111534 - DNA, 120 bp, synthetic construct
  source 1..120: mol_type = other DNA
tcccaccgttggagcctctgacttctgggtttgaaactatctttgcccacaatgccaggggggacattgttgtccccacaattgtggggacaacataggcagcgccatcaactaccctga

SEQ ID NO: 111535 - DNA, 120 bp, synthetic construct
  source 1..120: mol_type = other DNA
ctcagcactttgggaggccaaggcagaaggatcgcttgaggccaggagttcgagaccagcctgggcaacatagacttccttctttaattaaaagtaataataataattattacttttatt

SEQ ID NO: 111536 - DNA, 120 bp, synthetic construct
  source 1..120: mol_type = other DNA
tgtctcctctcttctctctctgtctctgtctctctcgtctccctctcccccctccgtgccctgtctgcctctctccccgtcagaagcccagctcgccctcgcccagggtccgtgacaagg

SEQ ID NO: 111537 - DNA, 120 bp, synthetic construct
  source 1..120: mol_type = other DNA
ccacaactgatccgtctccccttactgatcactgcccccagggaaccccctctcctcccatgaggctccccgcttactgatcactctccccccatcccgcagaacaatctcctccactga

SEQ ID NO: 111538 - DNA, 120 bp, synthetic construct; identical to SEQ ID NO: 13266
  source 1..120: mol_type = other DNA

SEQ ID NO: 111539 - DNA, 120 bp, synthetic construct; identical to SEQ ID NO: 13267
  source 1..120: mol_type = other DNA

SEQ ID NO: 111540 - DNA, 120 bp, synthetic construct; identical to SEQ ID NO: 13268
  source 1..120: mol_type = other DNA

SEQ ID NO: 111541 - DNA, 120 bp, synthetic construct
  source 1..120: mol_type = other DNA
tgtttagtgcttccttcaggagctcttgtaaggcaggcctggtggtgacaaagtctctcagcatttgcttgtctgtaaaggattttatttctccttcacttatgaagcctagtttggctg

SEQ ID NO: 111542 - DNA, 120 bp, synthetic construct
  source 1..120: mol_type = other DNA
atgtagttctcgtgccatgattttcagctccatcaggtcatttaaggtcttctctacactgtttattctagttagccattcgtctaatcttttttcaaggtttttagcttctttgcgatg

SEQ ID NO: 111543 - DNA, 120 bp, synthetic construct; identical to SEQ ID NO: 13281
  source 1..120: mol_type = other DNA

SEQ ID NO: 111544 - DNA, 120 bp, synthetic construct; identical to SEQ ID NO: 13282
  source 1..120: mol_type = other DNA

SEQ ID NO: 111545 - DNA, 120 bp, synthetic construct; identical to SEQ ID NO: 22669
  source 1..120: mol_type = other DNA

SEQ ID NO: 111546 - DNA, 120 bp, synthetic construct; identical to SEQ ID NO: 22670
  source 1..120: mol_type = other DNA

SEQ ID NO: 111547 - DNA, 120 bp, synthetic construct
  source 1..120: mol_type = other DNA
tttcaaactcagaaatataaatgtgagatatgttaatacgaactgcagaatttccttagctgcttttcttctaagaaaacaaaccggccgggcacggtggctcatgcctgtaatcccagc

SEQ ID NO: 111548 - DNA, 120 bp, synthetic construct; identical to SEQ ID NO: 26871
  source 1..120: mol_type = other DNA

SEQ ID NO: 111549 - DNA, 120 bp, synthetic construct
  source 1..120: mol_type = other DNA
tcacgtgaagagacacacactggctcaaaataaagggatagaagaagatctaccaagcaaatggaaaacaaaaaaaggcaggggttgcaatcctagtttctgataaaacagactttaaac

SEQ ID NO: 111550 - DNA, 120 bp, synthetic construct
  source 1..120: mol_type = other DNA
ataaattcctcgacacatacactctcccaagactaaaccaggaagaagttgaatctctgaatagaccaataacaggctctgaaattgaggcaataatcaatagcttactaaccaaaaaaa

SEQ ID NO: 111551 - DNA, 120 bp, synthetic construct
  source 1..120: mol_type = other DNA
gaagaatcaatatcatgaaaatggccatactgcccaaggtaatttatacattcaatgccatccccatcaagctaccaatgactttcttcacagaattggaaaaaactactttcaagttca

SEQ ID NO: 111552 - DNA, 120 bp, synthetic construct
  source 1..120: mol_type = other DNA
gtcagtgtgacgattcctcagggatctagaactagaaataccatttgacccagccatcccattactgggtatatacccaaaggattataaatcatgctgctataaagacacatgcacacg

SEQ ID NO: 111553 - DNA, 120 bp, synthetic construct; identical to SEQ ID NO: 26872
  source 1..120: mol_type = other DNA

SEQ ID NO: 111554 - DNA, 120 bp, synthetic construct
  source 1..120: mol_type = other DNA
ctaaataatggtgtttttccccacagttaccaaaatagtttagtaactttgaaaatacattgttgggaggagccaagatggccgaataggaacagctccggtctacacctcccagcgtga

SEQ ID NO: 111555 - DNA, 120 bp, synthetic construct
  source 1..120: mol_type = other DNA
gggaggcaccccccagcaggggcagactgacacctcacacagccgggtactccaacagacctacagctgagggtcctgtctgttagaaggaaaactaacaaccagaaaggacatctacac

SEQ ID NO: 111556 - DNA, 120 bp, synthetic construct
  source 1..120: mol_type = other DNA
ggtaccagctgctgcaaaatcatgccaaaatgtaaagaccatcgagactaggaagaaaccgcatcaaccaatgagcaaaatcaccagctaacatcataatgacaggatcaaattcacaca

SEQ ID NO: 111557 - DNA, 120 bp, synthetic construct
  source 1..120: mol_type = other DNA
accacacctattccaaaattgaccacatactgggaagtaaagctctcctcagcaaatgtaaaagaacagaaattataacaaactatctctcagaccacagtgcaatcaaactagaactca

SEQ ID NO: 111558 - DNA, 120 bp, synthetic construct; identical to SEQ ID NO: 91146
  source 1..120: mol_type = other DNA

SEQ ID NO: 111559 - DNA, 120 bp, synthetic construct
  source 1..120: mol_type = other DNA
taaagttcatatggaaccaaaaaagagcccgcatcgccaagtcaatcctaagccaaaagaacaaagctggaggcatcacactacctgacttcaaactatactacaaggctacagtcacca

SEQ ID NO: 111560 - DNA, 120 bp, synthetic construct
  source 1..120: mol_type = other DNA
ccagccatcccattactgggtatatacccaaaggcctataaatcatgctgctataaagacacatgcacacgtatgtttattgcggcactattcacaatagcaaagacttggaaccaaccc

SEQ ID NO: 111561 - DNA, 120 bp, synthetic construct; identical to SEQ ID NO: 26874
  source 1..120: mol_type = other DNA

SEQ ID NO: 111562 - DNA, 120 bp, synthetic construct; identical to SEQ ID NO: 26875
  source 1..120: mol_type = other DNA

SEQ ID NO: 111563 - DNA, 120 bp, synthetic construct; identical to SEQ ID NO: 7632
  source 1..120: mol_type = other DNA

SEQ ID NO: 111564 - DNA, 120 bp, synthetic construct
  source 1..120: mol_type = other DNA
tacttaaatttgataggctatattacattaattattttttagagatgaggtcttgctctgtcacccaagctagagtgcactcaagtgatccacctgcctcagcctcctgaatagctggga

SEQ ID NO: 111565 - DNA, 120 bp, synthetic construct
  source 1..120: mol_type = other DNA
cccatctgggatgtgaggagcgcctctgcccggccgcgaccccatctgggatgtgaggagcgcctctgcccggccgcgaccccgtctgggaggtgaggagcgtctctgcccggccgcccc

SEQ ID NO: 111566 - DNA, 120 bp, synthetic construct
  source 1..120: mol_type = other DNA
attaaaaaaaataaataaaaataaaaaataaaaaataaattaggggcaacatagtgagacctcatctctacaacaacaaataaaattagccgggtgtggtggcacgtgcctgtagtccca

SEQ ID NO: 111567 - DNA, 120 bp, synthetic construct; identical to SEQ ID NO: 7633
  source 1..120: mol_type = other DNA

SEQ ID NO: 111568 - DNA, 120 bp, synthetic construct; identical to SEQ ID NO: 7634
  source 1..120: mol_type = other DNA

SEQ ID NO: 111569 - DNA, 120 bp, synthetic construct; identical to SEQ ID NO: 7635
  source 1..120: mol_type = other DNA

SEQ ID NO: 111570 - DNA, 120 bp, synthetic construct; identical to SEQ ID NO: 7636
  source 1..120: mol_type = other DNA

SEQ ID NO: 111571 - DNA, 120 bp, synthetic construct; identical to SEQ ID NO: 7637
  source 1..120: mol_type = other DNA

SEQ ID NO: 111572 - DNA, 120 bp, synthetic construct; identical to SEQ ID NO: 7638
  source 1..120: mol_type = other DNA

SEQ ID NO: 111573 - DNA, 120 bp, synthetic construct; identical to SEQ ID NO: 7639
  source 1..120: mol_type = other DNA

SEQ ID NO: 111574 - DNA, 120 bp, synthetic construct
  source 1..120: mol_type = other DNA
cagataaacccgctaagatcccaacgacaggagacaggacacaccgttttgctgaactccatcaaaatatcaaaagccactctgctttcttttctttttcaaaaggatgtcaaagactcc

SEQ ID NO: 111575 - DNA, 120 bp, synthetic construct
  source 1..120: mol_type = other DNA
cttcccagagccaaaaggctaggaagaccaactaacaataaatgccaaaaggtgataaaaattcaaaatggtggccacagtggctgctcctgaaaacaaaggctctaagaatagtggggg

SEQ ID NO: 111576 - DNA, 120 bp, synthetic construct
  source 1..120: mol_type = other DNA
cacactcagatccaccagtgagtgggaggactggagggccgggtctttcagtctcttttcctaacccaggaagtccctcctggtgtctggctgcaaatcttcttgctgctgcaccaagaa

SEQ ID NO: 111577 - DNA, 120 bp, synthetic construct
  source 1..120: mol_type = other DNA
cttctgcccatccaggcctggcctcacccccactgggtccccggcccatccgaattccactgtgaccttggccccagctccgcaagggaatcccccaggtgtctggccgcatctctctga

SEQ ID NO: 111578 - DNA, 120 bp, synthetic construct; identical to SEQ ID NO: 20050
  source 1..120: mol_type = other DNA

SEQ ID NO: 111579 - DNA, 120 bp, synthetic construct; identical to SEQ ID NO: 20051
  source 1..120: mol_type = other DNA

SEQ ID NO: 111580 - DNA, 120 bp, synthetic construct
  source 1..120: mol_type = other DNA
cagatttggacacaactccatactccagtacagtctcagaatattctagatccccagacccctccccaagccctcaccccactactacccctgatcccaccatggcccctgaccccatca

SEQ ID NO: 111581 - DNA, 120 bp, synthetic construct; identical to SEQ ID NO: 13211
  source 1..120: mol_type = other DNA

SEQ ID NO: 111582 - DNA, 120 bp, synthetic construct
  source 1..120: mol_type = other DNA
gggaagatagcttggccccaggagttcaaggctgcagtgagctatgatcacaccattgcactccggcctggacaacaaagaccctgtctctaaaaaataaaaataaaaagttttaatttt

SEQ ID NO: 111583 - DNA, 120 bp, synthetic construct
  source 1..120: mol_type = other DNA
ggcaggcatctgggggagatttggggggaagggagctgggcgcccacaggagccgctgtgaggtgggcaagcccctctttcagttcctcctcgacagtcagtctccagacttccactcca

SEQ ID NO: 111584 - DNA, 120 bp, synthetic construct; identical to SEQ ID NO: 17847
  source 1..120: mol_type = other DNA

SEQ ID NO: 111585 - DNA, 120 bp, synthetic construct
  source 1..120: mol_type = other DNA
taatactaataaatacagtttagaagaagtgaatattatagcaagtctctttaaagaaaaaagaagtggctgggcacggtagcgcactcctgcaatcccagcactttgggaggccaaggc

SEQ ID NO: 111586 - DNA, 120 bp, synthetic construct
  source 1..120: mol_type = other DNA
tcgggatcaagaaactcactcaaaaccgctcaactacatggaaactgaacaacctgctcctgtatgactactgggtacataatgaaatgaaggcagaaataaagatgttctttgaaacca

SEQ ID NO: 111587 - DNA, 120 bp, synthetic construct
  source 1..120: mol_type = other DNA
acagaaccaacgacaaaaaccacacgattatctcaatagatgcagaaaaggcctttgacaaaattcaacaaccttcatgctaaaaactctcaataaattaggtattgatgggacgtatct

SEQ ID NO: 111588 - DNA, 120 bp, synthetic construct
  source 1..120: mol_type = other DNA
tcctaagccaaaagaacaaagctggaggcatcatgctacctgacttcaaactatgctacaaggctacagtaaccaaaacagcatggtactggtaccaaaacagagatatagaccaatgga

SEQ ID NO: 111589 - DNA, 120 bp, synthetic construct
  source 1..120: mol_type = other DNA
gcaaagacttggaaccaacccaaatgtccaacaatgagagactagattaagaaaatgtggcatatatacaccatggaatactatgcagccataaaaaatgatgagttcatgtcctttgta

SEQ ID NO: 111590 - DNA, 120 bp, synthetic construct; identical to SEQ ID NO: 12758
  source 1..120: mol_type = other DNA

SEQ ID NO: 111591 - DNA, 120 bp, synthetic construct
  source 1..120: mol_type = other DNA
ttccttgagcagtggtttgtagttctccttgaagaggtccttcacgtcccttataagttggattcctaggtattttattctctttgaagcaattgtgaatgggagttcactcatgatttg

SEQ ID NO: 111592 - DNA, 120 bp, synthetic construct
  source 1..120: mol_type = other DNA
gaaggggaatatcacactctggggactgttgtggggtggggggaggggggaggggggaggggggaggggggagggatagcatcgggagatatacctaatgctagatgacgagttagtggg

SEQ ID NO: 111593 - DNA, 120 bp, synthetic construct
  source 1..120: mol_type = other DNA
agggctcggagcctggggctgggggccggaagtggcactcaggccacagggaaccactgggccacggaaggagggtcccagggtgcccgtggcacccagcgaggggaggatccgcaattt

SEQ ID NO: 111594 - DNA, 120 bp, synthetic construct
  source 1..120: mol_type = other DNA
aggccacccttacgacagaggaaacaggtcagaacgcttgtcctgggagcacaggcctggctccggggcctttggaggggctggggcctgtagtcttagctagggtgtcccccgacgttt

SEQ ID NO: 111595 - DNA, 120 bp, synthetic construct
  source 1..120: mol_type = other DNA
attttatgattcagaggatactgcttccaaataacggctcttgcagaattatgttccaagagtcaggtacagcaataatggtctatttgtgtcctttgctgctctgaagtctaactccgg

SEQ ID NO: 111596 - DNA, 120 bp, synthetic construct
  source 1..120: mol_type = other DNA
ctcccccataccctatctttctctctccctccctgccaccccctccctctccctctccctctccctctccctctccctccctctctccccacaccctgtctttctttctccctccccacc

SEQ ID NO: 111597 - DNA, 120 bp, synthetic construct
  source 1..120: mol_type = other DNA
cagagggctttctctttgtgctgtcagccttgtgttctgggctcccccgtccccagctctcctttccttgtctaccagatttcagtggccttggcccagccccacagcccccagccagga

SEQ ID NO: 111598 - DNA, 120 bp, synthetic construct
  source 1..120: mol_type = other DNA
tcccccaagtctcccctgttctctctctgggccacagtggggggttccagggcctgggagggggctcaaagctccgatgggactgggcagtgtcaggtggctgcagcccccatacgctat

SEQ ID NO: 111599 - DNA, 120 bp, synthetic construct
  source 1..120: mol_type = other DNA
ctaaacatgactaatcgtgtttacccggtgatcccgcgcctcctggcaggcggggctggggcccaggaggaaggaatgcctgcatgtgctggttcagggactcaccaccctggcgtcctc

SEQ ID NO: 111600 - DNA, 120 bp, synthetic construct
  source 1..120: mol_type = other DNA
cttcttcgtggtcatcctctcctacgccaacagctgtgccaaccccgtcctctacggcttcctctctgacaacttccgccagagcttccagaaggttctgtgcctccgcaagggctctgg

SEQ ID NO: 111601 - DNA, 120 bp, synthetic construct
  source 1..120: mol_type = other DNA
tgcagatggctgtgccgtgctgagattggctctgtctggaggggtccagtgtggggtgcctgagggcactagggagaggtgctcctgctgcaggaggacctgagggtcagggcttggaga

SEQ ID NO: 111602 - DNA, 120 bp, synthetic construct; identical to SEQ ID NO: 2713
  source 1..120: mol_type = other DNA

SEQ ID NO: 111603 - DNA, 120 bp, synthetic construct; identical to SEQ ID NO: 6838
  source 1..120: mol_type = other DNA

SEQ ID NO: 111604 - DNA, 120 bp, synthetic construct
  source 1..120: mol_type = other DNA
gttataggcctgtgccaccgcccccagctaattttttgtgtggttgtttttttttttttttttttttttttgtagagatgaggggtttgctatgtttcccaggctggtctcaacctcctg

SEQ ID NO: 111605 - DNA, 120 bp, synthetic construct
  source 1..120: mol_type = other DNA
ggaggctcccaagggtccagatctcccccgagaccctgctccttgtctccagtatctctgtcctcccctcctcagaaaccgggtcaccccacactgtcccctgggccactactctgctcc

SEQ ID NO: 111606 - DNA, 120 bp, synthetic construct; identical to SEQ ID NO: 33832
  source 1..120: mol_type = other DNA

SEQ ID NO: 111607 - DNA, 120 bp, synthetic construct
  source 1..120: mol_type = other DNA
atttgtcaattttggcttttgttgccattgcttttggtgttttagacatgaagttaggcaggagaaggaaataaagggtattcaattaggaaaagaggaagtcaaattgtccctgtttgc

SEQ ID NO: 111608 - DNA, 120 bp, synthetic construct
  source 1..120: mol_type = other DNA
tttattgtttgtttgttttgcttttttttttttttttttttttaggcggagtcgccctctgttgcccaggctggagtgcagtggtgtgatctcagctcattgaaacctctgcctcccaga

SEQ ID NO: 111609 - DNA, 120 bp, synthetic construct
  source 1..120: mol_type = other DNA
gcggaccactgacacgttttcttattttcctctactgttaagagttgacccttgaaaacattttcttctcagttcaatggaatgttgattgagtggggcacgggatctgtctgccatctt

SEQ ID NO: 111610 - DNA, 120 bp, synthetic construct
  source 1..120: mol_type = other DNA
acctgcacgttgggcacatgtaccctaaaacttaaagtataatgaaaataaaaagttcattagaaacatctgaatcagccagattcccctccaacaccacagacagattggctggcagta

SEQ ID NO: 111611 - DNA, 120 bp, synthetic construct
  source 1..120: mol_type = other DNA
gagacaaagccacatgtgggctgtcacagccaccagagggagagggtgcctggaaggagattgtggagctccaggagcaacagaggttccccagatctgtgagcatgccctgcctggcag

SEQ ID NO: 111612 - DNA, 120 bp, synthetic construct; identical to SEQ ID NO: 33930
  source 1..120: mol_type = other DNA

SEQ ID NO: 111613 - DNA, 120 bp, synthetic construct; identical to SEQ ID NO: 33931
  source 1..120: mol_type = other DNA

SEQ ID NO: 111614 - DNA, 120 bp, synthetic construct
  source 1..120: mol_type = other DNA
aattaaaaaaaaaaattgcagcatctgcgaagcagtatgaacatgaggtgcaacaaaacaaggtacgcctgtgtggccttaacaaatacgtgctggatgaaaggaggtatgggggaatgt

SEQ ID NO: 111615 - DNA, 120 bp, synthetic construct
  source 1..120: mol_type = other DNA
ttgaagagagttctggtcttgctctgaattagactttggcttaagggaatgttgtgactggtttcgtcttctatcctgaccactcagacttcctctatttgagcagtaaggcagttttgc

SEQ ID NO: 111616 - DNA, 120 bp, synthetic construct
  source 1..120: mol_type = other DNA
atgagatgttagacatgacttccagagatagacttgatttgtcacccatagaaaaaaccatgtgacttggggcaagtctttcagattttctcagctccagattcctagtccgtaagatgg

SEQ ID NO: 111617 - DNA, 120 bp, synthetic construct
  source 1..120: mol_type = other DNA
ttttttctttctttctttctttttttttttttttttttttttttttgagacggagtctcactgtgtcgccagactggggtgccgtggcatgatatcggctcaaggcaacatccgactccc

SEQ ID NO: 111618 - DNA, 120 bp, synthetic construct; identical to SEQ ID NO: 33940
  source 1..120: mol_type = other DNA

SEQ ID NO: 111619 - DNA, 120 bp, synthetic construct; identical to SEQ ID NO: 33932
  source 1..120: mol_type = other DNA

SEQ ID NO: 111620 - DNA, 120 bp, synthetic construct
  source 1..120: mol_type = other DNA
agcccagctgcttttcagctcagctacctgagaaagatcctcaggcatttgttccctcatacacatcagggctgagtgaaaaaaaaaaaaaaaattgcatgcagaaagttaactacagag

SEQ ID NO: 111621 - DNA, 120 bp, synthetic construct; identical to SEQ ID NO: 33938
  source 1..120: mol_type = other DNA

SEQ ID NO: 111622 - DNA, 120 bp, synthetic construct; identical to SEQ ID NO: 33937
  source 1..120: mol_type = other DNA

SEQ ID NO: 111623 - DNA, 120 bp, synthetic construct; identical to SEQ ID NO: 33933
  source 1..120: mol_type = other DNA

SEQ ID NO: 111624 - DNA, 120 bp, synthetic construct; identical to SEQ ID NO: 33934
  source 1..120: mol_type = other DNA

SEQ ID NO: 111625 - DNA, 120 bp, synthetic construct; identical to SEQ ID NO: 33936
  source 1..120: mol_type = other DNA

SEQ ID NO: 111626 - DNA, 120 bp, synthetic construct; identical to SEQ ID NO: 33935
  source 1..120: mol_type = other DNA

SEQ ID NO: 111627 - DNA, 120 bp, synthetic construct
  source 1..120: mol_type = other DNA
tacatgggaggctgagacagaatagctcgaacccgggaggcagaggctgcagtgagctcgagagtgtgccactgcactacagcctaggagacagagtgagaatccctcttgaaaaaaaaa

SEQ ID NO: 111628 - DNA, 120 bp, synthetic construct
  source 1..120: mol_type = other DNA
atttgcttcactagatgcagaataacaccacgatgaggtatcactacacacttattacaatagctaaaataaaagacatagtgacaacaccaaatggtgacaaggatgcagagaaactgg

SEQ ID NO: 111629 - DNA, 120 bp, synthetic construct
  source 1..120: mol_type = other DNA
tgctactcagcaataaaaatgaactatcgtcagggcacagtggctcaccctgttatcacagcactttgggaggtcgaggcgggtggatgatgatgtcaggagttcaagaccagccttgcc

SEQ ID NO: 111630 - DNA, 120 bp, synthetic construct
  source 1..120: mol_type = other DNA
aatgacatccatagaatatatcctggtgttggtcaacataaagtttacttaatattagtaatttataggccaggctcagtggctcacacctgtaatcccaacactttgggaggtcgaggc

SEQ ID NO: 111631 - DNA, 120 bp, synthetic construct
  source 1..120: mol_type = other DNA
acctcaggcgatccacccgcctcagcctcccaaagtgttgggattacaggcgtgagccactgtgcccgggaggaaaataattattaaatgctattgttattaaagaaaccatagactgta

SEQ ID NO: 111632 - DNA, 120 bp, synthetic construct
  source 1..120: mol_type = other DNA
cactaatatttttaatttttctattagagacagtttcgctatgttgtccaggctgggctctacctctgggactcaagtgattctcccgcctcggccttgggactacaggcatgcaccacc

SEQ ID NO: 111633 - DNA, 120 bp, synthetic construct
  source 1..120: mol_type = other DNA
atacttaagattccctttcaaaaatgtaagcagaggttgcggggccttggactgttttttcagtggcaacagacatagaagccactgaagaatgaaagccacgactaagtatagcaaacc

SEQ ID NO: 111634 - DNA, 120 bp, synthetic construct
  source 1..120: mol_type = other DNA
aaaaaacaaacaaaatttagcagaagcggggtggtgcgcgcctgtagccccaaggcctaggcgagaggctcacttgagcccaggaggaaagatttgagtgagcttttttggtttttgttt

SEQ ID NO: 111635 - DNA, 120 bp, synthetic construct
  source 1..120: mol_type = other DNA
ctggtatttgagcaccaaccgtgggtctccttgcaaaggcgtcgtctccgttcatggcaccgggagcagtctgacctgcaagagaaatagcctgagtctttccagccacagcagctttga

SEQ ID NO: 111636 - DNA, 120 bp, synthetic construct
  source 1..120: mol_type = other DNA
cttgtctcttccttttttttttttttttttgagtcagtctcagtctgtcacctaggctagagggcagtagtgcaatcatagcttactgcagccttgaattcctggcctcaagcaattctc

SEQ ID NO: 111637 - DNA, 120 bp, synthetic construct
  source 1..120: mol_type = other DNA
caacattaccccacagctatgttaggtctgatttatttattcagaatattagaaaaactgcaaataggccgggcgtggtagctcacagttgtaatcccagcactttggaaggctgaggcg

SEQ ID NO: 111638 - DNA, 120 bp, synthetic construct
  source 1..120: mol_type = other DNA
agatgagactgtgatggggtttaatacccatgtgataaaccacgagatggaaaattctgaattgatgccacagataaatgcaccaaccatgactaaacataattcagaagcaaatctcaa

SEQ ID NO: 111639 - DNA, 120 bp, synthetic construct
  source 1..120: mol_type = other DNA
ccatacatgtcaaatagcctacagtaaagtcctctctgagcttgtaaacactgtttaaatgtcgtaataataacaattaatacctttcacaatccttctttgaattcagtctccacactg

SEQ ID NO: 111640 - DNA, 120 bp, synthetic construct
  source 1..120: mol_type = other DNA
tcattttgtgggccagatgcttctggcacttcctccgaatcatttccttcctctgctggcttcttgggcatgatctttataatgtgaagatcacagataaatagtatcagtgacatatct

SEQ ID NO: 111641 - DNA, 120 bp, synthetic construct
  source 1..120: mol_type = other DNA
aagaagctgcaggagaaacatgtgaagctagcagaggttggttcatgaggtttaaggaatgaagccgtttccataacataaaagtgcaaggtgaagcagcaaaccctgatggagaagctg

SEQ ID NO: 111642 - DNA, 120 bp, synthetic construct; identical to SEQ ID NO: 111614
  source 1..120: mol_type = other DNA

SEQ ID NO: 111643 - DNA, 120 bp, synthetic construct; identical to SEQ ID NO: 33931
  source 1..120: mol_type = other DNA

SEQ ID NO: 111644 - DNA, 120 bp, synthetic construct
  source 1..120: mol_type = other DNA
attgcacgcatctgccttattcttccacgttccccagatgacgatttcatctgtgtctcctcccacatccacccaaatggaccgtcccagaccttgaaaccgaaaatcattcagagagca

SEQ ID NO: 111645 - DNA, 120 bp, synthetic construct; identical to SEQ ID NO: 1929
  source 1..120: mol_type = other DNA

SEQ ID NO: 111646 - DNA, 120 bp, synthetic construct
  source 1..120: mol_type = other DNA
atccctcccccctccccccaccccacaacaggccccggtgtgtgacgttccccttcctgtgtccatgtgttctcattgttcaattcccgcctatgagtgacaacatgtggtgtttggttt

SEQ ID NO: 111647 - DNA, 120 bp, synthetic construct
  source 1..120: mol_type = other DNA
ggaagctgcacccagacaggtaacaaaatattatatacaatcatagataggtttactacataccgataataaccatttagaaaaccaaattgagaaaaattacactttcatagtgacaaa

SEQ ID NO: 111648 - DNA, 120 bp, synthetic construct; identical to SEQ ID NO: 111608
  source 1..120: mol_type = other DNA

SEQ ID NO: 111649 - DNA, 120 bp, synthetic construct
  source 1..120: mol_type = other DNA
cagcataattccatggagattcatccaatatattaatatttttgtatcagtagttcattgttgtttttgttgttgagacggagtctcactctgctgcccaggctggagtgcagtggtgcg

SEQ ID NO: 111650 - DNA, 120 bp, synthetic construct; identical to SEQ ID NO: 33842
  source 1..120: mol_type = other DNA

SEQ ID NO: 111651 - DNA, 120 bp, synthetic construct; identical to SEQ ID NO: 33833
  source 1..120: mol_type = other DNA

SEQ ID NO: 111652 - DNA, 120 bp, synthetic construct
  source 1..120: mol_type = other DNA
agaatggcacacgcctatggtcccgaggctgaggtggaagcattgcttgagcccaggaggttgaggccagtctgtgcaacatagcaaaacccggtttctactgaaaaacaaaaaaaatac

SEQ ID NO: 111653 - DNA, 120 bp, synthetic construct; identical to SEQ ID NO: 33834
  source 1..120: mol_type = other DNA

SEQ ID NO: 111654 - DNA, 120 bp, synthetic construct; identical to SEQ ID NO: 33835
  source 1..120: mol_type = other DNA

SEQ ID NO: 111655 - DNA, 120 bp, synthetic construct
  source 1..120: mol_type = other DNA
gaggattgcttgaggtgaggcgctcaacactagcctgggcaacatagagagacccacatatctacaaaatataaaataaaattagttgggcatagtggcacgtgcctgtagcctcagcta

SEQ ID NO: 111656 - DNA, 120 bp, synthetic construct; identical to SEQ ID NO: 33836
  source 1..120: mol_type = other DNA

SEQ ID NO: 111657 - DNA, 120 bp, synthetic construct
  source 1..120: mol_type = other DNA
agggacaaacgttctctggtcctttagatttgagagacactcaccttcgggaagattctctggaggctgccgaaagtcatctgaggacgttcaactgaaagagaatacatcagaattttt

SEQ ID NO: 111658 - DNA, 120 bp, synthetic construct
  source 1..120: mol_type = other DNA
attacagtcgtgagacactgcgcccagcccttaagctactttttattcagcttcctcacttacgaaatagtcaacagtacatgtaaaataggctacaagaaagtgctctctgagcttgta

SEQ ID NO: 111659 - DNA, 120 bp, synthetic construct; identical to SEQ ID NO: 33837
  source 1..120: mol_type = other DNA

SEQ ID NO: 111660 - DNA, 120 bp, synthetic construct
  source 1..120: mol_type = other DNA
aaagaagttctactgtgggtaaaatgctatccaatagcatcacatactacagagaaatccttcatgaaagggagagctaattgatgtggcaaatttcattgttgtcatcttttaagaaac

SEQ ID NO: 111661 - DNA, 120 bp, synthetic construct
  source 1..120: mol_type = other DNA
gtgggtacacagtaggtgtatatacttatggggtacgcgagacgttttgatacacgcatgcaatgcgtaataatcacatcatggaaaatagggtatccatcccctcaaacatttatcctt

SEQ ID NO: 111662 - DNA, 120 bp, synthetic construct
  source 1..120: mol_type = other DNA
actacactcccgcgtgggcgacagagcaagactccctctcaaaaaggaaaaaaaatagaaagaaagagcatgggaaatctcatcattcagcctcaatgctgtaccctagaaaattatgag

SEQ ID NO: 111663 - DNA, 120 bp, synthetic construct; identical to SEQ ID NO: 33838
  source 1..120: mol_type = other DNA

SEQ ID NO: 111664 - DNA, 120 bp, synthetic construct
  source 1..120: mol_type = other DNA
acggtctacagtgcacgcatcttcctcattcctccacgttccccagatgacgatttcatctgtgtctccttccacatactcccaaatggaccgtcccagcccttgaacttgaaaatcatt

SEQ ID NO: 111665 - DNA, 120 bp, synthetic construct
  source 1..120: mol_type = other DNA
ggacccaacttatggatcccatcatcccagggagaaagaaaaatcaaaagcttcagtatctcttttagggtatcctctgctgtatttgcatggaggataaggcactcaatatctagtagc

SEQ ID NO: 111666 - DNA, 120 bp, synthetic construct
  source 1..120: mol_type = other DNA
gacatcaagtgatctgcctgcctcggcctcccaaagtgctggcactacagcgtgagtcactgtgcccgaccaggagatgctctttgtaacaaagcctctgaaaaactccaaaccctgaat

SEQ ID NO: 111667 - DNA, 120 bp, synthetic construct
  source 1..120: mol_type = other DNA
acatgagctcatcattttttatggctacatagtattccatggtgtctatgtgccacattttcttaatccagtctatcattgttggacatttgggttggttccaagtctttgctattgtga

SEQ ID NO: 111668 - DNA, 120 bp, synthetic construct
  source 1..120: mol_type = other DNA
gagttcaagtgatcctcctgcctcagctgccctagtagctaggactacaggcgtgcgccaacaacgcatggctaaattattttttgtatttttagtagagatggggtttcaccatcttgg

SEQ ID NO: 111669 - DNA, 120 bp, synthetic construct; identical to SEQ ID NO: 111666
  source 1..120: mol_type = other DNA

SEQ ID NO: 111670 - DNA, 120 bp, synthetic construct
  source 1..120: mol_type = other DNA
ctgccacagccaccagagggagagggtgcctggaaggaggttgtggggctccaggagcagtagaggttccccagatctgtgagcatgccctgcctggcactgcaggaagaggtggctgcc

SEQ ID NO: 111671 - DNA, 120 bp, synthetic construct
  source 1..120: mol_type = other DNA
tccagagaagctgtgactacagccacgcaccatcatgacccactgatttttttaggttttgtcaagaaagtctcgctatattacccaggctggtctccaactcctgggcccaagcaatcc

SEQ ID NO: 111672 - DNA, 120 bp, synthetic construct
  source 1..120: mol_type = other DNA
ccacgtgacaactcaatctcaactcctcctgacctgcagaccctgcacactctgattctgccctaccccaggacctgcacacgccttccatggttccttgaagtgaaccatccgctcatg

SEQ ID NO: 111673 - DNA, 120 bp, synthetic construct
  source 1..120: mol_type = other DNA
gtgtgcccttaacaaatacatgctgaatgaaaggaggtatcggtgaatgttcccgtaagtgaagaggttgggaatttaacctgacaacggaaggagccagaagctaaaattttaatttgc

SEQ ID NO: 111674 - DNA, 120 bp, synthetic construct; identical to SEQ ID NO: 1912
  source 1..120: mol_type = other DNA

SEQ ID NO: 111675 - DNA, 120 bp, synthetic construct
  source 1..120: mol_type = other DNA
aaatttggaagactttccccacgtcacgtggttttttttatatggatgacaactccagtctgtgtctctggaagtcatgtctaacatctcatctggagctaggcgagctcctcagcccag

SEQ ID NO: 111676 - DNA, 120 bp, synthetic construct
  source 1..120: mol_type = other DNA
cctccagagtagctgggactacaggtaggctctaacacgcaccgttaagttttctatttttagtagagacaaagtttcaccatgttgggcaggatggtctccatctcttcacctcgtgat

SEQ ID NO: 111677 - DNA, 120 bp, synthetic construct
  source 1..120: mol_type = other DNA
tatcaaacatgccctcactgcctccttctccccatgtctatcacaacaacttatgtggcaccgacggcttgctaatattaacagttgtgatccttaatacttctttggttttcatagtga

SEQ ID NO: 111678 - DNA, 120 bp, synthetic construct
  source 1..120: mol_type = other DNA
tcttaggagtgagggtgatgaacacattatgtaataagcgtcgctgtttctctgtattttatcaaaaccaaatagtcctcacattccccaacaaccccaattctccgtgatgagcttgga

SEQ ID NO: 111679 - DNA, 120 bp, synthetic construct; identical to SEQ ID NO: 1913
  source 1..120: mol_type = other DNA

SEQ ID NO: 111680 - DNA, 120 bp, synthetic construct
  source 1..120: mol_type = other DNA
tcatccccacttctcagatcccacacacaggaagcggctccagctgaatggcagacatgcctagctgagtccctgccataattccttttttttttttttccaggccttcgatgatattgc

SEQ ID NO: 111681 - DNA, 120 bp, synthetic construct
  source 1..120: mol_type = other DNA
tgaaaaagttagaaactgacaggaagaatttgagatggcgacctgcctcacataaatacattattaaaattagataagaagtgcaccacggcggaggggaggggtaggaagaatggaaag

SEQ ID NO: 111682 - DNA, 120 bp, synthetic construct
  source 1..120: mol_type = other DNA
ctctctccagggctacaggtaaaggatggtaattgtgcgcaccacacttacattcccttccaaaaatgcggcactattcacaatagcaaagacttggaaccaacccaaatgtccaacaat

SEQ ID NO: 111683 - DNA, 120 bp, synthetic construct
  source 1..120: mol_type = other DNA
cttctcccttcccttccttttcttttcgacagtttttctctgtcacccaggctggagtgcagtggtgggatctcagctcaatgcaacctccccttcccgggttcaaatcattgagtgaac

SEQ ID NO: 111684 - DNA, 120 bp, synthetic construct
  source 1..120: mol_type = other DNA
aacccaggaggcagaggttgcagtgagccaagatcgcaccattgcaatccagcctgggcaaccagagtgaacctgtgacttaagcaaataaatacataaataaaataattattttcttct

SEQ ID NO: 111685 - DNA, 120 bp, synthetic construct
  source 1..120: mol_type = other DNA
ccagcactttgggagcccgaggcgggtggatcacgaggccaggagatcgagaccacggtgaaaccccgtctctgctaaaaataaataaaaaaataaaaataaaaataaaaaataaacaaa

SEQ ID NO: 111686 - DNA, 120 bp, synthetic construct; identical to SEQ ID NO: 111628
  source 1..120: mol_type = other DNA

SEQ ID NO: 111687 - DNA, 120 bp, synthetic construct
  source 1..120: mol_type = other DNA
ggatcgctttggcacaggaatttaagaacagcctgggtaacatagacagactttcttgacaaaatcttaaaaaaattagtgggtcatgatggtgcatgcctgtagtcacagcttctctgc

SEQ ID NO: 111688 - DNA, 120 bp, synthetic construct
  source 1..120: mol_type = other DNA
tgccacttatttccttctctcttcttgcctcagcctcagggatacgacacatgcccatgatgagaagcagaacgtggtgacctttcacgaacatgggcatggctgcggacccctcgtcat

SEQ ID NO: 111689 - DNA, 120 bp, synthetic construct
  source 1..120: mol_type = other DNA
ggaatctaagcctgagaagggaaggagccagaagctaaaactttaattggcatttggcctatgttggtgtggatctaaggtctcagcctctctaagccagagaatgtgaaaaactggatg

SEQ ID NO: 111690 - DNA, 120 bp, synthetic construct; identical to SEQ ID NO: 3405
  source 1..120: mol_type = other DNA

SEQ ID NO: 111691 - DNA, 120 bp, synthetic construct; identical to SEQ ID NO: 31527
  source 1..120: mol_type = other DNA

SEQ ID NO: 111692 - DNA, 120 bp, synthetic construct; identical to SEQ ID NO: 31528
  source 1..120: mol_type = other DNA

SEQ ID NO: 111693 - DNA, 120 bp, synthetic construct; identical to SEQ ID NO: 31529
  source 1..120: mol_type = other DNA

SEQ ID NO: 111694 - DNA, 120 bp, synthetic construct; identical to SEQ ID NO: 31794
  source 1..120: mol_type = other DNA

SEQ ID NO: 111695 - DNA, 120 bp, synthetic construct; identical to SEQ ID NO: 31795
  source 1..120: mol_type = other DNA

SEQ ID NO: 111696 - DNA, 120 bp, synthetic construct
  source 1..120: mol_type = other DNA
agacactccttgaccaccacacccatgctatgccctgccctgggaccccctgcccctgcccacaccatatatatatatacagacatatatatatatagacatatatatatatatagacat

SEQ ID NO: 111697 - DNA, 120 bp, synthetic construct; identical to SEQ ID NO: 7526
  source 1..120: mol_type = other DNA

SEQ ID NO: 111698 - DNA, 120 bp, synthetic construct; identical to SEQ ID NO: 7527
  source 1..120: mol_type = other DNA

SEQ ID NO: 111699 - DNA, 120 bp, synthetic construct; identical to SEQ ID NO: 7528
  source 1..120: mol_type = other DNA

SEQ ID NO: 111700 - DNA, 120 bp, synthetic construct; identical to SEQ ID NO: 7529
  source 1..120: mol_type = other DNA

SEQ ID NO: 111701 - DNA, 120 bp, synthetic construct; identical to SEQ ID NO: 7530
  source 1..120: mol_type = other DNA

SEQ ID NO: 111702 - DNA, 120 bp, synthetic construct; identical to SEQ ID NO: 12444
  source 1..120: mol_type = other DNA

SEQ ID NO: 111703 - DNA, 120 bp, synthetic construct; identical to SEQ ID NO: 12445
  source 1..120: mol_type = other DNA

SEQ ID NO: 111704 - DNA, 120 bp, synthetic construct; identical to SEQ ID NO: 12446
  source 1..120: mol_type = other DNA

SEQ ID NO: 111705 - DNA, 120 bp, synthetic construct; identical to SEQ ID NO: 12447
  source 1..120: mol_type = other DNA

SEQ ID NO: 111706 - DNA, 120 bp, synthetic construct; identical to SEQ ID NO: 12445
  source 1..120: mol_type = other DNA

SEQ ID NO: 111707 - DNA, 120 bp, synthetic construct; identical to SEQ ID NO: 12446
  source 1..120: mol_type = other DNA

SEQ ID NO: 111708 - DNA, 120 bp, synthetic construct; identical to SEQ ID NO: 24949
  source 1..120: mol_type = other DNA

SEQ ID NO: 111709 - DNA, 120 bp, synthetic construct; identical to SEQ ID NO: 24950
  source 1..120: mol_type = other DNA

SEQ ID NO: 111710 - DNA, 120 bp, synthetic construct
  source 1..120: mol_type = other DNA
tttatgtttgctgaggagtgctttacttccaactatgtggtcagttttacaataagtgcgatgtggtgctgagacaaatgtatattctgttgatttggggtggagagttctgtagatgtc

SEQ ID NO: 111711 - DNA, 120 bp, synthetic construct; identical to SEQ ID NO: 18522
  source 1..120: mol_type = other DNA

SEQ ID NO: 111712 - DNA, 120 bp, synthetic construct; identical to SEQ ID NO: 18523
  source 1..120: mol_type = other DNA

SEQ ID NO: 111713 - DNA, 120 bp, synthetic construct; identical to SEQ ID NO: 18520
  source 1..120: mol_type = other DNA

SEQ ID NO: 111714 - DNA, 120 bp, synthetic construct; identical to SEQ ID NO: 18521
  source 1..120: mol_type = other DNA

SEQ ID NO: 111715 - DNA, 120 bp, synthetic construct; identical to SEQ ID NO: 7753
  source 1..120: mol_type = other DNA

SEQ ID NO: 111716 - DNA, 120 bp, synthetic construct
  source 1..120: mol_type = other DNA
agacgatgggcggccaggcagagatgctcctcacttcccagacggggtggcggccgggcagaggctgcaatctcggcactttggggggccaaggcaggcagctgggaggtagaggttgta

SEQ ID NO: 111717 - DNA, 120 bp, synthetic construct; identical to SEQ ID NO: 7754
  source 1..120: mol_type = other DNA

SEQ ID NO: 111718 - DNA, 120 bp, synthetic construct
  source 1..120: mol_type = other DNA
tctcttttttcgtttttcttttctttctttcttatttatttatttttttgagtcggagtctcattctgttgcccaagttggagtgcagtggtgcaatctcggctcattgtggcctccgcc

SEQ ID NO: 111719 - DNA, 120 bp, synthetic construct
  source 1..120: mol_type = other DNA
acaaagctggaggcatcacactacctgacttcaaactatactacaaggctatactatactacaagtaaccaactatactacaagtaaccaaaacagcatggtactggtaccaaaacagag

SEQ ID NO: 111720 - DNA, 120 bp, synthetic construct
  source 1..120: mol_type = other DNA
gcgattcctcagggatctagaactagaaataccatttgacccagccatcccattactgggtatatacccaaaggactataaatcatgctgctgtaaagacacatgcacacatatgtttat

SEQ ID NO: 111721 - DNA, 120 bp, synthetic construct
  source 1..120: mol_type = other DNA
ggggtgatattgtggggttgttagaagaaatatttgttgtgtagaattattggtgatggcctggatatggttttgtatgaattgaaaaactaaatggaataacagaaggagaaaaacagg

SEQ ID NO: 111722 - DNA, 120 bp, synthetic construct; identical to SEQ ID NO: 7756
  source 1..120: mol_type = other DNA

SEQ ID NO: 111723 - DNA, 120 bp, synthetic construct
  source 1..120: mol_type = other DNA
tgttttgaatgtgtcccagagattctggtatgttgtgtctttgttctcgttggtttcagagaacatctttatttctgccttcatttcgttatgtacccagtagtcattcaggagcaggtt

SEQ ID NO: 111724 - DNA, 120 bp, synthetic construct
  source 1..120: mol_type = other DNA
gtttgttcctttccatgtttagtgcctccttcaggagctcttttagggcaggcctggtggtgacaaaatctctcagcatttgcttgtctgtaaaggattttatttctccttcacttatga

SEQ ID NO: 111725 - DNA, 120 bp, synthetic construct
  source 1..120: mol_type = other DNA
aactacaaaccactgctcaatgaaatcaaagaggatacaaacaaatggaagaacattccatgctcatgggtaggaagaatcaatatcgtgaaaaatggccatactgcccaaggtaattta

SEQ ID NO: 111726 - DNA, 120 bp, synthetic construct
  source 1..120: mol_type = other DNA
agttagaatggcaatcattaaaaagtcaggaaacaacaggtgctggagaggatgtggagaaataggaacacttttacactgttggtgggactgtaaactagttcaaccatcgtggaagtc

SEQ ID NO: 111727 - DNA, 120 bp, synthetic construct
  source 1..120: mol_type = other DNA
atttcatccatgtccctacaaaggacatgaactcatcactttttatggctgcatagtattccatgctatatatgtgccacatttacttaatccagtctatcattgttggacatttgggtt

SEQ ID NO: 111728 - DNA, 120 bp, synthetic construct
  source 1..120: mol_type = other DNA
agttttcccagcaccatttattaaatagggaatcctttccccattgcttgtttttctcaggtttgtcaaagatcagatagttgtagatatgcggcgttatttctgagggctccgttttgt

SEQ ID NO: 111729 - DNA, 120 bp, synthetic construct
  source 1..120: mol_type = other DNA
catgtggtttttgtctttggctctgtttatatgctggattacatttatttatttgcgtatattgaaccagccttgcattccaggaatgaagcccacttgatcatggtggataagcttttt

SEQ ID NO: 111730 - DNA, 120 bp, synthetic construct
  source 1..120: mol_type = other DNA
ttgttgctcctttcaaaaaaccagctcctggattcattaattttttgaacggttttttgtgtctctatttccttcagttctgctctgattttagttatttcttgccttctgctagctttt

SEQ ID NO: 111731 - DNA, 120 bp, synthetic construct
  source 1..120: mol_type = other DNA
gtgtgtctgcacatgagatgggtttcctgaatacagcacactgatggctcttgactctttatccaatttgccagtctgtgtcttttaattggagcatttagtccatttacatttaaagtt

SEQ ID NO: 111732 - DNA, 120 bp, synthetic construct
  source 1..120: mol_type = other DNA
gtcattctccatccagctttgttccattgctggtgaggaactgcgttcctttggaggaggagaggcgctctgtgttttagagtttccagtttttctgttctgttttttccccatctttgt

SEQ ID NO: 111733 - DNA, 120 bp, synthetic construct
  source 1..120: mol_type = other DNA
ccctgacccttgcgcttcccaagtgaggcaatgcctcgccctgcttcggctcgcgcacggtgcgcacacccactgacctgcacccactgtctggcactccctagtgagatgaacccggta

SEQ ID NO: 111734 - DNA, 120 bp, synthetic construct; identical to SEQ ID NO: 7757
  source 1..120: mol_type = other DNA

SEQ ID NO: 111735 - DNA, 120 bp, synthetic construct; identical to SEQ ID NO: 6433
  source 1..120: mol_type = other DNA

SEQ ID NO: 111736 - DNA, 120 bp, synthetic construct; identical to SEQ ID NO: 29964
  source 1..120: mol_type = other DNA

SEQ ID NO: 111737 - DNA, 120 bp, synthetic construct; identical to SEQ ID NO: 29965
  source 1..120: mol_type = other DNA

SEQ ID NO: 111738 - DNA, 120 bp, synthetic construct
  source 1..120: mol_type = other DNA
tgacctcaagtgatctgccctcctcggcctcccaaagtgctgggattacacgaatgagccaccacgcctggcctagttaaaatatttttaaaattaaaaaaagaatggttttgtacttag

SEQ ID NO: 111739 - DNA, 120 bp, synthetic construct; identical to SEQ ID NO: 29966
  source 1..120: mol_type = other DNA

SEQ ID NO: 111740 - DNA, 120 bp, synthetic construct; identical to SEQ ID NO: 12750
  source 1..120: mol_type = other DNA

SEQ ID NO: 111741 - DNA, 120 bp, synthetic construct
  source 1..120: mol_type = other DNA
aactcaaaactggcctctccacgtggcttgggtagaaagacagtcaatgagatgatttgatggttttatgagtcaactcctccaccagaagcgctgtttgggagttgaaacgaaataatg

SEQ ID NO: 111742 - DNA, 120 bp, synthetic construct; identical to SEQ ID NO: 18989
  source 1..120: mol_type = other DNA

SEQ ID NO: 111743 - DNA, 120 bp, synthetic construct; identical to SEQ ID NO: 24331
  source 1..120: mol_type = other DNA

SEQ ID NO: 111744 - DNA, 120 bp, synthetic construct; identical to SEQ ID NO: 13173
  source 1..120: mol_type = other DNA

SEQ ID NO: 111745 - DNA, 120 bp, synthetic construct; identical to SEQ ID NO: 13174
  source 1..120: mol_type = other DNA

SEQ ID NO: 111746 - DNA, 120 bp, synthetic construct
  source 1..120: mol_type = other DNA
atgttctcccattctgtaggttgcctattcactctgacggtagtttcttttgctgtgcagaagctctttagtttaattagatcccatttgtcaattttggcttttgttgccattgctttt

SEQ ID NO: 111747 - DNA, 120 bp, synthetic construct
  source 1..120: mol_type = other DNA
cactcatgatttggctctctgtttgtctgttattggagtataagaatgcttgtgatttttgcacattgattttgtatcctgagactttgctgaagttgcttatcagcttaaggagatttt

SEQ ID NO: 111748 - DNA, 120 bp, synthetic construct
  source 1..120: mol_type = other DNA
tttattaatcttgctagcggtctatcaattttgttgatcttttcaaaaaaccagctcctggattcattaattttttgaagggttttttatgtctctatctccctcagttctgctctgatc

SEQ ID NO: 111749 - DNA, 120 bp, synthetic construct
  source 1..120: mol_type = other DNA
tgcatgtgagatgggtttcctgagtacagcacactgatgggtcttgactctttatgcaatttgccagtgtgtcttttaattggagcatttagcccatttacatttaaggttaatattgtt

SEQ ID NO: 111750 - DNA, 120 bp, synthetic construct; identical to SEQ ID NO: 13175
  source 1..120: mol_type = other DNA

SEQ ID NO: 111751 - DNA, 120 bp, synthetic construct; identical to SEQ ID NO: 13176
  source 1..120: mol_type = other DNA

SEQ ID NO: 111752 - DNA, 120 bp, synthetic construct; identical to SEQ ID NO: 24185
  source 1..120: mol_type = other DNA

SEQ ID NO: 111753 - DNA, 120 bp, synthetic construct; identical to SEQ ID NO: 24186
  source 1..120: mol_type = other DNA

SEQ ID NO: 111754 - DNA, 120 bp, synthetic construct
  source 1..120: mol_type = other DNA
catggatgaaattggaaatcatcattctcagtaaactaccgcaaggacaaaaaaaccaaacaccacatgttctcactcataggtgggaattgaacaatgagaacacatggacacaggaag

SEQ ID NO: 111755 - DNA, 120 bp, synthetic construct
  source 1..120: mol_type = other DNA
cctgagtctggtggggacgtggagaacctttatgtctggctaggggattgtaaacacaccgatcggcactctgcatctagctcaaggtttgtaaacacaccaatcagcatcctgtgtcta

SEQ ID NO: 111756 - DNA, 120 bp, synthetic construct; identical to SEQ ID NO: 24187
  source 1..120: mol_type = other DNA

SEQ ID NO: 111757 - DNA, 120 bp, synthetic construct
  source 1..120: mol_type = other DNA
gagttcattgtagattctggacattagcactttgtcagattatttttaatttatttttttatttcaatagattttcagggaacaggtggctttggttacataataagttctttagtggtg

SEQ ID NO: 111758 - DNA, 120 bp, synthetic construct; identical to SEQ ID NO: 24746
  source 1..120: mol_type = other DNA

SEQ ID NO: 111759 - DNA, 120 bp, synthetic construct
  source 1..120: mol_type = other DNA
ctcatagtggttttgatttgcatttctctgatggccagtgatgatgagcattttttcatgtgttttttggctgcataaatgtcttcttttgagaagtgtctgttcatgtccttcgcccac

SEQ ID NO: 111760 - DNA, 120 bp, synthetic construct
  source 1..120: mol_type = other DNA
ctctctgtttgtctgttgttggtgtataagaatgcttgtgatttttgtacattgattttgtatcctgagactttgctgaagtcgcttatcagcttaaggagattttgggctgagacgatg

SEQ ID NO: 111761 - DNA, 120 bp, synthetic construct
  source 1..120: mol_type = other DNA
gtgatatcccctttatcattttttattgcgtctatttgattcttctcttttttctttattactcttgctagcggtctatcaattttgttgatcctttcaaaaaaccagctcctggattca

SEQ ID NO: 111762 - DNA, 120 bp, synthetic construct
  source 1..120: mol_type = other DNA
ttgatctttgttggtttaaagtctgttttatcagagactaggattgcaacccctgcctttttttgttttccattggcttggtagatctttctccatccttttattttgagcctatgtgtg

SEQ ID NO: 111763 - DNA, 120 bp, synthetic construct; identical to SEQ ID NO: 69279
  source 1..120: mol_type = other DNA

SEQ ID NO: 111764 - DNA, 120 bp, synthetic construct
  source 1..120: mol_type = other DNA
gtttacctaagcaagcctgggcaatggcgggcgcccctcccccagcctcgttgccgccttgcagtttgatctcagactgctgtgccagcaatcagcgagattccgtgggcgtaggaccct

SEQ ID NO: 111765 - DNA, 120 bp, synthetic construct
  source 1..120: mol_type = other DNA
atatgcagccaaactaagcttcatgagtgaaggagaaataaaatcctttagagacaaacaaatgctaagagattttgtcaccaccaagcctgccctacaagagctcctgaaggaagcact

SEQ ID NO: 111766 - DNA, 120 bp, synthetic construct
  source 1..120: mol_type = other DNA
cacataacaaaaaaagagaattttagaccaatatccctgatgaacattcacgcaaatatcctcaataaaatactggcaaaccgaatccagcagcacatcaaaaagcttagccaccatgat

SEQ ID NO: 111767 - DNA, 120 bp, synthetic construct
  source 1..120: mol_type = other DNA
gatggcattcaatctataaattaccttgggcagtatggccattttcacgatattgattattcctatccatgagcatggaatgttcttccatttgtttgtgtcgtcttttatttcattgag

SEQ ID NO: 111768 - DNA, 120 bp, synthetic construct; identical to SEQ ID NO: 24747
  source 1..120: mol_type = other DNA

SEQ ID NO: 111769 - DNA, 120 bp, synthetic construct
  source 1..120: mol_type = other DNA
atagatacccagtaaggggatggctggctcaaatgatatttctagttctagatccttgaggaatcgccacactgtcttccacaatggttgaactagtttacagtcccaacaacagtgtaa

SEQ ID NO: 111770 - DNA, 120 bp, synthetic construct; identical to SEQ ID NO: 111767
  source 1..120: mol_type = other DNA

SEQ ID NO: 111771 - DNA, 120 bp, synthetic construct
  source 1..120: mol_type = other DNA
gaggttgcagtgagccgagatcacgcactgcactctagcctgggcaacaagagcgaaactctgtcttgaacagacacttctcaaaagaagacatttatgcagccaaaaaacacatgaaaa

SEQ ID NO: 111772 - DNA, 120 bp, synthetic construct; identical to SEQ ID NO: 24748
  source 1..120: mol_type = other DNA

SEQ ID NO: 111773 - DNA, 120 bp, synthetic construct; identical to SEQ ID NO: 24749
  source 1..120: mol_type = other DNA

SEQ ID NO: 111774 - DNA, 120 bp, synthetic construct
  source 1..120: mol_type = other DNA
ctggcaaccgccccatatgagaagtgaggagcccctccgcccggcagccaccccatctgggaagtgaggagcgtctctgcccggcagccaccccatccgggagggaagtgggggtcagcc

SEQ ID NO: 111775 - DNA, 120 bp, synthetic construct; identical to SEQ ID NO: 24750
  source 1..120: mol_type = other DNA

SEQ ID NO: 111776 - DNA, 120 bp, synthetic construct
  source 1..120: mol_type = other DNA
ccccaagttattaggttcattagtgatcggtatcttagtctcagttttctttttcctttctgttttttttttagatggagtttcgcgcttgttgcccaggctgtggtgcagtggcatgat

SEQ ID NO: 111777 - DNA, 120 bp, synthetic construct
  source 1..120: mol_type = other DNA
acctcatcctcccaaagcgctgggattgtaggtgtgagccatcatgcatggcctgcaaattgtatttatatgcagctgtagacatttaaaataaagatgtaaacattctcagctcttcct

SEQ ID NO: 111778 - DNA, 120 bp, synthetic construct; identical to SEQ ID NO: 35248
  source 1..120: mol_type = other DNA

SEQ ID NO: 111779 - DNA, 120 bp, synthetic construct
  source 1..120: mol_type = other DNA
tttttcttatttattttattttattttatttttttttgagacagagtctcgctctgttgcccaggctggagtacagtggcatagtctcggctcaccacaacctccacctcctgggttcaa

SEQ ID NO: 111780 - DNA, 120 bp, synthetic construct
  source 1..120: mol_type = other DNA
cctcagcctccaaagtgctgggattacaggcatgagccaccttcctggcatgagtgagtttgtttgtttgtttgtttgtttgtctgtttttggcatgagtttctttctttcttttttttt

SEQ ID NO: 111781 - DNA, 120 bp, synthetic construct; identical to SEQ ID NO: 35250
  source 1..120: mol_type = other DNA

SEQ ID NO: 111782 - DNA, 120 bp, synthetic construct; identical to SEQ ID NO: 35251
  source 1..120: mol_type = other DNA

SEQ ID NO: 111783 - DNA, 120 bp, synthetic construct; identical to SEQ ID NO: 35252
  source 1..120: mol_type = other DNA

SEQ ID NO: 111784 - DNA, 120 bp, synthetic construct
  source 1..120: mol_type = other DNA
cgtgatccgccggcctcggccttccaaagtgctgggattacaggtgtgagccaccatgcctggccttttatttcttttttttagcccattctcccccttttatttttaaaattttattaa

SEQ ID NO: 111785 - DNA, 120 bp, synthetic construct
  source 1..120: mol_type = other DNA
tctcacttgaggtcaggagttcgagatcagcctggccaatatggtgaaaccctgtctctactaaaaatacaaaaattagccattagccaggcgtggtggcgcacacctgtaatcccagct

SEQ ID NO: 111786 - DNA, 120 bp, synthetic construct
  source 1..120: mol_type = other DNA
gtggaattaaaacacactcacacactttggccaacagttgaattaacttttttttttttggcagggacggagtctcactgtgttgcccaggctggagtgcagtggtgcgatctcggctca

SEQ ID NO: 111787 - DNA, 120 bp, synthetic construct; identical to SEQ ID NO: 29752
  source 1..120: mol_type = other DNA

SEQ ID NO: 111788 - DNA, 120 bp, synthetic construct; identical to SEQ ID NO: 10103
  source 1..120: mol_type = other DNA

SEQ ID NO: 111789 - DNA, 120 bp, synthetic construct
  source 1..120: mol_type = other DNA
agcctgcccagtgcctgcgattgcaggcgcgcgccgccacgcctgactggttttcctatttttttggtggagacggggtttcgctgtgttggccgggctggtctccagctcctaaccgcg

SEQ ID NO: 111790 - DNA, 120 bp, synthetic construct; identical to SEQ ID NO: 21684
  source 1..120: mol_type = other DNA

SEQ ID NO: 111791 - DNA, 120 bp, synthetic construct; identical to SEQ ID NO: 20616
  source 1..120: mol_type = other DNA

SEQ ID NO: 111792 - DNA, 120 bp, synthetic construct; identical to SEQ ID NO: 19431
  source 1..120: mol_type = other DNA

SEQ ID NO: 111793 - DNA, 120 bp, synthetic construct; identical to SEQ ID NO: 19432
  source 1..120: mol_type = other DNA

SEQ ID NO: 111794 - DNA, 120 bp, synthetic construct; identical to SEQ ID NO: 19433
  source 1..120: mol_type = other DNA

SEQ ID NO: 111795 - DNA, 120 bp, synthetic construct; identical to SEQ ID NO: 13639
  source 1..120: mol_type = other DNA

SEQ ID NO: 111796 - DNA, 120 bp, synthetic construct; identical to SEQ ID NO: 13640
  source 1..120: mol_type = other DNA

SEQ ID NO: 111797 - DNA, 120 bp, synthetic construct; identical to SEQ ID NO: 29067
  source 1..120: mol_type = other DNA

SEQ ID NO: 111798 - DNA, 120 bp, synthetic construct
  source 1..120: mol_type = other DNA
attgtcagattcaccgaagttgaaatgaaggaaaaagtgttaagggcagccagagagaaaggtcgggttacccacaaagggaagcccatcagactaacagctgatctctcggcagaaact

SEQ ID NO: 111799 - DNA, 120 bp, synthetic construct
  source 1..120: mol_type = other DNA
aattgaactcagctctgcaccaagcaaacctaatagacgtctacagaactctccaccccaaatcaacagaatatacattcttctcagcaccacactgcacttattccaaaattgaccaca

SEQ ID NO: 111800 - DNA, 120 bp, synthetic construct
  source 1..120: mol_type = other DNA
acagactctgaaattgaggcaataattaatagcttaccaaccaaaaaaagtccaggactagacggattcacagccgaattgtaccagaggtacaaggaggagctggtaccattccttctg

SEQ ID NO: 111801 - DNA, 120 bp, synthetic construct; identical to SEQ ID NO: 19048
  source 1..120: mol_type = other DNA

SEQ ID NO: 111802 - DNA, 120 bp, synthetic construct
  source 1..120: mol_type = other DNA
tgcccggccagctgccccgtccgggaggtgaggggcgcctctgcccggccgcccctactgggaagtgaggagcccctctgcccggccaccaccccgtctgggaggtgtgcccaacagctc

SEQ ID NO: 111803 - DNA, 120 bp, synthetic construct; identical to SEQ ID NO: 19049
  source 1..120: mol_type = other DNA

SEQ ID NO: 111804 - DNA, 120 bp, synthetic construct
  source 1..120: mol_type = other DNA
ttgagaaaattccacagccatgacatgttatctcttggatgaggtaaaactcacctcatcaaatgacttgtggggacggataaccatttgggattcatatgatctgaccctgacgaattc

SEQ ID NO: 111805 - DNA, 120 bp, synthetic construct
  source 1..120: mol_type = other DNA
aataaaatcagaagtaaaaatactcacaggaaaatgggttacccagtgaagaacctcggaaccactaaccacatccctctcaatcacctccagcttgattaccagggcatcccatttttt

SEQ ID NO: 111806 - DNA, 120 bp, synthetic construct
  source 1..120: mol_type = other DNA
tgtactccagcctgggtaacacagcaggaccctgtctcagggagaggaaagaaaaaaaaaaaccctccactatggaaatgttcttgatttgaggttaaacagatgtgacaactaaatata

SEQ ID NO: 111807 - DNA, 120 bp, synthetic construct
  source 1..120: mol_type = other DNA
tcattcccttctgtttgggcttttggttctggagggtggtgctggactccagagctctgaaacatatttgacatttcttccaaccgcttcatctcattaatagatctgtaaaggggaaaa

SEQ ID NO: 111808 - DNA, 120 bp, synthetic construct
  source 1..120: mol_type = other DNA
agctacaattctgccactgtactccagtctgggcaatacagtaagactctgtctcttttttttgtttgtttttttgaaacagagtctcactctgtcacccaggctagaatagagtgccat

SEQ ID NO: 111809 - DNA, 120 bp, synthetic construct
  source 1..120: mol_type = other DNA
cagtgagccaagatcgcaccattgcactccagcctgggcaacagagtgagactccatctctaaaataaataaaaaataaaataaaataaagtgtttgttatctggcacgtaagtagccct

SEQ ID NO: 111810 - DNA, 120 bp, synthetic construct
  source 1..120: mol_type = other DNA
cccaggaggtggaggttgcagtgagccaagattgcaccacttcactccagcctgggcgaaaagacaaaactgtctcaaaaaaaaaaaaaagaatactgctatggacatttgtgtacaaat

SEQ ID NO: 111811 - DNA, 120 bp, synthetic construct
  source 1..120: mol_type = other DNA
ctacactgaatttgtagatcactttaagtggtattgccatcttagcaatattaagtgttctaatctaatccatgaacacgggatgtctttcacttatgtctttttaaatttcttccaatg

SEQ ID NO: 111812 - DNA, 120 bp, synthetic construct
  source 1..120: mol_type = other DNA
tgttagtattttgttcaggactgcgaaaagttgtgtggtttttttttgtttgttctgagcccaggctagagtgcagtggcataatcacagctcactacagccttaactccccaagctcag

SEQ ID NO: 111813 - DNA, 120 bp, synthetic construct
  source 1..120: mol_type = other DNA
gctgtcttatacactctattgcaattcaagactgaagaagacccaaattactgctacactgtctgaaatgccttttcacccttcaagcttcaaaaaaccacaaaggtaactgctaggcag

SEQ ID NO: 111814 - DNA, 120 bp, synthetic construct
  source 1..120: mol_type = other DNA
ttgaacccaggagatggaggttgcagtgagttgagatcgtgccactgcactccagcctgggtgagagtgaaactgtctcaaaaatatatatatattgcattaatatattgctgcaaaagc

SEQ ID NO: 111815 - DNA, 120 bp, synthetic construct; identical to SEQ ID NO: 34073
  source 1..120: mol_type = other DNA

SEQ ID NO: 111816 - DNA, 120 bp, synthetic construct
  source 1..120: mol_type = other DNA
accaaacacacacaccacacacacacaacacagcacacacacatcacacacacaccacaccacacaacatacacaccacaccacacacacacaccacacatacaccacacacaccacaca

SEQ ID NO: 111817 - DNA, 120 bp, synthetic construct; identical to SEQ ID NO: 34074
  source 1..120: mol_type = other DNA

SEQ ID NO: 111818 - DNA, 120 bp, synthetic construct; identical to SEQ ID NO: 34075
  source 1..120: mol_type = other DNA

SEQ ID NO: 111819 - DNA, 120 bp, synthetic construct
  source 1..120: mol_type = other DNA
ggatatgttttcatttctcttgggtatgtatctagagttgagttgcaggatcatagaggaactgccagactgtttttcacagtggctgtcctattttaccttcccacgagcagtatatga

SEQ ID NO: 111820 - DNA, 120 bp, synthetic construct
  source 1..120: mol_type = other DNA
gagctgaaattgcaccactgcactccagcccgggcaatgagagtgagactgtctcaaaaaaaaaaaaaaaaaaaaaaaaaattctatccccagccaagtgccatggctcattcctacaat

SEQ ID NO: 111821 - DNA, 120 bp, synthetic construct; identical to SEQ ID NO: 18015
  source 1..120: mol_type = other DNA

SEQ ID NO: 111822 - DNA, 120 bp, synthetic construct; identical to SEQ ID NO: 18016
  source 1..120: mol_type = other DNA

SEQ ID NO: 111823 - DNA, 120 bp, synthetic construct; identical to SEQ ID NO: 18012
  source 1..120: mol_type = other DNA

SEQ ID NO: 111824 - DNA, 120 bp, synthetic construct
  source 1..120: mol_type = other DNA
ttcataatggatacttttttttttttgagatggagtcttgctctgttgccttggctggagtgcagtggtgctctcggctcactgcaacctttaaccccgggttcaagcaattctcctgcc

SEQ ID NO: 111825 - DNA, 120 bp, synthetic construct; identical to SEQ ID NO: 18013
  source 1..120: mol_type = other DNA

SEQ ID NO: 111826 - DNA, 120 bp, synthetic construct; identical to SEQ ID NO: 18014
  source 1..120: mol_type = other DNA

SEQ ID NO: 111827 - DNA, 120 bp, synthetic construct; identical to SEQ ID NO: 18014
  source 1..120: mol_type = other DNA

SEQ ID NO: 111828 - DNA, 120 bp, synthetic construct; identical to SEQ ID NO: 18007
  source 1..120: mol_type = other DNA

SEQ ID NO: 111829 - DNA, 120 bp, synthetic construct
  source 1..120: mol_type = other DNA
ttcctaaaagcttctgcaaatttccaggagagccctaagtgggtcccttgcataggaaggctgggcccaggtgttgggatcaccaccaccctccctgtggctgggcaggatacccgaggt

SEQ ID NO: 111830 - DNA, 120 bp, synthetic construct; identical to SEQ ID NO: 18010
  source 1..120: mol_type = other DNA

SEQ ID NO: 111831 - DNA, 120 bp, synthetic construct
  source 1..120: mol_type = other DNA
cagggacacaaacactgcggaaggccacagggtccctctgcctaggaaaaccagagacctttgttcacttgtttatctgctgaccttccctccactattgtcctgtgaccctgccaaatc

SEQ ID NO: 111832 - DNA, 120 bp, synthetic construct; identical to SEQ ID NO: 18011
  source 1..120: mol_type = other DNA

SEQ ID NO: 111833 - DNA, 120 bp, synthetic construct
  source 1..120: mol_type = other DNA
gtttacagtcccatcaacagtgtaaaagtgttcctatttctccacatcctctccagcacctgttgtttcctgactttttaatgattgccattctaactggtgtgagatggtatctcattg

SEQ ID NO: 111834 - DNA, 120 bp, synthetic construct
  source 1..120: mol_type = other DNA
aaccagttacagttttgccaagcatcgctgctcattccaactgggaggcagtagaacacacaggaattaggtagccataggactagtgaaaaatgggtgatcaactctagtgaaaagcag

SEQ ID NO: 111835 - DNA, 120 bp, synthetic construct
  source 1..120: mol_type = other DNA
ctaaatagcagctgataaagaatattcttatttcttacttgaatgggaacacggctagtaaatactcattaaaccttgttaaaaaaaaaaaaaaaacactgacagtgtggacagaggaaa

SEQ ID NO: 111836 - DNA, 120 bp, synthetic construct
  source 1..120: mol_type = other DNA
aactagaagcagcagcgataagagacccctgtagacactcccagtccctagggaagccattttttttttttttttttttttttttactttcatctcacagtggtccttggggaaggcagt

SEQ ID NO: 111837 - DNA, 120 bp, synthetic construct; identical to SEQ ID NO: 29707
  source 1..120: mol_type = other DNA

SEQ ID NO: 111838 - DNA, 120 bp, synthetic construct; identical to SEQ ID NO: 29708
  source 1..120: mol_type = other DNA

SEQ ID NO: 111839 - DNA, 120 bp, synthetic construct; identical to SEQ ID NO: 28952
  source 1..120: mol_type = other DNA

SEQ ID NO: 111840 - DNA, 120 bp, synthetic construct; identical to SEQ ID NO: 28953
  source 1..120: mol_type = other DNA

SEQ ID NO: 111841 - DNA, 120 bp, synthetic construct
  source 1..120: mol_type = other DNA
ctgatggccagtgatggtgagcattttttcatgtgttttttggctgcataaatgtcttcttttgagaagtgtctgttcatgtcctttgcccactttttgatggggttgtttgtttgataa

SEQ ID NO: 111842 - DNA, 120 bp, synthetic construct
  source 1..120: mol_type = other DNA
gcaggagaatcgcctgaacccaggaggcgcaggttgcagtgagccgagatcgtgccaccatactccagcatgggcaacagagcgagacttcatctccaaaaaaaaaaaaaaaaaaaaaaa

SEQ ID NO: 111843 - DNA, 120 bp, synthetic construct; identical to SEQ ID NO: 28955
  source 1..120: mol_type = other DNA

SEQ ID NO: 111844 - DNA, 120 bp, synthetic construct; identical to SEQ ID NO: 28956
  source 1..120: mol_type = other DNA

SEQ ID NO: 111845 - DNA, 120 bp, synthetic construct
  source 1..120: mol_type = other DNA
tttattattattgtgaagtgtactccttctacttacaaaaaaagagctaactgtaaacagccctaggcaggtccttcaggaggtcttccagaagaaggcattgttatcagagaagatggc

SEQ ID NO: 111846 - DNA, 120 bp, synthetic construct; identical to SEQ ID NO: 7593
  source 1..120: mol_type = other DNA

SEQ ID NO: 111847 - DNA, 120 bp, synthetic construct
  source 1..120: mol_type = other DNA
aggagttcaagaccagcctagccaacatggtaaaaccctgtctctactaaaaccacaaaaattagccgggcatggtggcacacggctgcaatcccagctactcaggtgataaaggcagga

SEQ ID NO: 111848 - DNA, 120 bp, synthetic construct
  source 1..120: mol_type = other DNA
caacctctgcctcccgggttcaagcgattctcccacttcagcgtaccgagtagctgggattacaggcacgctccagtgcgtccggctaatttttgtatttttagttgagacggggtttca

SEQ ID NO: 111849 - DNA, 120 bp, synthetic construct
  source 1..120: mol_type = other DNA
ttggactcccaaagtgctgggattataggcgtgagccatcacactccagctagtagttaattttatagtagtttatctgataggtccagatttaaaactataaggaagggttggggacga

SEQ ID NO: 111850 - DNA, 120 bp, synthetic construct; identical to SEQ ID NO: 11642
  source 1..120: mol_type = other DNA

SEQ ID NO: 111851 - DNA, 120 bp, synthetic construct
  source 1..120: mol_type = other DNA
ccaaagtgctgggattacaggcgtgagccactgcacctggccggaatagtgctctctctctaccattatatgtgggacaaggggaaaggagaatggtaaatacagttattttatgtacta

SEQ ID NO: 111852 - DNA, 120 bp, synthetic construct; identical to SEQ ID NO: 11643
  source 1..120: mol_type = other DNA

SEQ ID NO: 111853 - DNA, 120 bp, synthetic construct
  source 1..120: mol_type = other DNA
atacccagtaatgggatggctgggtcaaatggtatttctagttctagatccttgaggaatcgccacactgacttccacaatggttgaactagtttatagtcccaccaacagtgtaagagt

SEQ ID NO: 111854 - DNA, 120 bp, synthetic construct
  source 1..120: mol_type = other DNA
gtagtttgatggggatggcattgaatctataaattaccttgggcagcatggccattttcacgatattgattcttcctacccatgagcatggaatgttcttccatttgtttgtatcctctt

SEQ ID NO: 111855 - DNA, 120 bp, synthetic construct
  source 1..120: mol_type = other DNA
tattgattggaatagtttcagaaggaatggtaccagttcctccttgtacctctgcctaagcaagcctgggcaatggcagacgaccctcccccagcctcactgctgccttgcagtttgatc

SEQ ID NO: 111856 - DNA, 120 bp, synthetic construct; identical to SEQ ID NO: 11644
  source 1..120: mol_type = other DNA

SEQ ID NO: 111857 - DNA, 120 bp, synthetic construct
  source 1..120: mol_type = other DNA
gggaagcttgaactgggtggagcccaccacggctcaaggaggcctgcctgcctctgtaggctccacctctgggggcagggcacagacaaacaaaaagacagcagtaacctctgcagactt

SEQ ID NO: 111858 - DNA, 120 bp, synthetic construct
  source 1..120: mol_type = other DNA
ttagagaaaaaagaataaaaagaaacgaacaaagcctccaagaaatgtgggactatatgaaaagaccaaatctgcgtctgattggtgtacctgaaagtgatggggagaatggaaccaagt

SEQ ID NO: 111859 - DNA, 120 bp, synthetic construct
  source 1..120: mol_type = other DNA
gttaacaaggatacccaggaattgaactcagctctgcaccaagcggacctaatagacatctacagaactctccaccccaaatcaacagaatatacatttttttcagcaccacaccatgcc

SEQ ID NO: 111860 - DNA, 120 bp, synthetic construct
  source 1..120: mol_type = other DNA
ccttgatgaacattgatgcaaaaatcctcagtaaaatactggcaaactgaatccagcagcacatcaaaaagcttatccaccatgatcaagtgggcttcatccctgggatgcaaggctggt

SEQ ID NO: 111861 - DNA, 120 bp, synthetic construct
  source 1..120: mol_type = other DNA
ccatccccatcaaactaccaatgactttcttcacagaattggaaaaaactaaagttcatatggaaccaaaaaagagcccacatcgccaagtcaatcctaagccaaaagaacaaagctgga

SEQ ID NO: 111862 - DNA, 120 bp, synthetic construct
  source 1..120: mol_type = other DNA
aacacatgagaaaatgctcatcatcactggtcatcagagaaatgcaaatcaaagccacaatgagatagcatctcacaccagttagaatggcaatcattaaaaagtcaggaaacaacaggt

SEQ ID NO: 111863 - DNA, 120 bp, synthetic construct; identical to SEQ ID NO: 25360
  source 1..120: mol_type = other DNA

SEQ ID NO: 111864 - DNA, 120 bp, synthetic construct; identical to SEQ ID NO: 71048
  source 1..120: mol_type = other DNA

SEQ ID NO: 111865 - DNA, 120 bp, synthetic construct; identical to SEQ ID NO: 61532
  source 1..120: mol_type = other DNA

SEQ ID NO: 111866 - DNA, 120 bp, synthetic construct
  source 1..120: mol_type = other DNA
ccaaatcatgggtgaactcccattcacaattgcttcaaagagaataaaatacctaggaatccaacttacaagggatgtgaaggacctcttcaaggagaactacaaaccactgctcaagga

SEQ ID NO: 111867 - DNA, 120 bp, synthetic construct
  source 1..120: mol_type = other DNA
ccaaaattgacaaatgggatctaattaaactaaagagcttctgcacagcaaaagaaactaccatcagagtgaacaggcaacctacaacatgggagaaaattttcgcaacctactcatctg

SEQ ID NO: 111868 - DNA, 120 bp, synthetic construct
  source 1..120: mol_type = other DNA
ttagtgggtgcagcgcaccagcatggcacatgtatacatatgtaactaacctgcacaatgtgcacatgtaccctaaaacttagagtataataaaaaaaaaaaaaaaaaaaaaaaaaaact

SEQ ID NO: 111869 - DNA, 120 bp, synthetic construct; identical to SEQ ID NO: 25359
  source 1..120: mol_type = other DNA

SEQ ID NO: 111870 - DNA, 120 bp, synthetic construct; identical to SEQ ID NO: 27198
  source 1..120: mol_type = other DNA

SEQ ID NO: 111871 - DNA, 120 bp, synthetic construct; identical to SEQ ID NO: 27199
  source 1..120: mol_type = other DNA

SEQ ID NO: 111872 - DNA, 120 bp, synthetic construct
  source 1..120: mol_type = other DNA
tttgctcctgggacaggcggtgggaccggggcgtcgccggagacgcccccagcgaagttgggctctccaggtgtgggggtcccggggggtagcgacgtcgcggacccggcctgtgggatg

SEQ ID NO: 111873 - DNA, 120 bp, synthetic construct
  source 1..120: mol_type = other DNA
tgaagaagtaagtatggcttgctggggtcggggccgggccgggccagtcacggtgctgatggttctgtcttccttccttctctcctccctccctcccttacttcctcttaacaccctgag

SEQ ID NO: 111874 - DNA, 120 bp, synthetic construct
  source 1..120: mol_type = other DNA
tgctcctttcccagccttcttaactttcaaaactttgcctcctgtttccaagaaaggaccttatctgctgggctaggcctcgagggactggcaaggacaccctgcgcagggcaccatgac

SEQ ID NO: 111875 - DNA, 120 bp, synthetic construct
  source 1..120: mol_type = other DNA
tctgaagtttgtactctggagctggagcagtcagggttaaatgggagcggctgggaagggtgtgtttccacgaggcctttctgatgtctcagtgcccagtctggacccgggtagaaggtg

SEQ ID NO: 111876 - DNA, 120 bp, synthetic construct
  source 1..120: mol_type = other DNA
tggactggactgtgcgtcgcagctacccacagcttgaccccactgccttgaagtgagtgatgcaccctcactagtgttcagcgtccaatttcatcctggccctgagtgtgtaacggcttt

SEQ ID NO: 111877 - DNA, 120 bp, synthetic construct
  source 1..120: mol_type = other DNA
ttgatcacaaggtcagaagtttgagaccagcgtggccaacatggtgaaaccctctctctactaaaaatagaaaaactagccaggtgtggtggcacatgccaataatcccagctacttcat

SEQ ID NO: 111878 - DNA, 120 bp, synthetic construct
  source 1..120: mol_type = other DNA
gtgcccagccagctggggcaggcctggaatgttggttcctctctcaggatctggggcgctgctgtagctgtcggggaatcagtgaggcggctggacggcccgtatatcccacaaacgcca

SEQ ID NO: 111879 - DNA, 120 bp, synthetic construct
  source 1..120: mol_type = other DNA
cccctgaccttaagtaatcctctctggcctcccaaagtgctgggattacaggtgtaagccatagtactgggcctaaagttcaccttttttttttttttttttttttttgagatggagtct

SEQ ID NO: 111880 - DNA, 120 bp, synthetic construct
  source 1..120: mol_type = other DNA
cctgtatgatctgtttctaggcagacggaggctcctagccccacctctctgtgagcttgagtggcgtttatgactctccttcctatttcctgtcctgctaatcaacaagtcagctaaaca

SEQ ID NO: 111881 - DNA, 120 bp, synthetic construct
  source 1..120: mol_type = other DNA
gtgcgtccgagcatctggcctctgctgtctgaaaacagcaccttccccgccccccggccaccgcatctcctctgaatagaaggcaagtcttgcctcccaggaatggcctgtgaccttcat

SEQ ID NO: 111882 - DNA, 120 bp, synthetic construct
  source 1..120: mol_type = other DNA
acaggcgtgagtcaccgcgcctggccccccagctgttttttatgctccatgcttgggcttcctgttaagaattaaaaaagaaaaaaaaaactatggagatggaatttacatactgtacaa

SEQ ID NO: 111883 - DNA, 120 bp, synthetic construct
  source 1..120: mol_type = other DNA
gggtaacagacctttggagaagctgcagacgcttccacgcccacccactgggtgtgaggaccttgctcctcgtcatttttgtttttgtttaattttttcttttatgagacagggtcttat

SEQ ID NO: 111884 - DNA, 120 bp, synthetic construct
  source 1..120: mol_type = other DNA
ctagggacagagcaagactctgtctcagaaaaaaaaaaaagtgtcctaactgtgtcctccaaagccctcgccggccgatgacagactagagggcgctgtgctcccaccccctaccgccct

SEQ ID NO: 111885 - DNA, 120 bp, synthetic construct
  source 1..120: mol_type = other DNA
ctgagctgtgtgtccttagcgccccacgtatatggtgatggagtactgcgtgtgtggcatgcaggaaatgctggacagcgtgccggagaagcgtttcccagtgtgccaggcccacgggtg

SEQ ID NO: 111886 - DNA, 120 bp, synthetic construct
  source 1..120: mol_type = other DNA
ccgcaggtacttctgtcagctgattgacggcctggagtacctgcatagccagggcattgtgcacaaggacatcaagccggggaacctgctgctcaccaccggtggcaccctcaaaatctc

SEQ ID NO: 111887 - DNA, 120 bp, synthetic construct
  source 1..120: mol_type = other DNA
cgggtctgtaccccttcgaaggggacaacatctacaagttgtttgagaacatcgggaaggggagctacgccatcccgggcgactgtggccccccgctctctgacctgctgaaaggtggga

SEQ ID NO: 111888 - DNA, 120 bp, synthetic construct
  source 1..120: mol_type = other DNA
caggcgccttgtccgaactggggtctgagtgaggacatgcgtccgtccctgccctaggcatggagatgcgccaggaagggcacagctggtcccaaacactggcgagagcctctctttttc

SEQ ID NO: 111889 - DNA, 120 bp, synthetic construct
  source 1..120: mol_type = other DNA
atgacatcatctacactcaggacttcacggtgcccggtgagtctggcgggggcccctgcccggctctgctgactcggccaggatgtcccacgggagcagggtgcctgcctgtctgcaaca

SEQ ID NO: 111890 - DNA, 120 bp, synthetic construct
  source 1..120: mol_type = other DNA
gagggtcccagaatagtgggggccctgcagagagccccccattaggtccctcagcactcctgggcccctcatcaaacccctaggctcagctcagtagctggtccccaggagagtacagtg

SEQ ID NO: 111891 - DNA, 120 bp, synthetic construct
  source 1..120: mol_type = other DNA
tctgcgtgcctccactttggcctcacgtgtccctacccaggatgcgggtcctgctgccaacacccagatcccagggaaggggcttgggctagatcctgggcaccagtgcagacaggagtg

SEQ ID NO: 111892 - DNA, 120 bp, synthetic construct
  source 1..120: mol_type = other DNA
gggacagtacgtgggcagcttcctgcactttcccctgccattgtgagaacagtgtccacctgggcagggtgggcagccccaggcctgtgggtttcaccagggtgctggtgatggttggtg

SEQ ID NO: 111893 - DNA, 120 bp, synthetic construct
  source 1..120: mol_type = other DNA
tcagagtgggtgcattccgaggaccctgccctgggcctggcgccccctccccatgcccgcgccgcttccaggaaaggcttatgctgggctcagcccagaggcttttgagcaccagtgggt

SEQ ID NO: 111894 - DNA, 120 bp, synthetic construct
  source 1..120: mol_type = other DNA
ccgccgcagaccagctggcgggtgtggagaccaggctcctgaccccgccatgcatgcagcgccacctggaagccgcgcggccgctttggttttttgtttggttggttccattttcttttt

SEQ ID NO: 111895 - DNA, 120 bp, synthetic construct; identical to SEQ ID NO: 22010
  source 1..120: mol_type = other DNA

SEQ ID NO: 111896 - DNA, 120 bp, synthetic construct; identical to SEQ ID NO: 22011
  source 1..120: mol_type = other DNA

SEQ ID NO: 111897 - DNA, 120 bp, synthetic construct; identical to SEQ ID NO: 13876
  source 1..120: mol_type = other DNA

SEQ ID NO: 111898 - DNA, 120 bp, synthetic construct; identical to SEQ ID NO: 35289
  source 1..120: mol_type = other DNA

SEQ ID NO: 111899 - DNA, 120 bp, synthetic construct; identical to SEQ ID NO: 35290
  source 1..120: mol_type = other DNA

SEQ ID NO: 111900 - DNA, 120 bp, synthetic construct
  source 1..120: mol_type = other DNA
gaggggcgcccgccattgcccaagcttgcttaggtaaacaaagcagccgggaagctccaactgggtggagcccaccacagctcaaggaggcctgcctgcctctgtaggctccacctctgg

SEQ ID NO: 111901 - DNA, 120 bp, synthetic construct
  source 1..120: mol_type = other DNA
tcaggtacacagtgagatgaagatctggtcttttcacatagtcccatatttcttggaggctttgttcatttctttttgttctttttctctaaacttcccttctcgcttcatttcattcat

SEQ ID NO: 111902 - DNA, 120 bp, synthetic construct
  source 1..120: mol_type = other DNA
taactttctgtctggttgatctgtctaatgttgacagtggggtgttaaagtctcccattattattgtgtgggagtctaagtctctatgtaggtcactcaggacttgctttatgaatctgg

SEQ ID NO: 111903 - DNA, 120 bp, synthetic construct
  source 1..120: mol_type = other DNA
attgatagactgctagcaagactaatgaagaaaagagagaagaatcaaatagaagcaataaaaaatgataaaggggatatcacgaccgatcccacagaaatacaaactaccatcagagaa

SEQ ID NO: 111904 - DNA, 120 bp, synthetic construct
  source 1..120: mol_type = other DNA
tctggccagggcaattaggcaggagaaggaaatcaagggtattcaattaggaaaagaggaaggcaaattgtccctgtttgcagatgacatgattggatatctagaaaaccccattgtctt

SEQ ID NO: 111905 - DNA, 120 bp, synthetic construct
  source 1..120: mol_type = other DNA
ggattaaagacttaaacgttagacctaaaaccataacaaccctagaagaaaacctaggcattaccattcaggacataggcatgggcaaggacttcatgtctaaaacaccaaaagcaatgg

SEQ ID NO: 111906 - DNA, 120 bp, synthetic construct
  source 1..120: mol_type = other DNA
acttctaagacaaaagccactgttaatgaggcagacgattctcgaggaaacattttaaaaagccatccaagcaatggggaaaggattccctatttaataaatggtgctgggaaaactggc

SEQ ID NO: 111907 - DNA, 120 bp, synthetic construct
  source 1..120: mol_type = other DNA
ctatcacaaggacaaaaaaccaaacaccgcatgttctcactcataggtgggaattgaacgatgagaacacatggacacaggaaggggaacatcgcacaccggggacggttgtggggtggg

SEQ ID NO: 111908 - DNA, 120 bp, synthetic construct
  source 1..120: mol_type = other DNA
aaactggtaaaggtacaatttcacctcacctacaacacatacatatcctttaaaaacatctttctcaaccccaactccctagcagccatggtgcaccctcaatgtccgtgtttgagaatt

SEQ ID NO: 111909 - DNA, 120 bp, synthetic construct; identical to SEQ ID NO: 31679
  source 1..120: mol_type = other DNA

SEQ ID NO: 111910 - DNA, 120 bp, synthetic construct; identical to SEQ ID NO: 31680
  source 1..120: mol_type = other DNA

SEQ ID NO: 111911 - DNA, 120 bp, synthetic construct
  source 1..120: mol_type = other DNA
ctatcatttttggacatgtgggttggttccaagtctttgctattgtgaataatgccgcaataaacatacgtgtgcatgtgtctttatagcagcatgatttatagtcctttgggtatatac

SEQ ID NO: 111912 - DNA, 120 bp, synthetic construct
  source 1..120: mol_type = other DNA
tccatatgaactttaaagtagttttttccaattctgtgaagaaagtcattggtagcttgatggggatggcattgaatctgtaaattaccttgggcagtatggcctttttcacgatattga

SEQ ID NO: 111913 - DNA, 120 bp, synthetic construct
  source 1..120: mol_type = other DNA
ctggcctcataaaatgagttagggaggattccctctttttctattgattggaatagtttcagaaggaatggtaccagttcctccttgtacctctggtagaattaggctgtgaatctgtct

SEQ ID NO: 111914 - DNA, 120 bp, synthetic construct
  source 1..120: mol_type = other DNA
gggatggagagttctgtagatgtctattagttccgcttggtgcagagctgagttcaattcctgggtatccttgttgactttctgtctcgttgatctgtctaatgttgacagtggggtgtt

SEQ ID NO: 111915 - DNA, 120 bp, synthetic construct
  source 1..120: mol_type = other DNA
gttgctttctcgaggagtatctttatggcgttctctgtatttcctgaatctgaacgttggcctgccttgctagattggggaagttctcctggataatatcctgcagagtgttttccaact

SEQ ID NO: 111916 - DNA, 120 bp, synthetic construct
  source 1..120: mol_type = other DNA
gtggtgggctccacccagttcgagcttcctggctgctttgtctacttaagcaagcctgggcaatggcgggcgcccctcccccagcctagctgctgccttgcagtttgatctcagactgct

SEQ ID NO: 111917 - DNA, 120 bp, synthetic construct
  source 1..120: mol_type = other DNA
acacctggcttggagggtcctacacccacagaatctcgctgattgctagcacaaagcagtctgagatcaaactgcaaggcggcagctaggctgggggaggggagcccgccattgcccggg

SEQ ID NO: 111918 - DNA, 120 bp, synthetic construct
  source 1..120: mol_type = other DNA
gggaagtttagagaaaaaagaataaaaagaaatgagcaaagcctccaagaaatatgggactatgtgaaaagaccaaatctacgtctaattggtgtacctgaaagtgatggggagaatgga

SEQ ID NO: 111919 - DNA, 120 bp, synthetic construct
  source 1..120: mol_type = other DNA
ccacacattaataatgggagactttaacaccccactgtcaacattagacagatcaacgagacagaaagtcaacaaggatacccaggaatttaactcatctccgcaccaagcggacctaat

SEQ ID NO: 111920 - DNA, 120 bp, synthetic construct
  source 1..120: mol_type = other DNA
aaggatcaacaaaattgatagaccgctagcaagactaacaaagaaaaaaagagaggaaaatcaaatcgacacaataaaaaatgataaaggggatatcaccaccgatcccacagaaataca

SEQ ID NO: 111921 - DNA, 120 bp, synthetic construct
  source 1..120: mol_type = other DNA
ggcaaaaactggaagcattccctttgaaaactggcacaagatagggatgccctctctcactgctgctattcaacatagtgttggaagttctggccagggcaatcaggcaggagaaggaaa

SEQ ID NO: 111922 - DNA, 120 bp, synthetic construct
  source 1..120: mol_type = other DNA
aggcgtggggaaggacttcatgtccaaaacaccaaaagcaatggcaacaaaagccaaaattgacaaatgggatctaattaaactaaagagcttctgcacagcaaaagaaactaccatcag

SEQ ID NO: 111923 - DNA, 120 bp, synthetic construct; identical to SEQ ID NO: 31681
  source 1..120: mol_type = other DNA

SEQ ID NO: 111924 - DNA, 120 bp, synthetic construct
  source 1..120: mol_type = other DNA
cagtgatggaagatgaaatgaagcgagaagggaagtttagagaaaaaagaatgaaaagaaatgaacaaagcctccaagaaatatgggactatgtgaaaagaccagatctacgtctgattg

SEQ ID NO: 111925 - DNA, 120 bp, synthetic construct
  source 1..120: mol_type = other DNA
taggctcaaaataaaaggatggaggaagatctaccaagcaaatggaaaacaaaaaaaggcaggggttgcaatcctagtctctgataaaacagactttaaaccaacaaagattaaaagaga

SEQ ID NO: 111926 - DNA, 120 bp, synthetic construct; identical to SEQ ID NO: 111903
  source 1..120: mol_type = other DNA

SEQ ID NO: 111927 - DNA, 120 bp, synthetic construct; identical to SEQ ID NO: 111904
  source 1..120: mol_type = other DNA

SEQ ID NO: 111928 - DNA, 120 bp, synthetic construct
  source 1..120: mol_type = other DNA
ctaaaatgccaaaagcaatggcaacgaaagccaaaattgacaaatgggatctaattaaactaaagagcttctgcacagcaaaagaaactaccatcagagtgaacaggcaacctacaacat

SEQ ID NO: 111929 - DNA, 120 bp, synthetic construct
  source 1..120: mol_type = other DNA
ctatcgcaaggacaaaaaaccaaacactgcatgttctcactcataggtgggaattgaacaatgagaacacatggacacaggaaggggaacatcacacttgggactgttgtggggtagggg

SEQ ID NO: 111930 - DNA, 120 bp, synthetic construct
  source 1..120: mol_type = other DNA
actcggcaatgcgggctctttttgggttccatatgaactttaaaatagttttttccaattctgtgaagaaagtcattggtagcttgatggggatggcattgaatctataaattaccttgg

SEQ ID NO: 111931 - DNA, 120 bp, synthetic construct
  source 1..120: mol_type = other DNA
ttggtctaaaattctcttttttggttgtgtctctgtcaggctttggtatcaggatgacgctggcctcataaaatgagttagggaggattccctctttttctattgattggaatagtttca

SEQ ID NO: 111932 - DNA, 120 bp, synthetic construct
  source 1..120: mol_type = other DNA
agacagttagctcttcttgttgaattgatcccttcaccattatgtaatggccttctttgtctcttttgatctttgttggtttaaagtctgttttatcagagactaggattgcaacccctg

SEQ ID NO: 111933 - DNA, 120 bp, synthetic construct; identical to SEQ ID NO: 111901
  source 1..120: mol_type = other DNA

SEQ ID NO: 111934 - DNA, 120 bp, synthetic construct
  source 1..120: mol_type = other DNA
caatcagcgagactccgtgggcgtaggaccctctgatccaagtgcgggatataatctcctggtgagccgttttttaagcccctcggaaaagcgcagtattagggtgggagcgacccgatt

SEQ ID NO: 111935 - DNA, 120 bp, synthetic construct
  source 1..120: mol_type = other DNA
ccagaagacaggggggccaatagtcaagattcttaaagaaaagaattttcaacccagaatttcatatccagccaaactaagcttcataagtgaaggagaaataaaatactttacagacaa

SEQ ID NO: 111936 - DNA, 120 bp, synthetic construct
  source 1..120: mol_type = other DNA
agagcagaactgaaggagatagagacacaaaaaacccttcaaaaaattaatgaatctaggaactggttttttgaaaagagcaacaaaatagaccgctagcaagactaatagaaaagagag

SEQ ID NO: 111937 - DNA, 120 bp, synthetic construct
  source 1..120: mol_type = other DNA
tggtgttcggttttttgtccttgcgatagtttgctgagaatgatggtttccagcttcatccatgtccctacaaaggacatgaactcatccttttttatggctgcatagtattccatggtg

SEQ ID NO: 111938 - DNA, 120 bp, synthetic construct
  source 1..120: mol_type = other DNA
ttttggtgttttagacatgaagtccttgtccatgcctatgtcctgaatggtattgcctagttattcttctagggtttttatagttttaggtctaacatgtaagtctttaatccatcttga

SEQ ID NO: 111939 - DNA, 120 bp, synthetic construct
  source 1..120: mol_type = other DNA
cttattattttaagatacatcccatcaatacctaatttattgagagtctttagcatgaagcgttgttgaattttgtcaaaggccttttctgcatctattgagataatcatgtggtttttg

SEQ ID NO: 111940 - DNA, 120 bp, synthetic construct
  source 1..120: mol_type = other DNA
gttttttgtgtctatatgtacttcagttctgctctaatcttagttatttcttgccttctgctagcttttgaaggtgtttgctcttgctcctctagttcttttaattgtgatgttagggtg

SEQ ID NO: 111941 - DNA, 120 bp, synthetic construct
  source 1..120: mol_type = other DNA
cctgtcattatgatgttagctggttattttgcttgttagttgatgcagtttcttcctagccttgatggtctttacaatttggcatgtttttgcagtggctggtactggttgttcctttcc

SEQ ID NO: 111942 - DNA, 120 bp, synthetic construct
  source 1..120: mol_type = other DNA
gccttgcagtttgatctgagattgctgtgctagcaatgagcgaggctccttgggcgtaggaccttccgagccatgtgccggatataatctcctggtgtgccgtttgttaagcccattgga

SEQ ID NO: 111943 - DNA, 120 bp, synthetic construct; identical to SEQ ID NO: 27101
  source 1..120: mol_type = other DNA

SEQ ID NO: 111944 - DNA, 120 bp, synthetic construct
  source 1..120: mol_type = other DNA
tctatctctttctttccctctctgactttctgtctctttctttctgactccctctttgtagctctgcctctctttctctctctctgcctctctcctctctgtctctctcttctctgtctc

SEQ ID NO: 111945 - DNA, 120 bp, synthetic construct; identical to SEQ ID NO: 27102
  source 1..120: mol_type = other DNA

SEQ ID NO: 111946 - DNA, 120 bp, synthetic construct; identical to SEQ ID NO: 27103
  source 1..120: mol_type = other DNA

SEQ ID NO: 111947 - DNA, 120 bp, synthetic construct
  source 1..120: mol_type = other DNA
tgatggacgatggggaggccaagcatggcagaggaagcggaggttggagtgatttgactttttttgtttttgtttttgtttttatactttaagttttagggtacatgtgcacattgtgca

SEQ ID NO: 111948 - DNA, 120 bp, synthetic construct
  source 1..120: mol_type = other DNA
tgtgaaatttttctcccattttgtaggttgcctgttcactctgatggtagtttcttttgctgtgcagaagctctttagtttaattagatcccatttgtcaattttggcttttgttgccat

SEQ ID NO: 111949 - DNA, 120 bp, synthetic construct
  source 1..120: mol_type = other DNA
ctgagacaatggggttttctagatatacaatcatgtcatctgcaaacagagacaatttgtctttctcttttcctaattgaataccctttatttccttctcctgcctaattaccctggcca

SEQ ID NO: 111950 - DNA, 120 bp, synthetic construct
  source 1..120: mol_type = other DNA
gtagaatttggctgtgaatccatctggtcctggactctttttggttggtaagctattgattattgccacaacttcagctcctgttattggtctattcagagattcaacttcttcctggtt

SEQ ID NO: 111951 - DNA, 120 bp, synthetic construct
  source 1..120: mol_type = other DNA
cccattattaatgtgtgggagtctaagtctctttgtaggtcactcaggacttgcttcatgaatcttggtgctcctgtattggttgcatatatatttagaatagttagctcttcttgttga

SEQ ID NO: 111952 - DNA, 120 bp, synthetic construct
  source 1..120: mol_type = other DNA
tttttattcttttttctctaaacttcccttctcgcttcatttcattcatttcatcttccattgctgataccctttttccagttgatcgcatcggctcctgaggcttctgcattcttcacg

SEQ ID NO: 111953 - DNA, 120 bp, synthetic construct
  source 1..120: mol_type = other DNA
tcagcgagactccgtgggtgtaggaccctccaagtcaggtgcgggatataatcttgtggtgcaccgttttttaagcccgtcggaaaagcgcagtatttgggtgggagtgacccgattttc

SEQ ID NO: 111954 - DNA, 120 bp, synthetic construct
  source 1..120: mol_type = other DNA
tcttcccggctttggtatcaggatgatgctggactcataaaatgagttagggaggattccctctttttctattgattggaatagtttcagaaggaatggtaccagttcctccttgtacct

SEQ ID NO: 111955 - DNA, 120 bp, synthetic construct
  source 1..120: mol_type = other DNA
gtttgattgcactgtggtctgagagacagtttgttataatttctgttcttttacatttgctgaggagtgctttacttccaactatgtggtcaattttggaataggtgtggtgtgatgtgg

SEQ ID NO: 111956 - DNA, 120 bp, synthetic construct
  source 1..120: mol_type = other DNA
tttctttaagaatgttggatattggcccccactctcttctggcttgtagagtttctgcctagcgatcagctgttagtctgatgggcttccctttgtgggtaacccgacctttctctctgg

SEQ ID NO: 111957 - DNA, 120 bp, synthetic construct
  source 1..120: mol_type = other DNA
tagattgctgaagaatcaccacactgacttccacaatggttgaactagtttacagtcccaccaacagtgtaaaagtgttcctatttctccacatcctctccagcacctgttgtttcctga

SEQ ID NO: 111958 - DNA, 120 bp, synthetic construct
  source 1..120: mol_type = other DNA
cttcctacccatgagcatggaatgttcttccatttctttgtatcctcttttatttcattgagcagtggcttgtagttctccttgaagaggtccttcacatcccttgtaagttggattcct

SEQ ID NO: 111959 - DNA, 120 bp, synthetic construct
  source 1..120: mol_type = other DNA
tccatctggtcctggactcttttttcttggtaagctattgattattgccacaatttcagagcctgttattggtctattcagagattcaacttcttcctggtttagtcttgggagggtgta

SEQ ID NO: 111960 - DNA, 120 bp, synthetic construct
  source 1..120: mol_type = other DNA
tgtagatgtctattaggtccacttggtgcagagctgagttcaattcctgggtatctttgttaactttctgtctcgttgatctgtctaatgttgacagtggggtgttaaagtctcccatta

SEQ ID NO: 111961 - DNA, 120 bp, synthetic construct
  source 1..120: mol_type = other DNA
tctcgaggagtatctttgtggcattctctgtatttcgtgaatctgaatgttggcctgccttgctagattggggaagttctcctggataatatcctgcagagtgttttccaacttggttcc

SEQ ID NO: 111962 - DNA, 120 bp, synthetic construct
  source 1..120: mol_type = other DNA
tctcttcaaagctgtcagacagggacatttaagtctgcagaggttactgctgtctttttgtttgtctgtgccctgcccccagaggtggagcctacagaggcaggcaagcctccttgagct

SEQ ID NO: 111963 - DNA, 120 bp, synthetic construct
  source 1..120: mol_type = other DNA
tagtagtctgtcttctttgattgacttgtggctctttatatagtctacatgacatttctttgtcagttatgtgctgcaaatattttattctgttttgcaatttcacttttcaagcctttt

SEQ ID NO: 111964 - DNA, 120 bp, synthetic construct; identical to SEQ ID NO: 25215
  source 1..120: mol_type = other DNA

SEQ ID NO: 111965 - DNA, 120 bp, synthetic construct
  source 1..120: mol_type = other DNA
ctttcttttcttccattctttctttcctctccttccttccttccttccttcttcctttcttttcctttttcctttcctttcatttcttggatctcactctgtcccccaggctggagtgca

SEQ ID NO: 111966 - DNA, 120 bp, synthetic construct
  source 1..120: mol_type = other DNA
acacaccaccatacctggctaatttttttttttgtttttaatttttagtagagatacggttttaccattttggccaggctggtctcgaactcctgacctgaaatgatctgcccacctcag

SEQ ID NO: 111967 - DNA, 120 bp, synthetic construct; identical to SEQ ID NO: 25217
  source 1..120: mol_type = other DNA

SEQ ID NO: 111968 - DNA, 120 bp, synthetic construct
  source 1..120: mol_type = other DNA
atgatctccattctaactggtgtgagatggtatctcattgtggttttgatttgtatttctctgatgaccagtgatgatgagcattttttcatgtgttttttggctgcataaatgtcttct

SEQ ID NO: 111969 - DNA, 120 bp, synthetic construct
  source 1..120: mol_type = other DNA
acttggcaatgtgggctctgttttggttccatatgaactttaaagtagttttttccaattctgtgaagaaagtcattggtagcttgatggggatggcattgaatctataaattaccttgg

SEQ ID NO: 111970 - DNA, 120 bp, synthetic construct
  source 1..120: mol_type = other DNA
ctgccaggctttggtatcaggatgatactggcctcataaaatgagttagggaggattctgtctttttctattgattggaatagtttcagaaggaatggtaccagttcctccttgtacctc

SEQ ID NO: 111971 - DNA, 120 bp, synthetic construct
  source 1..120: mol_type = other DNA
cccaccaacagtgtataagtgttcctatttctccacatcctcttcagcacctgttgtttactgactttttaatgatcgccattctaactggtgtgagatggtatctcattgtggttttga

SEQ ID NO: 111972 - DNA, 120 bp, synthetic construct
  source 1..120: mol_type = other DNA
tgaatctataaattaccttgggcagtatggccattttcacgatattgattcttcctacccatgagcatggaatgttcttccatttgtttgtatcctctttcatttcattgagcagtggtt

SEQ ID NO: 111973 - DNA, 120 bp, synthetic construct
  source 1..120: mol_type = other DNA
ggtctaaaattctcttttttggttgtgtctctgccaggctttggtatcaggatgatactggcctcataaaatgagttagggaggattctgtctttttctattgattggaatagtttcaga

SEQ ID NO: 111974 - DNA, 120 bp, synthetic construct
  source 1..120: mol_type = other DNA
tgatccacccgccttgacctcccaaagtgctgggattaacaggtgtgagtcactgtgcccagcctgagttttttaagtatctttataataacaacagaaatatgaaatagggatagatct

SEQ ID NO: 111975 - DNA, 120 bp, synthetic construct
  source 1..120: mol_type = other DNA
ttttagcatgaagggttgttgaattttgtcaaaggctttttctgcatctattgagataatcatgtggtttttgtctttggctctgtttatatgctcgattacatttattgatttgtgtat

SEQ ID NO: 111976 - DNA, 120 bp, synthetic construct
  source 1..120: mol_type = other DNA
acacatttacaagaaaaaaacaaacaaccccatcaaaaagtgggcgaaggacatgaacagacacttctcaaaagaagacatttatgcagccaaaaaacacatgaaaaaatgctcatcatc

SEQ ID NO: 111977 - DNA, 120 bp, synthetic construct; identical to SEQ ID NO: 25218
  source 1..120: mol_type = other DNA

SEQ ID NO: 111978 - DNA, 120 bp, synthetic construct
  source 1..120: mol_type = other DNA
gcctcccaaattgctgggagtataggtgtgagccaccgggactggccgagtattttattttttaaagagagctgacattaataaggcaaaatgtaatgtctgtttagttttgatggagaa

SEQ ID NO: 111979 - DNA, 120 bp, synthetic construct
  source 1..120: mol_type = other DNA
atgtatatctctcttttggtaccagtaccgtgctgttttggttactgtaaccttgtagtatagtttgaagtcaggtagcatgatgcctccagctttgttcttttggcttaggattgactt

SEQ ID NO: 111980 - DNA, 120 bp, synthetic construct
  source 1..120: mol_type = other DNA
gttcatcaaggatattggtctaaaattctcttttttggttgtgtctctgccaggctttggtatcaggatgatgctggcctcataaaatgagttaaggaggattccctctttttctattga

SEQ ID NO: 111981 - DNA, 120 bp, synthetic construct; identical to SEQ ID NO: 11374
  source 1..120: mol_type = other DNA

SEQ ID NO: 111982 - DNA, 120 bp, synthetic construct; identical to SEQ ID NO: 11375
  source 1..120: mol_type = other DNA

SEQ ID NO: 111983 - DNA, 120 bp, synthetic construct; identical to SEQ ID NO: 11376
  source 1..120: mol_type = other DNA

SEQ ID NO: 111984 - DNA, 120 bp, synthetic construct; identical to SEQ ID NO: 11377
  source 1..120: mol_type = other DNA

SEQ ID NO: 111985 - DNA, 120 bp, synthetic construct; identical to SEQ ID NO: 11378
  source 1..120: mol_type = other DNA

SEQ ID NO: 111986 - DNA, 120 bp, synthetic construct; identical to SEQ ID NO: 11379
  source 1..120: mol_type = other DNA

SEQ ID NO: 111987 - DNA, 120 bp, synthetic construct; identical to SEQ ID NO: 11380
  source 1..120: mol_type = other DNA

SEQ ID NO: 111988 - DNA, 120 bp, synthetic construct; identical to SEQ ID NO: 11381
  source 1..120: mol_type = other DNA

SEQ ID NO: 111989 - DNA, 120 bp, synthetic construct; identical to SEQ ID NO: 11382
  source 1..120: mol_type = other DNA

SEQ ID NO: 111990 - DNA, 120 bp, synthetic construct; identical to SEQ ID NO: 11383
  source 1..120: mol_type = other DNA

SEQ ID NO: 111991 - DNA, 120 bp, synthetic construct; identical to SEQ ID NO: 11384
  source 1..120: mol_type = other DNA

SEQ ID NO: 111992 - DNA, 120 bp, synthetic construct; identical to SEQ ID NO: 11385
  source 1..120: mol_type = other DNA

SEQ ID NO: 111993 - DNA, 120 bp, synthetic construct
  source 1..120: mol_type = other DNA
agacaacagagcaatcaaactagaactcaggattaagaaactcactcaaaaccgctcaactacatggaaactgaacaacctgctcctgaatgactactgggtacataacgaaatgaaggc

SEQ ID NO: 111994 - DNA, 120 bp, synthetic construct
  source 1..120: mol_type = other DNA
caaacagaatccagcagcacatcaaaaagcttatccaccatgatcaagccggcttcatccctgggatgcaaggctggttcaacatacgcaaatcaataaacgtaatccagcatataaaca

SEQ ID NO: 111995 - DNA, 120 bp, synthetic construct
  source 1..120: mol_type = other DNA
ggcatcacgctacctgacttcaaactatacaacaaggctacagtaaccaaaacagcatggtactggtaccaaaacagagatatagaccaatggaacagaacagagccctcagaaataatg

SEQ ID NO: 111996 - DNA, 120 bp, synthetic construct
  source 1..120: mol_type = other DNA
cacacgtatgtttattgcggcactattcacaatagcaaagacttggaaccaacccaaatgtccaacaatgatagactggattaagaaaatgaggcacatatacaccatggaatactatgc

SEQ ID NO: 111997 - DNA, 120 bp, synthetic construct
  source 1..120: mol_type = other DNA
cagttcccacctatgagtgagaacatgcggtgtttggctttttgtccttgcgatagtttgctgagaatgatggtttccagcttcatccatgtccctacaaaggacatgaactcatcattt

SEQ ID NO: 111998 - DNA, 120 bp, synthetic construct
  source 1..120: mol_type = other DNA
tcttgtttttgtcaggtttgtcaaagatcagatagttgtagatatgtggcattacttctgagggctctgttctgttccagtggtctacatctctgttttgctaccagtaccatgctgttt

SEQ ID NO: 111999 - DNA, 120 bp, synthetic construct
  source 1..120: mol_type = other DNA
actcccattcacaattgctacaaagagaataaaatacctaggaatccaacttacaagggatgtgaaggaactcttcaaggagaactacaaaccactgctcaatgaaataaaagaggatac

SEQ ID NO: 112000 - DNA, 120 bp, synthetic construct
  source 1..120: mol_type = other DNA
agaaactaccatcagagtgcacaggcaacctacggaatgggagaaaattgttgcaatctactcatctgacaaagggctaatatccagaatctacaatgaactcaaacaaatttacaagaa

SEQ ID NO: 112001 - DNA, 120 bp, synthetic construct
  source 1..120: mol_type = other DNA
tttcaacccagaatttcatatccagccaactaagcttcacaagtgaagaggaaataaaatcctttctagacaagcaaatgctgagagattttgtcaccaccaggcctgccctaaaagagc

SEQ ID NO: 112002 - DNA, 120 bp, synthetic construct
  source 1..120: mol_type = other DNA
gcccctctttgctagatgcacttgctattgactaagatactttctttcaaagagaaaattaaaagaaaccttaaaccaggcatggtgtctcatgcctgtaatcccaacactttgggaggc

SEQ ID NO: 112003 - DNA, 120 bp, synthetic construct
  source 1..120: mol_type = other DNA
tataacaaattgtgaatgtaattactgtcacttaattatacacttaaaaatggttaaaatggggccaggcatggtggctcacgcctgtaatcccaacactttgggaggctgaggcgggtg

SEQ ID NO: 112004 - DNA, 120 bp, synthetic construct
  source 1..120: mol_type = other DNA
ttctctgatggccagtgatgatgagcatttttccatgtgtcttttggcttcataaatgtcttcttttgagaagtgtctgttcatatccttcgcccactttttgatggggttgtttgtttt

SEQ ID NO: 112005 - DNA, 120 bp, synthetic construct
  source 1..120: mol_type = other DNA
ttactgtagccttgtagtatagtttgaagtcaggtagcatgagccctccagcttttttcttttggctacatgttcataaccatgacatattcatgttgcatatgttctgtgtcataaccc

SEQ ID NO: 112006 - DNA, 120 bp, synthetic construct; identical to SEQ ID NO: 12772
  source 1..120: mol_type = other DNA

SEQ ID NO: 112007 - DNA, 120 bp, synthetic construct
  source 1..120: mol_type = other DNA
gtaccttaaaatttattgagtcaataattttttttttttttttgaaacagagtctcactctgttacccaggctggagtgcagcggcgtgatcttggctcactgcaaccaccgcttctcgg

SEQ ID NO: 112008 - DNA, 120 bp, synthetic construct
  source 1..120: mol_type = other DNA
tgaatagtgccacaataaacatacgtgtgcatgtgtctttatagcagaatgatttataatcctttgggtatatacccagtaatggaatggctgggtcaaatggtatttctagttctagat

SEQ ID NO: 112009 - DNA, 120 bp, synthetic construct
  source 1..120: mol_type = other DNA
tttgtcttaggattgacttggcaatgcgggctttttggttccatatgaactttaaagtagttttttccaattctgtgaagaaagtcattggtagcttgatggggatggcattgaatctat

SEQ ID NO: 112010 - DNA, 120 bp, synthetic construct; identical to SEQ ID NO: 33076
  source 1..120: mol_type = other DNA

SEQ ID NO: 112011 - DNA, 120 bp, synthetic construct; identical to SEQ ID NO: 33077
  source 1..120: mol_type = other DNA

SEQ ID NO: 112012 - DNA, 120 bp, synthetic construct; identical to SEQ ID NO: 33078
  source 1..120: mol_type = other DNA

SEQ ID NO: 112013 - DNA, 120 bp, synthetic construct
  source 1..120: mol_type = other DNA
agagatcaaccacagaggaggagtccagagtcccaggatggcagttgctggttgcactctgtccttttttttttttttttttttgaggcggagtctcgctctgtcgcccaggctggaatg

SEQ ID NO: 112014 - DNA, 120 bp, synthetic construct; identical to SEQ ID NO: 33079
  source 1..120: mol_type = other DNA

SEQ ID NO: 112015 - DNA, 120 bp, synthetic construct
  source 1..120: mol_type = other DNA
ctagctcgtaccggagccgagcttccttcagggcactttcaatataatgaatttagccatctattactgcggctagttactgtcccgccaggaccagactctggacctgcctcgtgcgct

SEQ ID NO: 112016 - DNA, 120 bp, synthetic construct
  source 1..120: mol_type = other DNA
ctgacttcagggagttaaaaacaattctcgcagtgagctgggcttgttttgtctccctgcttctctttgtactaaacattagataccgaggaaatgcggattggcctttggatgattcat

SEQ ID NO: 112017 - DNA, 120 bp, synthetic construct
  source 1..120: mol_type = other DNA
aagtgctgggattacaggcatgagccaccctatctgcctcacttctacagaggaggaatgaaggctcagagagggcaagcattccacccagcatcacacagagtgccgggtgagagccca

SEQ ID NO: 112018 - DNA, 120 bp, synthetic construct; identical to SEQ ID NO: 11127
  source 1..120: mol_type = other DNA

SEQ ID NO: 112019 - DNA, 120 bp, synthetic construct; identical to SEQ ID NO: 11128
  source 1..120: mol_type = other DNA

SEQ ID NO: 112020 - DNA, 120 bp, synthetic construct
  source 1..120: mol_type = other DNA
agcacactcccacataatgttcctgctggaaaggataacaagggctcagttatttatatattaaataatttcctcaccatttgtgaagacaaatgtctgtaatgcttacaggactgaata

SEQ ID NO: 112021 - DNA, 120 bp, synthetic construct
  source 1..120: mol_type = other DNA
gctcaagcacccaaggttgagacttagagatctgtaaatttacatataggctaaggtcgaaaatgtcagttggcacatccagtcattggctcccacgtatgcgtttctactcaaacttta

SEQ ID NO: 112022 - DNA, 120 bp, synthetic construct
  source 1..120: mol_type = other DNA
cccccacctccctcccggacggggtggctgccgggcggagacgctcctcacttcccagatggggtggctgccgggcggagacgctcctcacttctcagacggggcagctgccgggcggag

SEQ ID NO: 112023 - DNA, 120 bp, synthetic construct
  source 1..120: mol_type = other DNA
gatcacctgaggtcgggagttcgagaccagcatgaccaatatggagaaaccccatctctaccaaaaatacaaaaattagctgggcttggtggcacatgcctgtaatcccagctactcggc

SEQ ID NO: 112024 - DNA, 120 bp, synthetic construct; identical to SEQ ID NO: 20527
  source 1..120: mol_type = other DNA

SEQ ID NO: 112025 - DNA, 120 bp, synthetic construct; identical to SEQ ID NO: 14553
  source 1..120: mol_type = other DNA

SEQ ID NO: 112026 - DNA, 120 bp, synthetic construct; identical to SEQ ID NO: 14554
  source 1..120: mol_type = other DNA

SEQ ID NO: 112027 - DNA, 120 bp, synthetic construct; identical to SEQ ID NO: 14555
  source 1..120: mol_type = other DNA

SEQ ID NO: 112028 - DNA, 120 bp, synthetic construct; identical to SEQ ID NO: 14556
  source 1..120: mol_type = other DNA

SEQ ID NO: 112029 - DNA, 120 bp, synthetic construct
  source 1..120: mol_type = other DNA
gatattggtctaaaattctctttttttgttgtgtctctgccaggctttggtatcaggaggatgctggcctcataaaatgagttagggaggattccctctttttctattgattggaatagt

SEQ ID NO: 112030 - DNA, 120 bp, synthetic construct
  source 1..120: mol_type = other DNA
cactggccatcagagaaatgcaaatcaaaaccacaatgagaaatcatctcacaccaattagaatggcaatcattaaaaagtcaggaaacaacaggtgctggagaggatgtggagaaatag

SEQ ID NO: 112031 - DNA, 120 bp, synthetic construct; identical to SEQ ID NO: 14557
  source 1..120: mol_type = other DNA

SEQ ID NO: 112032 - DNA, 120 bp, synthetic construct
  source 1..120: mol_type = other DNA
cccaaagccaggtcgaaggcgagtctccccgccctggggactcctggcgctgcagttcgcacggcggatggacgcagtcaggttctccagggagctgcgaggagccccaggacttggaaa

SEQ ID NO: 112033 - DNA, 120 bp, synthetic construct
  source 1..120: mol_type = other DNA
gcggttaggaagggtaccccaggggaatggccagagtttaccatatctggcagctttattattattattttttgaactacagatctgcagcgaacggcattctggttttcatgttctgca

SEQ ID NO: 112034 - DNA, 120 bp, synthetic construct; identical to SEQ ID NO: 26000
  source 1..120: mol_type = other DNA

SEQ ID NO: 112035 - DNA, 120 bp, synthetic construct; identical to SEQ ID NO: 26001
  source 1..120: mol_type = other DNA

SEQ ID NO: 112036 - DNA, 120 bp, synthetic construct; identical to SEQ ID NO: 5453
  source 1..120: mol_type = other DNA

SEQ ID NO: 112037 - DNA, 120 bp, synthetic construct; identical to SEQ ID NO: 7307
  source 1..120: mol_type = other DNA

SEQ ID NO: 112038 - DNA, 120 bp, synthetic construct
  source 1..120: mol_type = other DNA
agccaggtgccagcaccatttattaaatagggaatccctttcccattgcttgtttttgtcaggtttgtcaaagatcaggtagttgtagatacgcagcattatttctgagggctctgttct

SEQ ID NO: 112039 - DNA, 120 bp, synthetic construct
  source 1..120: mol_type = other DNA
tttggttctgttcatatgctggattacatttattgatttgcatatattgaaccagccttgcatcccagggatgaagcccacttgatcatggtggataagctttttgatgtgctgctggat

SEQ ID NO: 112040 - DNA, 120 bp, synthetic construct
  source 1..120: mol_type = other DNA
ctgctttgaatgtgtctcagagattctggtatgttgtgtctttgttctcattgatttcaaagaacatcttcatttctgccttcattttgttatttacccagtagtcattcaggagcaggt

SEQ ID NO: 112041 - DNA, 120 bp, synthetic construct
  source 1..120: mol_type = other DNA
ggtactggttgttcctttccatgtttagtgcttccttcaggggctcttttagggcaggtctggtggtgacaaaatctctcagcatttgcttgtctgtaaagtattttatttctccttcac

SEQ ID NO: 112042 - DNA, 120 bp, synthetic construct
  source 1..120: mol_type = other DNA
aatttcctcctgtagctcggagtagtttgatcttctgaagccttcttctctcaactcatcaaagtcactctccatccagctttgttctgttactggtgaggaactgcattcctttggagg

SEQ ID NO: 112043 - DNA, 120 bp, synthetic construct
  source 1..120: mol_type = other DNA
tcacgctgggagctgtagaccggagctgttcctattcagccatcttggctccttaccaacttctttcctttataaattacctagtttcatgtagtatctttatagcactgtgaaaacaga

SEQ ID NO: 112044 - DNA, 120 bp, synthetic construct; identical to SEQ ID NO: 25665
  source 1..120: mol_type = other DNA

SEQ ID NO: 112045 - DNA, 120 bp, synthetic construct
  source 1..120: mol_type = other DNA
tttccacttgcttggtagatcttcctccatcctttcattttgagcctatgtgtgtctctgcatgtgagatgggtttcctgaatacagcacactgatgggtcttgactctttatccaattt

SEQ ID NO: 112046 - DNA, 120 bp, synthetic construct
  source 1..120: mol_type = other DNA
ccgagagatccatggttagtctgatgggcttccctttgtgagtaacccgacctttctctctggctgccgttaacattttttccttcatttgaactttggtgaatctgataattatgtgtc

SEQ ID NO: 112047 - DNA, 120 bp, synthetic construct
  source 1..120: mol_type = other DNA
ttcatttgtttataaatgaaacataaaaagatatttaaaataaaactgattcacctgagggaggcgccaagatggccgaaaaggaacagctccagtctacagctcccagcctgagcgacg

SEQ ID NO: 112048 - DNA, 120 bp, synthetic construct
  source 1..120: mol_type = other DNA
aaagtagataaaaccacaaagatggggaaaaaacagaacagaaaaactggaaactaaaaatcagagctcctctcctcctccaaaggaaggcagctcctcacctgcaacagaacaaagctg

SEQ ID NO: 112049 - DNA, 120 bp, synthetic construct
  source 1..120: mol_type = other DNA
tgtaaatggactaaatgctccaattaaaagacacagactggcaaattggataaagagtcaagacccatcagtgtgctgtattcaggaaacccgtctcacgtgcagagacacatataggct

SEQ ID NO: 112050 - DNA, 120 bp, synthetic construct
  source 1..120: mol_type = other DNA
gagcaaacacattcaaaagctagcagaaggcaagaaataactaaaatccgagcagaactgaaggaaatagagacacaaaaaacccttcaaaaaattaatgaatccaggagctggtttttt

SEQ ID NO: 112051 - DNA, 120 bp, synthetic construct
  source 1..120: mol_type = other DNA
agtaaattaagtattgatgggacatatttcaaaataataagagctatctatgacaaacccacagccaatatcatactgaatgggcaaaaactggaagcattccctttgaaaactggcaca

SEQ ID NO: 112052 - DNA, 120 bp, synthetic construct
  source 1..120: mol_type = other DNA
gcaatggggaaaggattccctatttaataaatggtactgggaaaactggctagccatatgtagaaagctgaaactggatcccttccttacaccttatacaaaaatcaattcaagatggat

SEQ ID NO: 112053 - DNA, 120 bp, synthetic construct
  source 1..120: mol_type = other DNA
accatggaatactatgcagccataaaaaatgatgagttcatgtcctttgtagggacatggatgaaattggaaatcatcattctcagtaaactatcgcaagaacaaaacccgaacaccgca

SEQ ID NO: 112054 - DNA, 120 bp, synthetic construct; identical to SEQ ID NO: 25660
  source 1..120: mol_type = other DNA

SEQ ID NO: 112055 - DNA, 120 bp, synthetic construct
  source 1..120: mol_type = other DNA
attctggatattagccctttgtcagatgagtaggttgcaaaaattttctcccattttgtaggttgcctgttcactctgatggtagtttcttttgctgtgcagaagctctttagtttaacg

SEQ ID NO: 112056 - DNA, 120 bp, synthetic construct
  source 1..120: mol_type = other DNA
gttttactggtttataagaatgcttgtgatttttgtacattgattttgtatcctgagactttgctgaagttgcttatcagcttaaggagattttgggctgagacaatggggttttctaga

SEQ ID NO: 112057 - DNA, 120 bp, synthetic construct
  source 1..120: mol_type = other DNA
gatcaaaagagacaaacaaggccattacacaatggtaaagggatcaattcaacaagaagagctaactatcctaaatatatatgcacccaatacaggagcacccagattcataaagcaagt

SEQ ID NO: 112058 - DNA, 120 bp, synthetic construct
  source 1..120: mol_type = other DNA
tacaaacacctctacgcaaataaactagaaaatcttgaagaaatggataaattcctcgacacatacaccctccctagagtaaaccaggaagaagttgaatctctgaatagaccaataaca

SEQ ID NO: 112059 - DNA, 120 bp, synthetic construct
  source 1..120: mol_type = other DNA
gatgtgaaggacctcttcaaggagaactacaaaccactgctcaaggaaataaaagaggatacaaacaaatggaagaacattcaatgctcatgagtaggaagaatcaatatcgtgaaaatg

SEQ ID NO: 112060 - DNA, 120 bp, synthetic construct
  source 1..120: mol_type = other DNA
ccagtaatggtgagcaatttttcatgtgtttcttggctgcatacatgtctacctttgagaagtgtctgttcatgtcctttgcccactttttgatggggttgtttgtttttttcttgtaaa

SEQ ID NO: 112061 - DNA, 120 bp, synthetic construct
  source 1..120: mol_type = other DNA
caccaaagttcaaatgaaagaaaaaatattaagggcagccagagagaaagatcgagttacccacaaatggaagtccatcagactaacagcggataactcagcagaaactctacaagccag

SEQ ID NO: 112062 - DNA, 120 bp, synthetic construct
  source 1..120: mol_type = other DNA
gcacttctcagcaaatgtaaaagaacagaaattataacaaactgtctctcagaccacagtgcaatcaaactagaactcaggattaagaaactcactcaaaactgctcaactacatggaac

SEQ ID NO: 112063 - DNA, 120 bp, synthetic construct
  source 1..120: mol_type = other DNA
aaaatcctcaatataatacaaaccgaatccagcaacatatcaaaaagcttatccaccatgatcaagtgggcttcatccctgggatgcaagtctggttcaacatatgcaaatcaataaatg

SEQ ID NO: 112064 - DNA, 120 bp, synthetic construct
  source 1..120: mol_type = other DNA
ttggtttcaaagaacatcttgatttctgacttcatttcgttatgaaccccatagtcattcaggagcaggttgttcagattctatgcagttgagcggttttcagtgagtttcttaatcctg

SEQ ID NO: 112065 - DNA, 120 bp, synthetic construct
  source 1..120: mol_type = other DNA
ttcttaaaggatgttgaatattggcccccactctcttctggcttgtagagtttctgccgagagatccgctgttagtctgatgggcttccctttgtgggtaacccgacctttctctctggc

SEQ ID NO: 112066 - DNA, 120 bp, synthetic construct; identical to SEQ ID NO: 25661
  source 1..120: mol_type = other DNA

SEQ ID NO: 112067 - DNA, 120 bp, synthetic construct
  source 1..120: mol_type = other DNA
aagtgggcaaaggacacgaacagacacttctcaaaggtagacatttatgcagccaaaaaacacatgaaaaaatgctcatcatcactggccatcagagaaatgcaaatcaaaaccactatg

SEQ ID NO: 112068 - DNA, 120 bp, synthetic construct; identical to SEQ ID NO: 25662
  source 1..120: mol_type = other DNA

SEQ ID NO: 112069 - DNA, 120 bp, synthetic construct
  source 1..120: mol_type = other DNA
tgttggtgggaatgtaaattagtacaaccactttggagaacagcttggaggttcctaaaaagtactaaaaatagagctaccacatgatccagcaatcccactgctaggtgtatacccatg

SEQ ID NO: 112070 - DNA, 120 bp, synthetic construct
  source 1..120: mol_type = other DNA
acaaagatcaaaagagacaaagaaggccattacataatggtaaacggatcaattcaacaagaagaactaactatcttaaatatatatgcacccaatacaagagcacccagattcataaag

SEQ ID NO: 112071 - DNA, 120 bp, synthetic construct
  source 1..120: mol_type = other DNA
caactggaagaaagggtatcagcgatggaagatgaaatgaatgaaatgaagtgagaagggaactttagagaaaaagaataaaaagaaacgagcaaagcctccaagaaatatgggactatg

SEQ ID NO: 112072 - DNA, 120 bp, synthetic construct
  source 1..120: mol_type = other DNA
gctcaaaataaaaggatggaggaagatctaccaagcaaatggaaaataaaaaaaggcaggagttgcaattctttgaaaccaacgagaacaaagacacaacataccagaatctctgggacg

SEQ ID NO: 112073 - DNA, 120 bp, synthetic construct
  source 1..120: mol_type = other DNA
caatagatgcagaaaaggcctttgacaaaattcaacaccccgtcaaactaaaaattctcaataaattaggtattgatgggacgtatctcaaaataataagagctatctatgacaaaccca

SEQ ID NO: 112074 - DNA, 120 bp, synthetic construct
  source 1..120: mol_type = other DNA
aaagacttaaacgttagacctaaaaccataaaaaccctagaagaaaacctaggcctgaccattcaggtcataggcttgggcaaggtcttcatgtctaaaacaccaaaagcaatggcaaca

SEQ ID NO: 112075 - DNA, 120 bp, synthetic construct
  source 1..120: mol_type = other DNA
gaacaatgagaacacatggacacgggaaggggaacatcacattctggggactgttgtggggttgggggaggggggagggatagcattgggcgatatacctaatgctagatgacaagttag

SEQ ID NO: 112076 - DNA, 120 bp, synthetic construct; identical to SEQ ID NO: 20517
  source 1..120: mol_type = other DNA

SEQ ID NO: 112077 - DNA, 120 bp, synthetic construct
  source 1..120: mol_type = other DNA
aacatggtgagaccttgtctctaaaaaatataaaaattagccagttgtgggggtgtgttcctgtggtcccagctacttgggaggctgaggtgagaggatcacctgagccacagaggtcaa

SEQ ID NO: 112078 - DNA, 120 bp, synthetic construct
  source 1..120: mol_type = other DNA
agcccaccagtgctgtgctcagtttctcgctgggtcttagctgccttcccaaggggcagggctcgggacctgcagcccaccatgcctgagcctcccaccccttccatgggctcctgtaca

SEQ ID NO: 112079 - DNA, 120 bp, synthetic construct
  source 1..120: mol_type = other DNA
actccagacacgccaccttaagagctgtaacactcaccacgaaagtctgcagcttcactcctgagccagtgataccacgaacccacaagaaggaagaaactccgaacacatccgaacatc

SEQ ID NO: 112080 - DNA, 120 bp, synthetic construct
  source 1..120: mol_type = other DNA
gcagggctcaggacctgcagcccgccatgcctgagcctcccaccccctgtatgggctcctgtgcagccccagcctccctgatgagtgccgccccctgctccatggcacccagtcccatcg

SEQ ID NO: 112081 - DNA, 120 bp, synthetic construct; identical to SEQ ID NO: 30079
  source 1..120: mol_type = other DNA

SEQ ID NO: 112082 - DNA, 120 bp, synthetic construct
  source 1..120: mol_type = other DNA
actgtccccacctctctctgcaagccctcaaactaagtctctgccccaatgaacttcccccttccaccccatactcctcttccctgagcaccagatacctgcctttttatccttacatgt

SEQ ID NO: 112083 - DNA, 120 bp, synthetic construct
  source 1..120: mol_type = other DNA
cttagccgagctagagctgagtctagagcagacacgagagagcaggaaaatggaagttctgggctaaaagaaaacttaatagtttacaaactcccagaactacagaattctagaactaca

SEQ ID NO: 112084 - DNA, 120 bp, synthetic construct
  source 1..120: mol_type = other DNA
aatccaaccaaagggcctaaggtctccagcacttcccctgagactggagtctcctttggagcctggagaagagcatcagaacttggacaatgcacttctgactcagaataccagacacct

SEQ ID NO: 112085 - DNA, 120 bp, synthetic construct; identical to SEQ ID NO: 624
  source 1..120: mol_type = other DNA

SEQ ID NO: 112086 - DNA, 120 bp, synthetic construct
  source 1..120: mol_type = other DNA
cagagggagaggttgcagtgagccgagatggcaccattgcactccagcctgggtgacagagcgagactctgtctcaaaaatataaataaataaacaaataaataaataaatcccttttac

SEQ ID NO: 112087 - DNA, 120 bp, synthetic construct
  source 1..120: mol_type = other DNA
tggagcatattctgggaaccagtcaatacatagagcaactttgaataaaatcctctgctttgggctataaattatgtcagggaactaccagacagaaaaactacctcctccagggcattc

SEQ ID NO: 112088 - DNA, 120 bp, synthetic construct
  source 1..120: mol_type = other DNA
ctgagacaggagaatcgcttgaacctgggaggcagaggttgcagtgagccgaaatcgcgccactgcactccagcctgggcaacagagcaagactgtctcgaaaaaaaaaaaaaaaaaaag

SEQ ID NO: 112089 - DNA, 120 bp, synthetic construct
  source 1..120: mol_type = other DNA
aggccaggagttcaagaccaatctggacagcatagtacctcaacatagtgtctccacatagtgtccacatttttgtattgtctgtctctacaaaaaatttaaaaattggccgggcatggt

SEQ ID NO: 112090 - DNA, 120 bp, synthetic construct
  source 1..120: mol_type = other DNA
aaagtcccttagcttctcccagccttggtcttttcatctgaaagcagggtgggtggcctggaagatttctcaggcccttccagctttgacattagtctaggacaatgtgagtggatcatg

SEQ ID NO: 112091 - DNA, 120 bp, synthetic construct
  source 1..120: mol_type = other DNA
gttaaaagaggatagagacctctggcgggaggctgagaagttgctgctactcacatcgtgcctaggaaggagccgtccaagcagcaggacagcctgtgttgggatgggaccgaaaacaac

SEQ ID NO: 112092 - DNA, 120 bp, synthetic construct
  source 1..120: mol_type = other DNA
ccaagactagcactaaggcaggcctggcagcagatggtatgggtacatacactgggcactctgacactacaccactacacaggggcaccatctatagacctctctcctggaactctatgc

SEQ ID NO: 112093 - DNA, 120 bp, synthetic construct
  source 1..120: mol_type = other DNA
cgaactcactaggcggacctagtgatccacctgcctcgggctcccaacgtgctgggattacaggcatgagccaccacgcccatcctctccctggttttaatagagaggagctctctgatc

SEQ ID NO: 112094 - DNA, 120 bp, synthetic construct
  source 1..120: mol_type = other DNA
catatctctaatttctcttgtaccctctcccatgccaggtccatagttggctcaattaatacttgtagacctgaaccaaatactatgagactatctaattccattttactgggcccaggg

SEQ ID NO: 112095 - DNA, 120 bp, synthetic construct
  source 1..120: mol_type = other DNA
gcactcacactaaagcaggccagcagctccatcttgcttataccagagctggggttgacagtgggttcaaagcctgatggggttggctgctcctcatcttgttccaggtattccccaatc

SEQ ID NO: 112096 - DNA, 120 bp, synthetic construct
  source 1..120: mol_type = other DNA
gacagggctgaaaaggagaggttactgcagatcgcatccaaaaactcatcaggaaactggtcgtggcaggcctgtagccagccttgggcacctggtgcccaggacactgcataccacaca

SEQ ID NO: 112097 - DNA, 120 bp, synthetic construct
  source 1..120: mol_type = other DNA
aactaatattatcattctcattttataaatggggaaactgaggtatagaaagactatgtaacctgctcaaggtcatatggctaggaagaggtggagctgggacaccaacccagacagtca

SEQ ID NO: 112098 - DNA, 120 bp, synthetic construct
  source 1..120: mol_type = other DNA
gtcactagaaaatcatggagccgcagagcaggcggctggagaggtgggggctctcctactggtccttcccccattctcccaggctcaaaggaagaagaaatgttggccaggaatgtaaag

SEQ ID NO: 112099 - DNA, 120 bp, synthetic construct
  source 1..120: mol_type = other DNA
taatctggggttctgcagaagcaaagaaaacaaagaggatatgaaggagctaagaagcaagtaggatttgaggaaattgaagaagaaatgacgcccaggagaaacaaactgcacagcaag

SEQ ID NO: 112100 - DNA, 120 bp, synthetic construct
  source 1..120: mol_type = other DNA
gtgtttgtatccctgggtacttgagattagggagtggtgatgactctttttttttcttttttttttttttctttttatttttttttattgatcattcttgggtgtttctcgcataggggg

SEQ ID NO: 112101 - DNA, 120 bp, synthetic construct
  source 1..120: mol_type = other DNA
ctgccgggcggaggggctcctcacttctcagacggggcggctgccgggcggaggggctcctcacttctcagatggggcggctgccgggcggaggggctcctcacttctcagatggggcgg

SEQ ID NO: 112102 - DNA, 120 bp, synthetic construct
  source 1..120: mol_type = other DNA
gggggagggggagggggagggagactgtggggagagggagagggctattgatatcttttttactttccgtacttatgagtacattcctacaatgttatttaaaactatgcatttatcagt

SEQ ID NO: 112103 - DNA, 120 bp, synthetic construct; identical to SEQ ID NO: 20463
  source 1..120: mol_type = other DNA

SEQ ID NO: 112104 - DNA, 120 bp, synthetic construct
  source 1..120: mol_type = other DNA
accggcctgggcaacagagcgagaccctctctccaataaaaggaaaaaaaaaaaggagtctctttaatatgataagcacccatgggaaagctacctgaagttaataaacatttgccacaa

SEQ ID NO: 112105 - DNA, 120 bp, synthetic construct; identical to SEQ ID NO: 14266
  source 1..120: mol_type = other DNA

SEQ ID NO: 112106 - DNA, 120 bp, synthetic construct; identical to SEQ ID NO: 14267
  source 1..120: mol_type = other DNA

SEQ ID NO: 112107 - DNA, 120 bp, synthetic construct
  source 1..120: mol_type = other DNA
ctctgtgaaattccatggcatcttccccgccccccccaacccccccccacacacaaaggcctataaaaaggtttaaatgtatttcttttcatgaaaaagtcttgataattaaaatgtact

SEQ ID NO: 112108 - DNA, 120 bp, synthetic construct; identical to SEQ ID NO: 33410
  source 1..120: mol_type = other DNA

SEQ ID NO: 112109 - DNA, 120 bp, synthetic construct; identical to SEQ ID NO: 33411
  source 1..120: mol_type = other DNA

SEQ ID NO: 112110 - DNA, 120 bp, synthetic construct; identical to SEQ ID NO: 33412
  source 1..120: mol_type = other DNA

SEQ ID NO: 112111 - DNA, 120 bp, synthetic construct
  source 1..120: mol_type = other DNA
ttttttttttttttttttaatttcttatagagatgggctttaactgtgttgcccaggctggtctcaaacccctacctaggctcaaggctcaagtgattcttccacctcggcctcccaaag

SEQ ID NO: 112112 - DNA, 120 bp, synthetic construct; identical to SEQ ID NO: 28372
  source 1..120: mol_type = other DNA

SEQ ID NO: 112113 - DNA, 120 bp, synthetic construct
  source 1..120: mol_type = other DNA
aggtggtagtgcagccgagatcgtgccactcgatccagcctcgggaccagagtaagattccatctcaaaaaaaaaaaaagaaaagaaaagaaaggttagtttatgtgtgtttatgccaaa

SEQ ID NO: 112114 - DNA, 120 bp, synthetic construct
  source 1..120: mol_type = other DNA
acactgcatattctcactcataggtgggaattgaacaatgagaacacatggacacaggaaggggaacatcacactctggggactgttgtggggtggggggagggatagcattgggagata

SEQ ID NO: 112115 - DNA, 120 bp, synthetic construct; identical to SEQ ID NO: 22594
  source 1..120: mol_type = other DNA

SEQ ID NO: 112116 - DNA, 120 bp, synthetic construct
  source 1..120: mol_type = other DNA
ggtatatacccaaaggactataaatcatgctgctataaagacacatgcacacgtatgtttattgtggcagtattcacaatagcaaagacttggaaccaacccaaatgtccaacaatgatc

SEQ ID NO: 112117 - DNA, 120 bp, synthetic construct; identical to SEQ ID NO: 25212
  source 1..120: mol_type = other DNA

SEQ ID NO: 112118 - DNA, 120 bp, synthetic construct; identical to SEQ ID NO: 25213
  source 1..120: mol_type = other DNA

SEQ ID NO: 112119 - DNA, 120 bp, synthetic construct; identical to SEQ ID NO: 13419
  source 1..120: mol_type = other DNA

SEQ ID NO: 112120 - DNA, 120 bp, synthetic construct
  source 1..120: mol_type = other DNA
atttcaaatatgataaatgcacaatcatattgatataaatctttaaagaagaaagccaccaggcacaagggctcacacctgtcatcctagcactttgggaagctgaggcgggcggattgc

SEQ ID NO: 112121 - DNA, 120 bp, synthetic construct; identical to SEQ ID NO: 13420
  source 1..120: mol_type = other DNA

SEQ ID NO: 112122 - DNA, 120 bp, synthetic construct; identical to SEQ ID NO: 11921
  source 1..120: mol_type = other DNA

SEQ ID NO: 112123 - DNA, 120 bp, synthetic construct; identical to SEQ ID NO: 11922
  source 1..120: mol_type = other DNA

SEQ ID NO: 112124 - DNA, 120 bp, synthetic construct; identical to SEQ ID NO: 11976
  source 1..120: mol_type = other DNA

SEQ ID NO: 112125 - DNA, 120 bp, synthetic construct; identical to SEQ ID NO: 11977
  source 1..120: mol_type = other DNA

SEQ ID NO: 112126 - DNA, 120 bp, synthetic construct; identical to SEQ ID NO: 17417
  source 1..120: mol_type = other DNA

SEQ ID NO: 112127 - DNA, 120 bp, synthetic construct
  source 1..120: mol_type = other DNA
atatatttatatattataaatatataaatatatgtaaataggccaggcacggtggctcacacacctgtaatcccagcactttgggaggcctaggcaggcggatcatgaggtcaggagatc

SEQ ID NO: 112128 - DNA, 120 bp, synthetic construct
  source 1..120: mol_type = other DNA
ctgctaaagagtttgtttggtaaaaaacaaatgaaaaggtacagcttgttaacaccactcagaggtagacagtccagggtctcagaaagaagaatggcatgcccctgggtttcttttaga

SEQ ID NO: 112129 - DNA, 120 bp, synthetic construct; identical to SEQ ID NO: 19505
  source 1..120: mol_type = other DNA

SEQ ID NO: 112130 - DNA, 120 bp, synthetic construct; identical to SEQ ID NO: 19506
  source 1..120: mol_type = other DNA

SEQ ID NO: 112131 - DNA, 120 bp, synthetic construct
  source 1..120: mol_type = other DNA
agtctatctcagattccttcatctgttgcactggtagtaaaaagcagatagtacaatctgtgtatgaaacaagaattgaaggagagaggtagactaaagcaggagaggagagcgagaaaa

SEQ ID NO: 112132 - DNA, 120 bp, synthetic construct; identical to SEQ ID NO: 18295
  source 1..120: mol_type = other DNA

SEQ ID NO: 112133 - DNA, 120 bp, synthetic construct
  source 1..120: mol_type = other DNA
ttccaatgagcattagtcctagagcgtcctttatggtcctaatgcttattcctttccagggtgcgtcaccacccatggacctctgtttatcggtttagttacactcaccgatgtagcagt

SEQ ID NO: 112134 - DNA, 120 bp, synthetic construct
  source 1..120: mol_type = other DNA
gagaataatatgtgatacattactgggtcaaatggtatttctagttctagatccctgaggaatcgccacactgacttccacaatggttgaactagtttacagtcccaccaacagtgtaaa

SEQ ID NO: 112135 - DNA, 120 bp, synthetic construct
  source 1..120: mol_type = other DNA
tttctgagggctctgttctgttccattgatctatatctctgttttggtaccagtatataaccaaaggactataaatcatgctgctataaagacacatgcacatgtatgtttattgcggca

SEQ ID NO: 112136 - DNA, 120 bp, synthetic construct; identical to SEQ ID NO: 18297
  source 1..120: mol_type = other DNA

SEQ ID NO: 112137 - DNA, 120 bp, synthetic construct; identical to SEQ ID NO: 28383
  source 1..120: mol_type = other DNA

SEQ ID NO: 112138 - DNA, 120 bp, synthetic construct
  source 1..120: mol_type = other DNA
gcagtcattaaaaagtcaggaaacaacaggtgctggagaggatgtggagaaataggaacacttttacactgttggtgggactgtaaactagttcaaccattgtggaagtcagtgtggcga

SEQ ID NO: 112139 - DNA, 120 bp, synthetic construct
  source 1..120: mol_type = other DNA
acacggttggtgggactgtaatctagttcaaccattgtggaagtcagtgtggcgattcctcagggatctagaactagaaataccatttgacccagccatcccattactgggtatataccc

SEQ ID NO: 112140 - DNA, 120 bp, synthetic construct
  source 1..120: mol_type = other DNA
ggagatatacctaatggtaaatgacgagttaatgggtgcagcacaccaacatggcatatgtatacatatgtaacaaacctgcacattgtgcacatgtaccgtaaaacttaaagtataata

SEQ ID NO: 112141 - DNA, 120 bp, synthetic construct; identical to SEQ ID NO: 24591
  source 1..120: mol_type = other DNA

SEQ ID NO: 112142 - DNA, 120 bp, synthetic construct
  source 1..120: mol_type = other DNA
cacaggaaggggaatatcacactctggggactgtggtggggtcgggggaggggggagggatagcattgggagatatacctaatgctagatgacacgttagtgggtgcagcacaccagcat

SEQ ID NO: 112143 - DNA, 120 bp, synthetic construct; identical to SEQ ID NO: 24592
  source 1..120: mol_type = other DNA

SEQ ID NO: 112144 - DNA, 120 bp, synthetic construct
  source 1..120: mol_type = other DNA
ccagtaatgggatggctgggtcaaatggtatttctagttttagaaccctgaggaatcgccacactgacttccacaatggttgaactagtttacagtcccaccaacagtgtaaaagtgttc

SEQ ID NO: 112145 - DNA, 120 bp, synthetic construct
  source 1..120: mol_type = other DNA
cccatcaatacctaatttattgagagtttttagcatgaagagttgttgaattttgtcaaaggccttttctgcagctattgagataatcatgtggtttttgcctttggttctgtttatatg

SEQ ID NO: 112146 - DNA, 120 bp, synthetic construct
  source 1..120: mol_type = other DNA
agtagtcattcaggagcaggttgttcaattttcatgtagttgagcggttttgagtgagtgtcttaatcctgagttctagtttgattgcactgtggtctgagagacagtttgttataattt

SEQ ID NO: 112147 - DNA, 120 bp, synthetic construct
  source 1..120: mol_type = other DNA
aaggggaacatcacacactggggcctgttgtagggtggggggagcggggaggggggagggatagcattaggagatacacctaatgttaaacgaagagttaatgggtgcagcataccaaca

SEQ ID NO: 112148 - DNA, 120 bp, synthetic construct
  source 1..120: mol_type = other DNA
gcaacaaaagccaaaattgataaatgggatctaattaagctaaagagcttctgcacagcaaaagaaactaccatcagagtgaacaggcaacctacaaaatgggagaaaatttttgcaatc

SEQ ID NO: 112149 - DNA, 120 bp, synthetic construct
  source 1..120: mol_type = other DNA
acctgcacattgtgcacatgtaccctaaaacttaaagtatataaaaaaaaaatacgttgaaagtaaaagaaggggaaaagaattccatgaaaacactatccccaaaaaagctgatatggc

SEQ ID NO: 112150 - DNA, 120 bp, synthetic construct
  source 1..120: mol_type = other DNA
tggcaacaaaagccagaattgacaaatgggatctaagtaaactaaagagcttctttttttttttttttttttttttatggcagaaaaatgtagttttatttgttttgtttttgacttaag

SEQ ID NO: 112151 - DNA, 120 bp, synthetic construct
  source 1..120: mol_type = other DNA
cagagggtttcctcacttctcagacggagcggccgggcagagacgctcctcacctcccagacagggttgcggcccagcagaagcgctcctcacatcccagacagggcggtggggcagagg

SEQ ID NO: 112152 - DNA, 120 bp, synthetic construct
  source 1..120: mol_type = other DNA
aaatcaaaaccacaatgagataccatctcacacccgttagaatggcaatcattaaaaagtcaggaaacaacaggtgctggagaggatgtggagaaataggaacacttttacactgttggt

SEQ ID NO: 112153 - DNA, 120 bp, synthetic construct
  source 1..120: mol_type = other DNA
agcctggccaatatgatgaaaccctgtctctactaaaaatataaaaattagctgggcttggtggcacacacctgtaatcccagctacttgagaggctgaggcaggagaactgattgagac

SEQ ID NO: 112154 - DNA, 120 bp, synthetic construct
  source 1..120: mol_type = other DNA
attcaagccttgaatgtatgtaattgaggggctggcacataacattaggaattatactagaatactatttttttattattattatactttaagttttagggtacatgtgcacaatgtgca

SEQ ID NO: 112155 - DNA, 120 bp, synthetic construct
  source 1..120: mol_type = other DNA
tcactctgatggtagtttcttttgctgtgcagaagctctttacagggatgccctctctcaccactcctattcaacatagtgttggaagttatggccagggcaattaggcaggagaaggaa

SEQ ID NO: 112156 - DNA, 120 bp, synthetic construct
  source 1..120: mol_type = other DNA
tcttccaccttccaaccttcctgagactgactggtttgtctcttctggccaactccctgtgaataatcatttcatagctctggagactagctattgtgtttttgctacagttcaaaatag

SEQ ID NO: 112157 - DNA, 120 bp, synthetic construct
  source 1..120: mol_type = other DNA
catggacacaggaaggggaatatcacactctggggactgtggtggggtcgggggaggggggagggatagcattgggagatatacctaatgctagatgacacgttagtgggtgcagcgcac

SEQ ID NO: 112158 - DNA, 120 bp, synthetic construct
  source 1..120: mol_type = other DNA
ggatgtagaactggaaataccatttgacccagcaatcccattactgggtatatgcccaaaggattataaatcatgctgctataaagacacatgcacacgtatgtttattgcggcactatt

SEQ ID NO: 112159 - DNA, 120 bp, synthetic construct
  source 1..120: mol_type = other DNA
accaaaggctgacagagacacaacaaaaaaatagaattttagaccagtatccctgatgaagatcaatgcaaaaatcctcaatataatacaaaccgaatccagcaacatatcaaaaagctt

SEQ ID NO: 112160 - DNA, 120 bp, synthetic construct
  source 1..120: mol_type = other DNA
ctatactacaaggctacagtaagcaaaacagcatggtactggtaccaaaacagagatatagaccaatggaacagaacagaggcctcagaaataatgccacacatctacaaccatctgatc

SEQ ID NO: 112161 - DNA, 120 bp, synthetic construct
  source 1..120: mol_type = other DNA
acatgtgcacaatgtgcaggttagttacatatgtatacttgtgccattctggtgtgctgcacccattaacttgtcatttagcattaggtaaatctcctaatgctatccctcccccatccc

SEQ ID NO: 112162 - DNA, 120 bp, synthetic construct
  source 1..120: mol_type = other DNA
ttttgctgtgcagaagctctttagtttaattagatcccatttgtcaactttggcttttgctgccattgcttttggtgttttagagatgaagtccttgcacatgcctatgtcctgaatgtt

SEQ ID NO: 112163 - DNA, 120 bp, synthetic construct
  source 1..120: mol_type = other DNA
tttgtatcctgagactttgctgaagttgcttatcagcttaaggagattttgggctgagacaatggggttttctagataacaattcatgtcatctgcaaacagagacaatttgacttcctc

SEQ ID NO: 112164 - DNA, 120 bp, synthetic construct
  source 1..120: mol_type = other DNA
gtgtatcaattttgttgatcatttcaaaaaatcagctcctgggttcattaattttttgaagggttttttatgtctctatctccttcagttctgctctgattttagttatttcttgccttc

SEQ ID NO: 112165 - DNA, 120 bp, synthetic construct
  source 1..120: mol_type = other DNA
tttgagcctatatctgtctctgcacgtgagatgggtttcctgaatacagcacactgatgggtcttgactgtttatccaatttggcagtctgtgtcttttaattgtagcatttagtccttt

SEQ ID NO: 112166 - DNA, 120 bp, synthetic construct
  source 1..120: mol_type = other DNA
aaaaaagagcccacatcgccaagtcaatcctaagccaaaacaacaaagctggaggcatcacgctacctgacttcaaactatactacaaggctacagtaaccaaaacagcatggtactggt

SEQ ID NO: 112167 - DNA, 120 bp, synthetic construct
  source 1..120: mol_type = other DNA
tttacagtggtggtgggactgtaaactagttcaaccattgtggaagtcagtgtggcgattcctcagggatctagaactagaaataccatttgacccagccatcccattactgggtatata

SEQ ID NO: 112168 - DNA, 120 bp, synthetic construct
  source 1..120: mol_type = other DNA
ttggctgcataaatgtcttcttttgagaagtgtctgttcatatgctttgctcactttttaatggggttgtttctttcttgtaattttgtttgagttcattgtagattctggatattagcc

SEQ ID NO: 112169 - DNA, 120 bp, synthetic construct
  source 1..120: mol_type = other DNA
gcctatcagcttaaggagatttggggctgagacaatggggttttctagatatacaatcatgtcgtctgcaaacagggacaatttgacttcctcttttcctaattgaataccctttatttc

SEQ ID NO: 112170 - DNA, 120 bp, synthetic construct
  source 1..120: mol_type = other DNA
tagctactagaaagttgttattcgtgaccttattagccactaggtaataaattcatgtgtttttcataaaaaccctagaagaaaacctaggcattaccattcaggacataggcacgggca

SEQ ID NO: 112171 - DNA, 120 bp, synthetic construct
  source 1..120: mol_type = other DNA
acacaggaaggggaatatcacactctggggactgtggtggggtcgggggaggggggagggatagcattgggagatatacctaatgctagatgacacgttagtgggtgcagtgcaccagca

SEQ ID NO: 112172 - DNA, 120 bp, synthetic construct; identical to SEQ ID NO: 24589
  source 1..120: mol_type = other DNA

SEQ ID NO: 112173 - DNA, 120 bp, synthetic construct
  source 1..120: mol_type = other DNA
ccacacaataataatgggagactttaacaccccactgtcaacattagacagatcaacgagacagaaagttaacaaggatacccaggaattgtactcagctctgcaccaagcagacctaat

SEQ ID NO: 112174 - DNA, 120 bp, synthetic construct; identical to SEQ ID NO: 14254
  source 1..120: mol_type = other DNA

SEQ ID NO: 112175 - DNA, 120 bp, synthetic construct; identical to SEQ ID NO: 14255
  source 1..120: mol_type = other DNA

SEQ ID NO: 112176 - DNA, 120 bp, synthetic construct
  source 1..120: mol_type = other DNA
cactgtctagtcctttggattaatatccttgcttgtcttatccttgttctatgtatccaccattactggcccatatcatgaagaggagagagagagagagagagagagagagagagagag

SEQ ID NO: 112177 - DNA, 120 bp, synthetic construct; identical to SEQ ID NO: 29524
  source 1..120: mol_type = other DNA

SEQ ID NO: 112178 - DNA, 120 bp, synthetic construct; identical to SEQ ID NO: 29525
  source 1..120: mol_type = other DNA

SEQ ID NO: 112179 - DNA, 120 bp, synthetic construct
  source 1..120: mol_type = other DNA
gataataattttgtatgtgaaaagatcttgctgtcctggagtaaaatgatgttatttaaacaaataagaaagaagaagggagagggagaaggaggagggagaaggaggaggagggggagg

SEQ ID NO: 112180 - DNA, 120 bp, synthetic construct; identical to SEQ ID NO: 24399
  source 1..120: mol_type = other DNA

SEQ ID NO: 112181 - DNA, 120 bp, synthetic construct
  source 1..120: mol_type = other DNA
ttctgcagccaccgccactgatacccaggcaaacagggtctggagtggacctctagcaaactccaacagacctgcagctgagggtcctgtctgttagaaggaaaactaacaaacagaaag

SEQ ID NO: 112182 - DNA, 120 bp, synthetic construct
  source 1..120: mol_type = other DNA
ggcagaaactctacaagccagaagagagtgggggccaatattcaacattcttaaagaaaagaattttcaacccagaatttcatatccacccaaactaaactgcataagtgaaggagaaat

SEQ ID NO: 112183 - DNA, 120 bp, synthetic construct
  source 1..120: mol_type = other DNA
tagaactcaggattaagaaactcactcaaaaccgctcaactacatggaaactgaacaacctgcccctgaatgactactgggtacataagtaaatgaaggcagaaataaagatgttttttg

SEQ ID NO: 112184 - DNA, 120 bp, synthetic construct
  source 1..120: mol_type = other DNA
tgatgaacatcgatgcaaaaatcctcaataaaatactggcaaaccgaatctagcagcatatcaaaaagcttatccaccatgatcaagtggtcttcatcactgggatgcaaggctggttca

SEQ ID NO: 112185 - DNA, 120 bp, synthetic construct
  source 1..120: mol_type = other DNA
ttggaaaaaactactttaaagttcatatggaaccaaaaaagagccagcattgccaagttaaccctaagtaaaaagaacaaagctggaggcatcacgctacctcagttgaaactatactac

SEQ ID NO: 112186 - DNA, 120 bp, synthetic construct
  source 1..120: mol_type = other DNA
atgctgctataaggacacatgcacacatatgtttattgcagcactattcatgatagcaaagccttggaaccaacccaaatgtccaacgatgatagactggattaagaaaatgtggctcat

SEQ ID NO: 112187 - DNA, 120 bp, synthetic construct
  source 1..120: mol_type = other DNA
ctgtgaaaatgacagtggctgtcctagagctttgttcctactgatggctgaaagtgtttttcagatatgaccaaagactttgggtggccttcagcctaatcaaaatatttagagatttaa

SEQ ID NO: 112188 - DNA, 120 bp, synthetic construct
  source 1..120: mol_type = other DNA
gtgaggagcgcctctgcccggccgagaccccgtctgggaggtgaggagcatctctgcccggccgccccgtctgagaagtgaggagaccctctgcctggcaaccactccgtctgagaagtg

SEQ ID NO: 112189 - DNA, 120 bp, synthetic construct
  source 1..120: mol_type = other DNA
ggaatagaaaggcgggaaaggtggggaaaagattgagaaatcggatggttgccgtgtctgtgtagaaagaagtagacatgggagacttttcattttgttctgcactaagaaaaattcctc

SEQ ID NO: 112190 - DNA, 120 bp, synthetic construct
  source 1..120: mol_type = other DNA
aagattgccagggagctgcataagcttcccaggtgatgtcaatgcgcagctggatttggaagtgaatgcctaagtaaaaaggataatttaggcaatcacttcaaggttcatccttggaaa

SEQ ID NO: 112191 - DNA, 120 bp, synthetic construct; identical to SEQ ID NO: 9015
  source 1..120: mol_type = other DNA

SEQ ID NO: 112192 - DNA, 120 bp, synthetic construct
  source 1..120: mol_type = other DNA
ggaggtgaggggcgcctctgcccggccgcccctactgggaagtgaggagcccctctacccagccaccaccccgtttgggaggtgtacccaacagctcattgagaacggaccatgatgaca

SEQ ID NO: 112193 - DNA, 120 bp, synthetic construct; identical to SEQ ID NO: 9016
  source 1..120: mol_type = other DNA

SEQ ID NO: 112194 - DNA, 120 bp, synthetic construct
  source 1..120: mol_type = other DNA
taggttttcttctagggtttttatggttttaggtctaacatttaagtctttaatccatcttgaattaatttttgtataaggtgtaaggaagggatccagtttcagctttctacatatggc

SEQ ID NO: 112195 - DNA, 120 bp, synthetic construct; identical to SEQ ID NO: 13265
  source 1..120: mol_type = other DNA

SEQ ID NO: 112196 - DNA, 120 bp, synthetic construct
  source 1..120: mol_type = other DNA
gttgtactaagtactgtatatattaacatgctttattcacacagcatcatgtcatggaagtctttctagctaagtaactatagttcagccgggcacagtggctcacgcctgtaatcccag

SEQ ID NO: 112197 - DNA, 120 bp, synthetic construct
  source 1..120: mol_type = other DNA
aagaatgtatattctgttgattttgggtggagagttctatagatgtctattaggtccgcttggtgcagagctgagttcaattcctggatatccttgttaactttctgtctcgttgatctg

SEQ ID NO: 112198 - DNA, 120 bp, synthetic construct; identical to SEQ ID NO: 29085
  source 1..120: mol_type = other DNA

SEQ ID NO: 112199 - DNA, 120 bp, synthetic construct
  source 1..120: mol_type = other DNA
caaaaagtgggtgaaggatatgaacagacacttctcaaaagaagacatttacgcagccaaaaaacacatgaaaaaatgcttgtcattactggccatcagagaaatgcaaatcaaaaccac

SEQ ID NO: 112200 - DNA, 120 bp, synthetic construct
  source 1..120: mol_type = other DNA
ttctcaggtttgtcaaagatcagatggttgtagatgtgtggtattgtttctgagggctctgttctgttccattggtctatatctctgttttggtaccagtaccatgctgttttggttact

SEQ ID NO: 112201 - DNA, 120 bp, synthetic construct
  source 1..120: mol_type = other DNA
aggaaaaatgcaaacaaaaaaatccctcaataccaaaaccccaaataacaacccatttttaaaatggctgttattggtctattcagagattcaacttcttcctggtttagacttgggagg

SEQ ID NO: 112202 - DNA, 120 bp, synthetic construct
  source 1..120: mol_type = other DNA
gtaatggccttctttgtctcttttgatctttgttggtttaaagtctgttttatccgagactaggattgaaacccctgcctttttttgttttccatttgcttggtagatcttcctacatcc

SEQ ID NO: 112203 - DNA, 120 bp, synthetic construct
  source 1..120: mol_type = other DNA
ttgatgaacattgatgcaaaaatgctcaataaaatactggcaaaccgaatccagcagcacatcacaaagcttatccaccatgatcaagtgggcttcatccctgggatgcaaggctggttc

SEQ ID NO: 112204 - DNA, 120 bp, synthetic construct
  source 1..120: mol_type = other DNA
ctgacttcaaactttactacgaggctacagttaccaaaacagcatggtactggtaccaaaacagagatatagatcagtggaacagaacagagccctcagaaataacgccacatatctaca

SEQ ID NO: 112205 - DNA, 120 bp, synthetic construct
  source 1..120: mol_type = other DNA
gtttattgcggcactattcacagtagcaaagagttggaaccaacccaaatgtccaacaatgatagactggtttaagaaaatgtggcacatatacaccatggaatactatgcagccataaa

SEQ ID NO: 112206 - DNA, 120 bp, synthetic construct; identical to SEQ ID NO: 29086
  source 1..120: mol_type = other DNA

SEQ ID NO: 112207 - DNA, 120 bp, synthetic construct
  source 1..120: mol_type = other DNA
tcttttcttttcttttctttcttttctttctttcttcccttccttccttccttctttcttttttgagacctagtctcactctattgcccaggctggagtgcagtggcatgatctctgctc

SEQ ID NO: 112208 - DNA, 120 bp, synthetic construct
  source 1..120: mol_type = other DNA
tcaacagcccttcatgctaaaaactctcaataaagtaggtattgatgggacgtatctcaaaataatatgagctatttatgacaaacccacagccaatatcatactgaatgggcataaact

SEQ ID NO: 112209 - DNA, 120 bp, synthetic construct
  source 1..120: mol_type = other DNA
acaagaaatggggaaaggattccctatttaataaatggtgctgggaaaactggctagccatatgtagaaagctgaaactggatcccttccttacaccttatacaaaaattaattcaagat

SEQ ID NO: 112210 - DNA, 120 bp, synthetic construct; identical to SEQ ID NO: 29088
  source 1..120: mol_type = other DNA

SEQ ID NO: 112211 - DNA, 120 bp, synthetic construct
  source 1..120: mol_type = other DNA
ttgcatttctctgatggccagtgatgctgagcattttttcatgtgtcttttggctgcataaatgtcttcttttgagaagtgtctgttcatatccttcacccactttttgatggggttgtt

SEQ ID NO: 112212 - DNA, 120 bp, synthetic construct
  source 1..120: mol_type = other DNA
tagtgaatgggagttcactcatgatttggctctctgtttgtctgttattggtgtataggaatgcttgtgatttttgcagattgattttgtatcctgagactttgctgaagttgcttatca

SEQ ID NO: 112213 - DNA, 120 bp, synthetic construct; identical to SEQ ID NO: 19635
  source 1..120: mol_type = other DNA

SEQ ID NO: 112214 - DNA, 120 bp, synthetic construct; identical to SEQ ID NO: 31588
  source 1..120: mol_type = other DNA

SEQ ID NO: 112215 - DNA, 120 bp, synthetic construct
  source 1..120: mol_type = other DNA
agagacctcaatctctaactagtctgtggtacaatatcatccgtcttataaagaatggagactttttgttttttttgagacagtcttgctctgtcacccaggctggagtgaagtggcatg

SEQ ID NO: 112216 - DNA, 120 bp, synthetic construct
  source 1..120: mol_type = other DNA
accccgacgcctccacacattttcagggcacaggctcattcttgttttaaagtcatgcagggaccattcttcctgtttgatggtgggagctgagcctcagaatggtgaagcgatggccca

SEQ ID NO: 112217 - DNA, 120 bp, synthetic construct; identical to SEQ ID NO: 22546
  source 1..120: mol_type = other DNA

SEQ ID NO: 112218 - DNA, 120 bp, synthetic construct; identical to SEQ ID NO: 22547
  source 1..120: mol_type = other DNA

SEQ ID NO: 112219 - DNA, 120 bp, synthetic construct
  source 1..120: mol_type = other DNA
cgtacagataattttctcaaatttttgtagggatgatgtcttgtaatgttgaacaggctggtcccaaactcctgtcctccagtgatcctctagcctcaacttctcaaattgctgggatta

SEQ ID NO: 112220 - DNA, 120 bp, synthetic construct
  source 1..120: mol_type = other DNA
atcccatcatgagctgggcttggctcctatgggtgaggaccgtgatggtcttcttctgtgactgtggccctgggtagcacaccctttggcagggagtagcaataggactaagtttctgat

SEQ ID NO: 112221 - DNA, 120 bp, synthetic construct
  source 1..120: mol_type = other DNA
gggctgagccagggcctccttccctggattcacatgccccacacctggacctttgctttttctttttattgtgggatttattttattttattttattttatttatttatttttgagacag

SEQ ID NO: 112222 - DNA, 120 bp, synthetic construct
  source 1..120: mol_type = other DNA
gtgtctttcagagtctccatccctgagcagtgggtcagggaaggtctggtgagctgaagccccagccctgtcttcctccactccccttgcacccaggacacactcacacacctgagggaa

SEQ ID NO: 112223 - DNA, 120 bp, synthetic construct
  source 1..120: mol_type = other DNA
acttgcctggccacagtccatctgggctccaggacaaacacggcccattgaggaactgagctgctactaggggccagagctgctgtgggaatgaacaaaactctgatgactcagcaaaag

SEQ ID NO: 112224 - DNA, 120 bp, synthetic construct
  source 1..120: mol_type = other DNA
gtttgtttttgtaggttttttttttctgttttttttttttttttttttttttttccgagctgtcactgggctcctgacctgcccctgaactccaccctgccaggcagccaacagacaagc

SEQ ID NO: 112225 - DNA, 120 bp, synthetic construct
  source 1..120: mol_type = other DNA
ggttcccttgactaagactttgtattgcactctagtaacaacctgtcggacccacacggggtgacacagaaaagaggcgagaatgtgagattaatagagtggtagcaagtgaatacaaaa

SEQ ID NO: 112226 - DNA, 120 bp, synthetic construct
  source 1..120: mol_type = other DNA
atcacgccattgcactccagcctgggcaacaagagtgaaactcggtctcaaaaaaacaaaacaaaacaaaaaaaagcgtggaaacgggctgaggtcgatgtcccaccggtctttgatgac

SEQ ID NO: 112227 - DNA, 120 bp, synthetic construct
  source 1..120: mol_type = other DNA
aaggttggggtgggagagactaacgagagtcataaagcacctagccggtgagatagtaagtattcaggtaaagaagcagacggggaagtacacaagaggtgcaattttattttatatttt

SEQ ID NO: 112228 - DNA, 120 bp, synthetic construct
  source 1..120: mol_type = other DNA
cgcctggtctccttccttacccgaagggttgccacggcgggcgggaagccgtgcacgacgagcactttctccctggggaggagaacgggggtgtccctgtgagccctgccgcgcccaacc

SEQ ID NO: 112229 - DNA, 120 bp, synthetic construct
  source 1..120: mol_type = other DNA
agagcaggtagatgctgaagaagcgccccggcctagccgcgactcccgtggaactctttgaattttaggaaattctccttaaacacacttctggttcagcaccgacatcaagaagagagc

SEQ ID NO: 112230 - DNA, 120 bp, synthetic construct
  source 1..120: mol_type = other DNA
agagactggtagtggccccgaacgtcgggctgcgctgttatttattggatacaaggctgaagggtcagggtaaagaatgtgagtcacctccaatgataggtaaggtcacgtgggtcacgt

SEQ ID NO: 112231 - DNA, 120 bp, synthetic construct
  source 1..120: mol_type = other DNA
cagttttatttttttaaatacagacagggtcttgctatgttgcccaagctggtctcgaactcctaacctcaagggatcctctcgcctcaccctcccaaagtgttaggattacaggcatga

SEQ ID NO: 112232 - DNA, 120 bp, synthetic construct
  source 1..120: mol_type = other DNA
tatggttttttgggtatcttccactaacacctaggacagcacctggaagacagtttcttttcttttctttttttttttctttttgtgacggagtctccctctgttgccaggctggagtgc

SEQ ID NO: 112233 - DNA, 120 bp, synthetic construct
  source 1..120: mol_type = other DNA
agctctaccgatcctcttgcctcagcctcccaaaatgctgggattacaagtgtgagccggctacttcccgctcttttttttttttttttttttttttgagacagagtctcgctctgtcgc

SEQ ID NO: 112234 - DNA, 120 bp, synthetic construct
  source 1..120: mol_type = other DNA
gttgggattagaggcgtgagccaccgtgcccggcccagagaaagtatttctttccaattcatgagaagtatagacactcttaaagcctctcctcatacatctatcaaaataactttaaga

SEQ ID NO: 112235 - DNA, 120 bp, synthetic construct
  source 1..120: mol_type = other DNA
accatcactatcatccatcaatatgaccctctgatcctacagtgaaaagagaacatagacaggtgccgtggctcaagcctgtaatcccagcactttgggaggccgaggcaggcagattgc

SEQ ID NO: 112236 - DNA, 120 bp, synthetic construct
  source 1..120: mol_type = other DNA
agattacttgagttcaggagttcgagacgaccctggcaaacatggtgaaactttgtctccattaaaaatgcaaaaattagccgggcatggtggtgtgcatctgtaatgccagctacttgg

SEQ ID NO: 112237 - DNA, 120 bp, synthetic construct
  source 1..120: mol_type = other DNA
gttcttattgtacgcagtagagaaggtttccacagtcaagcccctgtcccccacaccccaggcccgggtcggattttctaaggagagggttccctgaaccctcacaggtatatagtcctc

SEQ ID NO: 112238 - DNA, 120 bp, synthetic construct; identical to SEQ ID NO: 23895
  source 1..120: mol_type = other DNA

SEQ ID NO: 112239 - DNA, 120 bp, synthetic construct; identical to SEQ ID NO: 23896
  source 1..120: mol_type = other DNA

SEQ ID NO: 112240 - DNA, 120 bp, synthetic construct
  source 1..120: mol_type = other DNA
gccacagggaccctgtctacacagcgtcctcacactgcaggtgccacagggacccagtctacacagcgtcctcacactgcaggtgccacagggacccagcctacacagcgtcctgacact

SEQ ID NO: 112241 - DNA, 120 bp, synthetic construct
  source 1..120: mol_type = other DNA
ttattggtgtataagattgcttgtgatttttgtacattgatttcgtatcctgagacgttgctgaagttgcttatcagcttaaggagactttgggctgacacaatggggttttctagatat

SEQ ID NO: 112242 - DNA, 120 bp, synthetic construct
  source 1..120: mol_type = other DNA
tattgattggaatagtttcagaaggaatggtaccagttcctccttgtacctgtggtagaattcggctgtgaatccatctggtcctggactctttttggttggtaagctattgattattgc

SEQ ID NO: 112243 - DNA, 120 bp, synthetic construct
  source 1..120: mol_type = other DNA
tgatctgtctaatgttgacagtggggtgttaaagtctcccattattattgtgtgggagtctaagtctctttgtaggtcactcaggatttgctttatgaatctgggtgcttctgtattggg

SEQ ID NO: 112244 - DNA, 120 bp, synthetic construct
  source 1..120: mol_type = other DNA
tggataataacctgcagagtgtttccaacttggttccattctccccgtcactttcaggtacacccatcagacgtagatttggtcttttcacatagtcccatatttcttggaggctttgtt

SEQ ID NO: 112245 - DNA, 120 bp, synthetic construct
  source 1..120: mol_type = other DNA
cagccaggcctccttgagctgtggtgggctccacccatttcgagcttcccagctgcttaggttatactgcccaaggtaatttatagattcaatgccatccccatcaagctaccaatgact

SEQ ID NO: 112246 - DNA, 120 bp, synthetic construct
  source 1..120: mol_type = other DNA
tgtgcagccaaaagacacatgaaaaaatgctcaccatcactggccatcagagaaatgcaaatcaaaaccacaatgagatatcatctcacaccagttagaatggcaatcattaaaaagtca

SEQ ID NO: 112247 - DNA, 120 bp, synthetic construct; identical to SEQ ID NO: 24054
  source 1..120: mol_type = other DNA

SEQ ID NO: 112248 - DNA, 120 bp, synthetic construct; identical to SEQ ID NO: 24055
  source 1..120: mol_type = other DNA

SEQ ID NO: 112249 - DNA, 120 bp, synthetic construct
  source 1..120: mol_type = other DNA
ggtgatccacccacctcagcctcccaaagtgctgggattacaggcatgagttaccacacccagccagcatttctttatactaatgacaaactatctgaaaaagatattaagaaattaatc

SEQ ID NO: 112250 - DNA, 120 bp, synthetic construct
  source 1..120: mol_type = other DNA
ccagacgcttgttcccgagccgactccgtgcactcgacacaggatcccgcacccagggcgatgccgggggagagggcgaccccaaccagcaatgactcaggagaggagcacgcaaagacg

SEQ ID NO: 112251 - DNA, 120 bp, synthetic construct; identical to SEQ ID NO: 28686
  source 1..120: mol_type = other DNA

SEQ ID NO: 112252 - DNA, 120 bp, synthetic construct; identical to SEQ ID NO: 28687
  source 1..120: mol_type = other DNA

SEQ ID NO: 112253 - DNA, 120 bp, synthetic construct; identical to SEQ ID NO: 28688
  source 1..120: mol_type = other DNA

SEQ ID NO: 112254 - DNA, 120 bp, synthetic construct; identical to SEQ ID NO: 28689
  source 1..120: mol_type = other DNA

SEQ ID NO: 112255 - DNA, 120 bp, synthetic construct; identical to SEQ ID NO: 28690
  source 1..120: mol_type = other DNA

SEQ ID NO: 112256 - DNA, 120 bp, synthetic construct; identical to SEQ ID NO: 28691
  source 1..120: mol_type = other DNA

SEQ ID NO: 112257 - DNA, 120 bp, synthetic construct
  source 1..120: mol_type = other DNA
ctggaggccgttatccacagcaaactaacacaggaacagaaaaacaaatactctatgttctcacttgtaagtgggagctaaataatgagaacacatgaacacaaagcggagcaacagaca

SEQ ID NO: 112258 - DNA, 120 bp, synthetic construct
  source 1..120: mol_type = other DNA
acaagtttacattgcttctcaattcctgaggatcctcaggctcttttccacattcttcaacataaatgtcataaagtttttcctgcagagtttttcccgccctaggtgagtatctccttc

SEQ ID NO: 112259 - DNA, 120 bp, synthetic construct; identical to SEQ ID NO: 33608
  source 1..120: mol_type = other DNA

SEQ ID NO: 112260 - DNA, 120 bp, synthetic construct; identical to SEQ ID NO: 33609
  source 1..120: mol_type = other DNA

SEQ ID NO: 112261 - DNA, 120 bp, synthetic construct; identical to SEQ ID NO: 33610
  source 1..120: mol_type = other DNA

SEQ ID NO: 112262 - DNA, 120 bp, synthetic construct; identical to SEQ ID NO: 33604
  source 1..120: mol_type = other DNA

SEQ ID NO: 112263 - DNA, 120 bp, synthetic construct
  source 1..120: mol_type = other DNA
aattagtggcagatttgcttgtgacagtcccctgccctttcaaaggccctgtctgcacctagtgctccacagagcaaggctttctcactggctttgaaaaggctctttttggatgttttg

SEQ ID NO: 112264 - DNA, 120 bp, synthetic construct; identical to SEQ ID NO: 33605
  source 1..120: mol_type = other DNA

SEQ ID NO: 112265 - DNA, 120 bp, synthetic construct; identical to SEQ ID NO: 33606
  source 1..120: mol_type = other DNA

SEQ ID NO: 112266 - DNA, 120 bp, synthetic construct; identical to SEQ ID NO: 33607
  source 1..120: mol_type = other DNA

SEQ ID NO: 112267 - DNA, 120 bp, synthetic construct
  source 1..120: mol_type = other DNA
aaaaaaaaagattcatgtaactaaacaccaccggttccccaaaaaacctactaaataaatacgtttaaaaaaagtgtctaggtcgggcgcggtggctcacgcctgtaatcccagcacttc

SEQ ID NO: 112268 - DNA, 120 bp, synthetic construct
  source 1..120: mol_type = other DNA
atatgggaagtacactgttccttttgtcagtctgctggggctgccataacaaaataccatagaataggtggcttaaacaacagaaatatatttctcccggttctgaaggctagaggttca

SEQ ID NO: 112269 - DNA, 120 bp, synthetic construct; identical to SEQ ID NO: 27783
  source 1..120: mol_type = other DNA

SEQ ID NO: 112270 - DNA, 120 bp, synthetic construct; identical to SEQ ID NO: 27784
  source 1..120: mol_type = other DNA

SEQ ID NO: 112271 - DNA, 120 bp, synthetic construct
  source 1..120: mol_type = other DNA
tgaacatttttttcatgtgtcttttggctgcataaatgtcttcttttgagaagtgtctgttcatatcctttgcccactttttgatggggttgtttgtttttttcttgtaaatttgtttga

SEQ ID NO: 112272 - DNA, 120 bp, synthetic construct
  source 1..120: mol_type = other DNA
ttttatttccttgagcaatggtttgtagttctccttgaagaggtccttcatgtcccttgtaagttggattcctaggtattttattctctttgaagcaattgtgaatgggagttcactcat

SEQ ID NO: 112273 - DNA, 120 bp, synthetic construct
  source 1..120: mol_type = other DNA
ctctttttggttggtaagctattgattattgccacaatttcagattctgttgttggtctattcagagattcaacttcttcctggtttagtcttgggagagtgtatctgtcaaggaattta

SEQ ID NO: 112274 - DNA, 120 bp, synthetic construct; identical to SEQ ID NO: 27785
  source 1..120: mol_type = other DNA

SEQ ID NO: 112275 - DNA, 120 bp, synthetic construct
  source 1..120: mol_type = other DNA
caaacagaaaggacatccacaccgaaaacccatctgtacatcaccatcatcaaagaccaaaagtacataaaaccacaaagatggggaaaaaacagaacagaaactggaaactctaaaatg

SEQ ID NO: 112276 - DNA, 120 bp, synthetic construct
  source 1..120: mol_type = other DNA
ggatctcttggcagaaaccctacaagccagaagagaatgggggccaatattcaacattcttaaagaaaagaattttcaacccagaatttcatatccagccaaactaagcttcataagtga

SEQ ID NO: 112277 - DNA, 120 bp, synthetic construct
  source 1..120: mol_type = other DNA
ttccaaaattgaccacatactgggaagtaaagctctcctcagcaaatgtaaaagaacagaaattataacaaactatctctcagaccacagtgcaatcaaactagaattcaggattaagaa

SEQ ID NO: 112278 - DNA, 120 bp, synthetic construct
  source 1..120: mol_type = other DNA
ggtacgattccttctgaaactattccaatcaatagaaaaagagggaatcctccctcactcattttatgaggccagcatcattctgataccaaagccgggcagagacacaaccaaaaaaga

SEQ ID NO: 112279 - DNA, 120 bp, synthetic construct
  source 1..120: mol_type = other DNA
tatcgtgaaaatggccatactgcccaaggtaatttacagattcaatgccatccccataaagctaccaatgactttcctcacagaattggaaaaaactactttaaagttcatatggaacca

SEQ ID NO: 112280 - DNA, 120 bp, synthetic construct
  source 1..120: mol_type = other DNA
taccatctcacaccagttagaatggcaatcattaaaaagtcaggaaacaacaggtgctggagaggatgtggagaaataggaacacttttacactgttggtgggactgtaaactaattcaa

SEQ ID NO: 112281 - DNA, 120 bp, synthetic construct; identical to SEQ ID NO: 27786
  source 1..120: mol_type = other DNA

SEQ ID NO: 112282 - DNA, 120 bp, synthetic construct; identical to SEQ ID NO: 27787
  source 1..120: mol_type = other DNA

SEQ ID NO: 112283 - DNA, 120 bp, synthetic construct
  source 1..120: mol_type = other DNA
tttgactagctgagagaagaaggcttcagacgatcaaattactctgagctacgggcggacattcaaaccaaaggcaaagaagttgaaaactttgaaaaaaatttagaagaatgtataact

SEQ ID NO: 112284 - DNA, 120 bp, synthetic construct
  source 1..120: mol_type = other DNA
ttagaagacacagactggcaaattggataaagagtcaagacccatcagtgtgctgtatttaggaaacccatctcatgtgcagagacacacataggctcaaataaaaggatagaggaagat

SEQ ID NO: 112285 - DNA, 120 bp, synthetic construct
  source 1..120: mol_type = other DNA
gaaagcaggaaagatccaaaattgacaccctaacatcacaattaaaagagagaagaatcaaatagacgcaataaaaaatgataaaggggatatcaccaccgatcccacagaaatacaaac

SEQ ID NO: 112286 - DNA, 120 bp, synthetic construct
  source 1..120: mol_type = other DNA
gaagtcaaattgtccctgtttgcagatgacatgattgtatatctagaaaaccccactgtctcagcccagaatctccttaagctgataagcaacttcagcaaagtctcaggatacaaaatt

SEQ ID NO: 112287 - DNA, 120 bp, synthetic construct
  source 1..120: mol_type = other DNA
tgtagaaagctgaaactggatcccttccttacaccttatacaaaaattaattcaagatggattaaagacttaaatgttagacctaaaaccataaaaaccctggaagaaaacctaggcaat

SEQ ID NO: 112288 - DNA, 120 bp, synthetic construct
  source 1..120: mol_type = other DNA
gggatagcactgggagatatacctaatgctagatgacgagttagtgggtgcagcgcaccagcatggtacatgtatacatatgtaactaacctgcacattgtgcacatgtaccctaaaact

SEQ ID NO: 112289 - DNA, 120 bp, synthetic construct
  source 1..120: mol_type = other DNA
aagtttagaccaatatctctgatgaacatcgatacaaaaatacaacaaaatactggcaaaccgaattcagcagtgcatcaaaaagcttatccaccatgatcaagtgggcttcatccctgg

SEQ ID NO: 112290 - DNA, 120 bp, synthetic construct
  source 1..120: mol_type = other DNA
tcttcacagaattggaaaaaactactttaaagttcatatggaaccaaaaaagagcctgcattgccaagtcaatcctaagcccaaaagaacaaagctgaaggcatcacactacctgacttc

SEQ ID NO: 112291 - DNA, 120 bp, synthetic construct
  source 1..120: mol_type = other DNA
tgaggaatcgtcacaccgacttccacaatggttgaactagtttacagtcccaccaacagtgtaaaagtgttcctatttctccacatcctctccagcacctgttgtttcctcactttttaa

SEQ ID NO: 112292 - DNA, 120 bp, synthetic construct; identical to SEQ ID NO: 27788
  source 1..120: mol_type = other DNA

SEQ ID NO: 112293 - DNA, 120 bp, synthetic construct
  source 1..120: mol_type = other DNA
taatgtggggggggggggggacttcaatactccactgacagcactagacaggtcaacaagacagtcaacaaagaaataataaatttaaactataccttggaacaaatagactttgagcag

SEQ ID NO: 112294 - DNA, 120 bp, synthetic construct
  source 1..120: mol_type = other DNA
cctgggtgacagagtgagactctgtctcaaaaaaaaaaaaaaaaagaaagaaaaagaaaaagaagggggaggagccaagatggccgaataggaacagctccagtctacagctcccagcat

SEQ ID NO: 112295 - DNA, 120 bp, synthetic construct
  source 1..120: mol_type = other DNA
cagacttaagtgtccctgtctgacagctttgaagagagcagtggttctcccagcacgcagctggagatctgagaacgggcagactgcctcctcaagtgggtccctgacccctgacccccg

SEQ ID NO: 112296 - DNA, 120 bp, synthetic construct
  source 1..120: mol_type = other DNA
atgttaagggcagccagagagaaaggtcgggttaccctcaaaggaaagcccatcagactaacagcggatctctcggcagaaaccctacaagccagaagagagtgggggccaatattcaac

SEQ ID NO: 112297 - DNA, 120 bp, synthetic construct
  source 1..120: mol_type = other DNA
aagcggacctaatagacatctacagaactctccaccccaaatcaacagaatatacatttttttcagcaccacaccacacctattccaaaattgaccacatagttggaagtaaagctctcc

SEQ ID NO: 112298 - DNA, 120 bp, synthetic construct
  source 1..120: mol_type = other DNA
atccagcagcacatcaaaaagcttatccaccatgatcaagtgggcttcatccctgggatgcaaggctggttcaatatacgcaaatcaataaatgtaatccagcatatcaacagaaccaaa

SEQ ID NO: 112299 - DNA, 120 bp, synthetic construct
  source 1..120: mol_type = other DNA
ctaagccaaaagaacaaagctggaggcatcacactacctgacttcaaactatactacaaggctacagtaaccaaaacagcatggtactggtaccaaaacagagatatacatcaatggaac

SEQ ID NO: 112300 - DNA, 120 bp, synthetic construct
  source 1..120: mol_type = other DNA
tcccattactgggtatatacccaaatgactataaatcatgctgctataaagacacatgcacacgtatgtttattgcggcattattcacgatagcaaagacttggaaccaacccaaatgtc

SEQ ID NO: 112301 - DNA, 120 bp, synthetic construct; identical to SEQ ID NO: 27778
  source 1..120: mol_type = other DNA

SEQ ID NO: 112302 - DNA, 120 bp, synthetic construct; identical to SEQ ID NO: 27779
  source 1..120: mol_type = other DNA

SEQ ID NO: 112303 - DNA, 120 bp, synthetic construct
  source 1..120: mol_type = other DNA
ttcaacattcttaaagaaaagaactttcaacccagaatttcatatacagccaaactaagcttcagaagtgaaggagaaataaaatcctttacagacaagcaaatgctgagagattttgtc

SEQ ID NO: 112304 - DNA, 120 bp, synthetic construct
  source 1..120: mol_type = other DNA
ttgttcagtttccatgtagttgagcggttttgagtgagtttcttcatcctgagttatagtttgattgcactgtggtctgagagacagtttgttataatttctgttcttttacatttgctg

SEQ ID NO: 112305 - DNA, 120 bp, synthetic construct
  source 1..120: mol_type = other DNA
agactgctagcaagactaataaagaagaaaagagagaagaaccaaatagaggcaataaaaaatgataaaggggatatcaccaccgatcccacagaaatacaaactaccatcagagaatac

SEQ ID NO: 112306 - DNA, 120 bp, synthetic construct
  source 1..120: mol_type = other DNA
tccatttgtttgtatcctcttttatttcattgagcagtggtttgtagttctccttgaagaggtccttcacatcccttgtaagttggattcctaggtattttattctcgttgaagcaattg

SEQ ID NO: 112307 - DNA, 120 bp, synthetic construct
  source 1..120: mol_type = other DNA
accaacagtgtaaaagtgttcctatttctccacatcctctccagcacgtgttgcttcctgactttttaatgatcgccattctaactggtgtgagatggtatctcattgtggttttgattt

SEQ ID NO: 112308 - DNA, 120 bp, synthetic construct
  source 1..120: mol_type = other DNA
gtgcaggaaaccaccatggcacatgtatacctatgtaacaaacctgtacattctgcacatgtatcccagaacttaaagtataataataaaaagaagaagacctcttaagaagtcaaaaaa

SEQ ID NO: 112309 - DNA, 120 bp, synthetic construct; identical to SEQ ID NO: 27781
  source 1..120: mol_type = other DNA

SEQ ID NO: 112310 - DNA, 120 bp, synthetic construct
  source 1..120: mol_type = other DNA
cctttgtcagatgagtaggttgcgaaaattttctcccatgttgtaggttgcctgttcactctgatggcagtttcttttgctgtgcagaagctctttagtttaattagatcccatttctca

SEQ ID NO: 112311 - DNA, 120 bp, synthetic construct
  source 1..120: mol_type = other DNA
acgaatgcacaagcctcagtagccgatatgatcgactggaagaaagggtatcagtgatggaagatcaaatgaatgaaatgaagcgagaagagaagtttagagaaaaaagaataaaaagaa

SEQ ID NO: 112312 - DNA, 120 bp, synthetic construct
  source 1..120: mol_type = other DNA
caaaaaaaggcaggattgcaggggttgcaatcctagtctctgataaaacagactttaaaattacaaagatcaaaagagacaaagaagtccataacataatggtaaagggatcaattcaac

SEQ ID NO: 112313 - DNA, 120 bp, synthetic construct
  source 1..120: mol_type = other DNA
ctaacatcacaattaaaagaactagagaagcaagagcaaacaaattcaaaagctagcaaaaggcaagaaataactaagatcagagcaggactgaaggagatagagacacaaaaaaccctt

SEQ ID NO: 112314 - DNA, 120 bp, synthetic construct
  source 1..120: mol_type = other DNA
aaggaaataaagggtattcaattaggaaaagaggaagtcaaattgtccctgtctgcagatgacatgattgtatatctagaaaaccccaccgtctcagcccaaaatctccttaagctgatt

SEQ ID NO: 112315 - DNA, 120 bp, synthetic construct
  source 1..120: mol_type = other DNA
aatatccagaatctacaaagaacttaaacaaatttacaagaaaaaatcaaacaacccaatcaaaaagtgggcgaaggatatgaacagacacttctcaaaagaagacatttatgcagccaa

SEQ ID NO: 112316 - DNA, 120 bp, synthetic construct; identical to SEQ ID NO: 32925
  source 1..120: mol_type = other DNA

SEQ ID NO: 112317 - DNA, 120 bp, synthetic construct
  source 1..120: mol_type = other DNA
attccattaaaaaaatttctttcaatacagaaagtatataaaatataaaaattggctgggtgcggtggctcatgcctgtaatcccagaactttgggaggccaaggtgggcggatcacctg

SEQ ID NO: 112318 - DNA, 120 bp, synthetic construct; identical to SEQ ID NO: 23642
  source 1..120: mol_type = other DNA

SEQ ID NO: 112319 - DNA, 120 bp, synthetic construct; identical to SEQ ID NO: 23643
  source 1..120: mol_type = other DNA

SEQ ID NO: 112320 - DNA, 120 bp, synthetic construct
  source 1..120: mol_type = other DNA
atgatcgccattctaactcagcaaactattgcaaggacaaaaaaccaaacaccgcatgttctcactcacaggtgggaattgaacaatgagaacacttggacacaggaaggggaacatcac

SEQ ID NO: 112321 - DNA, 120 bp, synthetic construct
  source 1..120: mol_type = other DNA
tatgctcatgggtaggaacaatcaatattgtgaaaatggccatactgcccaaggtaatttatagattcaatgccatccccatcaagctaccaatgactttcttcacagaattggaaaaaa

SEQ ID NO: 112322 - DNA, 120 bp, synthetic construct
  source 1..120: mol_type = other DNA
tttagcataaaatcaagaaataaccataaaaatgggcaacccgcccctcttggctgctgtgtctatggagtagccattcttttattcctcttgctttcactttactctatggactctccc

SEQ ID NO: 112323 - DNA, 120 bp, synthetic construct
  source 1..120: mol_type = other DNA
tgtgtctttatagcagcatgatttatagtcctttgggtatatacccagtaatgggatggctgggtcaaatggtatttctagttctagatccctgaggaatcgccacgctgacttccacaa

SEQ ID NO: 112324 - DNA, 120 bp, synthetic construct; identical to SEQ ID NO: 9387
  source 1..120: mol_type = other DNA

SEQ ID NO: 112325 - DNA, 120 bp, synthetic construct; identical to SEQ ID NO: 9388
  source 1..120: mol_type = other DNA

SEQ ID NO: 112326 - DNA, 120 bp, synthetic construct; identical to SEQ ID NO: 9389
  source 1..120: mol_type = other DNA

SEQ ID NO: 112327 - DNA, 120 bp, synthetic construct
  source 1..120: mol_type = other DNA
attagaagacttttctgccttggctggtgggagcatgtattagtctgttttcacactgctgatgaagacatactcaagactgggaagaaaaagaggtttgattggacttacagttccaca

SEQ ID NO: 112328 - DNA, 120 bp, synthetic construct; identical to SEQ ID NO: 17867
  source 1..120: mol_type = other DNA

SEQ ID NO: 112329 - DNA, 120 bp, synthetic construct; identical to SEQ ID NO: 17868
  source 1..120: mol_type = other DNA

SEQ ID NO: 112330 - DNA, 120 bp, synthetic construct; identical to SEQ ID NO: 17869
  source 1..120: mol_type = other DNA

SEQ ID NO: 112331 - DNA, 120 bp, synthetic construct; identical to SEQ ID NO: 17870
  source 1..120: mol_type = other DNA

SEQ ID NO: 112332 - DNA, 120 bp, synthetic construct
  source 1..120: mol_type = other DNA
tatgaattgcttatacagaataggtttttaagactcctgttgtatacgattatttattattattattttttgagacagtcttgctctgtcgcccaggctggagtgcagtggcacaatctt

SEQ ID NO: 112333 - DNA, 120 bp, synthetic construct; identical to SEQ ID NO: 17871
  source 1..120: mol_type = other DNA

SEQ ID NO: 112334 - DNA, 120 bp, synthetic construct; identical to SEQ ID NO: 17872
  source 1..120: mol_type = other DNA

SEQ ID NO: 112335 - DNA, 120 bp, synthetic construct
  source 1..120: mol_type = other DNA
gcagtgagccgagatcacaccactgcactccatcctgggtgacagagcaagactcttgtcttaaaaagaaaagaaaagaaaatcatgtataatgattgtgtacctctgtgcatttggtac

SEQ ID NO: 112336 - DNA, 120 bp, synthetic construct
  source 1..120: mol_type = other DNA
atcgcttgaacccaggaggcggaggttacagtgagttgagatcgcgccgctgcactccagcctggtgacagcgagactgtgtctccaaaaaaaaaaaaaaaaaaaaaagaattcaaaacg

SEQ ID NO: 112337 - DNA, 120 bp, synthetic construct; identical to SEQ ID NO: 3942
  source 1..120: mol_type = other DNA

SEQ ID NO: 112338 - DNA, 120 bp, synthetic construct
  source 1..120: mol_type = other DNA
ttcaattcccatctatgagtgagaacatgcggtgtttggttttttgtccttgtgatagtttactgagaatgatgatttctgatttcatccatgtccctacaaaggacatgaactcatcat

SEQ ID NO: 112339 - DNA, 120 bp, synthetic construct
  source 1..120: mol_type = other DNA
tccatcttgaattaatttttgtataaggtgtaaggaagggatccagtttcagctttcaacatatggctagccagttttcccagcaccatttattaaatagggaatcctttccccattgct

SEQ ID NO: 112340 - DNA, 120 bp, synthetic construct
  source 1..120: mol_type = other DNA
attggttgtgggtttgtcatagatagctcttattattttgagatacatcccatcaatacctaatttattgagagtttttagcatgaaggttgttgaattttgtcaaaggccttttctgca

SEQ ID NO: 112341 - DNA, 120 bp, synthetic construct
  source 1..120: mol_type = other DNA
aattttgttgatcctttcaacaaaccagctcctggattcattaattttttgaagggttttttgtgtctctatttccttcagttctgctctgattttagttatttcttgccttctgctagc

SEQ ID NO: 112342 - DNA, 120 bp, synthetic construct
  source 1..120: mol_type = other DNA
ctctgcccgtgagctgggtttcctgaatacagcacactgatgggtcttgactctttatccaatttgccagtctgtgtcttttaattggagcatttagtccatttacatttaaagttaata

SEQ ID NO: 112343 - DNA, 120 bp, synthetic construct
  source 1..120: mol_type = other DNA
tgatcgcatcagctcctgaggcttctgcattcttcacgtagttcttgagccttggctttcagctccatcagctcctttaagcacttctctgtattggtgattctagttatacattcatct

SEQ ID NO: 112344 - DNA, 120 bp, synthetic construct; identical to SEQ ID NO: 15655
  source 1..120: mol_type = other DNA

SEQ ID NO: 112345 - DNA, 120 bp, synthetic construct; identical to SEQ ID NO: 26824
  source 1..120: mol_type = other DNA

SEQ ID NO: 112346 - DNA, 120 bp, synthetic construct
  source 1..120: mol_type = other DNA
gccctttgtcagatgagtaggttgcaaaaattttctcccatcccataggttgcctgttcattctgatggtagtttcttttcctgtgcagaagctctttagtttaattagatcccatttgt

SEQ ID NO: 112347 - DNA, 120 bp, synthetic construct
  source 1..120: mol_type = other DNA
cccttgtaagttggattcctaggtaatttattctctttgaagcaactgtgaatgggagatcactcataatttggctctctgtttgtctgttattggtgtataagaatgcttgtaattttt

SEQ ID NO: 112348 - DNA, 120 bp, synthetic construct
  source 1..120: mol_type = other DNA
gcagagacacaaccaaaaaagagaattttagaccaatatccttgatgaacattgatgcaaaaatcctcaataaaatactggcaaaccgaatccagcagcacatcaaaaagcttatccacc

SEQ ID NO: 112349 - DNA, 120 bp, synthetic construct
  source 1..120: mol_type = other DNA
aattagcttgctaggtagccagatcatttggccagctgtggaaaccatgttagtggaatagtggtgtcaatttgtggagaaagattgtgtctggtagtaaaaaagtggtttccccaaaga

SEQ ID NO: 112350 - DNA, 120 bp, synthetic construct
  source 1..120: mol_type = other DNA
cacaggttttttaaaaattaaaaaaactgagaaggctcgaaggcgccgcgggctggggtcggtggcttagggagcccgtccggccatggtggccgcgggtggtggttggcgcggctgcgc

SEQ ID NO: 112351 - DNA, 120 bp, synthetic construct; identical to SEQ ID NO: 112189
  source 1..120: mol_type = other DNA

SEQ ID NO: 112352 - DNA, 120 bp, synthetic construct
  source 1..120: mol_type = other DNA
caacagttcttcagacctggctcagagctacaatgcatttagtatattaaagcagctgacatgatgactttttgcgagccttcccaggcactggagtttttctgttaatttgccgcacta

SEQ ID NO: 112353 - DNA, 120 bp, synthetic construct; identical to SEQ ID NO: 26825
  source 1..120: mol_type = other DNA

SEQ ID NO: 112354 - DNA, 120 bp, synthetic construct
  source 1..120: mol_type = other DNA
tggatattagccctttgtcagatgagtaggttgcgaaaattttctctcattttgtaggttgcctgttcactctgatggtagtttcttttgctgtgcagaagctctttagtttaattagat

SEQ ID NO: 112355 - DNA, 120 bp, synthetic construct
  source 1..120: mol_type = other DNA
gctgagacaatggggttttctagatatacaatcacgtcgtctgcaaacagggacaatttgacttcctcttttcctaattgaataccctttatttccttctcctgcctaattgccctggcc

SEQ ID NO: 112356 - DNA, 120 bp, synthetic construct
  source 1..120: mol_type = other DNA
gcctgggcaacagagtgagacaccatctcaaaaaaaaaaaaaaaaaaaaaagccaaactgtcacttccccaggaaagtaaaaatccaaaaatatctggcttcacaaagttgtaggttcca

SEQ ID NO: 112357 - DNA, 120 bp, synthetic construct; identical to SEQ ID NO: 26826
  source 1..120: mol_type = other DNA

SEQ ID NO: 112358 - DNA, 120 bp, synthetic construct
  source 1..120: mol_type = other DNA
tagattctaactattagatgctagtagcatcttccccccagttgtgacaaccaaaaatgtctccagacattgccagatgtccttggagggcaatattgtccttgattgaggatcactaaa

SEQ ID NO: 112359 - DNA, 120 bp, synthetic construct
  source 1..120: mol_type = other DNA
cccctgacccccgagcagcctaactgggaggcaccccccagcaggggcacactgacacctaacacggcagggtattccaacagacctgcagctgagggtcctgtctgttagaaggaaaac

SEQ ID NO: 112360 - DNA, 120 bp, synthetic construct
  source 1..120: mol_type = other DNA
atttcgtatcagccaaactaagcttcataagtgaaggagaaataaaatactttatagacaagcaaatgctgagagattttgtcaccaccaggcctgccctaaaagagctcctgaaggaag

SEQ ID NO: 112361 - DNA, 120 bp, synthetic construct
  source 1..120: mol_type = other DNA
ctgaatgactactgggtacagaacgaaatgaaggcagaaataaagatgttctttgaaaccaacgagaacaaagacaccacataccagaatctctgggacgcattcaaagcagtgtgtaga

SEQ ID NO: 112362 - DNA, 120 bp, synthetic construct
  source 1..120: mol_type = other DNA
ggataagctttttgatgtgctgctggattcggtttgccagtattttattgaggatttttgcatcaatgttcatcaaggatattggtctaaaattctcttttttggttgtgtctctgcccg

SEQ ID NO: 112363 - DNA, 120 bp, synthetic construct
  source 1..120: mol_type = other DNA
aggtaatttacagattcaatgccatccccatcaagctaccaatgactttcttcacagaattggaaaaaactactttaaagttcatatggaaccaaaaaagagcccacattgccaagtcaa

SEQ ID NO: 112364 - DNA, 120 bp, synthetic construct
  source 1..120: mol_type = other DNA
tctagaactagaaataccatttgacccagccatcccattactgggtatatacccaaaggactataaatcatgctgctataaagacacatgcacacgtatgtttatagcggcactattcac

SEQ ID NO: 112365 - DNA, 120 bp, synthetic construct; identical to SEQ ID NO: 32916
  source 1..120: mol_type = other DNA

SEQ ID NO: 112366 - DNA, 120 bp, synthetic construct; identical to SEQ ID NO: 32913
  source 1..120: mol_type = other DNA

SEQ ID NO: 112367 - DNA, 120 bp, synthetic construct
  source 1..120: mol_type = other DNA
gcagagaagtccttaaaggacctgatggagctgaaaaccaaggcacgagaactacgtgaccagtgcagaagcctcaatagctgatgcaatcaactggaagaaagggtatcagtgatggaa

SEQ ID NO: 112368 - DNA, 120 bp, synthetic construct
  source 1..120: mol_type = other DNA
ccaaattgtaaagaccatcaaggctaggaagaaactgcatcaactaacaagcaaaatagccagctgacatcataatgacaggatcaaattcacacataacaatattaaccttaaatgtaa

SEQ ID NO: 112369 - DNA, 120 bp, synthetic construct
  source 1..120: mol_type = other DNA
tgacaccctaacatcacaactaaaagaactagagaagcaagagcaaacacattcaaaagctagcagaaggcaagaaataactaagatcagagcagaactgaaggaaatagagacacaaaa

SEQ ID NO: 112370 - DNA, 120 bp, synthetic construct
  source 1..120: mol_type = other DNA
aatatcatactgaatgggcaaaaactggaagcattccccttgaaaactggcataagacagggatgccctctctcaccactcctattcaacatagtgttggaagttctggccagggcaatc

SEQ ID NO: 112371 - DNA, 120 bp, synthetic construct
  source 1..120: mol_type = other DNA
acatgccactgcactccagcctgggtgacagagcaagacgttgtctcaaaaaaccaaaaaacaaaaaaccggtaataaccagatcagttctcagttatccacatgaaaagttaatcaaga

SEQ ID NO: 112372 - DNA, 120 bp, synthetic construct
  source 1..120: mol_type = other DNA
aaatttacaagaaaaaacaaaccccatcaaaaagtgggcaaaggacatgaacagacacttctcaaaagaagacatttatgcagccaaaaaacacatgaagaaatgctcatcatcactggc

SEQ ID NO: 112373 - DNA, 120 bp, synthetic construct; identical to SEQ ID NO: 32915
  source 1..120: mol_type = other DNA

SEQ ID NO: 112374 - DNA, 120 bp, synthetic construct; identical to SEQ ID NO: 32917
  source 1..120: mol_type = other DNA

SEQ ID NO: 112375 - DNA, 120 bp, synthetic construct; identical to SEQ ID NO: 10181
  source 1..120: mol_type = other DNA

SEQ ID NO: 112376 - DNA, 120 bp, synthetic construct; identical to SEQ ID NO: 10182
  source 1..120: mol_type = other DNA

SEQ ID NO: 112377 - DNA, 120 bp, synthetic construct; identical to SEQ ID NO: 10183
  source 1..120: mol_type = other DNA

SEQ ID NO: 112378 - DNA, 120 bp, synthetic construct; identical to SEQ ID NO: 10184
  source 1..120: mol_type = other DNA

SEQ ID NO: 112379 - DNA, 120 bp, synthetic construct; identical to SEQ ID NO: 10185
  source 1..120: mol_type = other DNA

SEQ ID NO: 112380 - DNA, 120 bp, synthetic construct; identical to SEQ ID NO: 10186
  source 1..120: mol_type = other DNA

SEQ ID NO: 112381 - DNA, 120 bp, synthetic construct; identical to SEQ ID NO: 10187
  source 1..120: mol_type = other DNA

SEQ ID NO: 112382 - DNA, 120 bp, synthetic construct
  source 1..120: mol_type = other DNA
cgcaaaaacaaaaaaccaaacaccgcatattctcactcataggtgggaattgaacaatgagaacacatggacacaggaaggggaacatcacactctggggactgttgtggggtgggggga

SEQ ID NO: 112383 - DNA, 120 bp, synthetic construct; identical to SEQ ID NO: 13212
  source 1..120: mol_type = other DNA

SEQ ID NO: 112384 - DNA, 120 bp, synthetic construct; identical to SEQ ID NO: 13213
  source 1..120: mol_type = other DNA

SEQ ID NO: 112385 - DNA, 120 bp, synthetic construct; identical to SEQ ID NO: 13214
  source 1..120: mol_type = other DNA

SEQ ID NO: 112386 - DNA, 120 bp, synthetic construct
  source 1..120: mol_type = other DNA
gcagactgcctcctcaagtgggtccctgacccctgacccccgagcagcctaactgggaggcaccccccagcaggggcacactgacaactcacaaggcagggtattccaacagacctgcag

SEQ ID NO: 112387 - DNA, 120 bp, synthetic construct
  source 1..120: mol_type = other DNA
caacctagaatttcatatccagccaaactaagcttcataagtgaaggagaaataaaatactttacagacaagcaaatgctgagagattttgtcaccaccaggcctgccctaaaagagctc

SEQ ID NO: 112388 - DNA, 120 bp, synthetic construct
  source 1..120: mol_type = other DNA
ataccagaatctctgggacacattcaaagcagtgtgtagagggaaatttatagcactaaatgcccacaagagaaagcaggaaagatccaacattgacaccctaacatcacaattaaaaga

SEQ ID NO: 112389 - DNA, 120 bp, synthetic construct; identical to SEQ ID NO: 67704
  source 1..120: mol_type = other DNA

SEQ ID NO: 112390 - DNA, 120 bp, synthetic construct
  source 1..120: mol_type = other DNA
atggggaaaggattccctatttaataaatggtgctgggaaaactggctagccatatgtaggaagctgaaactggatcccttccttacaccttatacaaaaatcaattcaagatggattaa

SEQ ID NO: 112391 - DNA, 120 bp, synthetic construct
  source 1..120: mol_type = other DNA
aaaatgatgagttcatgtcctttgtagggacatggatgaaattggaaatcatctttctcagtaaactaccgcaagaacaaaaaaccaaacaccgcgtattctcactcataggtgggaatt

SEQ ID NO: 112392 - DNA, 120 bp, synthetic construct; identical to SEQ ID NO: 13215
  source 1..120: mol_type = other DNA

SEQ ID NO: 112393 - DNA, 120 bp, synthetic construct
  source 1..120: mol_type = other DNA
aggcgacagagcaagactctgtctcaaaaacccccaaccccaaaacaaaacaaaacaaaacaaaacaaaacaaaaaccaaaccaatccttacccctttaactagtgcccagctctgttga

SEQ ID NO: 112394 - DNA, 120 bp, synthetic construct
  source 1..120: mol_type = other DNA
tatctgctgaccttccctccactattgtcccatgaccctgccaaatccccctctgtgagaaacacccaagaattatcaataaaaaaataaattaaaaaaaaaaaaaaaaaataaaataaa

SEQ ID NO: 112395 - DNA, 120 bp, synthetic construct; identical to SEQ ID NO: 30097
  source 1..120: mol_type = other DNA

SEQ ID NO: 112396 - DNA, 120 bp, synthetic construct
  source 1..120: mol_type = other DNA
gcctcccaaagtgtggggattacaggcgtgagccaccatgcccagccctttttaacattttattaaatttttatttttattttacagaaacaagacctcgctatgttgcccagactggta

SEQ ID NO: 112397 - DNA, 120 bp, synthetic construct
  source 1..120: mol_type = other DNA
atatataatgaatggattattcaaaatatatacatcatgggctgggcgtggtggatgcatgtaatctcagcactttgggaagttgaggtgggtgtatcacttgaggccaggaattcgagg

SEQ ID NO: 112398 - DNA, 120 bp, synthetic construct; identical to SEQ ID NO: 30099
  source 1..120: mol_type = other DNA

SEQ ID NO: 112399 - DNA, 120 bp, synthetic construct; identical to SEQ ID NO: 30100
  source 1..120: mol_type = other DNA

SEQ ID NO: 112400 - DNA, 120 bp, synthetic construct
  source 1..120: mol_type = other DNA
cctaatcctccactgggcaagcccctgaccctttatcgggcgcgcgcgcctaaccctcgagcacccctaatcctccatcaggcgcgcgcctaaccctccagcgcctttaatcctccatcg

SEQ ID NO: 112401 - DNA, 120 bp, synthetic construct
  source 1..120: mol_type = other DNA
gttaattttttattattatttttattttcatttatttattttttctgaggcggagtcttgctctatcacccaggctggagcacagtggggccatctcggctcactgcaaccttcacctcc

SEQ ID NO: 112402 - DNA, 120 bp, synthetic construct; identical to SEQ ID NO: 11676
  source 1..120: mol_type = other DNA

SEQ ID NO: 112403 - DNA, 120 bp, synthetic construct; identical to SEQ ID NO: 11677
  source 1..120: mol_type = other DNA

SEQ ID NO: 112404 - DNA, 120 bp, synthetic construct; identical to SEQ ID NO: 11678
  source 1..120: mol_type = other DNA

SEQ ID NO: 112405 - DNA, 120 bp, synthetic construct; identical to SEQ ID NO: 11679
  source 1..120: mol_type = other DNA

SEQ ID NO: 112406 - DNA, 120 bp, synthetic construct; identical to SEQ ID NO: 11680
  source 1..120: mol_type = other DNA

SEQ ID NO: 112407 - DNA, 120 bp, synthetic construct
  source 1..120: mol_type = other DNA
tccttcgcccactttttgatggggttgtttctttttttcttgtaaatttgtttgctcactcctttcttaaagcaacagccgatcattcgtggaatatttggaatctcattattcttttaa

SEQ ID NO: 112408 - DNA, 120 bp, synthetic construct
  source 1..120: mol_type = other DNA
cccctccacccaccccacaacagtccccagagtgtgatattccccttcctgtgtccatgtgatctcattgttcaattcccacctatgagtgagaatatgcggtgtttggttttttgttct

SEQ ID NO: 112409 - DNA, 120 bp, synthetic construct
  source 1..120: mol_type = other DNA
aagctcttgagtttaattagatcccatttgtcaattttggcttttgttgccattgcttttggtgttttagacatgaagtccttgcccatgcctatgtcctgaatggtaatgcctaggttt

SEQ ID NO: 112410 - DNA, 120 bp, synthetic construct
  source 1..120: mol_type = other DNA
acttccaacaccatgttgaataggagtggtgagagagggcatccctgtcttgtgccaattttcaaagggaatgcttccagtttttgtccattcagtatgatattggctgtgggtttgtca

SEQ ID NO: 112411 - DNA, 120 bp, synthetic construct
  source 1..120: mol_type = other DNA
tctcttgtgggcatttaatgctataaaattccctctacacactgcgttgaatgcgtcccagagattctggtatgttgtgtctttgttctcgttggtttcaaagaacatctttatttctgc

SEQ ID NO: 112412 - DNA, 120 bp, synthetic construct
  source 1..120: mol_type = other DNA
cttttaattggagcatttagtccatttacgtttaaagttaatattgttatgtgtgaatttgaccctgtcattatgatgttagctggtgattttgctcattagttgatgcagtttcttcct

SEQ ID NO: 112413 - DNA, 120 bp, synthetic construct
  source 1..120: mol_type = other DNA
tttgaatgtcctcccgtagctcagagtaatttgatcgtctgaagcgttcttttctcagctcgtcaaagtcattctccatccagctttgttccattgctggtgaggaactgcgttcctttg

SEQ ID NO: 112414 - DNA, 120 bp, synthetic construct
  source 1..120: mol_type = other DNA
acgctggtagctgtagaccagagctgttcctattcggccatcttggctcctgtccaatttatatattttttattgtgattattggtatattgtatttggactaatttctatcatttaaaa

SEQ ID NO: 112415 - DNA, 120 bp, synthetic construct
  source 1..120: mol_type = other DNA
gagggtagattatttactgagataaattagaaccagagacttgagcaagaaaattttgaagcagctactgggaagagtatactaagggtctttgaaagagatgaatgaggccaggcccgg

SEQ ID NO: 112416 - DNA, 120 bp, synthetic construct; identical to SEQ ID NO: 24012
  source 1..120: mol_type = other DNA

SEQ ID NO: 112417 - DNA, 120 bp, synthetic construct; identical to SEQ ID NO: 24013
  source 1..120: mol_type = other DNA

SEQ ID NO: 112418 - DNA, 120 bp, synthetic construct
  source 1..120: mol_type = other DNA
taccaatcactttcttcacagaattggaaaaaactcctttaaagttcatatggaaccaaaaaagagcccgcattgccaagacaattctaagcgaaaagaacaaagctggaggcatcatgc

SEQ ID NO: 112419 - DNA, 120 bp, synthetic construct
  source 1..120: mol_type = other DNA
gggactgtaaagtagttcaaccattgtggaagacagtgtggtgattcctcagggacctagaactagaaataccatttgacccagagatcccattactggttatatacccaaaggattata

SEQ ID NO: 112420 - DNA, 120 bp, synthetic construct; identical to SEQ ID NO: 7960
  source 1..120: mol_type = other DNA

SEQ ID NO: 112421 - DNA, 120 bp, synthetic construct
  source 1..120: mol_type = other DNA
aaaaaaaaaaaaaaaagaaacagaaaaaacaagcaatttctaattttaaccctgaatataggagaaaggaaagcaagactgggggcggggggggggggggagggtgttgataacctgtgc

SEQ ID NO: 112422 - DNA, 120 bp, synthetic construct
  source 1..120: mol_type = other DNA
acaggtatatttattgtggcactattcacaatagcaaagacttggaaccaacccaaatgtccaacaacgatagactggattaagaaaatgtggcacatatacaccatggaatactatgca

SEQ ID NO: 112423 - DNA, 120 bp, synthetic construct; identical to SEQ ID NO: 7773
  source 1..120: mol_type = other DNA

SEQ ID NO: 112424 - DNA, 120 bp, synthetic construct
  source 1..120: mol_type = other DNA
atagtttcagaaggaatggtaccagttcctccttgtacctctggtagaatctggctgtgaatccatcgtgaaaatggccatactgcccaaggtaattaatagattcaatgccatccccat

SEQ ID NO: 112425 - DNA, 120 bp, synthetic construct
  source 1..120: mol_type = other DNA
tttacactgctggtgggactgtaaactagttcaaccattgtggaagtcagtgtggtgattcctcagggatctagaactagaaataccatttgacccagccatcccattactgggtatata

SEQ ID NO: 112426 - DNA, 120 bp, synthetic construct; identical to SEQ ID NO: 7774
  source 1..120: mol_type = other DNA

SEQ ID NO: 112427 - DNA, 120 bp, synthetic construct; identical to SEQ ID NO: 32740
  source 1..120: mol_type = other DNA

SEQ ID NO: 112428 - DNA, 120 bp, synthetic construct; identical to SEQ ID NO: 32741
  source 1..120: mol_type = other DNA

SEQ ID NO: 112429 - DNA, 120 bp, synthetic construct; identical to SEQ ID NO: 32742
  source 1..120: mol_type = other DNA

SEQ ID NO: 112430 - DNA, 120 bp, synthetic construct; identical to SEQ ID NO: 6604
  source 1..120: mol_type = other DNA

SEQ ID NO: 112431 - DNA, 120 bp, synthetic construct; identical to SEQ ID NO: 33806
  source 1..120: mol_type = other DNA

SEQ ID NO: 112432 - DNA, 120 bp, synthetic construct
  source 1..120: mol_type = other DNA
attgcttcaggccaagggttggagaccaccctggacaatatagagagacccccatctctacaaaaaaaattgaaaaaaaaaaaaaaaaaacaaaagccgagggctgtggctcacgtctat

SEQ ID NO: 112433 - DNA, 120 bp, synthetic construct; identical to SEQ ID NO: 24104
  source 1..120: mol_type = other DNA

SEQ ID NO: 112434 - DNA, 120 bp, synthetic construct; identical to SEQ ID NO: 24105
  source 1..120: mol_type = other DNA

SEQ ID NO: 112435 - DNA, 120 bp, synthetic construct
  source 1..120: mol_type = other DNA
ttttttcttgtaaatttgtttgagttctttgtagattctggatattagccctttgtcagatgagtaggttgcgaaaattttcttccatgttgtaggttgcctgttcactctgatggtagt

SEQ ID NO: 112436 - DNA, 120 bp, synthetic construct
  source 1..120: mol_type = other DNA
gattttgggctgagacgatggggttttctagataaacaatcatgtcgtctgcaaacagggacaatttgacttcctcttttcctaattgaataccctttatttctttctcttgcctgattg

SEQ ID NO: 112437 - DNA, 120 bp, synthetic construct
  source 1..120: mol_type = other DNA
gctcctggattcattgattttttgaagggttttttgtgtctctatttccttcagttcttctctgattttagttatttcttgccttctgctagcttttgaatgtgtttgctcttgcttttc

SEQ ID NO: 112438 - DNA, 120 bp, synthetic construct
  source 1..120: mol_type = other DNA
tgagcctatgtgtgtctctgcacgtgagatgggtttcctgaatacagcacactgatgggtcttgactctttatccaacttgccagtctgtgtcttttaattggagaatttagtccattta

SEQ ID NO: 112439 - DNA, 120 bp, synthetic construct
  source 1..120: mol_type = other DNA
gttatacattcttctaaatttttttcaaagttttcaacttctttgcctttggtttgaatgtcctcccgtagctcagagtaatttgatcgtctgaagccttcttctctcagctcgtcaaaa

SEQ ID NO: 112440 - DNA, 120 bp, synthetic construct; identical to SEQ ID NO: 24106
  source 1..120: mol_type = other DNA

SEQ ID NO: 112441 - DNA, 120 bp, synthetic construct; identical to SEQ ID NO: 24107
  source 1..120: mol_type = other DNA

SEQ ID NO: 112442 - DNA, 120 bp, synthetic construct; identical to SEQ ID NO: 23760
  source 1..120: mol_type = other DNA

SEQ ID NO: 112443 - DNA, 120 bp, synthetic construct; identical to SEQ ID NO: 23761
  source 1..120: mol_type = other DNA

SEQ ID NO: 112444 - DNA, 120 bp, synthetic construct; identical to SEQ ID NO: 23762
  source 1..120: mol_type = other DNA

SEQ ID NO: 112445 - DNA, 120 bp, synthetic construct; identical to SEQ ID NO: 23763
  source 1..120: mol_type = other DNA

SEQ ID NO: 112446 - DNA, 120 bp, synthetic construct; identical to SEQ ID NO: 23766
  source 1..120: mol_type = other DNA

SEQ ID NO: 112447 - DNA, 120 bp, synthetic construct; identical to SEQ ID NO: 23767
  source 1..120: mol_type = other DNA

SEQ ID NO: 112448 - DNA, 120 bp, synthetic construct; identical to SEQ ID NO: 23768
  source 1..120: mol_type = other DNA

SEQ ID NO: 112449 - DNA, 120 bp, synthetic construct; identical to SEQ ID NO: 23769
  source 1..120: mol_type = other DNA

SEQ ID NO: 112450 - DNA, 120 bp, synthetic construct
  source 1..120: mol_type = other DNA
actacatggaaactgaacaacctgctcctgaatgacatgatcaagtgggcttcatccctggttgcaaggctggttcaacatatgcaaatcaataaacgtaatccagcatataaacagaac

SEQ ID NO: 112451 - DNA, 120 bp, synthetic construct
  source 1..120: mol_type = other DNA
actttaaagttcatatggaaccaaaaaagagcccacactgccaagacaatcctaagcgaaagaacaaaactggaggcatcacgctacctgactttaaactatactacaaggctacagtaa

SEQ ID NO: 112452 - DNA, 120 bp, synthetic construct
  source 1..120: mol_type = other DNA
ggacatttgggttggttccaagtctttgctattgtgaatagtgccgcaataaacatacgtgtgcatgtgtctttatagcagcatgatttatagtcctttgggtatatacccagtaatggg

SEQ ID NO: 112453 - DNA, 120 bp, synthetic construct
  source 1..120: mol_type = other DNA
tcaagctaacaatgacttttttcacagaattggaaaaaactactttaaacttcatatggaaccaaaacagagcccgcattgccaagacaatcctaagccaaaagaacaaagctggaggca

SEQ ID NO: 112454 - DNA, 120 bp, synthetic construct; identical to SEQ ID NO: 22422
  source 1..120: mol_type = other DNA

SEQ ID NO: 112455 - DNA, 120 bp, synthetic construct; identical to SEQ ID NO: 22423
  source 1..120: mol_type = other DNA

SEQ ID NO: 112456 - DNA, 120 bp, synthetic construct
  source 1..120: mol_type = other DNA
ctgcaataaacatacatatgcatgtgtctttatagcagcatgacttataatcctttgggtatatacccggtaatgggatggctgggtcaaatggtatttctagttctagatccctgagga

SEQ ID NO: 112457 - DNA, 120 bp, synthetic construct
  source 1..120: mol_type = other DNA
gttgaataggagtgatgagagaggcatcactgtcttgtgccagttttcaaagggaatgcttccagtttttgcccattcagtatgatattggctgtgggttggacatagattgctcttatt

SEQ ID NO: 112458 - DNA, 120 bp, synthetic construct
  source 1..120: mol_type = other DNA
gcatctatttgattcttctctcttttcttccttattagtcttgctagcagtctatcaattttgttgatcctttcaaaaaaaccagctctggattcattaattttttgaagggttttttgt

SEQ ID NO: 112459 - DNA, 120 bp, synthetic construct
  source 1..120: mol_type = other DNA
atcttcctccatccttttattttgagcctacttgtgtctctgcacgtgagatgggtttcctgaatacagcacactgatgggtcttgactctttatccaatttgccagtctgtgtctttta

SEQ ID NO: 112460 - DNA, 120 bp, synthetic construct; identical to SEQ ID NO: 22424
  source 1..120: mol_type = other DNA

SEQ ID NO: 112461 - DNA, 120 bp, synthetic construct; identical to SEQ ID NO: 22425
  source 1..120: mol_type = other DNA

SEQ ID NO: 112462 - DNA, 120 bp, synthetic construct; identical to SEQ ID NO: 22426
  source 1..120: mol_type = other DNA

SEQ ID NO: 112463 - DNA, 120 bp, synthetic construct
  source 1..120: mol_type = other DNA
atgctcctcacttcccagatggggtggcagccgggcggaggggctcctcacttctcagagggggcggttgccaggcagagggtctcctcacttctcagacaggacggccgggcagagacg

SEQ ID NO: 112464 - DNA, 120 bp, synthetic construct; identical to SEQ ID NO: 22427
  source 1..120: mol_type = other DNA

SEQ ID NO: 112465 - DNA, 120 bp, synthetic construct; identical to SEQ ID NO: 22428
  source 1..120: mol_type = other DNA

SEQ ID NO: 112466 - DNA, 120 bp, synthetic construct
  source 1..120: mol_type = other DNA
acaggcgtgagccaccgcacccggcccatttttatgcttttaatagcatattttctctcttaactatgttctactcaaggtggtaggaaacacagagttcatatttctggaagtcagact

SEQ ID NO: 112467 - DNA, 120 bp, synthetic construct; identical to SEQ ID NO: 28429
  source 1..120: mol_type = other DNA

SEQ ID NO: 112468 - DNA, 120 bp, synthetic construct
  source 1..120: mol_type = other DNA
tgtgagtcaattcaacctctctcctttataaattacccagtcttgggtctgtccttataacatcgtgagaatgaactaatacaccacaaaacagggcaaatgggggaccatgatcaggaa

SEQ ID NO: 112469 - DNA, 120 bp, synthetic construct
  source 1..120: mol_type = other DNA
agaattacaggcatgagccactgtgcccatcccagctattttaattttggaaaaaagttatagaaatctatctaataatttttgggggcagggcacggtggctcatgcctatagtcctag

SEQ ID NO: 112470 - DNA, 120 bp, synthetic construct
  source 1..120: mol_type = other DNA
ttttaaggctagggtggggtgggtgaagcagagtggacattttccttctaaattctctgcattggttaagtttttgtttttgtttttgttttgggacagtctcactctgtcatccaggct

SEQ ID NO: 112471 - DNA, 120 bp, synthetic construct; identical to SEQ ID NO: 28430
  source 1..120: mol_type = other DNA

SEQ ID NO: 112472 - DNA, 120 bp, synthetic construct; identical to SEQ ID NO: 28431
  source 1..120: mol_type = other DNA

SEQ ID NO: 112473 - DNA, 120 bp, synthetic construct; identical to SEQ ID NO: 28432
  source 1..120: mol_type = other DNA

SEQ ID NO: 112474 - DNA, 120 bp, synthetic construct; identical to SEQ ID NO: 14397
  source 1..120: mol_type = other DNA

SEQ ID NO: 112475 - DNA, 120 bp, synthetic construct; identical to SEQ ID NO: 14398
  source 1..120: mol_type = other DNA

SEQ ID NO: 112476 - DNA, 120 bp, synthetic construct; identical to SEQ ID NO: 14399
  source 1..120: mol_type = other DNA

SEQ ID NO: 112477 - DNA, 120 bp, synthetic construct; identical to SEQ ID NO: 14400
  source 1..120: mol_type = other DNA

SEQ ID NO: 112478 - DNA, 120 bp, synthetic construct; identical to SEQ ID NO: 14401
  source 1..120: mol_type = other DNA

SEQ ID NO: 112479 - DNA, 120 bp, synthetic construct
  source 1..120: mol_type = other DNA
ctcagacggggcggccgggcagagatgctcctcatctcccagacggggtcccggccgggcagaggcgctcctcacatcccagacggggcggcggggcagagacgctccccacatctcaga

SEQ ID NO: 112480 - DNA, 120 bp, synthetic construct
  source 1..120: mol_type = other DNA
ggctgccgggcggaggggctcctcacttctcggacggggcgactgccgggcagagacgctcctcacttcccggacgtggcagctgccgggcggaggggctcctcacttctcagacggggc

SEQ ID NO: 112481 - DNA, 120 bp, synthetic construct; identical to SEQ ID NO: 14402
  source 1..120: mol_type = other DNA

SEQ ID NO: 112482 - DNA, 120 bp, synthetic construct; identical to SEQ ID NO: 14632
  source 1..120: mol_type = other DNA

SEQ ID NO: 112483 - DNA, 120 bp, synthetic construct; identical to SEQ ID NO: 14633
  source 1..120: mol_type = other DNA

SEQ ID NO: 112484 - DNA, 120 bp, synthetic construct; identical to SEQ ID NO: 14634
  source 1..120: mol_type = other DNA

SEQ ID NO: 112485 - DNA, 120 bp, synthetic construct
  source 1..120: mol_type = other DNA
ttctcactgagccttagctgccttccctcggggcagggctcgggacctgcagcccgccatgcctaagcctcccacccactccatgggctcctgtgcggcccgagcctccccgatgagcac

SEQ ID NO: 112486 - DNA, 120 bp, synthetic construct; identical to SEQ ID NO: 19865
  source 1..120: mol_type = other DNA

SEQ ID NO: 112487 - DNA, 120 bp, synthetic construct; identical to SEQ ID NO: 19866
  source 1..120: mol_type = other DNA

SEQ ID NO: 112488 - DNA, 120 bp, synthetic construct; identical to SEQ ID NO: 23060
  source 1..120: mol_type = other DNA

SEQ ID NO: 112489 - DNA, 120 bp, synthetic construct; identical to SEQ ID NO: 23061
  source 1..120: mol_type = other DNA

SEQ ID NO: 112490 - DNA, 120 bp, synthetic construct; identical to SEQ ID NO: 25767
  source 1..120: mol_type = other DNA

SEQ ID NO: 112491 - DNA, 120 bp, synthetic construct; identical to SEQ ID NO: 25768
  source 1..120: mol_type = other DNA

SEQ ID NO: 112492 - DNA, 120 bp, synthetic construct
  source 1..120: mol_type = other DNA
gggtcagatggtatttctagttctagatccctgaggaatcgccacactgacttccacaatgattgaactagtttacagtcccaccaacagtgtaaaagtgttcctatttctccacatcct

SEQ ID NO: 112493 - DNA, 120 bp, synthetic construct
  source 1..120: mol_type = other DNA
ctctttcctccaggtccccaaaatccattgtattattcttacacctttgcatcctcatagcttagctccctcatataagtgagaacattcaatgtgtggttttccattcctgagttactt

SEQ ID NO: 112494 - DNA, 120 bp, synthetic construct
  source 1..120: mol_type = other DNA
tttgagttctttgcagattctggatattagccttttgtcagatgagtcgattttagaccaatatccctgatgaacactgatgcaaaaattctcaataaaatactggcaaaccgaatccag

SEQ ID NO: 112495 - DNA, 120 bp, synthetic construct; identical to SEQ ID NO: 24381
  source 1..120: mol_type = other DNA

SEQ ID NO: 112496 - DNA, 120 bp, synthetic construct; identical to SEQ ID NO: 24382
  source 1..120: mol_type = other DNA

SEQ ID NO: 112497 - DNA, 120 bp, synthetic construct
  source 1..120: mol_type = other DNA
ggcttttctcactccttagccttccaggtctcacccccagttttcattccatcctggctatataacagaaagttattctatcttttctgtctctccaaaggggaaattgtctacattagg

SEQ ID NO: 112498 - DNA, 120 bp, synthetic construct
  source 1..120: mol_type = other DNA
gtagagatctttcacctccttggttagctgcattcctaggtattttattttctttgtggctatggtaaatgagattgtgctcttgatttgactctcagcctggacattattggtgtatag

SEQ ID NO: 112499 - DNA, 120 bp, synthetic construct
  source 1..120: mol_type = other DNA
atttccaagacctggcacctggtagattctcaatagagatttgctaaataaatgagtaaaccccaaagccgggcagagacacaaccaaaaaagagaattttagaccaatatccttgatga

SEQ ID NO: 112500 - DNA, 120 bp, synthetic construct
  source 1..120: mol_type = other DNA
actgcccaaggtaatttacagattcaatgccatccccatcaagctaccaatgactttcttcacagaattggaaaaaactactttaaagttcatatggaaccaaaaacgagcccgcatcgc

SEQ ID NO: 112501 - DNA, 120 bp, synthetic construct
  source 1..120: mol_type = other DNA
tggagaggatgtggagaaataggaacacttttacatgttggtgggactgtaaactagttcaaccattgtggaagtcagtgtggcgattcctcagggatctagaactagaaataccatttg

SEQ ID NO: 112502 - DNA, 120 bp, synthetic construct; identical to SEQ ID NO: 24384
  source 1..120: mol_type = other DNA

SEQ ID NO: 112503 - DNA, 120 bp, synthetic construct
  source 1..120: mol_type = other DNA
ttagagactttctgacttcaatttctcctctctagtaaagataagcaaacttgatggcttgaccactcttaccccagaattccttttgcttatttaaaacaccagccctgagcaggcctg

SEQ ID NO: 112504 - DNA, 120 bp, synthetic construct
  source 1..120: mol_type = other DNA
cacccattaactcgtcatttagcattaggtatatctccctcctttggaggaaagagggagctctcttcctgctctcagacactgccgctgcctcctcctcctattttttctcttccttct

SEQ ID NO: 112505 - DNA, 120 bp, synthetic construct; identical to SEQ ID NO: 17958
  source 1..120: mol_type = other DNA

SEQ ID NO: 112506 - DNA, 120 bp, synthetic construct; identical to SEQ ID NO: 17959
  source 1..120: mol_type = other DNA

SEQ ID NO: 112507 - DNA, 120 bp, synthetic construct
  source 1..120: mol_type = other DNA
agttgcagtgagccgagatcgcgcaactgcactttagcctggagacagagcaagactccgtcttaaaaaaaaaaaaaatagtttcattcaaggaaagtatggaagtagtcaagtcagagc

SEQ ID NO: 112508 - DNA, 120 bp, synthetic construct
  source 1..120: mol_type = other DNA
ttgtggaatagaaaggcgggaaaggtggggaaaagattgagaaatcggatggttgccgtgtctgtgtagaaagaagtagacatgggagacttttcattttgttctgtactaagaaaaatt

SEQ ID NO: 112509 - DNA, 120 bp, synthetic construct; identical to SEQ ID NO: 29917
  source 1..120: mol_type = other DNA

SEQ ID NO: 112510 - DNA, 120 bp, synthetic construct; identical to SEQ ID NO: 29918
  source 1..120: mol_type = other DNA

SEQ ID NO: 112511 - DNA, 120 bp, synthetic construct; identical to SEQ ID NO: 13074
  source 1..120: mol_type = other DNA

SEQ ID NO: 112512 - DNA, 120 bp, synthetic construct; identical to SEQ ID NO: 13075
  source 1..120: mol_type = other DNA

SEQ ID NO: 112513 - DNA, 120 bp, synthetic construct; identical to SEQ ID NO: 13076
  source 1..120: mol_type = other DNA

SEQ ID NO: 112514 - DNA, 120 bp, synthetic construct
  source 1..120: mol_type = other DNA
acagatgagcaggttgcaaaaattttctcccattttgtaggttgcctgttcactctgatggtagtttcttttgctgtgcagaagctctttagtttaattagatcccatttgtcaattttg

SEQ ID NO: 112515 - DNA, 120 bp, synthetic construct
  source 1..120: mol_type = other DNA
ctgaagttgcttatcagcttaaggagattttgggctgagacaatggggttttcttgatacacaatcatgtcgtctgcaaacagggacagtttgacttcttattttcctaattgaataccc

SEQ ID NO: 112516 - DNA, 120 bp, synthetic construct
  source 1..120: mol_type = other DNA
cggtggtgatatcccctttatcattttttattgcatctatttgattcttctctctttttttctttattagtcttgctagtggtctatcaattttgttgatcctttcaaaaaaccagctcc

SEQ ID NO: 112517 - DNA, 120 bp, synthetic construct
  source 1..120: mol_type = other DNA
gtgggtcactcaggacttgctttatgaatctgggtcctcctgtattgggtgcatatatatttgggatagttagctcttcttgttgaattgatccctttaccattatgtaatggccttctt

SEQ ID NO: 112518 - DNA, 120 bp, synthetic construct
  source 1..120: mol_type = other DNA
ggataatatcctgcagagtgttttccaacttggttccattctccccatcactttcaggtacaccagtcagacgtagacttggtcttttcacatagtcccatatttcttggaagctttgct

SEQ ID NO: 112519 - DNA, 120 bp, synthetic construct
  source 1..120: mol_type = other DNA
tcgggagggagtgacccgattttccaggtgcgtctgttacccctttctttgactccgaaagggaactccctgaccccttgcgcttcccaagtgaggcaatgcctcgcccctgtttcggct

SEQ ID NO: 112520 - DNA, 120 bp, synthetic construct
  source 1..120: mol_type = other DNA
tttgtttgtatcctcttttatttcattgagcagtggtttgtagttctccttgaaggggtccttcacatcccttgtaagttggattccctatttaataaatggtgctgggaaaactggcta

SEQ ID NO: 112521 - DNA, 120 bp, synthetic construct; identical to SEQ ID NO: 13077
  source 1..120: mol_type = other DNA

SEQ ID NO: 112522 - DNA, 120 bp, synthetic construct
  source 1..120: mol_type = other DNA
agcacctgttgttccctgactttttaatgattgccattctaactggtgtgagatgatatctcatagtggttttgatttgcatttctctgatggccagtgatgatgagcatttcttcatgt

SEQ ID NO: 112523 - DNA, 120 bp, synthetic construct
  source 1..120: mol_type = other DNA
tatcacatctcccactgtcaaaacagtaatttgtttatttatttatatttatttatttatttttgagatggaatttcgctcttatagcccaggctggagtgcgatggcgtgatctcggct

SEQ ID NO: 112524 - DNA, 120 bp, synthetic construct; identical to SEQ ID NO: 13078
  source 1..120: mol_type = other DNA

SEQ ID NO: 112525 - DNA, 120 bp, synthetic construct
  source 1..120: mol_type = other DNA
cctcggcctcccaaagtgctaggattacaggcgtgagccaccgcacccggcctcctgttgcaacattttttaaaacactgtaaaatacacctgaagtttttataatgcatttgaaaaaac

SEQ ID NO: 112526 - DNA, 120 bp, synthetic construct; identical to SEQ ID NO: 13079
  source 1..120: mol_type = other DNA

SEQ ID NO: 112527 - DNA, 120 bp, synthetic construct
  source 1..120: mol_type = other DNA
ttgtgaatgggagttcactcataatttggctctctgtttgtctgttattggtgtataagaatgcttgtgatttttgtacattgattttgtatcctgagactttgctgaagttgcttatca

SEQ ID NO: 112528 - DNA, 120 bp, synthetic construct
  source 1..120: mol_type = other DNA
gggacatggatgaaattggaaatcatcattctcagtaaactatcgcaaggacaaaaaagcaaacaccgcatgttctcactcataggtgggaattgaacaatgagaacacatggacacagg

SEQ ID NO: 112529 - DNA, 120 bp, synthetic construct; identical to SEQ ID NO: 13080
  source 1..120: mol_type = other DNA

SEQ ID NO: 112530 - DNA, 120 bp, synthetic construct
  source 1..120: mol_type = other DNA
acatcctctccagcacctgttgtttcctgactttttaatgattgccattctaactggtgtgagatggtatctcattgtggttttgatttgcatttctctgacggccagtgatggtgagca

SEQ ID NO: 112531 - DNA, 120 bp, synthetic construct; identical to SEQ ID NO: 11870
  source 1..120: mol_type = other DNA

SEQ ID NO: 112532 - DNA, 120 bp, synthetic construct
  source 1..120: mol_type = other DNA
ggtaagctattaattattgcctcaatttcagagccagttgttggtctattcagagattcaactttttgctgatttagtcttgggagggtgtatgtgtcgaggaatttatccatttcttct

SEQ ID NO: 112533 - DNA, 120 bp, synthetic construct
  source 1..120: mol_type = other DNA
tgatctttgttggtttaaagtctattttatcagagactaggtttgcaacccctgccttttttttgttttccatttgcttggtggatcttcctccatccctttattttgagcctatgtgtg

SEQ ID NO: 112534 - DNA, 120 bp, synthetic construct
  source 1..120: mol_type = other DNA
tgttttcaggaactaaatataattcaagcctcaaatgtttttgagatacaactttttggaaatatattctgagtagggccaggcgcggtggctcacacctgtaatcccagcactttggga

SEQ ID NO: 112535 - DNA, 120 bp, synthetic construct; identical to SEQ ID NO: 9311
  source 1..120: mol_type = other DNA

SEQ ID NO: 112536 - DNA, 120 bp, synthetic construct; identical to SEQ ID NO: 10348
  source 1..120: mol_type = other DNA

SEQ ID NO: 112537 - DNA, 120 bp, synthetic construct; identical to SEQ ID NO: 10349
  source 1..120: mol_type = other DNA

SEQ ID NO: 112538 - DNA, 120 bp, synthetic construct; identical to SEQ ID NO: 10350
  source 1..120: mol_type = other DNA

SEQ ID NO: 112539 - DNA, 120 bp, synthetic construct; identical to SEQ ID NO: 10351
  source 1..120: mol_type = other DNA

SEQ ID NO: 112540 - DNA, 120 bp, synthetic construct; identical to SEQ ID NO: 10352
  source 1..120: mol_type = other DNA

SEQ ID NO: 112541 - DNA, 120 bp, synthetic construct; identical to SEQ ID NO: 10353
  source 1..120: mol_type = other DNA

SEQ ID NO: 112542 - DNA, 120 bp, synthetic construct; identical to SEQ ID NO: 10354
  source 1..120: mol_type = other DNA

SEQ ID NO: 112543 - DNA, 120 bp, synthetic construct; identical to SEQ ID NO: 10355
  source 1..120: mol_type = other DNA

SEQ ID NO: 112544 - DNA, 120 bp, synthetic construct; identical to SEQ ID NO: 10356
  source 1..120: mol_type = other DNA

SEQ ID NO: 112545 - DNA, 120 bp, synthetic construct; identical to SEQ ID NO: 10357
  source 1..120: mol_type = other DNA

SEQ ID NO: 112546 - DNA, 120 bp, synthetic construct; identical to SEQ ID NO: 10358
  source 1..120: mol_type = other DNA

SEQ ID NO: 112547 - DNA, 120 bp, synthetic construct
  source 1..120: mol_type = other DNA
caataattagctgggcgtggtggcacacccctgtaatcccagctacttgggaggttgaggtgggaggatctcttgaacccaggaggcgaggctgctgaatctgtcaaaaaaaaaaaaaaa

SEQ ID NO: 112548 - DNA, 120 bp, synthetic construct; identical to SEQ ID NO: 10359
  source 1..120: mol_type = other DNA

SEQ ID NO: 112549 - DNA, 120 bp, synthetic construct; identical to SEQ ID NO: 10360
  source 1..120: mol_type = other DNA

SEQ ID NO: 112550 - DNA, 120 bp, synthetic construct; identical to SEQ ID NO: 10361
  source 1..120: mol_type = other DNA

SEQ ID NO: 112551 - DNA, 120 bp, synthetic construct; identical to SEQ ID NO: 10362
  source 1..120: mol_type = other DNA

SEQ ID NO: 112552 - DNA, 120 bp, synthetic construct; identical to SEQ ID NO: 10363
  source 1..120: mol_type = other DNA

SEQ ID NO: 112553 - DNA, 120 bp, synthetic construct; identical to SEQ ID NO: 10364
  source 1..120: mol_type = other DNA

SEQ ID NO: 112554 - DNA, 120 bp, synthetic construct
  source 1..120: mol_type = other DNA
ctcccacctcagcctcccgagtagcgggactacaggcaggcaccaccatacctggctaattcttttgtattttttgtagagaagggatttcaccatgttgctcaggctggtctcaaactc

SEQ ID NO: 112555 - DNA, 120 bp, synthetic construct
  source 1..120: mol_type = other DNA
ggggaggcggaggttgcagtgagctgagatcgcgcgccaccgtactccagcctgggtgacaaagaaaaactccgtctcaaaaaataataataaaaaaaaagtatagtgtgcctggatgca

SEQ ID NO: 112556 - DNA, 120 bp, synthetic construct; identical to SEQ ID NO: 10365
  source 1..120: mol_type = other DNA

SEQ ID NO: 112557 - DNA, 120 bp, synthetic construct
  source 1..120: mol_type = other DNA
ctgatctcgaactcccgacctcaggtaatccgcctgcctcggcctcccaaagtgctgagattacaggcgtgagccactgcgccaggcctaattttgtattttttagtagaaacgggggtt

SEQ ID NO: 112558 - DNA, 120 bp, synthetic construct; identical to SEQ ID NO: 10366
  source 1..120: mol_type = other DNA

SEQ ID NO: 112559 - DNA, 120 bp, synthetic construct; identical to SEQ ID NO: 14381
  source 1..120: mol_type = other DNA

SEQ ID NO: 112560 - DNA, 120 bp, synthetic construct
  source 1..120: mol_type = other DNA
ccacctatgagtgagaacatgcggtgtttggttttttgtccttgcaatagtttgctgagaatgatggtttccagcttcatccatgtccctacaaaggatatgaactcatcattttttatg

SEQ ID NO: 112561 - DNA, 120 bp, synthetic construct; identical to SEQ ID NO: 16266
  source 1..120: mol_type = other DNA

SEQ ID NO: 112562 - DNA, 120 bp, synthetic construct
  source 1..120: mol_type = other DNA
atcatgccactgcactccagcctgggcgacagagcaaaactgtctcaaaacaaaacaaaacaaaaaaaccatgtttgagacgtctttttgaaatgacctcaagaaactgccccacattga

SEQ ID NO: 112563 - DNA, 120 bp, synthetic construct
  source 1..120: mol_type = other DNA
tgatgagcattttttcatgtgtcttttggctgcataactgtcttctttcgagaagtgtctgttcatatcctttgcccactttttgatggggttgtttttttcttgtaaatttgtttgagt

SEQ ID NO: 112564 - DNA, 120 bp, synthetic construct
  source 1..120: mol_type = other DNA
cctcttttatttcattgagcagtggtttgtagttctccttgaagaggtccttcacatcccttgtaagttggattcctaggtattttgttctctttgaagcaattgtgaatgggagttcac

SEQ ID NO: 112565 - DNA, 120 bp, synthetic construct; identical to SEQ ID NO: 9171
  source 1..120: mol_type = other DNA

SEQ ID NO: 112566 - DNA, 120 bp, synthetic construct; identical to SEQ ID NO: 9172
  source 1..120: mol_type = other DNA

SEQ ID NO: 112567 - DNA, 120 bp, synthetic construct
  source 1..120: mol_type = other DNA
ccttgatcttagacttccagtctccggaactgtgagaaataaaggtctgttgtttaagacacccagtctatggcatttcattttagcggctggtgcagactaatatggtaagattgtatg

SEQ ID NO: 112568 - DNA, 120 bp, synthetic construct
  source 1..120: mol_type = other DNA
gggaaaatgtctgaactataagtactattaagtcttctagaataaacagcaagaccctgtgtggcaggtcagcttcagcgttggaacatgtaagttaaaaggtacgtgaaaatggaccca

SEQ ID NO: 112569 - DNA, 120 bp, synthetic construct
  source 1..120: mol_type = other DNA
agccgagatcacaccactgcactccagcctgggcaacaagagtgaaactccatccaaaaaaaaaaagaggaaagcagaagtgagagtcccttgaacagcctgaagtccctctgtgttcaa

SEQ ID NO: 112570 - DNA, 120 bp, synthetic construct
  source 1..120: mol_type = other DNA
gcaccacgacctcctgtagctccatcaccacccagagatccaggagtcccaggcgcagcccctcctccctcagacccaggagtccaggcccccagcccctcctccctcagacgcaggcat

SEQ ID NO: 112571 - DNA, 120 bp, synthetic construct
  source 1..120: mol_type = other DNA
ctataatcccagcactttgggagcccaaggtgggtggatcacttgaggtgggaagttgagaccagcctggacaacatggcaaaaccctgtctctacaaaaaaaaaaaaaaaaaaaaaaaa

SEQ ID NO: 112572 - DNA, 120 bp, synthetic construct; identical to SEQ ID NO: 19917
  source 1..120: mol_type = other DNA

SEQ ID NO: 112573 - DNA, 120 bp, synthetic construct; identical to SEQ ID NO: 19918
  source 1..120: mol_type = other DNA

SEQ ID NO: 112574 - DNA, 120 bp, synthetic construct
  source 1..120: mol_type = other DNA
gtgtctctatatagagaaatgctttttaggccttcaagtgttctttggcatttataaagtttaaaaatttttcttccaattctgtgaagaaagtcattggtagcttgatggggatggcat

SEQ ID NO: 112575 - DNA, 120 bp, synthetic construct
  source 1..120: mol_type = other DNA
tcatgtggtttttgtccttggctctgtttatatgctggattacatttattgatttgtgtatattgaaccagccttgcatcccagggatgaagcccacttgatcatggtggataagctttt

SEQ ID NO: 112576 - DNA, 120 bp, synthetic construct
  source 1..120: mol_type = other DNA
tccccattgcttgtttttgtcaggtttgtcaaagatcagatagttgtaggtatgtggcgttatttctgagggctctgttctgctccattgatctatgtctctgttttggtaccagtacca

SEQ ID NO: 112577 - DNA, 120 bp, synthetic construct; identical to SEQ ID NO: 93140
  source 1..120: mol_type = other DNA

SEQ ID NO: 112578 - DNA, 120 bp, synthetic construct
  source 1..120: mol_type = other DNA
ctctcctcagcctcccaaagtactgggattacaggcgtgagccacagcacccagctggggacaatattttctttgttataggaattaataggaaaaagatgagagcaaattcaggtaaat

SEQ ID NO: 112579 - DNA, 120 bp, synthetic construct
  source 1..120: mol_type = other DNA
aaggctattcacaagccgaggaatttgagactagcctgggcaacatggtgaaaccccgtttctaccaaaaaaaaatatgtaatagtacaaaaattagccagacatggtggcgggtgccta

SEQ ID NO: 112580 - DNA, 120 bp, synthetic construct
  source 1..120: mol_type = other DNA
tcattttccctgcttctaatttcttcagatttttttttattatactttgagttttagggtacatgtgcacaatgtgcaggttaattacatatgtatacatgtgctatgctggtgcgctgc

SEQ ID NO: 112581 - DNA, 120 bp, synthetic construct
  source 1..120: mol_type = other DNA
caacatgggagaaaattttcgcaacctactcatctgacaaagggctaatatccagaatctacaatgaactcaaacaaatttacaagaaaaaaacaaacaaccccatccaaaagtgggtga

SEQ ID NO: 112582 - DNA, 120 bp, synthetic construct
  source 1..120: mol_type = other DNA
cctttgcaccagtgtgtcctggatatgggacatagagtcaaggattattttggagctttaagatttaacaacaatcgggcatggtggctcacgcctgtaatcccagcactttgggaggcc

SEQ ID NO: 112583 - DNA, 120 bp, synthetic construct
  source 1..120: mol_type = other DNA
gatggcaccactgcaccccagcctgggcgacagagcgagactccatctcatggataggaagaatcaatattgtgaaaatggccatactgcccaaggtaatttatatccccatcaagctac

SEQ ID NO: 112584 - DNA, 120 bp, synthetic construct
  source 1..120: mol_type = other DNA
gttcaaccattgtggaagacagtgtggcgattcctcaaggatctagaactagaaataccatttgacccagcaatcccattactggatatatacccaaaggactataaatcatgctgctat

SEQ ID NO: 112585 - DNA, 120 bp, synthetic construct; identical to SEQ ID NO: 28465
  source 1..120: mol_type = other DNA

SEQ ID NO: 112586 - DNA, 120 bp, synthetic construct; identical to SEQ ID NO: 28466
  source 1..120: mol_type = other DNA

SEQ ID NO: 112587 - DNA, 120 bp, synthetic construct; identical to SEQ ID NO: 28467
  source 1..120: mol_type = other DNA

SEQ ID NO: 112588 - DNA, 120 bp, synthetic construct; identical to SEQ ID NO: 28468
  source 1..120: mol_type = other DNA

SEQ ID NO: 112589 - DNA, 120 bp, synthetic construct; identical to SEQ ID NO: 28469
  source 1..120: mol_type = other DNA

SEQ ID NO: 112590 - DNA, 120 bp, synthetic construct
  source 1..120: mol_type = other DNA
catctgggaagtgaggagtgtctctgcctggccgccatcccatctaggaagtgaggagcgcctcatcccggccgccatcccatctaggcagtgaggagcgtctctgcccggccgcccatc

SEQ ID NO: 112591 - DNA, 120 bp, synthetic construct; identical to SEQ ID NO: 34937
  source 1..120: mol_type = other DNA

SEQ ID NO: 112592 - DNA, 120 bp, synthetic construct; identical to SEQ ID NO: 7522
  source 1..120: mol_type = other DNA

SEQ ID NO: 112593 - DNA, 120 bp, synthetic construct
  source 1..120: mol_type = other DNA
cagatgagctcttaccaactgtggccaaggaaaaactatagccttttccttgcctccctgctcttcagtccccataacctcaggcaaggcctagaagagagtgatagtagtctattcctt

SEQ ID NO: 112594 - DNA, 120 bp, synthetic construct
  source 1..120: mol_type = other DNA
agccaagatcgcaccactgcactccagcctgagcaacagagcaagactctgtctcaatcaatcaatcaatatcatgaggaaaaagtcttctttaaaatttgaaaattaatttttatttca

SEQ ID NO: 112595 - DNA, 120 bp, synthetic construct; identical to SEQ ID NO: 28396
  source 1..120: mol_type = other DNA

SEQ ID NO: 112596 - DNA, 120 bp, synthetic construct; identical to SEQ ID NO: 28397
  source 1..120: mol_type = other DNA

SEQ ID NO: 112597 - DNA, 120 bp, synthetic construct; identical to SEQ ID NO: 28398
  source 1..120: mol_type = other DNA

SEQ ID NO: 112598 - DNA, 120 bp, synthetic construct; identical to SEQ ID NO: 28399
  source 1..120: mol_type = other DNA

SEQ ID NO: 112599 - DNA, 120 bp, synthetic construct
  source 1..120: mol_type = other DNA
aaagagaggattaagcccaggcctatgaagcatgcatataatttttttttttttttttgagacaggctagagtatagtggcaaactcacggctcactgcagcctcaacctcccaggctca

SEQ ID NO: 112600 - DNA, 120 bp, synthetic construct; identical to SEQ ID NO: 31473
  source 1..120: mol_type = other DNA

SEQ ID NO: 112601 - DNA, 120 bp, synthetic construct
  source 1..120: mol_type = other DNA
atttttctatgtatgtaatcacgttatttgcaaataggggctgttttatttatttattcttttcccatcctgtatacccttccttccttccttccttccccctcccctctcctcccttcc

SEQ ID NO: 112602 - DNA, 120 bp, synthetic construct; identical to SEQ ID NO: 11239
  source 1..120: mol_type = other DNA

SEQ ID NO: 112603 - DNA, 120 bp, synthetic construct; identical to SEQ ID NO: 11240
  source 1..120: mol_type = other DNA

SEQ ID NO: 112604 - DNA, 120 bp, synthetic construct; identical to SEQ ID NO: 11241
  source 1..120: mol_type = other DNA

SEQ ID NO: 112605 - DNA, 120 bp, synthetic construct
  source 1..120: mol_type = other DNA
tggctgggcgggcggctgacccccccacctccctcccggacgaggtggctgccgggtggagacgctcctcacttcccagacggggcggctgccgggcggaggggctcctcacttctcaga

SEQ ID NO: 112606 - DNA, 120 bp, synthetic construct; identical to SEQ ID NO: 11242
  source 1..120: mol_type = other DNA

SEQ ID NO: 112607 - DNA, 120 bp, synthetic construct
  source 1..120: mol_type = other DNA
ccccacaacaggctctggggtatgatgtttcccttcctgtgtccaagtgttctcattgttcaattcccatctatgagtgagaacatgcagtgtttggttttttgtccttgtgatagtttg

SEQ ID NO: 112608 - DNA, 120 bp, synthetic construct
  source 1..120: mol_type = other DNA
gtaaggaagggatccggtttcagttttctacatatggctagctagttttcccagcaccatttgttaaatagggaatccttttcccatttcttgtttttgtcaggtttgtcaaagatcaga

SEQ ID NO: 112609 - DNA, 120 bp, synthetic construct
  source 1..120: mol_type = other DNA
gccttttctgcatctattgagataatcatgtggtttttgtcattggttctgtttatatgctggattacatttattgatttgcatctattgaaccagccttgcatcccagggatgaagccc

SEQ ID NO: 112610 - DNA, 120 bp, synthetic construct
  source 1..120: mol_type = other DNA
ttgcttctctagttcttttaattgtgatgttatggtgtcaattttagatctttcctgctttctcttgtgggcatttagtgctataaatttccctctacacactgctttaaatgtgtccca

SEQ ID NO: 112611 - DNA, 120 bp, synthetic construct; identical to SEQ ID NO: 20627
  source 1..120: mol_type = other DNA

SEQ ID NO: 112612 - DNA, 120 bp, synthetic construct
  source 1..120: mol_type = other DNA
ctataaacacacatgcacatgtatgtttaccgcggcactactcacaatagcaaagacttggaaccaacccaaatgtccatcaatgatagactggattaagaaaatgtggcacatatacac

SEQ ID NO: 112613 - DNA, 120 bp, synthetic construct; identical to SEQ ID NO: 25714
  source 1..120: mol_type = other DNA

SEQ ID NO: 112614 - DNA, 120 bp, synthetic construct
  source 1..120: mol_type = other DNA
ccattctaactggtgtgagacgatatctcattgtggttttggtttgcatttgtctgttggtacaggattgattctttctaaatgcttggaataaaaatggtcagctaggtgtgacaaaaa

SEQ ID NO: 112615 - DNA, 120 bp, synthetic construct
  source 1..120: mol_type = other DNA
ccccaccccacaagagtccccagtgtgtgatgttccccttcctgtgtccatgtgttctcattgttcaattcccacctgtgagtgagaacatgcagtttggttttttgtccttgtaatagt

SEQ ID NO: 112616 - DNA, 120 bp, synthetic construct
  source 1..120: mol_type = other DNA
gaaaaaaaacaccaccatcaaaaagtgggcaaaggatatgaagagacacttctcaaaacaagacagttatgtggccaacaaacatatgaaagaaagctcatcatcactggtcattagaga

SEQ ID NO: 112617 - DNA, 120 bp, synthetic construct
  source 1..120: mol_type = other DNA
ctttggttgccatggcttttggtgttttagacatgaagtccttgcccatgcctatgtactgaatggtaatgcctaggttttcttctagggtttttatggttttaggtcgtacgtttaagt

SEQ ID NO: 112618 - DNA, 120 bp, synthetic construct
  source 1..120: mol_type = other DNA
ttcctcttttcctaattgaataccctttatttccttctccggcctaattgccctgtccagaacttccaacactatgttgaataggagtgttgagagagggcatccctgtcttgtgccagt

SEQ ID NO: 112619 - DNA, 120 bp, synthetic construct; identical to SEQ ID NO: 25715
  source 1..120: mol_type = other DNA

SEQ ID NO: 112620 - DNA, 120 bp, synthetic construct
  source 1..120: mol_type = other DNA
gggacgtatctcaaaataataagagctatctatgacaaacccacagccaatatcatactgaatgggcaaaaactggaagcattccctttgaaaactggcacaagacaaggatgccctctc

SEQ ID NO: 112621 - DNA, 120 bp, synthetic construct
  source 1..120: mol_type = other DNA
agtcggtgtggtgattcctcagggatctagagctagaaataccatttgacccagccatcccattactgggtatatacccaaaggattataaatcatgctgctataaagacacatgcacac

SEQ ID NO: 112622 - DNA, 120 bp, synthetic construct
  source 1..120: mol_type = other DNA
ttgttatttattgtagtcttcacagtctacgcccatttggacccatccttcttgggaaggatttctagatattcaaaaggacttgggtattgtgatctaggccacatctgcattaggggg

SEQ ID NO: 112623 - DNA, 120 bp, synthetic construct
  source 1..120: mol_type = other DNA
gacaagagtcaaaaaccttagaagtctactttgtgttctattgtactgtggctgagctggcattcaaaccacaagaatcagttgtttcccctcttccgtcttcatttcaaaggcagagga

SEQ ID NO: 112624 - DNA, 120 bp, synthetic construct; identical to SEQ ID NO: 2209
  source 1..120: mol_type = other DNA

SEQ ID NO: 112625 - DNA, 120 bp, synthetic construct
  source 1..120: mol_type = other DNA
gttcatgtcctttgtagtgacatggatgaaactggaaacatcattctcagcaaactattgcaaggacaaaaatccacacaccgcatgttctcactcattggtgggaactgaaccatgaga

SEQ ID NO: 112626 - DNA, 120 bp, synthetic construct
  source 1..120: mol_type = other DNA
tggacttagcagagagagatttcaatgcagccaccattaatacgtttagagaactaaagaaaagctttttaggaccagatggattcacagccaaattctaccagaggtacaaggaggaac

SEQ ID NO: 112627 - DNA, 120 bp, synthetic construct
  source 1..120: mol_type = other DNA
tcctcaatgaaataaaagaggatacaaacaaatggaagaacattccatgctcatgtataggaagaatcaatatcgtgaaaatggccatactgcccaaggtaatttatagattcaatgcca

SEQ ID NO: 112628 - DNA, 120 bp, synthetic construct
  source 1..120: mol_type = other DNA
gagaggatgtggagaaataggaacacttttacactgttggtggaactgtaaactatttcaatcattgtggaaggcagtgtggcgattcctcagggatctagaactagaaataccatttga

SEQ ID NO: 112629 - DNA, 120 bp, synthetic construct; identical to SEQ ID NO: 25717
  source 1..120: mol_type = other DNA

SEQ ID NO: 112630 - DNA, 120 bp, synthetic construct
  source 1..120: mol_type = other DNA
ggactctcttgccagaactgtctttacaatttatgtcagacatcaaatgtgtttttaaaatgttgctgtaccaagatcaagtgggcttcatccctgggatgcaaggctggttcaacatac

SEQ ID NO: 112631 - DNA, 120 bp, synthetic construct
  source 1..120: mol_type = other DNA
aatggccatactgcccaaggtaatttatagattcaatgccatccccatcaagctacccatgactttcttcacagaattggaataaactactttatagtacatatggaaccaaaaaagagc

SEQ ID NO: 112632 - DNA, 120 bp, synthetic construct
  source 1..120: mol_type = other DNA
gatctagaactagaaataccatttgactcagacatcctattactgggtatatacccaaaggattataaatcatgctgctataaacacacatgcacatgtatgtttattgcggcactattc

SEQ ID NO: 112633 - DNA, 120 bp, synthetic construct; identical to SEQ ID NO: 34113
  source 1..120: mol_type = other DNA

SEQ ID NO: 112634 - DNA, 120 bp, synthetic construct; identical to SEQ ID NO: 34114
  source 1..120: mol_type = other DNA

SEQ ID NO: 112635 - DNA, 120 bp, synthetic construct; identical to SEQ ID NO: 34115
  source 1..120: mol_type = other DNA

SEQ ID NO: 112636 - DNA, 120 bp, synthetic construct; identical to SEQ ID NO: 34116
  source 1..120: mol_type = other DNA

SEQ ID NO: 112637 - DNA, 120 bp, synthetic construct; identical to SEQ ID NO: 34117
  source 1..120: mol_type = other DNA

SEQ ID NO: 112638 - DNA, 120 bp, synthetic construct
  source 1..120: mol_type = other DNA
cctggacggggtggctgccaggcggagatgctcctcacttcccagacggggcggctgccgggcggaggggctcctcacttctcagacggggcggctgccgggcggaggggctcctcactt

SEQ ID NO: 112639 - DNA, 120 bp, synthetic construct; identical to SEQ ID NO: 34118
  source 1..120: mol_type = other DNA

SEQ ID NO: 112640 - DNA, 120 bp, synthetic construct
  source 1..120: mol_type = other DNA
gcttgagcccaggaggcagaggctgcagtgagccaagattgcgccattacactccagactgacaacagtgagactctgtctcaaaaagaaaatatatatatatatatatacacacatata

SEQ ID NO: 112641 - DNA, 120 bp, synthetic construct
  source 1..120: mol_type = other DNA
attggtgtacctgaaagtgacagggagaatcgaaccaagttggaaaacactctacaggttgttatccaggagaacttccccaatctagcaaggcaggccaacattcaaattcagaaaatt

SEQ ID NO: 112642 - DNA, 120 bp, synthetic construct
  source 1..120: mol_type = other DNA
aacaccccactgtcaacattagacagatcaatgagacagaaagttaacaaggatatccaggaattgaactcagctctgcaccaagtggacctaatagacatctatagaactctccatcct

SEQ ID NO: 112643 - DNA, 120 bp, synthetic construct; identical to SEQ ID NO: 20347
  source 1..120: mol_type = other DNA

SEQ ID NO: 112644 - DNA, 120 bp, synthetic construct
  source 1..120: mol_type = other DNA
aactgacaaagggctgatatccagaatctacaaggaacttaaagttacaagagaaaaaccaaccccaggggagggatagctttaggagatatacctaatgctaaatgacgtgttaatggg

SEQ ID NO: 112645 - DNA, 120 bp, synthetic construct
  source 1..120: mol_type = other DNA
catggcacgtgtacacctatgtaacaaacctgcatgttctgcacatgtatcccacaacttaaagtataatttaaaaaaaattaggtatacaagagaatttttattttggcattttagtct

SEQ ID NO: 112646 - DNA, 120 bp, synthetic construct; identical to SEQ ID NO: 10056
  source 1..120: mol_type = other DNA

SEQ ID NO: 112647 - DNA, 120 bp, synthetic construct; identical to SEQ ID NO: 10057
  source 1..120: mol_type = other DNA

SEQ ID NO: 112648 - DNA, 120 bp, synthetic construct; identical to SEQ ID NO: 10058
  source 1..120: mol_type = other DNA

SEQ ID NO: 112649 - DNA, 120 bp, synthetic construct; identical to SEQ ID NO: 10059
  source 1..120: mol_type = other DNA

SEQ ID NO: 112650 - DNA, 120 bp, synthetic construct; identical to SEQ ID NO: 22666
  source 1..120: mol_type = other DNA

SEQ ID NO: 112651 - DNA, 120 bp, synthetic construct; identical to SEQ ID NO: 22667
  source 1..120: mol_type = other DNA

SEQ ID NO: 112652 - DNA, 120 bp, synthetic construct; identical to SEQ ID NO: 22668
  source 1..120: mol_type = other DNA

SEQ ID NO: 112653 - DNA, 120 bp, synthetic construct; identical to SEQ ID NO: 22659
  source 1..120: mol_type = other DNA

SEQ ID NO: 112654 - DNA, 120 bp, synthetic construct; identical to SEQ ID NO: 22660
  source 1..120: mol_type = other DNA

SEQ ID NO: 112655 - DNA, 120 bp, synthetic construct; identical to SEQ ID NO: 22661
  source 1..120: mol_type = other DNA

SEQ ID NO: 112656 - DNA, 120 bp, synthetic construct; identical to SEQ ID NO: 22662
  source 1..120: mol_type = other DNA

SEQ ID NO: 112657 - DNA, 120 bp, synthetic construct; identical to SEQ ID NO: 22663
  source 1..120: mol_type = other DNA

SEQ ID NO: 112658 - DNA, 120 bp, synthetic construct
  source 1..120: mol_type = other DNA
aacacaagtgcacacgcaccaacccctcaattcagcaatcccatctctcggaactcagccccaacagcaggcctccaacagcacgaagacacacgtacaaggcgactcttgatggcatca

SEQ ID NO: 112659 - DNA, 120 bp, synthetic construct
  source 1..120: mol_type = other DNA
cctggtgggggctgaggcaggaggattgctggagtctaggagcctcaggccagcccaggacacagagcaagactccatctctaaaaacaaataataaaaatttaaacataaaaagtaaaa

SEQ ID NO: 112660 - DNA, 120 bp, synthetic construct
  source 1..120: mol_type = other DNA
atcaaaggaaacaccatccccaatcaaaggaaacaccatccccaatcaaaggaaacaccattcccaaccaaaggaaacaccatcccccatcaaaggaaacaccatccccagtcaaaggaa

SEQ ID NO: 112661 - DNA, 120 bp, synthetic construct; identical to SEQ ID NO: 22664
  source 1..120: mol_type = other DNA

SEQ ID NO: 112662 - DNA, 120 bp, synthetic construct; identical to SEQ ID NO: 22665
  source 1..120: mol_type = other DNA

SEQ ID NO: 112663 - DNA, 120 bp, synthetic construct
  source 1..120: mol_type = other DNA
ttagcattccaccagcggagaacttcctggaactggcagctggcgctgctgggagccgcccttccctcccgccccgtgcggccactcacctgggggcagctggaagttctggatgttggt

SEQ ID NO: 112664 - DNA, 120 bp, synthetic construct
  source 1..120: mol_type = other DNA
agtgttctcattgttcaattctcacctatgagatagaacatgcggtgtttggttttcagtccttgcagtagattgctaagaatgatggtttccagcttcatccatgtccctacaaaggac

SEQ ID NO: 112665 - DNA, 120 bp, synthetic construct
  source 1..120: mol_type = other DNA
aaataggggctcctttccccatttcttgtttttgtcaggtttgtcagagatcagatggttgtagatgtgtggtactatttctgagggctctgttctgttccattggtctatatttttcat

SEQ ID NO: 112666 - DNA, 120 bp, synthetic construct
  source 1..120: mol_type = other DNA
ctttaaatgttcccagagattctggtatgttgtgtctttgttctcattggtttcaaagaacatctttatttctgccttcatttcgttatgtatccagtagtcattcaggagcaggttgtt

SEQ ID NO: 112667 - DNA, 120 bp, synthetic construct
  source 1..120: mol_type = other DNA
tatatttaaaaaatcttcttttaaaaaaaattgacacagggttgggcatggtgactcacatcttgtaatcccagcactttgggaggccgaggcaggcagatcacttgtgggcatgagttc

SEQ ID NO: 112668 - DNA, 120 bp, synthetic construct
  source 1..120: mol_type = other DNA
acctccctagcataagcagttctcctacgtcaaacctactgagtgactgggactacaggtgtgcctcactatgcccagctaatttttttttttttttggtacatttgggatctcactgtt

SEQ ID NO: 112669 - DNA, 120 bp, synthetic construct; identical to SEQ ID NO: 18920
  source 1..120: mol_type = other DNA

SEQ ID NO: 112670 - DNA, 120 bp, synthetic construct
  source 1..120: mol_type = other DNA
acacacatgtgcgtgtgtctttatagcagcatgatttataatcctttgggtatatacccagtaatgggatggctgggtcaaatggtatttctagttctagatccttgaggaattgccaca

SEQ ID NO: 112671 - DNA, 120 bp, synthetic construct
  source 1..120: mol_type = other DNA
gtagatgtgtggtactatttctgagggctctgttctgttccattggtctatatttttcatcattctttttgttctttggattacataatttctacagatttatctccaagtttgctgatc

SEQ ID NO: 112672 - DNA, 120 bp, synthetic construct; identical to SEQ ID NO: 18921
  source 1..120: mol_type = other DNA

SEQ ID NO: 112673 - DNA, 120 bp, synthetic construct
  source 1..120: mol_type = other DNA
tttagtagagacgggttttcaccatgttagccagggtggtctcaatctcctgaccttgtgatccgcccttctcggcctcccagagtgctgggattacaggtgtgagccaccgtgccctgc

SEQ ID NO: 112674 - DNA, 120 bp, synthetic construct
  source 1..120: mol_type = other DNA
ccgcatcctcccaaagtgctgggattacaggtgtgagccatcatgcccagcctatttgaatatctttttgtcttcaggagttaaaatttggtttttgtttttgctatggtttggaggttt

SEQ ID NO: 112675 - DNA, 120 bp, synthetic construct
  source 1..120: mol_type = other DNA
ggctctacttgggcttttgctattccctatacatttaatgatcaacttgttaaattctaccagtaatctgttagaatttgaattggcgtggcctgagtccataggcccactgtcttccag

SEQ ID NO: 112676 - DNA, 120 bp, synthetic construct; identical to SEQ ID NO: 18924
  source 1..120: mol_type = other DNA

SEQ ID NO: 112677 - DNA, 120 bp, synthetic construct; identical to SEQ ID NO: 18925
  source 1..120: mol_type = other DNA

SEQ ID NO: 112678 - DNA, 120 bp, synthetic construct
  source 1..120: mol_type = other DNA
ttcttcttctgaaccacttttgtatacctggaataagttctatttgttgcttttgagatttttgtttttttgagatggaatcttgccaagatggcgccactacactccagcccgggcgac

SEQ ID NO: 112679 - DNA, 120 bp, synthetic construct
  source 1..120: mol_type = other DNA
aaagtgctaggattacaggtgtgagccaccgcacctggccaactcattttaatttttttaaattttaaaacttgcatctttatgcctggcgtggtggctcacacctgtaatcctagcact

SEQ ID NO: 112680 - DNA, 120 bp, synthetic construct; identical to SEQ ID NO: 24400
  source 1..120: mol_type = other DNA

SEQ ID NO: 112681 - DNA, 120 bp, synthetic construct
  source 1..120: mol_type = other DNA
ttttcttgtaaatttgtttgagttcattgtagattctcgatattagccctttgtcagatgagtaggttgcaaaaattttctcccattttgtaggttgcctgttcactctgatggtagttt

SEQ ID NO: 112682 - DNA, 120 bp, synthetic construct
  source 1..120: mol_type = other DNA
tctgctgaagttccttatcagcttaaggagattttgggctgagacaatggggttttctagatatacaatcatgtcatctgcaaacagggacaatttgacttcctcttttcctaattgaat

SEQ ID NO: 112683 - DNA, 120 bp, synthetic construct
  source 1..120: mol_type = other DNA
ggattggtggtgatatcccctttatcattttttattgccgtctatttgattcttctctctttttctcattaatagtcttgctagtagtctatcaatttagttgatcctttcaaaaaacca

SEQ ID NO: 112684 - DNA, 120 bp, synthetic construct
  source 1..120: mol_type = other DNA
aaagtctgttttaccagagactaggattgcaacccctgcctttttttattttccatttgcttggtagatcttcctccatccttttattttgagcctatgtgtgtctctgcacgtgagatg

SEQ ID NO: 112685 - DNA, 120 bp, synthetic construct
  source 1..120: mol_type = other DNA
atatttcctgaatctgaacgttggcctaccttgctagattggggaagttctcctggataatatcctgcagagtgttttccaacttggttccattctccccatcactttcaggtacaccaa

SEQ ID NO: 112686 - DNA, 120 bp, synthetic construct
  source 1..120: mol_type = other DNA
tttgtttacctaatcaagcctgggcaatggcgggcgcccctctcccagcctcgctgccaccttgtagtttgatctcagactgctgtgctagcaatcagtgagactccatgggcgtaggac

SEQ ID NO: 112687 - DNA, 120 bp, synthetic construct; identical to SEQ ID NO: 24401
  source 1..120: mol_type = other DNA

SEQ ID NO: 112688 - DNA, 120 bp, synthetic construct; identical to SEQ ID NO: 24402
  source 1..120: mol_type = other DNA

SEQ ID NO: 112689 - DNA, 120 bp, synthetic construct
  source 1..120: mol_type = other DNA
atgttattacagttgacctgattggttggaagacaatgtacggtaaatgcacctgacaacaataacttaagcataccctgagaatgactctgtatggcagatgcacctgaatgtgtgttc

SEQ ID NO: 112690 - DNA, 120 bp, synthetic construct; identical to SEQ ID NO: 24403
  source 1..120: mol_type = other DNA

SEQ ID NO: 112691 - DNA, 120 bp, synthetic construct
  source 1..120: mol_type = other DNA
attttgtcaaaggccttttctgcatctattgagataatcatgtggtttttgtctttggttctgtttatatgctggattacatttattgatttgtgtatgttgaaccaggcttgcatccca

SEQ ID NO: 112692 - DNA, 120 bp, synthetic construct
  source 1..120: mol_type = other DNA
gaaactaacgtcagagtgaacaggcaacctacagaatgggagaaaatttttgcaacctactcatctgacaaagggctaatatccagaatctacaatgaactcaaacaaatttacaagaaa

SEQ ID NO: 112693 - DNA, 120 bp, synthetic construct
  source 1..120: mol_type = other DNA
gctgaatgccgaaatgtatatttgttttaaaatatagatgattgatcatttctttaaaaatgttttgggccaggtgtggtggctcactcctgtaatcccagcactttgggaggccgaggc

SEQ ID NO: 112694 - DNA, 120 bp, synthetic construct
  source 1..120: mol_type = other DNA
ctccagcacctgttgtttcctgactttttaatgatcgccattctaactggtgtgtgatggtatctcattgtggttttgatttgcatttctctgatggccagtgatgatgagcattttttc

SEQ ID NO: 112695 - DNA, 120 bp, synthetic construct
  source 1..120: mol_type = other DNA
cttgaagaggtccttcacatcccttgtaagttggattcgcaggtattttattctctttgaagcaaatgtgaatgggagttcactcatgatttggctctctgtttgtctgttattgttgta

SEQ ID NO: 112696 - DNA, 120 bp, synthetic construct
  source 1..120: mol_type = other DNA
ggttaaatcaggagtgatcttctaaataaataacaatcttcagggtggggtaatccaaaccatcaaaattggcacccttatgctggagcagggcagaaaggcccagctagctagatatta

SEQ ID NO: 112697 - DNA, 120 bp, synthetic construct; identical to SEQ ID NO: 12983
  source 1..120: mol_type = other DNA

SEQ ID NO: 112698 - DNA, 120 bp, synthetic construct; identical to SEQ ID NO: 12984
  source 1..120: mol_type = other DNA

SEQ ID NO: 112699 - DNA, 120 bp, synthetic construct; identical to SEQ ID NO: 12985
  source 1..120: mol_type = other DNA

SEQ ID NO: 112700 - DNA, 120 bp, synthetic construct
  source 1..120: mol_type = other DNA
gctttttccaattctgtgaagaaaggcattggtagcttgatggggatggcattgaatctataaattaccttgggcagtatggccattttcatgatattgattcttcctacccatgagcat

SEQ ID NO: 112701 - DNA, 120 bp, synthetic construct
  source 1..120: mol_type = other DNA
gcaataaagactttttgaatacagcatacatattctttctcacaaaatctgtatttcacaaagtcttttgaagagcttctgcacagcaaaagaaactaccatcagagtgaacaggcaacc

SEQ ID NO: 112702 - DNA, 120 bp, synthetic construct
  source 1..120: mol_type = other DNA
agggatagcactgggagatatacctaatgctagatgacgagttagtgggtgcagcacaccagcatggcacgtgtatacatatgtaactaacctgcacattgtgcacatgtaccctaaaac

SEQ ID NO: 112703 - DNA, 120 bp, synthetic construct; identical to SEQ ID NO: 12987
  source 1..120: mol_type = other DNA

SEQ ID NO: 112704 - DNA, 120 bp, synthetic construct; identical to SEQ ID NO: 12988
  source 1..120: mol_type = other DNA

SEQ ID NO: 112705 - DNA, 120 bp, synthetic construct; identical to SEQ ID NO: 12989
  source 1..120: mol_type = other DNA

SEQ ID NO: 112706 - DNA, 120 bp, synthetic construct; identical to SEQ ID NO: 12990
  source 1..120: mol_type = other DNA

SEQ ID NO: 112707 - DNA, 120 bp, synthetic construct
  source 1..120: mol_type = other DNA
ataactttattcgaaagtactggtctagtgaattaatagggtaggcaaaacaagatcttgccaaaattaagaattttgttggggaggagccaagatggccgaataggaacagctccagtc

SEQ ID NO: 112708 - DNA, 120 bp, synthetic construct
  source 1..120: mol_type = other DNA
aaacccatctgtacatcaccatcatcaaagaccaaaagtagataaaaccacaaagatggggaaaaaacagaacagaaaaactggaaactctaaaacgcagagagcctctcctcctccaaa

SEQ ID NO: 112709 - DNA, 120 bp, synthetic construct
  source 1..120: mol_type = other DNA
tttgtcaccaccaggcctgccctaaaagagctcctgaaggaagcactaaacatggaaaggaacaaccggtaccagccgctgcaaaatcatgccaaaatgtaaagatcatcgagactagga

SEQ ID NO: 112710 - DNA, 120 bp, synthetic construct
  source 1..120: mol_type = other DNA
agagggaaatttatagcactaaatgctcacaagagaaagcaggaaagatccaaaattgacaccctaacatcacaattaaaagaactagaaaagcaagagcaaacacattcaaaagctagc

SEQ ID NO: 112711 - DNA, 120 bp, synthetic construct
  source 1..120: mol_type = other DNA
aattaggtattgatgggacgtatttcaaaataataagagctatctatgacaaacccacagccaatatcatactgaatgtgcaaaaactggaagcattccctttgaaaactggcacaagac

SEQ ID NO: 112712 - DNA, 120 bp, synthetic construct
  source 1..120: mol_type = other DNA
ccttacatcttatataaaaatcaattcaagatggattaaagatttaaacgttagacctaaaaccataaaaaccctagaagaaaacctaggcattaccattcaggacataggcgtgggcaa

SEQ ID NO: 112713 - DNA, 120 bp, synthetic construct
  source 1..120: mol_type = other DNA
gaggtgggaggggggagggatagcattgggagatatacctaatgctagatgacgagttagtgggtgcagcgcaccagcatggcacatgtatacatatgtaactaacctgcacaatgtgca

SEQ ID NO: 112714 - DNA, 120 bp, synthetic construct
  source 1..120: mol_type = other DNA
tgcaccttccagccgcctgccttggcctcccaaagtgctaagattacagtctctgcccagccgccaccccgtctgggaagtggagagcgtctctgcctggctgccctgtctgggaggtga

SEQ ID NO: 112715 - DNA, 120 bp, synthetic construct; identical to SEQ ID NO: 7948
  source 1..120: mol_type = other DNA

SEQ ID NO: 112716 - DNA, 120 bp, synthetic construct
  source 1..120: mol_type = other DNA
gaacaccacaaagatactccttgagaagagcaactccaagacacacaattgtcagattcaccaaagttgaaatgaaggaaaaaatgttaagggcagccagagagaaaggtcgggttaccc

SEQ ID NO: 112717 - DNA, 120 bp, synthetic construct
  source 1..120: mol_type = other DNA
ataagaagagacaaagaaggccattacataatggtaaagggatcaatttaacaagaagagctaactatcctaaatatatatgcacccaatacaggagcacccagattcataaagcaagtc

SEQ ID NO: 112718 - DNA, 120 bp, synthetic construct
  source 1..120: mol_type = other DNA
tatgcaaataaactagaaaatctagaagaaatggataaattcctcaacacgtacaccctcccaagactaaaccaggaagaagttgaatgtctgaatagatcaacaaaaggctctgaaatt

SEQ ID NO: 112719 - DNA, 120 bp, synthetic construct; identical to SEQ ID NO: 24406
  source 1..120: mol_type = other DNA

SEQ ID NO: 112720 - DNA, 120 bp, synthetic construct; identical to SEQ ID NO: 23970
  source 1..120: mol_type = other DNA

SEQ ID NO: 112721 - DNA, 120 bp, synthetic construct; identical to SEQ ID NO: 23971
  source 1..120: mol_type = other DNA

SEQ ID NO: 112722 - DNA, 120 bp, synthetic construct; identical to SEQ ID NO: 23972
  source 1..120: mol_type = other DNA

SEQ ID NO: 112723 - DNA, 120 bp, synthetic construct; identical to SEQ ID NO: 23973
  source 1..120: mol_type = other DNA

SEQ ID NO: 112724 - DNA, 120 bp, synthetic construct
  source 1..120: mol_type = other DNA
gttatgattatgtgatggtgatgatgatagtgatagtagtgatgatggtggtgatgatgatggtgacaataatgatggtgatgataatggcagtggtgatgatgatggcccaggcaagtg

SEQ ID NO: 112725 - DNA, 120 bp, synthetic construct
  source 1..120: mol_type = other DNA
catgatctcggctcactgcaacctctgcttcccaggttcaagtgattcccctgcctcggcctcctgagtagctgggatgtaccaccatgcccagctaatttttgtatttttagtagagac

SEQ ID NO: 112726 - DNA, 120 bp, synthetic construct; identical to SEQ ID NO: 23976
  source 1..120: mol_type = other DNA

SEQ ID NO: 112727 - DNA, 120 bp, synthetic construct; identical to SEQ ID NO: 23977
  source 1..120: mol_type = other DNA

SEQ ID NO: 112728 - DNA, 120 bp, synthetic construct; identical to SEQ ID NO: 23961
  source 1..120: mol_type = other DNA

SEQ ID NO: 112729 - DNA, 120 bp, synthetic construct; identical to SEQ ID NO: 23962
  source 1..120: mol_type = other DNA

SEQ ID NO: 112730 - DNA, 120 bp, synthetic construct; identical to SEQ ID NO: 23963
  source 1..120: mol_type = other DNA

SEQ ID NO: 112731 - DNA, 120 bp, synthetic construct
  source 1..120: mol_type = other DNA
gtatgtgtgtgtgatgtacatgatgtgtggtgtgtgtgctgtgtgtgtgtgcatatgtgtgtgtatgtgtgtgtggtgtgtgtggggggtgtgtgtgcatgtgtgatgtgtgtgtagtgt

SEQ ID NO: 112732 - DNA, 120 bp, synthetic construct
  source 1..120: mol_type = other DNA
ccgagttgggactccgcgatgcagctcctgaaggcgctctgggcactggcaggggccgcgctctgctgcttcctcgtcctagtgatccacgcgcagttcctcaaagaaggtaattgtccc

SEQ ID NO: 112733 - DNA, 120 bp, synthetic construct; identical to SEQ ID NO: 23964
  source 1..120: mol_type = other DNA

SEQ ID NO: 112734 - DNA, 120 bp, synthetic construct; identical to SEQ ID NO: 23965
  source 1..120: mol_type = other DNA

SEQ ID NO: 112735 - DNA, 120 bp, synthetic construct; identical to SEQ ID NO: 23966
  source 1..120: mol_type = other DNA

SEQ ID NO: 112736 - DNA, 120 bp, synthetic construct
  source 1..120: mol_type = other DNA
ccccagtccacacccttctgggatgggggcagggtgggggaactcttgcctcacctccttttcctctcctcgtgcccactgcccccttggtgtcctctctggtgaactccagccacctct

SEQ ID NO: 112737 - DNA, 120 bp, synthetic construct
  source 1..120: mol_type = other DNA
tatccacccccccacccacactatccacccagccatccacccaatccacccacacaccaattctatccatctacccatccattctacctatccacccactcaccagccatccatccattt

SEQ ID NO: 112738 - DNA, 120 bp, synthetic construct; identical to SEQ ID NO: 23967
  source 1..120: mol_type = other DNA

SEQ ID NO: 112739 - DNA, 120 bp, synthetic construct; identical to SEQ ID NO: 23968
  source 1..120: mol_type = other DNA

SEQ ID NO: 112740 - DNA, 120 bp, synthetic construct; identical to SEQ ID NO: 23969
  source 1..120: mol_type = other DNA

SEQ ID NO: 112741 - DNA, 120 bp, synthetic construct; identical to SEQ ID NO: 7591
  source 1..120: mol_type = other DNA

SEQ ID NO: 112742 - DNA, 120 bp, synthetic construct; identical to SEQ ID NO: 7592
  source 1..120: mol_type = other DNA

SEQ ID NO: 112743 - DNA, 120 bp, synthetic construct; identical to SEQ ID NO: 24103
  source 1..120: mol_type = other DNA

SEQ ID NO: 112744 - DNA, 120 bp, synthetic construct; identical to SEQ ID NO: 21719
  source 1..120: mol_type = other DNA

SEQ ID NO: 112745 - DNA, 120 bp, synthetic construct
  source 1..120: mol_type = other DNA
cttggcctcccagagtgctgggattacaggcatgagccacccctcccagccagatacttactttttaaaaaaatttttagcatgttataatgttttcgctattcctggtgtgaatatttt

SEQ ID NO: 112746 - DNA, 120 bp, synthetic construct; identical to SEQ ID NO: 21720
  source 1..120: mol_type = other DNA

SEQ ID NO: 112747 - DNA, 120 bp, synthetic construct
  source 1..120: mol_type = other DNA
atgatccgcccacctcggcctcccagagtgctgggattacaggcatgagccaccccgcccggccagatacttactttttaaaaaaattagcatgttataatttgttttcgctattcctgg

SEQ ID NO: 112748 - DNA, 120 bp, synthetic construct; identical to SEQ ID NO: 21721
  source 1..120: mol_type = other DNA

SEQ ID NO: 112749 - DNA, 120 bp, synthetic construct; identical to SEQ ID NO: 21722
  source 1..120: mol_type = other DNA

SEQ ID NO: 112750 - DNA, 120 bp, synthetic construct
  source 1..120: mol_type = other DNA
tccagcctgggcaacagagcaagatcctgtctcaaaaaaaaaaaaaaaaagggggaatttagtaacagcaaatgttgtggtggttgggtggggggtgggtattgtgtttgttacaaattt

SEQ ID NO: 112751 - DNA, 120 bp, synthetic construct; identical to SEQ ID NO: 4684
  source 1..120: mol_type = other DNA

SEQ ID NO: 112752 - DNA, 120 bp, synthetic construct; identical to SEQ ID NO: 18393
  source 1..120: mol_type = other DNA

SEQ ID NO: 112753 - DNA, 120 bp, synthetic construct; identical to SEQ ID NO: 21735
  source 1..120: mol_type = other DNA

SEQ ID NO: 112754 - DNA, 120 bp, synthetic construct
  source 1..120: mol_type = other DNA
caagcagtccgcctacctcggcttcccaaagtgctgggattataggcataagccaccgcacctgatcacatttattactttaaaagtaaacaataatgtcttacttttggatcagaagat

SEQ ID NO: 112755 - DNA, 120 bp, synthetic construct
  source 1..120: mol_type = other DNA
gagaggaagagattcagagatctaatgagattctaggtttttcttttttgtttgtttgtggtttttttttttttgatcattcttgggtgtttctcgcagagggggatttggcagggtcat

SEQ ID NO: 112756 - DNA, 120 bp, synthetic construct
  source 1..120: mol_type = other DNA
cggccgggaagaggcgctcctcacttcctagatgggatggcggccgggcagagatgttcctcactttccacactgggcagccaggcagaggggctcctcacatcccagacgatgggcagc

SEQ ID NO: 112757 - DNA, 120 bp, synthetic construct
  source 1..120: mol_type = other DNA
acttaggaggtggaggttgcaatgagccgagattgtgccactgcactccagcctgggtaacagagtaagactctgtctcaaaaaaaataaataaataaatcatgctgctataaagacaca

SEQ ID NO: 112758 - DNA, 120 bp, synthetic construct; identical to SEQ ID NO: 13262
  source 1..120: mol_type = other DNA

SEQ ID NO: 112759 - DNA, 120 bp, synthetic construct; identical to SEQ ID NO: 13263
  source 1..120: mol_type = other DNA

SEQ ID NO: 112760 - DNA, 120 bp, synthetic construct; identical to SEQ ID NO: 13264
  source 1..120: mol_type = other DNA

SEQ ID NO: 112761 - DNA, 120 bp, synthetic construct
  source 1..120: mol_type = other DNA
tcggctggggagagtcagaatgaggctaaaatgtgagtgacagactgataggaagatagcctacagtcattaagacggtcatttttaaattgagttagggaacctgattcttgggttttt

SEQ ID NO: 112762 - DNA, 120 bp, synthetic construct
  source 1..120: mol_type = other DNA
agaggagaagggataacatgaagcggcgtccaaccaaccaagaggggactagaatcaagagctctgctttattcctatgaaggacaaaaaaagagatttcatcatttggtccttttggaa

SEQ ID NO: 112763 - DNA, 120 bp, synthetic construct
  source 1..120: mol_type = other DNA
aaaaaccaaacaccgcatattctcactcataggtggaaactgaacaatgagaacacacggacacaggaaggggaacattacactctggggactgttgtggggtggggggagggggggagg

SEQ ID NO: 112764 - DNA, 120 bp, synthetic construct
  source 1..120: mol_type = other DNA
aaaaattattttttgtgtccattagggttacccaaagtttactataaggaggcaaaggaagaatacatcacctgaccaaagataaaactgatgaatgggccgggcgcggtggctcacgcc

SEQ ID NO: 112765 - DNA, 120 bp, synthetic construct; identical to SEQ ID NO: 29068
  source 1..120: mol_type = other DNA

SEQ ID NO: 112766 - DNA, 120 bp, synthetic construct; identical to SEQ ID NO: 29069
  source 1..120: mol_type = other DNA

SEQ ID NO: 112767 - DNA, 120 bp, synthetic construct; identical to SEQ ID NO: 29070
  source 1..120: mol_type = other DNA

SEQ ID NO: 112768 - DNA, 120 bp, synthetic construct; identical to SEQ ID NO: 29071
  source 1..120: mol_type = other DNA

SEQ ID NO: 112769 - DNA, 120 bp, synthetic construct; identical to SEQ ID NO: 29072
  source 1..120: mol_type = other DNA

SEQ ID NO: 112770 - DNA, 120 bp, synthetic construct; identical to SEQ ID NO: 29073
  source 1..120: mol_type = other DNA

SEQ ID NO: 112771 - DNA, 120 bp, synthetic construct; identical to SEQ ID NO: 29074
  source 1..120: mol_type = other DNA

SEQ ID NO: 112772 - DNA, 120 bp, synthetic construct; identical to SEQ ID NO: 15700
  source 1..120: mol_type = other DNA

SEQ ID NO: 112773 - DNA, 120 bp, synthetic construct; identical to SEQ ID NO: 15701
  source 1..120: mol_type = other DNA

SEQ ID NO: 112774 - DNA, 120 bp, synthetic construct; identical to SEQ ID NO: 15702
  source 1..120: mol_type = other DNA

SEQ ID NO: 112775 - DNA, 120 bp, synthetic construct; identical to SEQ ID NO: 15703
  source 1..120: mol_type = other DNA

SEQ ID NO: 112776 - DNA, 120 bp, synthetic construct; identical to SEQ ID NO: 12687
  source 1..120: mol_type = other DNA

SEQ ID NO: 112777 - DNA, 120 bp, synthetic construct
  source 1..120: mol_type = other DNA
gatattataagcagtagttcttacttctacactattaaaagctggattcaacacagttgaataccagtttaataataatacccagagcaaaccaactctggagaccgccagagcagtgag

SEQ ID NO: 112778 - DNA, 120 bp, synthetic construct
  source 1..120: mol_type = other DNA
cacagagtgaaaggcaacccaggtaggttgccgcggctggctgaagccatgagcttttattcccttatttgtcccctcccattttccttttttgtcctatcagagtgcccttttatcaat

SEQ ID NO: 112779 - DNA, 120 bp, synthetic construct
  source 1..120: mol_type = other DNA
ttgaccccagaaggcggaggttgcagtgagccaagatagtgccattacactccaccctgggcaacaagagcaaaactccgtctcaataaataaataaattttttaaaatgtcaaataggt

SEQ ID NO: 112780 - DNA, 120 bp, synthetic construct
  source 1..120: mol_type = other DNA
ctactttaaagttcatatggaaccaaaaaggagcccgcattgccaagtcaatcctaatttatagattcaatgcccaaggtaatttatagattcaatgccatccccatcaagctaccaatg

SEQ ID NO: 112781 - DNA, 120 bp, synthetic construct
  source 1..120: mol_type = other DNA
aatctactcatctgacaaagggcgaatatccagaatctacaatgaactcaaacaaatttacaagaaaaaaacaaacaaccccatcaaaaagtgggcaaaggatatgaacagacacttctc

SEQ ID NO: 112782 - DNA, 120 bp, synthetic construct; identical to SEQ ID NO: 22352
  source 1..120: mol_type = other DNA

SEQ ID NO: 112783 - DNA, 120 bp, synthetic construct
  source 1..120: mol_type = other DNA
ccttacaccttatacaaaaattaattcaagatggatcaaagacttaactgttagacctgaaaccataaaaaccatataagaaaacctaggcaataccattcaggacataggcaagggcaa

SEQ ID NO: 112784 - DNA, 120 bp, synthetic construct
  source 1..120: mol_type = other DNA
agagccctcagaaacaatgccacatatctacaaccatctggtctttgacaaacctgacaaaaacaagaaatggggaaacgattccctatttaataaatggtgctgggaaaactggctagc

SEQ ID NO: 112785 - DNA, 120 bp, synthetic construct
  source 1..120: mol_type = other DNA
ctttttagggacatggatgaagctggaaaccatcattccatcattctcagcaaactatcgcaaggacaaaaaaccaaacaccgcatgttctcactcataggtgggaattgaacaatgaga

SEQ ID NO: 112786 - DNA, 120 bp, synthetic construct; identical to SEQ ID NO: 22353
  source 1..120: mol_type = other DNA

SEQ ID NO: 112787 - DNA, 120 bp, synthetic construct; identical to SEQ ID NO: 28976
  source 1..120: mol_type = other DNA

SEQ ID NO: 112788 - DNA, 120 bp, synthetic construct
  source 1..120: mol_type = other DNA
tgggattacaggcgtgagccaccgcacccggcctagtttagtatctttaaatgataaagactagaaaaacacagaatcaccataattatattatcacacataacaaaattaccttatttt

SEQ ID NO: 112789 - DNA, 120 bp, synthetic construct; identical to SEQ ID NO: 28977
  source 1..120: mol_type = other DNA

SEQ ID NO: 112790 - DNA, 120 bp, synthetic construct
  source 1..120: mol_type = other DNA
aggccagggtctctcgggggaggaagttcattgccatctcgttgccccccttacccccccacccccgccgcccttggacgaaagcgaaaccttaatgttgctagcgacccgagagctccg

SEQ ID NO: 112791 - DNA, 120 bp, synthetic construct; identical to SEQ ID NO: 25378
  source 1..120: mol_type = other DNA

SEQ ID NO: 112792 - DNA, 120 bp, synthetic construct
  source 1..120: mol_type = other DNA
atggatttttcaaaaaattcttaagacttcatttttttagagtagttttaggttcacagcaaaattgagaagaggctacagatatagccacctgccccctcccctcccgccccctacatg

SEQ ID NO: 112793 - DNA, 120 bp, synthetic construct
  source 1..120: mol_type = other DNA
ttcccagggcttgtttcctgtgtatggctggttgagtaataagctcacaactcgttagccatactgtgaggctttaccaattaataatttaattaggtggtggttatgtcttgagttatc

SEQ ID NO: 112794 - DNA, 120 bp, synthetic construct; identical to SEQ ID NO: 5315
  source 1..120: mol_type = other DNA

SEQ ID NO: 112795 - DNA, 120 bp, synthetic construct; identical to SEQ ID NO: 11033
  source 1..120: mol_type = other DNA

SEQ ID NO: 112796 - DNA, 120 bp, synthetic construct
  source 1..120: mol_type = other DNA
atattgaaaaccagcaacaaggcttcttttgtgtggagtccatctcacactccaaatctcttcccagagagaacactgattgcttttaagggctcactgaaattgtgtaaggctcattga

SEQ ID NO: 112797 - DNA, 120 bp, synthetic construct
  source 1..120: mol_type = other DNA
aggattacaggcacccactgtcacgcctagctaactatttttttctttcttttttttttttttttttctgagacagagcctcgctctgttgcccaggctggagtacaatggtgcaatctt

SEQ ID NO: 112798 - DNA, 120 bp, synthetic construct; identical to SEQ ID NO: 25252
  source 1..120: mol_type = other DNA

SEQ ID NO: 112799 - DNA, 120 bp, synthetic construct; identical to SEQ ID NO: 25253
  source 1..120: mol_type = other DNA

SEQ ID NO: 112800 - DNA, 120 bp, synthetic construct; identical to SEQ ID NO: 25254
  source 1..120: mol_type = other DNA

SEQ ID NO: 112801 - DNA, 120 bp, synthetic construct; identical to SEQ ID NO: 25255
  source 1..120: mol_type = other DNA

SEQ ID NO: 112802 - DNA, 120 bp, synthetic construct
  source 1..120: mol_type = other DNA
ccctgccgccccgtctgggatgtgaggagcgtctctgcccggccgccccgtctgagaagtgaggagaccctctgcctggcaaccgccccgtctgagaagtgaggagcccctccgcccggc

SEQ ID NO: 112803 - DNA, 120 bp, synthetic construct; identical to SEQ ID NO: 25256
  source 1..120: mol_type = other DNA

SEQ ID NO: 112804 - DNA, 120 bp, synthetic construct
  source 1..120: mol_type = other DNA
ccaaagtgctgggattacagacgtgagcaaccgcgcccagctcgagttcccatttaaaaggaaaggttcaagggggagtgactgttgggaggtttccgtttctgctgcctcttgcacttg

SEQ ID NO: 112805 - DNA, 120 bp, synthetic construct; identical to SEQ ID NO: 25257
  source 1..120: mol_type = other DNA

SEQ ID NO: 112806 - DNA, 120 bp, synthetic construct; identical to SEQ ID NO: 25258
  source 1..120: mol_type = other DNA

SEQ ID NO: 112807 - DNA, 120 bp, synthetic construct; identical to SEQ ID NO: 25259
  source 1..120: mol_type = other DNA

SEQ ID NO: 112808 - DNA, 120 bp, synthetic construct; identical to SEQ ID NO: 13060
  source 1..120: mol_type = other DNA

SEQ ID NO: 112809 - DNA, 120 bp, synthetic construct
  source 1..120: mol_type = other DNA
tcatgatttggctctctgtttgtctgttattggtgtataagaatgcttaccattcaggacataggcatgggcaaggacttcatgtctaaaacaccaaaagcaatggcaacaaaagccaaa

SEQ ID NO: 112810 - DNA, 120 bp, synthetic construct
  source 1..120: mol_type = other DNA
ctcagtaaactatcgcaaggacaaaaaaccaaacaccgcatgttctcacttataggtgggaattgaacaatgagaacacatggacacaggaaggggaacatcacactctggggactgttg

SEQ ID NO: 112811 - DNA, 120 bp, synthetic construct; identical to SEQ ID NO: 18566
  source 1..120: mol_type = other DNA

SEQ ID NO: 112812 - DNA, 120 bp, synthetic construct; identical to SEQ ID NO: 18567
  source 1..120: mol_type = other DNA

SEQ ID NO: 112813 - DNA, 120 bp, synthetic construct
  source 1..120: mol_type = other DNA
tatgataaattaataaagctgggacgtttatttttatttatttatttatttagagacagagtttctctcttgttgcccaggctagtggagtgcagtggtgctatcttggctcactgcaac

SEQ ID NO: 112814 - DNA, 120 bp, synthetic construct; identical to SEQ ID NO: 18568
  source 1..120: mol_type = other DNA

SEQ ID NO: 112815 - DNA, 120 bp, synthetic construct; identical to SEQ ID NO: 18569
  source 1..120: mol_type = other DNA

SEQ ID NO: 112816 - DNA, 120 bp, synthetic construct
  source 1..120: mol_type = other DNA
gaaccaaaaaagatcctgcattgccaagtcaatcctaagccaaaagaacaaagctgaaggcatcacactacgtgacttcaaactatactacaaggctacagtaaccaaaccagcatggta

SEQ ID NO: 112817 - DNA, 120 bp, synthetic construct
  source 1..120: mol_type = other DNA
tgttggtgggatggtaaactagttcaaccattgtggaagtcagtgtggcgattcctcagggatctagaactagaaataccatttgacccagccatcccattactgggtatatacccaaag

SEQ ID NO: 112818 - DNA, 120 bp, synthetic construct
  source 1..120: mol_type = other DNA
gagcttgcagtgagcagagatcatcgcgccactgcacttcagcctgggcgacagagcgagaatccatctcaaataataataataataataataaaaatgctactatgaacattagtgtgc

SEQ ID NO: 112819 - DNA, 120 bp, synthetic construct
  source 1..120: mol_type = other DNA
gtatcaatagatgtcatccacataaacaaaagcattcttgggttctcaataatttttttgagatgtagtctcactgtgttgcccaggttggtctcaaagtcctggattccagtgaccctc

SEQ ID NO: 112820 - DNA, 120 bp, synthetic construct
  source 1..120: mol_type = other DNA
tcctaatactatccctcccccctccgcccaccccacaacagtccccagggtgtgatgttccccttcctgtgtccatgtgttctcattgttcaattcccacctatgagtgagaacatgcgg

SEQ ID NO: 112821 - DNA, 120 bp, synthetic construct
  source 1..120: mol_type = other DNA
taggattgacttggcgatgcaggctcttttttgtttccatgtgaactttaaagtagttttttccagttctgtgaagaaagtcattggtagcttgatggcacaagacagggatgccctctc

SEQ ID NO: 112822 - DNA, 120 bp, synthetic construct
  source 1..120: mol_type = other DNA
ttttacttagcctactgttttcaagtttcatccatgttgtggcataatatctcaacgttctaactttttttttttttattatactttaagttttagggtacatgtgcacaacgtgcaggt

SEQ ID NO: 112823 - DNA, 120 bp, synthetic construct
  source 1..120: mol_type = other DNA
gtataaatgtcttctttggagaagtgtctgttcatatccttcgcccacttgttgatggggttgattgtttttttcttgtaaatttatttgagttcattgtagattctggatattagccct

SEQ ID NO: 112824 - DNA, 120 bp, synthetic construct
  source 1..120: mol_type = other DNA
cattaaatggtatgtcagtatctaagttggcttttatctgctttttttttttttgagatggagtgttgctctgccatccaggctggagtgcagtggcacaatcttggctcactgtaacct

SEQ ID NO: 112825 - DNA, 120 bp, synthetic construct
  source 1..120: mol_type = other DNA
acttcatccatgtccctgcaaaggacatgaactcatccttttttatggctatgtagtattccatggtgtatatgtgccacattttctttatccagtctatgatttatgggcatttgggtt

SEQ ID NO: 112826 - DNA, 120 bp, synthetic construct; identical to SEQ ID NO: 32856
  source 1..120: mol_type = other DNA

SEQ ID NO: 112827 - DNA, 120 bp, synthetic construct; identical to SEQ ID NO: 32857
  source 1..120: mol_type = other DNA

SEQ ID NO: 112828 - DNA, 120 bp, synthetic construct; identical to SEQ ID NO: 23955
  source 1..120: mol_type = other DNA

SEQ ID NO: 112829 - DNA, 120 bp, synthetic construct
  source 1..120: mol_type = other DNA
agcctggatttcttttgacgtgggcctcctaggctttcattattgcagcgagagtcttcatttgaggggctcttgcctgcacctgtggccagcttgctcttccactgccgtcggggaagg

SEQ ID NO: 112830 - DNA, 120 bp, synthetic construct
  source 1..120: mol_type = other DNA
ttaagaacttaactcatgaaggcactttgcaaagaagagaaatggagtcctgcacgaggctgcagaaaatcgattttcgttccatgactctgctcacagctatccgtgtgtttattaaat

SEQ ID NO: 112831 - DNA, 120 bp, synthetic construct; identical to SEQ ID NO: 23956
  source 1..120: mol_type = other DNA

SEQ ID NO: 112832 - DNA, 120 bp, synthetic construct; identical to SEQ ID NO: 23957
  source 1..120: mol_type = other DNA

SEQ ID NO: 112833 - DNA, 120 bp, synthetic construct; identical to SEQ ID NO: 5022
  source 1..120: mol_type = other DNA

SEQ ID NO: 112834 - DNA, 120 bp, synthetic construct; identical to SEQ ID NO: 23959
  source 1..120: mol_type = other DNA

SEQ ID NO: 112835 - DNA, 120 bp, synthetic construct; identical to SEQ ID NO: 23960
  source 1..120: mol_type = other DNA

SEQ ID NO: 112836 - DNA, 120 bp, synthetic construct; identical to SEQ ID NO: 23937
  source 1..120: mol_type = other DNA

SEQ ID NO: 112837 - DNA, 120 bp, synthetic construct
  source 1..120: mol_type = other DNA
cctcccaaagtgcagggattgcaggcatgagccactgcatgtggccacaccacacttcctttatccacttgttgatggatgggcatttgtgttgaaaagaagtcatctctgtttttcttt

SEQ ID NO: 112838 - DNA, 120 bp, synthetic construct; identical to SEQ ID NO: 23938
  source 1..120: mol_type = other DNA

SEQ ID NO: 112839 - DNA, 120 bp, synthetic construct; identical to SEQ ID NO: 23939
  source 1..120: mol_type = other DNA

SEQ ID NO: 112840 - DNA, 120 bp, synthetic construct; identical to SEQ ID NO: 23940
  source 1..120: mol_type = other DNA

SEQ ID NO: 112841 - DNA, 120 bp, synthetic construct; identical to SEQ ID NO: 23941
  source 1..120: mol_type = other DNA

SEQ ID NO: 112842 - DNA, 120 bp, synthetic construct; identical to SEQ ID NO: 23942
  source 1..120: mol_type = other DNA

SEQ ID NO: 112843 - DNA, 120 bp, synthetic construct
  source 1..120: mol_type = other DNA
caaaatgctgggattacaggcgtgagccaccacagctggccagttatttctcactatggtagaaatggactaaaataatagaatgggagaataagagatggcatcaagaatcatgtgata

SEQ ID NO: 112844 - DNA, 120 bp, synthetic construct
  source 1..120: mol_type = other DNA
aatagagcaaagcacaatacaacaacgtgcatgagtatatatatatacacacagtccacccttgaacagcatggaggttggggcaccagcacacatatatatgtatatacacagtccacc

SEQ ID NO: 112845 - DNA, 120 bp, synthetic construct
  source 1..120: mol_type = other DNA
catggggactgggacactagaatatatatatatgtatatatgtatacacacacacacacacacacacacacacagtccacccttgaacagcatggaagctggggcactagcacacatata

SEQ ID NO: 112846 - DNA, 120 bp, synthetic construct; identical to SEQ ID NO: 23946
  source 1..120: mol_type = other DNA

SEQ ID NO: 112847 - DNA, 120 bp, synthetic construct; identical to SEQ ID NO: 23947
  source 1..120: mol_type = other DNA

SEQ ID NO: 112848 - DNA, 120 bp, synthetic construct; identical to SEQ ID NO: 23948
  source 1..120: mol_type = other DNA

SEQ ID NO: 112849 - DNA, 120 bp, synthetic construct; identical to SEQ ID NO: 23949
  source 1..120: mol_type = other DNA

SEQ ID NO: 112850 - DNA, 120 bp, synthetic construct; identical to SEQ ID NO: 23950
  source 1..120: mol_type = other DNA

SEQ ID NO: 112851 - DNA, 120 bp, synthetic construct; identical to SEQ ID NO: 23951
  source 1..120: mol_type = other DNA

SEQ ID NO: 112852 - DNA, 120 bp, synthetic construct; identical to SEQ ID NO: 23952
  source 1..120: mol_type = other DNA

SEQ ID NO: 112853 - DNA, 120 bp, synthetic construct; identical to SEQ ID NO: 23953
  source 1..120: mol_type = other DNA

SEQ ID NO: 112854 - DNA, 120 bp, synthetic construct; identical to SEQ ID NO: 23954
  source 1..120: mol_type = other DNA

SEQ ID NO: 112855 - DNA, 120 bp, synthetic construct
  source 1..120: mol_type = other DNA
cacaaacaaatggaaaaacattccatcctcatggataggaagaattaatattgttaaaatggccatactgcccaaagctgaaggggtgggttgcccctccacacctgtgggtgtttctcg

SEQ ID NO: 112856 - DNA, 120 bp, synthetic construct; identical to SEQ ID NO: 17552
  source 1..120: mol_type = other DNA

SEQ ID NO: 112857 - DNA, 120 bp, synthetic construct; identical to SEQ ID NO: 17553
  source 1..120: mol_type = other DNA

SEQ ID NO: 112858 - DNA, 120 bp, synthetic construct
  source 1..120: mol_type = other DNA
aaaagtcgttcatgcaccacagaaccagacacctgtgtgcgtcttatgtgcaagtgctgcacaacacagaggtgagtgggtgggcaggtgggcggtcactcagcaccagtgacattttga

SEQ ID NO: 112859 - DNA, 120 bp, synthetic construct; identical to SEQ ID NO: 17670
  source 1..120: mol_type = other DNA

SEQ ID NO: 112860 - DNA, 120 bp, synthetic construct; identical to SEQ ID NO: 17554
  source 1..120: mol_type = other DNA

SEQ ID NO: 112861 - DNA, 120 bp, synthetic construct; identical to SEQ ID NO: 17669
  source 1..120: mol_type = other DNA

SEQ ID NO: 112862 - DNA, 120 bp, synthetic construct; identical to SEQ ID NO: 17555
  source 1..120: mol_type = other DNA

SEQ ID NO: 112863 - DNA, 120 bp, synthetic construct; identical to SEQ ID NO: 17556
  source 1..120: mol_type = other DNA

SEQ ID NO: 112864 - DNA, 120 bp, synthetic construct; identical to SEQ ID NO: 17668
  source 1..120: mol_type = other DNA

SEQ ID NO: 112865 - DNA, 120 bp, synthetic construct
  source 1..120: mol_type = other DNA
aattggatccttgccaggtttccagtgaagaagaggctcccccaggatgcaaactcatttcatgacaagtgcctggcccatcaggcacctcagcaacttgtcaaacctgtctcctacaag

SEQ ID NO: 112866 - DNA, 120 bp, synthetic construct; identical to SEQ ID NO: 17666
  source 1..120: mol_type = other DNA

SEQ ID NO: 112867 - DNA, 120 bp, synthetic construct; identical to SEQ ID NO: 17667
  source 1..120: mol_type = other DNA

SEQ ID NO: 112868 - DNA, 120 bp, synthetic construct; identical to SEQ ID NO: 17668
  source 1..120: mol_type = other DNA

SEQ ID NO: 112869 - DNA, 120 bp, synthetic construct
  source 1..120: mol_type = other DNA
ttctgcagaaggaaaccttccttccttccttccagaagtgctgactgtgggatgactgccgtttggggcagggagtcttttgtctgttctgaggctgcttcctcctcttggccctgccct

SEQ ID NO: 112870 - DNA, 120 bp, synthetic construct
  source 1..120: mol_type = other DNA
tgggggtaggctggtccttccctggggccctctcagggagagggatggctcctggcctgggcaggtcctcagctctgcctgggttgccttacagtgagatggagctgccccacgtcagtg

SEQ ID NO: 112871 - DNA, 120 bp, synthetic construct; identical to SEQ ID NO: 17669
  source 1..120: mol_type = other DNA

SEQ ID NO: 112872 - DNA, 120 bp, synthetic construct; identical to SEQ ID NO: 17554
  source 1..120: mol_type = other DNA

SEQ ID NO: 112873 - DNA, 120 bp, synthetic construct; identical to SEQ ID NO: 17670
  source 1..120: mol_type = other DNA

SEQ ID NO: 112874 - DNA, 120 bp, synthetic construct; identical to SEQ ID NO: 17671
  source 1..120: mol_type = other DNA

SEQ ID NO: 112875 - DNA, 120 bp, synthetic construct
  source 1..120: mol_type = other DNA
cgcctgtgggcagttgtggtagaggaccttgaacactgctgctctggggcctgggcagggaggacttggacagtggggacctggtcaggaaggcctggtcactgggggactggtcagcga

SEQ ID NO: 112876 - DNA, 120 bp, synthetic construct; identical to SEQ ID NO: 17552
  source 1..120: mol_type = other DNA

SEQ ID NO: 112877 - DNA, 120 bp, synthetic construct; identical to SEQ ID NO: 17672
  source 1..120: mol_type = other DNA

SEQ ID NO: 112878 - DNA, 120 bp, synthetic construct; identical to SEQ ID NO: 17673
  source 1..120: mol_type = other DNA

SEQ ID NO: 112879 - DNA, 120 bp, synthetic construct; identical to SEQ ID NO: 17674
  source 1..120: mol_type = other DNA

SEQ ID NO: 112880 - DNA, 120 bp, synthetic construct
  source 1..120: mol_type = other DNA
ttttaaaaataaattcttgacataaatttttgggattttgtcagttaaaggtggaaatatcttctctttaagaaagagcttggctgggcgtggtggctcacgcctgtaatcccagcattt

SEQ ID NO: 112881 - DNA, 120 bp, synthetic construct; identical to SEQ ID NO: 15529
  source 1..120: mol_type = other DNA

SEQ ID NO: 112882 - DNA, 120 bp, synthetic construct; identical to SEQ ID NO: 15530
  source 1..120: mol_type = other DNA

SEQ ID NO: 112883 - DNA, 120 bp, synthetic construct; identical to SEQ ID NO: 15531
  source 1..120: mol_type = other DNA

SEQ ID NO: 112884 - DNA, 120 bp, synthetic construct
  source 1..120: mol_type = other DNA
caatatggtttcatcatctgtaaattggggataattgaagtcttgatcctgatattgggctctgaaagcagaagtagcaagctcagccaagtcacttcaacaagaggagacgttccttgt

SEQ ID NO: 112885 - DNA, 120 bp, synthetic construct
  source 1..120: mol_type = other DNA
ctgctagcctgtggccatgttgggatctgggcctcagccttccagccacgaaggcagccaagtgtcatgaagaaggcatcacagaggcaattccaggctgtagtggtgaactttccactc

SEQ ID NO: 112886 - DNA, 120 bp, synthetic construct
  source 1..120: mol_type = other DNA
gaagaagtcagtcttgaaaggagaggacaggagcatctgctggcattagcagccgtgccatcgtaggaccgactcacctggacccgcggccacctgtgcttttacatctagtcttggtta

SEQ ID NO: 112887 - DNA, 120 bp, synthetic construct
  source 1..120: mol_type = other DNA
attttggaggcagagcctccagggcttgccgatgggttagctgcagggcttgagagggaacggagaatccaggatgatgtgttcaaatcggtccattcacctcttccgttccacgcctgt

SEQ ID NO: 112888 - DNA, 120 bp, synthetic construct
  source 1..120: mol_type = other DNA
tcagctcacgtctcttcagcttcctccacatggtccagcaaacacacacctgggctgaatggtagagctgatcgctcatacacaaaggtagaccggtgggcagggattttcagacttaca

SEQ ID NO: 112889 - DNA, 120 bp, synthetic construct
  source 1..120: mol_type = other DNA
tctcaagctgcactctttcttaatacatattcataagtttaaccaaaaataaaacgaggacgcgaagcttgcttgggttgttaagcctagggaaattatccagccatgagccctggccca

SEQ ID NO: 112890 - DNA, 120 bp, synthetic construct
  source 1..120: mol_type = other DNA
ggcttcctgccacacaccttcgtcccagggctgttgggcctgggatacggcccccagtcagaactcaggtgggaggggccttggatgtcacccagccccttgtcacctcacgtggggacc

SEQ ID NO: 112891 - DNA, 120 bp, synthetic construct
  source 1..120: mol_type = other DNA
atgacccagatgaaagtcgagagtgtggtgagcacttccctgtccggatcgccccccagccacagtctcctgtgtgtatctggacacctggggtggccacaaaaggatccggcaccgccc

SEQ ID NO: 112892 - DNA, 120 bp, synthetic construct
  source 1..120: mol_type = other DNA
cactgccctttgccctgctctgcgggagctgggcccccatccctgtgcctctgtctcctccagggcaggaaaggaaaccaactcccagcccatggagaacccaacgtcccaggtcaggcc

SEQ ID NO: 112893 - DNA, 120 bp, synthetic construct
  source 1..120: mol_type = other DNA
gaggaggaacaaggcggcgatgtggctcaggtccctgcagtagcccacctcctgcaagagccagagtcaccatggaaggacatcacctgggagggctgaggtcacccgggaggactcatg

SEQ ID NO: 112894 - DNA, 120 bp, synthetic construct
  source 1..120: mol_type = other DNA
gaatgatttttttttttttttcagtttgcatacacgccagttcagtctgtgggtgtacagttcctccacggttccaaaccaatgtgcagagtctcccggccaccgctccagcccctcctg

SEQ ID NO: 112895 - DNA, 120 bp, synthetic construct
  source 1..120: mol_type = other DNA
gaacatatgcttccttaatgtcccgcttatgtcccggtcgatgcgctggatgtgctcagatgacctcttgcccttctccttcatgatctgtagggcagggccaagcggaggaagcagtct

SEQ ID NO: 112896 - DNA, 120 bp, synthetic construct
  source 1..120: mol_type = other DNA
tcctccctccacacgttacctttctgctgcttttgtatttctcccagtctcccagcatatccacccacttgctctttcggctgatctcccgccgaatttgctgtcaaatgaggcatgttg

SEQ ID NO: 112897 - DNA, 120 bp, synthetic construct
  source 1..120: mol_type = other DNA
gtccctcagggagtgaccacatccccccgccagggtcaagggagcctgccctgagacctgcccggtgtactctggctgcaccaggggcccaccccacttgacagccccaaggcccttgca

SEQ ID NO: 112898 - DNA, 120 bp, synthetic construct
  source 1..120: mol_type = other DNA
agaggactcactgtacaatccccaaatgatcgacgttgttgttgtagcttcgaaaaggcttaggccccttgtcctctggcagcccagctcggtgtccctgtagcccagagggagccttgc

SEQ ID NO: 112899 - DNA, 120 bp, synthetic construct
  source 1..120: mol_type = other DNA
aaaaggagggcaaggcctcaagaggaccacgcagagcaagaaatacctggggagaaccctagtgcccggacccctttgaacacaagggaagatagtctcccctcagccagccctccaggg

SEQ ID NO: 112900 - DNA, 120 bp, synthetic construct
  source 1..120: mol_type = other DNA
gcacacaacgtgcacagatgtgtttacccacatacacatgtgcacgcacgtgcacaaacacattgcaggcaggcatgttgacgcctcaggcagcggaggaccctgactctgggcactgct

SEQ ID NO: 112901 - DNA, 120 bp, synthetic construct
  source 1..120: mol_type = other DNA
ttgttcttgtcattattccctaaagaatccagtatcacgaccatttatgtagcatctgcattgtattacacatcatgaataatccagggatggtctaatgtctacgggaggatgtgcata

SEQ ID NO: 112902 - DNA, 120 bp, synthetic construct
  source 1..120: mol_type = other DNA
cctgaacatttctcaatatagaaaagttacagtaaaaatatgatattaaagatgctccatcagctggctgatatgcctataatccgagcactttgggaggctggggcaggtggactgctt

SEQ ID NO: 112903 - DNA, 120 bp, synthetic construct
  source 1..120: mol_type = other DNA
aacacttgaacacagggcggggaacatcagacaccagggcctgtcatggggtagggggctgggggagggatagcattaggagaaatacctaatgtaaatgacgagttaatgggtgcagca

SEQ ID NO: 112904 - DNA, 120 bp, synthetic construct
  source 1..120: mol_type = other DNA
aaggcagaaaaatgtaagttagaagggttttcctagaaagcgttttatgtaattcagtattacaggctatctgcttcctgtcataaccctgaatcacactgtctgccaggtcagtgtggg

SEQ ID NO: 112905 - DNA, 120 bp, synthetic construct
  source 1..120: mol_type = other DNA
agccatcctattgaagtgagccatactttctaaccattagcctatgactgctctcatttacaatgaaatacgtaatttgttacatagatactttggactttgaaaagaagagaaaatagc

SEQ ID NO: 112906 - DNA, 120 bp, synthetic construct
  source 1..120: mol_type = other DNA
cggccttcctaagtgctgggattataggcatgaaccactgtgcccagcctacttagacttgtggggggaaacacttattgtggggaataaattattgaggataaaaaagattattctcat

SEQ ID NO: 112907 - DNA, 120 bp, synthetic construct
  source 1..120: mol_type = other DNA
tccatattgtatatataccacattttctttatccgttcattggttgatggatacttaggttgcttccaattcttggctattgtgaacagtgctgcgagaaacatgggagtgcagatactg

SEQ ID NO: 112908 - DNA, 120 bp, synthetic construct
  source 1..120: mol_type = other DNA
gtctcaaactcctgacatcaagtgatcctcccgccgagcttggcctcccaaaatgctgggattataggcgtgagccaccgtgcctggccttgagcaccttttcataagcctgttcgtcat

SEQ ID NO: 112909 - DNA, 120 bp, synthetic construct
  source 1..120: mol_type = other DNA
ctttactgggagattttttattatggcttcagtcttgttacttgttattggtgtgttcaggttttggattccttcatttttcaatcttggtaggttgtatgtgtctaggaatttatccat

SEQ ID NO: 112910 - DNA, 120 bp, synthetic construct
  source 1..120: mol_type = other DNA
tgtctgggtgatctgtccaatgccgaaagtagggtattgaaatctctagccgtcactgtgcttgggtctatctctctctttagctctaataatatttactttattatatctgggtgctcc

SEQ ID NO: 112911 - DNA, 120 bp, synthetic construct
  source 1..120: mol_type = other DNA
agacagtatcatactaaatgagcaaaagctgtgagcattagccttgaaaactggcacaagacaaggatagcttctctcaccactcctattaaacatagtattggaaattctagccagggc

SEQ ID NO: 112912 - DNA, 120 bp, synthetic construct
  source 1..120: mol_type = other DNA
ctgggaggcacactgacacctcacacggcagggtattccaacagacctgcagctgagggtcctgtctgttagaaggaaaactaacaaccagaaaggacatctacaccgaaaacccatctg

SEQ ID NO: 112913 - DNA, 120 bp, synthetic construct
  source 1..120: mol_type = other DNA
taagcttcataagtgaaggagaaataaaatactttatagacaagcaaatgctgagagattgtgtcaccaccaggcctgccctataagagctcctgaaggaagcgctaaacctggaaagga

SEQ ID NO: 112914 - DNA, 120 bp, synthetic construct
  source 1..120: mol_type = other DNA
gctcaactacatggaaactgaacaacctgctcctgaatgactactgggtacataatgaaatgaaggcagaaataaagatgttctttgaaaccaacgagaacaaagacaccacataccaga

SEQ ID NO: 112915 - DNA, 120 bp, synthetic construct; identical to SEQ ID NO: 45732
  source 1..120: mol_type = other DNA

SEQ ID NO: 112916 - DNA, 120 bp, synthetic construct; identical to SEQ ID NO: 54135
  source 1..120: mol_type = other DNA

SEQ ID NO: 112917 - DNA, 120 bp, synthetic construct
  source 1..120: mol_type = other DNA
atcattctcagtaacctatcacaagaacaaaaaaccaaacaccacatatgctcactcataggtgggaattgaacaatgagatcacatggacacaggaaggggaatatcacactctgggga

SEQ ID NO: 112918 - DNA, 120 bp, synthetic construct
  source 1..120: mol_type = other DNA
gaacaacgagaacacatagacacaggaaggggaacattacactctggggcctgttgtagggaggggggaggggggagggatagctttaggagatatacctaatgtaaatgacgagttaat

SEQ ID NO: 112919 - DNA, 120 bp, synthetic construct; identical to SEQ ID NO: 28254
  source 1..120: mol_type = other DNA

SEQ ID NO: 112920 - DNA, 120 bp, synthetic construct; identical to SEQ ID NO: 28255
  source 1..120: mol_type = other DNA

SEQ ID NO: 112921 - DNA, 120 bp, synthetic construct
  source 1..120: mol_type = other DNA
ctctattcaacatagtattggaagtcttggccacagcaatcaggtaagagaaacaaataaaggtcatccaaataggaagacaggaagccaaactatccctgtttgcagacggcatgattc

SEQ ID NO: 112922 - DNA, 120 bp, synthetic construct
  source 1..120: mol_type = other DNA
tagacagatcaaagagatagaaagttaacaaggatatccaggaattgaactcagctctgcaccaagtagacctaatagacatctacagaactctccaccccaaatcaacagaatatacat

SEQ ID NO: 112923 - DNA, 120 bp, synthetic construct
  source 1..120: mol_type = other DNA
ggaaacgattccctattcaataaatggtgctgggaaaactggatagacatatgtagaaagctgaaactggatcccttccttacaccttatacaaaaattaattcaaggtggattaaagac

SEQ ID NO: 112924 - DNA, 120 bp, synthetic construct
  source 1..120: mol_type = other DNA
agccataaaaaatgatgagttcatgtcttttgtagggacacagatgaagctagaaaccatcattctctgcaaactatctcaaggacaaaaaaaccaaacaccacatgttctcactcatag

SEQ ID NO: 112925 - DNA, 120 bp, synthetic construct; identical to SEQ ID NO: 17911
  source 1..120: mol_type = other DNA

SEQ ID NO: 112926 - DNA, 120 bp, synthetic construct
  source 1..120: mol_type = other DNA
ctactgaaaatacaaacaattggctgggcttggtggcgcacacctgtagtctcagctacttgggaggctgaggtgggaggattgctcaaacccagggaggttgaggcttcagtgagctat

SEQ ID NO: 112927 - DNA, 120 bp, synthetic construct; identical to SEQ ID NO: 17912
  source 1..120: mol_type = other DNA

SEQ ID NO: 112928 - DNA, 120 bp, synthetic construct; identical to SEQ ID NO: 17913
  source 1..120: mol_type = other DNA

SEQ ID NO: 112929 - DNA, 120 bp, synthetic construct
  source 1..120: mol_type = other DNA
gatctgacagtgggtgacgcagagccaggccttgcccctggggagctctccagcatacacctccctctcccctcccagcgtgccgcaaagcaggcgtcaacgccattgttaatgcacgga

SEQ ID NO: 112930 - DNA, 120 bp, synthetic construct; identical to SEQ ID NO: 17914
  source 1..120: mol_type = other DNA

SEQ ID NO: 112931 - DNA, 120 bp, synthetic construct; identical to SEQ ID NO: 17915
  source 1..120: mol_type = other DNA

SEQ ID NO: 112932 - DNA, 120 bp, synthetic construct
  source 1..120: mol_type = other DNA
agcccacctgggggtggcacgtcccccttctttcttgttagtttcttcatagaggccctaagatgcttgagcacagtgtcctcatccctggcccaggtatcaacgaaccggttgcaaaaa

SEQ ID NO: 112933 - DNA, 120 bp, synthetic construct
  source 1..120: mol_type = other DNA
gggcagtgttccccgttaggctgcctcatccggatattgattgacggggtaaggaggcatagggagaccctggctcagggaccttccttgccctgcagtgccctgcttccccagcccggg

SEQ ID NO: 112934 - DNA, 120 bp, synthetic construct; identical to SEQ ID NO: 17966
  source 1..120: mol_type = other DNA

SEQ ID NO: 112935 - DNA, 120 bp, synthetic construct; identical to SEQ ID NO: 17916
  source 1..120: mol_type = other DNA

SEQ ID NO: 112936 - DNA, 120 bp, synthetic construct; identical to SEQ ID NO: 17977
  source 1..120: mol_type = other DNA

SEQ ID NO: 112937 - DNA, 120 bp, synthetic construct; identical to SEQ ID NO: 17948
  source 1..120: mol_type = other DNA

SEQ ID NO: 112938 - DNA, 120 bp, synthetic construct; identical to SEQ ID NO: 17917
  source 1..120: mol_type = other DNA

SEQ ID NO: 112939 - DNA, 120 bp, synthetic construct; identical to SEQ ID NO: 17984
  source 1..120: mol_type = other DNA

SEQ ID NO: 112940 - DNA, 120 bp, synthetic construct; identical to SEQ ID NO: 17918
  source 1..120: mol_type = other DNA

SEQ ID NO: 112941 - DNA, 120 bp, synthetic construct; identical to SEQ ID NO: 17919
  source 1..120: mol_type = other DNA

SEQ ID NO: 112942 - DNA, 120 bp, synthetic construct; identical to SEQ ID NO: 17920
  source 1..120: mol_type = other DNA

SEQ ID NO: 112943 - DNA, 120 bp, synthetic construct; identical to SEQ ID NO: 17921
  source 1..120: mol_type = other DNA

SEQ ID NO: 112944 - DNA, 120 bp, synthetic construct; identical to SEQ ID NO: 17922
  source 1..120: mol_type = other DNA

SEQ ID NO: 112945 - DNA, 120 bp, synthetic construct; identical to SEQ ID NO: 17923
  source 1..120: mol_type = other DNA

SEQ ID NO: 112946 - DNA, 120 bp, synthetic construct
  source 1..120: mol_type = other DNA
tgtgctttatttctatgattatttcactgtaatatataatgaaataattacacaactcaccataacatagaatcagtgggagccctgaacttgttttcctgcaactacatggtcccatca

SEQ ID NO: 112947 - DNA, 120 bp, synthetic construct
  source 1..120: mol_type = other DNA
gcacacgcctgtaatgccagcactttgggaggctgaggtgggcagattgcttgaaccccagagttcgaaaccagcctgggcgacttggcaaaaccagtctctactgaaaatacaaaaaat

SEQ ID NO: 112948 - DNA, 120 bp, synthetic construct; identical to SEQ ID NO: 112885
  source 1..120: mol_type = other DNA

SEQ ID NO: 112949 - DNA, 120 bp, synthetic construct; identical to SEQ ID NO: 112886
  source 1..120: mol_type = other DNA

SEQ ID NO: 112950 - DNA, 120 bp, synthetic construct
  source 1..120: mol_type = other DNA
agccctggaggctcttcctccaaaatcctgcctatcccatgtgcaaacgcctctcaccatgtccactgctatttgcagttctgtgtgtgtggaaatacttccaccaatttggaatgaaca

SEQ ID NO: 112951 - DNA, 120 bp, synthetic construct; identical to SEQ ID NO: 112888
  source 1..120: mol_type = other DNA

SEQ ID NO: 112952 - DNA, 120 bp, synthetic construct; identical to SEQ ID NO: 112889
  source 1..120: mol_type = other DNA

SEQ ID NO: 112953 - DNA, 120 bp, synthetic construct; identical to SEQ ID NO: 112890
  source 1..120: mol_type = other DNA

SEQ ID NO: 112954 - DNA, 120 bp, synthetic construct; identical to SEQ ID NO: 112891
  source 1..120: mol_type = other DNA

SEQ ID NO: 112955 - DNA, 120 bp, synthetic construct; identical to SEQ ID NO: 112892
  source 1..120: mol_type = other DNA

SEQ ID NO: 112956 - DNA, 120 bp, synthetic construct; identical to SEQ ID NO: 112893
  source 1..120: mol_type = other DNA

SEQ ID NO: 112957 - DNA, 120 bp, synthetic construct
  source 1..120: mol_type = other DNA
ttgcctgatccttttcactctgaatgatttttttttttttttttcagtttgcacacacgccagttcagtctgtgggtgtacagttcctccacggttccaaaccgatgtgcagagtctccc

SEQ ID NO: 112958 - DNA, 120 bp, synthetic construct; identical to SEQ ID NO: 112895
  source 1..120: mol_type = other DNA

SEQ ID NO: 112959 - DNA, 120 bp, synthetic construct; identical to SEQ ID NO: 112896
  source 1..120: mol_type = other DNA

SEQ ID NO: 112960 - DNA, 120 bp, synthetic construct; identical to SEQ ID NO: 112897
  source 1..120: mol_type = other DNA

SEQ ID NO: 112961 - DNA, 120 bp, synthetic construct; identical to SEQ ID NO: 112898
  source 1..120: mol_type = other DNA

SEQ ID NO: 112962 - DNA, 120 bp, synthetic construct; identical to SEQ ID NO: 112899
  source 1..120: mol_type = other DNA

SEQ ID NO: 112963 - DNA, 120 bp, synthetic construct; identical to SEQ ID NO: 112900
  source 1..120: mol_type = other DNA

SEQ ID NO: 112964 - DNA, 120 bp, synthetic construct; identical to SEQ ID NO: 112901
  source 1..120: mol_type = other DNA

SEQ ID NO: 112965 - DNA, 120 bp, synthetic construct
  source 1..120: mol_type = other DNA
ctgtctcaaaaaaaaaaaaaaaaaaaaagaacagatatggcttggcgcggtggctcacacttgtaatcccagcactttggcaggcggaggcaggcagatcacctgatgtcaggagttcaa

SEQ ID NO: 112966 - DNA, 120 bp, synthetic construct
  source 1..120: mol_type = other DNA
aaagaaaaaaaaaaaaggcctggatgaaaagccaaaataggtgatacaaagtccgtacaataaaacacataccctttactcagaagagaatccaacaaactctcacacagcaattgattt

SEQ ID NO: 112967 - DNA, 120 bp, synthetic construct
  source 1..120: mol_type = other DNA
atgttagtgtatccttgctttgtttcaaacccaggattaagtcttcttggcctcctatatagactgcacttcaactgagccaaatactaagtaagggctgtaccaaagaggcagcttgac

SEQ ID NO: 112968 - DNA, 120 bp, synthetic construct
  source 1..120: mol_type = other DNA
ttcatccatcaacatctacagtgaatttcacagtagccaagcagttaatccaccaatgtcaagatacctgtacaacattatacatgccaaatcacacagcacattactactgcaaccatt

SEQ ID NO: 112969 - DNA, 120 bp, synthetic construct
  source 1..120: mol_type = other DNA
tctctaatataagacaagatgctgaccaatttttaaaatgtgaatggatttctatttttaagataagtacctttgttcctttggttcctccctcccacccttccagaaatggtagtatcc

SEQ ID NO: 112970 - DNA, 120 bp, synthetic construct; identical to SEQ ID NO: 17970
  source 1..120: mol_type = other DNA

SEQ ID NO: 112971 - DNA, 120 bp, synthetic construct; identical to SEQ ID NO: 17971
  source 1..120: mol_type = other DNA

SEQ ID NO: 112972 - DNA, 120 bp, synthetic construct
  source 1..120: mol_type = other DNA
acccgggaggcagaggttgcagtgagccgagattgtgccactgcacaatctccctcctgccatcttgtgaagaaggtgcctgcttccccttccccttctgccatgattgtaagtttccgg

SEQ ID NO: 112973 - DNA, 120 bp, synthetic construct; identical to SEQ ID NO: 17972
  source 1..120: mol_type = other DNA

SEQ ID NO: 112974 - DNA, 120 bp, synthetic construct
  source 1..120: mol_type = other DNA
catttgggaacagcacccactctacgaagccaccatggagacgaaagagccaatcgtctacacgggcagtgtagaacgggcgcctggtgagtgctcagggatgaccctcctcggtagctg

SEQ ID NO: 112975 - DNA, 120 bp, synthetic construct; identical to SEQ ID NO: 17918
  source 1..120: mol_type = other DNA

SEQ ID NO: 112976 - DNA, 120 bp, synthetic construct; identical to SEQ ID NO: 17984
  source 1..120: mol_type = other DNA

SEQ ID NO: 112977 - DNA, 120 bp, synthetic construct; identical to SEQ ID NO: 17917
  source 1..120: mol_type = other DNA

SEQ ID NO: 112978 - DNA, 120 bp, synthetic construct; identical to SEQ ID NO: 17948
  source 1..120: mol_type = other DNA

SEQ ID NO: 112979 - DNA, 120 bp, synthetic construct; identical to SEQ ID NO: 17977
  source 1..120: mol_type = other DNA

SEQ ID NO: 112980 - DNA, 120 bp, synthetic construct; identical to SEQ ID NO: 17916
  source 1..120: mol_type = other DNA

SEQ ID NO: 112981 - DNA, 120 bp, synthetic construct; identical to SEQ ID NO: 17966
  source 1..120: mol_type = other DNA

SEQ ID NO: 112982 - DNA, 120 bp, synthetic construct
  source 1..120: mol_type = other DNA
cttgaggcttccctgagccctcacaagtcgggtcctggcccactctgcccatgaggctgggcctgagccccagccatggccctgggatgaccccccttgggcagagggttttgcttgtgt

SEQ ID NO: 112983 - DNA, 120 bp, synthetic construct; identical to SEQ ID NO: 17973
  source 1..120: mol_type = other DNA

SEQ ID NO: 112984 - DNA, 120 bp, synthetic construct
  source 1..120: mol_type = other DNA
gctgttcgtccctagctctgaagggggtgccctggtcggaatcagtgctgggtgcagcgaaagccgatctcacccgctccgcagggtgttcagcctgccagcagggggccagctggtcct

SEQ ID NO: 112985 - DNA, 120 bp, synthetic construct
  source 1..120: mol_type = other DNA
tcacattattatttagttaatagaactgtacccacattaaatttcttaaatttttttaagagataaagtctcactctgtcacccaggctggagtgcagtggtgcaatcatggctcactgc

SEQ ID NO: 112986 - DNA, 120 bp, synthetic construct
  source 1..120: mol_type = other DNA
atttgcagttctgtgtgtgtggaaatacttccaccaatttggaatgaacaggtcacagctgtgcctggagggaatgcccagggaaatgtgccctcgccttgctgttctatccaggcccac

SEQ ID NO: 112987 - DNA, 120 bp, synthetic construct; identical to SEQ ID NO: 17974
  source 1..120: mol_type = other DNA

SEQ ID NO: 112988 - DNA, 120 bp, synthetic construct; identical to SEQ ID NO: 17975
  source 1..120: mol_type = other DNA

SEQ ID NO: 112989 - DNA, 120 bp, synthetic construct; identical to SEQ ID NO: 17976
  source 1..120: mol_type = other DNA

SEQ ID NO: 112990 - DNA, 120 bp, synthetic construct
  source 1..120: mol_type = other DNA
taagttctaattaaacatttcttttaaaggtaggcagtaaaaaaaaattggtctggccaggcgcagtggcttacgcctgtaatcctagcattttgggaggctgaggcgggtggatcacct

SEQ ID NO: 112991 - DNA, 120 bp, synthetic construct; identical to SEQ ID NO: 112904
  source 1..120: mol_type = other DNA

SEQ ID NO: 112992 - DNA, 120 bp, synthetic construct
  source 1..120: mol_type = other DNA
aatgtaaatgacgagttaatgggtgcagcaaaccaacatggcacatgtatactgatgtaacaaacctgcacattgtgcacatgcaccctagaactttaattaaaaaaaaagaaagaaaga

SEQ ID NO: 112993 - DNA, 120 bp, synthetic construct; identical to SEQ ID NO: 112902
  source 1..120: mol_type = other DNA

SEQ ID NO: 112994 - DNA, 120 bp, synthetic construct; identical to SEQ ID NO: 17972
  source 1..120: mol_type = other DNA

SEQ ID NO: 112995 - DNA, 120 bp, synthetic construct
  source 1..120: mol_type = other DNA
ttgggaacagcacccactctacgaagccaccatggagacgaaagagccaatcgtctacacgggcagtgtagaacgggcgcctggtgagtgctcagggatgaccctcctcggtagctgccc

SEQ ID NO: 112996 - DNA, 120 bp, synthetic construct; identical to SEQ ID NO: 17918
  source 1..120: mol_type = other DNA

SEQ ID NO: 112997 - DNA, 120 bp, synthetic construct; identical to SEQ ID NO: 17984
  source 1..120: mol_type = other DNA

SEQ ID NO: 112998 - DNA, 120 bp, synthetic construct; identical to SEQ ID NO: 17917
  source 1..120: mol_type = other DNA

SEQ ID NO: 112999 - DNA, 120 bp, synthetic construct
  source 1..120: mol_type = other DNA
gtggcctgtgacaccagatcgttttctgcccacagctcatagatcaagcgtacaagggaatgcccatgaacatccggggcccgatgtggtcagtcctcctgaacactgaggaaatgaagt

SEQ ID NO: 113000 - DNA, 120 bp, synthetic construct; identical to SEQ ID NO: 17977
  source 1..120: mol_type = other DNA

SEQ ID NO: 113001 - DNA, 120 bp, synthetic construct; identical to SEQ ID NO: 17916
  source 1..120: mol_type = other DNA

SEQ ID NO: 113002 - DNA, 120 bp, synthetic construct; identical to SEQ ID NO: 17966
  source 1..120: mol_type = other DNA

SEQ ID NO: 113003 - DNA, 120 bp, synthetic construct; identical to SEQ ID NO: 112982
  source 1..120: mol_type = other DNA

SEQ ID NO: 113004 - DNA, 120 bp, synthetic construct; identical to SEQ ID NO: 17973
  source 1..120: mol_type = other DNA

SEQ ID NO: 113005 - DNA, 120 bp, synthetic construct; identical to SEQ ID NO: 112984
  source 1..120: mol_type = other DNA

SEQ ID NO: 113006 - DNA, 120 bp, synthetic construct; identical to SEQ ID NO: 112985
  source 1..120: mol_type = other DNA

SEQ ID NO: 113007 - DNA, 120 bp, synthetic construct; identical to SEQ ID NO: 112986
  source 1..120: mol_type = other DNA

SEQ ID NO: 113008 - DNA, 120 bp, synthetic construct; identical to SEQ ID NO: 17974
  source 1..120: mol_type = other DNA

SEQ ID NO: 113009 - DNA, 120 bp, synthetic construct; identical to SEQ ID NO: 17975
  source 1..120: mol_type = other DNA

SEQ ID NO: 113010 - DNA, 120 bp, synthetic construct; identical to SEQ ID NO: 17976
  source 1..120: mol_type = other DNA

SEQ ID NO: 113011 - DNA, 120 bp, synthetic construct; identical to SEQ ID NO: 112947
  source 1..120: mol_type = other DNA

SEQ ID NO: 113012 - DNA, 120 bp, synthetic construct; identical to SEQ ID NO: 112885
  source 1..120: mol_type = other DNA

SEQ ID NO: 113013 - DNA, 120 bp, synthetic construct; identical to SEQ ID NO: 112886
  source 1..120: mol_type = other DNA

SEQ ID NO: 113014 - DNA, 120 bp, synthetic construct; identical to SEQ ID NO: 112887
  source 1..120: mol_type = other DNA

SEQ ID NO: 113015 - DNA, 120 bp, synthetic construct; identical to SEQ ID NO: 112888
  source 1..120: mol_type = other DNA

SEQ ID NO: 113016 - DNA, 120 bp, synthetic construct; identical to SEQ ID NO: 112889
  source 1..120: mol_type = other DNA

SEQ ID NO: 113017 - DNA, 120 bp, synthetic construct; identical to SEQ ID NO: 112890
  source 1..120: mol_type = other DNA

SEQ ID NO: 113018 - DNA, 120 bp, synthetic construct; identical to SEQ ID NO: 112891
  source 1..120: mol_type = other DNA

SEQ ID NO: 113019 - DNA, 120 bp, synthetic construct; identical to SEQ ID NO: 112892
  source 1..120: mol_type = other DNA

SEQ ID NO: 113020 - DNA, 120 bp, synthetic construct; identical to SEQ ID NO: 112893
  source 1..120: mol_type = other DNA

SEQ ID NO: 113021 - DNA, 120 bp, synthetic construct; identical to SEQ ID NO: 112894
  source 1..120: mol_type = other DNA

SEQ ID NO: 113022 - DNA, 120 bp, synthetic construct; identical to SEQ ID NO: 112895
  source 1..120: mol_type = other DNA

SEQ ID NO: 113023 - DNA, 120 bp, synthetic construct; identical to SEQ ID NO: 112896
  source 1..120: mol_type = other DNA

SEQ ID NO: 113024 - DNA, 120 bp, synthetic construct; identical to SEQ ID NO: 112897
  source 1..120: mol_type = other DNA

SEQ ID NO: 113025 - DNA, 120 bp, synthetic construct; identical to SEQ ID NO: 112898
  source 1..120: mol_type = other DNA

SEQ ID NO: 113026 - DNA, 120 bp, synthetic construct; identical to SEQ ID NO: 112899
  source 1..120: mol_type = other DNA

SEQ ID NO: 113027 - DNA, 120 bp, synthetic construct
  source 1..120: mol_type = other DNA
cctgcaacgtgtttgtgcacgtgcgtgcacacgtgtatgtgggtaaacatgtctgtgcacatgtgtgttgcttctctggccaggcccggctgccccactcatgtgtgcacccagttcctc

SEQ ID NO: 113028 - DNA, 120 bp, synthetic construct
  source 1..120: mol_type = other DNA
tatgtagcatctgcattgtattacacatcataatctagtaacggtctaacgtatacgggaggatgcgcatagcttatacgtaaatactaggccatgttctatcagagacttgagcatcca

SEQ ID NO: 113029 - DNA, 120 bp, synthetic construct
  source 1..120: mol_type = other DNA
cctcccttgacaaaggaggattacaattccagatgagatttcggtggggacacagagcccaacctgtgagggtctcaatctatcttgtagctcccctggggctggggctgagtacagttc

SEQ ID NO: 113030 - DNA, 120 bp, synthetic construct
  source 1..120: mol_type = other DNA
agagatgggcctgggctgctgtcctctgctttggcctcagcagatcacacgatggaagctggcagccccgtgggcaccactcgagccagctgtgacctgcagtttctgcttcctggagtg

SEQ ID NO: 113031 - DNA, 120 bp, synthetic construct
  source 1..120: mol_type = other DNA
cagcgtgtgtgtgtgtgtgtgtgtgcgcgcgtgtatgtgtgtgttgcagggctttacagtggacaggatgtgggagggcagctgcagctccaagctgcaagtctttctgatagaatggtt

SEQ ID NO: 113032 - DNA, 120 bp, synthetic construct
  source 1..120: mol_type = other DNA
agtctaagttctaattaaacatttcttttaaaggtaggcagtaaaaaaaaattggtctggccaggcgcagtggcttacgcctgtaatcctagcattttgggaggctgaggcgggtggatc

SEQ ID NO: 113033 - DNA, 120 bp, synthetic construct
  source 1..120: mol_type = other DNA
gtgatgctatatcatatagcaaaggtgcatctgtcatccgaatgctgcatgactacattggggataaggtaaaaaaaaaaaactttaagtatttcattctttcatggtgaaatcataaga

SEQ ID NO: 113034 - DNA, 120 bp, synthetic construct; identical to SEQ ID NO: 891
  source 1..120: mol_type = other DNA

SEQ ID NO: 113035 - DNA, 120 bp, synthetic construct
  source 1..120: mol_type = other DNA
catttctcaatatagaaaagttacagtaaaaatatgatattaaagatgctccatcagctggctgatatgcctataatccgagcactttgggaggctggggcaggtggactgcttgagtcc

SEQ ID NO: 113036 - DNA, 120 bp, synthetic construct
  source 1..120: mol_type = other DNA
gatggaaaatattcagaaaataaattggacggttatgtttctattgaacatgtgcagagtttgttcttgtcattattccctaaagaatccagtatcacgaccatttatgtagcatctgca

SEQ ID NO: 113037 - DNA, 120 bp, synthetic construct
  source 1..120: mol_type = other DNA
ggggacatttgggaacagcacccactctacgaagccaccatggagacgaaagagccaatcgtctacacgggcagtgtagaacgggcgcctggtgagtgctcagggatgaccctcctcggt

SEQ ID NO: 113038 - DNA, 120 bp, synthetic construct
  source 1..120: mol_type = other DNA
tgaaatggggacacaccggccccagcaggttgaatggtttccacctgccaagggtgaagggcccatgatgggctattccagggatgtggaggcagactggggtcagcgaccagaggtctc

SEQ ID NO: 113039 - DNA, 120 bp, synthetic construct
  source 1..120: mol_type = other DNA
agcctgagggtctggccctgtctacttggagacaaacccggtgagatgcaagggttatggccacagggtgaggggactcctggcccagcctcagggctgttgtgcagcaggtctctgagg

SEQ ID NO: 113040 - DNA, 120 bp, synthetic construct; identical to SEQ ID NO: 17930
  source 1..120: mol_type = other DNA

SEQ ID NO: 113041 - DNA, 120 bp, synthetic construct
  source 1..120: mol_type = other DNA
cagtcctcctgaacattgaggaaatgaagttgaaaaaccccggaagataccaggtacgctcagccagagcacaacaaacaggacaggccgtgtcggggcccaggtctccagctggaggga

SEQ ID NO: 113042 - DNA, 120 bp, synthetic construct
  source 1..120: mol_type = other DNA
ggcagccagttgggcagtggctcacaaagctcgatggacttgaaccacacatccccaaagtgtcacagatattgaacccactgatttgcaaactgacatccacatgaaaccagcatgcca

SEQ ID NO: 113043 - DNA, 120 bp, synthetic construct; identical to SEQ ID NO: 17928
  source 1..120: mol_type = other DNA

SEQ ID NO: 113044 - DNA, 120 bp, synthetic construct
  source 1..120: mol_type = other DNA
ccagacgggagggtgggaggccttggggtttgggggcctctccagctgcccagctcttgcagctgatggctccacatcttgggggaaggctctgatttcatgatgggctgggggcttctc

SEQ ID NO: 113045 - DNA, 120 bp, synthetic construct
  source 1..120: mol_type = other DNA
tgcgcagctcgagccaccagccccagcctggaaggaccaggttctttcacacctgctgtccccacagatctctctcgggctcaccctgcgcctgtgggacgtgtatctggtagaaggcga

SEQ ID NO: 113046 - DNA, 120 bp, synthetic construct
  source 1..120: mol_type = other DNA
atgctctgtgggtcagagacacggattcccttgtctccctggctccaggcttcttgtcctggcaaccttggaggagcgtgcaggagtgaggggcctctgctgctctctgaggctgtgggt

SEQ ID NO: 113047 - DNA, 120 bp, synthetic construct; identical to SEQ ID NO: 112984
  source 1..120: mol_type = other DNA

SEQ ID NO: 113048 - DNA, 120 bp, synthetic construct
  source 1..120: mol_type = other DNA
agataacagttcacattattatttagttaatagaactgtacccacattaaatttcttaaatttttttaagagataaagtctcactctgtcacccaggctggagtgcagtggtgcaatcat

SEQ ID NO: 113049 - DNA, 120 bp, synthetic construct
  source 1..120: mol_type = other DNA
ccatcggcaagccctggaggctctgcctccaaaatcctgcctatcccatgtgcaaacgcctctcaccacgtccactgctatttgcagttgtgtgtgtgtggaaatacttccacaaatttg

SEQ ID NO: 113050 - DNA, 120 bp, synthetic construct
  source 1..120: mol_type = other DNA
caggggaatgcagaagaggcttgcttattctcccatttaatgctcaggacaatatctgacatcaatgttacgtcttttattttataaatgaagacaatgagactcagaaaggtttaagtg

SEQ ID NO: 113051 - DNA, 120 bp, synthetic construct
  source 1..120: mol_type = other DNA
aaagtggcttttgctcaaaatagcctttgataggttaaggtactcctctgccactctaagtctgtgtggaacagacagggttttgcttcacagagaagatgcataaaatttggtcttaaa

SEQ ID NO: 113052 - DNA, 120 bp, synthetic construct
  source 1..120: mol_type = other DNA
gagagctgacagaataaaactagcagtaataatctggtaaattgtgctttctacagagtaaattttgtttgtctcatgacatttatgcaaatattcaaatgtttcaggaatataaacatt

SEQ ID NO: 113053 - DNA, 120 bp, synthetic construct; identical to SEQ ID NO: 112947
  source 1..120: mol_type = other DNA

SEQ ID NO: 113054 - DNA, 120 bp, synthetic construct; identical to SEQ ID NO: 112885
  source 1..120: mol_type = other DNA

SEQ ID NO: 113055 - DNA, 120 bp, synthetic construct; identical to SEQ ID NO: 112886
  source 1..120: mol_type = other DNA

SEQ ID NO: 113056 - DNA, 120 bp, synthetic construct
  source 1..120: mol_type = other DNA
aggattttggaggcagagcctccagggcttgccgatgggttagctgcagggcttgagagggaacggagaatccaggatgatgtgttcaaatcggtccattcacctcttccgttccacgcc

SEQ ID NO: 113057 - DNA, 120 bp, synthetic construct
  source 1..120: mol_type = other DNA
attctagccttcataaccttagataacagttcacattattatttagttaatagaactgtacccacattaaatttcttaaatttttttaagagataaagtctcactctgtcacccaggctg

SEQ ID NO: 113058 - DNA, 120 bp, synthetic construct
  source 1..120: mol_type = other DNA
gccattatgatttcagacagagctgctgggtccgtgccatatcccaggaggaccagctggccccctgctggcaggctgaacaccctgcggagcgggtgagatcggctttcgctgcaccca

SEQ ID NO: 113059 - DNA, 120 bp, synthetic construct; identical to SEQ ID NO: 113046
  source 1..120: mol_type = other DNA

SEQ ID NO: 113060 - DNA, 120 bp, synthetic construct
  source 1..120: mol_type = other DNA
gaacagaggatcatgaggacagtgtgaggaagctgccctcgggccagtcggggtctgaccccagggctccccaggccccgctgggcacacgtagacttactctgctgaaccttaaaggcg

SEQ ID NO: 113061 - DNA, 120 bp, synthetic construct
  source 1..120: mol_type = other DNA
cctcgtggggctggtgactggctgagtcccagccagggcctgacctgggacgtcgggttctccatgggctgggagttggtttcctttcctgccctggaggagacagaggcacagggatgg

SEQ ID NO: 113062 - DNA, 120 bp, synthetic construct
  source 1..120: mol_type = other DNA
gccacatcgccgccttgttcctcctctatcttcctgaggaggatgcattctgggcactggtgcagctgctggccagtgagaggcactccctgcagggtaagtgaacagctgccccgggga

SEQ ID NO: 113063 - DNA, 120 bp, synthetic construct; identical to SEQ ID NO: 17963
  source 1..120: mol_type = other DNA

SEQ ID NO: 113064 - DNA, 120 bp, synthetic construct
  source 1..120: mol_type = other DNA
tatcgatccctgaagaacatatgcttccttaatgtcccgcttatgtcccggtcgatgcgctggatgtgctcagatgacctcttgcccttctccttcatgatctgtagggcagggccaaga

SEQ ID NO: 113065 - DNA, 120 bp, synthetic construct
  source 1..120: mol_type = other DNA
cttcctccctccacacgttacctttctgctgcttttgtatttctcccagtctcccagcatatccacccacttgctctttcggctgatctcccgccgaatttgctgtcaaatgaggcatgt

SEQ ID NO: 113066 - DNA, 120 bp, synthetic construct
  source 1..120: mol_type = other DNA
cttgcagattctgacctcccagcatccacctgcctctccctgcacccgagccacacaccctgcgtttcagaagtggcacggctcatcagctccctcccgccctacctccccagggatcct

SEQ ID NO: 113067 - DNA, 120 bp, synthetic construct; identical to SEQ ID NO: 17939
  source 1..120: mol_type = other DNA

SEQ ID NO: 113068 - DNA, 120 bp, synthetic construct
  source 1..120: mol_type = other DNA
gtttcccatcccgatggggcagagcctggtcctggcagagccactggtatagagccactggtacagatccactgacggtcctcagaacacctctgtgccctaagctgggtcctgatggtc

SEQ ID NO: 113069 - DNA, 120 bp, synthetic construct
  source 1..120: mol_type = other DNA
cacgttatctaaaacctggttcatctgtccttccacgcagggcctaggggatgccgaattccagggtccagaaagagcttgggataaaaagaaacttcaaggggacggctttgacctggg

SEQ ID NO: 113070 - DNA, 120 bp, synthetic construct
  source 1..120: mol_type = other DNA
cctgcttccccttcgccttctgccatgactgtaagttccctgaactgggagtcgattaaacctctttcctttataaattacctaggctcaagtatttctttatagcagtgtgaaaacaaa

SEQ ID NO: 113071 - DNA, 120 bp, synthetic construct
  source 1..120: mol_type = other DNA
gagatgggcctgggctgctgtcctctgctttggcctcagcagatcacacgatggaagctggcagccccgtgggcaccactcgagccagctgtgacctgcagtttctgcttcctggagtgt

SEQ ID NO: 113072 - DNA, 120 bp, synthetic construct
  source 1..120: mol_type = other DNA
catacataaatacattcacatgtatatacctgcacacacacacatgcacacacatacacatgcatattcctgcaaacacacacacacacacacacacacacacacacacacacacgctgt

SEQ ID NO: 113073 - DNA, 120 bp, synthetic construct
  source 1..120: mol_type = other DNA
ccctgatgacaccttgatcttggacccacggcctccagtactgtgagacagtaacattctgttgctgaaggtgcccagtctgtggtactgtaaaacagccctaggaaactaacacagcct

SEQ ID NO: 113074 - DNA, 120 bp, synthetic construct; identical to SEQ ID NO: 112947
  source 1..120: mol_type = other DNA

SEQ ID NO: 113075 - DNA, 120 bp, synthetic construct; identical to SEQ ID NO: 112885
  source 1..120: mol_type = other DNA

SEQ ID NO: 113076 - DNA, 120 bp, synthetic construct; identical to SEQ ID NO: 112886
  source 1..120: mol_type = other DNA

SEQ ID NO: 113077 - DNA, 120 bp, synthetic construct; identical to SEQ ID NO: 113056
  source 1..120: mol_type = other DNA

SEQ ID NO: 113078 - DNA, 120 bp, synthetic construct; identical to SEQ ID NO: 113057
  source 1..120: mol_type = other DNA

SEQ ID NO: 113079 - DNA, 120 bp, synthetic construct; identical to SEQ ID NO: 113058
  source 1..120: mol_type = other DNA

SEQ ID NO: 113080 - DNA, 120 bp, synthetic construct; identical to SEQ ID NO: 113046
  source 1..120: mol_type = other DNA

SEQ ID NO: 113081 - DNA, 120 bp, synthetic construct; identical to SEQ ID NO: 113060
  source 1..120: mol_type = other DNA

SEQ ID NO: 113082 - DNA, 120 bp, synthetic construct; identical to SEQ ID NO: 113061
  source 1..120: mol_type = other DNA

SEQ ID NO: 113083 - DNA, 120 bp, synthetic construct; identical to SEQ ID NO: 113062
  source 1..120: mol_type = other DNA

SEQ ID NO: 113084 - DNA, 120 bp, synthetic construct; identical to SEQ ID NO: 17963
  source 1..120: mol_type = other DNA

SEQ ID NO: 113085 - DNA, 120 bp, synthetic construct; identical to SEQ ID NO: 113064
  source 1..120: mol_type = other DNA

SEQ ID NO: 113086 - DNA, 120 bp, synthetic construct; identical to SEQ ID NO: 113065
  source 1..120: mol_type = other DNA

SEQ ID NO: 113087 - DNA, 120 bp, synthetic construct; identical to SEQ ID NO: 17940
  source 1..120: mol_type = other DNA

SEQ ID NO: 113088 - DNA, 120 bp, synthetic construct; identical to SEQ ID NO: 17939
  source 1..120: mol_type = other DNA

SEQ ID NO: 113089 - DNA, 120 bp, synthetic construct; identical to SEQ ID NO: 113068
  source 1..120: mol_type = other DNA

SEQ ID NO: 113090 - DNA, 120 bp, synthetic construct; identical to SEQ ID NO: 17978
  source 1..120: mol_type = other DNA

SEQ ID NO: 113091 - DNA, 120 bp, synthetic construct; identical to SEQ ID NO: 17938
  source 1..120: mol_type = other DNA

SEQ ID NO: 113092 - DNA, 120 bp, synthetic construct; identical to SEQ ID NO: 890
  source 1..120: mol_type = other DNA

SEQ ID NO: 113093 - DNA, 120 bp, synthetic construct
  source 1..120: mol_type = other DNA
atagaactgttccaccaaggcaacaattattgctattttaatggtgaaatcagttttattaggcaaattgactcaggcttcagactggcatttggaattgtcacactggagattttcttt

SEQ ID NO: 113094 - DNA, 120 bp, synthetic construct
  source 1..120: mol_type = other DNA
ataagacaagatgctgaccaatttttaaaatgtgaatggatttctatttttaagataagtacctttgttcctttggttcctccctcccacccttccagaaatggtagtatcctggaaaaa

SEQ ID NO: 113095 - DNA, 120 bp, synthetic construct
  source 1..120: mol_type = other DNA
agctcccaaagtgtgctacaggacccctggatgggtgtaggtatgcaagataattttgggtggtgcagggtgaataatttcaaatgacataaaaatgtgtttctcttactgggtaaatca

SEQ ID NO: 113096 - DNA, 120 bp, synthetic construct; identical to SEQ ID NO: 113072
  source 1..120: mol_type = other DNA

SEQ ID NO: 113097 - DNA, 120 bp, synthetic construct; identical to SEQ ID NO: 113071
  source 1..120: mol_type = other DNA

SEQ ID NO: 113098 - DNA, 120 bp, synthetic construct
  source 1..120: mol_type = other DNA
gggggaacctgtccccagatcccatcccctcccaccaggttcctcccttgacacaggaggattacaattccagatgagatttgggtggggacacagagcccaacctgtgagggtctcagt

SEQ ID NO: 113099 - DNA, 120 bp, synthetic construct
  source 1..120: mol_type = other DNA
cgtatccaggagctctgcatctgtagattcagcaacagcagatggaaaatattcagaaaataaattggacggttatgtttctattgaacatgtgcagagtttgttcttgtcattattccc

SEQ ID NO: 113100 - DNA, 120 bp, synthetic construct; identical to SEQ ID NO: 113037
  source 1..120: mol_type = other DNA

SEQ ID NO: 113101 - DNA, 120 bp, synthetic construct; identical to SEQ ID NO: 113038
  source 1..120: mol_type = other DNA

SEQ ID NO: 113102 - DNA, 120 bp, synthetic construct; identical to SEQ ID NO: 113039
  source 1..120: mol_type = other DNA

SEQ ID NO: 113103 - DNA, 120 bp, synthetic construct; identical to SEQ ID NO: 17930
  source 1..120: mol_type = other DNA

SEQ ID NO: 113104 - DNA, 120 bp, synthetic construct; identical to SEQ ID NO: 113041
  source 1..120: mol_type = other DNA

SEQ ID NO: 113105 - DNA, 120 bp, synthetic construct; identical to SEQ ID NO: 113042
  source 1..120: mol_type = other DNA

SEQ ID NO: 113106 - DNA, 120 bp, synthetic construct; identical to SEQ ID NO: 17928
  source 1..120: mol_type = other DNA

SEQ ID NO: 113107 - DNA, 120 bp, synthetic construct; identical to SEQ ID NO: 113044
  source 1..120: mol_type = other DNA

SEQ ID NO: 113108 - DNA, 120 bp, synthetic construct; identical to SEQ ID NO: 113045
  source 1..120: mol_type = other DNA

SEQ ID NO: 113109 - DNA, 120 bp, synthetic construct; identical to SEQ ID NO: 113046
  source 1..120: mol_type = other DNA

SEQ ID NO: 113110 - DNA, 120 bp, synthetic construct; identical to SEQ ID NO: 112984
  source 1..120: mol_type = other DNA

SEQ ID NO: 113111 - DNA, 120 bp, synthetic construct; identical to SEQ ID NO: 113048
  source 1..120: mol_type = other DNA

SEQ ID NO: 113112 - DNA, 120 bp, synthetic construct; identical to SEQ ID NO: 113049
  source 1..120: mol_type = other DNA

SEQ ID NO: 113113 - DNA, 120 bp, synthetic construct; identical to SEQ ID NO: 113050
  source 1..120: mol_type = other DNA

SEQ ID NO: 113114 - DNA, 120 bp, synthetic construct; identical to SEQ ID NO: 113051
  source 1..120: mol_type = other DNA

SEQ ID NO: 113115 - DNA, 120 bp, synthetic construct; identical to SEQ ID NO: 113052
  source 1..120: mol_type = other DNA

SEQ ID NO: 113116 - DNA, 120 bp, synthetic construct; identical to SEQ ID NO: 112947
  source 1..120: mol_type = other DNA

SEQ ID NO: 113117 - DNA, 120 bp, synthetic construct; identical to SEQ ID NO: 112885
  source 1..120: mol_type = other DNA

SEQ ID NO: 113118 - DNA, 120 bp, synthetic construct; identical to SEQ ID NO: 112886
  source 1..120: mol_type = other DNA

SEQ ID NO: 113119 - DNA, 120 bp, synthetic construct; identical to SEQ ID NO: 113056
  source 1..120: mol_type = other DNA

SEQ ID NO: 113120 - DNA, 120 bp, synthetic construct; identical to SEQ ID NO: 113057
  source 1..120: mol_type = other DNA

SEQ ID NO: 113121 - DNA, 120 bp, synthetic construct; identical to SEQ ID NO: 113058
  source 1..120: mol_type = other DNA

SEQ ID NO: 113122 - DNA, 120 bp, synthetic construct; identical to SEQ ID NO: 113046
  source 1..120: mol_type = other DNA

SEQ ID NO: 113123 - DNA, 120 bp, synthetic construct; identical to SEQ ID NO: 113060
  source 1..120: mol_type = other DNA

SEQ ID NO: 113124 - DNA, 120 bp, synthetic construct; identical to SEQ ID NO: 113061
  source 1..120: mol_type = other DNA

SEQ ID NO: 113125 - DNA, 120 bp, synthetic construct; identical to SEQ ID NO: 113062
  source 1..120: mol_type = other DNA

SEQ ID NO: 113126 - DNA, 120 bp, synthetic construct; identical to SEQ ID NO: 17963
  source 1..120: mol_type = other DNA

SEQ ID NO: 113127 - DNA, 120 bp, synthetic construct; identical to SEQ ID NO: 113064
  source 1..120: mol_type = other DNA

SEQ ID NO: 113128 - DNA, 120 bp, synthetic construct; identical to SEQ ID NO: 113065
  source 1..120: mol_type = other DNA

SEQ ID NO: 113129 - DNA, 120 bp, synthetic construct; identical to SEQ ID NO: 113066
  source 1..120: mol_type = other DNA

SEQ ID NO: 113130 - DNA, 120 bp, synthetic construct; identical to SEQ ID NO: 17939
  source 1..120: mol_type = other DNA

SEQ ID NO: 113131 - DNA, 120 bp, synthetic construct; identical to SEQ ID NO: 113068
  source 1..120: mol_type = other DNA

SEQ ID NO: 113132 - DNA, 120 bp, synthetic construct
  source 1..120: mol_type = other DNA
gttaggggctcactcttctagacatgttatctaaaacctggttcatctgtccttccacacagggcctaggggatgccaaattccaggggccagaaagagcttgggataaaaagaaacttc

SEQ ID NO: 113133 - DNA, 120 bp, synthetic construct; identical to SEQ ID NO: 17938
  source 1..120: mol_type = other DNA

SEQ ID NO: 113134 - DNA, 120 bp, synthetic construct
  source 1..120: mol_type = other DNA
agtccatatctgttctttttttttttttttttttttttgagacagagtcttgctctgtcgccaaggccggagtgcagtggcgtgatctcagctcactgcaacctccgcctcccgggttta

SEQ ID NO: 113135 - DNA, 120 bp, synthetic construct
  source 1..120: mol_type = other DNA
ttcctacgtatagtttaaaactttaattgcatattagtagccacaaacatcacataccaatattctgtgccttttgcatttttacattaatggtaattatttttgaccttctgcaaatgg

SEQ ID NO: 113136 - DNA, 120 bp, synthetic construct
  source 1..120: mol_type = other DNA
agtgccatataatacaatacatagtttttaaacttcatatcattctgatcagaagctttataaactgttaggtgaatgctgttagatgatatgagagcacaatttaacctgtgtgtgtgt

SEQ ID NO: 113137 - DNA, 120 bp, synthetic construct; identical to SEQ ID NO: 24134
  source 1..120: mol_type = other DNA

SEQ ID NO: 113138 - DNA, 120 bp, synthetic construct
  source 1..120: mol_type = other DNA
ggtactggttccaaaacagagatataaaccaatggaaaagaacagaggcctcagaaagaataccacaatggccatactgcccaaggtaatttacagattcaatgccatccccatcaagct

SEQ ID NO: 113139 - DNA, 120 bp, synthetic construct
  source 1..120: mol_type = other DNA
atcaaaaccacatgagatatcatctcacaccagttagaatggcaatcattaaaaagtcaggaaacaacaggtgctggagaggatgtggagaaataggaacacttttacactgttggtggg

SEQ ID NO: 113140 - DNA, 120 bp, synthetic construct; identical to SEQ ID NO: 24135
  source 1..120: mol_type = other DNA

SEQ ID NO: 113141 - DNA, 120 bp, synthetic construct
  source 1..120: mol_type = other DNA
gaacaggggatcacaagctttcccacctaaacatccctaaataaatgccacaacagacaatgacctcatacatatgagagtctgggaatagaacccaaaattgctatagtgtcaattttc

SEQ ID NO: 113142 - DNA, 120 bp, synthetic construct
  source 1..120: mol_type = other DNA
tgacccccccccacctccctcccggacggggtggctgccgggcggagatgctcctcacttcccagatggggtggctgccgggcggagaggctcctcacttctcagacggggcagctgtcg

SEQ ID NO: 113143 - DNA, 120 bp, synthetic construct; identical to SEQ ID NO: 5058
  source 1..120: mol_type = other DNA

SEQ ID NO: 113144 - DNA, 120 bp, synthetic construct; identical to SEQ ID NO: 24127
  source 1..120: mol_type = other DNA

SEQ ID NO: 113145 - DNA, 120 bp, synthetic construct
  source 1..120: mol_type = other DNA
agattcaacttcttcctggtttagtcttgggagagtgtatgtgttgaggaatttatccatttcttctagattttctagtttatttgcgtagaggtgttggtagtattctctgatggtagg

SEQ ID NO: 113146 - DNA, 120 bp, synthetic construct
  source 1..120: mol_type = other DNA
cacagaattggaaaaaactactttaaagttcatatggtaccaaaaaagagcccgcatcgccaagtcaatcctaagccaaaagaacgaagctggaggcatcatgctacctgacttcaaact

SEQ ID NO: 113147 - DNA, 120 bp, synthetic construct
  source 1..120: mol_type = other DNA
gctggagagtatgtggagaaataggaacacttttacactgttggtgggacggtaaactagttcaaccattgtggaagtcagtgtggcgattcctcagggatctagaactagaaatactat

SEQ ID NO: 113148 - DNA, 120 bp, synthetic construct
  source 1..120: mol_type = other DNA
ctaatttttttaagtgcaataccaatcaataattggcaaacaaaagacaactcaatatgttaattaggctgggcgcagtggctcacacgtgtaaccccagcactttgggaagcccgggcg

SEQ ID NO: 113149 - DNA, 120 bp, synthetic construct
  source 1..120: mol_type = other DNA
tgtcagcttgcagatggcctattgtgggacttcaccatgatcatgtgagtcaatactccttaataaactcccctttatatatacatctttcctaacagttctgtccctctagagaacgct

SEQ ID NO: 113150 - DNA, 120 bp, synthetic construct; identical to SEQ ID NO: 5059
  source 1..120: mol_type = other DNA

SEQ ID NO: 113151 - DNA, 120 bp, synthetic construct; identical to SEQ ID NO: 2205
  source 1..120: mol_type = other DNA

SEQ ID NO: 113152 - DNA, 120 bp, synthetic construct
  source 1..120: mol_type = other DNA
ggatggttgggtcaaatggtatttctagttctagatccctgaggaatcgccacactgacttccacaagggttgaactagtttaccgtcccaccaacagtgtaaaagtgttcctatttctc

SEQ ID NO: 113153 - DNA, 120 bp, synthetic construct; identical to SEQ ID NO: 24132
  source 1..120: mol_type = other DNA

SEQ ID NO: 113154 - DNA, 120 bp, synthetic construct; identical to SEQ ID NO: 24133
  source 1..120: mol_type = other DNA

SEQ ID NO: 113155 - DNA, 120 bp, synthetic construct
  source 1..120: mol_type = other DNA
aatggagatcattaaaaagtcaggaaacaacaggtgctggagaggatgtagagaaacaggaacacttttacactgttggtgggactgtaaactagttcaaccattgtggaagtcagtgtg

SEQ ID NO: 113156 - DNA, 120 bp, synthetic construct
  source 1..120: mol_type = other DNA
gaggtaactaacaaaaacaattatcttgaaactgtatacaccaatcattttaaaaatgaaacccatacattgaaccagccttgcaacccagggatgaagcccacttgatcatggtggata

SEQ ID NO: 113157 - DNA, 120 bp, synthetic construct
  source 1..120: mol_type = other DNA
gtggggggagggggaaaggatagctttaggagatatacctaatgctaaatgaggagttaatgggtgcagcacaccagcatggcacatgtatacatatgtaactaacctgcacattgtgca

SEQ ID NO: 113158 - DNA, 120 bp, synthetic construct
  source 1..120: mol_type = other DNA
tctaaaacaccaaaagcaatggcaacaaaagccaaaattgacaaatgggatctaattaaactaaagagcttctgcacagcaaaagaaactaccatcagagtgaacacgcaatcttcaaaa

SEQ ID NO: 113159 - DNA, 120 bp, synthetic construct
  source 1..120: mol_type = other DNA
tcccaactgaaggtcttcatgggcaataacacacacaaagctgtcctctcctgtgccttctggaatagcgcctgaaggacctgcctgaggctgttttacagtttattttttttaataagt

SEQ ID NO: 113160 - DNA, 120 bp, synthetic construct
  source 1..120: mol_type = other DNA
ggtatatctcttaatgctatccctcccccctcccgccaccccacaacaggccccagagtgtgatgttccccttcgtatgttcatgtgttctcattgttcaattcccatctatgagtctga

SEQ ID NO: 113161 - DNA, 120 bp, synthetic construct
  source 1..120: mol_type = other DNA
ctaaatttgtttgagttcattgtaaattctggatattagccctttgtcagatgagtaggttgtgaaaattttctcccattctgtaggttgcctgttcactctgatggtagtttcttttgc

SEQ ID NO: 113162 - DNA, 120 bp, synthetic construct
  source 1..120: mol_type = other DNA
gatatacaatcatgtcgtctgcaaacagggacaatttgacttcctcttttcctaattgaataccctttatttccttctcctgcctaattgccctggccagaacttccaacactatgttga

SEQ ID NO: 113163 - DNA, 120 bp, synthetic construct; identical to SEQ ID NO: 35104
  source 1..120: mol_type = other DNA

SEQ ID NO: 113164 - DNA, 120 bp, synthetic construct
  source 1..120: mol_type = other DNA
aaatcataagagctatctatgacaaacccacagccaatatcatactgaatgggcaaaaactggaagcattcccttttgaaaactggcacaagacagggatgccctctctcaccactccta

SEQ ID NO: 113165 - DNA, 120 bp, synthetic construct
  source 1..120: mol_type = other DNA
taggcgttaccattcagtacataggcatgggcaaggacttcatgtctaaaacaccaaaagcaatggcaacaaaagccaaaattgacaaatgggatctaattaaactaaagagcttctgca

SEQ ID NO: 113166 - DNA, 120 bp, synthetic construct; identical to SEQ ID NO: 35105
  source 1..120: mol_type = other DNA

SEQ ID NO: 113167 - DNA, 120 bp, synthetic construct
  source 1..120: mol_type = other DNA
tagtttgttaattgtataatttttattttattttattttattttattgagacggagtcttgctctgtcgcccaggctggagtgcggcctcggcttactgcaagctccacctcctgggttc

SEQ ID NO: 113168 - DNA, 120 bp, synthetic construct
  source 1..120: mol_type = other DNA
gtgagaacatgcgatgtttcattttttgtccttgcgatattttgctgagaatgatggtttccagtttcatccatgtccctacaaaggacatgaactcatcattttttatggctgcatagt

SEQ ID NO: 113169 - DNA, 120 bp, synthetic construct
  source 1..120: mol_type = other DNA
gtctaacatgtaagtctgtaatccatcttgaattaatttttgtataaggtgtaaggaagggatccagtttcagctttctacatatggctagccagttttcccagcaccatttattaaata

SEQ ID NO: 113170 - DNA, 120 bp, synthetic construct; identical to SEQ ID NO: 35107
  source 1..120: mol_type = other DNA

SEQ ID NO: 113171 - DNA, 120 bp, synthetic construct; identical to SEQ ID NO: 25797
  source 1..120: mol_type = other DNA

SEQ ID NO: 113172 - DNA, 120 bp, synthetic construct
  source 1..120: mol_type = other DNA
atctggctcttgactggtatctcaccatgctctgccctttaccaagttatcacaccaggtactttactttcagaatcccatggaatccaacactattccttggttgtcgtggatagaaaa

SEQ ID NO: 113173 - DNA, 120 bp, synthetic construct; identical to SEQ ID NO: 25798
  source 1..120: mol_type = other DNA

SEQ ID NO: 113174 - DNA, 120 bp, synthetic construct; identical to SEQ ID NO: 27372
  source 1..120: mol_type = other DNA

SEQ ID NO: 113175 - DNA, 120 bp, synthetic construct; identical to SEQ ID NO: 27373
  source 1..120: mol_type = other DNA

SEQ ID NO: 113176 - DNA, 120 bp, synthetic construct; identical to SEQ ID NO: 26838
  source 1..120: mol_type = other DNA

SEQ ID NO: 113177 - DNA, 120 bp, synthetic construct; identical to SEQ ID NO: 26839
  source 1..120: mol_type = other DNA

SEQ ID NO: 113178 - DNA, 120 bp, synthetic construct; identical to SEQ ID NO: 18692
  source 1..120: mol_type = other DNA

SEQ ID NO: 113179 - DNA, 120 bp, synthetic construct; identical to SEQ ID NO: 18693
  source 1..120: mol_type = other DNA

SEQ ID NO: 113180 - DNA, 120 bp, synthetic construct; identical to SEQ ID NO: 18698
  source 1..120: mol_type = other DNA

SEQ ID NO: 113181 - DNA, 120 bp, synthetic construct; identical to SEQ ID NO: 18677
  source 1..120: mol_type = other DNA

SEQ ID NO: 113182 - DNA, 120 bp, synthetic construct; identical to SEQ ID NO: 18678
  source 1..120: mol_type = other DNA

SEQ ID NO: 113183 - DNA, 120 bp, synthetic construct; identical to SEQ ID NO: 18694
  source 1..120: mol_type = other DNA

SEQ ID NO: 113184 - DNA, 120 bp, synthetic construct; identical to SEQ ID NO: 18695
  source 1..120: mol_type = other DNA

SEQ ID NO: 113185 - DNA, 120 bp, synthetic construct; identical to SEQ ID NO: 18696
  source 1..120: mol_type = other DNA

SEQ ID NO: 113186 - DNA, 120 bp, synthetic construct; identical to SEQ ID NO: 18697
  source 1..120: mol_type = other DNA

SEQ ID NO: 113187 - DNA, 120 bp, synthetic construct; identical to SEQ ID NO: 18679
  source 1..120: mol_type = other DNA

SEQ ID NO: 113188 - DNA, 120 bp, synthetic construct; identical to SEQ ID NO: 18680
  source 1..120: mol_type = other DNA

SEQ ID NO: 113189 - DNA, 120 bp, synthetic construct; identical to SEQ ID NO: 18681
  source 1..120: mol_type = other DNA

SEQ ID NO: 113190 - DNA, 120 bp, synthetic construct; identical to SEQ ID NO: 18682
  source 1..120: mol_type = other DNA

SEQ ID NO: 113191 - DNA, 120 bp, synthetic construct; identical to SEQ ID NO: 18683
  source 1..120: mol_type = other DNA

SEQ ID NO: 113192 - DNA, 120 bp, synthetic construct; identical to SEQ ID NO: 18684
  source 1..120: mol_type = other DNA

SEQ ID NO: 113193 - DNA, 120 bp, synthetic construct; identical to SEQ ID NO: 18685
  source 1..120: mol_type = other DNA

SEQ ID NO: 113194 - DNA, 120 bp, synthetic construct; identical to SEQ ID NO: 18686
  source 1..120: mol_type = other DNA

SEQ ID NO: 113195 - DNA, 120 bp, synthetic construct; identical to SEQ ID NO: 18687
  source 1..120: mol_type = other DNA

SEQ ID NO: 113196 - DNA, 120 bp, synthetic construct; identical to SEQ ID NO: 18688
  source 1..120: mol_type = other DNA

SEQ ID NO: 113197 - DNA, 120 bp, synthetic construct; identical to SEQ ID NO: 18689
  source 1..120: mol_type = other DNA

SEQ ID NO: 113198 - DNA, 120 bp, synthetic construct; identical to SEQ ID NO: 18690
  source 1..120: mol_type = other DNA

SEQ ID NO: 113199 - DNA, 120 bp, synthetic construct; identical to SEQ ID NO: 18691
  source 1..120: mol_type = other DNA

SEQ ID NO: 113200 - DNA, 120 bp, synthetic construct
  source 1..120: mol_type = other DNA
tgagccgagaccacgccactgcaccccagcctgggcgacagagcgagactccttctccaaaaaaaaaaaaaaaaaaaaaaaaaaagactgatttgctttattgtaattggcctgattatt

SEQ ID NO: 113201 - DNA, 120 bp, synthetic construct
  source 1..120: mol_type = other DNA
tgtttcctgactttttaatgattgccattctaactgatgtgagatggtatctcattgaggttttgatttgcatttctctgatggccagtgatggtgagcattttttcatgtgttttttgg

SEQ ID NO: 113202 - DNA, 120 bp, synthetic construct
  source 1..120: mol_type = other DNA
accttaggcagtatggccattttcacgatattaattcttcctacccatgagcatggaatgttcttccatttgtttgtatcctcttttatttcattgagcagtggtttgtagttctccttg

SEQ ID NO: 113203 - DNA, 120 bp, synthetic construct
  source 1..120: mol_type = other DNA
tatcaggatgatgctggcctcataaaatgagttagggaggattccctctttttctattgattggaatagtttcagaaggaatggtacctgttcctccttgtacctctggtagaattcggc

SEQ ID NO: 113204 - DNA, 120 bp, synthetic construct
  source 1..120: mol_type = other DNA
agagttctgtagatgtctattacgtccgcttggtgcagagctgagttcaattcctggctatccttgttaactttctgtctcgttgatctgtctaatgttgacagtggggtgttaaagtct

SEQ ID NO: 113205 - DNA, 120 bp, synthetic construct
  source 1..120: mol_type = other DNA
gaatctgattgttggcttgccttgctagattggggaagttctcctggataatatcctgcagagtgttttccaacttggttccattctccccgtcactttcaggtacaccaatcagacgta

SEQ ID NO: 113206 - DNA, 120 bp, synthetic construct
  source 1..120: mol_type = other DNA
acttgaggaggcagtctgcctgttctcagatctccagctgcatgctgggagaaccactgctctcttcaaagctgtcagacggggacatttaagtctgcagaggttactgctgcctttttg

SEQ ID NO: 113207 - DNA, 120 bp, synthetic construct; identical to SEQ ID NO: 9476
  source 1..120: mol_type = other DNA

SEQ ID NO: 113208 - DNA, 120 bp, synthetic construct
  source 1..120: mol_type = other DNA
ggcaacagagggagactctatctccaaaaaaaattataataaaggaataacgaatggctactccataggcagaacagtcccgaggactgctgggtgcccatttttatggttatttcttga

SEQ ID NO: 113209 - DNA, 120 bp, synthetic construct
  source 1..120: mol_type = other DNA
tttaatttcctgcataatcagcttccccctattccactgaattaatttcatcaacatacaaggtggatattttctcctgtcttaagcaatctccctcctttgacccctgtgccccttcag

SEQ ID NO: 113210 - DNA, 120 bp, synthetic construct
  source 1..120: mol_type = other DNA
tggtcaacaccactaataaagagagaaatgcaaatcaaaaccacaatgtgagaggagccaagatggccgaataggaacagctcgggtctacagctcccagcctgagcgacgcagaagatg

SEQ ID NO: 113211 - DNA, 120 bp, synthetic construct
  source 1..120: mol_type = other DNA
aagatgggaaaaaaacagaacagaaaaactggaaactctaaaacgcagagctcctctcctcctccaaaggaacgcagttcctcaccagcaacggaacaaagctggatggagaatgacttt

SEQ ID NO: 113212 - DNA, 120 bp, synthetic construct
  source 1..120: mol_type = other DNA
aaaaccactcaactacatggaaactgaacaacctgctcctgaatgactactggatacatgacgaaatgaaggcagaaataaagatgttctttgaaaccaacgagaacaaagacacaacat

SEQ ID NO: 113213 - DNA, 120 bp, synthetic construct
  source 1..120: mol_type = other DNA
aattcaacaacccttcatgctaaaaactctcaataaatgaggtattgatgggacgtatttcaaaataataagagctatctatgacaaacccacagccaatatcatactgaatgggcaaaa

SEQ ID NO: 113214 - DNA, 120 bp, synthetic construct
  source 1..120: mol_type = other DNA
aaataacgtcgcatatctacaactacctgatctttgacaaacctgagaaaaacaagcaatggggaaaggattccctatttaataaatggtgctgggaaaactggctagccatatgtagaa

SEQ ID NO: 113215 - DNA, 120 bp, synthetic construct
  source 1..120: mol_type = other DNA
gtttattgcggcattattcacaatagcaaagacttggagccaacccaaatgtccaacaatgatagactggattaagaaaatgtggcacatatacaccatggaatactatgcagccataaa

SEQ ID NO: 113216 - DNA, 120 bp, synthetic construct
  source 1..120: mol_type = other DNA
ggctgggggaggggcgcccaccattgcccaggcttgcttaggtaaacaaagcagcccggaagctcgaactgggtggagcctaccacagctcaaggaggcctgcgtgcctctgtaggctcc

SEQ ID NO: 113217 - DNA, 120 bp, synthetic construct
  source 1..120: mol_type = other DNA
acgagcaaagcctccaagcaatatgggactatgtgaaaagaccaaatctacgtctgattggtgtacctgaaagtgatggggagaatggaaccaagttggaaaacactctgcaggatatta

SEQ ID NO: 113218 - DNA, 120 bp, synthetic construct
  source 1..120: mol_type = other DNA
atcaaaagagacaaagaaggccataacataatggtaaagggatcaattcaacaagaagagctaactatcctaaatatatatgcactcaatacaggagcacccagattcataaagcaagtc

SEQ ID NO: 113219 - DNA, 120 bp, synthetic construct
  source 1..120: mol_type = other DNA
caataaaaaatgataaaggggatatcaccaccgatcccacagaaatacaaactaccatcagagaatactacaaacacctctatgcaaataaactagaaaacctagaagaaatgggtaaat

SEQ ID NO: 113220 - DNA, 120 bp, synthetic construct
  source 1..120: mol_type = other DNA
cagttaggaaaagaggaagtcaaattgtccctgtttgcagatgacatgattgtatatctagaaaaccccattgtctcagccccaaatctcctttagctgataagcaacttcagcaaagtc

SEQ ID NO: 113221 - DNA, 120 bp, synthetic construct
  source 1..120: mol_type = other DNA
gcaataccattcaggacatacgcatgggcaaggacttcatgtctaaaacaccaaaagcaatggcaacaaaagacaaaattgacaaatgggatctaattaaactaaagagcttctgcacag

SEQ ID NO: 113222 - DNA, 120 bp, synthetic construct; identical to SEQ ID NO: 25727
  source 1..120: mol_type = other DNA

SEQ ID NO: 113223 - DNA, 120 bp, synthetic construct
  source 1..120: mol_type = other DNA
ttctcaaaagcgcaaagaccaaaaaaaaaaaaaaaaagccagataaatagccccacttcctccccaaatatacagcccataactaaacaaccaaaacaaccaaagcatcagccgggcccc

SEQ ID NO: 113224 - DNA, 120 bp, synthetic construct
  source 1..120: mol_type = other DNA
caatttctgtcggccgagcgaaaggggtttaaagggcggctcttaaaggggccgcaggaggggcccgggccgacagaggcactcaccccttccccagccgccttccattgcgctcacccg

SEQ ID NO: 113225 - DNA, 120 bp, synthetic construct; identical to SEQ ID NO: 33433
  source 1..120: mol_type = other DNA

SEQ ID NO: 113226 - DNA, 120 bp, synthetic construct
  source 1..120: mol_type = other DNA
tttttttctattgataatagcttttttttttttattattgagacaagtgctgttgcccaggttggagtgtgatggcatgatcacagctcactgtagccttgacctcctgggctcaagcga

SEQ ID NO: 113227 - DNA, 120 bp, synthetic construct
  source 1..120: mol_type = other DNA
gcactacagcctggacagcaaaggaagaccctgtctcaaaaaaaaaaaaaaaaaaaagcaagaaaaaaaaagcatccaggtgtggtggctcacacctataattccagcactttgggaggc

SEQ ID NO: 113228 - DNA, 120 bp, synthetic construct
  source 1..120: mol_type = other DNA
gtagggatggtgctactaattaggtagtagggtgctgcagcaaaccaccatgacacacatacacctgtataactaacctgcacgttctgcgcatgtatcctgttttttttgttttttttt

SEQ ID NO: 113229 - DNA, 120 bp, synthetic construct
  source 1..120: mol_type = other DNA
ccagcctgggtgacagagcaagactccgtctcagaaaaaacaaacaaacaaaaaaacccccaaaaaactccaccaagtctgtttacttatgtgttgtctgttaacagttgcttttgcact

SEQ ID NO: 113230 - DNA, 120 bp, synthetic construct; identical to SEQ ID NO: 33434
  source 1..120: mol_type = other DNA

SEQ ID NO: 113231 - DNA, 120 bp, synthetic construct; identical to SEQ ID NO: 6502
  source 1..120: mol_type = other DNA

SEQ ID NO: 113232 - DNA, 120 bp, synthetic construct
  source 1..120: mol_type = other DNA
caataaggatattatatgagtctgctcaggctgctgtaaccaaagaccacaggctgtgtggcttaaacaatagaaatttcttttctcacaattctggaggctggaagtccaagatcaagg

SEQ ID NO: 113233 - DNA, 120 bp, synthetic construct; identical to SEQ ID NO: 33436
  source 1..120: mol_type = other DNA

SEQ ID NO: 113234 - DNA, 120 bp, synthetic construct
  source 1..120: mol_type = other DNA
cagactagtctcgaactcctgggctcaagcgattcacccaccttcgcctccaaaaaagtgctgggattacaagtgtgagtcactgcgcctgacctatttattgttttttaaagacagagt

SEQ ID NO: 113235 - DNA, 120 bp, synthetic construct
  source 1..120: mol_type = other DNA
cccctcaggtaatatagcaggagggagagaatagggagggcggaaatctgaactgcaagagatggtatcaaaaggcaaggaagggcatttaatgatctgtttttgaaaatggtttaatat

SEQ ID NO: 113236 - DNA, 120 bp, synthetic construct
  source 1..120: mol_type = other DNA
gtttggatgttccacagttcatccattctccagttgctcacatttggggtctttccagtttggagctattgcgaataaaagcactgtaaacatttgtgtagactttgaatgcactgtttt

SEQ ID NO: 113237 - DNA, 120 bp, synthetic construct
  source 1..120: mol_type = other DNA
ccatccgccttggcctcccaaagtgttgggattacaggcatgagccactgtgcctagtcaaaccttttcattattatctgttattgtgatcagtgatctttgatgttactattgtaatta

SEQ ID NO: 113238 - DNA, 120 bp, synthetic construct
  source 1..120: mol_type = other DNA
gaagccaatgctcatgttctgctctaaaaccatagagccttaagaattacgctaaatctactctgcctgtcctcagtaaacagaacaacaaaacctgatgagagcacgtctgtttacagc

SEQ ID NO: 113239 - DNA, 120 bp, synthetic construct
  source 1..120: mol_type = other DNA
gcaggtgtagtggaaatagcaagtgaactagaattagaagtgaacctgaagatgtgactgaattgctgcaattttttgataaaacctgaacagatgaggagttgcttcttgtgagtaagc

SEQ ID NO: 113240 - DNA, 120 bp, synthetic construct; identical to SEQ ID NO: 28633
  source 1..120: mol_type = other DNA

SEQ ID NO: 113241 - DNA, 120 bp, synthetic construct; identical to SEQ ID NO: 28634
  source 1..120: mol_type = other DNA

SEQ ID NO: 113242 - DNA, 120 bp, synthetic construct
  source 1..120: mol_type = other DNA
gtatttgaacctatgtatttgaaatctggactcgatattcttgggatggtgatttccaggtccatgcgagacagttgttgagcagttaattgcattcaaagggcattgcccatttcaact

SEQ ID NO: 113243 - DNA, 120 bp, synthetic construct
  source 1..120: mol_type = other DNA
gtgtctctatattttaatgtatttcacgctataaaacaaatgtctgtagatcaggccaggcacagtggctaatgcctgtaatcccagcactttgggaggctgaggaaggagaatttcttg

SEQ ID NO: 113244 - DNA, 120 bp, synthetic construct
  source 1..120: mol_type = other DNA
ggacgtatataaactactatatactgctagcttttttagatgttgataaaatcacagggaagacatagagcaggttttaaactaaaattgttaaaagccaggcatggtgactcagacctg

SEQ ID NO: 113245 - DNA, 120 bp, synthetic construct
  source 1..120: mol_type = other DNA
aacaaatattttgataactagatgtactatgtccttcctaccagttgtgatttttttgtcaatgggtggttcgcctaacaacattgagcagtttggcatgacctcactaatgattctctc

SEQ ID NO: 113246 - DNA, 120 bp, synthetic construct; identical to SEQ ID NO: 14355
  source 1..120: mol_type = other DNA

SEQ ID NO: 113247 - DNA, 120 bp, synthetic construct
  source 1..120: mol_type = other DNA
aatcaagcgagtgagtataggcagccggtggggtagggtcggccaacagagccggctgggtggggcccctcacctcttcccgtcgcccttctggttgaccagggtttcctccaccctgac

SEQ ID NO: 113248 - DNA, 120 bp, synthetic construct
  source 1..120: mol_type = other DNA
gtctgaggtcctgagatcctaaaaaccctgggagaggttgcctgcctcccactcccatcctgagcatgcacaagcgaaggctgcaatgaggttgtatacagagaggccttgcaaacagtg

SEQ ID NO: 113249 - DNA, 120 bp, synthetic construct
  source 1..120: mol_type = other DNA
tagaagctgacggtggcttcgctgcacagagaaaggccgtgccttggcaggagcaacgggatgttcaaggggcgttggtcatggaggtccctgggaatggaggaagggggcagggagctt

SEQ ID NO: 113250 - DNA, 120 bp, synthetic construct
  source 1..120: mol_type = other DNA
ccgtggagacgaaattgagcaaaggggagaaaacacaaaaaacccaaagaagaaggtaggggagaaacagaaggacacgaaaaggcaataaaaagcaagagcgaaagagaagagagaaaa

SEQ ID NO: 113251 - DNA, 120 bp, synthetic construct
  source 1..120: mol_type = other DNA
ggcccgcgggtcatgatctccgccgtgtccagcccgtggctcacgcagctctcgcatttctgcgacgttgcagccttcacggccagcagcctgagcagcctgggggccgcggggggcttc

SEQ ID NO: 113252 - DNA, 120 bp, synthetic construct
  source 1..120: mol_type = other DNA
tagtaaatcccacctcaagaaaactctggttcagttctggagttcagtctatgcgggcaagataaagagcggcagccgggcaactctctggacactttcaggagaggattacccttaaaa

SEQ ID NO: 113253 - DNA, 120 bp, synthetic construct
  source 1..120: mol_type = other DNA
gaatgtcctttcaagagccctgactggtcactgagccagggtccaaagcgggggagatttgaggaacaggaaagacacaaactgagtacactctgggtagctgcgtcttggggttatgtg

SEQ ID NO: 113254 - DNA, 120 bp, synthetic construct
  source 1..120: mol_type = other DNA
aagggtcgtctgcaccatgaaactctttaggcacctgcgatgctgcccgatcaacccgctccctcctccactcccatctgaccccagacccacaaccctactccatgccctctcagaacc

SEQ ID NO: 113255 - DNA, 120 bp, synthetic construct
  source 1..120: mol_type = other DNA
gtcaggggtcgcacagcctagtgggcctgggccctgggagaggggtcgccctccttctctcaccccactcctgattttatgcaggaagcttttttaatggaaaagatggggccctgcaag

SEQ ID NO: 113256 - DNA, 120 bp, synthetic construct
  source 1..120: mol_type = other DNA
acttcgtcctgaaagtttgttttccgaaccattccggaaactccccatcaggggcctgatctgaggtttacccagattactagggaacccgctctgttccccaccccccaccccactgca

SEQ ID NO: 113257 - DNA, 120 bp, synthetic construct
  source 1..120: mol_type = other DNA
gagggctcggggcgccggcgacttggggtctcgggcacgctggcaccgactggtcggggaacaccgagggcggccaagagccttctctccgccagggcctcgcatggggcgtcggagctc

SEQ ID NO: 113258 - DNA, 120 bp, synthetic construct
  source 1..120: mol_type = other DNA
cggtgtagatacatgtagatactgtagatactgtagataccgccccggcgccgacttgataaacggtttcgcctcttttggaagccgcctgcgtgtccatttatttgtgcccagttagat

SEQ ID NO: 113259 - DNA, 120 bp, synthetic construct
  source 1..120: mol_type = other DNA
ctaggccactcggctcatcaccccacgtggtagcggcagcctgagtgccacctctccgagggcacagccaggagtttccagatgtccaccctcgcggacctgtttttcgtatacatgttt

SEQ ID NO: 113260 - DNA, 120 bp, synthetic construct
  source 1..120: mol_type = other DNA
aactcctgacctcaggtgacccgcctgccttggtcttccaaaatgctgggctttcaggcatgagccatcacactcggccacacgtcctaatgaactaggattcattaaacattcaggtcc

SEQ ID NO: 113261 - DNA, 120 bp, synthetic construct
  source 1..120: mol_type = other DNA
aaaaactctccaaaaacaacagatgcacaacgcaggaaatagatagattcttgactaagcgggggtggggaccatccacacccccttcacaccactgcatcccacggaagggttctagga

SEQ ID NO: 113262 - DNA, 120 bp, synthetic construct
  source 1..120: mol_type = other DNA
ggatgagacctttttccttggtgctacctcacacattttctggatttcaaaaaacacaactggtgcctttgattcaattccctttcctgcttgttgtactacttcaaaccagatgggctc

SEQ ID NO: 113263 - DNA, 120 bp, synthetic construct
  source 1..120: mol_type = other DNA
cctcccaagtaaccgggattacagatgtccgccaccacgcccggctaatttttgtctttttagtagacatgggtttcaccatgttggcctttttttctttttgagacagggtcttgctct

SEQ ID NO: 113264 - DNA, 120 bp, synthetic construct
  source 1..120: mol_type = other DNA
tacggaaacagccacttccatgcaaataatcacccttctgataacaataagtcaagtctcaagggactaagaaaaacaagcagctttattaagatgcagctgaccgatctgaaagcctgc

SEQ ID NO: 113265 - DNA, 120 bp, synthetic construct
  source 1..120: mol_type = other DNA
taaagacttggatatccattaggatgatgatgattttaaaaaacaaaaacagaaaacaacacgtgttggtgaggacatggagcccctggaagccgtctacactgctggtgggactgtaag

SEQ ID NO: 113266 - DNA, 120 bp, synthetic construct
  source 1..120: mol_type = other DNA
agaggttccattttgcgttcatctggaggtggacgcacagcatcgggaatacacaatgccactgaattgtgtacttcaacatggtcacaatggcacattctttattttttgtagagacag

SEQ ID NO: 113267 - DNA, 120 bp, synthetic construct
  source 1..120: mol_type = other DNA
ctgctgtgaggtgggcttcgagggtggctgccaggctgtgctggagagggctgggcatcagaaggctggtgacagccttgcagggagacggagggttaccggagccatccctggaggtgg

SEQ ID NO: 113268 - DNA, 120 bp, synthetic construct
  source 1..120: mol_type = other DNA
tgcaggcaggaagggccagcacacggggtgggaggagcttcctgggtaacgctcaatcccatacgctacagagggcgcatgttattgaacattaaggtttttttaaaaaattttaattta

SEQ ID NO: 113269 - DNA, 120 bp, synthetic construct
  source 1..120: mol_type = other DNA
tcaagtgatcctcttgccttggcctctcaaagtgctgggattacaggcgtgagccaccacacccaaccaggatttattactcttaactagtaaaacagcacattcctgctcatttcaaga

SEQ ID NO: 113270 - DNA, 120 bp, synthetic construct
  source 1..120: mol_type = other DNA
tgagctgagattgcaccactgcactccagcctaggcaacaataagactccgtctcaaacaaataaaataaataaaagtaggtaagggggagatctggttccctgatccgacgtctttcct

SEQ ID NO: 113271 - DNA, 120 bp, synthetic construct
  source 1..120: mol_type = other DNA
ccacggtgaggccaagtgctgctgtccagtaagcctgactgccccctcaggctctttcccttcacatttacttatttattttttaaatcgacatataaaattgacgtatttattgtgtaa

SEQ ID NO: 113272 - DNA, 120 bp, synthetic construct
  source 1..120: mol_type = other DNA
ccagctaattttttgtagttttagtagagacggggttttaccatgttagccaggatggtctcgatctcctgacctcgtgatccacccgcctcagcctcccaaagtgctgggattacaggc

SEQ ID NO: 113273 - DNA, 120 bp, synthetic construct
  source 1..120: mol_type = other DNA
tgcttgaggccaggagttcaagaccagactgggcaacgcagtgagaccctgtttctaattgagaaaaatatcactggtttatttctaggctgtctattctattacattggtctttacatc

SEQ ID NO: 113274 - DNA, 120 bp, synthetic construct
  source 1..120: mol_type = other DNA
cagaaggctctgggctccaacctggcttgctggacgtgctcttgaagcccccaagtaagaagtctgagtccctgagaccaccacactgcaaggacacttgaaggtactcaggttggtggt

SEQ ID NO: 113275 - DNA, 120 bp, synthetic construct
  source 1..120: mol_type = other DNA
tgacatatggattcctgagaccataaataattgttcccaacttactatgttgttatcttcacttaagaattttgggggccaggtgtggtgactcatgcctgtaatcccagcactttggga

SEQ ID NO: 113276 - DNA, 120 bp, synthetic construct; identical to SEQ ID NO: 29050
  source 1..120: mol_type = other DNA

SEQ ID NO: 113277 - DNA, 120 bp, synthetic construct; identical to SEQ ID NO: 29051
  source 1..120: mol_type = other DNA

SEQ ID NO: 113278 - DNA, 120 bp, synthetic construct; identical to SEQ ID NO: 29052
  source 1..120: mol_type = other DNA

SEQ ID NO: 113279 - DNA, 120 bp, synthetic construct
  source 1..120: mol_type = other DNA
tggaggttgcagtgagctgagatcgcgccactgcactccagactgggccataagagcgaaactctgtttccaaaaaaaaaaaattccaggcaggaatataaggatggttcaacagagaca

SEQ ID NO: 113280 - DNA, 120 bp, synthetic construct; identical to SEQ ID NO: 29054
  source 1..120: mol_type = other DNA

SEQ ID NO: 113281 - DNA, 120 bp, synthetic construct; identical to SEQ ID NO: 29055
  source 1..120: mol_type = other DNA

SEQ ID NO: 113282 - DNA, 120 bp, synthetic construct; identical to SEQ ID NO: 29056
  source 1..120: mol_type = other DNA

SEQ ID NO: 113283 - DNA, 120 bp, synthetic construct; identical to SEQ ID NO: 29057
  source 1..120: mol_type = other DNA

SEQ ID NO: 113284 - DNA, 120 bp, synthetic construct
  source 1..120: mol_type = other DNA
tgcacaaactccagagattgaaaacttctggacccaaaggaaaataaaaccaaaggcagagatatattttggcaagaaaagggggtgcccccgttcacattcaatcctttctggacagag

SEQ ID NO: 113285 - DNA, 120 bp, synthetic construct
  source 1..120: mol_type = other DNA
cgcaagtagatgagcagctccttctccgtggtgcgggacagctgcccggcggggctcatggcaggcgggtttcgcagcactgtctgggcgatgaagacctgcaaaggggagagctgtcag

SEQ ID NO: 113286 - DNA, 120 bp, synthetic construct
  source 1..120: mol_type = other DNA
aattatatttatctataggtcaggattgatgggaaatttttttttttttttgagacggagtttcactcttgttgcccaggctggagtgaaatggcaggttctcggcttaccacaacctcc

SEQ ID NO: 113287 - DNA, 120 bp, synthetic construct
  source 1..120: mol_type = other DNA
agtgcgagactccatctctaaataaattaaatcaatcaatcaatcaaatcatttcctgagcagtaggtcctgtaggctgaatgaagcagcaacagcagctgaggaactcccagggcgcac

SEQ ID NO: 113288 - DNA, 120 bp, synthetic construct
  source 1..120: mol_type = other DNA
cctctgcctcacaaagtgctgggatttcaggcatgagccactacgcccggcctgttttgttttttactaagaatttctttccatgtttaaatggttagaggaaaacaaaatagaggcaaa

SEQ ID NO: 113289 - DNA, 120 bp, synthetic construct
  source 1..120: mol_type = other DNA
atccccaggagctgagccatcatctccacctcggagtcccggggacgctgctgggccgcctcctgcccgtggtagacgtggcacagggtggccacgctgaccgtgttcagcaggaaggac

SEQ ID NO: 113290 - DNA, 120 bp, synthetic construct
  source 1..120: mol_type = other DNA
catttcagtgtaagtagctctggtgaactcctacacaaccttcaatgccccagctcaaatatcctctccggttttttttttttttttttttgagacagagtcttgctctgtcacccaggc

SEQ ID NO: 113291 - DNA, 120 bp, synthetic construct
  source 1..120: mol_type = other DNA
aaaccagcctagccaacatggtgaaaccccatcttcactaaaaatacaaaaagtagccaggcatggtggcgggcgcctgtaatcccagctactcaagagactgaggcagaagaaatgctt

SEQ ID NO: 113292 - DNA, 120 bp, synthetic construct
  source 1..120: mol_type = other DNA
tgatgtttgtgggccggaaacagggccccagagccaagatcgtgccactgaaccaacctgagcaacaagagcaaaactccgtctcaaaaaaaaaaaaaaaagaaaaagaaaagaaaagag

SEQ ID NO: 113293 - DNA, 120 bp, synthetic construct
  source 1..120: mol_type = other DNA
ggaaactggcactgagtccttctggccacagctggctgtttccaatccccccacctccactccccaccctggcttcaggcgatggcagccatctcaagttctccaggcaaggatgccaat

SEQ ID NO: 113294 - DNA, 120 bp, synthetic construct
  source 1..120: mol_type = other DNA
ctgtgcaatgggggtgagcttctgatctccatgcctgcgggtgctaagctcaggcctccctggctctcacctctgcagggctcctggctgtactcacagctcaactccctacaaggtgcc

SEQ ID NO: 113295 - DNA, 120 bp, synthetic construct
  source 1..120: mol_type = other DNA
atacagaaacatggcaaatacatagacacatacagatagacacacacagatggaaacatgacagacacagacacacacaagcagaaacacaacagacacacagacacacgcagatagaca

SEQ ID NO: 113296 - DNA, 120 bp, synthetic construct
  source 1..120: mol_type = other DNA
aaggacgggctcgagcgggacctcccagggaaactgagtcagtctggctgtgaccaggggcgggcccagcagaggacccacacagatggagggcgtggcggcacaggacgccctggggtc

SEQ ID NO: 113297 - DNA, 120 bp, synthetic construct
  source 1..120: mol_type = other DNA
gtctctttgcagaggggggaccttgggcttccttggccttgtttgtacacccgagccggacagaaccttgagttagggacctggagtgggaccggacaagctgaccttgccctgactgca

SEQ ID NO: 113298 - DNA, 120 bp, synthetic construct
  source 1..120: mol_type = other DNA
gacaatgactcttctgggaaacagcctgggcagagttcagagaaggacacttgcatttagcttaagcctcaccacatctctgcaaggcagggggtaaagatactcttaaattttagagat

SEQ ID NO: 113299 - DNA, 120 bp, synthetic construct; identical to SEQ ID NO: 30108
  source 1..120: mol_type = other DNA

SEQ ID NO: 113300 - DNA, 120 bp, synthetic construct; identical to SEQ ID NO: 30109
  source 1..120: mol_type = other DNA

SEQ ID NO: 113301 - DNA, 120 bp, synthetic construct
  source 1..120: mol_type = other DNA
ccaaagtgggtggatcacgaggtcaggagttctagatcagcctgatcaacatggtggaatcccgtctctactaaaaaaaaaaaaaaaaaaaaaaaaaaaaaattagccaggcatggtggc

SEQ ID NO: 113302 - DNA, 120 bp, synthetic construct; identical to SEQ ID NO: 30111
  source 1..120: mol_type = other DNA

SEQ ID NO: 113303 - DNA, 120 bp, synthetic construct; identical to SEQ ID NO: 30112
  source 1..120: mol_type = other DNA

SEQ ID NO: 113304 - DNA, 120 bp, synthetic construct
  source 1..120: mol_type = other DNA
ggactgtttgaactgaggagtttgataccagaaagggcaatatagcaagaccccttatctctactaaaaatttaaaaaattagctgggcatggtggtgtgcctgtagtcctagctactca

SEQ ID NO: 113305 - DNA, 120 bp, synthetic construct; identical to SEQ ID NO: 14605
  source 1..120: mol_type = other DNA

SEQ ID NO: 113306 - DNA, 120 bp, synthetic construct; identical to SEQ ID NO: 14606
  source 1..120: mol_type = other DNA

SEQ ID NO: 113307 - DNA, 120 bp, synthetic construct; identical to SEQ ID NO: 30135
  source 1..120: mol_type = other DNA

SEQ ID NO: 113308 - DNA, 120 bp, synthetic construct; identical to SEQ ID NO: 30136
  source 1..120: mol_type = other DNA

SEQ ID NO: 113309 - DNA, 120 bp, synthetic construct; identical to SEQ ID NO: 30137
  source 1..120: mol_type = other DNA

SEQ ID NO: 113310 - DNA, 120 bp, synthetic construct; identical to SEQ ID NO: 30138
  source 1..120: mol_type = other DNA

SEQ ID NO: 113311 - DNA, 120 bp, synthetic construct; identical to SEQ ID NO: 30139
  source 1..120: mol_type = other DNA

SEQ ID NO: 113312 - DNA, 120 bp, synthetic construct; identical to SEQ ID NO: 30140
  source 1..120: mol_type = other DNA

SEQ ID NO: 113313 - DNA, 120 bp, synthetic construct; identical to SEQ ID NO: 30141
  source 1..120: mol_type = other DNA

SEQ ID NO: 113314 - DNA, 120 bp, synthetic construct; identical to SEQ ID NO: 30142
  source 1..120: mol_type = other DNA

SEQ ID NO: 113315 - DNA, 120 bp, synthetic construct; identical to SEQ ID NO: 30143
  source 1..120: mol_type = other DNA

SEQ ID NO: 113316 - DNA, 120 bp, synthetic construct; identical to SEQ ID NO: 30144
  source 1..120: mol_type = other DNA

SEQ ID NO: 113317 - DNA, 120 bp, synthetic construct; identical to SEQ ID NO: 30145
  source 1..120: mol_type = other DNA

SEQ ID NO: 113318 - DNA, 120 bp, synthetic construct; identical to SEQ ID NO: 30146
  source 1..120: mol_type = other DNA

SEQ ID NO: 113319 - DNA, 120 bp, synthetic construct; identical to SEQ ID NO: 30147
  source 1..120: mol_type = other DNA

SEQ ID NO: 113320 - DNA, 120 bp, synthetic construct; identical to SEQ ID NO: 30148
  source 1..120: mol_type = other DNA

SEQ ID NO: 113321 - DNA, 120 bp, synthetic construct; identical to SEQ ID NO: 30149
  source 1..120: mol_type = other DNA

SEQ ID NO: 113322 - DNA, 120 bp, synthetic construct; identical to SEQ ID NO: 30150
  source 1..120: mol_type = other DNA

SEQ ID NO: 113323 - DNA, 120 bp, synthetic construct
  source 1..120: mol_type = other DNA
aagttacttaaaaaaataaatcctggtgaaaccctgtctctacaaaaatacaaaaattagcggggcatgatggcgggtgcctataatcccagctattcaggaggctgaggcaggagaatt

SEQ ID NO: 113324 - DNA, 120 bp, synthetic construct; identical to SEQ ID NO: 30151
  source 1..120: mol_type = other DNA

SEQ ID NO: 113325 - DNA, 120 bp, synthetic construct; identical to SEQ ID NO: 30152
  source 1..120: mol_type = other DNA

SEQ ID NO: 113326 - DNA, 120 bp, synthetic construct; identical to SEQ ID NO: 30153
  source 1..120: mol_type = other DNA

SEQ ID NO: 113327 - DNA, 120 bp, synthetic construct; identical to SEQ ID NO: 30154
  source 1..120: mol_type = other DNA

SEQ ID NO: 113328 - DNA, 120 bp, synthetic construct; identical to SEQ ID NO: 30155
  source 1..120: mol_type = other DNA

SEQ ID NO: 113329 - DNA, 120 bp, synthetic construct; identical to SEQ ID NO: 30156
  source 1..120: mol_type = other DNA

SEQ ID NO: 113330 - DNA, 120 bp, synthetic construct; identical to SEQ ID NO: 30157
  source 1..120: mol_type = other DNA

SEQ ID NO: 113331 - DNA, 120 bp, synthetic construct; identical to SEQ ID NO: 30158
  source 1..120: mol_type = other DNA

SEQ ID NO: 113332 - DNA, 120 bp, synthetic construct; identical to SEQ ID NO: 30159
  source 1..120: mol_type = other DNA

SEQ ID NO: 113333 - DNA, 120 bp, synthetic construct; identical to SEQ ID NO: 30160
  source 1..120: mol_type = other DNA

SEQ ID NO: 113334 - DNA, 120 bp, synthetic construct
  source 1..120: mol_type = other DNA
cttactagaggaagaaagtttcagtacctctggagtggcagtgatgtgttccaagacatcctctgtgattggaatataactggctcttaccacgtatgtttcacacacttatgatccaaa

SEQ ID NO: 113335 - DNA, 120 bp, synthetic construct
  source 1..120: mol_type = other DNA
tcattcttaaggcagctgtagacacctgttctggatcatcttaaatagtgacttagtgaacttccccagtgactcataccagtaaatgtccataggtggattcatccatctctgttccta

SEQ ID NO: 113336 - DNA, 120 bp, synthetic construct
  source 1..120: mol_type = other DNA
cattcatatctctgtgctttggaatcttatacagcctcacattgtaataccttcccctttatctccccgcaaatatacatttttctaagctgagtttctgtgtcaccttctgtgcacatt

SEQ ID NO: 113337 - DNA, 120 bp, synthetic construct
  source 1..120: mol_type = other DNA
agtagtactttaccatgaggagtgaggttgatgtaggtggagactggttaaaacctaagagtacaaacacacaaaagataccgagccagctttttgttgttgttgttgagacggagtctc

SEQ ID NO: 113338 - DNA, 120 bp, synthetic construct
  source 1..120: mol_type = other DNA
taatttctccagccatgcacggacgaatctgtgttagtgatgccacaggcacgtttccctcccagcaagaatataacttgctgggcagcatttctgtggatactttgagagaaaaatgcc

SEQ ID NO: 113339 - DNA, 120 bp, synthetic construct
  source 1..120: mol_type = other DNA
cctgtccgtcagtccctaggtatccgcactgctcaggggtgagttttccaatcccagcgggtcctggggtgggggcggtagctgagcacctagggcactgggggtcgccgcaaagtgctg

SEQ ID NO: 113340 - DNA, 120 bp, synthetic construct
  source 1..120: mol_type = other DNA
gtgttttagtttagattctgccctaaagcaaagccttatgcaagggcttacctgcaggtaattttttgggggtaagtgagaccaaaaagcccaaatgaggaagtggagagaatgagacaa

SEQ ID NO: 113341 - DNA, 120 bp, synthetic construct
  source 1..120: mol_type = other DNA
caaaaacaatcttcccatggctgtattattctctttttgtagatggggaaactgagactgaagtcatttatccaagaggggctgcttaaagggacaaatagtctcagtgttaggcacagc

SEQ ID NO: 113342 - DNA, 120 bp, synthetic construct
  source 1..120: mol_type = other DNA
agctgatagaaccatggcgaccattgctgctgctgcgtttgaggccctcatggatggagtgacatgctgggatgtccccagaggccccatccccagtgaactccttcttattggagaagc

SEQ ID NO: 113343 - DNA, 120 bp, synthetic construct
  source 1..120: mol_type = other DNA
aagtcctatcagtcagaccaagttggattggtcaggatttgttggcgttgctagcagaagggatttagtatggggaattgactatacccatgatagaggagctgaaaatacacacagggg

SEQ ID NO: 113344 - DNA, 120 bp, synthetic construct
  source 1..120: mol_type = other DNA
tccgcacacatgatgttctctgaatgaggaacaataaatgttagtcatttacagattgtgtaggctccaggctttcggcattatgcctgcagtaaataaaagcaagcagcttcagcttct

SEQ ID NO: 113345 - DNA, 120 bp, synthetic construct
  source 1..120: mol_type = other DNA
acggccagcctagttaaatcagtagtccctagccttttggtaccaggacctgttttgtagaagacaatttttccatggacctggcaggagtttcaagataattcaagtgcattacattta

SEQ ID NO: 113346 - DNA, 120 bp, synthetic construct
  source 1..120: mol_type = other DNA
tcatcatttatttccatgattgtcttatttttcaaaatgtgttaacattgggccaggcatggtgggtcatgcctgtaatcccagtcctttttgggaggccaaggcaggtggatcacttga

SEQ ID NO: 113347 - DNA, 120 bp, synthetic construct
  source 1..120: mol_type = other DNA
gccataaatgtaatgcacttgaattatcctgaaacccctgccaggtccatggaaaaattgtcttctataaacaggtccctggtaccaaaaggttagggaccactgatttaacatattcat

SEQ ID NO: 113348 - DNA, 120 bp, synthetic construct
  source 1..120: mol_type = other DNA
ctgaatcttttccacccaaccttaatgggcttcctggttttttaatataacaggaggtttcaatttcatctcatgtatttcctgctcaggcccagaactgccatttctccaaaaagccct

SEQ ID NO: 113349 - DNA, 120 bp, synthetic construct
  source 1..120: mol_type = other DNA
ggatatgatattgtttattcaataagtcccttattgacaggcacttgagtttccagtatgtgttatttttctggtacttctactgttacacatgtgctgcaatgaatacctttgtgcacg

SEQ ID NO: 113350 - DNA, 120 bp, synthetic construct
  source 1..120: mol_type = other DNA
tgagtgcctgttctagacactattctaggcactggaattcccacagcgtttaagtccatattttaggactaagagaagcgtagtgaaagttcagctaatactgtataaaaataaattccc

SEQ ID NO: 113351 - DNA, 120 bp, synthetic construct
  source 1..120: mol_type = other DNA
gttttcagtgaacattcctgccacaaatattggtcaaaggcgcttggactgacccagcaggttccttaactttaaatctcggctggaaggccctggagcttcttaagagaattgattgct

SEQ ID NO: 113352 - DNA, 120 bp, synthetic construct
  source 1..120: mol_type = other DNA
tatgcactggccaaggagaacaggtgattgatgggtggcccaggatggagtatctcctaacaccagtcaaccttccatgtacaatggaaagaaaatattcaaaatcacaaattcaatagt

SEQ ID NO: 113353 - DNA, 120 bp, synthetic construct
  source 1..120: mol_type = other DNA
atttatctgtatttaagaaattaaaaatacaaaaaaaaagatactcaagtgttgggggctgcaggtcttcaaaatgttttttacagcatctgatcaacatagttctctctagtccttttt

SEQ ID NO: 113354 - DNA, 120 bp, synthetic construct
  source 1..120: mol_type = other DNA
tatcttttaacttccctaacttagtgcacccaaagggaaaggaatgttcttattaaggcccactgtttaactggggcccattgtatgaggatgaagtttggcagttacccaagagacttt

SEQ ID NO: 113355 - DNA, 120 bp, synthetic construct
  source 1..120: mol_type = other DNA
tgcaacaagttagcagaacacaaccttctagggtctcaatgtcttgtcttcaggatgcaggacaattgtcttctggctgtaagtaagcttgtaagtcattctgatcaaatcatctccatc

SEQ ID NO: 113356 - DNA, 120 bp, synthetic construct
  source 1..120: mol_type = other DNA
atagtaatccatcatatgattaaatgccaatttttatttgcattcatattagtaaacatttaacttcttcatattttttcactattaccaacaatttgcaatgaacttcctagtactgcc

SEQ ID NO: 113357 - DNA, 120 bp, synthetic construct
  source 1..120: mol_type = other DNA
agttttataaagataattaaaatgacctaaaatcccaccagccaagacgaccactgaagacattttttttaaacaaagatattttgataaatatgctttaggttctgcttctatgtctgg

SEQ ID NO: 113358 - DNA, 120 bp, synthetic construct
  source 1..120: mol_type = other DNA
ggcacatacccaggatgaaggtaacgattgaggggaggtgatcatgtgaatgaaatatatttaagaacgcacatgtcacgtcacttttgcaaacttgacacctcattctgttccttcttt

SEQ ID NO: 113359 - DNA, 120 bp, synthetic construct
  source 1..120: mol_type = other DNA
aaacatcattaagagctcttgtccttctagagaacactggccaaagggagaaacacacgtaaataaacacattgctaaaactgttggtttatcaaggaggcgatgtccaggagagaaagg

SEQ ID NO: 113360 - DNA, 120 bp, synthetic construct
  source 1..120: mol_type = other DNA
ttgactgggactgtctcacattcactcttcagaaaattagtgaaaggcacaaaaaactaagagagggtatggcaatgcgaaagcctggggcttgtcattacgtcctgattttaagttcta

SEQ ID NO: 113361 - DNA, 120 bp, synthetic construct
  source 1..120: mol_type = other DNA
tcgctacatgactgaggggtctggtcatccccttctcccagaatttctgctcagtacctgtagatatgtttccagggctgtccatacattccagtcacacaggggggctccctttcccag

SEQ ID NO: 113362 - DNA, 120 bp, synthetic construct
  source 1..120: mol_type = other DNA
gctttactaataaaattatgcttacacattttggacattcataaaaggcaaagtaatagatacatggtttccactgactaggaggattccctgggagcacccaccagctgagatctgcac

SEQ ID NO: 113363 - DNA, 120 bp, synthetic construct
  source 1..120: mol_type = other DNA
gaagtccaaatgactttggagtgctaaaatttcataagtttccatgcctagcacatagaaaagggaagctggggtttcatgggcatgtttgtctaataccttccatctacacaacctcac

SEQ ID NO: 113364 - DNA, 120 bp, synthetic construct
  source 1..120: mol_type = other DNA
tgataacactaggcacttcagtcactcacttagatgccctgaaatttagctgcttcatctgtaaaatctgtaaaatgggcagaataatccatctctgtactcctggcagcattgccatga

SEQ ID NO: 113365 - DNA, 120 bp, synthetic construct
  source 1..120: mol_type = other DNA
cagaccctcgtagcatcttcctcaggagcctgtgcagggatatgtaagcagggaccccctccgcaggaatctgtaggaaggctgcaccatcaactctcaactttgccagacagctctttt

SEQ ID NO: 113366 - DNA, 120 bp, synthetic construct
  source 1..120: mol_type = other DNA
ttttcactgtttttacaactgatggcatattatcatttaattggcaatgtttagtctttctttcttttctttctttcttttctttctttctttctttttttatttgagatggagtttcgc

SEQ ID NO: 113367 - DNA, 120 bp, synthetic construct
  source 1..120: mol_type = other DNA
ccttttcttgattcattacattttgaccattccttaagaagaagaagtgaatactctaaccagatctaagtgaagttttaaaaacagtgtgtgtttgtataaatcttcaagcgtagtgtt

SEQ ID NO: 113368 - DNA, 120 bp, synthetic construct
  source 1..120: mol_type = other DNA
aaacagaaaatatttttaaagtatattctcaaacagttcatgaaagatgagatggagtttcgctctgtcgccaggctagagtgcagtggcacaatctcagctcactgcaacctccaccta

SEQ ID NO: 113369 - DNA, 120 bp, synthetic construct
  source 1..120: mol_type = other DNA
agagtggacgaaatgtaacggttcttgttagagttcttgtagaggacgattgtggatgagaatacatcctggggactaaaaccatattggtttagtctggaatgattgccaactaaaggg

SEQ ID NO: 113370 - DNA, 120 bp, synthetic construct
  source 1..120: mol_type = other DNA
tcagggttcaagaaattctcatgactcagcctccccaagtggctgggattacaggtgcacgccaccatgcccagctattttttgtagatttagtagagacaggtttcgccatgttggcca

SEQ ID NO: 113371 - DNA, 120 bp, synthetic construct
  source 1..120: mol_type = other DNA
aatcacgaaaagggaaaccttatctgttttgtttcttgctgtactcccagtgctagaacagtgcttggcccacaatggggaatccagtaaaatttggaggtgaatgcatttagttgtttg

SEQ ID NO: 113372 - DNA, 120 bp, synthetic construct
  source 1..120: mol_type = other DNA
tgattaaaatgcaccaagacacaagagaggctgggccctcactgccactccctcctgtggccaaagctgaatagaaaagcttgtcttaccactttatctccatgtctagtaaatagaacc

SEQ ID NO: 113373 - DNA, 120 bp, synthetic construct
  source 1..120: mol_type = other DNA
caaagaaatgcagttttctgcaacacggaggatgaccaagatgaaaggggaatagagatgagtgcaaacaagctcatggccggcttggaaggctggtctggtaggtagcacttgaaagga

SEQ ID NO: 113374 - DNA, 120 bp, synthetic construct
  source 1..120: mol_type = other DNA
gagaacccaacaggcttggctgatggagtgagtaaggaaaaagaggagttgagatttttggtctgaaaaagaccaaaaattaaacacaggtgctgctgtttagtgatctgtgaaaggaca

SEQ ID NO: 113375 - DNA, 120 bp, synthetic construct
  source 1..120: mol_type = other DNA
tgggtttactcagagacattggagtggatctgattcgcttcaacttttttattctaatgcgaagggacaagcaggtgaaatctcatcactataatgcctcttaattgccccaagggattc

SEQ ID NO: 113376 - DNA, 120 bp, synthetic construct
  source 1..120: mol_type = other DNA
aggcacagtgaagcgcaatggtgaaaacctggaaaggcaaattgattgccttcctgtggtatcatttaatatgggggtaccagtccatggcctgttaggaaccagaacacacagcaggat

SEQ ID NO: 113377 - DNA, 120 bp, synthetic construct
  source 1..120: mol_type = other DNA
tttataggtggtagtatgcacttctactgggtagagcacaatggtctgattttctctcttactgtgaggttggcagtccttaataaccgttgcttagccctagacccattaatttgtgtt

SEQ ID NO: 113378 - DNA, 120 bp, synthetic construct
  source 1..120: mol_type = other DNA
acgactcatttgctctatcccaagatatacaaacaacagttgcaaaatatgaataatagcactactaccagcaatatgatgattattgtaacaaagattacttgcagttctttttgtccc

SEQ ID NO: 113379 - DNA, 120 bp, synthetic construct
  source 1..120: mol_type = other DNA
gaagaaacgtgtctgtaatagaagattgcttaaataaggtatagcatatcctagagtgattgagtgagtaattttgcaatcattaaaaattctatgttcaaagacttcttaaaggaaatg

SEQ ID NO: 113380 - DNA, 120 bp, synthetic construct
  source 1..120: mol_type = other DNA
agctcttgaaaatccaatttattcttcttaattagtttcaactcaaacaccctcctcagagcagtcttccccagtggccatactgaaatttggactgtccatccagtttcacttcatcac

SEQ ID NO: 113381 - DNA, 120 bp, synthetic construct
  source 1..120: mol_type = other DNA
tgcacctgcaaatacgcattgcactccagcctgagcaacatagtgagaacctgtcactatttggtaagtaaaaattgtaaatatgtactagtggcttaggtttatgactgtcttgagaat

SEQ ID NO: 113382 - DNA, 120 bp, synthetic construct
  source 1..120: mol_type = other DNA
agagttgggtcccaacaccaaggtatctccttatgtgtatgcaaatattccataacctgaaaaaaatcaaaatctgaaacactattggttggtcccaagcattttccataagggctgctc

SEQ ID NO: 113383 - DNA, 120 bp, synthetic construct
  source 1..120: mol_type = other DNA
ttaaacacagtattgttcgcacctttgcatcctgtaaagcttcctttgcacaagatatacctgtcgaaaaccatgtacccagatgtaggttccgtcaaagactcagtaattgagtgagag

SEQ ID NO: 113384 - DNA, 120 bp, synthetic construct
  source 1..120: mol_type = other DNA
tggtaactagctgtctgagatcattaatattgcccttaggatattgtcaaatcagctgttgaaatttacctgatatactaactgctatgcttactcacttttccctccctccctccctgc

SEQ ID NO: 113385 - DNA, 120 bp, synthetic construct
  source 1..120: mol_type = other DNA
ataagcagcttatatccagatgtttttaacccaatctgacagcttctgtgagatggaaattcaatgcattcatatatactgtgatgattcaaatgtatttcttgctcttaccccctttta

SEQ ID NO: 113386 - DNA, 120 bp, synthetic construct
  source 1..120: mol_type = other DNA
ggtttttttctttaattctatgtggttcttgcagcttttgtcaaccattctagtcacttcctagattcccaatgctactgtagtttgtgtgtgtgggcatgtggatgaatatatgcagtc

SEQ ID NO: 113387 - DNA, 120 bp, synthetic construct
  source 1..120: mol_type = other DNA
aaacaatttaattgtgatgtgttcctagatcagaactaccctacggagagtccagatttggtgtttttacagccttcctttgcagaaagttagatcgagaaattcataagcagtaccaca

SEQ ID NO: 113388 - DNA, 120 bp, synthetic construct
  source 1..120: mol_type = other DNA
tgctcccaagatggggcccttcttgctcaatgcggtgcgctggctggccagaggccagacaggcaaagttggggtgaacacaaatctaaaagatctgtgtcctctcctatcggagcatgg

SEQ ID NO: 113389 - DNA, 120 bp, synthetic construct
  source 1..120: mol_type = other DNA
acaggacattgcaggtacttaccctcaggaagattgaccccattctttttttttttgagacagagtctcactctgtcatccaggttggaatgcagtggcgcgatctcagctcatgcaacc

SEQ ID NO: 113390 - DNA, 120 bp, synthetic construct
  source 1..120: mol_type = other DNA
gcaatttgattaacaaggagacaggagcccagctcaaatctgtcccattgtacttattttaaagagttattttagtagaaaaggtgtagggagtggattctgtgattagtaggtgattga

SEQ ID NO: 113391 - DNA, 120 bp, synthetic construct
  source 1..120: mol_type = other DNA
tgactttggagtgctaaaatttcataagtttccatgcctagcacatagaaaagggaagctggggtttcatgggcatgtttgtctaataccttccatctacacaacctcacacgcacatca

SEQ ID NO: 113392 - DNA, 120 bp, synthetic construct
  source 1..120: mol_type = other DNA
ttattgacatctacaaggtgagatttcactggatggtaaaacaatctcagaaaacgttgtattgggaattcatagatggcaaccagagtcatttcaaggacaacatagaaaatcaactat

SEQ ID NO: 113393 - DNA, 120 bp, synthetic construct
  source 1..120: mol_type = other DNA
acctgggaaagggagcccccctgtgtgactggaatgtatggacagccctggaaacatatctacaggtactgagcagaaattctgggagaaggggatgaccagacccctcagtcatgtagc

SEQ ID NO: 113394 - DNA, 120 bp, synthetic construct
  source 1..120: mol_type = other DNA
ttatcctgaggccaagtctcagacttggtctctctagagctattgagaactgatattcggggctccacagtgagtaggtagcagactaggacagaattagggcttaaacttacagtttag

SEQ ID NO: 113395 - DNA, 120 bp, synthetic construct
  source 1..120: mol_type = other DNA
gcaatgatacaaaattgctctgtagaacactgcatttagggcagaaaaagaaaaaaatccagcctgtctcgaggggctaaaaatgagagtggctcatacttcataaggggcagctaatga

SEQ ID NO: 113396 - DNA, 120 bp, synthetic construct
  source 1..120: mol_type = other DNA
ctggaagactaagaggtgaagtgagtctcttggggaaagcaatagcgtaggcagaaaaacaataaaaagaagcacaaggcaccttttacagaaaggggttccattttttcttatgaccgt

SEQ ID NO: 113397 - DNA, 120 bp, synthetic construct
  source 1..120: mol_type = other DNA
attattttacagtatcatggagaaatttctcagctttaatttatattatggtaaatgtcaatagatataacccggccgggtatggtggctcacacctgtaatcccagcactttgggaggc

SEQ ID NO: 113398 - DNA, 120 bp, synthetic construct; identical to SEQ ID NO: 31531
  source 1..120: mol_type = other DNA

SEQ ID NO: 113399 - DNA, 120 bp, synthetic construct; identical to SEQ ID NO: 31532
  source 1..120: mol_type = other DNA

SEQ ID NO: 113400 - DNA, 120 bp, synthetic construct; identical to SEQ ID NO: 31533
  source 1..120: mol_type = other DNA

SEQ ID NO: 113401 - DNA, 120 bp, synthetic construct; identical to SEQ ID NO: 7293
  source 1..120: mol_type = other DNA

SEQ ID NO: 113402 - DNA, 120 bp, synthetic construct
  source 1..120: mol_type = other DNA
gtgacagatcatcaggcattagattctcatgagaagcatgcaacttggtttcctcgaatgcacagttcacaatagggttcgtgctcctatgagaatctaatgccgtcactgatctgacag

SEQ ID NO: 113403 - DNA, 120 bp, synthetic construct; identical to SEQ ID NO: 11339
  source 1..120: mol_type = other DNA

SEQ ID NO: 113404 - DNA, 120 bp, synthetic construct; identical to SEQ ID NO: 11340
  source 1..120: mol_type = other DNA

SEQ ID NO: 113405 - DNA, 120 bp, synthetic construct; identical to SEQ ID NO: 11341
  source 1..120: mol_type = other DNA

SEQ ID NO: 113406 - DNA, 120 bp, synthetic construct; identical to SEQ ID NO: 11342
  source 1..120: mol_type = other DNA

SEQ ID NO: 113407 - DNA, 120 bp, synthetic construct; identical to SEQ ID NO: 11343
  source 1..120: mol_type = other DNA

SEQ ID NO: 113408 - DNA, 120 bp, synthetic construct; identical to SEQ ID NO: 11344
  source 1..120: mol_type = other DNA

SEQ ID NO: 113409 - DNA, 120 bp, synthetic construct
  source 1..120: mol_type = other DNA
cacatctagacatgatgtctttagcaattgtttcttcttcttctttcttcttcctcttcttcttcttctcctcctcctcctcctcctccttcttcttctcctcctcctccttcttcttct

SEQ ID NO: 113410 - DNA, 120 bp, synthetic construct
  source 1..120: mol_type = other DNA
ctcataggaaccaaaccctattgtgaactgtacgtgtggggggatctagattgctcactccttatgaaaatctaactaatgcctgatgatccgaagtggaacagttttatcccaaaacca

SEQ ID NO: 113411 - DNA, 120 bp, synthetic construct
  source 1..120: mol_type = other DNA
tctctctctctctcttttctttctttctttctttctttctttccattctttttttttatttgagacagggtcttgctctgttgcccaggctagagtacagtgacacgatcgtggcctatt

SEQ ID NO: 113412 - DNA, 120 bp, synthetic construct
  source 1..120: mol_type = other DNA
cctcaagtgatccacccgcctcagcctcccaaagtgctgggattacaggcgtgagctaaatcttatctagctaaaaaacgatatctagaagtcataaatattagaatatttggtatgata

SEQ ID NO: 113413 - DNA, 120 bp, synthetic construct
  source 1..120: mol_type = other DNA
ggttgagttcattgtagattctggatattagccctttgtcagatgagtaggttgcgaaaattttctcccattttgtaggttgcctgttcactctgatggtagtttcttttgctgtgcaga

SEQ ID NO: 113414 - DNA, 120 bp, synthetic construct
  source 1..120: mol_type = other DNA
ttaaggagattttgggctgagacaatgggattttctagatatacaatcatgtcgtctgcaaacagggacaatttgacttcctcttttcctaattgaataccctttatttccttctcctgc

SEQ ID NO: 113415 - DNA, 120 bp, synthetic construct
  source 1..120: mol_type = other DNA
tcaattttgttgatcctttcaaaaaaccagctcctggattcattaattttttgaagggttttttgtgtctctatttccttcatttctgctctgattttagttatttcttgccttctgcta

SEQ ID NO: 113416 - DNA, 120 bp, synthetic construct
  source 1..120: mol_type = other DNA
tttaaagttaatattgttatgtgtgaatttgatcctgtcattatgatgttagctggtgattttgctcgttagttgatgcagtttcttcctagtctcgatgatctttacattttgacatga

SEQ ID NO: 113417 - DNA, 120 bp, synthetic construct
  source 1..120: mol_type = other DNA
attttagagtttccagtatttctgttctgtttttccccatctttgtggttttatctacttttggtctttgatgatgtgatgtacagatgggtttttggtgtggatgtcctttctgtttgt

SEQ ID NO: 113418 - DNA, 120 bp, synthetic construct; identical to SEQ ID NO: 31570
  source 1..120: mol_type = other DNA

SEQ ID NO: 113419 - DNA, 120 bp, synthetic construct; identical to SEQ ID NO: 17172
  source 1..120: mol_type = other DNA

SEQ ID NO: 113420 - DNA, 120 bp, synthetic construct; identical to SEQ ID NO: 17173
  source 1..120: mol_type = other DNA

SEQ ID NO: 113421 - DNA, 120 bp, synthetic construct; identical to SEQ ID NO: 17174
  source 1..120: mol_type = other DNA

SEQ ID NO: 113422 - DNA, 120 bp, synthetic construct; identical to SEQ ID NO: 17175
  source 1..120: mol_type = other DNA

SEQ ID NO: 113423 - DNA, 120 bp, synthetic construct; identical to SEQ ID NO: 17176
  source 1..120: mol_type = other DNA

SEQ ID NO: 113424 - DNA, 120 bp, synthetic construct
  source 1..120: mol_type = other DNA
ccgagatcgcgccactgcactccagcctgggcaacatagtgagactccgtctcaaaaaaaaagaaaaaaaaaaaaaagacgggcctcctccgaggggctgtgaggggtgagggtgaaatc

SEQ ID NO: 113425 - DNA, 120 bp, synthetic construct; identical to SEQ ID NO: 17177
  source 1..120: mol_type = other DNA

SEQ ID NO: 113426 - DNA, 120 bp, synthetic construct; identical to SEQ ID NO: 17178
  source 1..120: mol_type = other DNA

SEQ ID NO: 113427 - DNA, 120 bp, synthetic construct; identical to SEQ ID NO: 19365
  source 1..120: mol_type = other DNA

SEQ ID NO: 113428 - DNA, 120 bp, synthetic construct; identical to SEQ ID NO: 19366
  source 1..120: mol_type = other DNA

SEQ ID NO: 113429 - DNA, 120 bp, synthetic construct; identical to SEQ ID NO: 19367
  source 1..120: mol_type = other DNA

SEQ ID NO: 113430 - DNA, 120 bp, synthetic construct; identical to SEQ ID NO: 19368
  source 1..120: mol_type = other DNA

SEQ ID NO: 113431 - DNA, 120 bp, synthetic construct; identical to SEQ ID NO: 19050
  source 1..120: mol_type = other DNA

SEQ ID NO: 113432 - DNA, 120 bp, synthetic construct; identical to SEQ ID NO: 19051
  source 1..120: mol_type = other DNA

SEQ ID NO: 113433 - DNA, 120 bp, synthetic construct; identical to SEQ ID NO: 19052
  source 1..120: mol_type = other DNA

SEQ ID NO: 113434 - DNA, 120 bp, synthetic construct; identical to SEQ ID NO: 19053
  source 1..120: mol_type = other DNA

SEQ ID NO: 113435 - DNA, 120 bp, synthetic construct; identical to SEQ ID NO: 4361
  source 1..120: mol_type = other DNA

SEQ ID NO: 113436 - DNA, 120 bp, synthetic construct; identical to SEQ ID NO: 20647
  source 1..120: mol_type = other DNA

SEQ ID NO: 113437 - DNA, 120 bp, synthetic construct; identical to SEQ ID NO: 20648
  source 1..120: mol_type = other DNA

SEQ ID NO: 113438 - DNA, 120 bp, synthetic construct; identical to SEQ ID NO: 20649
  source 1..120: mol_type = other DNA

SEQ ID NO: 113439 - DNA, 120 bp, synthetic construct; identical to SEQ ID NO: 20650
  source 1..120: mol_type = other DNA

SEQ ID NO: 113440 - DNA, 120 bp, synthetic construct
  source 1..120: mol_type = other DNA
tgtatgtgtttgttttggttttagttttggttttggttttggttttggttttggttttaggacggagtttcactcttgtcacccaagcaggagtgcaatggcacatgatctcagctcact

SEQ ID NO: 113441 - DNA, 120 bp, synthetic construct; identical to SEQ ID NO: 20651
  source 1..120: mol_type = other DNA

SEQ ID NO: 113442 - DNA, 120 bp, synthetic construct
  source 1..120: mol_type = other DNA
tttcatgaaatgattcactactaataaacaaaaaagggaggagggaggcctcatgggttaatagtttctttcattgtagatgaccaggaactttgaccagccccttcacttccccaagct

SEQ ID NO: 113443 - DNA, 120 bp, synthetic construct
  source 1..120: mol_type = other DNA
caatattttttgggggggcaaaactttttgggggtgattttttttggcttttcttcctccttcatttttcttccaaaattgctgctggtgggtgaaaaaaaaatgccgcagctgaacggc

SEQ ID NO: 113444 - DNA, 120 bp, synthetic construct; identical to SEQ ID NO: 11159
  source 1..120: mol_type = other DNA

SEQ ID NO: 113445 - DNA, 120 bp, synthetic construct; identical to SEQ ID NO: 11160
  source 1..120: mol_type = other DNA

SEQ ID NO: 113446 - DNA, 120 bp, synthetic construct
  source 1..120: mol_type = other DNA
caggtcattgatttattcccttttttatttttatttttttcttatttgtatctttctcttccccccccccccccctctttctctctctctctctctccctttctcccacgttctcctcct

SEQ ID NO: 113447 - DNA, 120 bp, synthetic construct
  source 1..120: mol_type = other DNA
tgtatcttacaaatgtgaacatatactttggcataaaattttatagggaggaaaaggaaggactgacatgggagaaggcggtagctcttcctccccatcttgtcttcaccaactcttgga

SEQ ID NO: 113448 - DNA, 120 bp, synthetic construct; identical to SEQ ID NO: 8815
  source 1..120: mol_type = other DNA

SEQ ID NO: 113449 - DNA, 120 bp, synthetic construct; identical to SEQ ID NO: 8816
  source 1..120: mol_type = other DNA

SEQ ID NO: 113450 - DNA, 120 bp, synthetic construct
  source 1..120: mol_type = other DNA
tggtctgcctgcctctgcctcccaaagttctgggattacaggcatgagccaccgcacccagccaaaattacttaacttttcttctagatactttttaaaaatatggcagtaagtttttca

SEQ ID NO: 113451 - DNA, 120 bp, synthetic construct; identical to SEQ ID NO: 27122
  source 1..120: mol_type = other DNA

SEQ ID NO: 113452 - DNA, 120 bp, synthetic construct; identical to SEQ ID NO: 27123
  source 1..120: mol_type = other DNA

SEQ ID NO: 113453 - DNA, 120 bp, synthetic construct
  source 1..120: mol_type = other DNA
ctggctaatttttctattgttagtagagacagggttttaccatgttggccagactggtctcaaaggctgtactggcatggatatatggtcaatagtttaaaaattatggaagccggccgg

SEQ ID NO: 113454 - DNA, 120 bp, synthetic construct; identical to SEQ ID NO: 27708
  source 1..120: mol_type = other DNA

SEQ ID NO: 113455 - DNA, 120 bp, synthetic construct; identical to SEQ ID NO: 27709
  source 1..120: mol_type = other DNA

SEQ ID NO: 113456 - DNA, 120 bp, synthetic construct; identical to SEQ ID NO: 34960
  source 1..120: mol_type = other DNA

SEQ ID NO: 113457 - DNA, 120 bp, synthetic construct
  source 1..120: mol_type = other DNA
gatacctcactgtagttttgatttgcatttctctgatgatcactaatgtcgagcaccttttcatgcgcttgtttgccatttgtatgtcttcttttgagaaatgtctattcagatcttttg

SEQ ID NO: 113458 - DNA, 120 bp, synthetic construct; identical to SEQ ID NO: 34961
  source 1..120: mol_type = other DNA

SEQ ID NO: 113459 - DNA, 120 bp, synthetic construct; identical to SEQ ID NO: 34962
  source 1..120: mol_type = other DNA

SEQ ID NO: 113460 - DNA, 120 bp, synthetic construct; identical to SEQ ID NO: 34963
  source 1..120: mol_type = other DNA

SEQ ID NO: 113461 - DNA, 120 bp, synthetic construct; identical to SEQ ID NO: 34964
  source 1..120: mol_type = other DNA

SEQ ID NO: 113462 - DNA, 120 bp, synthetic construct; identical to SEQ ID NO: 34965
  source 1..120: mol_type = other DNA

SEQ ID NO: 113463 - DNA, 120 bp, synthetic construct; identical to SEQ ID NO: 34966
  source 1..120: mol_type = other DNA

SEQ ID NO: 113464 - DNA, 120 bp, synthetic construct; identical to SEQ ID NO: 34967
  source 1..120: mol_type = other DNA

SEQ ID NO: 113465 - DNA, 120 bp, synthetic construct; identical to SEQ ID NO: 34968
  source 1..120: mol_type = other DNA

SEQ ID NO: 113466 - DNA, 120 bp, synthetic construct; identical to SEQ ID NO: 34969
  source 1..120: mol_type = other DNA

SEQ ID NO: 113467 - DNA, 120 bp, synthetic construct; identical to SEQ ID NO: 35053
  source 1..120: mol_type = other DNA

SEQ ID NO: 113468 - DNA, 120 bp, synthetic construct
  source 1..120: mol_type = other DNA
ctatctcatttcttaggcggttctgccatggtaatagcagtgatagcaaggtctgcccaacaaaggaaatcaaaggagccaagttctgttcagaacctcaaactttctccaatgaactat

SEQ ID NO: 113469 - DNA, 120 bp, synthetic construct; identical to SEQ ID NO: 34970
  source 1..120: mol_type = other DNA

SEQ ID NO: 113470 - DNA, 120 bp, synthetic construct; identical to SEQ ID NO: 34971
  source 1..120: mol_type = other DNA

SEQ ID NO: 113471 - DNA, 120 bp, synthetic construct
  source 1..120: mol_type = other DNA
aaagctaaaaaacttcccaaatgatcatgccttttcatttttaaatgcttaggtaactcacattcagggtaaggtctacccacccatgccccacattcttgccacttttctgcacgacga

SEQ ID NO: 113472 - DNA, 120 bp, synthetic construct; identical to SEQ ID NO: 34972
  source 1..120: mol_type = other DNA

SEQ ID NO: 113473 - DNA, 120 bp, synthetic construct
  source 1..120: mol_type = other DNA
cacaaagagttttcaaagccctcaaggaaatgatttttcaatggagaaaataatgctagtgactgtaggttaatgagttcccccctcccccaccagattacttaaggctgtatgtctgct

SEQ ID NO: 113474 - DNA, 120 bp, synthetic construct
  source 1..120: mol_type = other DNA
tcttgggctgagtaaattgtactcagctccttccatccgccgaaataatgaggacatgatttttttcaaccagtttgggtctatcccataagtaagtttctattgtcccctgtccattct

SEQ ID NO: 113475 - DNA, 120 bp, synthetic construct; identical to SEQ ID NO: 34973
  source 1..120: mol_type = other DNA

SEQ ID NO: 113476 - DNA, 120 bp, synthetic construct
  source 1..120: mol_type = other DNA
ataaagtattctgctgcaaacatgtattactcttcaaaacaaaaacaaaaacaagataactctgaggacagagcctggctctgttcacttaaagggtggagcctcgggcatagagggcag

SEQ ID NO: 113477 - DNA, 120 bp, synthetic construct
  source 1..120: mol_type = other DNA
ctgatggtggtttcttttgctgtgcagaagctctttagtttgattagatcccatttgtcaattttggcttttgttgccattgcttttggtgttttagacatgaagtccttgcccatgcct

SEQ ID NO: 113478 - DNA, 120 bp, synthetic construct
  source 1..120: mol_type = other DNA
gatggccagtgatgatgagcattttttcacgtgttttttggctgcataaatgtcttcctttgagaagtgcctgttcatgtccttcgcccactttttgatgggatcgtttgtttttttctt

SEQ ID NO: 113479 - DNA, 120 bp, synthetic construct; identical to SEQ ID NO: 35049
  source 1..120: mol_type = other DNA

SEQ ID NO: 113480 - DNA, 120 bp, synthetic construct; identical to SEQ ID NO: 35050
  source 1..120: mol_type = other DNA

SEQ ID NO: 113481 - DNA, 120 bp, synthetic construct
  source 1..120: mol_type = other DNA
cacacagaaaagctgtggaatggatcattcacgtgttctaatcttgtgactagatagtctcaggacagagaccatggcagatgaatgttttataattaataaataggcagtgagcctggc

SEQ ID NO: 113482 - DNA, 120 bp, synthetic construct
  source 1..120: mol_type = other DNA
attcactgaattgcagatgaagagaagacatagaactccatttctagcaccacatttccctgtagttttcaaggatacagcaatagcaagagttgcgaactcccgttctagtgtctggtt

SEQ ID NO: 113483 - DNA, 120 bp, synthetic construct; identical to SEQ ID NO: 35051
  source 1..120: mol_type = other DNA

SEQ ID NO: 113484 - DNA, 120 bp, synthetic construct
  source 1..120: mol_type = other DNA
gcagtgagcctagatcgtgtcactgcactccaacttgggcaacagagtgagactttgtctcaaaaaaaagaaaagaaaagaaaagagaaaataccaggaatgacttcatagggttagcgt

SEQ ID NO: 113485 - DNA, 120 bp, synthetic construct
  source 1..120: mol_type = other DNA
tgctatgtatatctagaagttgatcggttggtcagtgatattgaccattcactgcatgtgggggcagggatattataccaaagtacaaggaggagtaggaagtccaagcctcttaatata

SEQ ID NO: 113486 - DNA, 120 bp, synthetic construct; identical to SEQ ID NO: 35052
  source 1..120: mol_type = other DNA

SEQ ID NO: 113487 - DNA, 120 bp, synthetic construct
  source 1..120: mol_type = other DNA
atctttctaactacattctcaatttgatggctctgctatgtgcaccggttcgagatgaagcgatacagaaactagagaccataagagatccagtgcagttactgaggtgagagtctagat

SEQ ID NO: 113488 - DNA, 120 bp, synthetic construct; identical to SEQ ID NO: 35053
  source 1..120: mol_type = other DNA

SEQ ID NO: 113489 - DNA, 120 bp, synthetic construct; identical to SEQ ID NO: 34969
  source 1..120: mol_type = other DNA

SEQ ID NO: 113490 - DNA, 120 bp, synthetic construct
  source 1..120: mol_type = other DNA
gggtgcagaaaaaagtgaagctaagagaatgaaggtctgttaaagtggctagggatctcagggggtggatagatgaagcaggaggaataatattatttagggcttggatttcactgtgtt

SEQ ID NO: 113491 - DNA, 120 bp, synthetic construct; identical to SEQ ID NO: 34967
  source 1..120: mol_type = other DNA

SEQ ID NO: 113492 - DNA, 120 bp, synthetic construct
  source 1..120: mol_type = other DNA
gaatacccagatttggaaactactgttttaggagcaggtttcagctttagagccatctagtaagattcgtgtggtatctataaggagattttagccttcatcttgtgtgtagcccctgag

SEQ ID NO: 113493 - DNA, 120 bp, synthetic construct; identical to SEQ ID NO: 34965
  source 1..120: mol_type = other DNA

SEQ ID NO: 113494 - DNA, 120 bp, synthetic construct; identical to SEQ ID NO: 34964
  source 1..120: mol_type = other DNA

SEQ ID NO: 113495 - DNA, 120 bp, synthetic construct; identical to SEQ ID NO: 34963
  source 1..120: mol_type = other DNA

SEQ ID NO: 113496 - DNA, 120 bp, synthetic construct
  source 1..120: mol_type = other DNA
tattaaatacagtatctgggccatccctaggcaaaatgtgatttgctgttttccactagttctctccctttatttttcccacacttctatttcccctcattacctctcccaggggatttc

SEQ ID NO: 113497 - DNA, 120 bp, synthetic construct
  source 1..120: mol_type = other DNA
atagtagccactggtgattctttgaatttctgtggtatcagtcgtaatgtctcctcttccatctctgattttatttatttgggtcttctccattttgttcttcatgagtccggctaaaca

SEQ ID NO: 113498 - DNA, 120 bp, synthetic construct
  source 1..120: mol_type = other DNA
actgtgcagaagctttttacttgatgtgattccatttgtctatttttgccttggtttgcctgtgcttatgggatattactcaagaattttttgcccagaccaatatcctggacagtttcc

SEQ ID NO: 113499 - DNA, 120 bp, synthetic construct
  source 1..120: mol_type = other DNA
aattgctgttgcatggctctatatattgtggaataaacaatctgagatatgggttctagtcctgacttttctgtaaactggtggcagtcttagagaagtgatttaagttctctgagtctc

SEQ ID NO: 113500 - DNA, 120 bp, synthetic construct; identical to SEQ ID NO: 27775
  source 1..120: mol_type = other DNA

SEQ ID NO: 113501 - DNA, 120 bp, synthetic construct
  source 1..120: mol_type = other DNA
gatttcttttggaggtagggaactaacataataagagattaataaatcacaaagtagaaagtatgtcacagctatttaagagttagcaggccgggcgcggtggctcacgcctgtaatccc

SEQ ID NO: 113502 - DNA, 120 bp, synthetic construct
  source 1..120: mol_type = other DNA
ctgcagccttgacctcttctggctcaggtgattctcccacctcagcctcccaagtagctgaggctcaggcgtgtgccaccttgcacatctaattttttgtatatttttttttttagtaga

SEQ ID NO: 113503 - DNA, 120 bp, synthetic construct; identical to SEQ ID NO: 13177
  source 1..120: mol_type = other DNA

SEQ ID NO: 113504 - DNA, 120 bp, synthetic construct
  source 1..120: mol_type = other DNA
ctcttgatatccaagagtaaaactgacagtctctacaatctcttacaatagaagaaaccattatggtggttgataatgtcagctcttctcttctctcctctcctctcctctcttctcctc

SEQ ID NO: 113505 - DNA, 120 bp, synthetic construct
  source 1..120: mol_type = other DNA
ataactttttccctgaacagggttaaaaggggttaaacactacacaaattaatcaaatatcctttttttttttttttttttttgagacggagtctcgctctgtggcccaggcgggagtgc

SEQ ID NO: 113506 - DNA, 120 bp, synthetic construct; identical to SEQ ID NO: 14582
  source 1..120: mol_type = other DNA

SEQ ID NO: 113507 - DNA, 120 bp, synthetic construct
  source 1..120: mol_type = other DNA
acagcttcctacacccaccgcagccccgcacagcctcccacccccgaccccaaccctacacagcccccacccctccccccatcccagcctccacatccctccacacccactcctcccagc

SEQ ID NO: 113508 - DNA, 120 bp, synthetic construct
  source 1..120: mol_type = other DNA
acaatgttagcgagtataccccttgtgaaatttttcttttcctttttttttttttttttgtgacagagtctcactcttgttgcccaagctggagtgcagtggcgcgatcttggttcactg

SEQ ID NO: 113509 - DNA, 120 bp, synthetic construct; identical to SEQ ID NO: 19674
  source 1..120: mol_type = other DNA

SEQ ID NO: 113510 - DNA, 120 bp, synthetic construct; identical to SEQ ID NO: 19676
  source 1..120: mol_type = other DNA

SEQ ID NO: 113511 - DNA, 120 bp, synthetic construct; identical to SEQ ID NO: 19677
  source 1..120: mol_type = other DNA

SEQ ID NO: 113512 - DNA, 120 bp, synthetic construct; identical to SEQ ID NO: 19678
  source 1..120: mol_type = other DNA

SEQ ID NO: 113513 - DNA, 120 bp, synthetic construct; identical to SEQ ID NO: 19679
  source 1..120: mol_type = other DNA

SEQ ID NO: 113514 - DNA, 120 bp, synthetic construct
  source 1..120: mol_type = other DNA
tgtcctctaggcatgggcaaggacttcatgtctaaaacaccaaaagcaatggcaacaaaagccaaaattgacaaatgggatctaattaaactaaagagcttctgcacagcaaaagaaact

SEQ ID NO: 113515 - DNA, 120 bp, synthetic construct; identical to SEQ ID NO: 19680
  source 1..120: mol_type = other DNA

SEQ ID NO: 113516 - DNA, 120 bp, synthetic construct; identical to SEQ ID NO: 20379
  source 1..120: mol_type = other DNA

SEQ ID NO: 113517 - DNA, 120 bp, synthetic construct; identical to SEQ ID NO: 20380
  source 1..120: mol_type = other DNA

SEQ ID NO: 113518 - DNA, 120 bp, synthetic construct; identical to SEQ ID NO: 9073
  source 1..120: mol_type = other DNA

SEQ ID NO: 113519 - DNA, 120 bp, synthetic construct; identical to SEQ ID NO: 9074
  source 1..120: mol_type = other DNA

SEQ ID NO: 113520 - DNA, 120 bp, synthetic construct
  source 1..120: mol_type = other DNA
gcccaaggtaatttacagattcaatgccatctccatcaagctaccaatgactttcttcacagaattggaaaaaactactttaaagttcatatggaaccaaaaaagagcccgcatcgccaa

SEQ ID NO: 113521 - DNA, 120 bp, synthetic construct
  source 1..120: mol_type = other DNA
gctggagaggatgtggagaaataggtacacttttacactgttggtgggactgttaactagttcaaccattgtggaagtcagtgtggcgattcctcagggatctagaactagaaataccat

SEQ ID NO: 113522 - DNA, 120 bp, synthetic construct
  source 1..120: mol_type = other DNA
gtaggccatatgatctgtggcaattattcaactctgctgttatagcgtgaaaacagccacagacaacaggtaaatgaatgagagtagctgtgttggatttggtccacaggaccaaaaaaa

SEQ ID NO: 113523 - DNA, 120 bp, synthetic construct
  source 1..120: mol_type = other DNA
ttattgtttacctcccacttctcagtgagaacatgtggtgtttggctttctgttcctgtgttagctgagaatgatggtttccagcttcatccatgtccctgcaaagaacatgaactcatt

SEQ ID NO: 113524 - DNA, 120 bp, synthetic construct
  source 1..120: mol_type = other DNA
gagtggagagttctgtagatgtctattaggtctgcttgttgcagagctgagttcaattcctggatatccttgttaactttctgtctcattgatctgtctaatgttgacagtggggtgtta

SEQ ID NO: 113525 - DNA, 120 bp, synthetic construct
  source 1..120: mol_type = other DNA
tctttaagaatgttgaatattatcccccactctcttctggtttgtagagtttgtgcagagagatacgctgttagtctgatggccttccctttgtgggtaacctgacctttctctctggct

SEQ ID NO: 113526 - DNA, 120 bp, synthetic construct; identical to SEQ ID NO: 32850
  source 1..120: mol_type = other DNA

SEQ ID NO: 113527 - DNA, 120 bp, synthetic construct; identical to SEQ ID NO: 14671
  source 1..120: mol_type = other DNA

SEQ ID NO: 113528 - DNA, 120 bp, synthetic construct; identical to SEQ ID NO: 14672
  source 1..120: mol_type = other DNA

SEQ ID NO: 113529 - DNA, 120 bp, synthetic construct; identical to SEQ ID NO: 30818
  source 1..120: mol_type = other DNA

SEQ ID NO: 113530 - DNA, 120 bp, synthetic construct; identical to SEQ ID NO: 19891
  source 1..120: mol_type = other DNA

SEQ ID NO: 113531 - DNA, 120 bp, synthetic construct; identical to SEQ ID NO: 19892
  source 1..120: mol_type = other DNA

SEQ ID NO: 113532 - DNA, 120 bp, synthetic construct; identical to SEQ ID NO: 27713
  source 1..120: mol_type = other DNA

SEQ ID NO: 113533 - DNA, 120 bp, synthetic construct; identical to SEQ ID NO: 27714
  source 1..120: mol_type = other DNA

SEQ ID NO: 113534 - DNA, 120 bp, synthetic construct; identical to SEQ ID NO: 27715
  source 1..120: mol_type = other DNA

SEQ ID NO: 113535 - DNA, 120 bp, synthetic construct; identical to SEQ ID NO: 29743
  source 1..120: mol_type = other DNA

SEQ ID NO: 113536 - DNA, 120 bp, synthetic construct; identical to SEQ ID NO: 29744
  source 1..120: mol_type = other DNA

SEQ ID NO: 113537 - DNA, 120 bp, synthetic construct; identical to SEQ ID NO: 14657
  source 1..120: mol_type = other DNA

SEQ ID NO: 113538 - DNA, 120 bp, synthetic construct; identical to SEQ ID NO: 14658
  source 1..120: mol_type = other DNA

SEQ ID NO: 113539 - DNA, 120 bp, synthetic construct
  source 1..120: mol_type = other DNA
tctgactacttttttgtattttttgtagagatagtgtttcaccgttttagccaggatggtttcaatctcctgaccctgtgattgaaatctcccacctcagcctcccaaagtgctgggatt

SEQ ID NO: 113540 - DNA, 120 bp, synthetic construct
  source 1..120: mol_type = other DNA
tccaaaaccatatccaggccatcatcaatcattctatatgacaaatgtttcttctaacatccccacgatatcaccccttaccacaagacctcccttcagcttaatctctcccactctatg

SEQ ID NO: 113541 - DNA, 120 bp, synthetic construct; identical to SEQ ID NO: 14659
  source 1..120: mol_type = other DNA

SEQ ID NO: 113542 - DNA, 120 bp, synthetic construct
  source 1..120: mol_type = other DNA
cctgaggtcaggagttcaagactagcctggccaacatggcgaaaccccctctccactaaaaatataaaaattggccgggtgcagtggctcatgcctgtaatcccagcactttgggaggcc

SEQ ID NO: 113543 - DNA, 120 bp, synthetic construct; identical to SEQ ID NO: 25465
  source 1..120: mol_type = other DNA

SEQ ID NO: 113544 - DNA, 120 bp, synthetic construct
  source 1..120: mol_type = other DNA
gcctgttgtggggtggggggaggggggagggacagcattaggagatatacctaatgtgaatgacgtaaatgatgagttaattggtgcagcacaccaacatggcacatgtatacatatgta

SEQ ID NO: 113545 - DNA, 120 bp, synthetic construct
  source 1..120: mol_type = other DNA
aaaatgatgagttcatgtcctttgtagggacatggatgaagctggaaaccatcattctcagcaaactatcacaacggcaaaaaaccaaacaccacatgttctcacccataggtgggaatt

SEQ ID NO: 113546 - DNA, 120 bp, synthetic construct; identical to SEQ ID NO: 25468
  source 1..120: mol_type = other DNA

SEQ ID NO: 113547 - DNA, 120 bp, synthetic construct
  source 1..120: mol_type = other DNA
taatttttaaatttttagaaggatgaggtctcactatattgccaaggctggtctcaactcctggacttaagtgatcctcccacctcagcctcccaaagttctgggattacaagagtgagt

SEQ ID NO: 113548 - DNA, 120 bp, synthetic construct; identical to SEQ ID NO: 12407
  source 1..120: mol_type = other DNA

SEQ ID NO: 113549 - DNA, 120 bp, synthetic construct; identical to SEQ ID NO: 12408
  source 1..120: mol_type = other DNA

SEQ ID NO: 113550 - DNA, 120 bp, synthetic construct; identical to SEQ ID NO: 12404
  source 1..120: mol_type = other DNA

SEQ ID NO: 113551 - DNA, 120 bp, synthetic construct; identical to SEQ ID NO: 12405
  source 1..120: mol_type = other DNA

SEQ ID NO: 113552 - DNA, 120 bp, synthetic construct; identical to SEQ ID NO: 12406
  source 1..120: mol_type = other DNA

SEQ ID NO: 113553 - DNA, 120 bp, synthetic construct
  source 1..120: mol_type = other DNA
tatgagtgagaatatgcggtgtttggttttttgttcttgtgatagtttactgagaatgatgatttccaatttcatccatgtccctacaaaggacatgaactcatcatttttcatggctac

SEQ ID NO: 113554 - DNA, 120 bp, synthetic construct
  source 1..120: mol_type = other DNA
ttgtcaaagatcagatagttgtagatatgcggcgttatttctgagggctctgttctgttccattgatctatatctctgttttggtaccagtaccatgctgttctggttactgtagccttg

SEQ ID NO: 113555 - DNA, 120 bp, synthetic construct
  source 1..120: mol_type = other DNA
ctggatttggtttgccagtattttattgaggatttttgcatcaatgttcttcaaggatattggtctaaaattctcttttttggttgtgtctctgcctggctttggtatcaggataatgct

SEQ ID NO: 113556 - DNA, 120 bp, synthetic construct
  source 1..120: mol_type = other DNA
tctgtagatgtctattaggtctgcttggagcagagctgagttcaattcctaggtatccttgttaactttctgtctcgttgatctgtctaatgttgacggggtgttaaagtctcccattat

SEQ ID NO: 113557 - DNA, 120 bp, synthetic construct
  source 1..120: mol_type = other DNA
tatcttctggcttgtagagtttctgccaagagatccgctgttagtctgatgggcttccctttgtgggtaacctgacctttctctctggctgcccttaacattttttccttcatttcaact

SEQ ID NO: 113558 - DNA, 120 bp, synthetic construct
  source 1..120: mol_type = other DNA
gctagaggtccactccagaccctctttgcctgggtaccagcagtggtggctgcagaacagcagattttcgtgaaccacaaatgctgctgtctgatcgttcctctggaagttttgtctcag

SEQ ID NO: 113559 - DNA, 120 bp, synthetic construct; identical to SEQ ID NO: 32146
  source 1..120: mol_type = other DNA

SEQ ID NO: 113560 - DNA, 120 bp, synthetic construct
  source 1..120: mol_type = other DNA
agccctttgtcagatgagtaggttgtgaaaattttctcccattttgtaggttgcctgttcactctgctggtagtttcttttgctgtgcagaagctctttagtttaatgagatcccatttg

SEQ ID NO: 113561 - DNA, 120 bp, synthetic construct
  source 1..120: mol_type = other DNA
gtgccctttagcgctgtcattgactccacccttgtattagtctgtacttgcattgctataaagaaatacctgacactgggtaatttggaagaaaagaggtttggctttttaccaagccaa

SEQ ID NO: 113562 - DNA, 120 bp, synthetic construct; identical to SEQ ID NO: 32147
  source 1..120: mol_type = other DNA

SEQ ID NO: 113563 - DNA, 120 bp, synthetic construct
  source 1..120: mol_type = other DNA
tctgttcatatcctttgcccactttttaatggggttgtttgtttttttcttgtaaatttgttggagttcattctagattctggatattagccctttgtcagatgagtagactgcaaaaat

SEQ ID NO: 113564 - DNA, 120 bp, synthetic construct
  source 1..120: mol_type = other DNA
gcttgatggggatggcattgaatctataaattaccttgggcagtatggccattttcataatattgattcttcctacccatgagcatggaatgttcttccatttgtttgtatcctctttta

SEQ ID NO: 113565 - DNA, 120 bp, synthetic construct
  source 1..120: mol_type = other DNA
tcggctgggaatccgtatggtcctggaattttttttggttggtaagctattaactattgcctcaatttcagagcctgttattggtctattcagagattcaacttcttcctggtttagtct

SEQ ID NO: 113566 - DNA, 120 bp, synthetic construct
  source 1..120: mol_type = other DNA
cttgttaactttctgtctcgttgatctgtctaatgttgacagtggggtggtaaagtctcccattattattgtgtgggagtctaagtctctttgtaggtctctaaggacttgctttatgaa

SEQ ID NO: 113567 - DNA, 120 bp, synthetic construct
  source 1..120: mol_type = other DNA
ggaagttctcctggataatatactgcagagtgttttccaacttggttccattctccccatcactttcaggtacaccaatcagatgtagatttggtcttttcacatagtcccatatttctt

SEQ ID NO: 113568 - DNA, 120 bp, synthetic construct; identical to SEQ ID NO: 15993
  source 1..120: mol_type = other DNA

SEQ ID NO: 113569 - DNA, 120 bp, synthetic construct
  source 1..120: mol_type = other DNA
tagaactatcccttatatactcaggcaaaaacacacacacacaccctccaggccaggtacagcaatcccttatatacacaggcaaacacacacacacacacacacacacacacacacaca

SEQ ID NO: 113570 - DNA, 120 bp, synthetic construct; identical to SEQ ID NO: 15994
  source 1..120: mol_type = other DNA

SEQ ID NO: 113571 - DNA, 120 bp, synthetic construct; identical to SEQ ID NO: 15995
  source 1..120: mol_type = other DNA

SEQ ID NO: 113572 - DNA, 120 bp, synthetic construct
  source 1..120: mol_type = other DNA
gcatctctcagacctcagactaccaactgggaagcatgttttcattctgcataaaatctcacaatagcaaagacttggagccaacccaaatgtccaacgatgatagactggattaagaaa

SEQ ID NO: 113573 - DNA, 120 bp, synthetic construct; identical to SEQ ID NO: 35262
  source 1..120: mol_type = other DNA

SEQ ID NO: 113574 - DNA, 120 bp, synthetic construct
  source 1..120: mol_type = other DNA
tgaaaaaatgctcaccatcactggctatcagagaaatgcaaatcaaaaccacaatgagataccatctcacaccagttagaatggcaatcactaaaaagtcaggaaacaaccggtgttgga

SEQ ID NO: 113575 - DNA, 120 bp, synthetic construct
  source 1..120: mol_type = other DNA
tcttccatttctttgtatcctcttttatttcattgagcagtggtttgtagttctccttgaagaggtccttcacgtcccttgtaatttggattcctaggtattttattctttttgaagcag

SEQ ID NO: 113576 - DNA, 120 bp, synthetic construct
  source 1..120: mol_type = other DNA
ttatccatttcttctagattttctagtttatttgcgtagaggtgtttgtagtattctctgatggtagtttgtatttctgtgggattggtggtgacatcccctttaccattttttattgcg

SEQ ID NO: 113577 - DNA, 120 bp, synthetic construct
  source 1..120: mol_type = other DNA
aaagtctgttttatcagagactaggatggcaatcccggcctttttttgttttccatttgcttggtagatcttcctccatccttttattttcaggctatgtgtgtctctgcctgtgagatg

SEQ ID NO: 113578 - DNA, 120 bp, synthetic construct
  source 1..120: mol_type = other DNA
taaacttcccttctcgcttcatttcattcatttcatcttccatcactgataccctttattccagttgatcgcatcggctcctgaggcttctgcattcttcacgtagttctcgagccttgg

SEQ ID NO: 113579 - DNA, 120 bp, synthetic construct; identical to SEQ ID NO: 35263
  source 1..120: mol_type = other DNA

SEQ ID NO: 113580 - DNA, 120 bp, synthetic construct; identical to SEQ ID NO: 6735
  source 1..120: mol_type = other DNA

SEQ ID NO: 113581 - DNA, 120 bp, synthetic construct; identical to SEQ ID NO: 35265
  source 1..120: mol_type = other DNA

SEQ ID NO: 113582 - DNA, 120 bp, synthetic construct
  source 1..120: mol_type = other DNA
gtcctttgtagggacatggatgaaattggaaaccatcattctcagtaaactatcgcaagaacaaaaaaccaaacaccgcatattctcactcataggtgggaattgaacaatgagatcaca

SEQ ID NO: 113583 - DNA, 120 bp, synthetic construct
  source 1..120: mol_type = other DNA
aaataaaagaggatacaaacaaatggaagaacattccacgctcatgggtaggaagaatcaatatgaaaatggccatgctgcccaaggtaatttatagattcaatgccatccccatcaagc

SEQ ID NO: 113584 - DNA, 120 bp, synthetic construct
  source 1..120: mol_type = other DNA
agaaaaaaacaaacaaccccatcaaaaagtgggcgaaggatatgaacagacacttctcgaaagaagacatttatgcagccaacagatacatgaaaaaatgctcatcatcattggccatca

SEQ ID NO: 113585 - DNA, 120 bp, synthetic construct; identical to SEQ ID NO: 35266
  source 1..120: mol_type = other DNA

SEQ ID NO: 113586 - DNA, 120 bp, synthetic construct; identical to SEQ ID NO: 35267
  source 1..120: mol_type = other DNA

SEQ ID NO: 113587 - DNA, 120 bp, synthetic construct; identical to SEQ ID NO: 35255
  source 1..120: mol_type = other DNA

SEQ ID NO: 113588 - DNA, 120 bp, synthetic construct
  source 1..120: mol_type = other DNA
atacccagtaatgggatggctgggtcaaatggtatttctagttctagatccctgaggaattgccacactgacttccacaatggttgaactagtttacagtcccaccaccagtgtaaaagt

SEQ ID NO: 113589 - DNA, 120 bp, synthetic construct
  source 1..120: mol_type = other DNA
agaaatggggaaaggattccctatttaataaatggtgatgggaaaactggccagccatatgtagaaagctgaaactggatcccttccttacatcttacacaaaaactaattcaagatgga

SEQ ID NO: 113590 - DNA, 120 bp, synthetic construct
  source 1..120: mol_type = other DNA
aagagtttaagaaggggaaaagaaggtgccttttctgttaaagaaaatttttttttgagacattgtttcactctgtcatccaggctggagtgcagtggcacaatcacagcccactgcagc

SEQ ID NO: 113591 - DNA, 120 bp, synthetic construct
  source 1..120: mol_type = other DNA
taaattgtgatgtaagaatgaaataagttactatttttgttaagctattgagatactgtgtgtgtgtgtggggggggtgggggtgggggggagggtgtgtgtgtttaatatggttgttag

SEQ ID NO: 113592 - DNA, 120 bp, synthetic construct
  source 1..120: mol_type = other DNA
cttggagagctgtcatctatgaaaacagagagctgagtcctcagaaatcgggccataggacaagacagggtgtgtatgtgagaaaataacatacatgtatttttaagaaaaatacaaaag

SEQ ID NO: 113593 - DNA, 120 bp, synthetic construct; identical to SEQ ID NO: 35257
  source 1..120: mol_type = other DNA

SEQ ID NO: 113594 - DNA, 120 bp, synthetic construct
  source 1..120: mol_type = other DNA
ttcatgtgttttttggctgcataaatgtcttcttttgagaggtgtctgttcatgtccttcacccactttttgatggggttgtttgtttttttcttgtaaatttgtttgagttcattgtag

SEQ ID NO: 113595 - DNA, 120 bp, synthetic construct; identical to SEQ ID NO: 35258
  source 1..120: mol_type = other DNA

SEQ ID NO: 113596 - DNA, 120 bp, synthetic construct
  source 1..120: mol_type = other DNA
gcagcctaactgggaggcaccccccagtaggggcagactgacatctcacacggccgggtactcctctgagacaaaacttccagaggaatgatcagacagcaccattcacggttcatgaaa

SEQ ID NO: 113597 - DNA, 120 bp, synthetic construct
  source 1..120: mol_type = other DNA
aatctgacgattatgtgtcttggagttgctcttctcgaggagtatctttgtgccattctctgtatttcctgaatctgaatgttggcctgccttgctagatttgggaagttctcctggata

SEQ ID NO: 113598 - DNA, 120 bp, synthetic construct
  source 1..120: mol_type = other DNA
aactcagctctgcaccaagcagacttaatagacatctacagaactctccaccccaaatcaacagaatatacattttgttcagcaccacaccacacctattccaaaattgatcacatagtt

SEQ ID NO: 113599 - DNA, 120 bp, synthetic construct
  source 1..120: mol_type = other DNA
ttttatgaggccagcatcatcctgataccaaagccgggcagacacacaacagaaaaagagaattttagaccaatatccttgatgaatattgatgcaaaaatcctcaataaaatactggca

SEQ ID NO: 113600 - DNA, 120 bp, synthetic construct
  source 1..120: mol_type = other DNA
tattgaccaatggaacagaatagagccctcagaaataatgccacatatctacaactatctgatctttgacaaacctgagaaaaacaagcaatggggaaaggattccctatttaataaatg

SEQ ID NO: 113601 - DNA, 120 bp, synthetic construct
  source 1..120: mol_type = other DNA
acacttttacactgttggtgggactgtaaactagttcaaccattgtggaagttagtgtagcgatttcctcggggatctagaactagaaataccatttgacccagccatcccattactggg

SEQ ID NO: 113602 - DNA, 120 bp, synthetic construct; identical to SEQ ID NO: 35259
  source 1..120: mol_type = other DNA

SEQ ID NO: 113603 - DNA, 120 bp, synthetic construct
  source 1..120: mol_type = other DNA
cagaaaggcaaagagtggtaggaacactcatacacataagtcctggacccataatcttgttacctcagtacgctagccaactttgcaagctggtcaccaacaaataagaattagaaagta

SEQ ID NO: 113604 - DNA, 120 bp, synthetic construct; identical to SEQ ID NO: 35261
  source 1..120: mol_type = other DNA

SEQ ID NO: 113605 - DNA, 120 bp, synthetic construct
  source 1..120: mol_type = other DNA
ttttttttttttttgtatttttagtagggacagagtttcgccatgttggtctggctggtattgaacttccaacctcaggtaatccgcctgcctcggcctcccaaagtcctgggattacag

SEQ ID NO: 113606 - DNA, 120 bp, synthetic construct
  source 1..120: mol_type = other DNA
gcccactttttgatggggttgtttgtttctttcttgtaaatttgtttgagttcactgtagattctggatattagccctttgtcagatgagtaggttgcgaaaattttctcccattttgta

SEQ ID NO: 113607 - DNA, 120 bp, synthetic construct; identical to SEQ ID NO: 27165
  source 1..120: mol_type = other DNA

SEQ ID NO: 113608 - DNA, 120 bp, synthetic construct; identical to SEQ ID NO: 27166
  source 1..120: mol_type = other DNA

SEQ ID NO: 113609 - DNA, 120 bp, synthetic construct; identical to SEQ ID NO: 27167
  source 1..120: mol_type = other DNA

SEQ ID NO: 113610 - DNA, 120 bp, synthetic construct; identical to SEQ ID NO: 27168
  source 1..120: mol_type = other DNA

SEQ ID NO: 113611 - DNA, 120 bp, synthetic construct; identical to SEQ ID NO: 5634
  source 1..120: mol_type = other DNA

SEQ ID NO: 113612 - DNA, 120 bp, synthetic construct; identical to SEQ ID NO: 27159
  source 1..120: mol_type = other DNA

SEQ ID NO: 113613 - DNA, 120 bp, synthetic construct; identical to SEQ ID NO: 27160
  source 1..120: mol_type = other DNA

SEQ ID NO: 113614 - DNA, 120 bp, synthetic construct
  source 1..120: mol_type = other DNA
ggaaggaagggaaggaaggaaggacgggaaggaagggaaggaaggaaggaaggaaagaaagaaaaagagaaagaagccaacaataataattcctggtttcagtatctggtattctagtgt

SEQ ID NO: 113615 - DNA, 120 bp, synthetic construct
  source 1..120: mol_type = other DNA
tatatatatatatatatagagagagagagagagagagagagagagagagagtgtcaggtgttgtcttgttgttgggcaggtagattggagatgagtaaagctcttgtcctgcccttgatg

SEQ ID NO: 113616 - DNA, 120 bp, synthetic construct; identical to SEQ ID NO: 27162
  source 1..120: mol_type = other DNA

SEQ ID NO: 113617 - DNA, 120 bp, synthetic construct
  source 1..120: mol_type = other DNA
gcaaggagtcataaaattcagactatatatatcaaatgttttaacttaaatatagaaaaataggccaggcatggtggctcatgcctgtaatcccagcgctttgggaggccaaggcaggtg

SEQ ID NO: 113618 - DNA, 120 bp, synthetic construct
  source 1..120: mol_type = other DNA
ttgttcatgtctgaaatggcacatcattgtatcacctcacatgcaaactcctcactcactttaagtctttcagcatttctaccctggttggtagtggcttctttcctggcaactatgatt

SEQ ID NO: 113619 - DNA, 120 bp, synthetic construct
  source 1..120: mol_type = other DNA
gcagctgccccgtctgagaagtgaggagcctctccgcccggcagccaccccatctgggaagtgaggagcgtctccgcccggcagccaccccgtccgggagggaggtggggggggtcagcc

SEQ ID NO: 113620 - DNA, 120 bp, synthetic construct
  source 1..120: mol_type = other DNA
ttggctatgtctatttcagggtgtctgcccacatctctctttatttactccttctctcctttctctctcttctccatagattttctcatctaatgcaaaatgtcctcaagaaggtgggca

SEQ ID NO: 113621 - DNA, 120 bp, synthetic construct; identical to SEQ ID NO: 27164
  source 1..120: mol_type = other DNA

SEQ ID NO: 113622 - DNA, 120 bp, synthetic construct
  source 1..120: mol_type = other DNA
tgtgggctcttttttggttccatatgaactttaaagtagttttttccaattctatgaggaaagtcattggtagcttgatgggaatggcattgaatctataaattaccttcagcagtatgg

SEQ ID NO: 113623 - DNA, 120 bp, synthetic construct
  source 1..120: mol_type = other DNA
tagtttcagaaggaatggcaccagctcctctttgtacctctgttagaatttggctgtgaatctatctggtcctagactttttttggttggtaagctattaattattgcctcaatttcaga

SEQ ID NO: 113624 - DNA, 120 bp, synthetic construct; identical to SEQ ID NO: 25990
  source 1..120: mol_type = other DNA

SEQ ID NO: 113625 - DNA, 120 bp, synthetic construct
  source 1..120: mol_type = other DNA
caatgtgcaggttagctacatatgtatacatgtgccatgctggtgtgctgcacccactaactcgtcatctagcattaggtatatctcccaatgctctccctcctccctccccccacccca

SEQ ID NO: 113626 - DNA, 120 bp, synthetic construct
  source 1..120: mol_type = other DNA
gccagttttcccagcaccatttattaaatagggaatcctttccccattgctcgtttttctcaggtttgtcaaagatcagatagttgtagatatgcggcgttatttctgagggctctgttc

SEQ ID NO: 113627 - DNA, 120 bp, synthetic construct
  source 1..120: mol_type = other DNA
ttattattttgagatacgtcccatcaatacctaatttattaagagtttttagcgtgaagggttgttgaattttgtcaaaggcctttcctgcatctattgagataatcatgtggtttttgt

SEQ ID NO: 113628 - DNA, 120 bp, synthetic construct
  source 1..120: mol_type = other DNA
ccttcatttcgttatgtacccaatagtcattcaggagcaagttgttcagtttccatggagttgagcggttttgagtgagtttcttaatcctgagttctagtttgattgcactgtggtctg

SEQ ID NO: 113629 - DNA, 120 bp, synthetic construct
  source 1..120: mol_type = other DNA
gaaattctgggttgaaaattcttttctttaagaatgtttaatattggctcccattctcttctggcttgtagagtttctgccgagagatccgctgttagtctgatgggcttccctttgtgg

SEQ ID NO: 113630 - DNA, 120 bp, synthetic construct
  source 1..120: mol_type = other DNA
gtctttgatgatggtgatgtacagatgggtttttggtgtggatgtcctttctgtttgatagctttccttctgacagacaggaccctcagctgcaggtctgttggagtttgctagaggtcc

SEQ ID NO: 113631 - DNA, 120 bp, synthetic construct
  source 1..120: mol_type = other DNA
cgctgggagctgtagaccggagctgttcctattcggccatcttggctcctccctgaaaaacttttattttttaaggtacttttcatctcacaactttatatacataattaatttggtgtt

SEQ ID NO: 113632 - DNA, 120 bp, synthetic construct; identical to SEQ ID NO: 25991
  source 1..120: mol_type = other DNA

SEQ ID NO: 113633 - DNA, 120 bp, synthetic construct; identical to SEQ ID NO: 25992
  source 1..120: mol_type = other DNA

SEQ ID NO: 113634 - DNA, 120 bp, synthetic construct
  source 1..120: mol_type = other DNA
gcaataaacatacgtgtgcatgtgtctttatagcagcatgatttatagtcctttacccagtaatggggtaatgggatggctgggtcaaatggtatttccagttctagaaccctgaggaat

SEQ ID NO: 113635 - DNA, 120 bp, synthetic construct
  source 1..120: mol_type = other DNA
gtatggccattttcacgatattgattcttcctacccatgagcatggaatgttcttccatttgtttgtatcctcttttatttccttgaccagtggtttgtagttctccttgaagaagtcct

SEQ ID NO: 113636 - DNA, 120 bp, synthetic construct
  source 1..120: mol_type = other DNA
attgaggatttttgcatcaatgttcatcaaggatattggtctaaaattcttttttgttgtgtctctgcctggctttggtatcagaatgatgctggcctcataaaatgagttagggaggat

SEQ ID NO: 113637 - DNA, 120 bp, synthetic construct
  source 1..120: mol_type = other DNA
tataatttctgttcttttacatttgcagaggagagctttacttccaagtatgtggtcaattttggaataggtgtggtgtggtgctgaaaaaaatgtatattctgttgatttggggtggag

SEQ ID NO: 113638 - DNA, 120 bp, synthetic construct
  source 1..120: mol_type = other DNA
gaaaattcttttctttaagaatgttgaatattggcccccactctcttctggcttgtagggtttctgctgagagatccgctattagtctgatgggcttccctttgagggtaactcgacctt

SEQ ID NO: 113639 - DNA, 120 bp, synthetic construct
  source 1..120: mol_type = other DNA
ctcccagttaggctgctcaggggtcaggggtcagggacccacttgaggaggcactctgccagttttcagatctccagctgcgtgctgggagaaccactgctctcttcaaagctgtcagac

SEQ ID NO: 113640 - DNA, 120 bp, synthetic construct
  source 1..120: mol_type = other DNA
ccttgacttcacaggctcaagtgatcctcccaccccaggctcccaagtagctgggactacaggcacctccacacctggctaatttttgtatttttctacagacaggatttcaccatgttg

SEQ ID NO: 113641 - DNA, 120 bp, synthetic construct; identical to SEQ ID NO: 12145
  source 1..120: mol_type = other DNA

SEQ ID NO: 113642 - DNA, 120 bp, synthetic construct
  source 1..120: mol_type = other DNA
tccgcatcctctccagcacctgctgtttcctgactttttaatgattgccattctaactggtgtgagatgatatctcatagtggttttgatttgcatttctctgatggccagtgatgatga

SEQ ID NO: 113643 - DNA, 120 bp, synthetic construct
  source 1..120: mol_type = other DNA
ggatggcattgaatctgtaaattaccttgggcagtatggccattttcacgatattgattcttcctacccatgagcatggaatgttcttccatttgtttgtgtcctcttttatttccttga

SEQ ID NO: 113644 - DNA, 120 bp, synthetic construct
  source 1..120: mol_type = other DNA
gcctgttattggtctattcagagattcaacttcttcctggtttagtcttgggagagtgtatgtgtcgaggaatgtatccatttcttctagattttctagtttatttgcgtagaggtgttt

SEQ ID NO: 113645 - DNA, 120 bp, synthetic construct
  source 1..120: mol_type = other DNA
gtctctttgtaggtcactgaggacttgctttatgaatctgggtgctcctgtattgggtgcataaatatttaggatagttagctcctcttgttgaattgatccctttaccattatgtaatg

SEQ ID NO: 113646 - DNA, 120 bp, synthetic construct
  source 1..120: mol_type = other DNA
tgccgagagatccgctgttagtctgatgggctttcctttgagggtaacccgacctttctctctggctgcccttaacattttttccttcatttcaactttggtgaatctgacaattatgtg

SEQ ID NO: 113647 - DNA, 120 bp, synthetic construct
  source 1..120: mol_type = other DNA
tacagaggcaggcaggcctccttgagctgtggtgggctccacccagttcgagcttcgcggctgctttgtttacctaagcgagcctgggctatggcgggcgcccctcccccagcctcgttg

SEQ ID NO: 113648 - DNA, 120 bp, synthetic construct; identical to SEQ ID NO: 12146
  source 1..120: mol_type = other DNA

SEQ ID NO: 113649 - DNA, 120 bp, synthetic construct; identical to SEQ ID NO: 12147
  source 1..120: mol_type = other DNA

SEQ ID NO: 113650 - DNA, 120 bp, synthetic construct
  source 1..120: mol_type = other DNA
gaagtggggagcgcctccacccggccgccctgtctgggatgtgaggagcgcctctgcccggacaccaccccatctgggaggtgaggagcacctctgcctggctgccccgtctgggaactg

SEQ ID NO: 113651 - DNA, 120 bp, synthetic construct; identical to SEQ ID NO: 12148
  source 1..120: mol_type = other DNA

SEQ ID NO: 113652 - DNA, 120 bp, synthetic construct; identical to SEQ ID NO: 3337
  source 1..120: mol_type = other DNA

SEQ ID NO: 113653 - DNA, 120 bp, synthetic construct
  source 1..120: mol_type = other DNA
aatatcggactccaaattcttcagttttggaacttggactggctcgctttgctcttcagcctgcagatggcctattgtgggaccttgtgatggtgtgagttaatacttaataaactcccc

SEQ ID NO: 113654 - DNA, 120 bp, synthetic construct; identical to SEQ ID NO: 12150
  source 1..120: mol_type = other DNA

SEQ ID NO: 113655 - DNA, 120 bp, synthetic construct
  source 1..120: mol_type = other DNA
gctcaatggtgcccaggctggagtgcagtggcgtgatctcggctcgctacggcctccacctcccagccgcctgccttggccccccaaagtgcggagattgcagcctctgcccggccgcca

SEQ ID NO: 113656 - DNA, 120 bp, synthetic construct
  source 1..120: mol_type = other DNA
ccccaaccctgtgctctctgaaacatgtgctgtgtccactcagggttaaatggattaagggcggtgcaagatgtgctttgttaaacagatgcttgaaggcagcatgctcgtttaagagtc

SEQ ID NO: 113657 - DNA, 120 bp, synthetic construct
  source 1..120: mol_type = other DNA
ggccaaagaaagcattttccttccaaagaagctctcaggttactggaggggcaaaagaacagataaagtttaatgttgctccgggggagaagattaggggaacactggttaaagaaaggc

SEQ ID NO: 113658 - DNA, 120 bp, synthetic construct; identical to SEQ ID NO: 7403
  source 1..120: mol_type = other DNA

SEQ ID NO: 113659 - DNA, 120 bp, synthetic construct
  source 1..120: mol_type = other DNA
aaaaaaaaaaaaaaaaaaaaggaaagaaagaaaagaaaagaaaaagagcatctagagcgggcgcagtggctcacgctgtaattccagcactttgggaggctgaggtgggctgatcacaag

SEQ ID NO: 113660 - DNA, 120 bp, synthetic construct
  source 1..120: mol_type = other DNA
gtagtcccagctacttgggaggctgaggcaggagaatcgcttgaacccgccaggcggaggttgcagtgagctgagatcacgactgcactccaacctgggtgacagagcgagactccatct

SEQ ID NO: 113661 - DNA, 120 bp, synthetic construct
  source 1..120: mol_type = other DNA
agacaaacatcatgttctcacttatttgtgggatctagaaatcaaaacaattgaactcatggagatagatgattaccagaggctgggaagggtagtggaaagtggtgggtatggtaccaa

SEQ ID NO: 113662 - DNA, 120 bp, synthetic construct
  source 1..120: mol_type = other DNA
gtgattttttttttttttttttgagacagggtcttactctgtggtctgtcacccaggttagagtgcagtggcataatctcggcccactgccacctccacctcccaggctcaagcaatctc

SEQ ID NO: 113663 - DNA, 120 bp, synthetic construct; identical to SEQ ID NO: 15244
  source 1..120: mol_type = other DNA

SEQ ID NO: 113664 - DNA, 120 bp, synthetic construct; identical to SEQ ID NO: 15245
  source 1..120: mol_type = other DNA

SEQ ID NO: 113665 - DNA, 120 bp, synthetic construct; identical to SEQ ID NO: 15246
  source 1..120: mol_type = other DNA

SEQ ID NO: 113666 - DNA, 120 bp, synthetic construct; identical to SEQ ID NO: 15247
  source 1..120: mol_type = other DNA

SEQ ID NO: 113667 - DNA, 120 bp, synthetic construct; identical to SEQ ID NO: 15248
  source 1..120: mol_type = other DNA

SEQ ID NO: 113668 - DNA, 120 bp, synthetic construct
  source 1..120: mol_type = other DNA
tgatctgcccgcatcagcctcccatagtgctgggattacaggcatgagccaccatgcccggcaataaatgttcatactaatatcttccagtttgtgtatagaatttttataactgtttct

SEQ ID NO: 113669 - DNA, 120 bp, synthetic construct; identical to SEQ ID NO: 26235
  source 1..120: mol_type = other DNA

SEQ ID NO: 113670 - DNA, 120 bp, synthetic construct; identical to SEQ ID NO: 26236
  source 1..120: mol_type = other DNA

SEQ ID NO: 113671 - DNA, 120 bp, synthetic construct; identical to SEQ ID NO: 26237
  source 1..120: mol_type = other DNA

SEQ ID NO: 113672 - DNA, 120 bp, synthetic construct; identical to SEQ ID NO: 26238
  source 1..120: mol_type = other DNA

SEQ ID NO: 113673 - DNA, 120 bp, synthetic construct; identical to SEQ ID NO: 26239
  source 1..120: mol_type = other DNA

SEQ ID NO: 113674 - DNA, 120 bp, synthetic construct
  source 1..120: mol_type = other DNA
aggttgcagtgagccaagatcacgccaaaccactccagcctgggcaaaaaagagcgagactctgttatcaaaaaaaaaaaaaaagaaagaaaaaaagaaagaaagcaagcctccaactcg

SEQ ID NO: 113675 - DNA, 120 bp, synthetic construct
  source 1..120: mol_type = other DNA
cacagatccccacctaccccacggatgaaaaccaattcacatatccccacctaccccacacataaaaaccaatcccacagatccccacctaccccacacaagaaaaccaatcccacagat

SEQ ID NO: 113676 - DNA, 120 bp, synthetic construct; identical to SEQ ID NO: 26242
  source 1..120: mol_type = other DNA

SEQ ID NO: 113677 - DNA, 120 bp, synthetic construct; identical to SEQ ID NO: 26243
  source 1..120: mol_type = other DNA

SEQ ID NO: 113678 - DNA, 120 bp, synthetic construct; identical to SEQ ID NO: 26244
  source 1..120: mol_type = other DNA

SEQ ID NO: 113679 - DNA, 120 bp, synthetic construct; identical to SEQ ID NO: 26245
  source 1..120: mol_type = other DNA

SEQ ID NO: 113680 - DNA, 120 bp, synthetic construct; identical to SEQ ID NO: 26246
  source 1..120: mol_type = other DNA

SEQ ID NO: 113681 - DNA, 120 bp, synthetic construct
  source 1..120: mol_type = other DNA
cacccgggggccgcgcctcactcaccctacacgtgacagggacacccgggggccgcgcctcactcaccctgcacgtgacagggacacccgggggccgcgcctcactcaccctacacgtga

SEQ ID NO: 113682 - DNA, 120 bp, synthetic construct
  source 1..120: mol_type = other DNA
ctcactcaccctgcacgggacagggacacctggggaccgcgcctcactcaccctgcacgggacagggacacccggggacagtgcctcactcaccctacacgtgacagggacacctgggga

SEQ ID NO: 113683 - DNA, 120 bp, synthetic construct; identical to SEQ ID NO: 26247
  source 1..120: mol_type = other DNA

SEQ ID NO: 113684 - DNA, 120 bp, synthetic construct; identical to SEQ ID NO: 29958
  source 1..120: mol_type = other DNA

SEQ ID NO: 113685 - DNA, 120 bp, synthetic construct; identical to SEQ ID NO: 29959
  source 1..120: mol_type = other DNA

SEQ ID NO: 113686 - DNA, 120 bp, synthetic construct
  source 1..120: mol_type = other DNA
aggtacgcttctttgaagacgtggaactcgtcctcctcgtacttcacgggggccttcaggccgatgttctccgaagcgaacggaccctcggggcttaagagctccgtcaccatcgcatcc

SEQ ID NO: 113687 - DNA, 120 bp, synthetic construct
  source 1..120: mol_type = other DNA
ggttggagaagggggaagggtgagggacaggaacctggggggaggggaagaggcgcccgggcagtgggcggggcctgggcgtggggcggagtcgaggtcggggcggggaggtaaaggcgg

SEQ ID NO: 113688 - DNA, 120 bp, synthetic construct
  source 1..120: mol_type = other DNA
cctcccaaagtgctgggattataggtgtgagccaccacacctagtctatacctaattttcttcataaaatagatactgtgccaaactagttgggtgattggcagttgtaatcaggtaaca

SEQ ID NO: 113689 - DNA, 120 bp, synthetic construct
  source 1..120: mol_type = other DNA
cctcagcctcccaaagtgctgggattataggtgtgagccacagcacctggccttttgtgtgtgtgtgtgtgtgtgtgtgtgtgtatacacaagatatatatgtatatatatacacatata

SEQ ID NO: 113690 - DNA, 120 bp, synthetic construct
  source 1..120: mol_type = other DNA
cgtgaatggtgttgcctaggttttcttctagggtttttatggttttaggtctaacgtttaagtctttaatccatcttgaattgatttttgtataaggtgtaaggaagggatccagtttca

SEQ ID NO: 113691 - DNA, 120 bp, synthetic construct; identical to SEQ ID NO: 25721
  source 1..120: mol_type = other DNA

SEQ ID NO: 113692 - DNA, 120 bp, synthetic construct; identical to SEQ ID NO: 20618
  source 1..120: mol_type = other DNA

SEQ ID NO: 113693 - DNA, 120 bp, synthetic construct
  source 1..120: mol_type = other DNA
caagttcgacttacttaagtcaccatccatatgtaaagtcttcataaaaacatttttttttaaatttattattatttttttttattgatcattcttgggtgtttctcgcagagggggatt

SEQ ID NO: 113694 - DNA, 120 bp, synthetic construct
  source 1..120: mol_type = other DNA
ctcctcactttccagactgggcagccaggcagaggggctcctcacgtcccagacaatgggcgaccaggcagagacgctcctcacttcccagacggggtggcggccgggcagaggctgcag

SEQ ID NO: 113695 - DNA, 120 bp, synthetic construct; identical to SEQ ID NO: 20619
  source 1..120: mol_type = other DNA

SEQ ID NO: 113696 - DNA, 120 bp, synthetic construct; identical to SEQ ID NO: 20620
  source 1..120: mol_type = other DNA

SEQ ID NO: 113697 - DNA, 120 bp, synthetic construct
  source 1..120: mol_type = other DNA
acgggcagactgcctcctcaagtggctccctgacccctgacccccaagcagcctaactgggaggcaccctccagcaggggcagactgacacctcacactgcagggtactccagcagacct

SEQ ID NO: 113698 - DNA, 120 bp, synthetic construct
  source 1..120: mol_type = other DNA
aatgaaggaaaaaatgttaagtgcagccagagagaaacgtcaggttaccctcaaagggaagcccatcagactaacagcggatctctcggcagaaaccctacaagccagaagagagtgggg

SEQ ID NO: 113699 - DNA, 120 bp, synthetic construct
  source 1..120: mol_type = other DNA
actcaactacatggaaactgaacaacctgctcctcaatgactgctgggtacataacgaaatgaagacagaaataaagatgttctttgaaaccaacgagaacaaagacacaacataccaga

SEQ ID NO: 113700 - DNA, 120 bp, synthetic construct
  source 1..120: mol_type = other DNA
gaatccaggaccagatggattcacagccgaattctaccagaggtacaaggaggaaccggtaccattccttctgaaactattccaatcaatagaaaaagagggaatcctccctaactcatt

SEQ ID NO: 113701 - DNA, 120 bp, synthetic construct
  source 1..120: mol_type = other DNA
tacagattcaatgccatccccatcaagctaccaatgactttcttcacagaattggaaaaaactactttaaagttcatatggaaccaaaaaagagcccgcatcgccaagtcaatcctaagc

SEQ ID NO: 113702 - DNA, 120 bp, synthetic construct
  source 1..120: mol_type = other DNA
attcctcagggatctagaactagaaataccatttgacccagccatcccattactgggtatatacccaaaggactataaatcatgctgctataaagacacatgcacacgtacgtttattgc

SEQ ID NO: 113703 - DNA, 120 bp, synthetic construct; identical to SEQ ID NO: 34101
  source 1..120: mol_type = other DNA

SEQ ID NO: 113704 - DNA, 120 bp, synthetic construct; identical to SEQ ID NO: 34102
  source 1..120: mol_type = other DNA

SEQ ID NO: 113705 - DNA, 120 bp, synthetic construct; identical to SEQ ID NO: 34103
  source 1..120: mol_type = other DNA

SEQ ID NO: 113706 - DNA, 120 bp, synthetic construct
  source 1..120: mol_type = other DNA
gcccggcagccgcgctgtctgagaagtgagaagcccctccgcccagcagccaccccgtctgggaagtgaggagcgtctctgcccggcagccacctcgtcaggcagggaggtgggggggtc

SEQ ID NO: 113707 - DNA, 120 bp, synthetic construct; identical to SEQ ID NO: 34104
  source 1..120: mol_type = other DNA

SEQ ID NO: 113708 - DNA, 120 bp, synthetic construct
  source 1..120: mol_type = other DNA
tagagcagcatgatttataatcctttaggtatatacccagtaatgggatggctgggtcaaatggtatttctagttctagatccctgaggaatcgccacactgacttccacaatggttgaa

SEQ ID NO: 113709 - DNA, 120 bp, synthetic construct
  source 1..120: mol_type = other DNA
ttctgagggctctgttcttttccattggtctgtatctctgttttggtaccagtactatgctgttttggttactgtagccttgtagtatagtttgaagtcaggaagagtgatgcctccagt

SEQ ID NO: 113710 - DNA, 120 bp, synthetic construct
  source 1..120: mol_type = other DNA
acttctcttctcacttcatttcattcatttgatcttccactactgataccctttcttccagttgatagcatcggctactgaggcttgtgcatttgtcacgcagttctcgtgccatggttt

SEQ ID NO: 113711 - DNA, 120 bp, synthetic construct
  source 1..120: mol_type = other DNA
ctcaagcctcggcaatggtgggcgcccctcccccagcctcgctgctgccttgcagtttgatctcagactgctgtgctagcaatgagcgaggctctgtgggcgtaggaccctccaaaccat

SEQ ID NO: 113712 - DNA, 120 bp, synthetic construct; identical to SEQ ID NO: 34105
  source 1..120: mol_type = other DNA

SEQ ID NO: 113713 - DNA, 120 bp, synthetic construct
  source 1..120: mol_type = other DNA
tttctgtttgttagttttccttctaacagtcaggaccctcagctgcaggtgcattggagtttgccagaggtccactccagaccctgtttgcctgggtatcagagcggaggctgcagaaca

SEQ ID NO: 113714 - DNA, 120 bp, synthetic construct
  source 1..120: mol_type = other DNA
ctgacacccctcagagttcatggagtaaagaaggcaaaaaggatgtattcaaacatctgtgaaatttgttgccattgcttttggtgttttagacatgaagtccttgcccatgcctatgtc

SEQ ID NO: 113715 - DNA, 120 bp, synthetic construct
  source 1..120: mol_type = other DNA
tgggctgagacgatggggttttctagatatacaatcatgtcgtctgcaaacagggaaaatttgacttcctcttttcctaattgaacaccttttatttccttctcctgcctaattgccctg

SEQ ID NO: 113716 - DNA, 120 bp, synthetic construct
  source 1..120: mol_type = other DNA
atctagaactggaaataccatttgacccagccatcccattactgggtatatagccaaaggactataaatcatgctgctataaagacacgcatacgtatgtttattgcggcattattcaca

SEQ ID NO: 113717 - DNA, 120 bp, synthetic construct
  source 1..120: mol_type = other DNA
gaatactatgcaaccataaaaaacgatgagttcatgtcctttgtagggacatggatgaagctggaaaccatcattctcagcaaactatcgcaaggacaaaaaaccaaacaccacatgttc

SEQ ID NO: 113718 - DNA, 120 bp, synthetic construct
  source 1..120: mol_type = other DNA
taagaaccagaaatcaggtggaaactcacagtacctggttttaacttcatattgctaaaagaggcactaaagaggtagaaaaacagtcttgaatcgcagaagccacccttttcccgtccc

SEQ ID NO: 113719 - DNA, 120 bp, synthetic construct
  source 1..120: mol_type = other DNA
agaatcgctttaacccaggaggcagaggttgcagtgagccaagatggtcccactgcactccagcctgagctacagggcaaggctctgtctcaaaaaaaaaaaaaaaaaaaaaaaaaaaaa

SEQ ID NO: 113720 - DNA, 120 bp, synthetic construct; identical to SEQ ID NO: 34108
  source 1..120: mol_type = other DNA

SEQ ID NO: 113721 - DNA, 120 bp, synthetic construct
  source 1..120: mol_type = other DNA
gattgattgtacctgggaggtcaaagctgtagtgagctgagatcatgccactgcactccagcctgggtgacagagactttgtctcaaaaaatatataaatataaattgaccttgtcttac

SEQ ID NO: 113722 - DNA, 120 bp, synthetic construct
  source 1..120: mol_type = other DNA
acatggaaaggaacaactggtaccagccactgcaaaaacataccaaattgtaaacgccatcaaggctaggaaaaaactgcatcaactatcgagcaaaatgaccagctaacatcataatga

SEQ ID NO: 113723 - DNA, 120 bp, synthetic construct
  source 1..120: mol_type = other DNA
caacataccagaatctctgggacacattcaaagcagtgtgtagagggaaacttatagcactaaatgcccacaagaggaagcagaaaagatccaaaattgacaccctaacatcacaattaa

SEQ ID NO: 113724 - DNA, 120 bp, synthetic construct
  source 1..120: mol_type = other DNA
gattatctcaatagatgcagaaaaggcctttgacaaaattcaacaacacttcatgctaaaaactctcaataaattaggtattcatgggacatatctccaaataataagagctatctatga

SEQ ID NO: 113725 - DNA, 120 bp, synthetic construct
  source 1..120: mol_type = other DNA
agaagtaacaaccatctcatttcatctccactttctcctaaattaagacttaccataatcagtcgttgaatactttgttctgaggcaaatgaggcttcacacatactcagcaacttgcaa

SEQ ID NO: 113726 - DNA, 120 bp, synthetic construct
  source 1..120: mol_type = other DNA
tactactcatcagcagtggaaataaatgaactaaaagtattcatatgggtaaatattaaaaacacagcctggcacagtgactcacgcctgtaatcctaagactttgggaggctgaggcag

SEQ ID NO: 113727 - DNA, 120 bp, synthetic construct
  source 1..120: mol_type = other DNA
atccacccacctcagcctcccaaagtgctgggattacaggaacgagccactgtgcccagccattcaattcttttgtccatttttttattgggttatttatcttttcttgttgaattgtaa

SEQ ID NO: 113728 - DNA, 120 bp, synthetic construct
  source 1..120: mol_type = other DNA
aaatattgcagtaagctgagatcgtgccactgcgctccagcctgggcgacagagtgagacttcatctcaaaaaaacaaaaacaaaaacaaacaaacaaaaaagacactgacactgacttg

SEQ ID NO: 113729 - DNA, 120 bp, synthetic construct
  source 1..120: mol_type = other DNA
tgatttgcatttctctgatggccagtgatggtgagcattttttcaatgtgtttattggctgcataaatgtcttcttttgagaagtgtctgttcatgtccttcacccactttttgatgggg

SEQ ID NO: 113730 - DNA, 120 bp, synthetic construct
  source 1..120: mol_type = other DNA
gccattttcacgatattgattcctcctacccatgagcatggaatgttcttccatttgtttgtatcctcttttatttccttgagcagtggtttgtagttctccttgaagaggtccttcaca

SEQ ID NO: 113731 - DNA, 120 bp, synthetic construct
  source 1..120: mol_type = other DNA
accggttcctccttgtacctctggtagaattcggctgtgaatccatctggtcctgggctctttttggttggtaagctattgattattgccacaatttcagagcctgttattggtctattc

SEQ ID NO: 113732 - DNA, 120 bp, synthetic construct
  source 1..120: mol_type = other DNA
ctcctgacctcaggtgatccacccgccttggcctcccaaagtgctggttactgcgcccagccagaagttgaacttttaatactaaaatgtgctaaactaaaaatattttcacaaaaaatt

SEQ ID NO: 113733 - DNA, 120 bp, synthetic construct
  source 1..120: mol_type = other DNA
ggaacccttgtacactgctggtgggaacataaattagtacaaccactgtggagaagagtcaccaatcccactcctaggtatacactcaaaagaaaggaaatcagcatattgaagagatat

SEQ ID NO: 113734 - DNA, 120 bp, synthetic construct
  source 1..120: mol_type = other DNA
cgatgttggcaaggatgcagagaaaaggaaatgctttacactgctggtgggaatgtaaatcagtagagcttccatggacaacagtgtgaagatttctcaaagaactaaaaacagaactac

SEQ ID NO: 113735 - DNA, 120 bp, synthetic construct; identical to SEQ ID NO: 34096
  source 1..120: mol_type = other DNA

SEQ ID NO: 113736 - DNA, 120 bp, synthetic construct
  source 1..120: mol_type = other DNA
tgaggaattgccacactgacttccacaatggttgaactagtttacagtccaaccaacagtgtaaaagtgttcctatttctccacatcctctccagcacctgttgtttcctgactttttaa

SEQ ID NO: 113737 - DNA, 120 bp, synthetic construct
  source 1..120: mol_type = other DNA
tggttttttgaaaggatcaacaaaattgatagaccactagcaagactaataaagaaaaaaagagagaagaatcaaatagatgcaataaaaaatgataaaggggatatcaccaccgatccc

SEQ ID NO: 113738 - DNA, 120 bp, synthetic construct
  source 1..120: mol_type = other DNA
cagatggggtcctggccgggcagaggggctcctcacttcccagtaggggcggccgggcagaagcgcccctcacctcctggatagggcggctggccgggcggggggctgacccccccacct

SEQ ID NO: 113739 - DNA, 120 bp, synthetic construct
  source 1..120: mol_type = other DNA
tcccattcacaattgcttcaaagagaataaaatacctaggaatccaacttacaagggatatgaaggacctcttcaaggagaactacaaaccactgctcaaggaaataaaagaggatacaa

SEQ ID NO: 113740 - DNA, 120 bp, synthetic construct; identical to SEQ ID NO: 34097
  source 1..120: mol_type = other DNA

SEQ ID NO: 113741 - DNA, 120 bp, synthetic construct
  source 1..120: mol_type = other DNA
ccctaatataaattatggacttcaaatgattatgatatgtcaatttagcttcatcaattgtaataactgtagcactctggcggggaatggaggaggctatgcatgtggtggggagagggg

SEQ ID NO: 113742 - DNA, 120 bp, synthetic construct; identical to SEQ ID NO: 34099
  source 1..120: mol_type = other DNA

SEQ ID NO: 113743 - DNA, 120 bp, synthetic construct
  source 1..120: mol_type = other DNA
gatcagaacgtaaataaattaaatagaaatcagataaaaacaatagaggccaaggtaggaggatcgtttgagcccaggagtttgagaccagcctgggcaacatggtgagaccctatctct

SEQ ID NO: 113744 - DNA, 120 bp, synthetic construct
  source 1..120: mol_type = other DNA
caaaccaccatggcacacgtttacctatgtaacaaacttgcacatcctgcacatgtccccctgaacttacaagctggaaataaaaaaaaaataacattaaaaaaagatcttcctcaataa

SEQ ID NO: 113745 - DNA, 120 bp, synthetic construct; identical to SEQ ID NO: 35268
  source 1..120: mol_type = other DNA

SEQ ID NO: 113746 - DNA, 120 bp, synthetic construct; identical to SEQ ID NO: 35269
  source 1..120: mol_type = other DNA

SEQ ID NO: 113747 - DNA, 120 bp, synthetic construct; identical to SEQ ID NO: 35253
  source 1..120: mol_type = other DNA

SEQ ID NO: 113748 - DNA, 120 bp, synthetic construct; identical to SEQ ID NO: 35254
  source 1..120: mol_type = other DNA

SEQ ID NO: 113749 - DNA, 120 bp, synthetic construct; identical to SEQ ID NO: 18656
  source 1..120: mol_type = other DNA

SEQ ID NO: 113750 - DNA, 120 bp, synthetic construct; identical to SEQ ID NO: 18657
  source 1..120: mol_type = other DNA

SEQ ID NO: 113751 - DNA, 120 bp, synthetic construct; identical to SEQ ID NO: 18658
  source 1..120: mol_type = other DNA

SEQ ID NO: 113752 - DNA, 120 bp, synthetic construct; identical to SEQ ID NO: 14704
  source 1..120: mol_type = other DNA

SEQ ID NO: 113753 - DNA, 120 bp, synthetic construct; identical to SEQ ID NO: 13630
  source 1..120: mol_type = other DNA

SEQ ID NO: 113754 - DNA, 120 bp, synthetic construct; identical to SEQ ID NO: 13955
  source 1..120: mol_type = other DNA

SEQ ID NO: 113755 - DNA, 120 bp, synthetic construct; identical to SEQ ID NO: 13956
  source 1..120: mol_type = other DNA

SEQ ID NO: 113756 - DNA, 120 bp, synthetic construct; identical to SEQ ID NO: 13957
  source 1..120: mol_type = other DNA

SEQ ID NO: 113757 - DNA, 120 bp, synthetic construct; identical to SEQ ID NO: 13953
  source 1..120: mol_type = other DNA

SEQ ID NO: 113758 - DNA, 120 bp, synthetic construct; identical to SEQ ID NO: 13954
  source 1..120: mol_type = other DNA

SEQ ID NO: 113759 - DNA, 120 bp, synthetic construct
  source 1..120: mol_type = other DNA
cactttgagaggccaaggtgggtgaatcacttgagcccaggagtttgagaccagcctgggcaatatggtgaaaccttgcctctagcaaaaatacaaaaaaaaaaaaacagaaaagaaaaa

SEQ ID NO: 113760 - DNA, 120 bp, synthetic construct
  source 1..120: mol_type = other DNA
gacaggggatggaaaagcagtttcaagccccatatctccctccaactcctcctcccttgaccctgccctccccaccccgatcccacctgtagcctgcagccctcaacctattcacagggc

SEQ ID NO: 113761 - DNA, 120 bp, synthetic construct
  source 1..120: mol_type = other DNA
tggagtctgaagctgaaggtcagaggagagagctaactctcagaaggtgtgaagacaggaagagattgagaataggcaggacctaggacaactgcagagcaggggaaaaccagtaagaaa

SEQ ID NO: 113762 - DNA, 120 bp, synthetic construct; identical to SEQ ID NO: 15336
  source 1..120: mol_type = other DNA

SEQ ID NO: 113763 - DNA, 120 bp, synthetic construct
  source 1..120: mol_type = other DNA
catcttgaattaatttttgtataaggtgtaaggaagggatccagtttcagcttatacccaaaggactataaatcatgctgctataaagacacatgcacacatatgtttattgcggcacta

SEQ ID NO: 113764 - DNA, 120 bp, synthetic construct; identical to SEQ ID NO: 24730
  source 1..120: mol_type = other DNA

SEQ ID NO: 113765 - DNA, 120 bp, synthetic construct; identical to SEQ ID NO: 24731
  source 1..120: mol_type = other DNA

SEQ ID NO: 113766 - DNA, 120 bp, synthetic construct; identical to SEQ ID NO: 27477
  source 1..120: mol_type = other DNA

SEQ ID NO: 113767 - DNA, 120 bp, synthetic construct
  source 1..120: mol_type = other DNA
cagcatgtaccttgggaggctgaagttttgttgtttgcgttatttctagtagaattattatttattgtttctactatgttaatggcaggtagtgaaaagatgactagaggattatcccat

SEQ ID NO: 113768 - DNA, 120 bp, synthetic construct
  source 1..120: mol_type = other DNA
ccaactgatttttgacaatagtactaaggcaattcaatgaggaaaagacagtattttcaaaaaatggtgttaaaaaaagaacctaaaccttacctcacactatatgcaagaattagctca

SEQ ID NO: 113769 - DNA, 120 bp, synthetic construct; identical to SEQ ID NO: 21401
  source 1..120: mol_type = other DNA

SEQ ID NO: 113770 - DNA, 120 bp, synthetic construct; identical to SEQ ID NO: 14065
  source 1..120: mol_type = other DNA

SEQ ID NO: 113771 - DNA, 120 bp, synthetic construct; identical to SEQ ID NO: 14066
  source 1..120: mol_type = other DNA

SEQ ID NO: 113772 - DNA, 120 bp, synthetic construct; identical to SEQ ID NO: 14067
  source 1..120: mol_type = other DNA

SEQ ID NO: 113773 - DNA, 120 bp, synthetic construct; identical to SEQ ID NO: 14068
  source 1..120: mol_type = other DNA

SEQ ID NO: 113774 - DNA, 120 bp, synthetic construct; identical to SEQ ID NO: 14069
  source 1..120: mol_type = other DNA

SEQ ID NO: 113775 - DNA, 120 bp, synthetic construct; identical to SEQ ID NO: 14070
  source 1..120: mol_type = other DNA

SEQ ID NO: 113776 - DNA, 120 bp, synthetic construct; identical to SEQ ID NO: 14071
  source 1..120: mol_type = other DNA

SEQ ID NO: 113777 - DNA, 120 bp, synthetic construct; identical to SEQ ID NO: 14072
  source 1..120: mol_type = other DNA

SEQ ID NO: 113778 - DNA, 120 bp, synthetic construct; identical to SEQ ID NO: 24771
  source 1..120: mol_type = other DNA

SEQ ID NO: 113779 - DNA, 120 bp, synthetic construct
  source 1..120: mol_type = other DNA
atatgaagaaatacagatgccagtcatcacatgaaaagacgcttgattttaataattaaaaaactaacttttgggccgggcgcagtggctcacacctgtaatcccagcactttgggaggc

SEQ ID NO: 113780 - DNA, 120 bp, synthetic construct
  source 1..120: mol_type = other DNA
ctgggtatatacccaaaggactataaatcatgctgctataaagacacatgcacacgtatgtttattgcggcattattcacaatagcaaagacttggaaccaacccaaatgtccaacaatg

SEQ ID NO: 113781 - DNA, 120 bp, synthetic construct; identical to SEQ ID NO: 24773
  source 1..120: mol_type = other DNA

SEQ ID NO: 113782 - DNA, 120 bp, synthetic construct
  source 1..120: mol_type = other DNA
aattgcttgaacccaggaggcagagggtgcaatgagcagagatcgcacattgcattccagcctggacaaggagagtgaaactccatctcaaaaaaaaaaaaaaaattcaataaaaaataa

SEQ ID NO: 113783 - DNA, 120 bp, synthetic construct
  source 1..120: mol_type = other DNA
atcatttccggataatgaataatatccagtatttggagaaaaaagttctcagtttttttttaaatttattattattatactttaagttttagggtacatgtgccaatgtgcaggttagtt

SEQ ID NO: 113784 - DNA, 120 bp, synthetic construct
  source 1..120: mol_type = other DNA
ttgagaagtgtctgttcatgtcgttcacccactttttgatggggttgtttgttttttcttgtaaatttgtttaagttcattgtagattctggatattagccctttgtcagaagagataac

SEQ ID NO: 113785 - DNA, 120 bp, synthetic construct
  source 1..120: mol_type = other DNA
ctggccagggcaattaggcaggagaaggaaataaagggtattcaattaggaaaagaggaagtcaaattgtccctgtttgcagatgacatgattgtatatgtagaaaaccccattgtctca

SEQ ID NO: 113786 - DNA, 120 bp, synthetic construct
  source 1..120: mol_type = other DNA
gaatgaacaggcaacctacaaaatgggagaaaattttcgcaacctactcaaaagttctcagttttaatgaaatattttcaaatcattattaatgctacagattccatgttttcacttttt

SEQ ID NO: 113787 - DNA, 120 bp, synthetic construct; identical to SEQ ID NO: 23129
  source 1..120: mol_type = other DNA

SEQ ID NO: 113788 - DNA, 120 bp, synthetic construct; identical to SEQ ID NO: 19969
  source 1..120: mol_type = other DNA

SEQ ID NO: 113789 - DNA, 120 bp, synthetic construct
  source 1..120: mol_type = other DNA
aaaagaaaacaaaaaaaaagcggggcgggggggggggggggcggtctttacctggttctacaaagcctttaataactccaaagatgttaagaatttttatctctttcagcacattgctca

SEQ ID NO: 113790 - DNA, 120 bp, synthetic construct; identical to SEQ ID NO: 31787
  source 1..120: mol_type = other DNA

SEQ ID NO: 113791 - DNA, 120 bp, synthetic construct; identical to SEQ ID NO: 31788
  source 1..120: mol_type = other DNA

SEQ ID NO: 113792 - DNA, 120 bp, synthetic construct; identical to SEQ ID NO: 31789
  source 1..120: mol_type = other DNA

SEQ ID NO: 113793 - DNA, 120 bp, synthetic construct; identical to SEQ ID NO: 31790
  source 1..120: mol_type = other DNA

SEQ ID NO: 113794 - DNA, 120 bp, synthetic construct; identical to SEQ ID NO: 31791
  source 1..120: mol_type = other DNA

SEQ ID NO: 113795 - DNA, 120 bp, synthetic construct
  source 1..120: mol_type = other DNA
taaattaggaattcagaatgaaaacgtagagtttatttgggtttttagtgacacctcaggattattatacagcagtgtcagacacagctcaaagtaatgatgactgctccccctccgccc

SEQ ID NO: 113796 - DNA, 120 bp, synthetic construct
  source 1..120: mol_type = other DNA
ggagcccggcagccaatggacgcgcgtcctccgagcagttacaaagggccggagcgaggccgccgcggcggctagggaggtggggcgaggcgaggtttgctggggtgaggcagcggcgcg

SEQ ID NO: 113797 - DNA, 120 bp, synthetic construct
  source 1..120: mol_type = other DNA
gtagtggcatttgccccactttacagatgtgcaaagtggggtacagacacgttaagtacccaataacttaagtgctaaagctaggattttcactcagatctcagtttcccaaacctgtat

SEQ ID NO: 113798 - DNA, 120 bp, synthetic construct
  source 1..120: mol_type = other DNA
ttttctatggctactgccaaactaatcttcctcagccttccccgtgaaggtttataagatttcccatttgtattcagcacttagaacaacacttagcagcttatgattggggccatctct

SEQ ID NO: 113799 - DNA, 120 bp, synthetic construct
  source 1..120: mol_type = other DNA
ttagtattcaaaaagggaaatgattagtgtaagctggaatgattgggggaggcttcttggacactttaggacttacactgactttgaagggtgggtagaattcagagggggatttgatga

SEQ ID NO: 113800 - DNA, 120 bp, synthetic construct
  source 1..120: mol_type = other DNA
tccgctttgttgttgaaattaagagaggaattgacataaaaataatcaagaggaagataaatcttgttcctgtgaggagggccgctcatgtagggaagacccctgtcaaaaggttctagg

SEQ ID NO: 113801 - DNA, 120 bp, synthetic construct
  source 1..120: mol_type = other DNA
atttagttctcataaccaaccttgaatggtagttgtatagagtaccaaaacttcttacttatttgctgcttaatttccaaactcttaagcccatttgttcccagatacaggtgaccagtg

SEQ ID NO: 113802 - DNA, 120 bp, synthetic construct
  source 1..120: mol_type = other DNA
tttttttttttttttttttttttttttttgagtataaaaaaccattcttgggctgggcacagtagctcacacctgtaatcccagcactttgggaggccgaagtgggcgaatcacgaggtc

SEQ ID NO: 113803 - DNA, 120 bp, synthetic construct
  source 1..120: mol_type = other DNA
ctcacctcctgcaagtctttgctcagatgacacctttttctcagtgaggcttatcctgccaccttttaaaatattgtcatcatcctacagtgctttccttctctgtaacaataccttcta

SEQ ID NO: 113804 - DNA, 120 bp, synthetic construct
  source 1..120: mol_type = other DNA
tcatggttgctgatgttacaggtgtcagctttactatctcctggagctccctgatggctatccttttaaatgcttttcctgttgtttttctcaatgaaccaaacactggtgcagttgtat

SEQ ID NO: 113805 - DNA, 120 bp, synthetic construct
  source 1..120: mol_type = other DNA
taaccaaggcaagtaaggaagactgataatttgcatagatctcattgcctatcgagaattcatgaggagactgccaccttccttaataaagtggagccccaaatgccaagattgtcatac

SEQ ID NO: 113806 - DNA, 120 bp, synthetic construct
  source 1..120: mol_type = other DNA
tgctgtactacttcaggtctgttccagtgtttccttgttctcaccaccaagactgaacctccttatttttgttcatttgcttcaggaaaaccattccatctagatttcctaggtgtaaac

SEQ ID NO: 113807 - DNA, 120 bp, synthetic construct
  source 1..120: mol_type = other DNA
tatgtagatctcatctatcatttaagttttgtcagatccagcctgctcttgccttaccatgggagaagggaaaggagggaggagttttaagggattttaggcatcaggcagaagtcttaa

SEQ ID NO: 113808 - DNA, 120 bp, synthetic construct
  source 1..120: mol_type = other DNA
aacctctgcctcctgggttcaagtgattctcctgtctcagcctcccgtgtagctgggattacaggcatctgccaccacgcctggctatttttttttttttttttgtatttttagtagaga

SEQ ID NO: 113809 - DNA, 120 bp, synthetic construct
  source 1..120: mol_type = other DNA
gtgaccttgctagattgactaattgattctaatagttgatctgtaggtcacttttggattttccatgtacatagttgtcctctgcaagtaatgatagttctgtgtctttccagtctatct

SEQ ID NO: 113810 - DNA, 120 bp, synthetic construct
  source 1..120: mol_type = other DNA
gatcagccactttcatttacgttcattattacaccttattatctgtgcaaccaagccagtctctcctacagccactcgtgctttccaaagggaaaggttgaaattttcggttttgtccta

SEQ ID NO: 113811 - DNA, 120 bp, synthetic construct
  source 1..120: mol_type = other DNA
tgacttcctcaggattactcagtgcctgactggcaaagataggattttaacttaagtttttctgtctctgagttccatcaacttaactaccatatccttataatacctacccactagtca

SEQ ID NO: 113812 - DNA, 120 bp, synthetic construct
  source 1..120: mol_type = other DNA
ccccaggagggttgaattgagaagaactgagtattttgaggaacaaaacctaggatagtaggctggagggaattggaggtcagggttttagccatgtatacagagataagcaacatattt

SEQ ID NO: 113813 - DNA, 120 bp, synthetic construct
  source 1..120: mol_type = other DNA
atacacaactgtttacctctcagcttttctagcaagacatatgggcttgtgaattaaccctgggtagccctggcattagatagaattaatagtgcttccatatgtgacctcgagacgtac

SEQ ID NO: 113814 - DNA, 120 bp, synthetic construct
  source 1..120: mol_type = other DNA
ttctggtcctgagcattttgcatgagggatactcaacttgtaatcttttctatgtatagccaagtttgcacatacataggttacaacaacccatcatgtcttaacctttcagtctggagg

SEQ ID NO: 113815 - DNA, 120 bp, synthetic construct
  source 1..120: mol_type = other DNA
cttgtcttactcatctctgcacctcatagcccacactgtacctggcatatagagatgcttagtgaataattgcagaattaaatgaaagagtcaaggtgatgtgttgcagagtgaggagaa

SEQ ID NO: 113816 - DNA, 120 bp, synthetic construct
  source 1..120: mol_type = other DNA
taaaagctgtgagtagtgcctcttctcatcagtaatgttatgcaggagggcattaatgacttcaaggccttgttggtaagttcaggatgagacatcatacctaaccaaaacacttgacag

SEQ ID NO: 113817 - DNA, 120 bp, synthetic construct
  source 1..120: mol_type = other DNA
attattataatggtgagaggtgtgtggccctagatagcatttgccatgtgagaagtaaattggaaccccaaactaaaagtcttgttaggctaggtgtttagcccttatctcatcagcata

SEQ ID NO: 113818 - DNA, 120 bp, synthetic construct
  source 1..120: mol_type = other DNA
tagaaggactcacaggactcagaaaagctgttacagtcatggttatagtgtattacagcaaaaccatacagttaacatcagcaaaagcaaaaggcacccggggtgaagtctaggagaaat

SEQ ID NO: 113819 - DNA, 120 bp, synthetic construct
  source 1..120: mol_type = other DNA
attctggtaagcagtatgtgttttggagagcacttaacttcatcagagagcatggttgaaggtgtatctgtgtgtatgagaaggtgttggtgataattagaaggcttccctaaagaggtc

SEQ ID NO: 113820 - DNA, 120 bp, synthetic construct
  source 1..120: mol_type = other DNA
acaacagcatgtgtatagctgaaattgacttaattcctcgagataggccgtttgtatgtgcaccctcttcaaaaactgggtctgtgactacaacatattgctgcaatcaggaccattgca

SEQ ID NO: 113821 - DNA, 120 bp, synthetic construct
  source 1..120: mol_type = other DNA
cagatcccaaaggaatataaaaatgagggcaacctgtattaatgctagtgggattaatggtagaatgccacccacatgccagcacttgtgaggaacttctgcaatttacagtacagatga

SEQ ID NO: 113822 - DNA, 120 bp, synthetic construct
  source 1..120: mol_type = other DNA
aatgcactattgagagcgaacaacagactggatgccataattttatagtcaagtttgggacaagttttaagaaactgtgttacaattcagagaaaagacagttggtgagcatattaagag

SEQ ID NO: 113823 - DNA, 120 bp, synthetic construct
  source 1..120: mol_type = other DNA
gaacccgggaggcggaggttgcagtgagccaacatcataccactgtactccagcctgggcaacaagagtgaaaatccatctcaaaaaaaaaaaaaattggtggagagatatatactgaaa

SEQ ID NO: 113824 - DNA, 120 bp, synthetic construct
  source 1..120: mol_type = other DNA
ttttcatcactgtgaggtagaaaggataagaacaattattctcatatagatgaagctgaaggtcaaagatattcacatgatctgcagctaacccattctattcaggattgtttagcagct

SEQ ID NO: 113825 - DNA, 120 bp, synthetic construct
  source 1..120: mol_type = other DNA
tcacctgaacctggggggtggaggttgcagttagctgagatcgcaccactgcactccagcctgggaaacagactccatctaaaaaaaaaaaaaaaaaaaaattttcactaattttataat

SEQ ID NO: 113826 - DNA, 120 bp, synthetic construct
  source 1..120: mol_type = other DNA
ttctctccctcctttgatgccttaccctgcaaaaacttgtctgcattgcttgctagctctgtggctttgggcagttaaccaatgtctcatgcttgagttatttcatctttaaaatgaaag

SEQ ID NO: 113827 - DNA, 120 bp, synthetic construct
  source 1..120: mol_type = other DNA
gctaatttttgtatatttattagagaccaggtttcaccatgttggccaggctgatcttgaactcctgatctctagtgatccaaccacgtcggcctcctaaagtgctgggattagaggtgt

SEQ ID NO: 113828 - DNA, 120 bp, synthetic construct
  source 1..120: mol_type = other DNA
tggagaaagccaagttccattagtggaaaaacagtgctccattaccaaggtaagttacttagccttgttcttcaagatactagtgttgtctatgtagccagttgtcagcaagtaaattgc

SEQ ID NO: 113829 - DNA, 120 bp, synthetic construct
  source 1..120: mol_type = other DNA
cggggagaagaagttgctgttaagatattctcctctagagaagaacgttcgtggttccgtgaggcagagatttatcaaactgtaatgttacgtcatgaaaacatcctgggatttatagca

SEQ ID NO: 113830 - DNA, 120 bp, synthetic construct
  source 1..120: mol_type = other DNA
tgcccagcccccacgattcctatttttactgcctctgtcagagacttgtgtttcagctccactcttgtcatccctacccctgaatcaaatgtatttcccagctttcctatttaaaaaaaa

SEQ ID NO: 113831 - DNA, 120 bp, synthetic construct
  source 1..120: mol_type = other DNA
tggaggtgtatagtgtttgattaagacggggcagtgaggtatatgatgaatgtaggtagcgattatcagtggcacctgacaatgtaatacctcttaagttaaaaacaaaacaggccgggc

SEQ ID NO: 113832 - DNA, 120 bp, synthetic construct
  source 1..120: mol_type = other DNA
cacctcagttcctttatcttctcctgatttagttaattccacccccggcagccctttatatttatggccccttacatataaccttccttctatcttgtccataacctgtggtttcccttt

SEQ ID NO: 113833 - DNA, 120 bp, synthetic construct
  source 1..120: mol_type = other DNA
taatcatcttgtcttgcgtctttgtgaactgtgtacacaatctgtcactaaagcttgtcatttcttgttgaaactcactttcagttttgtcccatactcttccattcccactgtggccac

SEQ ID NO: 113834 - DNA, 120 bp, synthetic construct
  source 1..120: mol_type = other DNA
tgcagtgagcagacatcatgccactgcactcccagctgagtaatagagagagaccctgtctcagaaaaaaaaacaaaaacaaaaacagtaggtggcctaactggagatatttaaaacaaa

SEQ ID NO: 113835 - DNA, 120 bp, synthetic construct
  source 1..120: mol_type = other DNA
acttcagtcattttgatggctaagtaatacttcagtgtatggatatggcatatgtcatatatccgttcgttgatggacatttggtttgtttcttttggccattgtagctaatgctgcagt

SEQ ID NO: 113836 - DNA, 120 bp, synthetic construct
  source 1..120: mol_type = other DNA
gaatggaacttgctgtattgcagacttaggactggcagtaagacatgattcagccacagataccattgatattgctccaaaccacagagtgggaacaaaaaggtatacttttgaacaact

SEQ ID NO: 113837 - DNA, 120 bp, synthetic construct
  source 1..120: mol_type = other DNA
tttctgacccaaaccccttatcacaagctgtcacagcattttttcaaactactgtcttggccttggagacagctggagagccagcagcattagtctattcaaattgcatgtataattttg

SEQ ID NO: 113838 - DNA, 120 bp, synthetic construct
  source 1..120: mol_type = other DNA
ctatgcaatgggcttagtattctgggaaattgctcgacgatgttccattggtggtaaattgctctcctctcccccagtagtttgtcatgagcagaagttgttcaagaattgtcttctttt

SEQ ID NO: 113839 - DNA, 120 bp, synthetic construct
  source 1..120: mol_type = other DNA
ttaccaactgccttattatgatcttgtaccttctgacccatcagttgaagaaatgagaaaagttgtttgtgaacagaagttaaggccaaatatcccaaacagatggcagagctgtgaagt

SEQ ID NO: 113840 - DNA, 120 bp, synthetic construct
  source 1..120: mol_type = other DNA
cttaaggaatttgcatgtgacatagtttaataaatgagagtgctgctagattttgtcttttagaaatttgatctacttgggaggctgaagtgggaggattgctggagcctgggaggtcaa

SEQ ID NO: 113841 - DNA, 120 bp, synthetic construct
  source 1..120: mol_type = other DNA
tgctggagatcatctttaagggcaaaggagttggattgctgaattacaatgaaacatgtcttattactaaagaaagtgatttactcctggttagtacattctcagaggattctgaaccac

SEQ ID NO: 113842 - DNA, 120 bp, synthetic construct
  source 1..120: mol_type = other DNA
agatgtgcaagaaagtcacatttgttatgtatgtaggagtaaacgttcggtggatcctctgtctttgtaactgaggttagagctagtgtggttttgaggtctcactacactttgaggaag

SEQ ID NO: 113843 - DNA, 120 bp, synthetic construct
  source 1..120: mol_type = other DNA
ttctgtgatcaggtactttttttgtgggggttttttttttgtttttttttttttgttgttgtttttgggccatttctaagcctaccagatctgctttatgaaatccaggggaccaatgca

SEQ ID NO: 113844 - DNA, 120 bp, synthetic construct
  source 1..120: mol_type = other DNA
aggtctgaagagctgagcctgtaattctgctgtaataatgatagtgctcaagaagtgccttgagttggtgtacagtgccatggccatcaagaatcccagatttcaggttttattacaaaa

SEQ ID NO: 113845 - DNA, 120 bp, synthetic construct
  source 1..120: mol_type = other DNA
atcagtgtaatctctgccttttaagatatgtacagaaaatgtccatataaatttccattgaagtcgaatgatactgagaagcctgtaaagaggagaaaaaaacataagctgtgtttcccc

SEQ ID NO: 113846 - DNA, 120 bp, synthetic construct
  source 1..120: mol_type = other DNA
gagctaggggctggacgtcgaggagagggagaaggctctcgggcggagagaggtcctgcccagctgttggcgaggagtttcctgtttcccccgcagcgctgagttgaagttgagtgagtc

SEQ ID NO: 113847 - DNA, 120 bp, synthetic construct
  source 1..120: mol_type = other DNA
atgcctactgggtgctagaggctgtagattttgcctggaacaagatagtcctgtcttcagggagttgatggttctatgcaattatcgtttgttggaaaccgaagggttaaaatcctaact

SEQ ID NO: 113848 - DNA, 120 bp, synthetic construct
  source 1..120: mol_type = other DNA
taggaagaggcactattgcaagcaaaaagtcttgacacacatttgagtcctatggttttaataaaatcttagtgtttcgttcttggcgtttttcctgcattgcagtaccagaatgttcaa

SEQ ID NO: 113849 - DNA, 120 bp, synthetic construct
  source 1..120: mol_type = other DNA
ctgtaaagtgcacaataactcttcaggtctgaaaaatatgacttttcaggttcctggaagtagatagattcttattgaggacaaagaatttgtaaaagtgtcatagtgatcaggttcttc

SEQ ID NO: 113850 - DNA, 120 bp, synthetic construct
  source 1..120: mol_type = other DNA
ccagacccacttgccatgtactggctgtgtagcctgttgtagttgctttacctactagtcatccctggtctcatttgtaaaatgaggattatggagttatggtgaggattaaataaaata

SEQ ID NO: 113851 - DNA, 120 bp, synthetic construct
  source 1..120: mol_type = other DNA
gatggaaagctgctagaagttttcatgcaattcctttagccataaattttgaatcagtgtagggccttgaaagccactgcaaaattttaaataaagtcaccagaggaattatccagtaga

SEQ ID NO: 113852 - DNA, 120 bp, synthetic construct
  source 1..120: mol_type = other DNA
ggtttgcttgcattatctgcctccttcctgactacatttgtaccacagaaaatcaagataaggcagagtttctttgcataaggaaactctacagcccacagtttgacaatggtgtcttag

SEQ ID NO: 113853 - DNA, 120 bp, synthetic construct
  source 1..120: mol_type = other DNA
tttgggccttccagtcttactctcttttcatttttagaccatgatttggttatgtgggaacccacattcgctgtccagaaggccctgaactggtatctgcagtttgcatggatccttgaa

SEQ ID NO: 113854 - DNA, 120 bp, synthetic construct
  source 1..120: mol_type = other DNA
cctttgaaagaagatatgggttgggtgcatattttcagtatatgctgcagcagctctttattaaagtataaatcattacgaagtcttcatttcctatggggcgataacactgctgctttg

SEQ ID NO: 113855 - DNA, 120 bp, synthetic construct
  source 1..120: mol_type = other DNA
tctcctggctctaggagaggccctggcaatgtggttaacaagtgtcatcaagtcaaatactacgaaatcttgcagtgccctgaatcttacagctcacatataaaagaaacctgataaaag

SEQ ID NO: 113856 - DNA, 120 bp, synthetic construct
  source 1..120: mol_type = other DNA
cttccccccattgcaaacagagactgaaatctgcattgttatttcacaaaaccaaaatatttttcctccaggtttagctaaacccttcatcattttcctactttagagccccatgccaag

SEQ ID NO: 113857 - DNA, 120 bp, synthetic construct
  source 1..120: mol_type = other DNA
agctgccgcaacctctaattgcatttctgtagagtttgcagacacttgttagcgtagactaggaatctttcaacttttgctgtgagtgactaccttgttactacatatcggatttgcgtc

SEQ ID NO: 113858 - DNA, 120 bp, synthetic construct
  source 1..120: mol_type = other DNA
tccactgattgtccatcccttgaccatggtgaactgtagaacccaaggacccatttcttttttctttcttgttttttttttttttttgagatggaatctcgctctgttgcccaggctggt

SEQ ID NO: 113859 - DNA, 120 bp, synthetic construct
  source 1..120: mol_type = other DNA
tttttgtgacttagttacttttgtcttccagaattatgggtccctgtcagttattaatgctcttaattaacagtagccacaataaccagtccttacaagcagtttctgatgtttccaaat

SEQ ID NO: 113860 - DNA, 120 bp, synthetic construct
  source 1..120: mol_type = other DNA
tgaaataacgcctggtctaaatgttactttttctagtgggccttccttgattatccatcccactgtgattccttttcctgcccatagcctctccgacaagccttgcattctcattcatat

SEQ ID NO: 113861 - DNA, 120 bp, synthetic construct
  source 1..120: mol_type = other DNA
aatcccatattgcaaaggtgacccctggttgtactttttggaaagccctgttaaaatgatacatgctaaggagacttaaatatgaggcctttcttacctgggtgcttaataggagtgggt

SEQ ID NO: 113862 - DNA, 120 bp, synthetic construct
  source 1..120: mol_type = other DNA
gtcttcaggggacaggagagaatatgttaacttcttgaataactgctgcagccgtagttagccccctatgagccaagcctattggctttgttactcccaaggtataacttatttcatata

SEQ ID NO: 113863 - DNA, 120 bp, synthetic construct
  source 1..120: mol_type = other DNA
tcaggaagctgagccaggagaatcacttgaacccaggagacagtggttgcagtgatccgatatcgcaccactgcactccagcctgggcaacagagcgagactttgtctcaaaaaaaaaaa

SEQ ID NO: 113864 - DNA, 120 bp, synthetic construct
  source 1..120: mol_type = other DNA
gctatgccagtttctgcagtcctgtagttttgcccctcactagaacttcaagttgcttaacctaatcaggaatacgggcatctttacataggaagtgcacttcttcatcatatagacata

SEQ ID NO: 113865 - DNA, 120 bp, synthetic construct
  source 1..120: mol_type = other DNA
ttttccaccagtgttcttcagggtgatttttccagtgggcttgattaggactgtgtggatcattgtgatgctttgttctcagtggggattttccagcaaagatgagcttcattaaacaat

SEQ ID NO: 113866 - DNA, 120 bp, synthetic construct
  source 1..120: mol_type = other DNA
tgtatataataatgttctggttataatgcagtttgcagtttttctagttacagctcaaggcaaagatgagaagcaacacctatgggcctgactgcctctgtccagtactaccatgcccca

SEQ ID NO: 113867 - DNA, 120 bp, synthetic construct
  source 1..120: mol_type = other DNA
ccagcaattatcaggtcaaagggtttctgataaaaggagttattcagcagaaaggtaatcagattatgggagccttaagtgccagtttgggctaaattctctgagtcactggcagattgt

SEQ ID NO: 113868 - DNA, 120 bp, synthetic construct
  source 1..120: mol_type = other DNA
tcagttaacttgaatttaaatagccacaggtggctcttgggtatcataatgaatagggcagttatggagcatcattaaagtccccattcttctcaagtcccaaagaggtccgttcaggta

SEQ ID NO: 113869 - DNA, 120 bp, synthetic construct
  source 1..120: mol_type = other DNA
tccctaattgtcttctctccctacctcagcagtgacactacagacagccagtcatttaatacgagactcattccttaagaagttgggatagaactttaattacacaaggcatccaagcca

SEQ ID NO: 113870 - DNA, 120 bp, synthetic construct
  source 1..120: mol_type = other DNA
gaatggcatctttgataatgtgatatttgagcagtaattggtatgaaatcgggatgaagaaggcagatctctgggttaagcgcattctagttggagggaacagcaagtacagtgtcctaa

SEQ ID NO: 113871 - DNA, 120 bp, synthetic construct
  source 1..120: mol_type = other DNA
tggacttgtcagcctctagaactgtgaaaaatttctgtcctttataaatcacccagtctcacatattttgtatggcagccaaacagactaagttaccaaccttagtgggattgctaggac

SEQ ID NO: 113872 - DNA, 120 bp, synthetic construct
  source 1..120: mol_type = other DNA
tctccactgcaacctgctgccattcccagcatggtgaattctcctccagtagaagtcatatagcaatgttttataattaacttttacgtgagcaaatgagctccaggagagaagattaag

SEQ ID NO: 113873 - DNA, 120 bp, synthetic construct
  source 1..120: mol_type = other DNA
tactgtctagaggattttcacaggtacttcaagcatgtttgctcttcatcatgatcctacatgggacgatttcataaatcaggaaatggaggtttcaagaagttaagtggcccacagcta

SEQ ID NO: 113874 - DNA, 120 bp, synthetic construct
  source 1..120: mol_type = other DNA
tttctgctttagcttctcagtctgtgcccaagttatttggttgttagaaaccaagcgccttggacctcgttatattactttttaaagggatgcctttcccaaatatggtagtactctggc

SEQ ID NO: 113875 - DNA, 120 bp, synthetic construct
  source 1..120: mol_type = other DNA
tatatggcttaacttttttaactggcttcctgttcttctcagccccaaaccctacattctggtttttgactcatctcatagtccctgcagtcagtctttgccagataaaggcactgttaa

SEQ ID NO: 113876 - DNA, 120 bp, synthetic construct
  source 1..120: mol_type = other DNA
ttccctcagttgaacaagtccaaatgaggaaatcacacacataaatgcataaacacacacactcacacacacacttcccgtatcagctctgtctccatttctgacctcatgtttgcattt

SEQ ID NO: 113877 - DNA, 120 bp, synthetic construct
  source 1..120: mol_type = other DNA
tggctaacacggtgaaaccccgtctctactaaaaatacaaaaaattagccaagcgtggtgttgggcacctgtagtcccagctgctcgggaggctgaggcaggagaatggcgtgaacctgg

SEQ ID NO: 113878 - DNA, 120 bp, synthetic construct
  source 1..120: mol_type = other DNA
taactctatacattggtctctaccttgcttattttcttgaatgctatagcctgggcttcaacacttataaagatagccacatggagctgccctctgctttttagtcgttgcgttgtgttc

SEQ ID NO: 113879 - DNA, 120 bp, synthetic construct
  source 1..120: mol_type = other DNA
ggtatctctagtattgaccttggtaccccagagaccatgtggactgtcagttgaaggaaagcccgatacctctcttctctcaaggtataattagataaagcattagggttcaaacacatt

SEQ ID NO: 113880 - DNA, 120 bp, synthetic construct
  source 1..120: mol_type = other DNA
aggctgccagtctgccctataaatttcagacttgccagcccccacaataccactatgctacacctgcaggttaaaaatattcccaaagtacttgtgtattaatatttgagaagcagtact

SEQ ID NO: 113881 - DNA, 120 bp, synthetic construct
  source 1..120: mol_type = other DNA
ctataggaatcgaagtacagtcatctcttggtacccatgggggattggttccaagactcctcgaggagaccaaaatctacagatgtttaactcccttatataaaattgtgtaatatttac

SEQ ID NO: 113882 - DNA, 120 bp, synthetic construct
  source 1..120: mol_type = other DNA
caggcttttgaaaaaaaattctggttaagctcttgcagtggtagcttctgctgtaacaaggagaaaaatgtggcatccctggctgggttcttgtgaagtaatatgctgtatcttaggcaa

SEQ ID NO: 113883 - DNA, 120 bp, synthetic construct
  source 1..120: mol_type = other DNA
aactataggtctgggttctcaaccttggttccacattagaatcatctgggcagcttctaaaaatcctgatgcctcagttaccttccagaaaaattaaatcagactatctgggagtgggac

SEQ ID NO: 113884 - DNA, 120 bp, synthetic construct
  source 1..120: mol_type = other DNA
catacttcactgactgtccaaactcatgtcttaaacatcatcaccatctcattgaggaagaaaatggggaatggggtgttacacctttatttgaactgcccctagtttgcagcctgtatt

SEQ ID NO: 113885 - DNA, 120 bp, synthetic construct
  source 1..120: mol_type = other DNA
tgacttggtctgtttcctgtcttattcaccagctaaactataatttccttaagggtacttttatttgtgggcccagcactccgtactatgcagtgggcccatctaggtttctttattgaa

SEQ ID NO: 113886 - DNA, 120 bp, synthetic construct
  source 1..120: mol_type = other DNA
tcttgaggcaatctcaggtctggaagaagaggtgatgaaaggttggctgttggaagagaaaactaccagccaaaaatggggaatctacttggagaaccacaaaaacaacctgttttttta

SEQ ID NO: 113887 - DNA, 120 bp, synthetic construct
  source 1..120: mol_type = other DNA
cttgtcatgacatacttgccaatatgatatgatacctgtccatgtccacttctaggtaacgctttcaaagaaaggatttggacaaagaatgtgttcagaggagagggaccagtgtggtta

SEQ ID NO: 113888 - DNA, 120 bp, synthetic construct
  source 1..120: mol_type = other DNA
cctcattcacgttggacacttttcatgggtagccatcatcccatggctagttgatgcagagaaacaaattcctggttattttgccataatgtggtacatctttgaaggacatcccatttt

SEQ ID NO: 113889 - DNA, 120 bp, synthetic construct
  source 1..120: mol_type = other DNA
acttctttgtatttacctttcctatgctcagctatatccaaaaagagtttgaaaagttagctgtgcctggctgttacaggagtgagtggagaaagcagttaagggctttaccaggtctca

SEQ ID NO: 113890 - DNA, 120 bp, synthetic construct
  source 1..120: mol_type = other DNA
cttcatagaagattactctagcaaaactgactggaccagattagcccttccttccgctccctctctagacagagagaatgcgattcaagacaacaggtattttgcatctaaaaaggacag

SEQ ID NO: 113891 - DNA, 120 bp, synthetic construct
  source 1..120: mol_type = other DNA
tataatcacaaatgggttccaagaataaacaaaggaaaaacagaaaagagtagaaaagcataggagactataggacagcctgcgaatgctggagaacaggaaccagctgccgttgttagg

SEQ ID NO: 113892 - DNA, 120 bp, synthetic construct
  source 1..120: mol_type = other DNA
agaggaaataataagccaaagtttacccctagagccaggagaagagtagattagatactagcctccatctttgaagttcagcgtttactcagcttgaaaggaaggcatacactattccct

SEQ ID NO: 113893 - DNA, 120 bp, synthetic construct
  source 1..120: mol_type = other DNA
aaggcaggcatgcacatcttgtcagggcaacgctttccagattactcttccttcctatgttctcatcctcatcctgtaaatggtccatttctctcgttttcttttctggttgtttttttt

SEQ ID NO: 113894 - DNA, 120 bp, synthetic construct
  source 1..120: mol_type = other DNA
gaagtgagataataagcataaagacaatttctcactgtacagtacaggaagcctttcacagctgacgactcaaatgtctgggtgatttcagagtcttctaaaatgctccagaaggtaggg

SEQ ID NO: 113895 - DNA, 120 bp, synthetic construct
  source 1..120: mol_type = other DNA
tgataaaaaattcaaatgctagacaaattcaaacatctagacaaaatggtgcagagatttaacatttgttccttttgttgttgttgtaaatgaggcttggttgtctgtagaggcagagga

SEQ ID NO: 113896 - DNA, 120 bp, synthetic construct
  source 1..120: mol_type = other DNA
gaggtgatttctgctggtttaggtaagagagaaacggtctagtgtaatactcaagaatgagctagatctcctggatttaaggcttattctacagcttattagctctgctatgttgggcca

SEQ ID NO: 113897 - DNA, 120 bp, synthetic construct
  source 1..120: mol_type = other DNA
gggatggaaccagagatggaggtcttattaacttcatgctggtaactccctgagctaatgggcccatgaggaataaatttggtctaaagcctggtcatttggaaatgaactaaatatact

SEQ ID NO: 113898 - DNA, 120 bp, synthetic construct
  source 1..120: mol_type = other DNA
ctcctccagacttctcattttaatgacaaaaaagtgggtctccagagaggagctgggattttccaagatctcatagtttgttcctcactttttgtccgtaggagaatcatagaagaacca

SEQ ID NO: 113899 - DNA, 120 bp, synthetic construct
  source 1..120: mol_type = other DNA
tgctgttcactgcattgtattgttatcttcatgaggaagccaggagacatttattttggctctctgttttagaaaggtgttctcctcatgacgacctgtttgcctctgatcttaaggaca

SEQ ID NO: 113900 - DNA, 120 bp, synthetic construct
  source 1..120: mol_type = other DNA
gggaagtcttagaaatgctgccctctttctcccaaatctcattttatgtttgttcagctccaacaccagggagctggcttcttggggaaatgattagttcttgcatgtaagaaatgaaaa

SEQ ID NO: 113901 - DNA, 120 bp, synthetic construct
  source 1..120: mol_type = other DNA
agggaggtggctaaccactgtgaaattgacttttatttccacccacgtatactccagaggctgtattcaccaccatttggacatctggatgacttgcctttggaaagtccttttgtattc

SEQ ID NO: 113902 - DNA, 120 bp, synthetic construct
  source 1..120: mol_type = other DNA
aagccagggagagagagaggatgtattctggtgacctaacaggtattgtgaataatgaatatgcttttccaaagcgatctggtctccctgttggagagcatcctgaaataacttaagaaa

SEQ ID NO: 113903 - DNA, 120 bp, synthetic construct
  source 1..120: mol_type = other DNA
tgtgtctatcaaaacacatgatgaagaatcttaaatagcaagcgtggtttcagagaacagatcactttacccttagaaaaaaggtcctggcatttattgggcgctatatgctgggcaggc

SEQ ID NO: 113904 - DNA, 120 bp, synthetic construct
  source 1..120: mol_type = other DNA
gtgtaaatgaatcactgagagaacttttaaatgtagattctgattcagttagttgaggacagcgctaagactctgcatttccagtaagttcccaggggatgctgatgactgctggtctgc

SEQ ID NO: 113905 - DNA, 120 bp, synthetic construct
  source 1..120: mol_type = other DNA
gattgagttggggaacatgaacagacttctggggtggccagcaaaattatattttctgacctgaccagtggttacaagagtgttgatcttatagtaattcactaagccagacacttgttt

SEQ ID NO: 113906 - DNA, 120 bp, synthetic construct
  source 1..120: mol_type = other DNA
cgcgcacacacacgttgctctcagcctcttttatgtcctttgttatgccgacaccagttcctaaaaggaacttaaaactgaacctccctaatccactattttaaataaaagtcacttggt

SEQ ID NO: 113907 - DNA, 120 bp, synthetic construct
  source 1..120: mol_type = other DNA
aaaataaattgtccggtgcctaacccaacaaagcacatcgtatatgagttatctttcttattgttacaagatttcaaaggagggcttctcctcaaattctacactgcggagctcccttcc

SEQ ID NO: 113908 - DNA, 120 bp, synthetic construct
  source 1..120: mol_type = other DNA
aattgccaatgtcagtcggtggatggctgtaaaatcacttagtccaggctacactaaagaaaaacactttatcaaattgggagcttatataaagtcattcttcccctcccccgcaacccc

SEQ ID NO: 113909 - DNA, 120 bp, synthetic construct
  source 1..120: mol_type = other DNA
gctcctgtttagataaagccacatcccaaagcttccttccagccctggttgctattgttagagtttttcaccacctctttgaagtttcaagattgacagatgttattcaagaattcctcc

SEQ ID NO: 113910 - DNA, 120 bp, synthetic construct
  source 1..120: mol_type = other DNA
cctgctttgtcaggagagaagcaatcagataatcaagtggatttctgattataagacattccatgtagttacagacacagagaccggagacaagtgggtacttcaagcaaacacattcat

SEQ ID NO: 113911 - DNA, 120 bp, synthetic construct
  source 1..120: mol_type = other DNA
atgctgaagtagctatgtagactggggtatataacctggggttcatcatcatgagccaggaaaatttaggatatgaacacacatgaggagtttaggagtggaggtttaataggcagaaga

SEQ ID NO: 113912 - DNA, 120 bp, synthetic construct
  source 1..120: mol_type = other DNA
ttgcttacttgtatatatgccctaagtcctctactgggtactctctgagggcagtgccatgcccatcatagacactcagtagtgatatatttaatgaatgattctaggatctgagcatga

SEQ ID NO: 113913 - DNA, 120 bp, synthetic construct
  source 1..120: mol_type = other DNA
gagcttagataacactcagtaaatggtttgtctttttatttggcaatattgaggacctgctgtgtgctaagtgcagtttacagtagtgaagaagacatggtaccttccagcatggagttc

SEQ ID NO: 113914 - DNA, 120 bp, synthetic construct
  source 1..120: mol_type = other DNA
cacttcagagcagtttgagacagtggcagtcaagatctttccctatgaggagtatgcctcttggaagacagagaaggacatcttctcagacatcaatctgaagcatgagaacatactcca

SEQ ID NO: 113915 - DNA, 120 bp, synthetic construct
  source 1..120: mol_type = other DNA
atgtttttggctaagaaactattggaaggtgattggaaatcaccacaacatcccttataaatgatgagcccagtgttttcacacagtggagtccatggagagcagcactgtcttctttag

SEQ ID NO: 113916 - DNA, 120 bp, synthetic construct
  source 1..120: mol_type = other DNA
ggatgttattgaaaaatgtgatgacataagtcatggggttagataaggcagctctggggtttggcacttccttattttggcatgctttgtttatggtctttagagggttttcagggagag

SEQ ID NO: 113917 - DNA, 120 bp, synthetic construct
  source 1..120: mol_type = other DNA
agacctacttttctcctgaaaagctggcttgctctttttatccccaagttcagccacctactgttttttttttcttttaggatcatttttccctgaacacactgtcatagcctcccaggt

SEQ ID NO: 113918 - DNA, 120 bp, synthetic construct
  source 1..120: mol_type = other DNA
cacctcggcctcccaaagtgctgggattacaggcgtgagccactgcacccagcctccattccatgtttaactttttgttttgtgataattttagacttagaaaatagttgtaaaaatagt

SEQ ID NO: 113919 - DNA, 120 bp, synthetic construct
  source 1..120: mol_type = other DNA
tgtttcattatatgagtatccagtattgtcattatttattttgttgctcaggttgccacagcttgggtcactggtccaaactacccaacattttgcccaaggcagattcagttggcacca

SEQ ID NO: 113920 - DNA, 120 bp, synthetic construct
  source 1..120: mol_type = other DNA
tttcagcctagtcttagtttcagaggcttttcttttacattcaaaaggtcctttggaaagtacacgaagcctgaagacagatggattccctccaactgcattcatcttgatgttgtccct

SEQ ID NO: 113921 - DNA, 120 bp, synthetic construct
  source 1..120: mol_type = other DNA
ctgggcgacagagcaagactgcgtctaaaaaaaaaaaaaaaaaaaaaagaggtatggtccacctcaactgtgtgcagaaggatgatgggatgcaagtctccagtgaaaacagctaatcta

SEQ ID NO: 113922 - DNA, 120 bp, synthetic construct
  source 1..120: mol_type = other DNA
aagaacagcactacactggagaagcctcacttttatcaggtgagaaaacataaacagatgataatagagctcttcaaaagccaggtggtacagcttcatttcgcacaaaattccaccagg

SEQ ID NO: 113923 - DNA, 120 bp, synthetic construct
  source 1..120: mol_type = other DNA
gaagctgaggagacaatcacatgtttgaggaacattcagtgatggcctcacttctctgggtgaatccctgttaacagaatccaaggctgttaatttgtgtagcaggtcacagtattgata

SEQ ID NO: 113924 - DNA, 120 bp, synthetic construct
  source 1..120: mol_type = other DNA
tgctgcagccttgtgagatgaaaaaaaaaaaaaaaaaaaaagtgcaaatgaaccaaaaagaaagggaaggggctgggggaagaaagagacagaaaaaaaggaggcgttggagagacggct

SEQ ID NO: 113925 - DNA, 120 bp, synthetic construct
  source 1..120: mol_type = other DNA
tggccctgcagcatcacactgaataattgtagggggcatatgtgactattcttattttgtggatataggaagtgaggcacaaactcttggcatctcttttctaagtcctcatatctactt

SEQ ID NO: 113926 - DNA, 120 bp, synthetic construct
  source 1..120: mol_type = other DNA
tgtcaaaatgcatctcacattccttaagaagcatttagggcaatgttgctccaagtgtggtctttggcaggtgctggtcctcaaactctctgttacagatttgcaatataaggacagaaa

SEQ ID NO: 113927 - DNA, 120 bp, synthetic construct
  source 1..120: mol_type = other DNA
tacatggtcatcctacaagtcctaatggaggccctgagaatggcattgccttaatggccatagtaggaaaaatgagcaatgttgcctgatcgctgcaattgaatatcaaagatgttaact

SEQ ID NO: 113928 - DNA, 120 bp, synthetic construct
  source 1..120: mol_type = other DNA
agattaggacttggaatgaattggctctgcgtttatagtctcaaggacaaagactttgtctttgttctcaaggactatcagccatgagattgacagctggggtttattctgatcccaaca

SEQ ID NO: 113929 - DNA, 120 bp, synthetic construct
  source 1..120: mol_type = other DNA
tggtcaaggggaccttggcaggcaccaactgcagctgctacataagccaaaacaattgaagatggaaggtctgtggactgtaccttatctaaggaacaatttatatcatatacaaatcct

SEQ ID NO: 113930 - DNA, 120 bp, synthetic construct
  source 1..120: mol_type = other DNA
tgccactttggagagaatctaagattcattcattcattcattcattcactcactcaacaaagcatttgttgacagcctgttggcatgggagacccttgcaattggcaccaagaatacaag

SEQ ID NO: 113931 - DNA, 120 bp, synthetic construct
  source 1..120: mol_type = other DNA
tttgtatactctgggcctttggaggctcacaaaccattgtaatacataagatttttccacttcccaagaaccagtttcacccttttgctgcaatatccccctgtagaaaatgcctgtgtt

SEQ ID NO: 113932 - DNA, 120 bp, synthetic construct
  source 1..120: mol_type = other DNA
cctcactctggaattaaggaaagcaaagaagaggagaatgccctggaaggaacgagaaatctgtctgttgggaacatcctaatggcctcttatttttccttgttaagaaatgctagctaa

SEQ ID NO: 113933 - DNA, 120 bp, synthetic construct
  source 1..120: mol_type = other DNA
tatgcaattaatttaacatcatgaactcatcgggtggggagggagagataggctcctaggtgtgtttggaaagttgttggtattagaaaacaagtagaaaaagtgccagctctcccaggt

SEQ ID NO: 113934 - DNA, 120 bp, synthetic construct
  source 1..120: mol_type = other DNA
gatgtcaaggtggagaaggctgtgcctttatggggaaggggttttgtgaaaactctctgtactttccactcaattttgctgtgaagcgagaacttctctaaatagaaaggtgttgaaatg

SEQ ID NO: 113935 - DNA, 120 bp, synthetic construct
  source 1..120: mol_type = other DNA
aaatattcccaggaaattggttttattggagaactccagaaccaagcagagaaggaagggacccatgacagcattagcatttgacaatcacacatgcagtggttctctgactgtaaaaca

SEQ ID NO: 113936 - DNA, 120 bp, synthetic construct
  source 1..120: mol_type = other DNA
ctctttccactgcctacctggaccccagtctaggaattaaatctgcacctaaccaaggtcccttgtaagaaatgtccattcaagcagtcattctctgggtatataatatgattttgacta

SEQ ID NO: 113937 - DNA, 120 bp, synthetic construct
  source 1..120: mol_type = other DNA
aagcacttatttttattctatgcattgtttgtcttttacataaataaaatgtttattagattgaataaagcaaaatactcaggtgagcatcctgcctcctgttcccattcctagtagcta

SEQ ID NO: 113938 - DNA, 120 bp, synthetic construct
  source 1..120: mol_type = other DNA
gcctaaagaaacgctgtactacttatgcaacccttctgtcagtcaaaaattatctcaaaataaaaagtttttaaaaatcacttgctctggccaggcacggtggctcacgcctgtaatccc

SEQ ID NO: 113939 - DNA, 120 bp, synthetic construct
  source 1..120: mol_type = other DNA
agttcactgcaacctccacctccagggttcaagcaattctcctgcctcagcctcctgagtagctgagactacaggtgcatgccaccacacccagctaatttttgtatttttagtagagac

SEQ ID NO: 113940 - DNA, 120 bp, synthetic construct; identical to SEQ ID NO: 7796
  source 1..120: mol_type = other DNA

SEQ ID NO: 113941 - DNA, 120 bp, synthetic construct; identical to SEQ ID NO: 34308
  source 1..120: mol_type = other DNA

SEQ ID NO: 113942 - DNA, 120 bp, synthetic construct; identical to SEQ ID NO: 34309
  source 1..120: mol_type = other DNA

SEQ ID NO: 113943 - DNA, 120 bp, synthetic construct; identical to SEQ ID NO: 34310
  source 1..120: mol_type = other DNA

SEQ ID NO: 113944 - DNA, 120 bp, synthetic construct; identical to SEQ ID NO: 34311
  source 1..120: mol_type = other DNA

SEQ ID NO: 113945 - DNA, 120 bp, synthetic construct
  source 1..120: mol_type = other DNA
gttgcagtgagccgagattgcgccactactgcactccagcctgggtgacagagcgagacttcatctcaaaaaataaaaaattaaaaaaattaaaaaatatatttaaataaactgtctgtg

SEQ ID NO: 113946 - DNA, 120 bp, synthetic construct; identical to SEQ ID NO: 34312
  source 1..120: mol_type = other DNA

SEQ ID NO: 113947 - DNA, 120 bp, synthetic construct; identical to SEQ ID NO: 34313
  source 1..120: mol_type = other DNA

SEQ ID NO: 113948 - DNA, 120 bp, synthetic construct; identical to SEQ ID NO: 24263
  source 1..120: mol_type = other DNA

SEQ ID NO: 113949 - DNA, 120 bp, synthetic construct; identical to SEQ ID NO: 24264
  source 1..120: mol_type = other DNA

SEQ ID NO: 113950 - DNA, 120 bp, synthetic construct
  source 1..120: mol_type = other DNA
gtgtgcatgtgtctttatagcagcatgatttataatcctttgggtatttacccagtaataagattgctgggtcaaatggtatttctagttctaaatccctgaggaattgccacactgact

SEQ ID NO: 113951 - DNA, 120 bp, synthetic construct
  source 1..120: mol_type = other DNA
ttgttaactgccacaacctcagtttgccgagttgaccaaatctctccttaacagcactaacagggtcctgagcatgaggggtctggggctcccaggacaagaaagtggagggcagctcag

SEQ ID NO: 113952 - DNA, 120 bp, synthetic construct
  source 1..120: mol_type = other DNA
agtcacccttttatcctactgatataagaataaacatactaggattttgtatgaattaagtcagtgagctgactggaagctgggacttcagccatagggcaagtccctgctttggaattc

SEQ ID NO: 113953 - DNA, 120 bp, synthetic construct; identical to SEQ ID NO: 20492
  source 1..120: mol_type = other DNA

SEQ ID NO: 113954 - DNA, 120 bp, synthetic construct
  source 1..120: mol_type = other DNA
agaaaggcgggaaaggtggggaaaagattgagaaatcggatggttgccgtgtctgtgtagaaagaagtagacatgggagacttttcattttgttctgcactaagaaaaattcctctgcct

SEQ ID NO: 113955 - DNA, 120 bp, synthetic construct; identical to SEQ ID NO: 20493
  source 1..120: mol_type = other DNA

SEQ ID NO: 113956 - DNA, 120 bp, synthetic construct; identical to SEQ ID NO: 20494
  source 1..120: mol_type = other DNA

SEQ ID NO: 113957 - DNA, 120 bp, synthetic construct; identical to SEQ ID NO: 20495
  source 1..120: mol_type = other DNA

SEQ ID NO: 113958 - DNA, 120 bp, synthetic construct; identical to SEQ ID NO: 20496
  source 1..120: mol_type = other DNA

SEQ ID NO: 113959 - DNA, 120 bp, synthetic construct; identical to SEQ ID NO: 20497
  source 1..120: mol_type = other DNA

SEQ ID NO: 113960 - DNA, 120 bp, synthetic construct
  source 1..120: mol_type = other DNA
atttccatcatcccataaagatcccccatgccccttcccagcaaactcccgccccacaaaggaacctctgatttgatttctatcattacagtttggttttgtctattctagaatttcata

SEQ ID NO: 113961 - DNA, 120 bp, synthetic construct
  source 1..120: mol_type = other DNA
acctcagcctcccaaagttctgggattacaggcgtgagccactgtgcccagcaataatacgtttttttggcttgcttttttcactcagcacagagtttatgaaatttatccatgttattc

SEQ ID NO: 113962 - DNA, 120 bp, synthetic construct
  source 1..120: mol_type = other DNA
tcgtgacttagaagatagttttctgggaaatttacccaaaacagtatacagaatgaaaaaaccataaagtatgtgtgtgtatatacataacgatagttccatacctggaaaaagcatagc

SEQ ID NO: 113963 - DNA, 120 bp, synthetic construct; identical to SEQ ID NO: 20498
  source 1..120: mol_type = other DNA

SEQ ID NO: 113964 - DNA, 120 bp, synthetic construct
  source 1..120: mol_type = other DNA
tgatttgcatttctctgatggccagtgatggtgagcattttttcatgtgttttctggctgcataaatgtcttcttttgagaagttctgttcatgtcctttgcccactttttgatggggtt

SEQ ID NO: 113965 - DNA, 120 bp, synthetic construct
  source 1..120: mol_type = other DNA
ctgtttgtctgttattggtgtataagaatgcttgtgatttttgtacattgattttgtatcctgagactttgctgaagttgcttatcagcttaaggagattttgggctgagaaaatggggt

SEQ ID NO: 113966 - DNA, 120 bp, synthetic construct
  source 1..120: mol_type = other DNA
ttgctagtggtctatcaattttgttgatcctttcaaaaaaccagctcctggattcattaattttttgaagggttttttgtgtctgtatttccttcagttctgctctgactttagttattt

SEQ ID NO: 113967 - DNA, 120 bp, synthetic construct
  source 1..120: mol_type = other DNA
tatccgagactaggattgcaacccctgcctttttttggtttccatttgcttggtagatcttcctccatccttttattttgagcctatgtgtgtctctgcacatgagatgggtttcctgaa

SEQ ID NO: 113968 - DNA, 120 bp, synthetic construct
  source 1..120: mol_type = other DNA
tggctttcagctccatcagctcctttaagcacttctctgtattggttattctagttatacatttgtctaaattttttcaaagttttcaacttctttgcctttggttttaatttcctcctg

SEQ ID NO: 113969 - DNA, 120 bp, synthetic construct; identical to SEQ ID NO: 12118
  source 1..120: mol_type = other DNA

SEQ ID NO: 113970 - DNA, 120 bp, synthetic construct; identical to SEQ ID NO: 12119
  source 1..120: mol_type = other DNA

SEQ ID NO: 113971 - DNA, 120 bp, synthetic construct; identical to SEQ ID NO: 12120
  source 1..120: mol_type = other DNA

SEQ ID NO: 113972 - DNA, 120 bp, synthetic construct; identical to SEQ ID NO: 22266
  source 1..120: mol_type = other DNA

SEQ ID NO: 113973 - DNA, 120 bp, synthetic construct; identical to SEQ ID NO: 22267
  source 1..120: mol_type = other DNA

SEQ ID NO: 113974 - DNA, 120 bp, synthetic construct; identical to SEQ ID NO: 22268
  source 1..120: mol_type = other DNA

SEQ ID NO: 113975 - DNA, 120 bp, synthetic construct
  source 1..120: mol_type = other DNA
ccagacatctaaaggtggcctataagatccaatccagaaccaaaacaaacaaacaaacaaacataaaattaaaagcaacttggggcggggcatagtggctcacgcctgtaatcccagcat

SEQ ID NO: 113976 - DNA, 120 bp, synthetic construct; identical to SEQ ID NO: 22269
  source 1..120: mol_type = other DNA

SEQ ID NO: 113977 - DNA, 120 bp, synthetic construct; identical to SEQ ID NO: 22270
  source 1..120: mol_type = other DNA

SEQ ID NO: 113978 - DNA, 120 bp, synthetic construct; identical to SEQ ID NO: 22271
  source 1..120: mol_type = other DNA

SEQ ID NO: 113979 - DNA, 120 bp, synthetic construct; identical to SEQ ID NO: 25524
  source 1..120: mol_type = other DNA

SEQ ID NO: 113980 - DNA, 120 bp, synthetic construct
  source 1..120: mol_type = other DNA
atggggttgtttgtttttttcttgtaaatttgtgtgagttcattgtagattctggatattagccctttgtcagatgagtaggttgcgaaaattttctcccattttgtaggttgccggggc

SEQ ID NO: 113981 - DNA, 120 bp, synthetic construct
  source 1..120: mol_type = other DNA
accagaaatataattactttaattaaagatgagatctatcatatggatggatggatggatggatgaaatggatgggtggatggatgagatgggtgggtggatggatgagatgggtcggtg

SEQ ID NO: 113982 - DNA, 120 bp, synthetic construct; identical to SEQ ID NO: 28612
  source 1..120: mol_type = other DNA

SEQ ID NO: 113983 - DNA, 120 bp, synthetic construct; identical to SEQ ID NO: 28613
  source 1..120: mol_type = other DNA

SEQ ID NO: 113984 - DNA, 120 bp, synthetic construct; identical to SEQ ID NO: 28614
  source 1..120: mol_type = other DNA

SEQ ID NO: 113985 - DNA, 120 bp, synthetic construct; identical to SEQ ID NO: 28615
  source 1..120: mol_type = other DNA

SEQ ID NO: 113986 - DNA, 120 bp, synthetic construct; identical to SEQ ID NO: 28616
  source 1..120: mol_type = other DNA

SEQ ID NO: 113987 - DNA, 120 bp, synthetic construct; identical to SEQ ID NO: 28617
  source 1..120: mol_type = other DNA

SEQ ID NO: 113988 - DNA, 120 bp, synthetic construct; identical to SEQ ID NO: 19294
  source 1..120: mol_type = other DNA

SEQ ID NO: 113989 - DNA, 120 bp, synthetic construct; identical to SEQ ID NO: 19295
  source 1..120: mol_type = other DNA

SEQ ID NO: 113990 - DNA, 120 bp, synthetic construct; identical to SEQ ID NO: 19296
  source 1..120: mol_type = other DNA

SEQ ID NO: 113991 - DNA, 120 bp, synthetic construct
  source 1..120: mol_type = other DNA
gtaggctgtccagggtaagctgcaagagatgctgtgaaagacagtatttatgctagaagccataccctaaaaatcagggattctatactactaaggaggaagcaaagaacaattaggaaa

SEQ ID NO: 113992 - DNA, 120 bp, synthetic construct
  source 1..120: mol_type = other DNA
caaatggaaacacatcccatgctcacagatgggaagagtcaatattgtgaaaatgaccacactgcccaaaggaatctacggattcaatgcaattcccatcaaaataccagcatcattctt

SEQ ID NO: 113993 - DNA, 120 bp, synthetic construct
  source 1..120: mol_type = other DNA
atacccagtaatgagatggctgggtcaaatggtatttctagttctagatccctgaagaatcgccacactgtcttccacaatggttgaactagtttacagtcccaccaacagtgtaaaagt

SEQ ID NO: 113994 - DNA, 120 bp, synthetic construct
  source 1..120: mol_type = other DNA
caacatggtgaaaccccatctctgctaaaaatacaaaaattagctaggggtggtggggggcacctgtaatcccagctattcaggaggctgaggcatgagaatcacttgaacctgggaggt

SEQ ID NO: 113995 - DNA, 120 bp, synthetic construct; identical to SEQ ID NO: 7411
  source 1..120: mol_type = other DNA

SEQ ID NO: 113996 - DNA, 120 bp, synthetic construct; identical to SEQ ID NO: 20762
  source 1..120: mol_type = other DNA

SEQ ID NO: 113997 - DNA, 120 bp, synthetic construct; identical to SEQ ID NO: 20763
  source 1..120: mol_type = other DNA

SEQ ID NO: 113998 - DNA, 120 bp, synthetic construct; identical to SEQ ID NO: 18733
  source 1..120: mol_type = other DNA

SEQ ID NO: 113999 - DNA, 120 bp, synthetic construct; identical to SEQ ID NO: 18734
  source 1..120: mol_type = other DNA

SEQ ID NO: 114000 - DNA, 120 bp, synthetic construct
  source 1..120: mol_type = other DNA
taaattctctttaatttcccctatgatttcaataaaaagccctcagctatttccagctctagtgcccagcatcaccaattacctaccccagcccagaggccccatcagcatatcaactta

SEQ ID NO: 114001 - DNA, 120 bp, synthetic construct
  source 1..120: mol_type = other DNA
gctgttgtttttggtttgtttttgtttgggtttttgttttttttttttttttaaagagtttcgctcttgttacccatgctggagtgcaacagcgcgatctccgctcaccgcaacttccgc

SEQ ID NO: 114002 - DNA, 120 bp, synthetic construct
  source 1..120: mol_type = other DNA
ccatgataagcacgctgaataaaattaaagtcggtgggaagagatccagcaatggggcaaagggaggctacattaacattcaggttagagaggactgcttctaaattaagacctaaatgc

SEQ ID NO: 114003 - DNA, 120 bp, synthetic construct
  source 1..120: mol_type = other DNA
ccgagatgactggacagattccttgctgcatctgcaccattccctgacctgtattccagtaaccttatcaggaaggtaacaggaaatgtaaatttatcaacttgttcttggtagatctat

SEQ ID NO: 114004 - DNA, 120 bp, synthetic construct
  source 1..120: mol_type = other DNA
ccccctccccatacgaccctttcccagcagcctcagttaacaggagctttgcccccctcctccttcacccgctgctgtgcagtctgagttatgctccacttgttcacacacacacacact

SEQ ID NO: 114005 - DNA, 120 bp, synthetic construct
  source 1..120: mol_type = other DNA
ctctcccaggactccagctgctcagcctcccacccacacaggttaaggtgtggggaacaacatggcacatacacttcacaagcttcccatgtggcatggctcatcctactctggatctca

SEQ ID NO: 114006 - DNA, 120 bp, synthetic construct
  source 1..120: mol_type = other DNA
cagtcacttgatgagtaacactgagttacttaaactccctgaggtagtaaaatggtgataacacccacctcagaaggctgctgcaaacactgagtaacagctgataaaagtgttccttat

SEQ ID NO: 114007 - DNA, 120 bp, synthetic construct
  source 1..120: mol_type = other DNA
tttttaattatttaaaaaaacttccatgcccttccattcccctccctccaaactaggtattgtccaagttgtatcaaatgccacaaagtctaccatgcacccagaagcagagaagacagg

SEQ ID NO: 114008 - DNA, 120 bp, synthetic construct
  source 1..120: mol_type = other DNA
caagttcatatacaggcaaaagataaagagaaatatatcacaacatttaaaacaggtggtatttagagagtgggaccccaagtggtgcttttttcttccttctactctgtagtttaaagt

SEQ ID NO: 114009 - DNA, 120 bp, synthetic construct
  source 1..120: mol_type = other DNA
aagaaaatggagtaccatatttaagaaagatacacaagcgagaaaacgagccaaggatttttacatccagcaaaactgaatttcaaatataatgatacaaacaataagcacaataacgtt

SEQ ID NO: 114010 - DNA, 120 bp, synthetic construct
  source 1..120: mol_type = other DNA
gttcaagcgattctcctgcctcagtctgccaagcagctgggaatatacacgtgcgtcaccacgcccagataatttttgtattttgagtagagacagggtttctctatgattgccaggtct

SEQ ID NO: 114011 - DNA, 120 bp, synthetic construct
  source 1..120: mol_type = other DNA
aacaaccctgacctaaccactctccaagtaagtcatgctcactcacacctgctttgtcagttatgtggttcccttttgcttattcttaaaattctgctcatctttcaagatcaagctcac

SEQ ID NO: 114012 - DNA, 120 bp, synthetic construct
  source 1..120: mol_type = other DNA
ataattcaaggtgcatccagttctagcacacactagctgactactgatgtaacctctcaccctcagatcctcatctgtcaaatgagaagcaaatcatcaacccctagaatttctgtaagg

SEQ ID NO: 114013 - DNA, 120 bp, synthetic construct
  source 1..120: mol_type = other DNA
ccgcctcggcctcccaaagtgctgggattacaggcgtgagccaccgtgcccggccaagccaagattttaaacccagatttgaccccaaagcccccttttctcttacaccagcatttctca

SEQ ID NO: 114014 - DNA, 120 bp, synthetic construct; identical to SEQ ID NO: 1438
  source 1..120: mol_type = other DNA

SEQ ID NO: 114015 - DNA, 120 bp, synthetic construct
  source 1..120: mol_type = other DNA
tcccatcgcagccctgtcccatccaccctctcctcaccttcacccgccatcgccaacctccttacttccacactcttcacacgcccccagtcttcctctcctcacccctcacgaccccgt

SEQ ID NO: 114016 - DNA, 120 bp, synthetic construct; identical to SEQ ID NO: 1439
  source 1..120: mol_type = other DNA

SEQ ID NO: 114017 - DNA, 120 bp, synthetic construct; identical to SEQ ID NO: 1440
  source 1..120: mol_type = other DNA

SEQ ID NO: 114018 - DNA, 120 bp, synthetic construct
  source 1..120: mol_type = other DNA
gtatattttttattttttaatttttttttgagatgaagttttgctcctattgcccaggctggagtgcagtgcgatcttggctcactgcaacttccgcctcccaggttcaaccaagtcttc

SEQ ID NO: 114019 - DNA, 120 bp, synthetic construct
  source 1..120: mol_type = other DNA
gcccagcctccatttgctttctctacatatatctacgttactactcttttgtctaaacatttggcaattgtgcattagtccgttctcacattgctatagggaactacctgagactgggta

SEQ ID NO: 114020 - DNA, 120 bp, synthetic construct; identical to SEQ ID NO: 1441
  source 1..120: mol_type = other DNA

SEQ ID NO: 114021 - DNA, 120 bp, synthetic construct
  source 1..120: mol_type = other DNA
cgacagagtgagactctgtctcaaaaaaaaaaaaaaaaagaaaaaagaaaaagaaatgggtcctttgggaaccactggagaagaggaaatcaatgctggccatgtgagaattcccaccct

SEQ ID NO: 114022 - DNA, 120 bp, synthetic construct; identical to SEQ ID NO: 23731
  source 1..120: mol_type = other DNA

SEQ ID NO: 114023 - DNA, 120 bp, synthetic construct
  source 1..120: mol_type = other DNA
aggatggcttgagcccagaagttccaggctgcagtgagctatgatcgcgccactgcactcagtcttgacaacagagatcccgttgcaaaaaaaaaatttggactggattaaaaattttta

SEQ ID NO: 114024 - DNA, 120 bp, synthetic construct; identical to SEQ ID NO: 19405
  source 1..120: mol_type = other DNA

SEQ ID NO: 114025 - DNA, 120 bp, synthetic construct
  source 1..120: mol_type = other DNA
atgatcatgccactgcattccagcctgggtgacagtaagaccccatctctaaaaacaaaaatagaatgctgattgtggcaagctgctaatgttgcttataagtggtttgggaataagatg

SEQ ID NO: 114026 - DNA, 120 bp, synthetic construct; identical to SEQ ID NO: 7443
  source 1..120: mol_type = other DNA

SEQ ID NO: 114027 - DNA, 120 bp, synthetic construct; identical to SEQ ID NO: 7444
  source 1..120: mol_type = other DNA

SEQ ID NO: 114028 - DNA, 120 bp, synthetic construct; identical to SEQ ID NO: 7445
  source 1..120: mol_type = other DNA

SEQ ID NO: 114029 - DNA, 120 bp, synthetic construct; identical to SEQ ID NO: 7446
  source 1..120: mol_type = other DNA

SEQ ID NO: 114030 - DNA, 120 bp, synthetic construct
  source 1..120: mol_type = other DNA
tcctgagcaacagagcaagactccacctcaaaaaaaaaaaaaagactgtgtgtgtgtgtgtgtcacacacacacacacacacacacacacacacagacaaaatgagctgtatttctatac

SEQ ID NO: 114031 - DNA, 120 bp, synthetic construct; identical to SEQ ID NO: 24159
  source 1..120: mol_type = other DNA

SEQ ID NO: 114032 - DNA, 120 bp, synthetic construct
  source 1..120: mol_type = other DNA
tgaaagtgatggggagaatggaaccaagttggaaaacactctgcaggatatcatccaggagaacttccccaatctagcaaggcaggccaacgttcagattcaggaaatacagagaacgcc

SEQ ID NO: 114033 - DNA, 120 bp, synthetic construct
  source 1..120: mol_type = other DNA
agcaccacaccacacctattccaaaattgaccacatacttggaagtaaagctctcctcagcaaatgtaaaagaacagaaattataaaaaactatctctcagaccacagtgcagtcaaact

SEQ ID NO: 114034 - DNA, 120 bp, synthetic construct
  source 1..120: mol_type = other DNA
ccaacgaaagagtccaggaccagatggattcacagccgaattctaccagaggtacaaggaggaactggtaccattccttctgaaactattccaatcaatagaaaaagagggaatcctccc

SEQ ID NO: 114035 - DNA, 120 bp, synthetic construct
  source 1..120: mol_type = other DNA
atatcatgaaaatggccatactgcccaaggtaatttacagattcaatgccatccccaccaagctaccaatgactttcttcacagaattggaaaaaactactttaaagttcatatggaacc

SEQ ID NO: 114036 - DNA, 120 bp, synthetic construct
  source 1..120: mol_type = other DNA
tggtgattcctcagggatctagaactagacataccatttgacccagccatcccattactgggtatatacccaaaggactataaatcatgctgctataaagacacatgcacacatatgttt

SEQ ID NO: 114037 - DNA, 120 bp, synthetic construct
  source 1..120: mol_type = other DNA
ttctgcttcagttattaatttttattcctgcacaattaaaaatgtggttgtagagcaacaacatatacaatcagaaccaaaactgaataggacaaccctcccccacccccacccccaccc

SEQ ID NO: 114038 - DNA, 120 bp, synthetic construct; identical to SEQ ID NO: 24157
  source 1..120: mol_type = other DNA

SEQ ID NO: 114039 - DNA, 120 bp, synthetic construct; identical to SEQ ID NO: 24158
  source 1..120: mol_type = other DNA

SEQ ID NO: 114040 - DNA, 120 bp, synthetic construct; identical to SEQ ID NO: 15439
  source 1..120: mol_type = other DNA

SEQ ID NO: 114041 - DNA, 120 bp, synthetic construct; identical to SEQ ID NO: 15440
  source 1..120: mol_type = other DNA

SEQ ID NO: 114042 - DNA, 120 bp, synthetic construct; identical to SEQ ID NO: 15441
  source 1..120: mol_type = other DNA

SEQ ID NO: 114043 - DNA, 120 bp, synthetic construct; identical to SEQ ID NO: 15442
  source 1..120: mol_type = other DNA

SEQ ID NO: 114044 - DNA, 120 bp, synthetic construct; identical to SEQ ID NO: 15443
  source 1..120: mol_type = other DNA

SEQ ID NO: 114045 - DNA, 120 bp, synthetic construct; identical to SEQ ID NO: 15444
  source 1..120: mol_type = other DNA

SEQ ID NO: 114046 - DNA, 120 bp, synthetic construct; identical to SEQ ID NO: 15445
  source 1..120: mol_type = other DNA

SEQ ID NO: 114047 - DNA, 120 bp, synthetic construct
  source 1..120: mol_type = other DNA
gcaaccaaaaactttttaagtgcaagaatgaaaaagacagtggaagggaaacctatggattgaaagagttgtgagagacttattgaccaattgcaacttgcagacctgacgcagatcctg

SEQ ID NO: 114048 - DNA, 120 bp, synthetic construct
  source 1..120: mol_type = other DNA
gggaggtgaggggcgcctctgcccggccgcccctactgggaagtgaggagcccctctgcccggccaaccaccccgtctgggaggtgtgcccaacagctcattgagaacgggccaggatga

SEQ ID NO: 114049 - DNA, 120 bp, synthetic construct
  source 1..120: mol_type = other DNA
tgtatgaataaatatgatatgtcctttaaaaaaaaaaaaaaaaaaaaaatcttggctgggtgcagtggctcacgcctataatcccagcactttgggaggtcgaggtgggcagatcacctg

SEQ ID NO: 114050 - DNA, 120 bp, synthetic construct
  source 1..120: mol_type = other DNA
aaagaaaaatagccaactggacttcatgaaaattaaaattttgtgccttaaaaagacactatcgagcagaaataggagccaagatggccgaataggaacagctccggtctacagctccca

SEQ ID NO: 114051 - DNA, 120 bp, synthetic construct
  source 1..120: mol_type = other DNA
cacaaggcagggtattccaacagacctgcagctgagggtcctgtttgttagaaggaaaactaacaaacagaaaggacatccacaccgaaaacccatctgtacatcaccatcatcaaagac

SEQ ID NO: 114052 - DNA, 120 bp, synthetic construct
  source 1..120: mol_type = other DNA
aaataaaatcctttacagacaagcaaatgctgagagattttgtcaccaccaggcctgccctaaaagagctcctgaaggaagcgctaaacatggaaaggaacaaccggtaccagccgctgc

SEQ ID NO: 114053 - DNA, 120 bp, synthetic construct
  source 1..120: mol_type = other DNA
acaacctgctcctgaatgactactgggtacataacgaaatgaaggcagaaataaagatgttctttgaaaccaacgagaacaaagacaccacataccagaatcgctgggacacattcaaag

SEQ ID NO: 114054 - DNA, 120 bp, synthetic construct
  source 1..120: mol_type = other DNA
gatgcagaaaaagcctttgacaaaattcaacaaccctccatgctaaaaactctcaataaattaggtattgatgggacgtatttcaaaataataagagctatctatgacaaacccacagcc

SEQ ID NO: 114055 - DNA, 120 bp, synthetic construct
  source 1..120: mol_type = other DNA
cctgagaaaaacaagcaatggggaaaggattccctatttaataaatggtgctgggaaaactggctagccatatgtagaaagctgaaactggatcccttccttccaccttatacaaaaatc

SEQ ID NO: 114056 - DNA, 120 bp, synthetic construct
  source 1..120: mol_type = other DNA
ttggaaatcatcattctcagtaaactatcgcaagaacaaaaaaccaaacaccgcatattctcactcataggtgggaattgaacaatgagatcacatggacacaggaaggggaatatcaca

SEQ ID NO: 114057 - DNA, 120 bp, synthetic construct; identical to SEQ ID NO: 15428
  source 1..120: mol_type = other DNA

SEQ ID NO: 114058 - DNA, 120 bp, synthetic construct; identical to SEQ ID NO: 15429
  source 1..120: mol_type = other DNA

SEQ ID NO: 114059 - DNA, 120 bp, synthetic construct; identical to SEQ ID NO: 15430
  source 1..120: mol_type = other DNA

SEQ ID NO: 114060 - DNA, 120 bp, synthetic construct; identical to SEQ ID NO: 13628
  source 1..120: mol_type = other DNA

SEQ ID NO: 114061 - DNA, 120 bp, synthetic construct; identical to SEQ ID NO: 15431
  source 1..120: mol_type = other DNA

SEQ ID NO: 114062 - DNA, 120 bp, synthetic construct; identical to SEQ ID NO: 15432
  source 1..120: mol_type = other DNA

SEQ ID NO: 114063 - DNA, 120 bp, synthetic construct; identical to SEQ ID NO: 15433
  source 1..120: mol_type = other DNA

SEQ ID NO: 114064 - DNA, 120 bp, synthetic construct; identical to SEQ ID NO: 15434
  source 1..120: mol_type = other DNA

SEQ ID NO: 114065 - DNA, 120 bp, synthetic construct; identical to SEQ ID NO: 15435
  source 1..120: mol_type = other DNA

SEQ ID NO: 114066 - DNA, 120 bp, synthetic construct
  source 1..120: mol_type = other DNA
atttgggttggttccaagtctttgctattgtgaacagtgctgcaataaacatatgtgggcatgtgtctttatagcagcatgattgataatgctttggctatatacacagtaatgggatgg

SEQ ID NO: 114067 - DNA, 120 bp, synthetic construct
  source 1..120: mol_type = other DNA
ttgttcttttggcttaggattgtcttggctatgtgcgctcttttttggttccatatgaactttaaagtagttttttccaattctgtgaagaaagtcattggtagcttgatggggatggca

SEQ ID NO: 114068 - DNA, 120 bp, synthetic construct
  source 1..120: mol_type = other DNA
tctttttgttgtgtctctgtcaggctttggtatcgggatgatgctggcctcataaaatgagttagggaggattccctctttttctattgattggaatagtttcagaaggaatggtaccag

SEQ ID NO: 114069 - DNA, 120 bp, synthetic construct; identical to SEQ ID NO: 15436
  source 1..120: mol_type = other DNA

SEQ ID NO: 114070 - DNA, 120 bp, synthetic construct; identical to SEQ ID NO: 15437
  source 1..120: mol_type = other DNA

SEQ ID NO: 114071 - DNA, 120 bp, synthetic construct; identical to SEQ ID NO: 15438
  source 1..120: mol_type = other DNA

SEQ ID NO: 114072 - DNA, 120 bp, synthetic construct
  source 1..120: mol_type = other DNA
gtgatccacccacctcagcctcccaaagtgctgcgattaccagcgtgagccactgcgcccagcctcattttatttactttttgaatagcaatacattcacatgtttgacagttcaataag

SEQ ID NO: 114073 - DNA, 120 bp, synthetic construct
  source 1..120: mol_type = other DNA
tgctcatggataggaagaatccatattgtgaaaatggccatattgcccaaagtaatttatagattcaatgccatccccatcaaactaccaatgactttcttcacagaattgggaaaaact

SEQ ID NO: 114074 - DNA, 120 bp, synthetic construct
  source 1..120: mol_type = other DNA
tcaaccattgtggaagtcagtgtggcgattcctcaaggatctagaactagaaataccatttgacccagccattccattactgagtatatacccaaaggattataaatcatgctgctataa

SEQ ID NO: 114075 - DNA, 120 bp, synthetic construct; identical to SEQ ID NO: 28903
  source 1..120: mol_type = other DNA

SEQ ID NO: 114076 - DNA, 120 bp, synthetic construct; identical to SEQ ID NO: 28904
  source 1..120: mol_type = other DNA

SEQ ID NO: 114077 - DNA, 120 bp, synthetic construct; identical to SEQ ID NO: 28905
  source 1..120: mol_type = other DNA

SEQ ID NO: 114078 - DNA, 120 bp, synthetic construct
  source 1..120: mol_type = other DNA
aattacctccacctggtttcttccttcatatatggagattagggggattacagttcaagatgagatttaggtggggacacgaagcctaaccatatcattccacttactccaggaagaaat

SEQ ID NO: 114079 - DNA, 120 bp, synthetic construct; identical to SEQ ID NO: 28906
  source 1..120: mol_type = other DNA

SEQ ID NO: 114080 - DNA, 120 bp, synthetic construct
  source 1..120: mol_type = other DNA
tcatgtcctttgtagggacatggatgaaattggaaatcatcattctcagtaaactatcgcaagaacaaaaaaccaaacaccgcatattctcactcataggtgggaattgaacaacgagat

SEQ ID NO: 114081 - DNA, 120 bp, synthetic construct; identical to SEQ ID NO: 28907
  source 1..120: mol_type = other DNA

SEQ ID NO: 114082 - DNA, 120 bp, synthetic construct; identical to SEQ ID NO: 28908
  source 1..120: mol_type = other DNA

SEQ ID NO: 114083 - DNA, 120 bp, synthetic construct
  source 1..120: mol_type = other DNA
tcctctccggcacctgtttcctgactttttaatgattgccattctaactggtgtgaaatgttatctcactgtggttttgattttcatttctctgatggccagtgatggtgagcatttttt

SEQ ID NO: 114084 - DNA, 120 bp, synthetic construct
  source 1..120: mol_type = other DNA
agcagtggtttgtagttctccttgaagaggtccttcacatcccttgtaagttggattcctaggtattttattctctttgaagcaattgtgaatgggacttcactcatgatttggctctct

SEQ ID NO: 114085 - DNA, 120 bp, synthetic construct
  source 1..120: mol_type = other DNA
ctcctgttattgccctattcagagattcaacttcttcctggtttagtcttgggaaagtgtatgtgtcgaggaatttatccatttcttctagattttctagtttatttgcgtagaggtgtt

SEQ ID NO: 114086 - DNA, 120 bp, synthetic construct
  source 1..120: mol_type = other DNA
ccgcttggtgcagagctgagttcaattcctgggtatccttgttgactttctgtctcattgatctgtctaatgttgacagtggggtgttaaagtctcccattattaatatgtgggagacta

SEQ ID NO: 114087 - DNA, 120 bp, synthetic construct
  source 1..120: mol_type = other DNA
cctgaatctgaatgttggcctgctttgctagattggggaagttctcctggataatatcctgcagagtgttttccaacttggttccattctccccatcactttcaggtacaccaatcagat

SEQ ID NO: 114088 - DNA, 120 bp, synthetic construct; identical to SEQ ID NO: 21604
  source 1..120: mol_type = other DNA

SEQ ID NO: 114089 - DNA, 120 bp, synthetic construct
  source 1..120: mol_type = other DNA
tgcccatgcctatgtcctgaatggtaatgcctaggttttcttctagggttttaatggttttaggtctaacaggtaagtctttaatccatcttgaattaatttttgtataagttgtaagga

SEQ ID NO: 114090 - DNA, 120 bp, synthetic construct; identical to SEQ ID NO: 21605
  source 1..120: mol_type = other DNA

SEQ ID NO: 114091 - DNA, 120 bp, synthetic construct
  source 1..120: mol_type = other DNA
attttttcatatgttttttggctgcataaatgtcttcttttgagaagtgtctgttcatgtccttcacccactttttgatggggttgtttgtttttttcttgtaaatttgtttgagttcat

SEQ ID NO: 114092 - DNA, 120 bp, synthetic construct
  source 1..120: mol_type = other DNA
tctttgaagcaattgtgaatggcagttcactcatgatttggctctctgtttgtctgttattggtgtataagaatgcttgtgatttttgtacattgattttgtatcctgagactttgctga

SEQ ID NO: 114093 - DNA, 120 bp, synthetic construct
  source 1..120: mol_type = other DNA
atttgcatagaggtgtttgtagtgttctctgatggtagtttgtatttctgtgggaccggtggtgatagcccctttatcattttttattgtgtctatttgattcttctctctctttttctt

SEQ ID NO: 114094 - DNA, 120 bp, synthetic construct
  source 1..120: mol_type = other DNA
ttaagtctgttttatcagagacgaggattgcaacccctgcctttttttgttttccattttcttggtagttcttcctccatccttttattttgagcctatgtgtgtctctgcacgtgagat

SEQ ID NO: 114095 - DNA, 120 bp, synthetic construct
  source 1..120: mol_type = other DNA
tgtcctcccgtagctcagagtaatttgatcgtctgaagccttctctcagctcgtcaaagtcattctccatccagctttgttccgttgctggtgaggaactgcgttcctttggaggaggag

SEQ ID NO: 114096 - DNA, 120 bp, synthetic construct
  source 1..120: mol_type = other DNA
ttggtgcaccgttttttaagcctgtcagaaaagcgcaatattcgggtgggagtgacccgattttccaggtgctgtccgttacccctttctttgactcggaaagggaactccctgacccct

SEQ ID NO: 114097 - DNA, 120 bp, synthetic construct; identical to SEQ ID NO: 21606
  source 1..120: mol_type = other DNA

SEQ ID NO: 114098 - DNA, 120 bp, synthetic construct; identical to SEQ ID NO: 21607
  source 1..120: mol_type = other DNA

SEQ ID NO: 114099 - DNA, 120 bp, synthetic construct; identical to SEQ ID NO: 21608
  source 1..120: mol_type = other DNA

SEQ ID NO: 114100 - DNA, 120 bp, synthetic construct
  source 1..120: mol_type = other DNA
cctgttcactctgatggtagtttcttttgctgtgcagaagctctttagtttaattagatcccatttgtcaattttggcttttgttgccattgcttttggtgttttggtcatgaagtccgt

SEQ ID NO: 114101 - DNA, 120 bp, synthetic construct
  source 1..120: mol_type = other DNA
ctgagagattttgtcaccaccaggcctgccctaaaagagctcctgaaggaagcactaaacatggaaaggaacaaccggtaccagccgctgcaaaatcatgccaaattgtaaagaccatga

SEQ ID NO: 114102 - DNA, 120 bp, synthetic construct
  source 1..120: mol_type = other DNA
taaagctctcctcagcaaatgtaaaagaacagaaattctaacaaactgtctctcagaccacagtgcaatcaaactagaactcaggattaagaaactcactcaaaaccgctcaactacatg

SEQ ID NO: 114103 - DNA, 120 bp, synthetic construct
  source 1..120: mol_type = other DNA
aaaatctagaagaaatattttgaggtttctttctttttttttttttttttttttttttttttttttttttttttttttgagacggagtctcgctctgtcgcccaggctggagtgcagtgg

SEQ ID NO: 114104 - DNA, 120 bp, synthetic construct; identical to SEQ ID NO: 21609
  source 1..120: mol_type = other DNA

SEQ ID NO: 114105 - DNA, 120 bp, synthetic construct; identical to SEQ ID NO: 21610
  source 1..120: mol_type = other DNA

SEQ ID NO: 114106 - DNA, 120 bp, synthetic construct
  source 1..120: mol_type = other DNA
agtgggcaaaagttttagcttcaggtgatattagcatcatggtttggtatgggcatgctttccagaaagcatattcatattcatttctgtgttcatgcattcagtattgaagtcagcata

SEQ ID NO: 114107 - DNA, 120 bp, synthetic construct
  source 1..120: mol_type = other DNA
gaggcagaggttgcaggaggttgcagtgagctaagatggcgccactgcactgcagcctggatgacagagggagactcattctcaaaaaataaaatatagataaataaaaataaattaatt

SEQ ID NO: 114108 - DNA, 120 bp, synthetic construct
  source 1..120: mol_type = other DNA
ccagtaatgggatggctgggtcaaactgtatttctagttctagatccctgaggaatcaccacactctcttccataatggttaaattagtttacactcccaccaacagtgtaaaagtgttc

SEQ ID NO: 114109 - DNA, 120 bp, synthetic construct; identical to SEQ ID NO: 21611
  source 1..120: mol_type = other DNA

SEQ ID NO: 114110 - DNA, 120 bp, synthetic construct
  source 1..120: mol_type = other DNA
ccaagtctttgctattgtgaataatgccacagacacttctcaaaagaagacatttatgcagccaaaaatcacatgaaaaaatgctcatcatcactggccatcagagaaatgcaaatcaaa

SEQ ID NO: 114111 - DNA, 120 bp, synthetic construct; identical to SEQ ID NO: 21597
  source 1..120: mol_type = other DNA

SEQ ID NO: 114112 - DNA, 120 bp, synthetic construct
  source 1..120: mol_type = other DNA
attgcggcattattcacaatagcaaagacttggaaccaacccaaatgtccatcaataatagactggattaagaaaatgtggcacatatacaccatggaatactatgcagccataaaaaat

SEQ ID NO: 114113 - DNA, 120 bp, synthetic construct
  source 1..120: mol_type = other DNA
ggccagccagatgtagaaagctgaaactggatcccttccttacaccttatacaaaaatcaattcaagatggattaaagacttaaatgttagacctaaaaccataaaaaccctagaagaaa

SEQ ID NO: 114114 - DNA, 120 bp, synthetic construct
  source 1..120: mol_type = other DNA
ccatggaatactatgcagccataaaaaatgatgagttcatgtcctttttaggattatggatgaagctggaaaccatcatgctgagcaaactatcacaaggtcagaaaaccaaagactgca

SEQ ID NO: 114115 - DNA, 120 bp, synthetic construct; identical to SEQ ID NO: 21613
  source 1..120: mol_type = other DNA

SEQ ID NO: 114116 - DNA, 120 bp, synthetic construct; identical to SEQ ID NO: 21598
  source 1..120: mol_type = other DNA

SEQ ID NO: 114117 - DNA, 120 bp, synthetic construct; identical to SEQ ID NO: 21599
  source 1..120: mol_type = other DNA

SEQ ID NO: 114118 - DNA, 120 bp, synthetic construct
  source 1..120: mol_type = other DNA
cctgcctcagcctcccaaagtgctgggattataggcgtgagctaccgtgcctggccatgtcctacacttctgagattttttttttatgcaatttcctcttctctgttgtgtgaattcctt

SEQ ID NO: 114119 - DNA, 120 bp, synthetic construct
  source 1..120: mol_type = other DNA
tgaagtccttgcctgtgcctatgtcctgaatggtattgcctaggttttaggtgttgcctatgtcctgaatgatattgcctaggtattgcctaggttttcttctagggtttttatggtttt

SEQ ID NO: 114120 - DNA, 120 bp, synthetic construct
  source 1..120: mol_type = other DNA
gagtggtgagagggggcgtccctgtcttgtgcccgttttcaaagggaatgcttccagtttttgcccattcagtatgatattggctgtgggtttctcatagatagctcttattattttgag

SEQ ID NO: 114121 - DNA, 120 bp, synthetic construct
  source 1..120: mol_type = other DNA
tcagtggtgatatccattgcatctatttgattcttctctcttttcttcttagtcttgctagcggtctatcaattttgttgatcgttcaaaaaaacagctcctggattcattgatttttgg

SEQ ID NO: 114122 - DNA, 120 bp, synthetic construct
  source 1..120: mol_type = other DNA
tccatccctttattttgagcccatgtgtgtccctgcatgtgagatgggtttcctgaatagagcacactgatgggtcttgactctttatccaatttgccagtctgtgtcttttaattggag

SEQ ID NO: 114123 - DNA, 120 bp, synthetic construct
  source 1..120: mol_type = other DNA
gaccggagctgttcctattcggccatcttggctcctcccctcccaaattctcttttatagtggtggtaccatcctcacattcccactgcaaatttacagatacagtatattgtttatttg

SEQ ID NO: 114124 - DNA, 120 bp, synthetic construct; identical to SEQ ID NO: 21600
  source 1..120: mol_type = other DNA

SEQ ID NO: 114125 - DNA, 120 bp, synthetic construct
  source 1..120: mol_type = other DNA
cgccacactgacttctaaaatggttgaactagtttacagtcccaccaacagtgtaaaagtgttcctatttctccacatcctctccagcacctgttgtttcctgactttttaatgatcgcc

SEQ ID NO: 114126 - DNA, 120 bp, synthetic construct
  source 1..120: mol_type = other DNA
cctcttttatttcgttgagcagtggtttgtagttctccttgaagaggtccttcacatcccttgtaagttggattcctaggtattttattctctttgaagcaattgtgaatggcagttcac

SEQ ID NO: 114127 - DNA, 120 bp, synthetic construct
  source 1..120: mol_type = other DNA
ccagattgcttgtctattcaacagactctatccttcctacacacacacacacacacacacacacacacacacggaatatattatagatgttatagttgtgccctctcactgtctcacact

SEQ ID NO: 114128 - DNA, 120 bp, synthetic construct
  source 1..120: mol_type = other DNA
attaatactgaaagttttaatatttttctgtttacatacttactgctttgcacacataagtataaaaattctgccaaaagcagttgtcagggtatccctgacccctgccccccgcccccc

SEQ ID NO: 114129 - DNA, 120 bp, synthetic construct; identical to SEQ ID NO: 21603
  source 1..120: mol_type = other DNA

SEQ ID NO: 114130 - DNA, 120 bp, synthetic construct
  source 1..120: mol_type = other DNA
tgcctgttcactctgatggtagtttctttcgctgtgcagaaactcattaatttaattagatcccatctgtcaatgttggcttttgttgccattgcttttggtgttttagacatgaagtcc

SEQ ID NO: 114131 - DNA, 120 bp, synthetic construct; identical to SEQ ID NO: 24076
  source 1..120: mol_type = other DNA

SEQ ID NO: 114132 - DNA, 120 bp, synthetic construct; identical to SEQ ID NO: 20584
  source 1..120: mol_type = other DNA

SEQ ID NO: 114133 - DNA, 120 bp, synthetic construct; identical to SEQ ID NO: 23051
  source 1..120: mol_type = other DNA

SEQ ID NO: 114134 - DNA, 120 bp, synthetic construct; identical to SEQ ID NO: 23052
  source 1..120: mol_type = other DNA

SEQ ID NO: 114135 - DNA, 120 bp, synthetic construct
  source 1..120: mol_type = other DNA
gcttcacaacccacagcatccataggtgatcacggcatgaatgagtgggcatcaaaatttggaagaaaagaaagaaagagagagagatagggaaggaaggaaaagaaagaaagaaagaaa

SEQ ID NO: 114136 - DNA, 120 bp, synthetic construct
  source 1..120: mol_type = other DNA
acttgcttcttatttttttcaatatggtcactagaaaattaaattacaggccaggtgcagtggcttactgtagattacagtggccaggtggatcacttgaggtcaggagtttgagaccag

SEQ ID NO: 114137 - DNA, 120 bp, synthetic construct
  source 1..120: mol_type = other DNA
tctcttactcctgacctcaggtgatccacttgcctgggcctcccaaagtgttgggattacaggcatgagccatcgcacctgtatattatatatataatatatatactgtgttacatatat

SEQ ID NO: 114138 - DNA, 120 bp, synthetic construct
  source 1..120: mol_type = other DNA
actatgtgttatatacactatatgtactatgtgttatatacactgtatgtactatgtgttatatacactatatgtactatgtgttatatacactatatgtactatgtgttatatacacta

SEQ ID NO: 114139 - DNA, 120 bp, synthetic construct; identical to SEQ ID NO: 28444
  source 1..120: mol_type = other DNA

SEQ ID NO: 114140 - DNA, 120 bp, synthetic construct; identical to SEQ ID NO: 28445
  source 1..120: mol_type = other DNA

SEQ ID NO: 114141 - DNA, 120 bp, synthetic construct; identical to SEQ ID NO: 15643
  source 1..120: mol_type = other DNA

SEQ ID NO: 114142 - DNA, 120 bp, synthetic construct
  source 1..120: mol_type = other DNA
cttcagcaaagtctcaggatacaaaatcaatgtgcaaaaatcacaagccttattatacaccaataacaaacagccaaatcatgagtgaactcccattcacaattgcttcaaagaggataa

SEQ ID NO: 114143 - DNA, 120 bp, synthetic construct
  source 1..120: mol_type = other DNA
ccccaaagtccattagtcccttgtatcattcttaacgcctttgcgtcctcatagcttagctcccacttctgagtgagaacatacaatgtttggtttttcattcctgagttacttcactta

SEQ ID NO: 114144 - DNA, 120 bp, synthetic construct
  source 1..120: mol_type = other DNA
gtctgggaagtgaggagagtctccacccggctgccccatctgggaggtagggggcacccccgcccggcagccgccccgtctgggaggtgtacccaacagctcattgagaaggggccatga

SEQ ID NO: 114145 - DNA, 120 bp, synthetic construct; identical to SEQ ID NO: 10301
  source 1..120: mol_type = other DNA

SEQ ID NO: 114146 - DNA, 120 bp, synthetic construct; identical to SEQ ID NO: 418
  source 1..120: mol_type = other DNA

SEQ ID NO: 114147 - DNA, 120 bp, synthetic construct
  source 1..120: mol_type = other DNA
tctcaatagattcacaaaaatcatttgacaacatccaacaccccctttaatgattataaaaacaaactaggctgggcgcagtgattcacacctgtaatcccagcactctgggaagctgag

SEQ ID NO: 114148 - DNA, 120 bp, synthetic construct; identical to SEQ ID NO: 10302
  source 1..120: mol_type = other DNA

SEQ ID NO: 114149 - DNA, 120 bp, synthetic construct
  source 1..120: mol_type = other DNA
cagctactagggaggctgaggtgggaggatcacttgagtccagcaggtcaagtctcagcataatcaaaccacttaactccagcctgggtgacagagagagactttgtctcaaaaggaaaa

SEQ ID NO: 114150 - DNA, 120 bp, synthetic construct
  source 1..120: mol_type = other DNA
tgtagtcttggttgcacgactctgaatatactaaaaaccactgaattgtacgctctaagtaagtggattgtgtgatacatgagatacagatcagtaactccattttctctctctcttttt

SEQ ID NO: 114151 - DNA, 120 bp, synthetic construct
  source 1..120: mol_type = other DNA
agaaaatagtacctgtcaactcaccatgtcgtgactttggcaacaactttttttttttcttgtttaatagtagacacagggtctcactgtgttgtccaggctggtctggaactcctgggt

SEQ ID NO: 114152 - DNA, 120 bp, synthetic construct
  source 1..120: mol_type = other DNA
ctgtttctgtattgaaggataattttttttttcttctcagcaaccatggcctgagactgaagaataattatttaccttaccacattgaatctagcatttctaaaaactcaaacaaaaagc

SEQ ID NO: 114153 - DNA, 120 bp, synthetic construct
  source 1..120: mol_type = other DNA
tctgttcttctcatagctttcagtgttcctttctctagagctgtcctttctaaacacttttgcacaaatctatcagatttacgttttgaaggaaacaaagtctttaatgagactcccttc

SEQ ID NO: 114154 - DNA, 120 bp, synthetic construct
  source 1..120: mol_type = other DNA
ttctcagctgcacctgttacattctccaaccctatgtgacttgcttttcaaattgttgagttgctaatgggaattttggattgtttgggggcatgcagatccataggaaatggtaatgaa

SEQ ID NO: 114155 - DNA, 120 bp, synthetic construct
  source 1..120: mol_type = other DNA
ctgctgggattacagatgtgagccactgcgcctagccctgttaagttttttatattcctgttactgtgtggatctctgtccatgctttaccagcctagatccttcaatatttttattact

SEQ ID NO: 114156 - DNA, 120 bp, synthetic construct
  source 1..120: mol_type = other DNA
ttacatagattagtttctgtaaacctctgtaagatacattccaggctgtcattcaaagccttatatatatttaatgtgtattcattatattatacatttaataataagagttttccttat

SEQ ID NO: 114157 - DNA, 120 bp, synthetic construct; identical to SEQ ID NO: 10647
  source 1..120: mol_type = other DNA

SEQ ID NO: 114158 - DNA, 120 bp, synthetic construct; identical to SEQ ID NO: 10648
  source 1..120: mol_type = other DNA

SEQ ID NO: 114159 - DNA, 120 bp, synthetic construct; identical to SEQ ID NO: 10310
  source 1..120: mol_type = other DNA

SEQ ID NO: 114160 - DNA, 120 bp, synthetic construct
  source 1..120: mol_type = other DNA
ttcccttttcccaaaggcaacttttaatttttttttttttttttttcttttttgagacggagtctaggtgtcacccaggctggagtgcagtggcatgatctcagctcactgcaacctcca

SEQ ID NO: 114161 - DNA, 120 bp, synthetic construct; identical to SEQ ID NO: 10311
  source 1..120: mol_type = other DNA

SEQ ID NO: 114162 - DNA, 120 bp, synthetic construct
  source 1..120: mol_type = other DNA
tttctctgttttgttatattgtggaagcaatatatgggactttgaatagcatagcagctagctgtcctgggctccctcaccactgcccccatctgtcccttacttatctcttccaggcaa

SEQ ID NO: 114163 - DNA, 120 bp, synthetic construct
  source 1..120: mol_type = other DNA
tgaaatgatgaagtaatgaaacaaaattaaatatgaaatgaaaggaaatacgaaatgctgggtgtggtggctcacctgtaatcctagcactttgggaggccgaggcaggtggatcacctg

SEQ ID NO: 114164 - DNA, 120 bp, synthetic construct
  source 1..120: mol_type = other DNA
tgacatagaattaatgagtattcttttttgctttttctcttctgagccaagagctttcttttcataatttatgttggaggtgttccagactatgttactactgcaagaaggtccttgcca

SEQ ID NO: 114165 - DNA, 120 bp, synthetic construct
  source 1..120: mol_type = other DNA
tgcctttcggaggcaagaatatagaacatgtgtagttaattaagctatttaaaacagaaatgttaggcctggcacagtggctcacgtctgtaatcccagcactttgggaggccaaggcgg

SEQ ID NO: 114166 - DNA, 120 bp, synthetic construct
  source 1..120: mol_type = other DNA
acagagtgagaccctgtgtcaaacaaaaaaaaaaaaaaaaagatagattctaagaggccaaggcaggcaaatgggcagattgcttgagcccaggaattggagactagcctggacaacata

SEQ ID NO: 114167 - DNA, 120 bp, synthetic construct; identical to SEQ ID NO: 10643
  source 1..120: mol_type = other DNA

SEQ ID NO: 114168 - DNA, 120 bp, synthetic construct
  source 1..120: mol_type = other DNA
tagctgggactacaggcgcccatcaccacgcctggctaatttttgtgttctcaatagagaccgggtttcaccatgttggccaggctcccaaagtgctgggattacaggcaaagtgtgttt

SEQ ID NO: 114169 - DNA, 120 bp, synthetic construct; identical to SEQ ID NO: 10644
  source 1..120: mol_type = other DNA

SEQ ID NO: 114170 - DNA, 120 bp, synthetic construct
  source 1..120: mol_type = other DNA
ttgtatttaatcagaattttaaaattttgtggtttagacaataccaacaagaatggaggccaggtgcagtggctcacacctgtaatcccagcactttgggaggctgaggcgggtggatca

SEQ ID NO: 114171 - DNA, 120 bp, synthetic construct; identical to SEQ ID NO: 10303
  source 1..120: mol_type = other DNA

SEQ ID NO: 114172 - DNA, 120 bp, synthetic construct; identical to SEQ ID NO: 10304
  source 1..120: mol_type = other DNA

SEQ ID NO: 114173 - DNA, 120 bp, synthetic construct
  source 1..120: mol_type = other DNA
acaaccttgtttgtgtgtgaattgatggacgtttgcttgcaacccttgttatatttttcagttgatactagcaggagaatgagttggtgctaacgtgcacttttgcttgcttgataatgt

SEQ ID NO: 114174 - DNA, 120 bp, synthetic construct; identical to SEQ ID NO: 10645
  source 1..120: mol_type = other DNA

SEQ ID NO: 114175 - DNA, 120 bp, synthetic construct
  source 1..120: mol_type = other DNA
gtgagtgttacatacttttttctcaagagtgctcagttcaagtagttgagggtgcgtaaaatcaaaagcaattagaatgttggtttcagggttttttttttaatatttacatttgtcttt

SEQ ID NO: 114176 - DNA, 120 bp, synthetic construct; identical to SEQ ID NO: 10307
  source 1..120: mol_type = other DNA

SEQ ID NO: 114177 - DNA, 120 bp, synthetic construct; identical to SEQ ID NO: 10646
  source 1..120: mol_type = other DNA

SEQ ID NO: 114178 - DNA, 120 bp, synthetic construct
  source 1..120: mol_type = other DNA
acgtgtgtgtgtgtgtgtgtgtgtgtgtgtgtgtgtgtgtgtgtgtatgtgtgtcttcaatccgaagtacagcaattatgggtagcatataaatgaaaattttaaatattcttcctgaga

SEQ ID NO: 114179 - DNA, 120 bp, synthetic construct
  source 1..120: mol_type = other DNA
gagctgggactataggcaacatgcaccaccatgccaactaatttttttaaaaatttttttggagaagggggtatccctatgttgttgcccagactggtctctgactcctgggcttatgtg

SEQ ID NO: 114180 - DNA, 120 bp, synthetic construct
  source 1..120: mol_type = other DNA
ccccagtaatacaacaaaagaccttcacctttgtccctctgaagctgttccaaagctgattccagaaccaaggacaaataccttaacaagtgattgttttagtcacttaggaagggctat

SEQ ID NO: 114181 - DNA, 120 bp, synthetic construct
  source 1..120: mol_type = other DNA
tcccttttcccaaaggcaacttttaatttttttttttttctttcttttttgagatggagtcttggtgtcacccaggctggagtgcagtggcatgatctcggctcactgcaacctccacct

SEQ ID NO: 114182 - DNA, 120 bp, synthetic construct
  source 1..120: mol_type = other DNA
actcccttgttttatagacaaactaaaattcagacaagttaaattacctccacatgctcacacagctctgtcacggtctagtgcatcaaactctagtctgagtccaaagcccgttgtctt

SEQ ID NO: 114183 - DNA, 120 bp, synthetic construct
  source 1..120: mol_type = other DNA
atctgtcccttacttatctcttccaggcaagactaaagtcactaaaatgtttcccttgtttttttttttgagttgcggtcttgctctgtcacccaggctaaagtgcagtggtgccatcat

SEQ ID NO: 114184 - DNA, 120 bp, synthetic construct
  source 1..120: mol_type = other DNA
gatccgcccacctcagcctcccaaagtgctgggattacaggcgtgaaccaccacgccgggccaagccagattctttaaagtggctctatcttctctgtaatttgctcccttgccactttg

SEQ ID NO: 114185 - DNA, 120 bp, synthetic construct; identical to SEQ ID NO: 10649
  source 1..120: mol_type = other DNA

SEQ ID NO: 114186 - DNA, 120 bp, synthetic construct; identical to SEQ ID NO: 10650
  source 1..120: mol_type = other DNA

SEQ ID NO: 114187 - DNA, 120 bp, synthetic construct; identical to SEQ ID NO: 10651
  source 1..120: mol_type = other DNA

SEQ ID NO: 114188 - DNA, 120 bp, synthetic construct
  source 1..120: mol_type = other DNA
agcctgggtgatagagtgagtttccatcttgaaatgaaagaaatgaaatatgaaatgctgggtgtggtggctcacacctgtaatcctagcactttgggaggccgaggcaggtggatcacc

SEQ ID NO: 114189 - DNA, 120 bp, synthetic construct
  source 1..120: mol_type = other DNA
caaatctatgaatctggaagttgaagttatatttgtattcccaccacacaaaatttatgtctgtgccctgtcttcctgggtctgtttttaaccagaaattaataagacattgatttgcct

SEQ ID NO: 114190 - DNA, 120 bp, synthetic construct; identical to SEQ ID NO: 10652
  source 1..120: mol_type = other DNA

SEQ ID NO: 114191 - DNA, 120 bp, synthetic construct
  source 1..120: mol_type = other DNA
caaagctgcagtgtgccttcattgtgccactgcactctagcctgggcgacagagtgagaccctgtgtcaaaaaaaaaaaaaaaaaaaaagatagattctaagaggccaaggcaggcaaat

SEQ ID NO: 114192 - DNA, 120 bp, synthetic construct
  source 1..120: mol_type = other DNA
aggagcgtctctgcctggccgcccatcgtctgggatgtgaggagcccctctgcccgggctgcccagtctgggaagtgaggagcgccttttcccggctgccatcccgtctaggaagtgagg

SEQ ID NO: 114193 - DNA, 120 bp, synthetic construct
  source 1..120: mol_type = other DNA
catgtttatctgctgaccttccctccactattgtcctatgaccctgccaaatccccttctccgagaaacacccaagaatgatcaataaatactaaaaaaaaaaaaaaaaaatactgcaag

SEQ ID NO: 114194 - DNA, 120 bp, synthetic construct; identical to SEQ ID NO: 10653
  source 1..120: mol_type = other DNA

SEQ ID NO: 114195 - DNA, 120 bp, synthetic construct
  source 1..120: mol_type = other DNA
agcaaacaaattttcttcttaataaagaatccagttgctgggcacaatggttcacacctgtaatctcagcacgtttggagggcaaggcaggaggattccttggggctaggagttcaagac

SEQ ID NO: 114196 - DNA, 120 bp, synthetic construct; identical to SEQ ID NO: 10654
  source 1..120: mol_type = other DNA

SEQ ID NO: 114197 - DNA, 120 bp, synthetic construct
  source 1..120: mol_type = other DNA
tttgaaatgtggcctcagtgtgtttgcccaggctgatcttaaactcctgggctcacatgatcctccctctcagcctcctgagtagctgggactacaggcatgatccactacacccagcta

SEQ ID NO: 114198 - DNA, 120 bp, synthetic construct; identical to SEQ ID NO: 10655
  source 1..120: mol_type = other DNA

SEQ ID NO: 114199 - DNA, 120 bp, synthetic construct
  source 1..120: mol_type = other DNA
ttgactttgggaggtggaggttgctgtgaaccaagattgcaccattgcactctagcctggacaacaacagcaaaactctgtctcaaaaaaaaaaaaaaaaaaaaagatttataactgggc

SEQ ID NO: 114200 - DNA, 120 bp, synthetic construct; identical to SEQ ID NO: 10656
  source 1..120: mol_type = other DNA

SEQ ID NO: 114201 - DNA, 120 bp, synthetic construct; identical to SEQ ID NO: 10657
  source 1..120: mol_type = other DNA

SEQ ID NO: 114202 - DNA, 120 bp, synthetic construct
  source 1..120: mol_type = other DNA
gttcacctatcatctgagaattcacctttagaaaaataagatgtctcttaaaacaggccatagtgtcctggaggctgagaaagaagtgagtgtgtcaccaaagccacctacctccaaaat

SEQ ID NO: 114203 - DNA, 120 bp, synthetic construct
  source 1..120: mol_type = other DNA
aaggcagggactgggagggaagccgcgtgtcccagccctgcctgcacccaaggatcgaagccccagacacatagtgcctggcagagggaggatgggatgaggaccttggacccacgtctc

SEQ ID NO: 114204 - DNA, 120 bp, synthetic construct
  source 1..120: mol_type = other DNA
cctgaaatcttagcactttgggaggctgagatgagaggatcacttgaacccaggagttcgagaccagactgggcaacatagcaagatctggtttctaaacacaaaagtaattttaaaaat

SEQ ID NO: 114205 - DNA, 120 bp, synthetic construct
  source 1..120: mol_type = other DNA
ctgcagtgcaactctggcatctgactgggcctctgagccgggatggggtgaaaagttttagctacaggatgattttgatgcaaagatttagacacaaatgccaggcaacccagaagagga

SEQ ID NO: 114206 - DNA, 120 bp, synthetic construct; identical to SEQ ID NO: 7424
  source 1..120: mol_type = other DNA

SEQ ID NO: 114207 - DNA, 120 bp, synthetic construct; identical to SEQ ID NO: 7425
  source 1..120: mol_type = other DNA

SEQ ID NO: 114208 - DNA, 120 bp, synthetic construct
  source 1..120: mol_type = other DNA
gtggtgttagactagttagagaagggcttctcattgaaaaagaatttaaagtggcaaggtgacagacctgaaaaaacaatttgtgaagtataagaatgttgtgggccgggcgcggtggct

SEQ ID NO: 114209 - DNA, 120 bp, synthetic construct
  source 1..120: mol_type = other DNA
aaggattaggaagcggacctgggcacgaatagagaaagaagcccagcaaattcctcttgcaccagctctgggaggaagctcagctgcagttctacgtagaagaaaagaggcggcaaagta

SEQ ID NO: 114210 - DNA, 120 bp, synthetic construct
  source 1..120: mol_type = other DNA
ctgggtcgtttgtgcaggcggggtgaggggcagcgcgagtaaacgggttgacatcccctaggtttctctgcagagtgcgctgtgtacttcatcgggcatttactttttcactgcttcctc

SEQ ID NO: 114211 - DNA, 120 bp, synthetic construct
  source 1..120: mol_type = other DNA
acattaacgtctgagaagtactggcctaggtatgttggagtgaagttttctgtccagtgtcaaggagtgctttacatttccatccggttatgtatttgaatctttgttttgcccaccagg

SEQ ID NO: 114212 - DNA, 120 bp, synthetic construct
  source 1..120: mol_type = other DNA
cagccttattttattttttgagacagagtcttgctgtgtttccaggctggagtgcagtggtgtaatcttggttcactgcagcttcaacctctcaggctcaagtgatcctcccacctcagc

SEQ ID NO: 114213 - DNA, 120 bp, synthetic construct
  source 1..120: mol_type = other DNA
actcctgacctcaggtgatccacccacctcgacctccaaaagtgctaggattacaggtgtgagccactgcgcccggccaagtcaaagtctttatactacaatctgtgcgtttaatagcac

SEQ ID NO: 114214 - DNA, 120 bp, synthetic construct
  source 1..120: mol_type = other DNA
ctttgggtcttcttgcttgaaaccatggttcttttcctggtcctcccattgtagaataagaaattcctacctactcactccccttcacctccagcagttatattgagatgtaattcatga

SEQ ID NO: 114215 - DNA, 120 bp, synthetic construct
  source 1..120: mol_type = other DNA
aggatatttgtggagttgttaaccatcaccactgtcaatattaagatattttcaaggctagatgtggtagctcatgcctgtaatcccagcagtttggaaggctgaggtggaaggattgct

SEQ ID NO: 114216 - DNA, 120 bp, synthetic construct
  source 1..120: mol_type = other DNA
gtctcggcctcccaaagtgctaagattataggtgtgagccatcatgacaggccagtactttattctttctattgctgaataatcatccattgcatggacatgtcatagtttgcttatcca

SEQ ID NO: 114217 - DNA, 120 bp, synthetic construct
  source 1..120: mol_type = other DNA
attgcggcttaggcctctgggcctagtgtaatacctgatgttcctaaagatttgaatgaagaattaatgaatacgtagtttcttggggttgatggggagtacgtaagcagggacttacta

SEQ ID NO: 114218 - DNA, 120 bp, synthetic construct
  source 1..120: mol_type = other DNA
gcggaggttgcagtgagccaagatcacgccattgcactccagcctgggggacaagagcgaaactctgcctcaaaaaaaaaaaaaaaaagaaaaagaaaaaaaagaaaaagaaagtaaaaa

SEQ ID NO: 114219 - DNA, 120 bp, synthetic construct
  source 1..120: mol_type = other DNA
gaagaacagagctgagagataaggaagaaatggacagagggttatgaggagacctgggtgagtgaagacccacaaactcctatgtaaaggttcaggagagtgaggacatgtatgggtatt

SEQ ID NO: 114220 - DNA, 120 bp, synthetic construct
  source 1..120: mol_type = other DNA
gttatcatttggggcatctgttgttagtagagagcaaagtgatttaatatcagtgcttgtaaaccaactgcctggtgacttgctgtatggtcaggaactgagtagcagctccttagttta

SEQ ID NO: 114221 - DNA, 120 bp, synthetic construct
  source 1..120: mol_type = other DNA
tgataactgggattcctgcactacacggatagagaagggtggaaaagagttcaaagtcctgtgcattcattcatccatttattcattcttaacaggcgcttatcaatgcctatgcccttt

SEQ ID NO: 114222 - DNA, 120 bp, synthetic construct
  source 1..120: mol_type = other DNA
catgggtgcacacaagcctgcattcctgccacactgctccgcttgctggtctaagaatgctttcctgtttcatttttctggctttttttttttttttttttttttgagacagggtctcgc

SEQ ID NO: 114223 - DNA, 120 bp, synthetic construct
  source 1..120: mol_type = other DNA
gcacaggtaaacataaatataacaattagagactaagcagtgacacaagtcccacagcaggtgcagggagtctctcctgggaagagggagaaataggaagttggaatgttgataccctgg

SEQ ID NO: 114224 - DNA, 120 bp, synthetic construct
  source 1..120: mol_type = other DNA
aacatatgaattttggggagatacaaacactcagtccttagcaacccaggccaataacgatttgctgagtaaataatcatggctggcactcttaatagctctttgaatgggacaggacct

SEQ ID NO: 114225 - DNA, 120 bp, synthetic construct
  source 1..120: mol_type = other DNA
aaactctaatattattggacgtcagtcaagtgctagttcctgagtgaggagagatattagagatagaaggatgactatgacatcatacctaccttttaggctatctcagaatgctcaaag

SEQ ID NO: 114226 - DNA, 120 bp, synthetic construct
  source 1..120: mol_type = other DNA
cagcctctcgtcatgagctgaggttttgtccagctgcccacactcttcaaccaatgatcatgagcttctttgttttctttccttctttctttctttctctctctctttctttctttcttt

SEQ ID NO: 114227 - DNA, 120 bp, synthetic construct
  source 1..120: mol_type = other DNA
aggtcccatgtctttgtttgctcataatagttataagtgggttttagcttcttcctcttgagtttggatggatttggcttctgctgccagagcctagattgttctcacgtatcagacatt

SEQ ID NO: 114228 - DNA, 120 bp, synthetic construct
  source 1..120: mol_type = other DNA
tgcagtgagctgagattgagccactgcactccagcctgggtgatagagtgagacttcatctcaaaaaaaccaaccaaccaaacaaaatgttttactttagtcagtgttatgggttgaatt

SEQ ID NO: 114229 - DNA, 120 bp, synthetic construct
  source 1..120: mol_type = other DNA
tcatcgtgttccagttttaattgatgaagcccaaagtatgtgagagggcagaataggaacaccaaacccagtctggggattcaacgaaagaaagctttttggaagaaatgaagccacaac

SEQ ID NO: 114230 - DNA, 120 bp, synthetic construct
  source 1..120: mol_type = other DNA
cctcccaaagtgctgggattacaggcgtgagccactgcacccggcctgaaagttttttatttcttaggactgagagtactcagagaatccatgaattattatatatatgcaagttgtttg

SEQ ID NO: 114231 - DNA, 120 bp, synthetic construct
  source 1..120: mol_type = other DNA
gggcactgtagctggcgctgggcacatgggttatttccaatagatactgggttgtgccagaggacaggattggaacgataaatttgatgacatccagttgaaggtaatagtttaaaccta

SEQ ID NO: 114232 - DNA, 120 bp, synthetic construct
  source 1..120: mol_type = other DNA
gaaggggtattttggctagatttgttatttcctgtgttattaaccttatgtataattatgagagattccacacaaagatgacaattttaaaaaatgaataaataaattagcaagttgaac

SEQ ID NO: 114233 - DNA, 120 bp, synthetic construct
  source 1..120: mol_type = other DNA
cattcaattttattttttatttttttgagacagagtctctctctgtcacccaggctggaataaaatgacacgattatagcttactgcagcctcgaacttgtgggctcaagtgatcctcct

SEQ ID NO: 114234 - DNA, 120 bp, synthetic construct
  source 1..120: mol_type = other DNA
gcattgctataaaatgacaactagaattccttcctcacttgtcaaagcacaggcttttagagagagagatatttgtagaaagagcaaatctgtttctgattttagttcatccagtggcag

SEQ ID NO: 114235 - DNA, 120 bp, synthetic construct
  source 1..120: mol_type = other DNA
aatgtttttcaacaatacaagtgtttttctgattaaagtgtatgtgcagactatgcttcggggaaatactttgcttgaaacagcagttttccttccacatctctttctgcagccccactg

SEQ ID NO: 114236 - DNA, 120 bp, synthetic construct
  source 1..120: mol_type = other DNA
tattattgttattctactgttattgtcttgaaagtaaatggaagtgtgtatatgcgtggagagggcagggggcatacagagactctatcagagtccatgtaggttaatgctgttcagcca

SEQ ID NO: 114237 - DNA, 120 bp, synthetic construct
  source 1..120: mol_type = other DNA
atacacagggataaaacatttcactgatcacttttttttttttttttgagacagtatttagctcttgctgcccaggctggagtgcaatggcacaatcttggctcactgcaacctccgcct

SEQ ID NO: 114238 - DNA, 120 bp, synthetic construct
  source 1..120: mol_type = other DNA
gttgcatgattggccaaaacgaatggctaccaaccgacaattgactgagtattgcaagttcattgaaacagagattggatgatttacacatgtgtatatttgcccattgcccagcacatg

SEQ ID NO: 114239 - DNA, 120 bp, synthetic construct
  source 1..120: mol_type = other DNA
aagaatttgcagaaggggtatttcttgggttttcttggtcttaggggtaaaacgagaaagtatttgccatctttcctgctggtgagcaacccataaatataaacacaagcctaggccagt

SEQ ID NO: 114240 - DNA, 120 bp, synthetic construct
  source 1..120: mol_type = other DNA
tttctcagagtgaccctcaggtggactggtgataccaaagtttaggtggcaattcactttctccattttttgaagactgaaaacaggggcagcaattccattatttctgagagaaatgaa

SEQ ID NO: 114241 - DNA, 120 bp, synthetic construct
  source 1..120: mol_type = other DNA
tgacagttgcataactctgtgaaggtactaaaagccatcctaaaaacgggcaaattgtatggtatgtggacttcagtgcatttcccaaaatcttaccattgcagggaatgagcatgttgg

SEQ ID NO: 114242 - DNA, 120 bp, synthetic construct
  source 1..120: mol_type = other DNA
agctggaatggggttgtaatttttttcatgtgcttgttttataattcctgtctgttgaagttggcagcccctacttgggtggattccagataaatgtgtgaactggagtttagtggagtg

SEQ ID NO: 114243 - DNA, 120 bp, synthetic construct
  source 1..120: mol_type = other DNA
aatcacttgaacccaggaggtggaggttacagtgagctgagatcgtgccactgcattccagccttgcgatacagagaaactgtctcaaaaaagaaaaaaattgttctcctaaaatcttta

SEQ ID NO: 114244 - DNA, 120 bp, synthetic construct
  source 1..120: mol_type = other DNA
agtctctcctctgatgagcactgtttgcctgaggctggatttttgcaactttaaggggctttgattatcacctttctgacttggcaggatcatctttgccttcagaaataatgctaaggc

SEQ ID NO: 114245 - DNA, 120 bp, synthetic construct
  source 1..120: mol_type = other DNA
aaaaaggaaaagaaaacaaaagaagtgagttgaaggtgaaagctcgaaacttttacttctgtgcacctgggagcccctctatagcttctttccctcttccctaggggctcctcggtttac

SEQ ID NO: 114246 - DNA, 120 bp, synthetic construct
  source 1..120: mol_type = other DNA
aactgcttgaacctgggaggcagaggttgcggtgagctgagattgccactgcactccagcctgcgcaacagagtgagactctgtcccaaaaaaaaagaaaaatttagaaagtttattttg

SEQ ID NO: 114247 - DNA, 120 bp, synthetic construct
  source 1..120: mol_type = other DNA
ttctcatacccatcccatgaggtggaggtccaactctaatccccatttgtagtagtttgccgaagccacagtaacaaagcaccataaactgggtggcttaaacagaaattaacataaatt

SEQ ID NO: 114248 - DNA, 120 bp, synthetic construct
  source 1..120: mol_type = other DNA
ccctagatctcttaacttttcacagccaaatcttaaaaggcttctctgtgctttttgttccttttcctcactatcacctgcccttctgacactttctcctctacctatgccagaaactta

SEQ ID NO: 114249 - DNA, 120 bp, synthetic construct
  source 1..120: mol_type = other DNA
agactggttacttaaaataattaactctgtcaatacgctttgaaagaggctttgtaaattgttaaagttacatttgtctcttctgatagctttagctcagcagaataaatatggtaatag

SEQ ID NO: 114250 - DNA, 120 bp, synthetic construct
  source 1..120: mol_type = other DNA
aagaatttgatgtaccttctacaaacctgattttgttcattatgactccacaccttgcttgctttccttcactactctaggaatgtggaaaagtttagctggatgtagtcctggcctacc

SEQ ID NO: 114251 - DNA, 120 bp, synthetic construct
  source 1..120: mol_type = other DNA
atttttctatttttagtagagatggggtttcaccatcttggctaggcaggtctcgaactcctgacttcgtgatccatccgcttcagcctcccaaagtgctgggattacaggcatgagcca

SEQ ID NO: 114252 - DNA, 120 bp, synthetic construct
  source 1..120: mol_type = other DNA
tacaggttattatcttacatgtcttacaacttactgtttacacttaacacatcttatgaattctgcgtgagtcttacaagctacttatttcctcattatctatgctaaatgaatcaggag

SEQ ID NO: 114253 - DNA, 120 bp, synthetic construct
  source 1..120: mol_type = other DNA
tttattttaaaacatttttagctgagtgcggtggctcaggcctgtaatccctgcactttgggaggccaaggcaggtggattgcctcagttcaggaattcaagaccagcctgggtaacatg

SEQ ID NO: 114254 - DNA, 120 bp, synthetic construct
  source 1..120: mol_type = other DNA
atactcttcaactttaatctgtgttgatcgaggatcctgaattcttagagctagccgattctggtgataagttttttaaagcaattcaggaatgcagagggccctctggtttccccagag

SEQ ID NO: 114255 - DNA, 120 bp, synthetic construct
  source 1..120: mol_type = other DNA
tcaagtgattcttctgtctcagcctctggagtagctgggacttcaggtgtgtgccatcacgctagctcatttacttttattatttttattttttgtagagacagggtcttcctatgttgc

SEQ ID NO: 114256 - DNA, 120 bp, synthetic construct
  source 1..120: mol_type = other DNA
tctccttccaacccaggactctccccaaacaccagtctagggcaccccagcttcttaatccgttcaggccatagctgactctgaattgcacagctaattcttttttatttttttttgagg

SEQ ID NO: 114257 - DNA, 120 bp, synthetic construct
  source 1..120: mol_type = other DNA
ccagagtgagactttttctgaaaaataaataaaataggctgggtgcagtggctcacgcccataatcctagcactttcggaggccaagacgggagaatcacttgaggtcaggagttcaaaa

SEQ ID NO: 114258 - DNA, 120 bp, synthetic construct
  source 1..120: mol_type = other DNA
ttatggtgagccaagattgcaccactgcactccagcctgggcaagagagcgagagtctgtcaaaaaaaaaaaaaaaaagaagaagaagaagaatgtctgcgtgaaaatttgttctgttct

SEQ ID NO: 114259 - DNA, 120 bp, synthetic construct
  source 1..120: mol_type = other DNA
aagaaaaaagaaagtaatatataataactaaaagtgaaagcataagggggaagcagaacgttagatgccgctctcctggaggtaatcacaggggccattgagtggggtgattattgtggg

SEQ ID NO: 114260 - DNA, 120 bp, synthetic construct
  source 1..120: mol_type = other DNA
gtttatctcattaaggtcttctgaccaacttatttcttattttttgagacagtgtctctctctgtcacctaggctgcagtatagtggtgcagtcatagcttactgcagcctcaaattcct

SEQ ID NO: 114261 - DNA, 120 bp, synthetic construct
  source 1..120: mol_type = other DNA
aatgtgggattgtcccctcccaagacttcaacttttatgatacattgatgatacccaaatcactcccaaatctctctcctcaaatactcatcagtgcctagcacataggagacacttgat

SEQ ID NO: 114262 - DNA, 120 bp, synthetic construct
  source 1..120: mol_type = other DNA
atctcagtgcttacacagtttatcattacttgttgattgtctactgcaatagactgagtttcctaaggcaggatcctgagtattttatcaaggggttgacagaggtgttcagtaagtacc

SEQ ID NO: 114263 - DNA, 120 bp, synthetic construct
  source 1..120: mol_type = other DNA
cagtgccgctctagagagaaaaaaggaaatcagtcagtagatgtaactgccacattctggattattttttaaatgttagtggctctaagcccacatcattaaggtgtggccacctttcaa

SEQ ID NO: 114264 - DNA, 120 bp, synthetic construct
  source 1..120: mol_type = other DNA
cacatggaggacttcgaaaggaataagcacactgaattgcattagatgaatcctgtcagataagcacttgtgacctactggcaaccttttataagctgatgatgggagaggagtttcaat

SEQ ID NO: 114265 - DNA, 120 bp, synthetic construct
  source 1..120: mol_type = other DNA
agtaggagcaggagcagaagcagaagcggggtccggagctgcgcgcctacgcgggacctgtgtccgaaatgccggtgcgaggagaccgcgggtttccaccccggcgggagctgtcaggtt

SEQ ID NO: 114266 - DNA, 120 bp, synthetic construct
  source 1..120: mol_type = other DNA
cccacctctatttcagcttcagttcttaggctaggctgcttttctggcagctgtctggcctgagtaatgatggttgtggtttccctgaagttcccagcggagagtcatcccatgatagaa

SEQ ID NO: 114267 - DNA, 120 bp, synthetic construct
  source 1..120: mol_type = other DNA
aaactcttaagtgttgggtcctgggttgataagggaggtgagatctaaagatacaagtaggaggtgccaggtaggtgtccaggaaaaaactgaaagagttgttgttcacactctgttaaa

SEQ ID NO: 114268 - DNA, 120 bp, synthetic construct
  source 1..120: mol_type = other DNA
gatgggagtggagggaagcagaacagttttctctggtgttttactgagtttttgtcttgatcctaaatccaagggttagggtcagaaacacagactcagaggttagatttaacacccatt

SEQ ID NO: 114269 - DNA, 120 bp, synthetic construct
  source 1..120: mol_type = other DNA
atcaactctgggaatgagtaatatgaggctaaggcaaaaatggtaaagctagcccttgacatctgaggtgtgcataatactgcttaaaatatgagtgtggtgcttacttatagagagcct

SEQ ID NO: 114270 - DNA, 120 bp, synthetic construct
  source 1..120: mol_type = other DNA
gcacagatgtttgtttagtgcctctgccagatggttaaagttaaatcaggttttttaacctgaaaaacgtaatgtagctttccttaaccatttacacaccattgtatattgcagaccata

SEQ ID NO: 114271 - DNA, 120 bp, synthetic construct
  source 1..120: mol_type = other DNA
aggtaaacagagaaaacagtactttctagtcatcagtaggaattaactcttccaggacatgtagcttcaaggaccttctaggttcttctgagggggaaataatgttccacttggggccat

SEQ ID NO: 114272 - DNA, 120 bp, synthetic construct
  source 1..120: mol_type = other DNA
cccgaagtgctgggattataggcatgagccacctcgcctggcctagttctcagtttctttatcagaaaatgagtagttacagttgatcatctcaaagtcttttgtgcttaagattctgaa

SEQ ID NO: 114273 - DNA, 120 bp, synthetic construct
  source 1..120: mol_type = other DNA
tacttatactatttaagtgcacagtttggcagatgactttgggcagtgaaggatctggaagaggcaggaaaggtagactcaatctgccagacttagagctaaaaaaatttgcctggtatg

SEQ ID NO: 114274 - DNA, 120 bp, synthetic construct
  source 1..120: mol_type = other DNA
gttattttcagtgtttttgctattatgaataaagctgccatgaaaagcacctacacattgccttgtggacatgtacacccatttctcttgtgtgaattcctaggaccataggttagggat

SEQ ID NO: 114275 - DNA, 120 bp, synthetic construct
  source 1..120: mol_type = other DNA
acatgctgtaaagctcatgtctgaggaatccaacttttgcctgctactgctgctgtctgtaggaagaagaaaaacaaatggcttctgctttccttcatccttccaaatctcaaacacgtg

SEQ ID NO: 114276 - DNA, 120 bp, synthetic construct
  source 1..120: mol_type = other DNA
gtcacatggatgccactgtaagagctccgtgtcacataaggtgttgtttttctggaagggccttccagattctgtatctattgctctgtgattctaggtacttttctaaaggtataagct

SEQ ID NO: 114277 - DNA, 120 bp, synthetic construct
  source 1..120: mol_type = other DNA
tactttccagggaccctactattactgccctaaggtaatttgctagaaatggagtggtcaagatgtattgattaacgttttaggcatacttctgtagtactacttccgaaggctccttgc

SEQ ID NO: 114278 - DNA, 120 bp, synthetic construct
  source 1..120: mol_type = other DNA
atgaactgtcctgaaaaaacagctgtaacataccactccagactgttaccagacttagtcggctggctttatatttgtgttgtcaaaactgggatgctgtcatttctgtttctctgtctc

SEQ ID NO: 114279 - DNA, 120 bp, synthetic construct
  source 1..120: mol_type = other DNA
gggatttgagccaaggtccatttgatgaatttgaaacctgtagattctgtcaattccaccagtctctgctttttagaatcacagtggcaagaaaataggagaagctcaaggccctgtgtt

SEQ ID NO: 114280 - DNA, 120 bp, synthetic construct
  source 1..120: mol_type = other DNA
tgagtttctgtgggcagtctaaggtagtgttactatttaaaatgttagtaacattttcagattcactgagattcttgctgagtgtggtggcatatgcctgtggtcccaactacttggaga

SEQ ID NO: 114281 - DNA, 120 bp, synthetic construct
  source 1..120: mol_type = other DNA
aggtcagcttcccctgaagtatgtgattggaaactgaacgagttcagattttagtttaggtaaaaatataaccagagaagttgctaccaagcatagttgactttgagctgacctaacttt

SEQ ID NO: 114282 - DNA, 120 bp, synthetic construct
  source 1..120: mol_type = other DNA
gcaacatgtactgttgtgtttctgagttgttgactatttcagttccaaacagttcgttatttcctgtcagaggaaacttcagagtaacaataaagtgctggtgtggcttcaaaggcttgg

SEQ ID NO: 114283 - DNA, 120 bp, synthetic construct
  source 1..120: mol_type = other DNA
tgattgccgttgctacagtggggcttatattaatattagaaacacccctcatttgagtggtactttacagtttatagcaacctctacataaagctgggcatggtggcacatgcctgtaat

SEQ ID NO: 114284 - DNA, 120 bp, synthetic construct
  source 1..120: mol_type = other DNA
cagtgccagggtcttcctttcttccttctctctcactttttttttttttttttttgagatgtggtctcactctgtcacccaggctagtgtccagtggcacagtctcagctcacttgagcc

SEQ ID NO: 114285 - DNA, 120 bp, synthetic construct
  source 1..120: mol_type = other DNA
tgcctggatggagtatgttccagtatgatggagcaattgtttctttttgtctgttgatttccattaggtgcagtgggcattggtcattgtgctaagtataccatgcaagaacacattcag

SEQ ID NO: 114286 - DNA, 120 bp, synthetic construct
  source 1..120: mol_type = other DNA
attaatcacataggggctctagttagaatgcatatttttatcagtaggtccaagttagggcttgagattctgtatttttaacaggctcccaggggttggctacgtaatacccaaagggtg

SEQ ID NO: 114287 - DNA, 120 bp, synthetic construct
  source 1..120: mol_type = other DNA
ccagtggtgtggaaatagctatcatgcttgtgaagatgttctgagttgtcagagtgattgaatccatgattggtctggtgcccaagcaccaacaatcatgtttttgtttgtgtgtttgtt

SEQ ID NO: 114288 - DNA, 120 bp, synthetic construct
  source 1..120: mol_type = other DNA
tgtgcaaccagtggcttttagtactgtatattcacagagttgtgtggccatcaccacaattcattttagaacattttcttcaccccaaaaggaaactgcatacccattagcagtcactcc

SEQ ID NO: 114289 - DNA, 120 bp, synthetic construct
  source 1..120: mol_type = other DNA
tgcttatcctgtgatgggtactgagcaatgctctccagaagcattactttattcagttctcagaattctaatagggtagggatcttgacctcattttgcagataggcaaccaagtcttac

SEQ ID NO: 114290 - DNA, 120 bp, synthetic construct
  source 1..120: mol_type = other DNA
aggagaatgtggttaaaaaacacaactcagtaaacctggcactcttcagtagtaggtctgggatctagttgtgttgattctggtgacctatcacaaacccctctctaagcttattgcttt

SEQ ID NO: 114291 - DNA, 120 bp, synthetic construct
  source 1..120: mol_type = other DNA
ttggagctactgagaacctggctgatttcatttagtgctccctctgtcttactttgtctttccttcctttctttcctttctccctcctttccttctttccagctatccagtaacatgtat

SEQ ID NO: 114292 - DNA, 120 bp, synthetic construct
  source 1..120: mol_type = other DNA
attttaacatttttctttttgtagagataggatcttgctttgttgcctagcccagtcttgaactcctgggctcaactgatgctcccacttcagcctcttaaagtgctgggattataggct

SEQ ID NO: 114293 - DNA, 120 bp, synthetic construct
  source 1..120: mol_type = other DNA
atcagatgctggctcctgcaaagcttcctgagggcagtgctttatttgttttgctcttcatttgttcctcagagcacattgcacttggtcgacatttgttgaatgaatgagtaaagaatt

SEQ ID NO: 114294 - DNA, 120 bp, synthetic construct
  source 1..120: mol_type = other DNA
acatgagttttggtgggacacatacattcaaaccttagcaggtgctacactgtataccctagaaaaatgagaggttaggagtgccgaccctcacacagtcaaaaatccatgtataacttt

SEQ ID NO: 114295 - DNA, 120 bp, synthetic construct
  source 1..120: mol_type = other DNA
atataataaataatttattattatttttttgagacggagttcactcttgttgcctaggctggagtgcaatggtgggatcttggctcactgcaggagaagtgattctcctgcctcagtctc

SEQ ID NO: 114296 - DNA, 120 bp, synthetic construct
  source 1..120: mol_type = other DNA
taagtgacaggacaaggatctcactccagatcttgtgactttaaaaatcactttcttggctctgcttctccttgtttcctagatggtggccatctcatggtccagatttatatacatctc

SEQ ID NO: 114297 - DNA, 120 bp, synthetic construct
  source 1..120: mol_type = other DNA
actgctttcttttttgctcataagtagtgcttttcaaagcgtttggcatccctgccatatggatgtgtcactgtgtgagatgacaacaggatttgctggaaatgtgggccactattgtat

SEQ ID NO: 114298 - DNA, 120 bp, synthetic construct
  source 1..120: mol_type = other DNA
agccgcctgttcagggggactttgggcagtgaacacttcggtatctgttttggggttggcttttaacatgtttctacattctttatgtaaaatatataggatttttacctatctggccaa

SEQ ID NO: 114299 - DNA, 120 bp, synthetic construct
  source 1..120: mol_type = other DNA
taaatcatggagcataataattaaacaaatgccatgagcccattacacatatctgcagaccatcaccaagacaaaacacgaaggaaatttgtgtacctcccaccatactctgcctcctgc

SEQ ID NO: 114300 - DNA, 120 bp, synthetic construct
  source 1..120: mol_type = other DNA
cttgtagttagttggtaagctgcccaagggctttggcgattttattcactgatgtctctgaagtgccacaaaccacttgcttggcagaaggtggatgcttaataaatgtttttgcataaa

SEQ ID NO: 114301 - DNA, 120 bp, synthetic construct
  source 1..120: mol_type = other DNA
ttgacagctttaaggtacaagaaggcattgagaagatgagcttggagaagtgggcatgctcataaggtcatttctgggtggtagtggcttagttttactaaggccacatctaaaactgaa

SEQ ID NO: 114302 - DNA, 120 bp, synthetic construct
  source 1..120: mol_type = other DNA
agaaagtcagaccatgagcacctgagtttttagttcacccacctcacgtatgctatcaaagaagcagagagccacgaatttgatacaaactttctttaagaaaatttgtaggctgggcac

SEQ ID NO: 114303 - DNA, 120 bp, synthetic construct
  source 1..120: mol_type = other DNA
tttttttttttttttttttcttattaaatatacagatggggtctcactatgttgctcaggttggtcgtaaactcctgcactcaactgatcaccccgcctcagcctcctgagtagctggga

SEQ ID NO: 114304 - DNA, 120 bp, synthetic construct
  source 1..120: mol_type = other DNA
atccccagcctcctctaaatgcctgcttcagtgctggcttatctctgtggttctgagtgttcttggcatttctagctttctcacaggcagcctgcatttaatggattattatttttaaaa

SEQ ID NO: 114305 - DNA, 120 bp, synthetic construct
  source 1..120: mol_type = other DNA
aggttgtggttttcatcagattggttttgttcttttaaaacaggccccaggcatggaagagctgatatgggaacagtacactgtgaccctacaaaaggtgagttctgcacatttcatata

SEQ ID NO: 114306 - DNA, 120 bp, synthetic construct
  source 1..120: mol_type = other DNA
ggctctgaattcctccaaggtctgacatctcctagagggaccataagttcctcataggaagagttttcctttgaccctcagaactgtgagcttcaagctttgtcttctatgaaaattaaa

SEQ ID NO: 114307 - DNA, 120 bp, synthetic construct
  source 1..120: mol_type = other DNA
ggattacaggtgtgagccaccgcacctggcccagacttagctttttaaaacacaaatgaattaggattatgtattatctatgctcaccattgtgcattgctagactgatcatggatgtaa

SEQ ID NO: 114308 - DNA, 120 bp, synthetic construct
  source 1..120: mol_type = other DNA
tttcccgcccagctagaaagttgtggttttttttttttgttttttagagacttctccatttgcccaatttaaagtgcaaaagctgccttggcttgttgaagccttgacctcacaggctca

SEQ ID NO: 114309 - DNA, 120 bp, synthetic construct
  source 1..120: mol_type = other DNA
tcctgaaagccacttattgaaggatttttaatatttctcctctctgatgtacaggattccaaaagaggatttggaattgcagtgtccggaggcagagacaacccccactttgaaaatgga

SEQ ID NO: 114310 - DNA, 120 bp, synthetic construct
  source 1..120: mol_type = other DNA
gccaccatacccagctggtaacaccattttacatgatacatgcctgattcccacaggataacttctcaggacgaagtctaaagttaactgtatggctgcattggataaatagctcaaaag

SEQ ID NO: 114311 - DNA, 120 bp, synthetic construct
  source 1..120: mol_type = other DNA
gcttcattcgtttgcagttcagcagctcagaaaaagtgggaaggtcgctgctattgtaagtactgggtttgctttcagcttgccttaatagcattttggttttttgcccagaagaaaatt

SEQ ID NO: 114312 - DNA, 120 bp, synthetic construct
  source 1..120: mol_type = other DNA
agccttggcctcccaaagtgctgggattacaggcgtgagccacctcacccggccacatatatggtatttaatgtttttcaactttatattatgaagattttcaaagaaaaaggaaagttg

SEQ ID NO: 114313 - DNA, 120 bp, synthetic construct
  source 1..120: mol_type = other DNA
gggaggcggaggttgcagtgagctgagtacagtccagcctgggcaacagagcgagactttgtcttaataataaattaaataaataaataaataaggcattgacttttcttccttaaaatt

SEQ ID NO: 114314 - DNA, 120 bp, synthetic construct
  source 1..120: mol_type = other DNA
atcaggatgaccgggcttttgaggtgatggacgagtttgatggcagaagtttccggagtggctacagcgagaggagccggctgaacagccatggggggcgcagccgcagctgggaggaca

SEQ ID NO: 114315 - DNA, 120 bp, synthetic construct
  source 1..120: mol_type = other DNA
tggtcttgaacttctgacctcaggtgatctgcccactgcagcctcccaaagtgctgggattataggcatgagccactgcacctggccagctaacttttttttttttttgagacagagtct

SEQ ID NO: 114316 - DNA, 120 bp, synthetic construct
  source 1..120: mol_type = other DNA
cgagactctgtcttgaaaaaaaaaaaaaaaaaaaaaagaaaccatggggtgggccctcagagtctctatgttaataagctctcctagtggccttgctgcatctcaagtggaaaaccacag

SEQ ID NO: 114317 - DNA, 120 bp, synthetic construct
  source 1..120: mol_type = other DNA
ttcagagtccataaactcccaaagctatgctggttttagttgaatgctttattaattactttgcctgacttctttaccccttttcttcacccactgaattcctttcaatgccaagcttca

SEQ ID NO: 114318 - DNA, 120 bp, synthetic construct
  source 1..120: mol_type = other DNA
ttcagattgctccaaatgatgtaactcattcttcccccaccctccactggatcagggacctatggtagttcatgcattgcatttggtttttatgtaacttttaatctggaacagtttctc

SEQ ID NO: 114319 - DNA, 120 bp, synthetic construct
  source 1..120: mol_type = other DNA
taactgagaacatgtctttaacggatgctcgaaaattgatagaaaagtcaagaggaaaactacagctagtggtgttgagagacagccagcagaccctcatcaacatcccgtcattaaatg

SEQ ID NO: 114320 - DNA, 120 bp, synthetic construct
  source 1..120: mol_type = other DNA
aggatagctaaaacaagtagatgctcaaaaagaatcaaaatggctaatattgtggcattcattaattagcagtctgcatcacctcttcccttttaaagagctatattcattatttgaata

SEQ ID NO: 114321 - DNA, 120 bp, synthetic construct
  source 1..120: mol_type = other DNA
tcattgtgaatgtacacacatatgtatttatgaaactgttatctcttgagacatttacgtatgacatgtgattcagttccagagaggacacgccgagcagattgtccaggatgggtgcga

SEQ ID NO: 114322 - DNA, 120 bp, synthetic construct
  source 1..120: mol_type = other DNA
tgagttgaggtcattgttttctcccatccttgatcctgacctcttcccccaacccttccccaccaccctacaattatcatcataattttatattcataaatatttaaggggaaacagtat

SEQ ID NO: 114323 - DNA, 120 bp, synthetic construct
  source 1..120: mol_type = other DNA
gtgcaagcgggccttcctttggaagaattttagccctaactctgccctttatttgctttctcatcttgaaagagttgctgtaaagattctataattctatgtcttcaccagtaaccaggg

SEQ ID NO: 114324 - DNA, 120 bp, synthetic construct
  source 1..120: mol_type = other DNA
gactgtgggaagattagaccaggtaacacttacaaggcacctagcagagttccctggcacagaataggaaggtgagtgtccattcttttttcttattggaagataacaaatagctgctac

SEQ ID NO: 114325 - DNA, 120 bp, synthetic construct
  source 1..120: mol_type = other DNA
gactatgtacctgcacgaacctcatgttgccttatgatcctaggaaataccactcaccaaatgttactgatgaaaacccatctgagtgccagctcataccagtttactctttgcatatat

SEQ ID NO: 114326 - DNA, 120 bp, synthetic construct
  source 1..120: mol_type = other DNA
gtggctctttgttttgcaaaggtgacagcctaatgtgtggaatgaagacgtgagccagatatgtatattccttatcaataatggagatatatgtgcttttgctcattcctgcttggctga

SEQ ID NO: 114327 - DNA, 120 bp, synthetic construct
  source 1..120: mol_type = other DNA
gcattttacttatttataattctgttttaaaataggctgaaagatacagaactatgggccaggcgtggtggctcacgcatgtaatcccagcactttgggaggcctaggtgggcggatcac

SEQ ID NO: 114328 - DNA, 120 bp, synthetic construct
  source 1..120: mol_type = other DNA
ttttctgtttttccttcctaataggtgaacacacaggatttcagaggattagtgcgggaggatgccgttctctacctgttagaaatccctaaaggtgaaatggtgaccattttagctcag

SEQ ID NO: 114329 - DNA, 120 bp, synthetic construct
  source 1..120: mol_type = other DNA
cggagtctggctttgtcgctgaggctggagtgcagtggagcaatcttggctcactgcaagctctgcctcccaggttcaccccattctcctgcctcagcctcccgagtagctgggactaca

SEQ ID NO: 114330 - DNA, 120 bp, synthetic construct
  source 1..120: mol_type = other DNA
tgaactgtaaatagccaccagccagtttattgtgagtaaatttagcatcatgtggttggttgctgaatgtggctgtttgaacaacttcctaaggagcatccactgccttgtaccgtatac

SEQ ID NO: 114331 - DNA, 120 bp, synthetic construct
  source 1..120: mol_type = other DNA
gcttatttctgcaacttaaaaaatgttttaataccactgttcaagagtttcggtatattggctgggcactgtaccttatgcctataatcgtagcactttgggaggccaaggtgggaggat

SEQ ID NO: 114332 - DNA, 120 bp, synthetic construct
  source 1..120: mol_type = other DNA
tgtgaatctcctaagaacaaggactttctcccacataactgcaataccattatcacagccaagaaaggtaacattgatgtggtgtgattttgtatatagtccattttccacgttttctta

SEQ ID NO: 114333 - DNA, 120 bp, synthetic construct
  source 1..120: mol_type = other DNA
ctcaaaaaaatatatatataatgtaaatgcaaaccgtttcactgtgtggaaaccagtcactgttggcagtgagcggagattgcaccattgcactccagcctgggcgacaagagtgaaact

SEQ ID NO: 114334 - DNA, 120 bp, synthetic construct
  source 1..120: mol_type = other DNA
aatgaccataaagatccatgatgtggtaataattagctattttgatgaagttcatattttcctgtgagactataaggctagtgattgagccaggccaaacacctatgtctctctagagat

SEQ ID NO: 114335 - DNA, 120 bp, synthetic construct
  source 1..120: mol_type = other DNA
ttattttgttggggcaacacgaggagactgcaaggatatgatatccttaggatgaggatagctcattgagttcattgcccatcatcatccacccatgtcattttagtgtatctctgatac

SEQ ID NO: 114336 - DNA, 120 bp, synthetic construct
  source 1..120: mol_type = other DNA
catagatggatttcaagatccttgaaggcagagcctgaacatttcccagcgttgtgtgcctgaggccagcatcaggactagcacatgggcaaggcataaatgtttgtaacttacattaga

SEQ ID NO: 114337 - DNA, 120 bp, synthetic construct
  source 1..120: mol_type = other DNA
cttacaagtcttacagtacttctcagttaaacaagagaagctttattctgagatttgcccaaaggcaagttgacttgtcataataagtttaagtgttaggtttgcctcccctactaccaa

SEQ ID NO: 114338 - DNA, 120 bp, synthetic construct
  source 1..120: mol_type = other DNA
ttcagagttgtacagctgtcatcacaaccaatcaatcttagaacatttttatcatccccaaaagataccccatacccattagcagtcattccccatttctccctttccctaaaccctcta

SEQ ID NO: 114339 - DNA, 120 bp, synthetic construct
  source 1..120: mol_type = other DNA
tagctatgagatgagcacagtaatctttgcagagtaccataataggaatagagaagtccgtggaatcaaagttaattttcttcgggttgtctaatggatcagtttatttcagtgctgtaa

SEQ ID NO: 114340 - DNA, 120 bp, synthetic construct
  source 1..120: mol_type = other DNA
gagatgatttaaagtatataagaggatgtacataagtcatatgcaaatactgtgtcattttgtatcagatactcggcatctgtggattttggtatccaagtggggggtgtcccggaacca

SEQ ID NO: 114341 - DNA, 120 bp, synthetic construct
  source 1..120: mol_type = other DNA
tgaggtgagagtccctgttctgaaacttttctcaagagggcagtgaatgtagtcaagccatgcccatttgaagtgatgctcacatgtgtgctaatcaagtttgaaatttcgtaaattctc

SEQ ID NO: 114342 - DNA, 120 bp, synthetic construct
  source 1..120: mol_type = other DNA
atggatggtagcacagataggctgcagggcccctaatttgagttcctgcacaaaaacgaccataatatcaacattgtaccaaagccaagtgatctcagggagaaaaataaaagatgcctt

SEQ ID NO: 114343 - DNA, 120 bp, synthetic construct
  source 1..120: mol_type = other DNA
atcacatcacatgtactgtgcatccactgtgattagatagcttatgggatccttgaaatcacattgacaggcactgtaaagtcacagccaagttagcaattattagttgcacctcagaga

SEQ ID NO: 114344 - DNA, 120 bp, synthetic construct
  source 1..120: mol_type = other DNA
taattacggttctgactcactgtgttctctattagagcctatcttttggcctgttgggtgaactcccaaattagggaagggcaaaaaggaaggaaaggcaatattaggagagcatatgat

SEQ ID NO: 114345 - DNA, 120 bp, synthetic construct
  source 1..120: mol_type = other DNA
aaatgtgataggtactaagtaataataagtgacctcataaaatacatcagcgaaaatttgcaagccgggcaagactggaagtgtgaaggaaaagtggctgttagcgtgaagcagtgctct

SEQ ID NO: 114346 - DNA, 120 bp, synthetic construct
  source 1..120: mol_type = other DNA
gtcctgggcaaagtcaaaatatttgagaagatggatcacaaggccaggttacagagaatgcaggagctccaggaagcacagaatgcaagggtaattgtttttaaactacacatcatcaat

SEQ ID NO: 114347 - DNA, 120 bp, synthetic construct
  source 1..120: mol_type = other DNA
gattacaatcatgagtcactgcacccagcctcaaccattttaaaacgttcggttcagcggcattaagtaccttcacattgctgttcagccatcaccaccatccatccccaaaactttttt

SEQ ID NO: 114348 - DNA, 120 bp, synthetic construct
  source 1..120: mol_type = other DNA
tttgacacattggagcctggttatgttacattgcacatggttagcacatgagcagaattcctacggcttagacctgttttgtcttgtttgctgactctcagccaaacttcttaattcctt

SEQ ID NO: 114349 - DNA, 120 bp, synthetic construct
  source 1..120: mol_type = other DNA
catggatgtgctctggaatgtctttaacaccctttttttgttagttccagaccccctgagccacagaaagctccttccagaccttatcaggataccagaggaagttatggcagtgatgcc

SEQ ID NO: 114350 - DNA, 120 bp, synthetic construct
  source 1..120: mol_type = other DNA
actatacttgatagtttggctataagtgctcaatagcttgaagcccaagaagttggtatcgaaatttgttgtttgtttaaacccaagtgctgcacaaaagcagatacttgaggaaaacac

SEQ ID NO: 114351 - DNA, 120 bp, synthetic construct
  source 1..120: mol_type = other DNA
gaaatagcaataataataattttaataatttatcttctttgaccgggcgtggtggctcacgcttgtaatcccagcactttgggaggccaagatgggtgggtcacttgagcccaggagtct

SEQ ID NO: 114352 - DNA, 120 bp, synthetic construct
  source 1..120: mol_type = other DNA
gccaagattaagccactgcaccgccagcctcggtgacacagcaagactctgtctcaaaaaaataagtaaataggccacgtgcggtggctcacgcctgtaatcccagcactttgggaggcc

SEQ ID NO: 114353 - DNA, 120 bp, synthetic construct; identical to SEQ ID NO: 16529
  source 1..120: mol_type = other DNA

SEQ ID NO: 114354 - DNA, 120 bp, synthetic construct
  source 1..120: mol_type = other DNA
aaccagagacctttgttcacatgtttatctgctgaccttctctccactattgtcctatgaccctgccaaatccccctctccgagaaacacccaagaatgatcaataaatactaaaaaaaa

SEQ ID NO: 114355 - DNA, 120 bp, synthetic construct; identical to SEQ ID NO: 11970
  source 1..120: mol_type = other DNA

SEQ ID NO: 114356 - DNA, 120 bp, synthetic construct; identical to SEQ ID NO: 11971
  source 1..120: mol_type = other DNA

SEQ ID NO: 114357 - DNA, 120 bp, synthetic construct; identical to SEQ ID NO: 24334
  source 1..120: mol_type = other DNA

SEQ ID NO: 114358 - DNA, 120 bp, synthetic construct; identical to SEQ ID NO: 35612
  source 1..120: mol_type = other DNA

SEQ ID NO: 114359 - DNA, 120 bp, synthetic construct
  source 1..120: mol_type = other DNA
cagcctcccaagtagcttgaactgcaggtgcatgccaccctgcccagctaattttttttttttttttttttttttttttttttggaaagacgaggtttcaccatgttgcccatgctggtc

SEQ ID NO: 114360 - DNA, 120 bp, synthetic construct
  source 1..120: mol_type = other DNA
gatcccaggacttaaacgctgcaatgtaccactgcattccagcctgtgaaacagcgagaccccatctcaaaaaagaaaaagaatcaggaggtcttatatagaatacatatttctggattc

SEQ ID NO: 114361 - DNA, 120 bp, synthetic construct
  source 1..120: mol_type = other DNA
agaatcacttgaacccaggaggtggaggttgcagtgagccaggatcataccattgcactccagcttgggaaacagagtgagactctgcctcaaaaaaaaaaaaaaaaaaaaaaaaaaaaa

SEQ ID NO: 114362 - DNA, 120 bp, synthetic construct
  source 1..120: mol_type = other DNA
aaactgctgggctcaagtgatcctcctgcctcagcctcccaaagtgctaggattacaggcatgattcaccatccctggcctcttgatacttcatttatttatttatttatttatttttta

SEQ ID NO: 114363 - DNA, 120 bp, synthetic construct
  source 1..120: mol_type = other DNA
tgccacagtaaacatacgtgtgcgtgtgtctttatagcagcatgaattataatcctttgggttttgacccagtaatgggatggctgggtcaaatggtatttctacttctagatccttgag

SEQ ID NO: 114364 - DNA, 120 bp, synthetic construct
  source 1..120: mol_type = other DNA
gatgttagggtgtcaattttagatctttcctgctttctcttgtgggcatttagtgcaataaatttccctctacaccctgctttaaatgtgtcccagagattctggtatgttgtgtctgtg

SEQ ID NO: 114365 - DNA, 120 bp, synthetic construct; identical to SEQ ID NO: 12397
  source 1..120: mol_type = other DNA

SEQ ID NO: 114366 - DNA, 120 bp, synthetic construct; identical to SEQ ID NO: 12398
  source 1..120: mol_type = other DNA

SEQ ID NO: 114367 - DNA, 120 bp, synthetic construct; identical to SEQ ID NO: 32665
  source 1..120: mol_type = other DNA

SEQ ID NO: 114368 - DNA, 120 bp, synthetic construct
  source 1..120: mol_type = other DNA
atacccaaaggattataaatcatgctgctataaagacacatgcacacatatgtttattgtagcactattcaaaacagcaaagacttggaaccaacccaaatgtccatcaatgatagactg

SEQ ID NO: 114369 - DNA, 120 bp, synthetic construct; identical to SEQ ID NO: 32666
  source 1..120: mol_type = other DNA

SEQ ID NO: 114370 - DNA, 120 bp, synthetic construct; identical to SEQ ID NO: 15423
  source 1..120: mol_type = other DNA

SEQ ID NO: 114371 - DNA, 120 bp, synthetic construct; identical to SEQ ID NO: 15424
  source 1..120: mol_type = other DNA

SEQ ID NO: 114372 - DNA, 120 bp, synthetic construct
  source 1..120: mol_type = other DNA
atgtgcaggtttgttacatatgtatacatgtgcctgttggtgtactgcatccattaactcgtcatttatcattaggtatatgtcctaatgctatccctcccccctgcccccaccctacaa

SEQ ID NO: 114373 - DNA, 120 bp, synthetic construct
  source 1..120: mol_type = other DNA
tttcttttgctgtgcagaagctctttagtttaattagatcccatttgtcaattttggcttctcttgccattgcttttggtgttttagacatgaaatccttgcccatgcctatgtcctgaa

SEQ ID NO: 114374 - DNA, 120 bp, synthetic construct
  source 1..120: mol_type = other DNA
tgagacaatggagttttctagatatacaatcatgtcatctgcaaacagggaggatttgacttcctcttttcctaattgaaaaccctttatttccttctcctgcctgattgccatggccag

SEQ ID NO: 114375 - DNA, 120 bp, synthetic construct
  source 1..120: mol_type = other DNA
gtacctgtttgtgcatctcgatgttcaagccgtaggacatctcgtagtactgtatgggggagagagagggggagcgggagatgggggtggggaaggatggggggacacggagacaaagag

SEQ ID NO: 114376 - DNA, 120 bp, synthetic construct
  source 1..120: mol_type = other DNA
caaaaaaaaaaaaaagggggggaggcgggtgggggggggggaggatgaactctgggaaggaaaaaaggtagtggttctaagtctcactgatgctccaaacacagagatcattagaaatat

SEQ ID NO: 114377 - DNA, 120 bp, synthetic construct
  source 1..120: mol_type = other DNA
aaggagagaaagttgcaaccatctggaggggcggttttaaaagcctgcccacgagtcagtctgtcgtttaaattgctctagggggccacacaggggatcaaagtctgcccagataatttc

SEQ ID NO: 114378 - DNA, 120 bp, synthetic construct
  source 1..120: mol_type = other DNA
gggcgagcgagagagcgagggctgggaggggagagtcaaggggatgggggaggaaaccgagaagaggggaggtggggaggaaagaggtgagggaaggagaggggacagggaggagggaaa

SEQ ID NO: 114379 - DNA, 120 bp, synthetic construct; identical to SEQ ID NO: 4228
  source 1..120: mol_type = other DNA

SEQ ID NO: 114380 - DNA, 120 bp, synthetic construct; identical to SEQ ID NO: 18376
  source 1..120: mol_type = other DNA

SEQ ID NO: 114381 - DNA, 120 bp, synthetic construct; identical to SEQ ID NO: 18377
  source 1..120: mol_type = other DNA

SEQ ID NO: 114382 - DNA, 120 bp, synthetic construct
  source 1..120: mol_type = other DNA
tgacctcaggtgatccaccttcctcggcctcccaaaatgctgggattacaggcatgagccaccatgcctggcctaatttcaaaaatttttctttagaatttaatctgcaaatgacttcaa

SEQ ID NO: 114383 - DNA, 120 bp, synthetic construct
  source 1..120: mol_type = other DNA
tggctcatgcctgtaatcccagcgctttgggaggctgaggcaggtggatcacctgaggtcaggagatcgagaccatcctggccaacacggtgaaaccccatctctactaaaaatacaaaa

SEQ ID NO: 114384 - DNA, 120 bp, synthetic construct; identical to SEQ ID NO: 18379
  source 1..120: mol_type = other DNA

SEQ ID NO: 114385 - DNA, 120 bp, synthetic construct
  source 1..120: mol_type = other DNA
tactaaaaatacaaaaaaattagccaggtgtggtggtgtgtgcttgtaatcccagctacgtgggaggctgaggcggaagaattgcttgaatctgggaggcaggggttgcagtgagctgat

SEQ ID NO: 114386 - DNA, 120 bp, synthetic construct
  source 1..120: mol_type = other DNA
aatttctacaaagaagtcagctggggccgggtgcggtggctcacgtctttaatctcagcacttcgggaggcggaggcgggtggatcacctgaggtcaggagttcgagaccagcctggcca

SEQ ID NO: 114387 - DNA, 120 bp, synthetic construct; identical to SEQ ID NO: 18380
  source 1..120: mol_type = other DNA

SEQ ID NO: 114388 - DNA, 120 bp, synthetic construct; identical to SEQ ID NO: 18381
  source 1..120: mol_type = other DNA

SEQ ID NO: 114389 - DNA, 120 bp, synthetic construct; identical to SEQ ID NO: 18382
  source 1..120: mol_type = other DNA

SEQ ID NO: 114390 - DNA, 120 bp, synthetic construct
  source 1..120: mol_type = other DNA
tgactcacagcaacctctgcctcgtaggctcaagtgattctcccaaatcaacttcctgagtagctcgtagtacaggcatgtaccactacgcccggctaatttttgtatttttttgtagag

SEQ ID NO: 114391 - DNA, 120 bp, synthetic construct
  source 1..120: mol_type = other DNA
gctaactgatggccttccttttttatgttactgagaaaatagaaacaatcagaagagcatttccacatgctcctactgcagatttgccaagctccttgcatcagtacccacatccatctg

SEQ ID NO: 114392 - DNA, 120 bp, synthetic construct; identical to SEQ ID NO: 18385
  source 1..120: mol_type = other DNA

SEQ ID NO: 114393 - DNA, 120 bp, synthetic construct; identical to SEQ ID NO: 18386
  source 1..120: mol_type = other DNA

SEQ ID NO: 114394 - DNA, 120 bp, synthetic construct
  source 1..120: mol_type = other DNA
ggagaacggcgtgaacctgggaggcagagcttgcagtgagacgagatcgtgccactacactccagcctaagtgacagagcaagactccatctcaaaaaaaaaaaaaaaaaaaaaaaaaaa

SEQ ID NO: 114395 - DNA, 120 bp, synthetic construct
  source 1..120: mol_type = other DNA
gcatgaacccgggaggcagagcttgcagtgagcccagatcgtgctactgtactccagcctgggtgacagagcaagactacatctcaaaagaaaaaaaaaaaaaagtattattgagaatat

SEQ ID NO: 114396 - DNA, 120 bp, synthetic construct; identical to SEQ ID NO: 18388
  source 1..120: mol_type = other DNA

SEQ ID NO: 114397 - DNA, 120 bp, synthetic construct
  source 1..120: mol_type = other DNA
gtggtttgtagttctccttgaagaggtgcttcacatccgttgtaagttgtattcctagatattttattctgtttgtagcaattgtgaatgggagttcactcatgatttggctctctgttt

SEQ ID NO: 114398 - DNA, 120 bp, synthetic construct
  source 1..120: mol_type = other DNA
ggtacaggtgatatttggttacatgagtaagttgtttagtagagattgatgagattttggtgcacccatcacccgagctgtatacactgcaccatatttgtagacttttatcgctcgtcc

SEQ ID NO: 114399 - DNA, 120 bp, synthetic construct
  source 1..120: mol_type = other DNA
ttcatatcctttgcccactttttgatggggttgtttgtttttttcttttaaatttgtttgagttcattgtagattctggatattagccctttgtcagatgagtaggttgcaaaaattttc

SEQ ID NO: 114400 - DNA, 120 bp, synthetic construct; identical to SEQ ID NO: 25942
  source 1..120: mol_type = other DNA

SEQ ID NO: 114401 - DNA, 120 bp, synthetic construct; identical to SEQ ID NO: 25943
  source 1..120: mol_type = other DNA

SEQ ID NO: 114402 - DNA, 120 bp, synthetic construct; identical to SEQ ID NO: 11055
  source 1..120: mol_type = other DNA

SEQ ID NO: 114403 - DNA, 120 bp, synthetic construct; identical to SEQ ID NO: 11056
  source 1..120: mol_type = other DNA

SEQ ID NO: 114404 - DNA, 120 bp, synthetic construct; identical to SEQ ID NO: 11057
  source 1..120: mol_type = other DNA

SEQ ID NO: 114405 - DNA, 120 bp, synthetic construct; identical to SEQ ID NO: 11058
  source 1..120: mol_type = other DNA

SEQ ID NO: 114406 - DNA, 120 bp, synthetic construct; identical to SEQ ID NO: 15372
  source 1..120: mol_type = other DNA

SEQ ID NO: 114407 - DNA, 120 bp, synthetic construct; identical to SEQ ID NO: 15373
  source 1..120: mol_type = other DNA

SEQ ID NO: 114408 - DNA, 120 bp, synthetic construct
  source 1..120: mol_type = other DNA
tatctctagttttcaaaattcttggtatgggcttctttttttttttttttttttttttttttttttattggctgaccccccttcctccctcccggacggggcagctggccaggcgggggg

SEQ ID NO: 114409 - DNA, 120 bp, synthetic construct
  source 1..120: mol_type = other DNA
aggggctcctcacttctcagacggggcggccgggcagagacgctcttcacctcccagacggggtcgcggccgggcagaggcgctcctcacctcccagacggggcggcgggacagaggcgc

SEQ ID NO: 114410 - DNA, 120 bp, synthetic construct; identical to SEQ ID NO: 15374
  source 1..120: mol_type = other DNA

SEQ ID NO: 114411 - DNA, 120 bp, synthetic construct; identical to SEQ ID NO: 15375
  source 1..120: mol_type = other DNA

SEQ ID NO: 114412 - DNA, 120 bp, synthetic construct; identical to SEQ ID NO: 15376
  source 1..120: mol_type = other DNA

SEQ ID NO: 114413 - DNA, 120 bp, synthetic construct; identical to SEQ ID NO: 15377
  source 1..120: mol_type = other DNA

SEQ ID NO: 114414 - DNA, 120 bp, synthetic construct; identical to SEQ ID NO: 15378
  source 1..120: mol_type = other DNA

SEQ ID NO: 114415 - DNA, 120 bp, synthetic construct; identical to SEQ ID NO: 15379
  source 1..120: mol_type = other DNA

SEQ ID NO: 114416 - DNA, 120 bp, synthetic construct
  source 1..120: mol_type = other DNA
gccaggaagtccagctcttctctgaaatcctcaggaggaactgttttcctgtaaacacaggggttggggacttgagtcattttacttaaaatgaaaaggaagtggtaacccaaaaaatga

SEQ ID NO: 114417 - DNA, 120 bp, synthetic construct
  source 1..120: mol_type = other DNA
gtgaaggaattcatctatggacagaggatttgtgccctctcttttctcttctacagagaaattgagccaggatttaatcccagcatgccggtttacaaagcccagctttataacctttat

SEQ ID NO: 114418 - DNA, 120 bp, synthetic construct
  source 1..120: mol_type = other DNA
ggtgtgagactagataactggttttgtgacctttgctaactacccatctctagccaataaaggggattggagagactgagaggagttatacattagaagagcattttggagagaggtttt

SEQ ID NO: 114419 - DNA, 120 bp, synthetic construct
  source 1..120: mol_type = other DNA
tcctctcaaaagcagccaaccctgccaacaccttgattttggactttcagcctccagaactatgggaataaatttcagttgtttaggccacccagcttgttaaaatagactttgttaaaa

SEQ ID NO: 114420 - DNA, 120 bp, synthetic construct
  source 1..120: mol_type = other DNA
tgaccaaggaagaatggaaagtcaatgcaaaaccaagttactgagctggttaccctgtgggtaagtaaacctcagtgccactagggattgtctgagaaaaggtatcaattacacctcatt

SEQ ID NO: 114421 - DNA, 120 bp, synthetic construct
  source 1..120: mol_type = other DNA
aggaaccttcaggcatagtgtctccagctttatcaacgagcagccatcaataagttgagttgaatgcaccatggatatgaggaaagcatcaaaagctgtagaaatctgctatacaaaccc

SEQ ID NO: 114422 - DNA, 120 bp, synthetic construct
  source 1..120: mol_type = other DNA
tagggttcctctataactttccgggtagtcacacttataagaatcaggccagccctctaacacttcacttgatacttggtctatatttttgacaaattctcctagctcacaggtacattg

SEQ ID NO: 114423 - DNA, 120 bp, synthetic construct
  source 1..120: mol_type = other DNA
ctgacacatccaaaataaaatggaattctttgtttgtggggaacacaatgtgcagactctcagtgttaaagtcttgaaggccctcagggtcttctttttccccataagtctctcctaaga

SEQ ID NO: 114424 - DNA, 120 bp, synthetic construct
  source 1..120: mol_type = other DNA
aaccatgtcctaatccccagaaaccatgaatgttaccttccttagaaaaggggtctttgcagagataataaagttaaggatcttgagatgaggagatcatcccaaattatccaggtggtc

SEQ ID NO: 114425 - DNA, 120 bp, synthetic construct
  source 1..120: mol_type = other DNA
cagtgcttgggggtggctatttttgagtgattagttagagaaggcctttttgagatgatgacactagagtagaaatcaaaatgaagtgaatgagtaacctatgggaagatctgggtaacc

SEQ ID NO: 114426 - DNA, 120 bp, synthetic construct
  source 1..120: mol_type = other DNA
gatttcttctaacgaggaagagggcctggtacccctattagtgttcatgaagaccctgagcaaggaagatgatgcagacattaatgttcatgttaaaagtcaaggtggtgtttttatgac

SEQ ID NO: 114427 - DNA, 120 bp, synthetic construct
  source 1..120: mol_type = other DNA
gtcctttttcccttaacaacagctatcatcacaaaaatatataaatttatataactgcctgcccccaagtgttagagtaggtacttaggcagacatgagcaggacaggagaggggccccc

SEQ ID NO: 114428 - DNA, 120 bp, synthetic construct
  source 1..120: mol_type = other DNA
ggatctctcaagttgcccacttggccctcctccaagtgtactttatttcctttcgttcctgatctaaaacttcttaataaactctctgtaaggaatatggctgtgctttggtcaaggata

SEQ ID NO: 114429 - DNA, 120 bp, synthetic construct
  source 1..120: mol_type = other DNA
caggatctttgaattttatataccaaacttgctaaatccatgaaaatcaatgtctcagtttcctagaccaaagaattttttgatcaacgtcttaatgaccatgactgagcctcatctatt

SEQ ID NO: 114430 - DNA, 120 bp, synthetic construct
  source 1..120: mol_type = other DNA
cgaggtgttattcccagaggagtgtggggactttctctgatttaggactcagaactgatacacaaatgccagtacaaactacacagtaactatatacatatcagaaatataacccactta

SEQ ID NO: 114431 - DNA, 120 bp, synthetic construct
  source 1..120: mol_type = other DNA
gatagctctactcttgccttttccagtaatgacaacaacaaaataacaacacaataaatgggcaaataaagctatgggattccagctgactgcctctgaagttgatctcagcctgcatgg

SEQ ID NO: 114432 - DNA, 120 bp, synthetic construct
  source 1..120: mol_type = other DNA
cagacacgcctcattataccctcctccctttggaattcaggcacaactgaccagtgttaacattaaaacagagatcttcagactgatagaacagactctttgtagcaataagataccaac

SEQ ID NO: 114433 - DNA, 120 bp, synthetic construct; identical to SEQ ID NO: 5316
  source 1..120: mol_type = other DNA

SEQ ID NO: 114434 - DNA, 120 bp, synthetic construct
  source 1..120: mol_type = other DNA
aaagcctccaagaaatatgggactatgtgaaaaggccaaatctatgtctgattggtgtgcctgaaattgacggggagaatggaaccatgttggaaaacattctgcaggatgttatccagg

SEQ ID NO: 114435 - DNA, 120 bp, synthetic construct
  source 1..120: mol_type = other DNA
acagaaagttaacaaggatatccaggaattgaactcagctctgcaccaagcgaacctaatagacatctacagaactctccaccccaaatcaacagaatatatatttttctcagcaccaca

SEQ ID NO: 114436 - DNA, 120 bp, synthetic construct
  source 1..120: mol_type = other DNA
gctctcagaagtaataccacacatctacaaccatctgatctttgacaagcctgacaaaaacaagaaatagggaaaggattccctatttaataaatggtgctgggaaaactggctagccat

SEQ ID NO: 114437 - DNA, 120 bp, synthetic construct
  source 1..120: mol_type = other DNA
aagatacatgcacacacatgtttattgtggcactattcacaatagcaaagacttggaaccaacccaaatgtccatcaatgatagactggattaagaaaatgtggcacatatacaccatgg

SEQ ID NO: 114438 - DNA, 120 bp, synthetic construct; identical to SEQ ID NO: 24790
  source 1..120: mol_type = other DNA

SEQ ID NO: 114439 - DNA, 120 bp, synthetic construct
  source 1..120: mol_type = other DNA
cgggtgttttccatttttcaagactgtagcttttcttttctttttctttttttttttgagatggagtcttgctctgtctcccaggctggagctcagaaacagacccggtccaggataaat

SEQ ID NO: 114440 - DNA, 120 bp, synthetic construct
  source 1..120: mol_type = other DNA
tgggggtaggagaggggagaggtgccctgggagggtggccagaggacaggggaggagtgcacagggagagtgggggtaggagaggggagggatgcacggggagggtggaggtagcagagg

SEQ ID NO: 114441 - DNA, 120 bp, synthetic construct
  source 1..120: mol_type = other DNA
ctgttcatcatcatcatgaacacacaggatagttgtccgtagtttccatttcttgtgatgtctttgcctggctttggcacgtggtttttaaaaatttatttagacaagtgaaaaaaggct

SEQ ID NO: 114442 - DNA, 120 bp, synthetic construct
  source 1..120: mol_type = other DNA
tcagccctccgcccggccagctgccccgtctgggaggtgaggggcgcctctgcccggccgcccctactgggaagtgaggagcccctttgcccggccagccgcccagtctgggagggaggt

SEQ ID NO: 114443 - DNA, 120 bp, synthetic construct
  source 1..120: mol_type = other DNA
tgagccgagatggcagcagtatagtccagcttcggctcggcatgagagggagaccatgaggagagggagagggggagggggggagggggagagggggaggggggagggggaggggggagg

SEQ ID NO: 114444 - DNA, 120 bp, synthetic construct; identical to SEQ ID NO: 13037
  source 1..120: mol_type = other DNA

SEQ ID NO: 114445 - DNA, 120 bp, synthetic construct
  source 1..120: mol_type = other DNA
ccgcccggcagctgccccgtctgagaagtgaggagcctctccgcccggcagccaccccatctgggaagtgaggagcgtctctgcccggcagccaccccgtccgggagggaggtggggggg

SEQ ID NO: 114446 - DNA, 120 bp, synthetic construct
  source 1..120: mol_type = other DNA
atgatgacaatggcggttttgtggaatagaaaagggggaaaggtggggaaaagattgagaaatcggatggttgctgtgtctgtgtagaaagaagtagacatgggagacttttcattttgt

SEQ ID NO: 114447 - DNA, 120 bp, synthetic construct; identical to SEQ ID NO: 32627
  source 1..120: mol_type = other DNA

SEQ ID NO: 114448 - DNA, 120 bp, synthetic construct; identical to SEQ ID NO: 32628
  source 1..120: mol_type = other DNA

SEQ ID NO: 114449 - DNA, 120 bp, synthetic construct
  source 1..120: mol_type = other DNA
ccaggcagagacgctcctcacttcccagacggggtggcagccgagcagaggctgcaatctcggcactttgggaggccaaggcaggcggctgggaggtggaggttgtagcgagccgagatc

SEQ ID NO: 114450 - DNA, 120 bp, synthetic construct; identical to SEQ ID NO: 15558
  source 1..120: mol_type = other DNA

SEQ ID NO: 114451 - DNA, 120 bp, synthetic construct; identical to SEQ ID NO: 15559
  source 1..120: mol_type = other DNA

SEQ ID NO: 114452 - DNA, 120 bp, synthetic construct
  source 1..120: mol_type = other DNA
cttcccgggagcaggaccagcccctcctacccctggactggggtccagccgcgccttcctttctttctttcttttcttttctttcttttcttttcttttcttttcttttcttttcttttc

SEQ ID NO: 114453 - DNA, 120 bp, synthetic construct; identical to SEQ ID NO: 19971
  source 1..120: mol_type = other DNA

SEQ ID NO: 114454 - DNA, 120 bp, synthetic construct; identical to SEQ ID NO: 19972
  source 1..120: mol_type = other DNA

SEQ ID NO: 114455 - DNA, 120 bp, synthetic construct; identical to SEQ ID NO: 4256
  source 1..120: mol_type = other DNA

SEQ ID NO: 114456 - DNA, 120 bp, synthetic construct
  source 1..120: mol_type = other DNA
gagtagctggtacaggtggacgccaccacgcccagctgatttttgtacttttagtagagacggggttttgccatgatggtcaggctggtctcgacctcctgacctcaagtgatctgctca

SEQ ID NO: 114457 - DNA, 120 bp, synthetic construct; identical to SEQ ID NO: 16265
  source 1..120: mol_type = other DNA

SEQ ID NO: 114458 - DNA, 120 bp, synthetic construct
  source 1..120: mol_type = other DNA
tgcactaagaaaaattcctctgccttgggatcctgttgatctgtgaccttacccccaaccctgtgctctctgaaacatgtgctgtgtccactcagggttaaatggattaagggcggtgca

SEQ ID NO: 114459 - DNA, 120 bp, synthetic construct
  source 1..120: mol_type = other DNA
cacccacctcagcatcccaaagtgctgggatcacaggtatgagccccagcacctggctgggaattattttttaagaaaaaaaagaaaaatacaaaacttctttaaatttctgtgatcagc

SEQ ID NO: 114460 - DNA, 120 bp, synthetic construct
  source 1..120: mol_type = other DNA
ccaggctcacgcctgtaatcccagcactttgggaagctgaggcaggaggatcacctgaggtcaggagttcgagaccagcctggccaacatggtgaaaccctgtctctactaaaaataaaa

SEQ ID NO: 114461 - DNA, 120 bp, synthetic construct
  source 1..120: mol_type = other DNA
aagtattatcttcagtaccaaaatcctaattcttcaattgtttttcattagatatggtggctaatgaggctggacagcgtggaagctcacgcctgtaatcctagcactttgggaggccga

SEQ ID NO: 114462 - DNA, 120 bp, synthetic construct
  source 1..120: mol_type = other DNA
tgttattcgcagacaaagggctggagaaatccaagatgctaaccaaaaagtggacagcaggtgaccattagttttccttgctgagtaagtctctacccattgggatctttgtgtgtgtgt

SEQ ID NO: 114463 - DNA, 120 bp, synthetic construct
  source 1..120: mol_type = other DNA
gttgccttcatgaggaagatgggttggtcatggcatgggggctgcagtgtctctgtagagggacgccttaagggatgccacgtttccactctcctgtattatcttttttttctttctttc

SEQ ID NO: 114464 - DNA, 120 bp, synthetic construct; identical to SEQ ID NO: 9193
  source 1..120: mol_type = other DNA

SEQ ID NO: 114465 - DNA, 120 bp, synthetic construct; identical to SEQ ID NO: 2887
  source 1..120: mol_type = other DNA

SEQ ID NO: 114466 - DNA, 120 bp, synthetic construct
  source 1..120: mol_type = other DNA
ttgttccttttcttggagttgctttggctgttggggctctttattctgcaggaggaagattatgccacgcacacgattgctgatcactgccatgctttattaccgccgagatgtgtggat

SEQ ID NO: 114467 - DNA, 120 bp, synthetic construct
  source 1..120: mol_type = other DNA
gcacacgattgctgatgactgccatgctttattaccgtccagatgtgtggatgatacgcacacgattgctgatcactgccatgctttattaccgccgagatgtgtggatgatacgcacac

SEQ ID NO: 114468 - DNA, 120 bp, synthetic construct
  source 1..120: mol_type = other DNA
ccctgcgcccctaccctccctgtgtgttacccccacctcctctccctgcccccactctgtccgtgacccccacctcctccccctgcccccgccctccctctgtgggtgactccacttcct

SEQ ID NO: 114469 - DNA, 120 bp, synthetic construct; identical to SEQ ID NO: 14058
  source 1..120: mol_type = other DNA

SEQ ID NO: 114470 - DNA, 120 bp, synthetic construct; identical to SEQ ID NO: 14059
  source 1..120: mol_type = other DNA

SEQ ID NO: 114471 - DNA, 120 bp, synthetic construct; identical to SEQ ID NO: 14060
  source 1..120: mol_type = other DNA

SEQ ID NO: 114472 - DNA, 120 bp, synthetic construct; identical to SEQ ID NO: 14061
  source 1..120: mol_type = other DNA

SEQ ID NO: 114473 - DNA, 120 bp, synthetic construct; identical to SEQ ID NO: 14062
  source 1..120: mol_type = other DNA

SEQ ID NO: 114474 - DNA, 120 bp, synthetic construct; identical to SEQ ID NO: 14063
  source 1..120: mol_type = other DNA

SEQ ID NO: 114475 - DNA, 120 bp, synthetic construct; identical to SEQ ID NO: 14064
  source 1..120: mol_type = other DNA

SEQ ID NO: 114476 - DNA, 120 bp, synthetic construct
  source 1..120: mol_type = other DNA
gcaccagtcagaaataggaaagaaaatcttgttaggctaacggtacatgatagaaatttcacatttaaaagtttaaagatggaggctgggtgtggtggctcacgcgtgtaatcccagcac

SEQ ID NO: 114477 - DNA, 120 bp, synthetic construct; identical to SEQ ID NO: 14507
  source 1..120: mol_type = other DNA

SEQ ID NO: 114478 - DNA, 120 bp, synthetic construct; identical to SEQ ID NO: 27299
  source 1..120: mol_type = other DNA

SEQ ID NO: 114479 - DNA, 120 bp, synthetic construct
  source 1..120: mol_type = other DNA
aggggaggagccaagatggccgaataggaacagctccggtctacagctcccagcgtgagccacgcagaacacggtgatttctgcatttccatctgaggtaccaggttcatctcactaggg

SEQ ID NO: 114480 - DNA, 120 bp, synthetic construct
  source 1..120: mol_type = other DNA
aagcctcaggagccgatgcgatcaactggaagaaagggtatcagcgatggaagatgaaatgaatgaaatgaagcgagaagggaagtttagagaaaaaagaataaaaagaaatgagcaaag

SEQ ID NO: 114481 - DNA, 120 bp, synthetic construct
  source 1..120: mol_type = other DNA
atggtaaagggatcaattcaacaagaagagctaactatcctaaatatatatgcacccaatacaggagcacccagattcataaagcaagtcctgagtgacctacagagagacttagactcc

SEQ ID NO: 114482 - DNA, 120 bp, synthetic construct
  source 1..120: mol_type = other DNA
ctacaaacacctctacgcaaataaactagaaaatctagaagaaatggataaattcctcgacacatacaccctcccaagactaaatcaggaagaagttgaatctctgaatagaccaataac

SEQ ID NO: 114483 - DNA, 120 bp, synthetic construct
  source 1..120: mol_type = other DNA
gcaattaggcaggagaagaaaataaagggtattcaattaggaaaagaggaagtcaaattgtccctgtttgcagacgacatgattgtatatctagaaaacccgactgtctcagcccaaaat

SEQ ID NO: 114484 - DNA, 120 bp, synthetic construct
  source 1..120: mol_type = other DNA
aagagcctctgcacagcaaaagaaactactatcagagtgaacaggcaacctacaaaatgggagaaaatttttgcaacctactcatctgacaaagggctaatatccagaatctacaatgaa

SEQ ID NO: 114485 - DNA, 120 bp, synthetic construct
  source 1..120: mol_type = other DNA
tgcaactaacctgcacaatgtgcacatgtaccgtagaacttaaagtataataataaaaaaaaaatgcctggatccgatgctatctttaagggactttttaagaacaactgatttagtttc

SEQ ID NO: 114486 - DNA, 120 bp, synthetic construct; identical to SEQ ID NO: 21879
  source 1..120: mol_type = other DNA

SEQ ID NO: 114487 - DNA, 120 bp, synthetic construct
  source 1..120: mol_type = other DNA
gtgatcctctcaccttggcttcccaaaatgcgggattacaggtgtgagccatcatgcctggccagtatttatatttataaactaaatccagataaacaacttctttgtgtctctactgag

SEQ ID NO: 114488 - DNA, 120 bp, synthetic construct
  source 1..120: mol_type = other DNA
gactcctgactctttatcccacctagattctattgctactctaaaaaacaatttccttcctttctctttctttctctctttctgtctgtctttctttccttccttccttccttccttcct

SEQ ID NO: 114489 - DNA, 120 bp, synthetic construct; identical to SEQ ID NO: 21881
  source 1..120: mol_type = other DNA

SEQ ID NO: 114490 - DNA, 120 bp, synthetic construct
  source 1..120: mol_type = other DNA
tgatcactatttcatttacatagggtgtacactaagtaaccaatgggaaacctctagagggtgtttaaaccccagaaaattctataaccagtgctcttgaaccacttgctcaagcccgct

SEQ ID NO: 114491 - DNA, 120 bp, synthetic construct
  source 1..120: mol_type = other DNA
atgttgctcacacaaagtctgtttggtggtctcttcacacggacacgcatgaaatttggtgctgaaacctgggaaagcagagaaggggtagagacaaggagagaaggggttggggtactt

SEQ ID NO: 114492 - DNA, 120 bp, synthetic construct
  source 1..120: mol_type = other DNA
cagtagttccaaatagccggaaaacggcactttcaatttttccatcctacaagatctaaataattcttgtcataaaatgggcaaatggtctgaggtgcctgacgtccaggcattctttta

SEQ ID NO: 114493 - DNA, 120 bp, synthetic construct
  source 1..120: mol_type = other DNA
aggacctcgctgaaaatcggagtgttcaactcacctggcagccactcccagagcccctggaattctggcccaaggctctttgaccgactccttctcggcttagtggctgaagactgacgc

SEQ ID NO: 114494 - DNA, 120 bp, synthetic construct
  source 1..120: mol_type = other DNA
cttaaaaatgactggacaatacttttaccactttcccttctcagaagtcagacctgtcctcagaatgctacaagctacagcccatttaagctcctgtatagatgctcctttttattaggc

SEQ ID NO: 114495 - DNA, 120 bp, synthetic construct
  source 1..120: mol_type = other DNA
cttaactgagcgattaaccctgtgaatttccttctcctggctcagaagctcccccactgagcaccttgtgacccccgcccctgcccaccagagaacaaccctctttgactgtaattttcc

SEQ ID NO: 114496 - DNA, 120 bp, synthetic construct; identical to SEQ ID NO: 18510
  source 1..120: mol_type = other DNA

SEQ ID NO: 114497 - DNA, 120 bp, synthetic construct; identical to SEQ ID NO: 24718
  source 1..120: mol_type = other DNA

SEQ ID NO: 114498 - DNA, 120 bp, synthetic construct
  source 1..120: mol_type = other DNA
gctgggatgcagagttaaatttgctcaaatattttccattaaaacaataactaccataaacccagagtagctgctctggttggaggccaactttcaagtgttggagcatcactcacggac

SEQ ID NO: 114499 - DNA, 120 bp, synthetic construct
  source 1..120: mol_type = other DNA
cagatcaaattcacacataacaaaattaaccttaaatgtaaatgggctaaatgcttcaattaaaagacacagactggcaaattggataaagagtcaagacccatcagtgtgctgtattca

SEQ ID NO: 114500 - DNA, 120 bp, synthetic construct
  source 1..120: mol_type = other DNA
aaaagatcaacaaaattgatagaccgctagcaagactaataaagaagaaaagagagaagaatcaaatagacacaataaaaaatgatgaaggggatatcaccaccaatcccacagaaatac

SEQ ID NO: 114501 - DNA, 120 bp, synthetic construct
  source 1..120: mol_type = other DNA
tatatctagaaaaccccatcgtctcagcccaaaatctcctcaagctgataggcaacttcaacaaagtctcaggatgcaaaatcaatgtgcaaaaatcacaagcattcttatacatcaata

SEQ ID NO: 114502 - DNA, 120 bp, synthetic construct
  source 1..120: mol_type = other DNA
caaagaactcaaacaaatttacaagaaaaaaacaaccccatcaaaaagtgggcgaaagatatgaacagacacttctcaaaagaagacatttatgcagccaaaagacacatgaaaaaatgc

SEQ ID NO: 114503 - DNA, 120 bp, synthetic construct; identical to SEQ ID NO: 24720
  source 1..120: mol_type = other DNA

SEQ ID NO: 114504 - DNA, 120 bp, synthetic construct; identical to SEQ ID NO: 24721
  source 1..120: mol_type = other DNA

SEQ ID NO: 114505 - DNA, 120 bp, synthetic construct
  source 1..120: mol_type = other DNA
catcctctccagcacctgttgtttcctgactttttaatgatcgccattctacctggtgtgagatggtatctcattgtggttttgatttgcatttctctgatggccagtgatgatgagcat

SEQ ID NO: 114506 - DNA, 120 bp, synthetic construct
  source 1..120: mol_type = other DNA
aataaagggtattcaattaggaaaagaggaagtcaaattgtccctgtttgcagacgacatgattgtatatctagaaaacccgactgtctcagcccaaaatctccttaagctgataaacaa

SEQ ID NO: 114507 - DNA, 120 bp, synthetic construct; identical to SEQ ID NO: 24722
  source 1..120: mol_type = other DNA

SEQ ID NO: 114508 - DNA, 120 bp, synthetic construct
  source 1..120: mol_type = other DNA
tctgttcttttacatttgctgaggagttcttttatatttgctttacttctaattatgtggtcaattttagagtaagtgtgatgtagtgctgagaagaatgtatattctgttgatatgggg

SEQ ID NO: 114509 - DNA, 120 bp, synthetic construct
  source 1..120: mol_type = other DNA
tggccgccgtcccgtctgggaggtgggggggcccctctgcctggcagccccgtctgggaagggaggagcccctctgcccggccaccaccccgtctgggaggtgtacccaacagctcattg

SEQ ID NO: 114510 - DNA, 120 bp, synthetic construct
  source 1..120: mol_type = other DNA
aatgacctgatagagctgaaaaacacagcacaagaacttcgtgaaacatacacaagtatcaatagccaaatcaatcaagtggaagaaaggatatcagagattgaagatcaactgaatgaa

SEQ ID NO: 114511 - DNA, 120 bp, synthetic construct; identical to SEQ ID NO: 12897
  source 1..120: mol_type = other DNA

SEQ ID NO: 114512 - DNA, 120 bp, synthetic construct
  source 1..120: mol_type = other DNA
cttcttttgagcggtgtctgttcatatcctttgcccactttttgatggggttgtctgtttttttcttgtaaatttgtttgagttcattgtagattctggatattagccctttgtcagatg

SEQ ID NO: 114513 - DNA, 120 bp, synthetic construct
  source 1..120: mol_type = other DNA
acatcccttgtaagttggcttcctaggtattttattctctttgaagcaattgtgaatgagagttcactcattatttggctctctgtctgttattgatgtataagaatgcttgtgattttt

SEQ ID NO: 114514 - DNA, 120 bp, synthetic construct
  source 1..120: mol_type = other DNA
cttgtgcaatacattttagatgagttcaattgttaaacaaagatggcagaatgatacctagtgctatggctcatgcctgaaattccagcactttgggaggctgaggaaggtggatctctc

SEQ ID NO: 114515 - DNA, 120 bp, synthetic construct
  source 1..120: mol_type = other DNA
cagtggttctcccagcacgcagctggagatctgagaacgggcagactgccccctcaagtgggtccctgacccctgacccctgagcagcctaactgggaggcaccccccggcaggagcaga

SEQ ID NO: 114516 - DNA, 120 bp, synthetic construct
  source 1..120: mol_type = other DNA
aaagaattttcaacccagaatttcatatccagccaaactaagcttcataagtgaaggagaaataaaatcctttacagacaagcaaatgctgagagattttgtcaccatcaggcctgccct

SEQ ID NO: 114517 - DNA, 120 bp, synthetic construct
  source 1..120: mol_type = other DNA
atagttggaagtaaagctctcctcagcaaatgtaaaagaacagaaattacaacaaactatctctcagaccatagtgcaatcaaactagaactcaggattaagaatctcactcaaagccgc

SEQ ID NO: 114518 - DNA, 120 bp, synthetic construct
  source 1..120: mol_type = other DNA
ccagcagcacatcaaaaagcttatccaccatgatcaagtgggcttcatccctgggatgcaaggctggttcaatatatgcaaatcaataaatgtaatccagcatataagcagaaccaaagc

SEQ ID NO: 114519 - DNA, 120 bp, synthetic construct
  source 1..120: mol_type = other DNA
cgcatcgccaagtcaatcctaagccaaaagaacaaagctggaggcatcacactacctgacttcaaactatactacaaggctacagtaaccaaaacagtatggtactggtaccaaaacaga

SEQ ID NO: 114520 - DNA, 120 bp, synthetic construct
  source 1..120: mol_type = other DNA
ttgtggcactattcacaatagcaaagacttggaaccaacccaaatatccaacaacgatagactggattaagaaaatgtggcacatatacaccatggaatactatgcagccataaaaaagg

SEQ ID NO: 114521 - DNA, 120 bp, synthetic construct; identical to SEQ ID NO: 12887
  source 1..120: mol_type = other DNA

SEQ ID NO: 114522 - DNA, 120 bp, synthetic construct; identical to SEQ ID NO: 12888
  source 1..120: mol_type = other DNA

SEQ ID NO: 114523 - DNA, 120 bp, synthetic construct
  source 1..120: mol_type = other DNA
agctaccaaattttatagattttatctctaaaacgtctttgcactcctctctttaaaaattactttttgttggtcaggcatggtggctcacgcctataatcccagcactttgggatgccg

SEQ ID NO: 114524 - DNA, 120 bp, synthetic construct; identical to SEQ ID NO: 12889
  source 1..120: mol_type = other DNA

SEQ ID NO: 114525 - DNA, 120 bp, synthetic construct; identical to SEQ ID NO: 12890
  source 1..120: mol_type = other DNA

SEQ ID NO: 114526 - DNA, 120 bp, synthetic construct
  source 1..120: mol_type = other DNA
aactacaaaccattactcaatgaaataaaagaggatataaacaaatggaagaacattccatgcttgtggataggaagaatcaatatcgtgtaaatggccatactgcccaaggtaatttat

SEQ ID NO: 114527 - DNA, 120 bp, synthetic construct
  source 1..120: mol_type = other DNA
gagacaccatctcacaccagttagaatggcgatgattaaaaagtcaggaaacaacaggtgctggagaggatgtggagaaataggaacacttttacactgttggtgggactgtaaactagt

SEQ ID NO: 114528 - DNA, 120 bp, synthetic construct; identical to SEQ ID NO: 12891
  source 1..120: mol_type = other DNA

SEQ ID NO: 114529 - DNA, 120 bp, synthetic construct
  source 1..120: mol_type = other DNA
ctagttctagatccctgaggaatcgccacactgacttccacaatggttgaactagtttacagtcccaccaacagtgtaaaagtgttcctatttctccacgtcctctccagcacctgttgt

SEQ ID NO: 114530 - DNA, 120 bp, synthetic construct
  source 1..120: mol_type = other DNA
ataaattaccttgggcagtatggccattttcacgatattgattcttcctacccatgagcatggaatgttcttccatttgtttgtgtcctcttttatttccttgagcagtggtttgtagtt

SEQ ID NO: 114531 - DNA, 120 bp, synthetic construct
  source 1..120: mol_type = other DNA
ctttttggttggtaaactattgattattgccacaatttcagagcctgttattggtctattcagagattcaacttcttcctggtttagtcttgggagagtgtatgtgtcgaggaatgtatc

SEQ ID NO: 114532 - DNA, 120 bp, synthetic construct
  source 1..120: mol_type = other DNA
gttcaattcctgggtatccttgttgactttctgtcttgttgatctgtctaacgttgacagtggggtgttaaagtctcccattattaatgtgtgggagtctaagtctctttgtaggtcact

SEQ ID NO: 114533 - DNA, 120 bp, synthetic construct
  source 1..120: mol_type = other DNA
ctccccatcactttcaggtacaccaatcagacgtagatttggtcttttcacatagtcccatatttcttggaggctttgctcatttctttttattcttttttctctaaacttcccttctcg

SEQ ID NO: 114534 - DNA, 120 bp, synthetic construct
  source 1..120: mol_type = other DNA
cctacagaggcaggcaggcctccttgagctgtggtgggctccacccagttcgagcttcccagctgctttgtttacctaagcaagcctgggcaatggcgggcgcccctcccccagcctcgt

SEQ ID NO: 114535 - DNA, 120 bp, synthetic construct; identical to SEQ ID NO: 12892
  source 1..120: mol_type = other DNA

SEQ ID NO: 114536 - DNA, 120 bp, synthetic construct
  source 1..120: mol_type = other DNA
ggtgggaattgaacaatgagaacacatggacacagggtggggaacatcacacactggggcctgctggggggtggggggaggggggagggatagcattaggaggtatacctaatgtaaatg

SEQ ID NO: 114537 - DNA, 120 bp, synthetic construct
  source 1..120: mol_type = other DNA
ttttagtagagacggggtttcacccttttagccgggatggtctcgatctcctgacctcgtgatccgcccgcctcggcctcccaaagtgctgggattacaggcgtgagccaccgcgcccgg

SEQ ID NO: 114538 - DNA, 120 bp, synthetic construct
  source 1..120: mol_type = other DNA
cctgagctcaggcaatccatccacctcgtcctcccaaagcgctggaattatagacgtgagccaccatgcctggcaacctgttcttattttattaatttaataactttcttcattttactg

SEQ ID NO: 114539 - DNA, 120 bp, synthetic construct; identical to SEQ ID NO: 12895
  source 1..120: mol_type = other DNA

SEQ ID NO: 114540 - DNA, 120 bp, synthetic construct
  source 1..120: mol_type = other DNA
ctggtgtaaaatggtatctcattgtggttttgatttgcatttctctgatggccagtgatgatgagcattttttcatgtgttttttggctgcataaatgtcttcttttgagaagtgtctgt

SEQ ID NO: 114541 - DNA, 120 bp, synthetic construct
  source 1..120: mol_type = other DNA
ttgtatcctcttttacttccttgagcagtggtttgtagttctccttgaagaggtcctttgcattccttgtaagttggattcctaggtattttattctcttggaagcaattgtgaatggga

SEQ ID NO: 114542 - DNA, 120 bp, synthetic construct; identical to SEQ ID NO: 12896
  source 1..120: mol_type = other DNA

SEQ ID NO: 114543 - DNA, 120 bp, synthetic construct
  source 1..120: mol_type = other DNA
cctggagttgagcaggaagcggcaagtgaaggagatgaggatgaggatgatggtgaggtagagcttgaacttctcatactcgtccttgtaggcaaacctggggggcgcaggccggtgaga

SEQ ID NO: 114544 - DNA, 120 bp, synthetic construct
  source 1..120: mol_type = other DNA
ccttggaggctgcagacccactccctgccatgcccagccttcctggccgcctgctccggaatcctgacccccggaggaaacagtgttcccccccatctccagagtcttgtctgaaactcc

SEQ ID NO: 114545 - DNA, 120 bp, synthetic construct; identical to SEQ ID NO: 13291
  source 1..120: mol_type = other DNA

SEQ ID NO: 114546 - DNA, 120 bp, synthetic construct; identical to SEQ ID NO: 13292
  source 1..120: mol_type = other DNA

SEQ ID NO: 114547 - DNA, 120 bp, synthetic construct; identical to SEQ ID NO: 13293
  source 1..120: mol_type = other DNA

SEQ ID NO: 114548 - DNA, 120 bp, synthetic construct; identical to SEQ ID NO: 13294
  source 1..120: mol_type = other DNA

SEQ ID NO: 114549 - DNA, 120 bp, synthetic construct
  source 1..120: mol_type = other DNA
attcccacctacttaggagtctgaggtgagaggatcgcttgagcccaggagattaaggctacagtgggccatgatcacgtcactgcactccagcctgactctaaaaacagaaaaaaattg

SEQ ID NO: 114550 - DNA, 120 bp, synthetic construct; identical to SEQ ID NO: 3562
  source 1..120: mol_type = other DNA

SEQ ID NO: 114551 - DNA, 120 bp, synthetic construct; identical to SEQ ID NO: 12312
  source 1..120: mol_type = other DNA

SEQ ID NO: 114552 - DNA, 120 bp, synthetic construct
  source 1..120: mol_type = other DNA
tgtaaccatcaccacaattaaaatttggaatacttccaacatccccaaaaagttccctcattcccttttatttttttttattttattattattatactttaagttttagggtacatgtgc

SEQ ID NO: 114553 - DNA, 120 bp, synthetic construct
  source 1..120: mol_type = other DNA
atgaatgagacattcttcttttattaaaataaaacccatccaccaccccaaggttattccagaaggaaactctccaccaatagtggtggcactagacatatactgagagacccccaagag

SEQ ID NO: 114554 - DNA, 120 bp, synthetic construct
  source 1..120: mol_type = other DNA
aaaaaaaacattttctcttctccacaaacctcctgcctcccattaaaatgtcactccccccaaaaaatgcagaggaagaggtaagattgcaggctatttgaaaacaggggcatgaagttt

SEQ ID NO: 114555 - DNA, 120 bp, synthetic construct
  source 1..120: mol_type = other DNA
atttcatggtgcctaatggtgctttgtctgaatggacatgaaatgagaacacactcccagcttccaagaaagatgtgtattctccctaacaacaacaaaagagacctaaatgggctgctc

SEQ ID NO: 114556 - DNA, 120 bp, synthetic construct
  source 1..120: mol_type = other DNA
ttacactccagcccgggtgacagagcgagactcttgtctcaaaaacaagaaaaagaaaaaaaaatacagcctcatcaacatctcctgcttctctgagacaaagggaacaaaccaaatcag

SEQ ID NO: 114557 - DNA, 120 bp, synthetic construct
  source 1..120: mol_type = other DNA
caagtaacttaacaaggacaggttggccatctggatctacactgaaggtctttcaagtttcatccactttatgcccagatctcagggcagaaaattcagccagacccagagcaaacaagg

SEQ ID NO: 114558 - DNA, 120 bp, synthetic construct
  source 1..120: mol_type = other DNA
caaagatatcgcccatgctggaggaaacttggatgaccttccctggctggtaatgactcgtgaatgtgaagggggcaggatgtggcaggagggaaagagtacattatagaaaaccagtgg

SEQ ID NO: 114559 - DNA, 120 bp, synthetic construct
  source 1..120: mol_type = other DNA
ggttccttcttcactcatgtcaggtctgagcttcaaatgccattttagagagctgtgagcttccttgtggaatttctagcaacatttcccctctacagctgggctgagtgggtttgtgat

SEQ ID NO: 114560 - DNA, 120 bp, synthetic construct
  source 1..120: mol_type = other DNA
ttggagctgagacagccagagaggctaagaccatacaggtcaattaatgctgattctccatttactcactcattcattccctttttgttccaaaaagaagttgaacttgaagatactatg

SEQ ID NO: 114561 - DNA, 120 bp, synthetic construct
  source 1..120: mol_type = other DNA
ctgtctcaaaaaaaaaaaaaaaaatgttggcagggcacggtggctcacacctgtaatcccacactttgggaggccaaggcgggcaaaacacctgaggtcaggagtttgagacaagcctga

SEQ ID NO: 114562 - DNA, 120 bp, synthetic construct
  source 1..120: mol_type = other DNA
gaggcaggagaatcgcttgaaccctggagacggaggttgcagtgagccgacatcgtgtcactgcactccagcctggcgacagagcgagactccatctcaaaaacaaaaaacaaaacaaaa

SEQ ID NO: 114563 - DNA, 120 bp, synthetic construct
  source 1..120: mol_type = other DNA
aggctcatacacctctgtctggctttgggtcacccacgaagcagccctcagaactatctgtcatgatctcttgtctgctgaccatctgttttgggcccaagcatccagcctgggtaactg

SEQ ID NO: 114564 - DNA, 120 bp, synthetic construct
  source 1..120: mol_type = other DNA
gctcactagaggaacagcttgaagcaatgaaatctctctaagaagcaaaaaaggtttgggtcattaagtcctcacatggggaattattgggcaaaacctgccaggcatggtgtctaagct

SEQ ID NO: 114565 - DNA, 120 bp, synthetic construct
  source 1..120: mol_type = other DNA
gattgctaaagaaaacccctgaaggttatgtatgtaggattttattcgagagagaaatggcatgcaacgcaggaccctaacttgaaattcaagccagtggtgcagtccacgatgccctgg

SEQ ID NO: 114566 - DNA, 120 bp, synthetic construct
  source 1..120: mol_type = other DNA
gtggagaaaacccaggatgaggtcttttttttttttttttaaaggaagggtctcactctgtcacccaggctggagtgcagaggcacgacgatagttcactgcagccttgaactcctggac

SEQ ID NO: 114567 - DNA, 120 bp, synthetic construct
  source 1..120: mol_type = other DNA
tgggtgacagagcaagagtctgtctcatttaaaaaaaaaaaaaaaaaaactctatatgcaccacatctgtgcttgacagctctgctccctcttgagatgtggaatactccaggctctcag

SEQ ID NO: 114568 - DNA, 120 bp, synthetic construct
  source 1..120: mol_type = other DNA
atttacttttttttttttttttgagatggagtcttgctctgctctgttgcccaggctggagtgcagtggtgtgatcttgggctcactgcaactcctctacttcctgggttcaagcgattc

SEQ ID NO: 114569 - DNA, 120 bp, synthetic construct
  source 1..120: mol_type = other DNA
cataactttggctttaatgagccaacccagcaaagagtaccattaaggtgaaatctggaaacaaccagttgtccccaaccttctacaaaatcaccctacagcttctaaaactcaagagag

SEQ ID NO: 114570 - DNA, 120 bp, synthetic construct
  source 1..120: mol_type = other DNA
tagcacccttatcttttctcgatacacagcgtccttcctccagcagaatcctaaaatagcagcagtccggattaacatggctgtgaggagtaggtgcttagctgaataacatcagaatta

SEQ ID NO: 114571 - DNA, 120 bp, synthetic construct
  source 1..120: mol_type = other DNA
agactccggaatgggactgcgggacgacaaccgaagagggccaggggccagatggggtctgggcagactcgagtggggggcggagggatcggggatcggctactgctagagcaaagaccc

SEQ ID NO: 114572 - DNA, 120 bp, synthetic construct; identical to SEQ ID NO: 4612
  source 1..120: mol_type = other DNA

SEQ ID NO: 114573 - DNA, 120 bp, synthetic construct
  source 1..120: mol_type = other DNA
aaacttacaaggttttcaacaaaagtttgctaaaagttaacagtgttggggaggagtggcagcggcaaggcagcccagtttcgtgaaggctcttggcgcgccgcggcccgcaggcacctg

SEQ ID NO: 114574 - DNA, 120 bp, synthetic construct; identical to SEQ ID NO: 20960
  source 1..120: mol_type = other DNA

SEQ ID NO: 114575 - DNA, 120 bp, synthetic construct; identical to SEQ ID NO: 20961
  source 1..120: mol_type = other DNA

SEQ ID NO: 114576 - DNA, 120 bp, synthetic construct; identical to SEQ ID NO: 20962
  source 1..120: mol_type = other DNA

SEQ ID NO: 114577 - DNA, 120 bp, synthetic construct
  source 1..120: mol_type = other DNA
caagagcaaagacttggaaccaacccaaatgtccatcagtgatagactggattaagaaaatgtggcacatatacaccatggaatactatgcagccattaaaaaggatgagttcatgtcct

SEQ ID NO: 114578 - DNA, 120 bp, synthetic construct; identical to SEQ ID NO: 20964
  source 1..120: mol_type = other DNA

SEQ ID NO: 114579 - DNA, 120 bp, synthetic construct
  source 1..120: mol_type = other DNA
ttgcagtgagctgagatcgcttgccactgcactcctgcctgggcaccagagcgagactccatatcaaaaataaataaataaacaataaaataaaaataaaaaaatgaccaatacaattgt

SEQ ID NO: 114580 - DNA, 120 bp, synthetic construct; identical to SEQ ID NO: 13358
  source 1..120: mol_type = other DNA

SEQ ID NO: 114581 - DNA, 120 bp, synthetic construct; identical to SEQ ID NO: 13359
  source 1..120: mol_type = other DNA

SEQ ID NO: 114582 - DNA, 120 bp, synthetic construct
  source 1..120: mol_type = other DNA
gtgggaaaagcaaaatagtcaggtattgtctgtcttcgctggagtttggaaagctttctacccaccttggtgtggctacatgttggttctatagaaagcgtatcctaaaatgacaattcc

SEQ ID NO: 114583 - DNA, 120 bp, synthetic construct; identical to SEQ ID NO: 13344
  source 1..120: mol_type = other DNA

SEQ ID NO: 114584 - DNA, 120 bp, synthetic construct; identical to SEQ ID NO: 13345
  source 1..120: mol_type = other DNA

SEQ ID NO: 114585 - DNA, 120 bp, synthetic construct; identical to SEQ ID NO: 13346
  source 1..120: mol_type = other DNA

SEQ ID NO: 114586 - DNA, 120 bp, synthetic construct; identical to SEQ ID NO: 13347
  source 1..120: mol_type = other DNA

SEQ ID NO: 114587 - DNA, 120 bp, synthetic construct; identical to SEQ ID NO: 13348
  source 1..120: mol_type = other DNA

SEQ ID NO: 114588 - DNA, 120 bp, synthetic construct; identical to SEQ ID NO: 13349
  source 1..120: mol_type = other DNA

SEQ ID NO: 114589 - DNA, 120 bp, synthetic construct; identical to SEQ ID NO: 13350
  source 1..120: mol_type = other DNA

SEQ ID NO: 114590 - DNA, 120 bp, synthetic construct; identical to SEQ ID NO: 13351
  source 1..120: mol_type = other DNA

SEQ ID NO: 114591 - DNA, 120 bp, synthetic construct; identical to SEQ ID NO: 13352
  source 1..120: mol_type = other DNA

SEQ ID NO: 114592 - DNA, 120 bp, synthetic construct
  source 1..120: mol_type = other DNA
agtggagtgagtggagtggagtgagtgagtggagtggaggagtggagtggagtggaggagtggagtggagtggagtggaggagtggagtggagtggagtggaggagtggagtggaggagt

SEQ ID NO: 114593 - DNA, 120 bp, synthetic construct
  source 1..120: mol_type = other DNA
agtggaggagtggagtggagtggagtgagtggagtggagtggagtgagtggagtggaggagtggagtggagtggagtggagtggagtggaggagtggagtggagtggaggagtggagtgg

SEQ ID NO: 114594 - DNA, 120 bp, synthetic construct; identical to SEQ ID NO: 13353
  source 1..120: mol_type = other DNA

SEQ ID NO: 114595 - DNA, 120 bp, synthetic construct; identical to SEQ ID NO: 13354
  source 1..120: mol_type = other DNA

SEQ ID NO: 114596 - DNA, 120 bp, synthetic construct; identical to SEQ ID NO: 13355
  source 1..120: mol_type = other DNA

SEQ ID NO: 114597 - DNA, 120 bp, synthetic construct; identical to SEQ ID NO: 13356
  source 1..120: mol_type = other DNA

SEQ ID NO: 114598 - DNA, 120 bp, synthetic construct; identical to SEQ ID NO: 13357
  source 1..120: mol_type = other DNA

SEQ ID NO: 114599 - DNA, 120 bp, synthetic construct; identical to SEQ ID NO: 13365
  source 1..120: mol_type = other DNA

SEQ ID NO: 114600 - DNA, 120 bp, synthetic construct; identical to SEQ ID NO: 13366
  source 1..120: mol_type = other DNA

SEQ ID NO: 114601 - DNA, 120 bp, synthetic construct; identical to SEQ ID NO: 13367
  source 1..120: mol_type = other DNA

SEQ ID NO: 114602 - DNA, 120 bp, synthetic construct; identical to SEQ ID NO: 13368
  source 1..120: mol_type = other DNA

SEQ ID NO: 114603 - DNA, 120 bp, synthetic construct; identical to SEQ ID NO: 13369
  source 1..120: mol_type = other DNA

SEQ ID NO: 114604 - DNA, 120 bp, synthetic construct; identical to SEQ ID NO: 13370
  source 1..120: mol_type = other DNA

SEQ ID NO: 114605 - DNA, 120 bp, synthetic construct; identical to SEQ ID NO: 13371
  source 1..120: mol_type = other DNA

SEQ ID NO: 114606 - DNA, 120 bp, synthetic construct
  source 1..120: mol_type = other DNA
aggtttaaaagtagcgtttgcttttcaaaagtcattctgcaccgcctgaaaatccagaaaaatctactttccttgaggctgcgctttcccagatacaccaaccagacaagtttgctatgt

SEQ ID NO: 114607 - DNA, 120 bp, synthetic construct; identical to SEQ ID NO: 13360
  source 1..120: mol_type = other DNA

SEQ ID NO: 114608 - DNA, 120 bp, synthetic construct
  source 1..120: mol_type = other DNA
caaatgggatctaattaaactaaagagcttctgcacagcaaaagaaactaccatcagcatgaacaggcaacctacagaatgggagaaaatttttgcaatctccccatctgacaaagggct

SEQ ID NO: 114609 - DNA, 120 bp, synthetic construct; identical to SEQ ID NO: 13361
  source 1..120: mol_type = other DNA

SEQ ID NO: 114610 - DNA, 120 bp, synthetic construct; identical to SEQ ID NO: 13362
  source 1..120: mol_type = other DNA

SEQ ID NO: 114611 - DNA, 120 bp, synthetic construct
  source 1..120: mol_type = other DNA
atatagcaagaccccatctctgctaaaaataaagatgaaattaaaaaattagctgggcatggtagcacacacctgtagtcccagctgcttgggaggctgaggtggggcgattgcttgagt

SEQ ID NO: 114612 - DNA, 120 bp, synthetic construct
  source 1..120: mol_type = other DNA
tggtttgtagttctccttgaagaggtccttcacatcccttatacgttggattcctaggtattttattctctttgaagcaattgcaaattggagttcactcatgttttggctctctgtttg

SEQ ID NO: 114613 - DNA, 120 bp, synthetic construct
  source 1..120: mol_type = other DNA
gagcctgttattggtctattcagggattcaacttcttcttggtttagtcttggaagggtgtatgtgtccaggaatttatccatttcttctagattttttagtttatttgtgtggagctat

SEQ ID NO: 114614 - DNA, 120 bp, synthetic construct
  source 1..120: mol_type = other DNA
atgaatctgggtgctcgtgtattgggtgcatacatatttaagatagttagctcttcttgttgaatccctttaccattatgtaatggccttctttgtctcttttgatctttgttggtttaa

SEQ ID NO: 114615 - DNA, 120 bp, synthetic construct
  source 1..120: mol_type = other DNA
acttggttccattctccccatcactttcaggtacaccaatcagatgtagatttggtcttttcacatagtcccatatttcttggaggctttattcatttctttttattcttttttctataa

SEQ ID NO: 114616 - DNA, 120 bp, synthetic construct; identical to SEQ ID NO: 13363
  source 1..120: mol_type = other DNA

SEQ ID NO: 114617 - DNA, 120 bp, synthetic construct; identical to SEQ ID NO: 13364
  source 1..120: mol_type = other DNA

SEQ ID NO: 114618 - DNA, 120 bp, synthetic construct
  source 1..120: mol_type = other DNA
tatctcagctttccatatggcaaaaaacataagcaacccaaaacagcctgtgtcctgggatccctgtcctatttatttatttatttatttatttatttatgtattattattattattatt

SEQ ID NO: 114619 - DNA, 120 bp, synthetic construct
  source 1..120: mol_type = other DNA
tatttaagttcattgtagattctggatattagccctttgtcagatgagtaggttgcaaaaattttctcccattttgtaggttgcctgttcactctgatggtagtttcttttgctgtgcag

SEQ ID NO: 114620 - DNA, 120 bp, synthetic construct; identical to SEQ ID NO: 13388
  source 1..120: mol_type = other DNA

SEQ ID NO: 114621 - DNA, 120 bp, synthetic construct; identical to SEQ ID NO: 13389
  source 1..120: mol_type = other DNA

SEQ ID NO: 114622 - DNA, 120 bp, synthetic construct; identical to SEQ ID NO: 13390
  source 1..120: mol_type = other DNA

SEQ ID NO: 114623 - DNA, 120 bp, synthetic construct; identical to SEQ ID NO: 13391
  source 1..120: mol_type = other DNA

SEQ ID NO: 114624 - DNA, 120 bp, synthetic construct
  source 1..120: mol_type = other DNA
aatggcacgtccagccaggccaaaggtttttaccttccaggacttagccaagttcagtcattagatgcatgtccattaggttctgtttctttagttaaaataggcatttctaatactagg

SEQ ID NO: 114625 - DNA, 120 bp, synthetic construct
  source 1..120: mol_type = other DNA
ctctcatacgttatattccacagtgaaaaccagcctatatttattctaaagtacacagagcttattttcaatgtcttctctttggtatattcttatataagaaactcaacaaattctact

SEQ ID NO: 114626 - DNA, 120 bp, synthetic construct; identical to SEQ ID NO: 13392
  source 1..120: mol_type = other DNA

SEQ ID NO: 114627 - DNA, 120 bp, synthetic construct
  source 1..120: mol_type = other DNA
tgcctgcctctgtaggctccacctctgggggcagggcacagacaaataaaaagacaacagtctgacagctttgaagagagcagtggttctcccagcacgcagctggagatctgagatggg

SEQ ID NO: 114628 - DNA, 120 bp, synthetic construct
  source 1..120: mol_type = other DNA
ggaagatgaaatgaatgaaatgaagcgagaagggaagtttagagaaaaaagaataacaagaaatgagcaaagcctccaagaaatatgggactatgtgaaaagaccaaatctacgtctgat

SEQ ID NO: 114629 - DNA, 120 bp, synthetic construct
  source 1..120: mol_type = other DNA
cctaaatatatatgcacccaatacaggagcacccagattcatagagcaagtcctgagtgacctacaaagagacttagactcccacacattaataatgggagactttaacaccccactgtc

SEQ ID NO: 114630 - DNA, 120 bp, synthetic construct
  source 1..120: mol_type = other DNA
cactgatcccacagaaatacaaactaccatcagagaatactacaaacacctctacgcaaataaactagaaaatctagaagaaatggataaattccttgacacatacactctcccaagact

SEQ ID NO: 114631 - DNA, 120 bp, synthetic construct
  source 1..120: mol_type = other DNA
tgcttcaaagagaataaaatacctaggaatccaacttacaagggatgtgaagaacctattcaagaagaactacaaaccactgctcaaggaaataaaagaggatacaaacaaatggaagaa

SEQ ID NO: 114632 - DNA, 120 bp, synthetic construct
  source 1..120: mol_type = other DNA
gatatgaacagacacttctcaaaagaagacatttatgcagccaaaaaacacatgaaaaaatgctcatcatcattggccatcagagaaatgcaaatcaaaaccacaatgagataccatctc

SEQ ID NO: 114633 - DNA, 120 bp, synthetic construct
  source 1..120: mol_type = other DNA
ggtgggggttgcagtgagccaagactgcaccactgcacttcagcctgggcaacagagcaagaccctatctaaataaatgaatgaatgaataaataaatgaataaagtaattgccaaatga

SEQ ID NO: 114634 - DNA, 120 bp, synthetic construct
  source 1..120: mol_type = other DNA
tatttgtgggagatatggttggttggctactcaaaaacattttatcctccctgtgggctaatgagaagtaaggaagaagagaagaaagggaagaaagggaaggaaggaaaggaaagaagg

SEQ ID NO: 114635 - DNA, 120 bp, synthetic construct
  source 1..120: mol_type = other DNA
ttctggaggtcacaagatttgcaacttccccaatttctggcagataacatcactactgtagaacctaagattggccttttgagatgtcctttcaggcttttgcatttctgatgaccagat

SEQ ID NO: 114636 - DNA, 120 bp, synthetic construct; identical to SEQ ID NO: 13394
  source 1..120: mol_type = other DNA

SEQ ID NO: 114637 - DNA, 120 bp, synthetic construct; identical to SEQ ID NO: 13395
  source 1..120: mol_type = other DNA

SEQ ID NO: 114638 - DNA, 120 bp, synthetic construct; identical to SEQ ID NO: 13393
  source 1..120: mol_type = other DNA

SEQ ID NO: 114639 - DNA, 120 bp, synthetic construct
  source 1..120: mol_type = other DNA
agagtccgggggatgggatggctgcccttgtaacggagtccgggggaacgggatgggtgcccttggagtccgggggaacgggatgggtgcccttggagtccgggggaacgggatgggtgc

SEQ ID NO: 114640 - DNA, 120 bp, synthetic construct
  source 1..120: mol_type = other DNA
atgggtgtaacagagtccggggaaacgggatgggtgcccttgtaacagagtccaggggaacgggatgggtgcccttgtaacggagtccgggggaacgggatggctgcccttgtaacagag

SEQ ID NO: 114641 - DNA, 120 bp, synthetic construct
  source 1..120: mol_type = other DNA
ggagtccaggggaacgggatgggtgcccttgtaacggagtccaggggaacgggatgggtgcccttgtaacagagtccgggggaacgggatgggtgcccttgtaacagagtccggggaaac

SEQ ID NO: 114642 - DNA, 120 bp, synthetic construct
  source 1..120: mol_type = other DNA
ggatgggtgcccttggagtccgggggaacgggatgggtgcccttggagtccgggggaacgggatgggtgccctagtaacggagtccgggggaacgggatgggtgcccttgtaacggagtc

SEQ ID NO: 114643 - DNA, 120 bp, synthetic construct; identical to SEQ ID NO: 13376
  source 1..120: mol_type = other DNA

SEQ ID NO: 114644 - DNA, 120 bp, synthetic construct; identical to SEQ ID NO: 13377
  source 1..120: mol_type = other DNA

SEQ ID NO: 114645 - DNA, 120 bp, synthetic construct; identical to SEQ ID NO: 13378
  source 1..120: mol_type = other DNA

SEQ ID NO: 114646 - DNA, 120 bp, synthetic construct
  source 1..120: mol_type = other DNA
taaagtgctgggattacaggcgtgagccaccacgcctggcctaggtaaccatctttatgctaaaatatctccgtacaaaatcacaagcattcctatacaccaacaacagacaaacagaga

SEQ ID NO: 114647 - DNA, 120 bp, synthetic construct
  source 1..120: mol_type = other DNA
caacctactcatctgacaaagggctaatatccagaatctacaatgaactcaaacaaatttacaagaaaaaaacaaacaaccccatcaaaaagtgggcgaaggacatggacagacacttct

SEQ ID NO: 114648 - DNA, 120 bp, synthetic construct
  source 1..120: mol_type = other DNA
gtgcacatgtaccctaatacttaaagtataataataataaaaaaaaagaaaaaaaaaagaaaaaaacaaacaaccccatcaaaaagtggccgaaggacatgaacagacaatcctcaaagg

SEQ ID NO: 114649 - DNA, 120 bp, synthetic construct; identical to SEQ ID NO: 13379
  source 1..120: mol_type = other DNA

SEQ ID NO: 114650 - DNA, 120 bp, synthetic construct; identical to SEQ ID NO: 13380
  source 1..120: mol_type = other DNA

SEQ ID NO: 114651 - DNA, 120 bp, synthetic construct; identical to SEQ ID NO: 13381
  source 1..120: mol_type = other DNA

SEQ ID NO: 114652 - DNA, 120 bp, synthetic construct; identical to SEQ ID NO: 13382
  source 1..120: mol_type = other DNA

SEQ ID NO: 114653 - DNA, 120 bp, synthetic construct; identical to SEQ ID NO: 13383
  source 1..120: mol_type = other DNA

SEQ ID NO: 114654 - DNA, 120 bp, synthetic construct
  source 1..120: mol_type = other DNA
ttacactgtatacaaaaattaattcaagatggattaaagacttacatgttagacctaaaaccataaaaaccctagaagaaaacctaggcaataccattcaggacataggcatgggcaagg

SEQ ID NO: 114655 - DNA, 120 bp, synthetic construct
  source 1..120: mol_type = other DNA
tgtgtatgtgtctttatagcagcatgatttacaatcctttgggtatatacccagtaatgggatggctgggtcaaacggtatttctagttctagatccctgatgaatcaccacactgactt

SEQ ID NO: 114656 - DNA, 120 bp, synthetic construct; identical to SEQ ID NO: 13384
  source 1..120: mol_type = other DNA

SEQ ID NO: 114657 - DNA, 120 bp, synthetic construct; identical to SEQ ID NO: 13385
  source 1..120: mol_type = other DNA

SEQ ID NO: 114658 - DNA, 120 bp, synthetic construct; identical to SEQ ID NO: 13386
  source 1..120: mol_type = other DNA

SEQ ID NO: 114659 - DNA, 120 bp, synthetic construct; identical to SEQ ID NO: 13387
  source 1..120: mol_type = other DNA

SEQ ID NO: 114660 - DNA, 120 bp, synthetic construct
  source 1..120: mol_type = other DNA
tccacaaggaaacaggaaaactgggaaacctttctcacctcagcctcccaagtagctgagacacaggtgtgtgccaccacacccagctaattctttcttttttttttttttaatatactt

SEQ ID NO: 114661 - DNA, 120 bp, synthetic construct; identical to SEQ ID NO: 12177
  source 1..120: mol_type = other DNA

SEQ ID NO: 114662 - DNA, 120 bp, synthetic construct
  source 1..120: mol_type = other DNA
cacggcagggtattccaacagacctgcagctgagggtcctgtctgttagaaggaaaactaacaaccagaaaggacatctacaccgaaaacctatctgtacatcaccatcatcaaagacca

SEQ ID NO: 114663 - DNA, 120 bp, synthetic construct
  source 1..120: mol_type = other DNA
aaagagctcctgaaggaagcgctaaacatggaaaggaacaaccggtaccagccactgcaaaatcatgccaaaatgtaaagaccatcgagactaggaagaaactgcatcaactaatgagca

SEQ ID NO: 114664 - DNA, 120 bp, synthetic construct
  source 1..120: mol_type = other DNA
agagacacaaaaaacccttcaaaaaatcaatgaatccaggagctggttttttgaaaggatcaacaaaattgatagaccgctagcaagactaataaagaaaaaaagagaagaatcaaatag

SEQ ID NO: 114665 - DNA, 120 bp, synthetic construct
  source 1..120: mol_type = other DNA
tgtacaaaaatcacaagcattcttatacatcaacaacagacagagagccaaatcataagtgaactcccattcacaattgcttcaaagagaataaaatacctaggaatccaacttacaagg

SEQ ID NO: 114666 - DNA, 120 bp, synthetic construct
  source 1..120: mol_type = other DNA
gaaaaaaacaaacaaccccatcaaaaagtgggcgaaggacatgaacagacacttctcaaaagaagacatttatgcagccaaaaaacacatgaaaaaatgctcaccatcactggccatcag

SEQ ID NO: 114667 - DNA, 120 bp, synthetic construct; identical to SEQ ID NO: 12178
  source 1..120: mol_type = other DNA

SEQ ID NO: 114668 - DNA, 120 bp, synthetic construct; identical to SEQ ID NO: 12179
  source 1..120: mol_type = other DNA

SEQ ID NO: 114669 - DNA, 120 bp, synthetic construct; identical to SEQ ID NO: 12180
  source 1..120: mol_type = other DNA

SEQ ID NO: 114670 - DNA, 120 bp, synthetic construct
  source 1..120: mol_type = other DNA
ctgcaattaacatacgtgtacatgtgtctttatagtagagtgatttataatccttcatgtatatgcccattaatgggattgctgggtcaaatggtatttctggttctagatccttaagga

SEQ ID NO: 114671 - DNA, 120 bp, synthetic construct
  source 1..120: mol_type = other DNA
ttctagatccctgaggaattgccacactgacttccacaatggttgaactaatttacagtcccaccaacagtgtaaaagtgttcctatttctccacatcctctccagcacctgttgtttcc

SEQ ID NO: 114672 - DNA, 120 bp, synthetic construct
  source 1..120: mol_type = other DNA
taaagtagttttttccaattctgtgaagaaaggcattggtagcttgatggggatggcattgaatctgtaaattaccttgggcagtatggccgttttcacgatattgattcttcctgccca

SEQ ID NO: 114673 - DNA, 120 bp, synthetic construct
  source 1..120: mol_type = other DNA
tggtagaattcagctgtgaatccatctggtcctggactctttactagaaaagcaagagcaaatacattcaaaagctagcagaaggcaagaaataactaaaatcagagcagaactgaagga

SEQ ID NO: 114674 - DNA, 120 bp, synthetic construct; identical to SEQ ID NO: 12181
  source 1..120: mol_type = other DNA

SEQ ID NO: 114675 - DNA, 120 bp, synthetic construct
  source 1..120: mol_type = other DNA
ttttcatgggtcttttggctgcataaatgtcttcttttgagaagtgtctgttgatatcctttgcccactttttgatggggttgtttgtttttttcttgtaaatttgtttgagttcattgt

SEQ ID NO: 114676 - DNA, 120 bp, synthetic construct
  source 1..120: mol_type = other DNA
ttttgtacattgattttgtatcctgagactttgctgaagttgcttatcagcttgagattttgggctgagacaatggggttttctagatatacaatcatgtcatctcaaaacagggacaat

SEQ ID NO: 114677 - DNA, 120 bp, synthetic construct
  source 1..120: mol_type = other DNA
atgtgtcgaggaattcatccatttcttccacattttctagtttatttgcgtagaggtgtttgtagtattctctgatggtagtttgtatttctgtgggatcagtggtgatatcccctttat

SEQ ID NO: 114678 - DNA, 120 bp, synthetic construct
  source 1..120: mol_type = other DNA
tgactcgctgatctgtctaatgttgacagtggggtgttaaagtctcccattattattgtgtgggagtctaagtctctttgtaggtcactcaggacttgctttatgaatctgggtgctcct

SEQ ID NO: 114679 - DNA, 120 bp, synthetic construct
  source 1..120: mol_type = other DNA
gaggagtatctttgtggcattctctgtatttcctgaatctgaatgttggcctgccttgctagattggggaagttctcctggataatatcctgcagagtgttttccaacttggttgcattc

SEQ ID NO: 114680 - DNA, 120 bp, synthetic construct
  source 1..120: mol_type = other DNA
agggtttttttttttttttttatgaggaagcttttttttttgtgcaagtgtggatttcttttcttttttttttaaattattatcatactttaagttttagggtacatgtgcacaatgtgc

SEQ ID NO: 114681 - DNA, 120 bp, synthetic construct
  source 1..120: mol_type = other DNA
tattagccctttgtcagatgagtaggttgcaaaaattttctcccattttgtaggatgcctgttcactctgatggtagtttcttttggtgtgcagaagctctttagtttaatgagatccca

SEQ ID NO: 114682 - DNA, 120 bp, synthetic construct
  source 1..120: mol_type = other DNA
ccaggaggcagatcttgcagtgaaccgagatcgtgccactgcactccagcctgggtgacagaatgagactccatctaaaaaaaaaagaaaaaaaaaaaagaaagaaaacaactgacatgg

SEQ ID NO: 114683 - DNA, 120 bp, synthetic construct
  source 1..120: mol_type = other DNA
tgtaaactagttcaaccattgtggaagtcagtgcggcgattcctcagggatctagaactagaaataccatttgacccagccatcccattactgggtatatacccaaaggactataaatca

SEQ ID NO: 114684 - DNA, 120 bp, synthetic construct; identical to SEQ ID NO: 21580
  source 1..120: mol_type = other DNA

SEQ ID NO: 114685 - DNA, 120 bp, synthetic construct
  source 1..120: mol_type = other DNA
gaactgtactggtgaaaaggaggacagaccccgagaactgtgctgatgaaaaggacagaccccgagaactgtgctgatgaaaaggacagaccccgagaactgtgctggtgaaaaggacag

SEQ ID NO: 114686 - DNA, 120 bp, synthetic construct
  source 1..120: mol_type = other DNA
gaactgtgctggtgaaaaggacagaccccgagaattgtgctggtgaaaaggacagaccccgagaactgtgctggtgaaaaggacagaccctgagaactgtactggtgaaaaggaggacag

SEQ ID NO: 114687 - DNA, 120 bp, synthetic construct; identical to SEQ ID NO: 21581
  source 1..120: mol_type = other DNA

SEQ ID NO: 114688 - DNA, 120 bp, synthetic construct
  source 1..120: mol_type = other DNA
aatcttctcccattctgtaggttgccggttcactctgatggtagtttcttttgctgcgcagaagctctttagtttaattcgatctcatttgtcaattttggcttttgttgccattgcttt

SEQ ID NO: 114689 - DNA, 120 bp, synthetic construct
  source 1..120: mol_type = other DNA
aaggagattttgggctgagacgacggggttttctagatatacaatcatgtcatctgcaaacagggacaatttgacttcctcttttcctaattgaataccctttatttctttctcctgcct

SEQ ID NO: 114690 - DNA, 120 bp, synthetic construct; identical to SEQ ID NO: 21582
  source 1..120: mol_type = other DNA

SEQ ID NO: 114691 - DNA, 120 bp, synthetic construct
  source 1..120: mol_type = other DNA
acgaactcatcattttttatggctgcattgtattccatggtgtatatgtgccacattttcttaatccagtctatcattgttggacatttgggttggttccaagtctttgctattgtgaat

SEQ ID NO: 114692 - DNA, 120 bp, synthetic construct
  source 1..120: mol_type = other DNA
tgtaaggaagggatccagtttcagctttctacatatggctagccagttttcccagcaccatttattaaatagggaatcctttccccattgcttgttttcctcaggtttgtcaaagatcag

SEQ ID NO: 114693 - DNA, 120 bp, synthetic construct
  source 1..120: mol_type = other DNA
tattttgagatgcgtcccatcagtacctaatttattgaaagttattagcatgaagggctgttgaattttgtcaaaggctttttctgcatctattgagataatcgtggtttttgtcattgg

SEQ ID NO: 114694 - DNA, 120 bp, synthetic construct
  source 1..120: mol_type = other DNA
aattgtgatgttagggtgtcaattttggatctttcctgctttctcttgtgggcatttagtgctataaatttccctctacacactgctttgaatgcgtcccagagattctgttaagttgtg

SEQ ID NO: 114695 - DNA, 120 bp, synthetic construct
  source 1..120: mol_type = other DNA
agcgcttccttcaggagctcttttagggcaggcctagtggtgacaaaatctctcagcatttgcttgtctgtgaagtattttatttctccttcacttatgaagcttagtttggctggatat

SEQ ID NO: 114696 - DNA, 120 bp, synthetic construct
  source 1..120: mol_type = other DNA
tttccagtttttctgttctgttttttccccatctttgtggttttatctacttttggtctttgatgatggtgatgtacagatgggttttcggtgcggatgtcctttctgtttgttagtttt

SEQ ID NO: 114697 - DNA, 120 bp, synthetic construct; identical to SEQ ID NO: 21583
  source 1..120: mol_type = other DNA

SEQ ID NO: 114698 - DNA, 120 bp, synthetic construct
  source 1..120: mol_type = other DNA
tacagtactaggccagaccctgtgtaagttctgcctgtgagagttgagaactgatgcatatcccaatcagaagtgagcacagaaaactgtgatttgaatcatacactctgttttaggaaa

SEQ ID NO: 114699 - DNA, 120 bp, synthetic construct; identical to SEQ ID NO: 35126
  source 1..120: mol_type = other DNA

SEQ ID NO: 114700 - DNA, 120 bp, synthetic construct; identical to SEQ ID NO: 35127
  source 1..120: mol_type = other DNA

SEQ ID NO: 114701 - DNA, 120 bp, synthetic construct
  source 1..120: mol_type = other DNA
tcttaatgcctatgtggtactccatcctgtatgtaactggatcataatttacctagccatttcctttttttttttttaggggggatggattcttgctctgtcacccaggctggagtgcag

SEQ ID NO: 114702 - DNA, 120 bp, synthetic construct; identical to SEQ ID NO: 35128
  source 1..120: mol_type = other DNA

SEQ ID NO: 114703 - DNA, 120 bp, synthetic construct
  source 1..120: mol_type = other DNA
tgcttcaatattcccgagattagagtcatgtttttcttagtgtttttttcttcaagtttaaggattgaggccaggtgtggtggctcatgcgtataatcccaacactttgggaggctgagg

SEQ ID NO: 114704 - DNA, 120 bp, synthetic construct
  source 1..120: mol_type = other DNA
tataatattagggaattaccttattcttaaattatcaagtcctcacaaaaatcaagaatagttggccaggtgtggtggctcacgcctgtaatcccagcacttcaggaggctgaggcagaa

SEQ ID NO: 114705 - DNA, 120 bp, synthetic construct; identical to SEQ ID NO: 35129
  source 1..120: mol_type = other DNA

SEQ ID NO: 114706 - DNA, 120 bp, synthetic construct; identical to SEQ ID NO: 35130
  source 1..120: mol_type = other DNA

SEQ ID NO: 114707 - DNA, 120 bp, synthetic construct; identical to SEQ ID NO: 35131
  source 1..120: mol_type = other DNA

SEQ ID NO: 114708 - DNA, 120 bp, synthetic construct; identical to SEQ ID NO: 35132
  source 1..120: mol_type = other DNA

SEQ ID NO: 114709 - DNA, 120 bp, synthetic construct; identical to SEQ ID NO: 35133
  source 1..120: mol_type = other DNA

SEQ ID NO: 114710 - DNA, 120 bp, synthetic construct
  source 1..120: mol_type = other DNA
gggaggtggaggttgcagtgaaccaagatcgtgccactgccctccagcctgggcaacaagagcaaaactctgtctccaaaaaaaaaaaagaaactaaacacatttaataaatttcaagtg

SEQ ID NO: 114711 - DNA, 120 bp, synthetic construct; identical to SEQ ID NO: 26879
  source 1..120: mol_type = other DNA

SEQ ID NO: 114712 - DNA, 120 bp, synthetic construct; identical to SEQ ID NO: 26880
  source 1..120: mol_type = other DNA

SEQ ID NO: 114713 - DNA, 120 bp, synthetic construct; identical to SEQ ID NO: 5691
  source 1..120: mol_type = other DNA

SEQ ID NO: 114714 - DNA, 120 bp, synthetic construct; identical to SEQ ID NO: 25136
  source 1..120: mol_type = other DNA

SEQ ID NO: 114715 - DNA, 120 bp, synthetic construct
  source 1..120: mol_type = other DNA
atataaatgcaccaggagccggggagcagaggagcaaatgagtgggggaaagtgtgagaggaagagttggagaaaagtcgggggaaagtagggacagggttaaggggagagaggaggatg

SEQ ID NO: 114716 - DNA, 120 bp, synthetic construct; identical to SEQ ID NO: 20483
  source 1..120: mol_type = other DNA

SEQ ID NO: 114717 - DNA, 120 bp, synthetic construct; identical to SEQ ID NO: 30118
  source 1..120: mol_type = other DNA

SEQ ID NO: 114718 - DNA, 120 bp, synthetic construct
  source 1..120: mol_type = other DNA
gaagtgtatgtttatatccttcgcccactttttgatggggttgtttgtttttttcttgtaaatttgtttgagttcattgtagattctggatattagccctttgtcagatgagtaggttgc

SEQ ID NO: 114719 - DNA, 120 bp, synthetic construct; identical to SEQ ID NO: 30119
  source 1..120: mol_type = other DNA

SEQ ID NO: 114720 - DNA, 120 bp, synthetic construct; identical to SEQ ID NO: 30120
  source 1..120: mol_type = other DNA

SEQ ID NO: 114721 - DNA, 120 bp, synthetic construct; identical to SEQ ID NO: 30121
  source 1..120: mol_type = other DNA

SEQ ID NO: 114722 - DNA, 120 bp, synthetic construct; identical to SEQ ID NO: 20158
  source 1..120: mol_type = other DNA

SEQ ID NO: 114723 - DNA, 120 bp, synthetic construct; identical to SEQ ID NO: 20159
  source 1..120: mol_type = other DNA

SEQ ID NO: 114724 - DNA, 120 bp, synthetic construct; identical to SEQ ID NO: 21034
  source 1..120: mol_type = other DNA

SEQ ID NO: 114725 - DNA, 120 bp, synthetic construct; identical to SEQ ID NO: 21035
  source 1..120: mol_type = other DNA

SEQ ID NO: 114726 - DNA, 120 bp, synthetic construct; identical to SEQ ID NO: 9178
  source 1..120: mol_type = other DNA

SEQ ID NO: 114727 - DNA, 120 bp, synthetic construct; identical to SEQ ID NO: 9179
  source 1..120: mol_type = other DNA

SEQ ID NO: 114728 - DNA, 120 bp, synthetic construct; identical to SEQ ID NO: 23800
  source 1..120: mol_type = other DNA

SEQ ID NO: 114729 - DNA, 120 bp, synthetic construct; identical to SEQ ID NO: 23801
  source 1..120: mol_type = other DNA

SEQ ID NO: 114730 - DNA, 120 bp, synthetic construct; identical to SEQ ID NO: 23802
  source 1..120: mol_type = other DNA

SEQ ID NO: 114731 - DNA, 120 bp, synthetic construct; identical to SEQ ID NO: 23803
  source 1..120: mol_type = other DNA

SEQ ID NO: 114732 - DNA, 120 bp, synthetic construct; identical to SEQ ID NO: 35469
  source 1..120: mol_type = other DNA

SEQ ID NO: 114733 - DNA, 120 bp, synthetic construct; identical to SEQ ID NO: 35470
  source 1..120: mol_type = other DNA

SEQ ID NO: 114734 - DNA, 120 bp, synthetic construct; identical to SEQ ID NO: 35471
  source 1..120: mol_type = other DNA

SEQ ID NO: 114735 - DNA, 120 bp, synthetic construct
  source 1..120: mol_type = other DNA
ttcctcagggatctagaactagaaataccatttgacccagccatcccattactgggtatatacccaaaggactataaatcatgctgctataaagacacatgcacacgtatgtttattgtg

SEQ ID NO: 114736 - DNA, 120 bp, synthetic construct
  source 1..120: mol_type = other DNA
acactgccctttctctcgcagacggaaatggaatccagggattcttctacccatggagtgagcagccgctgaaatactgggtcacccagggaggggagcccagatcagacccctgaatct

SEQ ID NO: 114737 - DNA, 120 bp, synthetic construct
  source 1..120: mol_type = other DNA
gtcacattcataggagtacaatttagtcactagtaatcctttgcgaataatacaaacgtccagtaattctttgctgcataacaggccttgtgctcaaaaggttctgcagaccttgcctgg

SEQ ID NO: 114738 - DNA, 120 bp, synthetic construct
  source 1..120: mol_type = other DNA
accattgcactccagcttgggccacaagagtgaaactctgtctcaaaaataaaaaaattaaaaataaatgttaacacctgtagtcccagtgctttgggaggtcaaggcaggaggatcact

SEQ ID NO: 114739 - DNA, 120 bp, synthetic construct
  source 1..120: mol_type = other DNA
ttaaactcccaagcccaagagatcctcccagctcagccttctgagtaaccgggactacaggtgcacaccagcacacccagctcattttaaattttttctttttttttgagatggatcttg

SEQ ID NO: 114740 - DNA, 120 bp, synthetic construct
  source 1..120: mol_type = other DNA
tatgcgattctcctgcctcagcctcctgagtagctgggattataggccaccatgcccagctaattttttgtatttttagtagaggtggggttttaccatgttggccaggctggtctcaaa

SEQ ID NO: 114741 - DNA, 120 bp, synthetic construct
  source 1..120: mol_type = other DNA
tgccactgcactccagcctgggcaacagaatgagactctgtctcagaaaaaaaaaaaattattaatagatggtgaccctcatcttcatgttttctgcatctattgaagtgcgccattgag

SEQ ID NO: 114742 - DNA, 120 bp, synthetic construct
  source 1..120: mol_type = other DNA
catttaggctcggtctccacagccatggccgcgacgcaggagctgctgctgcagttgcagaaggataaccgagatggtcgccagcggaagcaggagctagagaagctgatgcgcgggctc

SEQ ID NO: 114743 - DNA, 120 bp, synthetic construct
  source 1..120: mol_type = other DNA
cctccccgtccctgtctcccctgacacccgttcctccagaagcccggtaaaccccgcccttacaagccccgcccctagctcttctactacggaggggaactgcagagccagaagagcacg

SEQ ID NO: 114744 - DNA, 120 bp, synthetic construct
  source 1..120: mol_type = other DNA
taagggagttgggcctgcgggcgcggcggggcactgtggggccgggatgggctcccacctgcatgcctgtccccgcaggtgtgacgggcagcttcgcggagtgcagtacagcaccgaatc

SEQ ID NO: 114745 - DNA, 120 bp, synthetic construct
  source 1..120: mol_type = other DNA
tgaatttatttctaccatttgtaacatgttgatcctgatttttcaatgctcccctttccttctgtttatttgggaagtcacactctgtattctggtattcttactacttgagctcagctc

SEQ ID NO: 114746 - DNA, 120 bp, synthetic construct
  source 1..120: mol_type = other DNA
tggtcttgatctcttgacattgtgatccgcctggcttggcctcccaaagcgctgggattacaggcatgagccaccgtgccaggccaacagagtgtgttctaaatacccagcaggtccagg

SEQ ID NO: 114747 - DNA, 120 bp, synthetic construct
  source 1..120: mol_type = other DNA
gagacaggttgcagtgagcagagatcacgccactgcactccagcctgggcgacagagtgagactccgactaaaaaaaaaagaaaaagttgactggagcttttcattcaactttttttttt

SEQ ID NO: 114748 - DNA, 120 bp, synthetic construct; identical to SEQ ID NO: 23536
  source 1..120: mol_type = other DNA

SEQ ID NO: 114749 - DNA, 120 bp, synthetic construct
  source 1..120: mol_type = other DNA
tcagggccttaccaaccccacatgtttaagtgctgcccccttcggggatggctcacttgctgggatcgccatcctccctttgttcaggccggacccctcaaagccacctctgactcccac

SEQ ID NO: 114750 - DNA, 120 bp, synthetic construct
  source 1..120: mol_type = other DNA
cttgtatatactgacttttttttttttgagaccgagtctctatttttttttttttgagacggaaacttgctctgttgcccaggctggagcacagtggtgcgatctcagctcactgcaaac

SEQ ID NO: 114751 - DNA, 120 bp, synthetic construct; identical to SEQ ID NO: 28939
  source 1..120: mol_type = other DNA

SEQ ID NO: 114752 - DNA, 120 bp, synthetic construct; identical to SEQ ID NO: 24965
  source 1..120: mol_type = other DNA

SEQ ID NO: 114753 - DNA, 120 bp, synthetic construct; identical to SEQ ID NO: 24966
  source 1..120: mol_type = other DNA

SEQ ID NO: 114754 - DNA, 120 bp, synthetic construct; identical to SEQ ID NO: 16961
  source 1..120: mol_type = other DNA

SEQ ID NO: 114755 - DNA, 120 bp, synthetic construct; identical to SEQ ID NO: 16962
  source 1..120: mol_type = other DNA

SEQ ID NO: 114756 - DNA, 120 bp, synthetic construct; identical to SEQ ID NO: 16963
  source 1..120: mol_type = other DNA

SEQ ID NO: 114757 - DNA, 120 bp, synthetic construct; identical to SEQ ID NO: 16964
  source 1..120: mol_type = other DNA

SEQ ID NO: 114758 - DNA, 120 bp, synthetic construct
  source 1..120: mol_type = other DNA
ggaggtaaaaggaggagaactgcttgagcccaggagtttgagactaccctgggcaatataagtaggccctgtctctacaaaaataaattttttaaaaaacctagctgagtgtagtgtcat

SEQ ID NO: 114759 - DNA, 120 bp, synthetic construct
  source 1..120: mol_type = other DNA
gagaatggaaccaagttggaaaacacacttcaggatattatccggaagaacttccccaacctagtaagagaggccaacatgcaaattcaggaaatacagagaacaccactaagatactcc

SEQ ID NO: 114760 - DNA, 120 bp, synthetic construct
  source 1..120: mol_type = other DNA
aactctttatgctaaaaactctcaataaattaggtattgatgggacgtatctcaaaataataagagctatctatgacaaacccacagccaatatcatactgaatgggcaaaaactggaag

SEQ ID NO: 114761 - DNA, 120 bp, synthetic construct
  source 1..120: mol_type = other DNA
gaaactggatcccttccctacaccttatacaaaaattaattcaagatggattaaagagttaaatgttagacctaaaaccataaaaaccctagaagaaacctaggcattaccattcaggac

SEQ ID NO: 114762 - DNA, 120 bp, synthetic construct; identical to SEQ ID NO: 26940
  source 1..120: mol_type = other DNA

SEQ ID NO: 114763 - DNA, 120 bp, synthetic construct; identical to SEQ ID NO: 26941
  source 1..120: mol_type = other DNA

SEQ ID NO: 114764 - DNA, 120 bp, synthetic construct; identical to SEQ ID NO: 26942
  source 1..120: mol_type = other DNA

SEQ ID NO: 114765 - DNA, 120 bp, synthetic construct
  source 1..120: mol_type = other DNA
aaatgggagaaaatttttgcaacctactcatctgacaaagggctattatccagaatctacaatgaactgaaacaaatttacaagaaaaaaaacaaacaaccccatcaaaaagtgggcaaa

SEQ ID NO: 114766 - DNA, 120 bp, synthetic construct
  source 1..120: mol_type = other DNA
tcaatagaaaaagagggaatcctccctaactcattttatgaggccagcatcatcctgataccaaagcctggcagagacacaaccaaaaaagacaatttgagaccaagatccctgatgaac

SEQ ID NO: 114767 - DNA, 120 bp, synthetic construct; identical to SEQ ID NO: 26943
  source 1..120: mol_type = other DNA

SEQ ID NO: 114768 - DNA, 120 bp, synthetic construct
  source 1..120: mol_type = other DNA
aattcaggttctctgtctttcatgcgctggaagctgctcactctccccagtaaacaagagtcctgggtttgaacaggcccattttcctctaagtggggcctacgttcgagtcagtgtggt

SEQ ID NO: 114769 - DNA, 120 bp, synthetic construct
  source 1..120: mol_type = other DNA
tgtgatgttttacacctgtaatcccaatgctttagaaggctgaggcaggaggatcctttaagcctaggagctcgagaatagcctggacaacatagcaagaccctatctctataaataaaa

SEQ ID NO: 114770 - DNA, 120 bp, synthetic construct; identical to SEQ ID NO: 28449
  source 1..120: mol_type = other DNA

SEQ ID NO: 114771 - DNA, 120 bp, synthetic construct
  source 1..120: mol_type = other DNA
gcctcatcatagtgccccagtgtgcactcacctagcctcatcatagtgccccagtgtgcactcacctggcctcatcatagtgtcccagtatgcgctaacctagcctccccagtgtgcagt

SEQ ID NO: 114772 - DNA, 120 bp, synthetic construct; identical to SEQ ID NO: 1485
  source 1..120: mol_type = other DNA

SEQ ID NO: 114773 - DNA, 120 bp, synthetic construct; identical to SEQ ID NO: 28450
  source 1..120: mol_type = other DNA

SEQ ID NO: 114774 - DNA, 120 bp, synthetic construct; identical to SEQ ID NO: 28451
  source 1..120: mol_type = other DNA

SEQ ID NO: 114775 - DNA, 120 bp, synthetic construct; identical to SEQ ID NO: 28452
  source 1..120: mol_type = other DNA

SEQ ID NO: 114776 - DNA, 120 bp, synthetic construct; identical to SEQ ID NO: 29686
  source 1..120: mol_type = other DNA

SEQ ID NO: 114777 - DNA, 120 bp, synthetic construct; identical to SEQ ID NO: 29687
  source 1..120: mol_type = other DNA

SEQ ID NO: 114778 - DNA, 120 bp, synthetic construct; identical to SEQ ID NO: 35234
  source 1..120: mol_type = other DNA

SEQ ID NO: 114779 - DNA, 120 bp, synthetic construct
  source 1..120: mol_type = other DNA
agtcttgtggaattgtctggaaagacaaggcactccagaactggaaatcccaggccagccagttacttcatccagttatctccccttctcctctattctattctattctattctattcta

SEQ ID NO: 114780 - DNA, 120 bp, synthetic construct
  source 1..120: mol_type = other DNA
ttttgcctcccaccgtgattctgaggcctccccaaccatgtgcaattgtaagtcccgttaaacctctttttttcccagtctcgggtatgtccttattagcagtgtgaaaacagaatacta

SEQ ID NO: 114781 - DNA, 120 bp, synthetic construct; identical to SEQ ID NO: 14099
  source 1..120: mol_type = other DNA

SEQ ID NO: 114782 - DNA, 120 bp, synthetic construct; identical to SEQ ID NO: 14082
  source 1..120: mol_type = other DNA

SEQ ID NO: 114783 - DNA, 120 bp, synthetic construct; identical to SEQ ID NO: 3694
  source 1..120: mol_type = other DNA

SEQ ID NO: 114784 - DNA, 120 bp, synthetic construct; identical to SEQ ID NO: 14084
  source 1..120: mol_type = other DNA

SEQ ID NO: 114785 - DNA, 120 bp, synthetic construct; identical to SEQ ID NO: 14085
  source 1..120: mol_type = other DNA

SEQ ID NO: 114786 - DNA, 120 bp, synthetic construct; identical to SEQ ID NO: 14086
  source 1..120: mol_type = other DNA

SEQ ID NO: 114787 - DNA, 120 bp, synthetic construct; identical to SEQ ID NO: 14087
  source 1..120: mol_type = other DNA

SEQ ID NO: 114788 - DNA, 120 bp, synthetic construct; identical to SEQ ID NO: 14088
  source 1..120: mol_type = other DNA

SEQ ID NO: 114789 - DNA, 120 bp, synthetic construct; identical to SEQ ID NO: 14089
  source 1..120: mol_type = other DNA

SEQ ID NO: 114790 - DNA, 120 bp, synthetic construct; identical to SEQ ID NO: 14090
  source 1..120: mol_type = other DNA

SEQ ID NO: 114791 - DNA, 120 bp, synthetic construct; identical to SEQ ID NO: 14091
  source 1..120: mol_type = other DNA

SEQ ID NO: 114792 - DNA, 120 bp, synthetic construct; identical to SEQ ID NO: 14092
  source 1..120: mol_type = other DNA

SEQ ID NO: 114793 - DNA, 120 bp, synthetic construct; identical to SEQ ID NO: 14093
  source 1..120: mol_type = other DNA

SEQ ID NO: 114794 - DNA, 120 bp, synthetic construct; identical to SEQ ID NO: 14094
  source 1..120: mol_type = other DNA

SEQ ID NO: 114795 - DNA, 120 bp, synthetic construct; identical to SEQ ID NO: 14095
  source 1..120: mol_type = other DNA

SEQ ID NO: 114796 - DNA, 120 bp, synthetic construct; identical to SEQ ID NO: 14096
  source 1..120: mol_type = other DNA

SEQ ID NO: 114797 - DNA, 120 bp, synthetic construct
  source 1..120: mol_type = other DNA
gtcacaggacaggtctcaggtgggtcacaggtcctgagtgggtcacaggtcccgggtgggtcacaggcatcccgggtgggtcacaggtcccgagtgggtcacaggccccgggtgagtcac

SEQ ID NO: 114798 - DNA, 120 bp, synthetic construct
  source 1..120: mol_type = other DNA
actgtcaacattagacagatccatgagacagaaagttaacaaagatatccaggaattgaactcagctctgcacgaagcggacctaatagagatctacagaactctccaccccaaatcaac

SEQ ID NO: 114799 - DNA, 120 bp, synthetic construct
  source 1..120: mol_type = other DNA
ccagaggtacaaggaggaactggtaccattccttctgaaacgattccaatcaatagaaaaagagggaatcctccctaactcattttatgaggccagcatcatcctgataccaaagcctgg

SEQ ID NO: 114800 - DNA, 120 bp, synthetic construct
  source 1..120: mol_type = other DNA
aaaaaagtactttaaagttcatatggaaccaaaaaagagcccacattgccaaatcaatcctaagccaaaagaacaaagctggaggcatcacactacctgacttcaaactatactacaagg

SEQ ID NO: 114801 - DNA, 120 bp, synthetic construct
  source 1..120: mol_type = other DNA
aaataggaacacttttacactgttggtgggactgtaaactagttcaaccattgtggaagtcagtgtggtgattcctcagggatctagaactagaaataccatttgacccagccatcctat

SEQ ID NO: 114802 - DNA, 120 bp, synthetic construct; identical to SEQ ID NO: 15512
  source 1..120: mol_type = other DNA

SEQ ID NO: 114803 - DNA, 120 bp, synthetic construct
  source 1..120: mol_type = other DNA
cctttgacaaaattcaacaactcttcatgctaaaaactctcaataaattaggtatcgatgggatgtatctccaaataatcagagctatctatgacaaacgcacagccaatatcatacgga

SEQ ID NO: 114804 - DNA, 120 bp, synthetic construct
  source 1..120: mol_type = other DNA
aatgccacatatctacaaccatctgatctttgacaaacctgacaaaaacaagaaatgggggaaggattccctatttaataaatggtgctgggaaaactggctagccatatgtagaaagct

SEQ ID NO: 114805 - DNA, 120 bp, synthetic construct
  source 1..120: mol_type = other DNA
atatatactgaaacatgcacatagcataagtatgcagctcaaggaattttcagaacattcccatgtaacccagcactcatattaagaaaaagcacattgccaggtgctgtggctcacgcc

SEQ ID NO: 114806 - DNA, 120 bp, synthetic construct
  source 1..120: mol_type = other DNA
aaggaaaaaaaggtatgactaaagaaaggctctggctgggcgcggtcgctcacgcctgtaatcccagcactttgggaagccaagctgggccgatcacctgaggccaggagttctagacca

SEQ ID NO: 114807 - DNA, 120 bp, synthetic construct
  source 1..120: mol_type = other DNA
gaatcacttgaggccaggagttccagaccagcgtggccaacatggtggaactctgtctctactaaaaatacaaaaattatttccaatttcatccatgtctctacaaaggacatgaactca

SEQ ID NO: 114808 - DNA, 120 bp, synthetic construct
  source 1..120: mol_type = other DNA
atcaggcgatatacctaatgctagatgacgagttagtgggttcagtgcgccagcatggcacatgtatacatatgtaactaacctgcacaatgtgcacatgtaccctaaaacttaaagtat

SEQ ID NO: 114809 - DNA, 120 bp, synthetic construct; identical to SEQ ID NO: 6392
  source 1..120: mol_type = other DNA

SEQ ID NO: 114810 - DNA, 120 bp, synthetic construct
  source 1..120: mol_type = other DNA
ttgtcataaatagctcttattattttgagatgcgtcccatcagtacctaatttattgaaagttattagcatgaagggctgttgaattttgtcaaaggctttttctgcatctattgagata

SEQ ID NO: 114811 - DNA, 120 bp, synthetic construct
  source 1..120: mol_type = other DNA
gatctttcctgctttctcttgtgggcacctagtgctataaatttcgctctacacactgccttacatgtgtcccagagattctggtatgttgtgtcgttgttctcgttggtttcaaagaac

SEQ ID NO: 114812 - DNA, 120 bp, synthetic construct
  source 1..120: mol_type = other DNA
gctataaattttttttttaaatttattattattatactttaagttttagggtacatgtgcacaatgtgcaggttagttacatatgtatacatgtgccatgctggtgcgctgcacccacta

SEQ ID NO: 114813 - DNA, 120 bp, synthetic construct
  source 1..120: mol_type = other DNA
cctgttcactgtgatggtagtttcttttgctgtgcagaagctctttagtttaattagctctcatttgtcaattttggctttggttgccattgcttttggtgttttagacatgaagtcctt

SEQ ID NO: 114814 - DNA, 120 bp, synthetic construct
  source 1..120: mol_type = other DNA
agttctggctagggcaattaagcaggagaaggaaataaagggtattcagttaggaaaagaggaagtcaaattgtccctgtttgcagacgacatgattgtatatctagaaaaccccattgt

SEQ ID NO: 114815 - DNA, 120 bp, synthetic construct; identical to SEQ ID NO: 32897
  source 1..120: mol_type = other DNA

SEQ ID NO: 114816 - DNA, 120 bp, synthetic construct; identical to SEQ ID NO: 32898
  source 1..120: mol_type = other DNA

SEQ ID NO: 114817 - DNA, 120 bp, synthetic construct; identical to SEQ ID NO: 32899
  source 1..120: mol_type = other DNA

SEQ ID NO: 114818 - DNA, 120 bp, synthetic construct; identical to SEQ ID NO: 24572
  source 1..120: mol_type = other DNA

SEQ ID NO: 114819 - DNA, 120 bp, synthetic construct; identical to SEQ ID NO: 24573
  source 1..120: mol_type = other DNA

SEQ ID NO: 114820 - DNA, 120 bp, synthetic construct
  source 1..120: mol_type = other DNA
cagaaaactgtctggcccagggttggacacctcacccaagtagtaacaaatcattactggctgaccagattttctcttgataatttgaactaaaagagatactggttgtcaagcgatagt

SEQ ID NO: 114821 - DNA, 120 bp, synthetic construct
  source 1..120: mol_type = other DNA
tacttcagcccctcaagtagctggcactacaggcatgtaacactgagccctgactagatattactaaattctatgttgaacacatagagaaatagaaaccaactagctccttgctattca

SEQ ID NO: 114822 - DNA, 120 bp, synthetic construct; identical to SEQ ID NO: 11675
  source 1..120: mol_type = other DNA

SEQ ID NO: 114823 - DNA, 120 bp, synthetic construct
  source 1..120: mol_type = other DNA
gaggtgttgctcccgtactgggatctgcttgtacgcctctccgcggcccctccttgcattcccagttccctcctgtaccttggggccctgaaacttgcgcattatgagagctggacgcga

SEQ ID NO: 114824 - DNA, 120 bp, synthetic construct
  source 1..120: mol_type = other DNA
gaaatatgctgaaaagggcaggctttggagttagggagacctgggggcaatccagattcttccacccagtagctgtgtggctttcatctctccaggtttatgtagcctcatggatcagtt

SEQ ID NO: 114825 - DNA, 120 bp, synthetic construct
  source 1..120: mol_type = other DNA
cccaacattcagctcacattgtagcccaagagatggggagcacagactggaatgagtaatgggagagtagcctccagtctgcccggatttgaatcctaactcttcctcttagaagctgtg

SEQ ID NO: 114826 - DNA, 120 bp, synthetic construct
  source 1..120: mol_type = other DNA
tttatggttgtgacctcactgccctaagactgtctacttctgaccccacaagggctagcactgccctcagaaagctcagccactgtttgctgaatttaattaaaaatacatctctaataa

SEQ ID NO: 114827 - DNA, 120 bp, synthetic construct
  source 1..120: mol_type = other DNA
actagttttcattctgttactgtttctttttcttcagtattccagtaccagtacccggagagaacatgtcaaagttaaaaccagctcccagccaggcttcctggaacggctgagcgagac

SEQ ID NO: 114828 - DNA, 120 bp, synthetic construct
  source 1..120: mol_type = other DNA
cagcactttgggaggccaaggaggcaggatcgcttgaggtcagaagttcgaaagcagcctgggcaacatagcaagaccccatttctacaaaaaacttaaacataaaaataaaattaaaaa

SEQ ID NO: 114829 - DNA, 120 bp, synthetic construct
  source 1..120: mol_type = other DNA
ttctctatttcttcctcttccagtccagcttcccctgagccaggctttctgggctgacgtgaatgttatcctttatttttttggtttctttgattctgtttgaagcttttgtctgatcca

SEQ ID NO: 114830 - DNA, 120 bp, synthetic construct
  source 1..120: mol_type = other DNA
ctgtctgtcaggagtgagtgccctgtcttggggctggtgtagagaaggcatctgccgtatctggggagtctgatctggtagccctgaggttgcttcctgctcagatgcttagagattaga

SEQ ID NO: 114831 - DNA, 120 bp, synthetic construct
  source 1..120: mol_type = other DNA
gctagagagcaggccttgttcagcaatggtctgggctgtgccagtaagatggttgggatggaatgctctgggaggggctagtgaggggtgtaaagtccatgcaagatacatctgacagca

SEQ ID NO: 114832 - DNA, 120 bp, synthetic construct
  source 1..120: mol_type = other DNA
ggacgtggatggccgtaaccttgatggaagggaaaagggctaaggccactcccagtgctgtggtcactctgacttggtgggagagggcacagggaaagcttcctggaggagatggtctaa

SEQ ID NO: 114833 - DNA, 120 bp, synthetic construct
  source 1..120: mol_type = other DNA
atccatggaccccacgttaagaagggcagctcaaaaggggtctcatagtcgcaccttatgacaggtgttccagtcacacacagaccctctccccaagcccgttttgatctgtcaataatt

SEQ ID NO: 114834 - DNA, 120 bp, synthetic construct
  source 1..120: mol_type = other DNA
ctctgataccagtggacgtcagagtagaacatccgtttctgcagtgatcaagcagggcctctgacaagtgagttttgctgacgagaaggggttaaccctagaagaatcagtgatcagtca

SEQ ID NO: 114835 - DNA, 120 bp, synthetic construct
  source 1..120: mol_type = other DNA
ttctaaaattaggaggcccagtccaggccttgctctctctcccagggctgaggcccagctcacgcagccgcccctccagagaggagtggatggggcccatggcttaggtaatgccccaga

SEQ ID NO: 114836 - DNA, 120 bp, synthetic construct
  source 1..120: mol_type = other DNA
gatagaagcagggccagtgaggctcctgcgggcagacagtggtaagagactcgggaatatgtggcctggactggatggggtggtaggggaggagcgagccatgtctttcccatagatgtg

SEQ ID NO: 114837 - DNA, 120 bp, synthetic construct
  source 1..120: mol_type = other DNA
tgcaggaggtgtttcatagagaactaaggagcaactccatgaagacctggggcctgcgggcagctggctggatggccatgttcatgggcctcaaccttatgacacggatcctctacacct

SEQ ID NO: 114838 - DNA, 120 bp, synthetic construct
  source 1..120: mol_type = other DNA
aggactctccctgagcctttctttggacagctgaattgtgctcagaaagaccagtgacgtggtgggcacattagcgagagatgagcatttaaacggaatcctctttcttgcctgtgtgac

SEQ ID NO: 114839 - DNA, 120 bp, synthetic construct
  source 1..120: mol_type = other DNA
aattcctcatgaatttagctggattctgggctttatcctattggaccaatagtctgtgagattcttgaggagaggccaatgcttaggctaatttatttcctctagcacctgctggttcag

SEQ ID NO: 114840 - DNA, 120 bp, synthetic construct
  source 1..120: mol_type = other DNA
ttggtgttcaccagctcatgtcttccccacatctcttcttgccagtaagcagctttggtgggcagcagcagctcatgaatggcaagctgacagcttctcctgctgtttccttcctctctt

SEQ ID NO: 114841 - DNA, 120 bp, synthetic construct
  source 1..120: mol_type = other DNA
gcacttgaagatggtttaaaagattaaagaaacgattaagagaaaaggttggaagctttatactaaatgggctccttcatggtgacgccccgtcaaccacaatcaagaactgaggcctga

SEQ ID NO: 114842 - DNA, 120 bp, synthetic construct; identical to SEQ ID NO: 24983
  source 1..120: mol_type = other DNA

SEQ ID NO: 114843 - DNA, 120 bp, synthetic construct; identical to SEQ ID NO: 24984
  source 1..120: mol_type = other DNA

SEQ ID NO: 114844 - DNA, 120 bp, synthetic construct; identical to SEQ ID NO: 24985
  source 1..120: mol_type = other DNA

SEQ ID NO: 114845 - DNA, 120 bp, synthetic construct
  source 1..120: mol_type = other DNA
ttgctgattgctagcacagcagtctgagatcaaactgcaaggtggcagcgaggttgggggaggagcgcccgccattgtccaggcttgcttaggtaaacaaagcagctgagaagctcgaac

SEQ ID NO: 114846 - DNA, 120 bp, synthetic construct
  source 1..120: mol_type = other DNA
tccaagaaatatgggactatgtgaaaagaccaaatctacgtctgattggtgtacctgaaagtgacagggagaatggaaccaagttggaaaacactcttcaggatattatccaggagaact

SEQ ID NO: 114847 - DNA, 120 bp, synthetic construct
  source 1..120: mol_type = other DNA
gaaagtcaacaaggatacccaggaattgaacccagctctgcaccaagtggacctaatagacatctgcagaactctccaccccaaatcaacagaatatacatttttttcagcaccacacca

SEQ ID NO: 114848 - DNA, 120 bp, synthetic construct
  source 1..120: mol_type = other DNA
tcacagccgaattctaccagaggtacaaggaggaactggtaccattccttctgaaactattccaatcaatagaaaaagagggaatcctccctaactcattttatgaggccagtatcatcc

SEQ ID NO: 114849 - DNA, 120 bp, synthetic construct
  source 1..120: mol_type = other DNA
tatcaagctaccaatgactttcttcacagaattgaaaaaactactttaaagttcatatggaaccaaaaaagagcccgcattgccaagtcaatcctaagccaaaagaacaaagctggaggc

SEQ ID NO: 114850 - DNA, 120 bp, synthetic construct
  source 1..120: mol_type = other DNA
atctagaactagaaataccatttgacccagccatcccattactgggtatatacccaaaggactataaatcatgctgctataaagacacatgcacacgtatgtttattgtgtcattattct

SEQ ID NO: 114851 - DNA, 120 bp, synthetic construct; identical to SEQ ID NO: 24507
  source 1..120: mol_type = other DNA

SEQ ID NO: 114852 - DNA, 120 bp, synthetic construct; identical to SEQ ID NO: 24508
  source 1..120: mol_type = other DNA

SEQ ID NO: 114853 - DNA, 120 bp, synthetic construct
  source 1..120: mol_type = other DNA
ttttggctacataaatgtcttcttttgagaagtgtctgttcatatccttcgcccactttttgatggggttgtttgtttttttcttgtaaatttgtttgagttcattgtagattctggata

SEQ ID NO: 114854 - DNA, 120 bp, synthetic construct
  source 1..120: mol_type = other DNA
aaaaatcacaagcattcttatacaccaataacagacaaacagagagccaaatcatgaattaactcccattcacaattgcttcaaagagaataaaatacctaggaatccaacttacaaggg

SEQ ID NO: 114855 - DNA, 120 bp, synthetic construct; identical to SEQ ID NO: 12458
  source 1..120: mol_type = other DNA

SEQ ID NO: 114856 - DNA, 120 bp, synthetic construct
  source 1..120: mol_type = other DNA
caatctcggcactttgggaggccaaggcaggcagctgggaggtggaggttgtagccgagatcacgccactgcactccggcctgggcaccattgagcactgagtgaacgagactccgtctg

SEQ ID NO: 114857 - DNA, 120 bp, synthetic construct
  source 1..120: mol_type = other DNA
cgctaagaaagaaatgctaaagggaattcttcaagctgaaaggaatgatacccgatgaaactgagacctacaagaaaaactgaagaggccaggtgcaatggctaacacttgtaatcccag

SEQ ID NO: 114858 - DNA, 120 bp, synthetic construct
  source 1..120: mol_type = other DNA
atgttttatatgcttttttgtacctgagataaaatttgcaatgaaagaaattattactatttttttttgggagatggagtctcgctctgtcgcccaggctggagtgcagtggcacgatct

SEQ ID NO: 114859 - DNA, 120 bp, synthetic construct
  source 1..120: mol_type = other DNA
gtacttgagattagggagtggtgatgccttcaagcatctgtttaacaaagcacatcttgcaccgcccttaatccattcaaccctgagtggatacaccacatgtttcagagagcacagggt

SEQ ID NO: 114860 - DNA, 120 bp, synthetic construct
  source 1..120: mol_type = other DNA
gggtggcggccgggtagaggctgcaatctcggcactttgggaggccaaggcaggctgctgggaggtcgaggttgtagcgagccgagatcacgccactgcactccagcctgggcaccattg

SEQ ID NO: 114861 - DNA, 120 bp, synthetic construct
  source 1..120: mol_type = other DNA
cgtgaagaatgtagaagcctcaggagccgatgcgatcaactggaagaaagggtatcagcgatggaagatgaaatgaatgaaatgaagcgagaagggaagtttagagaaaaaagaataaaa

SEQ ID NO: 114862 - DNA, 120 bp, synthetic construct
  source 1..120: mol_type = other DNA
caaagctttattcttggggaactctcagttttgtagactaagaaaaaggcagcttgaattggagatgtgggtttttttgtctttttttttgagatggagtctcgctctgtcgcccagtct

SEQ ID NO: 114863 - DNA, 120 bp, synthetic construct; identical to SEQ ID NO: 14501
  source 1..120: mol_type = other DNA

SEQ ID NO: 114864 - DNA, 120 bp, synthetic construct; identical to SEQ ID NO: 14502
  source 1..120: mol_type = other DNA

SEQ ID NO: 114865 - DNA, 120 bp, synthetic construct; identical to SEQ ID NO: 14503
  source 1..120: mol_type = other DNA

SEQ ID NO: 114866 - DNA, 120 bp, synthetic construct; identical to SEQ ID NO: 14504
  source 1..120: mol_type = other DNA

SEQ ID NO: 114867 - DNA, 120 bp, synthetic construct
  source 1..120: mol_type = other DNA
aaaagaaaaagcaatttaccttttcagctaattcttccgctgttatctgtgggtcatacggaatggggtcgcctaaataggtccgtaacttcactggaaaacctccatacattggagcaa

SEQ ID NO: 114868 - DNA, 120 bp, synthetic construct
  source 1..120: mol_type = other DNA
ctcccaaagtgctaggattacaggcatgagccaccgctcccggccgctacaaaatatttttaaaaacaacaagaagtgacaaataaaccaaagcaaatgctatttccttaggtagttaat

SEQ ID NO: 114869 - DNA, 120 bp, synthetic construct; identical to SEQ ID NO: 6284
  source 1..120: mol_type = other DNA

SEQ ID NO: 114870 - DNA, 120 bp, synthetic construct; identical to SEQ ID NO: 21310
  source 1..120: mol_type = other DNA

SEQ ID NO: 114871 - DNA, 120 bp, synthetic construct; identical to SEQ ID NO: 21311
  source 1..120: mol_type = other DNA

SEQ ID NO: 114872 - DNA, 120 bp, synthetic construct; identical to SEQ ID NO: 21312
  source 1..120: mol_type = other DNA

SEQ ID NO: 114873 - DNA, 120 bp, synthetic construct
  source 1..120: mol_type = other DNA
gtgatgagagggcgcaggagggcagaagcgggcagaacgcggcagtgggcgctttttctgagcctcccctcaagggaccctgctcagccctttacctgctgcgtcccggatctcctgttc

SEQ ID NO: 114874 - DNA, 120 bp, synthetic construct
  source 1..120: mol_type = other DNA
aggacgagcaactctgcgcctgggtgtgacccggcggccgctgcgaaaccccgggaggcctccgagctcgcgcgcgaccccatcgcgtggcccggcccggaaaactgagggtcgcccccg

SEQ ID NO: 114875 - DNA, 120 bp, synthetic construct
  source 1..120: mol_type = other DNA
atctctattaaaaaaaattaaaaatatacagttctaggcttgactcagtggctcatatctgtaattccggcactttgggaggctgaggtgggaggatttgcttgagccccagagttctag

SEQ ID NO: 114876 - DNA, 120 bp, synthetic construct
  source 1..120: mol_type = other DNA
tctttccttttccctctgatccattttctaccctcttaaaatactgagaacagcctgggcaacatagaccctgtctccaaaaaaaaaattgtcaggcatagtggcacatacctgtgatcc

SEQ ID NO: 114877 - DNA, 120 bp, synthetic construct
  source 1..120: mol_type = other DNA
gcgggagaatcgcttgaacccgagagacggaggttgtggtgagccatagcaccactgcactccagcctgggcaacaaagcgagactccatcttttttttttttttttttttttttttttt

SEQ ID NO: 114878 - DNA, 120 bp, synthetic construct; identical to SEQ ID NO: 24273
  source 1..120: mol_type = other DNA

SEQ ID NO: 114879 - DNA, 120 bp, synthetic construct; identical to SEQ ID NO: 24274
  source 1..120: mol_type = other DNA

SEQ ID NO: 114880 - DNA, 120 bp, synthetic construct
  source 1..120: mol_type = other DNA
aggtgtgtgtgtccaggaatttgtccatttcttctagacttcctagtttatgtgcccagaggtgttcacaatattctctggtggttgtttgtatttctgtggggtcagtgataaatattc

SEQ ID NO: 114881 - DNA, 120 bp, synthetic construct
  source 1..120: mol_type = other DNA
ctgtctcaatgatctgtctaatattgtcagtggggtgttaaaaagtctcccactatcattgcctggcagtctaagtctctgtgaaggcctctaagaacttgctttataaatctgggtgct

SEQ ID NO: 114882 - DNA, 120 bp, synthetic construct; identical to SEQ ID NO: 35671
  source 1..120: mol_type = other DNA

SEQ ID NO: 114883 - DNA, 120 bp, synthetic construct
  source 1..120: mol_type = other DNA
cccaaatgcgcctgcaggacaaggctggagaccctggttgggaggtctcacccagtcaggaggaacgggatcagggaactgcttaaagaagcagtctgtccatgctttcacagatcagct

SEQ ID NO: 114884 - DNA, 120 bp, synthetic construct; identical to SEQ ID NO: 35672
  source 1..120: mol_type = other DNA

SEQ ID NO: 114885 - DNA, 120 bp, synthetic construct; identical to SEQ ID NO: 35673
  source 1..120: mol_type = other DNA

SEQ ID NO: 114886 - DNA, 120 bp, synthetic construct; identical to SEQ ID NO: 35674
  source 1..120: mol_type = other DNA

SEQ ID NO: 114887 - DNA, 120 bp, synthetic construct; identical to SEQ ID NO: 35675
  source 1..120: mol_type = other DNA

SEQ ID NO: 114888 - DNA, 120 bp, synthetic construct; identical to SEQ ID NO: 35676
  source 1..120: mol_type = other DNA

SEQ ID NO: 114889 - DNA, 120 bp, synthetic construct; identical to SEQ ID NO: 35677
  source 1..120: mol_type = other DNA

SEQ ID NO: 114890 - DNA, 120 bp, synthetic construct; identical to SEQ ID NO: 35678
  source 1..120: mol_type = other DNA

SEQ ID NO: 114891 - DNA, 120 bp, synthetic construct; identical to SEQ ID NO: 35679
  source 1..120: mol_type = other DNA

SEQ ID NO: 114892 - DNA, 120 bp, synthetic construct; identical to SEQ ID NO: 35680
  source 1..120: mol_type = other DNA

SEQ ID NO: 114893 - DNA, 120 bp, synthetic construct; identical to SEQ ID NO: 35681
  source 1..120: mol_type = other DNA

SEQ ID NO: 114894 - DNA, 120 bp, synthetic construct
  source 1..120: mol_type = other DNA
caaagaaggcagacaaatggcaaatgggtatatttttaaatgctccacatcactaatcattagggaaatgcaaatcaaaaccacaatatcacctcaccccagttacaatggctatcatta

SEQ ID NO: 114895 - DNA, 120 bp, synthetic construct; identical to SEQ ID NO: 35682
  source 1..120: mol_type = other DNA

SEQ ID NO: 114896 - DNA, 120 bp, synthetic construct
  source 1..120: mol_type = other DNA
taaaagagcccacatcgccaagtcaatcctaagccaaaagaacaaacctggaggcatcacgctacctgacttcaaactatactacaaggctacagtaaccaaaacagcatggtactggta

SEQ ID NO: 114897 - DNA, 120 bp, synthetic construct
  source 1..120: mol_type = other DNA
aaaggattataaatcatgctgctataaggacacatgcacacgtatgtttatagctgcactattcacaatagcaaagacttggaaccaacctaaatgtccaacaacgatagactggattaa

SEQ ID NO: 114898 - DNA, 120 bp, synthetic construct; identical to SEQ ID NO: 35683
  source 1..120: mol_type = other DNA

SEQ ID NO: 114899 - DNA, 120 bp, synthetic construct; identical to SEQ ID NO: 35684
  source 1..120: mol_type = other DNA

SEQ ID NO: 114900 - DNA, 120 bp, synthetic construct; identical to SEQ ID NO: 35685
  source 1..120: mol_type = other DNA

SEQ ID NO: 114901 - DNA, 120 bp, synthetic construct; identical to SEQ ID NO: 35686
  source 1..120: mol_type = other DNA

SEQ ID NO: 114902 - DNA, 120 bp, synthetic construct
  source 1..120: mol_type = other DNA
tgtgttctcattgttcaattcccacctatgagtgagaacatgcggtgtttggtttgttgttcttgtgatagtttgctgagaatgatggtttccagctccatccatgtccctacaaaggac

SEQ ID NO: 114903 - DNA, 120 bp, synthetic construct; identical to SEQ ID NO: 35687
  source 1..120: mol_type = other DNA

SEQ ID NO: 114904 - DNA, 120 bp, synthetic construct
  source 1..120: mol_type = other DNA
tttgatggggttgtttgtttttttcttgtaaatttgttggagttcattgtagattctggatattagccctttgtcagatgagtaggttgcgaaaattttctcccatgttgtaggttgcct

SEQ ID NO: 114905 - DNA, 120 bp, synthetic construct; identical to SEQ ID NO: 66523
  source 1..120: mol_type = other DNA

SEQ ID NO: 114906 - DNA, 120 bp, synthetic construct
  source 1..120: mol_type = other DNA
cctctacacactgctttgaatgcgtcccagagattctggtatgtgatgtctttgttctcgttggtttcaaagaacatctttatttctgccttcatttcgttatgtacccagtagtcattc

SEQ ID NO: 114907 - DNA, 120 bp, synthetic construct
  source 1..120: mol_type = other DNA
gttgatgcagtttcttcctagtctcgatggtctttacattttggcatgattttgcagcggctggtaccggttgttcctttccatgttgagcacttccttcaggagctcttttagggcagg

SEQ ID NO: 114908 - DNA, 120 bp, synthetic construct; identical to SEQ ID NO: 66409
  source 1..120: mol_type = other DNA

SEQ ID NO: 114909 - DNA, 120 bp, synthetic construct
  source 1..120: mol_type = other DNA
ctgtacaccggagctgttcctattcggccatcttggctcctccccccaacaattgtacttttcttacaatttagcaaaagcaccttacatattaaggatatttagtcttcggcatacatt

SEQ ID NO: 114910 - DNA, 120 bp, synthetic construct
  source 1..120: mol_type = other DNA
agccatgcttcctgtacagcctatggaactgtgagtcaattaaacttcttttcttcataaattaaccattctctgggagttctttatggcagtgtgagaacaggctaatacaggaggtcc

SEQ ID NO: 114911 - DNA, 120 bp, synthetic construct; identical to SEQ ID NO: 35688
  source 1..120: mol_type = other DNA

SEQ ID NO: 114912 - DNA, 120 bp, synthetic construct; identical to SEQ ID NO: 35689
  source 1..120: mol_type = other DNA

SEQ ID NO: 114913 - DNA, 120 bp, synthetic construct; identical to SEQ ID NO: 35690
  source 1..120: mol_type = other DNA

SEQ ID NO: 114914 - DNA, 120 bp, synthetic construct
  source 1..120: mol_type = other DNA
cctcacacggctgggtactcctctgagacaaaacttccagaggaacgatcagacagcagcattcgcggttcatgaaaatccgctgttctgcagacaccgctgctgatacccaggcaaaca

SEQ ID NO: 114915 - DNA, 120 bp, synthetic construct
  source 1..120: mol_type = other DNA
gcagccagagagaaaggttgggttacccgcaaagggaagcccatcagactaacagtggatctctcggcagaaaccctacaagccagaagagagtgggggccaatattcaacattcttaaa

SEQ ID NO: 114916 - DNA, 120 bp, synthetic construct
  source 1..120: mol_type = other DNA
ataacaaactgtctctcagaccacagtgcaatcaaactagaactcaggattaagaaactcactcaaaaccgctcaactacatggagactgaacaacctgctcctgaatgactactgggta

SEQ ID NO: 114917 - DNA, 120 bp, synthetic construct
  source 1..120: mol_type = other DNA
aatcaacaaaaaaagagggaatcctccctaactcattttatgaggccagcatcatcctgataccaaagccgggcagagacacaaccaaaaaagagaattttagaccaatatccttgatga

SEQ ID NO: 114918 - DNA, 120 bp, synthetic construct
  source 1..120: mol_type = other DNA
tcatagaattagaaaaaactactttaaagttcatatggaaccaaaaaagagcccgcattgccaagtcaatcctaagccaaaagaacaaagctggaggcatcacgctacctgacttcaaac

SEQ ID NO: 114919 - DNA, 120 bp, synthetic construct
  source 1..120: mol_type = other DNA
ccagccatcccattactgggtatatacccaaaggattataaatcatgctgctataaggacccatgcacacgtatgtttattgcggcactattcacaatagcgaagacttggaaccaaccc

SEQ ID NO: 114920 - DNA, 120 bp, synthetic construct; identical to SEQ ID NO: 35691
  source 1..120: mol_type = other DNA

SEQ ID NO: 114921 - DNA, 120 bp, synthetic construct; identical to SEQ ID NO: 35692
  source 1..120: mol_type = other DNA

SEQ ID NO: 114922 - DNA, 120 bp, synthetic construct; identical to SEQ ID NO: 32851
  source 1..120: mol_type = other DNA

SEQ ID NO: 114923 - DNA, 120 bp, synthetic construct
  source 1..120: mol_type = other DNA
ctctccagcacctgttgtttcctgactttttaatgatcgccagtctaactggtgtgagatggtatctcattgtggttttgatttgcatttctctgatggccagtgatgatgagcattttt

SEQ ID NO: 114924 - DNA, 120 bp, synthetic construct
  source 1..120: mol_type = other DNA
gaactttaaagtagttttttccaattctgtgaagaaagtcattggtagcttgttggggatggcattgaatctgtaaattaccttgggcagtatggccattttcacgatattgattcttcc

SEQ ID NO: 114925 - DNA, 120 bp, synthetic construct
  source 1..120: mol_type = other DNA
gttcatcaaggatattggtcgaaaattctctttttttgttgtgtctctgcctggctttggtatcagaatgatgctggcctcataaaatgagttagggaggattccgtctttttctattga

SEQ ID NO: 114926 - DNA, 120 bp, synthetic construct
  source 1..120: mol_type = other DNA
tgagttcaattcctgggtatccttgttgactttctgtctcgttgatctgtctaatgttgacagtggggtgttaaagtctcctattattaatgtgtgggagtctaagtctctctgtaggtc

SEQ ID NO: 114927 - DNA, 120 bp, synthetic construct
  source 1..120: mol_type = other DNA
tgaatctgaatgttggcctgccttgctagattggagaagttctcctggataatatcctgcagagtgttttccaacttggttccattctccccatcactttcaggtacaccaatcagacgt

SEQ ID NO: 114928 - DNA, 120 bp, synthetic construct
  source 1..120: mol_type = other DNA
gctttgtttacctaatcaagcctgggcaatggcgggcgcccctcccccagcctcgctgccgccttgcagtttgatctcagactgctgtgctagcaatcagcgagactctgtgggcgtagg

SEQ ID NO: 114929 - DNA, 120 bp, synthetic construct; identical to SEQ ID NO: 15308
  source 1..120: mol_type = other DNA

SEQ ID NO: 114930 - DNA, 120 bp, synthetic construct
  source 1..120: mol_type = other DNA
tcaagcgattctcctgcctcagcctcttgagtagctgggactacaggcatgtgccaccacacccaactaatttttaggattacagcttttcttaggttaattttattttattcactttaa

SEQ ID NO: 114931 - DNA, 120 bp, synthetic construct
  source 1..120: mol_type = other DNA
gaattgcttgaaccaggagatggaggttacagtgagccgacacagtgccactgcactccagcctgggcaacatgtcaagtgagactttgtctcaaaaaaaaaaaaaaaagttttttttat

SEQ ID NO: 114932 - DNA, 120 bp, synthetic construct; identical to SEQ ID NO: 15309
  source 1..120: mol_type = other DNA

SEQ ID NO: 114933 - DNA, 120 bp, synthetic construct
  source 1..120: mol_type = other DNA
tgattattttttatttttttattttttatgagatggagtctcactcttgtcacccagactgtagtgcagtggcacgatctgggctcgatgcaacctctgcctcccaggttcaagcaattt

SEQ ID NO: 114934 - DNA, 120 bp, synthetic construct; identical to SEQ ID NO: 25477
  source 1..120: mol_type = other DNA

SEQ ID NO: 114935 - DNA, 120 bp, synthetic construct; identical to SEQ ID NO: 25478
  source 1..120: mol_type = other DNA

SEQ ID NO: 114936 - DNA, 120 bp, synthetic construct; identical to SEQ ID NO: 25479
  source 1..120: mol_type = other DNA

SEQ ID NO: 114937 - DNA, 120 bp, synthetic construct
  source 1..120: mol_type = other DNA
cagtggcaagttggataaaaacacaagattctacaatctgctgccttcaaaagaaccatctcacatgtaatgacacccataggctcaaagtaaagggttggagaaagatccgtcatgcaa

SEQ ID NO: 114938 - DNA, 120 bp, synthetic construct; identical to SEQ ID NO: 25480
  source 1..120: mol_type = other DNA

SEQ ID NO: 114939 - DNA, 120 bp, synthetic construct
  source 1..120: mol_type = other DNA
aatcaacagaatatacatttttttcagcaccacaccacacctattccaaaattgaccacatacttggaagtaaagctctcctcaggaaatgtaaaataacagaaattataacaaactatc

SEQ ID NO: 114940 - DNA, 120 bp, synthetic construct
  source 1..120: mol_type = other DNA
aatagtatacccctttatataagagtactgaagcttagtgaagtagaaaagaagtttgctgaagatcacctaaatggtgctgggaaaactggctagccatatgtagaaagctgaaactgg

SEQ ID NO: 114941 - DNA, 120 bp, synthetic construct
  source 1..120: mol_type = other DNA
tcatgtcctttgtagggacatggatgaaattggaaatcatcattctcagtaaactatcgcaagaacagaaaaccagacaccgcatattctcactcataggtgggaattgaacaatgagaa

SEQ ID NO: 114942 - DNA, 120 bp, synthetic construct
  source 1..120: mol_type = other DNA
aaggatttggaataatacatatgcttagttgataaagcagtggcagagtttcagaggactgactccaactttgaaaaaagttctgctctgagtaaaatgctatcaaacagcatcacatgc

SEQ ID NO: 114943 - DNA, 120 bp, synthetic construct
  source 1..120: mol_type = other DNA
tgggtatctacccagaagaaaagaagtcattattcaaaaaagaaacttgcacacgcgtgtttatagcagcacaattcgcaattgcagaatcgtggaaccaacccaaatgcccatcaatca

SEQ ID NO: 114944 - DNA, 120 bp, synthetic construct
  source 1..120: mol_type = other DNA
aactcaggaatggaaaaccaaacatcatatattctcgctgatatgtgggagctaaactatgaggatgcaaaggcatatgaatgatgcaatggacttgggggactcaggggaaagggtggg

SEQ ID NO: 114945 - DNA, 120 bp, synthetic construct
  source 1..120: mol_type = other DNA
ctgcagatagaggtaaaacataaaatttaaagttttagaaatatatatttttagtttgagtctaggtgctgtggctcacgcctgtaatcccagcactttgggaggctgagacgggcagat

SEQ ID NO: 114946 - DNA, 120 bp, synthetic construct; identical to SEQ ID NO: 12387
  source 1..120: mol_type = other DNA

SEQ ID NO: 114947 - DNA, 120 bp, synthetic construct; identical to SEQ ID NO: 23021
  source 1..120: mol_type = other DNA

SEQ ID NO: 114948 - DNA, 120 bp, synthetic construct; identical to SEQ ID NO: 23022
  source 1..120: mol_type = other DNA

SEQ ID NO: 114949 - DNA, 120 bp, synthetic construct; identical to SEQ ID NO: 23023
  source 1..120: mol_type = other DNA

SEQ ID NO: 114950 - DNA, 120 bp, synthetic construct; identical to SEQ ID NO: 23024
  source 1..120: mol_type = other DNA

SEQ ID NO: 114951 - DNA, 120 bp, synthetic construct; identical to SEQ ID NO: 23025
  source 1..120: mol_type = other DNA

SEQ ID NO: 114952 - DNA, 120 bp, synthetic construct
  source 1..120: mol_type = other DNA
gtgttctggataacaaggccctggggactccttgagtcttggagggactgacaccactcagggaccccagattctcacacaaagaaaaggaagatgggaggggcagggctggaagtgagt

SEQ ID NO: 114953 - DNA, 120 bp, synthetic construct
  source 1..120: mol_type = other DNA
agggggtgaggggtgagtgagggggtgagggggtgaggggtgagtgagggggcgagggggtgagtgaggaggtgagcgggtgagtgaggaggtgagggggtgagtgaggagatgaggggg

SEQ ID NO: 114954 - DNA, 120 bp, synthetic construct
  source 1..120: mol_type = other DNA
atgagggggagagtgaggaggtgaggaggtgagtgagggttgagggagtgaggaggtgagtgagggttgagggagtgagggggtgagtgagggggcgagggggtgggtggtgaatgagag

SEQ ID NO: 114955 - DNA, 120 bp, synthetic construct; identical to SEQ ID NO: 23130
  source 1..120: mol_type = other DNA

SEQ ID NO: 114956 - DNA, 120 bp, synthetic construct
  source 1..120: mol_type = other DNA
ccactgcactccagcctgggcagcagattccatgaatgaaagggagagagagaggagagaaaaaagaaagaaagagagaaagaaagaaggaaagaaggaaagaaagaaagaaagaaagaa

SEQ ID NO: 114957 - DNA, 120 bp, synthetic construct; identical to SEQ ID NO: 12389
  source 1..120: mol_type = other DNA

SEQ ID NO: 114958 - DNA, 120 bp, synthetic construct
  source 1..120: mol_type = other DNA
agatgatggatggacggatgatggatggatgatggatggatggatgatgggtgaatggatggatgatggatgaacggatgatggatggatggatgatggatgaatggatggatggatgat

SEQ ID NO: 114959 - DNA, 120 bp, synthetic construct
  source 1..120: mol_type = other DNA
gatagacggatgatggatggatggatggatgatggatggatgatgcatggatgatggatggatgaatggatggatggatagatggatgatgtatggatggatgatggacagatggatgat

SEQ ID NO: 114960 - DNA, 120 bp, synthetic construct; identical to SEQ ID NO: 23785
  source 1..120: mol_type = other DNA

SEQ ID NO: 114961 - DNA, 120 bp, synthetic construct; identical to SEQ ID NO: 23786
  source 1..120: mol_type = other DNA

SEQ ID NO: 114962 - DNA, 120 bp, synthetic construct; identical to SEQ ID NO: 23787
  source 1..120: mol_type = other DNA

SEQ ID NO: 114963 - DNA, 120 bp, synthetic construct
  source 1..120: mol_type = other DNA
tgtatgtatgtatgtatgtatgtatgtatatatgtatgtatgtatgtatgtatttgagatggggtctcactgtgttgcccaggctggtctcaacatcatgggctcaagcagtccttctgc

SEQ ID NO: 114964 - DNA, 120 bp, synthetic construct
  source 1..120: mol_type = other DNA
cagcactttgagaggctgaggcaggaagatggcttgaagccagtagttccagaccagcctgggcaacatagcaagaccccgtctctaaaaaaaaaaattacgatttttaaaattttctta

SEQ ID NO: 114965 - DNA, 120 bp, synthetic construct
  source 1..120: mol_type = other DNA
aagtcgactcctgccaggtaagcattcaaagggggaaagcgggcaatatttccatgaaatgcccacagccgttcacccagcagttctttgtgtgcagacctagatttttttcctttcttt

SEQ ID NO: 114966 - DNA, 120 bp, synthetic construct
  source 1..120: mol_type = other DNA
ttctcttccctccctccctttccttcccttccctccctacctttccttcctttcctttccttctctctctctctctgtctttctctctgtttctttctttctgacggagtctggctctgt

SEQ ID NO: 114967 - DNA, 120 bp, synthetic construct
  source 1..120: mol_type = other DNA
catgccattatactccagcctgggtgacacagcctgtctctaaaaaaattaaaaaaaaaaaaaaaaatgaaagcagggactttgatggttcacagctgtgccatgtccttgggtgcgtgt

SEQ ID NO: 114968 - DNA, 120 bp, synthetic construct
  source 1..120: mol_type = other DNA
ttcctgctgagttttcctgggataggtcccccatcacaacctactccctggggctcccagggggattcgtggagaggcggcgcccaggggggccttcgtggaggaggtgccctgggtccg

SEQ ID NO: 114969 - DNA, 120 bp, synthetic construct
  source 1..120: mol_type = other DNA
aaaagcccaggaccaggggattcacagctgaattctatcagatgtacaaagaagagttggtaccattcttactgaaactattccaaaaattgaggaggaggtactctgccctaactcatt

SEQ ID NO: 114970 - DNA, 120 bp, synthetic construct; identical to SEQ ID NO: 35057
  source 1..120: mol_type = other DNA

SEQ ID NO: 114971 - DNA, 120 bp, synthetic construct
  source 1..120: mol_type = other DNA
acagtgtggcgattcctcaaagccctaaagacagaaataccatttgactcagcaatcccattactgggtatatacccgaaggaatagaaattgttcaattataaagacacatgcacaggt

SEQ ID NO: 114972 - DNA, 120 bp, synthetic construct; identical to SEQ ID NO: 35058
  source 1..120: mol_type = other DNA

SEQ ID NO: 114973 - DNA, 120 bp, synthetic construct; identical to SEQ ID NO: 35059
  source 1..120: mol_type = other DNA

SEQ ID NO: 114974 - DNA, 120 bp, synthetic construct; identical to SEQ ID NO: 35060
  source 1..120: mol_type = other DNA

SEQ ID NO: 114975 - DNA, 120 bp, synthetic construct; identical to SEQ ID NO: 35061
  source 1..120: mol_type = other DNA

SEQ ID NO: 114976 - DNA, 120 bp, synthetic construct; identical to SEQ ID NO: 35062
  source 1..120: mol_type = other DNA

SEQ ID NO: 114977 - DNA, 120 bp, synthetic construct; identical to SEQ ID NO: 35063
  source 1..120: mol_type = other DNA

SEQ ID NO: 114978 - DNA, 120 bp, synthetic construct; identical to SEQ ID NO: 35064
  source 1..120: mol_type = other DNA

SEQ ID NO: 114979 - DNA, 120 bp, synthetic construct; identical to SEQ ID NO: 35065
  source 1..120: mol_type = other DNA

SEQ ID NO: 114980 - DNA, 120 bp, synthetic construct; identical to SEQ ID NO: 35066
  source 1..120: mol_type = other DNA

SEQ ID NO: 114981 - DNA, 120 bp, synthetic construct
  source 1..120: mol_type = other DNA
actccaaccaacagtgtaaatgtgttcctatttctctgcatcctctccagcatctgttgtttccagacttttagtgatcaccattctaacaggcgtgagatggtatcacattgtggtttt

SEQ ID NO: 114982 - DNA, 120 bp, synthetic construct; identical to SEQ ID NO: 35067
  source 1..120: mol_type = other DNA

SEQ ID NO: 114983 - DNA, 120 bp, synthetic construct
  source 1..120: mol_type = other DNA
aaatgtgggctcttttttggttccatatgaactttaaaggagttttttccaattctgtgaagaaagtcattggtagcttgatggggatggcattgaatctataaattaccttgggcagta

SEQ ID NO: 114984 - DNA, 120 bp, synthetic construct
  source 1..120: mol_type = other DNA
ttaaaccagccttgcatcccaggaatgaagcccacttgatcatggtggataagctttttgatgtgctgctggattcggtttgccagtattttattgaggatttttgcatcaatgttcatc

SEQ ID NO: 114985 - DNA, 120 bp, synthetic construct
  source 1..120: mol_type = other DNA
aaaagatacttgcacatgcatgtttatagcagcacaattcacaatagcacaatgctatggtgaaccaacccaaatacccatcaatcaacgagtggataaactgtgatatatatatatata

SEQ ID NO: 114986 - DNA, 120 bp, synthetic construct; identical to SEQ ID NO: 12794
  source 1..120: mol_type = other DNA

SEQ ID NO: 114987 - DNA, 120 bp, synthetic construct; identical to SEQ ID NO: 12795
  source 1..120: mol_type = other DNA

SEQ ID NO: 114988 - DNA, 120 bp, synthetic construct; identical to SEQ ID NO: 13103
  source 1..120: mol_type = other DNA

SEQ ID NO: 114989 - DNA, 120 bp, synthetic construct; identical to SEQ ID NO: 13104
  source 1..120: mol_type = other DNA

SEQ ID NO: 114990 - DNA, 120 bp, synthetic construct
  source 1..120: mol_type = other DNA
ataaagcaagtccttagagacctacaaagagacttagactcccacacaataataatgggagactttaacaccccactgtcaacattagacagatcaacgagacaggaaattaacaaggtt

SEQ ID NO: 114991 - DNA, 120 bp, synthetic construct; identical to SEQ ID NO: 13105
  source 1..120: mol_type = other DNA

SEQ ID NO: 114992 - DNA, 120 bp, synthetic construct; identical to SEQ ID NO: 13106
  source 1..120: mol_type = other DNA

SEQ ID NO: 114993 - DNA, 120 bp, synthetic construct
  source 1..120: mol_type = other DNA
aaggaaaatagaatataaagaacaagagataggaacaaatgatacaaccggttttaaaagttaggtaaccatcattctcagcaaactatcgcaaggacaaaaaaccaaacaccacatgtt

SEQ ID NO: 114994 - DNA, 120 bp, synthetic construct; identical to SEQ ID NO: 13887
  source 1..120: mol_type = other DNA

SEQ ID NO: 114995 - DNA, 120 bp, synthetic construct
  source 1..120: mol_type = other DNA
ttgcatagttaataaaagcagacacacacacacacacacacacacacacacacacacacacacacacagtgatggattttttagcaggtgaccctgttgccctcttatctcagttcaaat

SEQ ID NO: 114996 - DNA, 120 bp, synthetic construct; identical to SEQ ID NO: 14339
  source 1..120: mol_type = other DNA

SEQ ID NO: 114997 - DNA, 120 bp, synthetic construct
  source 1..120: mol_type = other DNA
gaatcacttgaacctgagaggcagaggttgcagtgagccaggatcgtgccattgcactccagcctgggcaacaagagcaaagttctgtctcaaaataaataaataaataaaattaaaaaa

SEQ ID NO: 114998 - DNA, 120 bp, synthetic construct
  source 1..120: mol_type = other DNA
ctggacggggcggctgccgggcggagacgctcctcatttcccagacggggttggtgccgggcagaggggctcctcacttctcagatggggcggatgctgggcggagggtctcctcacttc

SEQ ID NO: 114999 - DNA, 120 bp, synthetic construct; identical to SEQ ID NO: 11911
  source 1..120: mol_type = other DNA

SEQ ID NO: 115000 - DNA, 120 bp, synthetic construct; identical to SEQ ID NO: 22323
  source 1..120: mol_type = other DNA

SEQ ID NO: 115001 - DNA, 120 bp, synthetic construct; identical to SEQ ID NO: 22324
  source 1..120: mol_type = other DNA

SEQ ID NO: 115002 - DNA, 120 bp, synthetic construct
  source 1..120: mol_type = other DNA
ctatgaaaatatgctttgctggctttatgtttctgcctatcacccctgcctcctgtctcttatggcatgcagcaaattcatggctttgaccttaagcagggtttagttgggtttataaga

SEQ ID NO: 115003 - DNA, 120 bp, synthetic construct
  source 1..120: mol_type = other DNA
tattatagtaaaccaatacttgcataatatcaaggcagataagtttcacaaggaaacctagagcagcttgaaggggtagatcaggatgggggtgcctttttaggctggtagtcagagaag

SEQ ID NO: 115004 - DNA, 120 bp, synthetic construct; identical to SEQ ID NO: 32955
  source 1..120: mol_type = other DNA

SEQ ID NO: 115005 - DNA, 120 bp, synthetic construct; identical to SEQ ID NO: 31745
  source 1..120: mol_type = other DNA

SEQ ID NO: 115006 - DNA, 120 bp, synthetic construct
  source 1..120: mol_type = other DNA
tgcccttgcatctagcctgtctttcctgtgggctgtgacaagccactctgcatctctgagactccatttcttcttcttcttcttcttcttcttcttcttcttcttcttctccttctcctt

SEQ ID NO: 115007 - DNA, 120 bp, synthetic construct; identical to SEQ ID NO: 7070
  source 1..120: mol_type = other DNA

SEQ ID NO: 115008 - DNA, 120 bp, synthetic construct; identical to SEQ ID NO: 7071
  source 1..120: mol_type = other DNA

SEQ ID NO: 115009 - DNA, 120 bp, synthetic construct; identical to SEQ ID NO: 7072
  source 1..120: mol_type = other DNA

SEQ ID NO: 115010 - DNA, 120 bp, synthetic construct; identical to SEQ ID NO: 13909
  source 1..120: mol_type = other DNA

SEQ ID NO: 115011 - DNA, 120 bp, synthetic construct
  source 1..120: mol_type = other DNA
cactcaagactgcttgcaactgattgcagacagtgaaacaccaactatacaaaaaggtaataaaatatagcaaagacttggaaccaagccaaatgtccatcaatgatagactggattaag

SEQ ID NO: 115012 - DNA, 120 bp, synthetic construct; identical to SEQ ID NO: 19473
  source 1..120: mol_type = other DNA

SEQ ID NO: 115013 - DNA, 120 bp, synthetic construct; identical to SEQ ID NO: 19474
  source 1..120: mol_type = other DNA

SEQ ID NO: 115014 - DNA, 120 bp, synthetic construct
  source 1..120: mol_type = other DNA
gagcatttcatgctcatggataggaagaatcaatatcgtgaaaatggccatactgcccaaggtaatttatagattcaatgccatccccatcaagctaccaatgactttcttcacagaatt

SEQ ID NO: 115015 - DNA, 120 bp, synthetic construct
  source 1..120: mol_type = other DNA
gaaatgcaaatcaaaaccacaatgagataccatctcacaccagtgaatggcgatcattaaaaagtcaggaaacaacacgtcctggagaggatgtggagaaataggaacacttttacactg

SEQ ID NO: 115016 - DNA, 120 bp, synthetic construct
  source 1..120: mol_type = other DNA
acccatcatatacattaggtatttctcctaatgctatccctcccctagccccccatttactgacaagccccggtgtgtgttattcccctccctgtgtacatatgttctcattgttcaact

SEQ ID NO: 115017 - DNA, 120 bp, synthetic construct
  source 1..120: mol_type = other DNA
gaattgcttgaacccaggagacggaggttgcagtcagccaacacggtgccactgcactccagcctgggtgatgaagtgagactccgtctcaaacataaaaaaaaaattaaacaaattttt

SEQ ID NO: 115018 - DNA, 120 bp, synthetic construct; identical to SEQ ID NO: 24871
  source 1..120: mol_type = other DNA

SEQ ID NO: 115019 - DNA, 120 bp, synthetic construct; identical to SEQ ID NO: 24872
  source 1..120: mol_type = other DNA

SEQ ID NO: 115020 - DNA, 120 bp, synthetic construct; identical to SEQ ID NO: 25185
  source 1..120: mol_type = other DNA

SEQ ID NO: 115021 - DNA, 120 bp, synthetic construct; identical to SEQ ID NO: 25018
  source 1..120: mol_type = other DNA

SEQ ID NO: 115022 - DNA, 120 bp, synthetic construct; identical to SEQ ID NO: 25019
  source 1..120: mol_type = other DNA

SEQ ID NO: 115023 - DNA, 120 bp, synthetic construct; identical to SEQ ID NO: 25020
  source 1..120: mol_type = other DNA

SEQ ID NO: 115024 - DNA, 120 bp, synthetic construct; identical to SEQ ID NO: 25021
  source 1..120: mol_type = other DNA

SEQ ID NO: 115025 - DNA, 120 bp, synthetic construct; identical to SEQ ID NO: 25022
  source 1..120: mol_type = other DNA

SEQ ID NO: 115026 - DNA, 120 bp, synthetic construct; identical to SEQ ID NO: 25023
  source 1..120: mol_type = other DNA

SEQ ID NO: 115027 - DNA, 120 bp, synthetic construct; identical to SEQ ID NO: 25024
  source 1..120: mol_type = other DNA

SEQ ID NO: 115028 - DNA, 120 bp, synthetic construct
  source 1..120: mol_type = other DNA
acccagctaatttttgtattttttgtagagatgaggtttcgtcatgttgcccaggttggtctcaaactcctgggctcaagcattctaccagccttgctctctcaaagtgctgggattaca

SEQ ID NO: 115029 - DNA, 120 bp, synthetic construct; identical to SEQ ID NO: 31251
  source 1..120: mol_type = other DNA

SEQ ID NO: 115030 - DNA, 120 bp, synthetic construct; identical to SEQ ID NO: 31252
  source 1..120: mol_type = other DNA

SEQ ID NO: 115031 - DNA, 120 bp, synthetic construct
  source 1..120: mol_type = other DNA
attttctttttttttttttttaatttatttttttattgataattcttgggtgtttctcacagagggggatttggcagggtcatgggacaatagtggagggaaggtcagcagataaacaag

SEQ ID NO: 115032 - DNA, 120 bp, synthetic construct
  source 1..120: mol_type = other DNA
cacttcctagatgggatggcggccgggcggagacgctcctcactttccagactgggcagccaggcagaggggctcctcacatcccagacgatgggcggccaggcagagacgctcctcact

SEQ ID NO: 115033 - DNA, 120 bp, synthetic construct
  source 1..120: mol_type = other DNA
aatcccagccattcgggaggctgaggtgggaagatcgcttgagcccaggagttcaaggccaccctgatcaacatagtgagacctcatctaaaaaaaaaaaaaaaaaaaaaaaattaaatg

SEQ ID NO: 115034 - DNA, 120 bp, synthetic construct; identical to SEQ ID NO: 66523
  source 1..120: mol_type = other DNA

SEQ ID NO: 115035 - DNA, 120 bp, synthetic construct
  source 1..120: mol_type = other DNA
tataaatttccctctacacactgctttgaatgcgtcccagagattctggtatgtggagtctttgttctcattggtttcaaagaacatctttatttctgccttcatttcgttatgtaccca

SEQ ID NO: 115036 - DNA, 120 bp, synthetic construct
  source 1..120: mol_type = other DNA
aataccatttgacccagccatcccattactgggtatatacccaaatgagtataaatcatgctgctataaagacacatgcacacgtatgtttattgcggcactattcacaatagcaaagac

SEQ ID NO: 115037 - DNA, 120 bp, synthetic construct
  source 1..120: mol_type = other DNA
acctcagcctcccaaagtgctgggattacaggcgtgagccaccgcacccagcccctacttaaacttttacaactcaatttcttttaatagttctaccttattttctaatcttccagattc

SEQ ID NO: 115038 - DNA, 120 bp, synthetic construct
  source 1..120: mol_type = other DNA
gtttctaacgtgtgtgtacacccatgtaaatttatgggtaagtagtaatataagcatgtgtgtgtatatgagagaaagagaaaccaaggaagggagggaaggagagagagagagacagac

SEQ ID NO: 115039 - DNA, 120 bp, synthetic construct
  source 1..120: mol_type = other DNA
aggagacagaggtagggagggatggagggggagagagggagagagaaggagggagggagaaacagggaaggacgggtggagggagggatgacatgggactcatcatgtacccattattag

SEQ ID NO: 115040 - DNA, 120 bp, synthetic construct; identical to SEQ ID NO: 11023
  source 1..120: mol_type = other DNA

SEQ ID NO: 115041 - DNA, 120 bp, synthetic construct; identical to SEQ ID NO: 11024
  source 1..120: mol_type = other DNA

SEQ ID NO: 115042 - DNA, 120 bp, synthetic construct; identical to SEQ ID NO: 9040
  source 1..120: mol_type = other DNA

SEQ ID NO: 115043 - DNA, 120 bp, synthetic construct
  source 1..120: mol_type = other DNA
aaacatgtcaaatcttctcttctagctattttgaaatgtacaataaatcattgttaactgtagtcatcctgtgtccggaattggtgggttcttggtctcactgacttcaagaatgaagct

SEQ ID NO: 115044 - DNA, 120 bp, synthetic construct
  source 1..120: mol_type = other DNA
ctgattggtgtatttacaaaccttgagctagatacagagtgccgattgatgtattaacaatccttgagctagacataaaggtcctccacgtcctcatcagagcagctagatacagagtgt

SEQ ID NO: 115045 - DNA, 120 bp, synthetic construct
  source 1..120: mol_type = other DNA
cgtggtcgccaaaatgtgtccggaattggtgggttcttggtctcactgacttcaaggatgaagccgcaaaccctcgtggtgagtgttacagctcttaaggtggcgcatctggagtctgtc

SEQ ID NO: 115046 - DNA, 120 bp, synthetic construct
  source 1..120: mol_type = other DNA
gaccaggagcccagctggcttcaccgagtggatcccgcactggggctgcaggtggagctgcctgccagtcccatgccatgagctcgtactcgtcagcccttgggtggtcgatgggactgg

SEQ ID NO: 115047 - DNA, 120 bp, synthetic construct
  source 1..120: mol_type = other DNA
atctttcccctccacttcctgtctgccttatgcccttcctgtctccttccttctcttcttattatagtagtccctccttttctgcaattttactttgtgtggtttcagttacctgaggta

SEQ ID NO: 115048 - DNA, 120 bp, synthetic construct
  source 1..120: mol_type = other DNA
gaaaaaaaattacatatagggttcagtacaatccatggtttcaggcatccactcctatctttcctgtcttcttctttaagatagggtctcactgtattgcccaggctggagtgcagtggt

SEQ ID NO: 115049 - DNA, 120 bp, synthetic construct; identical to SEQ ID NO: 20039
  source 1..120: mol_type = other DNA

SEQ ID NO: 115050 - DNA, 120 bp, synthetic construct
  source 1..120: mol_type = other DNA
aggggctggggcctggactccagggtctgagggaggagaggctggggcctggactccagggtctcagggaggagaggctggggcctggactccagggtctgagggaggaggggctggggc

SEQ ID NO: 115051 - DNA, 120 bp, synthetic construct; identical to SEQ ID NO: 20040
  source 1..120: mol_type = other DNA

SEQ ID NO: 115052 - DNA, 120 bp, synthetic construct
  source 1..120: mol_type = other DNA
aagggtccagcctctcagctgcgacccctcttgggaacccgggaggtcgcccccaactcccactgccttggggcatcactcacccatccgccatgctgagactcaggccgggaatggcag

SEQ ID NO: 115053 - DNA, 120 bp, synthetic construct; identical to SEQ ID NO: 7743
  source 1..120: mol_type = other DNA

SEQ ID NO: 115054 - DNA, 120 bp, synthetic construct
  source 1..120: mol_type = other DNA
tctccgcatcctctccagcacctgttgtttcctgactttttaatgattgccttactttaaaagtgtaatttttgaattgatttttaaactaaaatcataagaaagccagaatagagataa

SEQ ID NO: 115055 - DNA, 120 bp, synthetic construct
  source 1..120: mol_type = other DNA
ccctcccccctcgccccaccccacagcagtccccagagtgtgatgttcccctccctgtgtccatgtgtccaaaacagcatggtactggtaccaaaacagagatatagatcaatggaacag

SEQ ID NO: 115056 - DNA, 120 bp, synthetic construct; identical to SEQ ID NO: 7744
  source 1..120: mol_type = other DNA

SEQ ID NO: 115057 - DNA, 120 bp, synthetic construct
  source 1..120: mol_type = other DNA
ggtttccagcttcaaccatgtccctacaaaggacatgaagtcatcattttttatggctgcatagtattccatggtgtatatgtgccacattttcttaatccagtctatcattgttggaca

SEQ ID NO: 115058 - DNA, 120 bp, synthetic construct; identical to SEQ ID NO: 2829
  source 1..120: mol_type = other DNA

SEQ ID NO: 115059 - DNA, 120 bp, synthetic construct; identical to SEQ ID NO: 2830
  source 1..120: mol_type = other DNA

SEQ ID NO: 115060 - DNA, 120 bp, synthetic construct
  source 1..120: mol_type = other DNA
taaaaaattatgaaactgaatcagtgatagaaaaactaccaaccataaaaagcactggaccagacagattcacagctgaattcttccaggtgtaaaaagaagagataggccgggcgcggt

SEQ ID NO: 115061 - DNA, 120 bp, synthetic construct; identical to SEQ ID NO: 7737
  source 1..120: mol_type = other DNA

SEQ ID NO: 115062 - DNA, 120 bp, synthetic construct; identical to SEQ ID NO: 7738
  source 1..120: mol_type = other DNA

SEQ ID NO: 115063 - DNA, 120 bp, synthetic construct; identical to SEQ ID NO: 7739
  source 1..120: mol_type = other DNA

SEQ ID NO: 115064 - DNA, 120 bp, synthetic construct
  source 1..120: mol_type = other DNA
tgtgatggggttgtttatttttttcttgtaaatttgtttgagttcattgtagattctggatattagccctttgtcagatgagtaggttgcgaaaattttctcccattttgtaggttgcct

SEQ ID NO: 115065 - DNA, 120 bp, synthetic construct
  source 1..120: mol_type = other DNA
agggctgcatttgtttgttaggactgtcataaagaaataccacagactgggtggcttaagcaacagaaatttatcatctcacaattctggaggctagaagtccaagatcaaggtgtcaac

SEQ ID NO: 115066 - DNA, 120 bp, synthetic construct
  source 1..120: mol_type = other DNA
attctaactggtgtgagatggtatctcattgtggttttgatttgcatctctctgatggccagtgatggtgagcattttttcatgtgttttttggctgcataaatgtcttcttttgagaag

SEQ ID NO: 115067 - DNA, 120 bp, synthetic construct
  source 1..120: mol_type = other DNA
agaactttaaagtagttttttccaattctgtgaagaaagtcattggtagcttgatggagatactattgaatctataaattaccttgggcagtatggccattttcacgacattgattcttc

SEQ ID NO: 115068 - DNA, 120 bp, synthetic construct
  source 1..120: mol_type = other DNA
gaggactgctttacttccaactatgtggttgattttagaataggtgtggtgtggtgctgaaaagaatgtatattctgttgatttggggtggagagttctgtagatgtctattaggtccac

SEQ ID NO: 115069 - DNA, 120 bp, synthetic construct
  source 1..120: mol_type = other DNA
tgaaaattcttttctttaagaatgttgaatattggcccccactctcttctggcttgtagagtttctgccgagagatctgctgttagtctgatgggcttccctttgtgggtaacccaacct

SEQ ID NO: 115070 - DNA, 120 bp, synthetic construct
  source 1..120: mol_type = other DNA
ccagtaggggcagactgacacctcacacggctgggtactcctctgagacaaaacttccagaggaacgatcagacagcagcattcgcggttcatgaaaatccgctgttctgcagacaccgc

SEQ ID NO: 115071 - DNA, 120 bp, synthetic construct; identical to SEQ ID NO: 7740
  source 1..120: mol_type = other DNA

SEQ ID NO: 115072 - DNA, 120 bp, synthetic construct
  source 1..120: mol_type = other DNA
actcatcattttttatggctgcatagtattccatggtgtatatgttccacattttcttttttttctttttttcttttttttgagacggagtctcgctctgtcgcccaggctggagtgcag

SEQ ID NO: 115073 - DNA, 120 bp, synthetic construct
  source 1..120: mol_type = other DNA
gacatgaaatccttgcccatgcctatgtcctgaatggtaatgccaaggttttcttctagggtttttatggttttaggtctaacgtttaaatctttaatccatcttgaattgatttttgta

SEQ ID NO: 115074 - DNA, 120 bp, synthetic construct
  source 1..120: mol_type = other DNA
atcattaaaaagtcaggaaacaacaggtgctggagaggatgaggagaaataggaacacttttacactgttggtgggactgtaaactagttcaaccattgtggaagtcagtgtggcgattc

SEQ ID NO: 115075 - DNA, 120 bp, synthetic construct
  source 1..120: mol_type = other DNA
tgttgaataggagtggtgagagagggcatccctgtcttgtgccggttttcaaagggaatgcttccagtttttgcccattcagtatgatattggctgtgggtttgtcatagatagctctta

SEQ ID NO: 115076 - DNA, 120 bp, synthetic construct
  source 1..120: mol_type = other DNA
agatctaccaagcaaatggaaaacaaaaaaaggcaggggttgcaatcctagtcttcgataaaacagactttaaaccaacaaagatcaaaagagacaaagaaggccattacataatggtaa

SEQ ID NO: 115077 - DNA, 120 bp, synthetic construct
  source 1..120: mol_type = other DNA
aaagaagacatttgtgcggccaacaaacatacaaaaaaacgcccaacatcactgatcattagagaaacgcagatcaaaaccacaatgagacaccatttcatgccagtcagaatggcgatt

SEQ ID NO: 115078 - DNA, 120 bp, synthetic construct; identical to SEQ ID NO: 20034
  source 1..120: mol_type = other DNA

SEQ ID NO: 115079 - DNA, 120 bp, synthetic construct; identical to SEQ ID NO: 20035
  source 1..120: mol_type = other DNA

SEQ ID NO: 115080 - DNA, 120 bp, synthetic construct; identical to SEQ ID NO: 20036
  source 1..120: mol_type = other DNA

SEQ ID NO: 115081 - DNA, 120 bp, synthetic construct; identical to SEQ ID NO: 20037
  source 1..120: mol_type = other DNA

SEQ ID NO: 115082 - DNA, 120 bp, synthetic construct; identical to SEQ ID NO: 20038
  source 1..120: mol_type = other DNA

SEQ ID NO: 115083 - DNA, 120 bp, synthetic construct
  source 1..120: mol_type = other DNA
gagcgaggagcagatctttggtgaaggaggccaggctctatttccagcgcccggtgactttagccttcccgcgggtcttggagctgcaggggaagcaggacgcagtgacatggagacaca

SEQ ID NO: 115084 - DNA, 120 bp, synthetic construct
  source 1..120: mol_type = other DNA
gcaaatctgtgtcctgttggccggtgcagagttcagtgtggaaccaaaaaaagagaaaaaagtggaaggcacaggactagagaggccataacaatggctgacacctgctgagcatttagt

SEQ ID NO: 115085 - DNA, 120 bp, synthetic construct
  source 1..120: mol_type = other DNA
tgaaccaggaggagtgtgagatggagatgctgggcggggacagcatggcggcccacctcatatttctgctgcttgaacttctcctgcaggtcgaacttctctgcctccaagttatagatg

SEQ ID NO: 115086 - DNA, 120 bp, synthetic construct
  source 1..120: mol_type = other DNA
tatgctcttcttcctgccacaccccccaactaccaactacatgtattccctagggaaactgaggtaggggcaagaaggatcacgtcagtctcttccttctttgcctaactaatctctttc

SEQ ID NO: 115087 - DNA, 120 bp, synthetic construct
  source 1..120: mol_type = other DNA
taaagtctacctgctgcagtggacacctcattcctcagggctatactaggatctcctggcaacccctgctgctccctacctaccttctggatgtaacccccaaaatgcatcatgttggac

SEQ ID NO: 115088 - DNA, 120 bp, synthetic construct
  source 1..120: mol_type = other DNA
caatattgtctcttgactgatttcattcatgttgatgaatagagaggggcctgggggcccagcaggagctgggagcatggggggcctccatgggcctgggctaggggtcactcacagcca

SEQ ID NO: 115089 - DNA, 120 bp, synthetic construct
  source 1..120: mol_type = other DNA
ccatcagagaatgttaggtgggcagactggacacctacgatcctgtctttgagagaaacgagctcctcctcctctttcttcctgttctcaaagtgagcctcgatcagcgcctgcaactca

SEQ ID NO: 115090 - DNA, 120 bp, synthetic construct
  source 1..120: mol_type = other DNA
agtcttgcagtttggtcctggtcccaacacatactgagacccagggggttctctgattcttcatgtccccatctgccctcaggtgtgtggagctgaaatgagataccgcagtgcacaaga

SEQ ID NO: 115091 - DNA, 120 bp, synthetic construct
  source 1..120: mol_type = other DNA
atagagttctgcagggcacacactcacgcagtgtggaacttcacacaaagccttctctcactcaccagttctgggcaaagcaattttgcttctcttgtgcttcacagtgacaaggccttt

SEQ ID NO: 115092 - DNA, 120 bp, synthetic construct
  source 1..120: mol_type = other DNA
actgcctgacacaagagaagcgctgggtcaacgtttgttgattgggcaatcaatggttgaatcttagtcaataggagagtcaggtgcacatgggaaagcctgttctggggggtttcttac

SEQ ID NO: 115093 - DNA, 120 bp, synthetic construct
  source 1..120: mol_type = other DNA
ttatttgatccctgcaggagtcttacctcaaaatgatccttctagaaagtgtgaaagcagagggctagcgaggaaggacatggccattgtggggtctacctttaggccatcttgttcaca

SEQ ID NO: 115094 - DNA, 120 bp, synthetic construct
  source 1..120: mol_type = other DNA
gagttaggccggcattccaattcccaagccactactttccagcaacaggggcaactctcagttacttccctgagcctcaggtgcctcatcagtaaaatgggaatcattctactcacttct

SEQ ID NO: 115095 - DNA, 120 bp, synthetic construct
  source 1..120: mol_type = other DNA
atatttctgatagcttctgaagtatctggtgttccttaaaaaccaaaaaagacgcctgtggcctctttcagtttctcctgtgaatttctcttctgtctcctctttggccagacagccctg

SEQ ID NO: 115096 - DNA, 120 bp, synthetic construct
  source 1..120: mol_type = other DNA
ataccttcaacagctgcttctgctcagaagagaagtccaggcagcaagagaagagagaagaggtgggtcagtttcgaaccaggctgtctttgatccaaatgagtacacacgtttacgctt

SEQ ID NO: 115097 - DNA, 120 bp, synthetic construct
  source 1..120: mol_type = other DNA
caagatgctccagatactcactcctcctcgtactcttccaccacctcttctatgtcagacatggtctctgctctccctccaaaaggagaaaaaagtcagtgcaggtacaaagggaagcct

SEQ ID NO: 115098 - DNA, 120 bp, synthetic construct
  source 1..120: mol_type = other DNA
tcaatgaaaattccgattaaaaaatgttcccccagggaactcattctgagatcatcttctcactgcactgggaacagataatctagattcagatcctcttccattagcttgccgagggtg

SEQ ID NO: 115099 - DNA, 120 bp, synthetic construct
  source 1..120: mol_type = other DNA
gctgcccctccaggtggaggcttccccagactcagcacccactgcagccctggattgattgtcttcagaccctgttcccattatgtccagttctgctgggttagaaacaagcatggctgc

SEQ ID NO: 115100 - DNA, 120 bp, synthetic construct
  source 1..120: mol_type = other DNA
aaagcaaagacaatagaaggcataaggcatactgaccttggggtcaaaaaatctgggcttaaaacccagattttgctgtgtggccttatttaagtcacctagcctctctgacttcagtta

SEQ ID NO: 115101 - DNA, 120 bp, synthetic construct
  source 1..120: mol_type = other DNA
tcattgtatttagagcaggcagaggcctagcaaatatttagcccactctacagatgagaaaactgaggcctggggagggaaagtgactcatccaagagtttaaactctacatctttagtg

SEQ ID NO: 115102 - DNA, 120 bp, synthetic construct; identical to SEQ ID NO: 26802
  source 1..120: mol_type = other DNA

SEQ ID NO: 115103 - DNA, 120 bp, synthetic construct; identical to SEQ ID NO: 19568
  source 1..120: mol_type = other DNA

SEQ ID NO: 115104 - DNA, 120 bp, synthetic construct; identical to SEQ ID NO: 19569
  source 1..120: mol_type = other DNA

SEQ ID NO: 115105 - DNA, 120 bp, synthetic construct; identical to SEQ ID NO: 9041
  source 1..120: mol_type = other DNA

SEQ ID NO: 115106 - DNA, 120 bp, synthetic construct
  source 1..120: mol_type = other DNA
tcaaagtgctgggattacaggcgtgagccactgtgcctggccgatattttcttatatacattttcttgcctgcttgtcatgattagccatgccctgggactctccaattttgatctacct

SEQ ID NO: 115107 - DNA, 120 bp, synthetic construct
  source 1..120: mol_type = other DNA
caacttcagcaaagtctcaggatacaaaatcaatatgcaaaaatcacaagcattcttataaaccaataacagacagagagccaaatcatgagtgaactcccattcacaattgctacaaag

SEQ ID NO: 115108 - DNA, 120 bp, synthetic construct
  source 1..120: mol_type = other DNA
ggatctaattaaactaaagagcttctgcacagcaaaagaaactaccatcagagtgaacaggcaacctacagaatgggagaaaatttttgcaatctattcatctgacaaaggactaatatc

SEQ ID NO: 115109 - DNA, 120 bp, synthetic construct; identical to SEQ ID NO: 9042
  source 1..120: mol_type = other DNA

SEQ ID NO: 115110 - DNA, 120 bp, synthetic construct; identical to SEQ ID NO: 9043
  source 1..120: mol_type = other DNA

SEQ ID NO: 115111 - DNA, 120 bp, synthetic construct; identical to SEQ ID NO: 9044
  source 1..120: mol_type = other DNA

SEQ ID NO: 115112 - DNA, 120 bp, synthetic construct; identical to SEQ ID NO: 9045
  source 1..120: mol_type = other DNA

SEQ ID NO: 115113 - DNA, 120 bp, synthetic construct; identical to SEQ ID NO: 9046
  source 1..120: mol_type = other DNA

SEQ ID NO: 115114 - DNA, 120 bp, synthetic construct; identical to SEQ ID NO: 2903
  source 1..120: mol_type = other DNA

SEQ ID NO: 115115 - DNA, 120 bp, synthetic construct
  source 1..120: mol_type = other DNA
ccacaattcttctttgctcaaaaaggcccccacctgcagagtgccagcaaatcatactatctatctacaaaggaaagcagtctgcacaatttgtttacttgtttgattattcgagtgagc

SEQ ID NO: 115116 - DNA, 120 bp, synthetic construct
  source 1..120: mol_type = other DNA
cagagagagagagagacagagagagagagagagagagagacagaagggaaatatctgcagagagaacagagctatgatcactaagtagaacagaggcagcctaatcgcctaatcagatac

SEQ ID NO: 115117 - DNA, 120 bp, synthetic construct
  source 1..120: mol_type = other DNA
ttttgcagcccactgactcccagcctggtaagttactgcacactttcagcaattatctgcgaagctttcctcaactgcctcattagcatgcgcagggcaccctcgctgggcccgttggaa

SEQ ID NO: 115118 - DNA, 120 bp, synthetic construct
  source 1..120: mol_type = other DNA
attcttttttcactaagacagtgtagaatgcccagttcccgctgtgtgtacgtgcgtgcacatatgtgttaaaggagatggatacattgcttggggccatcagaactgtttcctgggagg

SEQ ID NO: 115119 - DNA, 120 bp, synthetic construct
  source 1..120: mol_type = other DNA
aaattaaattaaatcatggcagtatctgtagccccagagaaaggagatggtggctgtgtcaaaagcttttggttcactgtcatctgagctataccaacgtctgttcggcaagaaactttt

SEQ ID NO: 115120 - DNA, 120 bp, synthetic construct
  source 1..120: mol_type = other DNA
gtgagccgagatcgcaccattgcgctctaacctgggtgacagagtgagactctgtctcaaaaaaaaaaaaaaaaaaaaaaaaaggaatctataactgaagacatacttcagttgcggggg

SEQ ID NO: 115121 - DNA, 120 bp, synthetic construct
  source 1..120: mol_type = other DNA
tcaagcatttgcttgcatcgtgtttgcgaggccccgtgggcctagacaagttacgtagtcaagcccagagttagaggatggaaaaagataccacttgttgggtggaggtacaaaatattg

SEQ ID NO: 115122 - DNA, 120 bp, synthetic construct
  source 1..120: mol_type = other DNA
cacatagagtaattgaaggaaaggcacatattagagaaggctcacaggttgataattccatgtactaagatggaaagaaagactaggagaggagaagagtattttgttgggggagagggc

SEQ ID NO: 115123 - DNA, 120 bp, synthetic construct
  source 1..120: mol_type = other DNA
ttagaaacaagcctgggcaacggagcaagaccctatctctaaatttactttttaattagccaggcatagtggcacatgcctgtagtcccagctactcagtagactgagatgggaggatta

SEQ ID NO: 115124 - DNA, 120 bp, synthetic construct
  source 1..120: mol_type = other DNA
ttatagatttatctattagtttttttgagcatcttttttttttttggcaggttgtggggatggagtcccactctgttgcccaggctggagtgcagtggtgcaatcatagctcactccagc

SEQ ID NO: 115125 - DNA, 120 bp, synthetic construct
  source 1..120: mol_type = other DNA
cggctaatttttgtgtttttttatttgtttatttgtttgttttgtagagatggggtttcgccatgttgcccagactgggtcttgaactctcagcctcaagtgatctgcccgcatcagctt

SEQ ID NO: 115126 - DNA, 120 bp, synthetic construct
  source 1..120: mol_type = other DNA
tagttaaagcattctcacccttttagaatttaattaggggacttgtgcattaattactattgtaaatggttgcaggcattgtgtgactcatgattgaggcggcccttatggcgggctgtc

SEQ ID NO: 115127 - DNA, 120 bp, synthetic construct; identical to SEQ ID NO: 16363
  source 1..120: mol_type = other DNA

SEQ ID NO: 115128 - DNA, 120 bp, synthetic construct; identical to SEQ ID NO: 4254
  source 1..120: mol_type = other DNA

SEQ ID NO: 115129 - DNA, 120 bp, synthetic construct; identical to SEQ ID NO: 18535
  source 1..120: mol_type = other DNA

SEQ ID NO: 115130 - DNA, 120 bp, synthetic construct; identical to SEQ ID NO: 18536
  source 1..120: mol_type = other DNA

SEQ ID NO: 115131 - DNA, 120 bp, synthetic construct; identical to SEQ ID NO: 21998
  source 1..120: mol_type = other DNA

SEQ ID NO: 115132 - DNA, 120 bp, synthetic construct; identical to SEQ ID NO: 21999
  source 1..120: mol_type = other DNA

SEQ ID NO: 115133 - DNA, 120 bp, synthetic construct; identical to SEQ ID NO: 29123
  source 1..120: mol_type = other DNA

SEQ ID NO: 115134 - DNA, 120 bp, synthetic construct; identical to SEQ ID NO: 29124
  source 1..120: mol_type = other DNA

SEQ ID NO: 115135 - DNA, 120 bp, synthetic construct; identical to SEQ ID NO: 5957
  source 1..120: mol_type = other DNA

SEQ ID NO: 115136 - DNA, 120 bp, synthetic construct
  source 1..120: mol_type = other DNA
ttaagaaaatgataatctctctttataaatgtcttttaaaatattcagtgtgggctcaattcttcccatatcattatccctggaggtgtgctggtaaaggggaggggaggggaggggagg

SEQ ID NO: 115137 - DNA, 120 bp, synthetic construct; identical to SEQ ID NO: 29126
  source 1..120: mol_type = other DNA

SEQ ID NO: 115138 - DNA, 120 bp, synthetic construct; identical to SEQ ID NO: 5959
  source 1..120: mol_type = other DNA

SEQ ID NO: 115139 - DNA, 120 bp, synthetic construct; identical to SEQ ID NO: 20418
  source 1..120: mol_type = other DNA

SEQ ID NO: 115140 - DNA, 120 bp, synthetic construct; identical to SEQ ID NO: 20419
  source 1..120: mol_type = other DNA

SEQ ID NO: 115141 - DNA, 120 bp, synthetic construct; identical to SEQ ID NO: 20420
  source 1..120: mol_type = other DNA

SEQ ID NO: 115142 - DNA, 120 bp, synthetic construct; identical to SEQ ID NO: 11597
  source 1..120: mol_type = other DNA

SEQ ID NO: 115143 - DNA, 120 bp, synthetic construct; identical to SEQ ID NO: 11598
  source 1..120: mol_type = other DNA

SEQ ID NO: 115144 - DNA, 120 bp, synthetic construct
  source 1..120: mol_type = other DNA
atcactggagcgtcatgatggttctgtgtttgtatgaaagcgtctgttaaagacgtgtcatgagacatttacacatcgtcactcacggccgggacatgatttaaaatatcccagctttaa

SEQ ID NO: 115145 - DNA, 120 bp, synthetic construct
  source 1..120: mol_type = other DNA
tgccctgtggggaggagcctggtgtcctgcagggcccagggctgtatctcagaccctggagggctgctcagctggaccctaagggcagagcttggaagggctgtgggggtcctccgagga

SEQ ID NO: 115146 - DNA, 120 bp, synthetic construct; identical to SEQ ID NO: 11599
  source 1..120: mol_type = other DNA

SEQ ID NO: 115147 - DNA, 120 bp, synthetic construct; identical to SEQ ID NO: 11600
  source 1..120: mol_type = other DNA

SEQ ID NO: 115148 - DNA, 120 bp, synthetic construct; identical to SEQ ID NO: 23770
  source 1..120: mol_type = other DNA

SEQ ID NO: 115149 - DNA, 120 bp, synthetic construct; identical to SEQ ID NO: 23771
  source 1..120: mol_type = other DNA

SEQ ID NO: 115150 - DNA, 120 bp, synthetic construct; identical to SEQ ID NO: 23772
  source 1..120: mol_type = other DNA

SEQ ID NO: 115151 - DNA, 120 bp, synthetic construct; identical to SEQ ID NO: 17643
  source 1..120: mol_type = other DNA

SEQ ID NO: 115152 - DNA, 120 bp, synthetic construct
  source 1..120: mol_type = other DNA
gctcctcacatcccagacggggcggcggggcagaggcgctccccacatctcagacgatgggcggccgggcagagacgctcttcacttcctagatgggatggcggccgggaagaggcgctc

SEQ ID NO: 115153 - DNA, 120 bp, synthetic construct; identical to SEQ ID NO: 17644
  source 1..120: mol_type = other DNA

SEQ ID NO: 115154 - DNA, 120 bp, synthetic construct
  source 1..120: mol_type = other DNA
tgcagtgagccgagatcgcacgactgcactccagcctgggcgacagagcgagactccggctcaaaaattaaataaataaataaataaataatttattcctacctaattccagatggattt

SEQ ID NO: 115155 - DNA, 120 bp, synthetic construct; identical to SEQ ID NO: 28958
  source 1..120: mol_type = other DNA

SEQ ID NO: 115156 - DNA, 120 bp, synthetic construct; identical to SEQ ID NO: 22503
  source 1..120: mol_type = other DNA

SEQ ID NO: 115157 - DNA, 120 bp, synthetic construct; identical to SEQ ID NO: 31909
  source 1..120: mol_type = other DNA

SEQ ID NO: 115158 - DNA, 120 bp, synthetic construct; identical to SEQ ID NO: 31910
  source 1..120: mol_type = other DNA

SEQ ID NO: 115159 - DNA, 120 bp, synthetic construct; identical to SEQ ID NO: 31911
  source 1..120: mol_type = other DNA

SEQ ID NO: 115160 - DNA, 120 bp, synthetic construct; identical to SEQ ID NO: 31912
  source 1..120: mol_type = other DNA

SEQ ID NO: 115161 - DNA, 120 bp, synthetic construct
  source 1..120: mol_type = other DNA
gcaggagaatcacttgaacccgggaggcagaagttgtggtgagctgagaccgcaccattgcactccagcctaggcaacaagagcgaaactgcgccctgtccctgtccctgtccctctccc

SEQ ID NO: 115162 - DNA, 120 bp, synthetic construct
  source 1..120: mol_type = other DNA
agaagcccctccgcccagcagccaccccgtctgggaagtgaggagcgtctctgcccagcagccacctcgtccggcagggaggtgggagggtcagccccccgcccggccagccgccccatc

SEQ ID NO: 115163 - DNA, 120 bp, synthetic construct
  source 1..120: mol_type = other DNA
gattccatctctaccaaaaaattttaaaaataattagctggtcatagtggtacatgactatagtcccagctacttgggaggctgaggtgggaagatctcttgagcccagaagtttgagtc

SEQ ID NO: 115164 - DNA, 120 bp, synthetic construct
  source 1..120: mol_type = other DNA
cttgggctcaagtgatcctcctgcctcagccttcccaagtgctgggattataggtgtgaaccattacacctggccaaaatattttattttaaaggcagaagaaagaaacctttatgtcaa

SEQ ID NO: 115165 - DNA, 120 bp, synthetic construct
  source 1..120: mol_type = other DNA
ctgtcactgcctcactgtccacattccatcacgcctcagatcctggcttccaccctggtgaaaggaatctttcaatatcacccacccagccacagacgcttctctgcttctctggcaagg

SEQ ID NO: 115166 - DNA, 120 bp, synthetic construct
  source 1..120: mol_type = other DNA
gtccgaaacattcctgacctgcccctcaaagaaaggtcccactgaacagtctggaaagctgttttgctgagctcccgtcatcactcaatgaggcacgggcggagtgtggagggagtttcc

SEQ ID NO: 115167 - DNA, 120 bp, synthetic construct
  source 1..120: mol_type = other DNA
ccgccctcgaccctgccttctccctggtccaccgcggtgcatggggtggcaggaggccgcatgcttcagctccaccagctcctggaagacggggtcacaaaagacgcagcccatgtgctg

SEQ ID NO: 115168 - DNA, 120 bp, synthetic construct
  source 1..120: mol_type = other DNA
gactagggttgcctgctcgattctgacacagagagagggtggcaccactggctgaggcctaagcagtgccccagctacatccagggtctctcgtctcagtgccaatgagtgcaggaaagg

SEQ ID NO: 115169 - DNA, 120 bp, synthetic construct
  source 1..120: mol_type = other DNA
gagccgtgattgcaccactgcactccagcctgggtgacagatagagaccctgtctcaaaaaagaaaacaagaatagggtaaagtaaaaggattcactctacttaatgttaagacttacta

SEQ ID NO: 115170 - DNA, 120 bp, synthetic construct
  source 1..120: mol_type = other DNA
ctgttagaaaatgggagctggacatgaacagacacgtctcaaaagaagacatttatgcagccaaaaaacacatgaaaaaatgctcaccatcactggctttcagagaaatgcaaatcaaaa

SEQ ID NO: 115171 - DNA, 120 bp, synthetic construct; identical to SEQ ID NO: 24728
  source 1..120: mol_type = other DNA

SEQ ID NO: 115172 - DNA, 120 bp, synthetic construct; identical to SEQ ID NO: 24729
  source 1..120: mol_type = other DNA

SEQ ID NO: 115173 - DNA, 120 bp, synthetic construct; identical to SEQ ID NO: 9069
  source 1..120: mol_type = other DNA

SEQ ID NO: 115174 - DNA, 120 bp, synthetic construct; identical to SEQ ID NO: 31545
  source 1..120: mol_type = other DNA

SEQ ID NO: 115175 - DNA, 120 bp, synthetic construct
  source 1..120: mol_type = other DNA
ggcagggtattccaacagacctgcagctgagggtcctgtctgttagaaggaaaactaacaaccagaaaggacatctacaccgaaaacctatctgtacatcaccatcatcaaagaccaaaa

SEQ ID NO: 115176 - DNA, 120 bp, synthetic construct
  source 1..120: mol_type = other DNA
aaatactttatagacaagcaaatgctgagagattttgtcaccaccaggcctgccctaaaagagctcctgaaggaagcgctaaacatggaaaggaacaaccggtaccagccgctgcaaaat

SEQ ID NO: 115177 - DNA, 120 bp, synthetic construct
  source 1..120: mol_type = other DNA
caattttggatctttcctgctttctcttgtaggcatttagtgctataaatttccctctacacactgctttgaatgcgtcccagagattctggtatgtggtgtctttgttctcgttggttt

SEQ ID NO: 115178 - DNA, 120 bp, synthetic construct
  source 1..120: mol_type = other DNA
aatatacgcaaatcaataaatgtaatccagcatataaacagagccaaagacaaaaaccacatgattatctcaatagatgcagaaaaagcctttgacaaaattcaacaacccttcatgcta

SEQ ID NO: 115179 - DNA, 120 bp, synthetic construct
  source 1..120: mol_type = other DNA
ctgatctttgacaaacctgagaaagacaagcaatggggaaaggattccctatttaataaatggtgctgggaaaactggctagccatatgtagaaagctgaaactggatcccttccttaca

SEQ ID NO: 115180 - DNA, 120 bp, synthetic construct
  source 1..120: mol_type = other DNA
ccatggaatactatgcagccataaaaaatgatgagttcatgtcctttgtagggacatgtatgaaattggaaaccatcattctcagtaaactatcgcaagaacaaaaaaccaaacaccgca

SEQ ID NO: 115181 - DNA, 120 bp, synthetic construct; identical to SEQ ID NO: 31546
  source 1..120: mol_type = other DNA

SEQ ID NO: 115182 - DNA, 120 bp, synthetic construct; identical to SEQ ID NO: 31547
  source 1..120: mol_type = other DNA

SEQ ID NO: 115183 - DNA, 120 bp, synthetic construct; identical to SEQ ID NO: 22533
  source 1..120: mol_type = other DNA

SEQ ID NO: 115184 - DNA, 120 bp, synthetic construct; identical to SEQ ID NO: 22534
  source 1..120: mol_type = other DNA

SEQ ID NO: 115185 - DNA, 120 bp, synthetic construct
  source 1..120: mol_type = other DNA
agctaaaattctccctgggagaaaaatcatagttacagtgcagagtttctcaacctcagcactattgacattttgggatgcataattctttgtttagtggggacatccctggccactacc

SEQ ID NO: 115186 - DNA, 120 bp, synthetic construct
  source 1..120: mol_type = other DNA
ggtggaggcagaggttgtggtgagccgagatagcatcactgcactccagtgtgggcaacagagcaagactccgtcacaaaaaaataaataaaataaattttgagaaggaaaattttaaaa

SEQ ID NO: 115187 - DNA, 120 bp, synthetic construct
  source 1..120: mol_type = other DNA
aaggctgcagtaagccaagatcacgccactccactccagcctgggcaacaaagcgagacccagtctcaaagaaaaagaaaaaaaaaaaaaaaaaagaaaaaagaaattgaccctgagcat

SEQ ID NO: 115188 - DNA, 120 bp, synthetic construct
  source 1..120: mol_type = other DNA
tagtgtgtattagtctcgtaatcttcccttaccccattttactttatttatcttttttgagacggagtttcactcttgttgcccaggctggagtgtaatggtgagatctcagctcaccgc

SEQ ID NO: 115189 - DNA, 120 bp, synthetic construct
  source 1..120: mol_type = other DNA
gctcacgcccacggatctgcagcaacagaggagggggagaagtaagtatatacacagtacctgagttaaaagatggttcaagttacaattgtttgactttatgacggtacaaaagcaaca

SEQ ID NO: 115190 - DNA, 120 bp, synthetic construct
  source 1..120: mol_type = other DNA
acaacattttattactataaaaagggctttgtgttagatgactttgcccaactgtagggtaacttaaatgctctgaacacgtttcaagtaggctagggctgagtgtggtagctcatgcct

SEQ ID NO: 115191 - DNA, 120 bp, synthetic construct
  source 1..120: mol_type = other DNA
tatccagcctgggtgacagagcaagaccttgtctcaaaaaagtaggctagagaccagcctgggcaacatagtgagactctatctatctacaaaaaattttaaaaattagctgggtatggt

SEQ ID NO: 115192 - DNA, 120 bp, synthetic construct
  source 1..120: mol_type = other DNA
gatggcaaatgccccaattgcaggtaaaacagtcaagaagaaaacggcattttgagtgttagactggaaactttccacttgataagaggtcccaagacttagtacctgaagggtgaaata

SEQ ID NO: 115193 - DNA, 120 bp, synthetic construct
  source 1..120: mol_type = other DNA
ggtggtacagtcagagccaacctaggagataacacaggcccaagatgaggccagtgcgccttggggagacctgtggcaagcaggggaggccttttttttttttttttgagatggaatctc

SEQ ID NO: 115194 - DNA, 120 bp, synthetic construct
  source 1..120: mol_type = other DNA
aaacatcttgttgagggcaggggagtactgtaggaagaggaaggagacagagttgaaagtcagggcacaagtgaacagataaagcaactggaagacggcagcaaagaaacaaacatgcgt

SEQ ID NO: 115195 - DNA, 120 bp, synthetic construct
  source 1..120: mol_type = other DNA
agcttcatctggacctgggtcttcagtgaaccattgttcaatatcgtccggggacagcatcaaatcatccattgcttgggacggcaagggggactgtagatgggtgaaaagagcagtcag

SEQ ID NO: 115196 - DNA, 120 bp, synthetic construct
  source 1..120: mol_type = other DNA
cccacctgatacacggctccatttctttgattcctttcactgcaaagcttctggaagaacaactgtctcaccgctcacctgcccattctcttcggacactcctcagccctgcattacaaa

SEQ ID NO: 115197 - DNA, 120 bp, synthetic construct
  source 1..120: mol_type = other DNA
gttctttctttctttcttttttcttttgaggcagggtcttgctttgttgcccaagctagggtacagtggtgcaatcatggctcactacagcctcggactcctgggctcagtgattctcct

SEQ ID NO: 115198 - DNA, 120 bp, synthetic construct
  source 1..120: mol_type = other DNA
tttattttattttattttattttgagacggagtctcagctcttattgcccaggctggagtacagtggcactatctccgcttactgcaacctcctcccggattcaaatgattctcctgcct

SEQ ID NO: 115199 - DNA, 120 bp, synthetic construct
  source 1..120: mol_type = other DNA
taaactatatgggaggatatgtgtaggttaaatccaaatactataccgtcttatatatgggacttagacatctgtgggtttggtgtgtgaggagtcccagaaccaagcccctacagatag

SEQ ID NO: 115200 - DNA, 120 bp, synthetic construct
  source 1..120: mol_type = other DNA
cctcctaaaagtgctaggattacaggcatgagccaccacgcctggccccattaggacatgtatgtatagaatcatactggctgtgaatgtgttttatttcttcctttctaatcgttattt

SEQ ID NO: 115201 - DNA, 120 bp, synthetic construct
  source 1..120: mol_type = other DNA
accgcacccggccctcattatttctttttcttgcctggttaaaacctccagtatggtatcaacgttgtgagagtcaaatccttttctagttcctgatcttagaggaaaaagcgttgagtt

SEQ ID NO: 115202 - DNA, 120 bp, synthetic construct
  source 1..120: mol_type = other DNA
cgattctcctgcctcagactcccgagtagctgggatttcaggtgcccaccaccatgcccagctaatttttttttttttttgagatgaagtcttgctctgtcgcccaggctggagtgcagt

SEQ ID NO: 115203 - DNA, 120 bp, synthetic construct
  source 1..120: mol_type = other DNA
gttttctgaagagtttgtgtaagatgggtactgtttcttcctccaacgtttaaagagagcagagaacagaggagataaatagaaaatagcactaagaggtcaggcatggtggctcacacc

SEQ ID NO: 115204 - DNA, 120 bp, synthetic construct
  source 1..120: mol_type = other DNA
aggatataccacattagaaagactgacaatacctaatgtccggaaggctgtggcacaaccataataactcccataccttgctagttggagtgtaaaatggtacaaccgctctggaaaact

SEQ ID NO: 115205 - DNA, 120 bp, synthetic construct
  source 1..120: mol_type = other DNA
tgtgacttggtaggcatcacggagcggttaggggccaaaactcatcttcctgtgcacttgctgtgtgcactggcgctgtgtgtaaatgccacctcgatttaggaaaaagatgacgtaagt

SEQ ID NO: 115206 - DNA, 120 bp, synthetic construct
  source 1..120: mol_type = other DNA
gaaggacaaaggtccggaagttgtgggaccttagcagcttgggctccccggatcacccccaaatgatcatttcggaatggagccccagttttcactaggatgccatgggctctaaaatat

SEQ ID NO: 115207 - DNA, 120 bp, synthetic construct
  source 1..120: mol_type = other DNA
gggagggaaaggaggagggggagggaaaggaggagggggagggaaaggaggagggggagggaaagaaagaagaagaaaaacaaaattttttttgaaaatttaaaaaatgtatgaactttt

SEQ ID NO: 115208 - DNA, 120 bp, synthetic construct; identical to SEQ ID NO: 3273
  source 1..120: mol_type = other DNA

SEQ ID NO: 115209 - DNA, 120 bp, synthetic construct
  source 1..120: mol_type = other DNA
agaaaaagagaacagctctctgctgcagagagggatccagaaaaaaagagttgccattctgcagtgaaatacaagtgtttttatagatgagctagtgggagggggtatgttatccacata

SEQ ID NO: 115210 - DNA, 120 bp, synthetic construct
  source 1..120: mol_type = other DNA
gggtaatcatgccttccttggcaaggctgctgagattcagaaggacctaaacagatctttggctcagatgggttgcttcagccttgtgtccttggccatcttcccttgccttccgaaggt

SEQ ID NO: 115211 - DNA, 120 bp, synthetic construct
  source 1..120: mol_type = other DNA
ttagttacctctatggtgtgattttaataaatcacaaagtcagatcgtccccaccctcactcttcgtctaatctactctgagcctagctctcccaggccctttctctagtctctctaatg

SEQ ID NO: 115212 - DNA, 120 bp, synthetic construct
  source 1..120: mol_type = other DNA
ttcttttaaggggtcctaccctcccctccaatcccatgtagccccaacctgttctcaagagttggatataaacagtccctcctctaggagtttatcattgattctattcccctaatcaaa

SEQ ID NO: 115213 - DNA, 120 bp, synthetic construct
  source 1..120: mol_type = other DNA
gtgcaggacagaggaattaatcatactcacattgttctacaaccatcatccacattcatagggaaatttgttcattttgcaaaactcaaactctgttcccgttaccttccttttggcctc

SEQ ID NO: 115214 - DNA, 120 bp, synthetic construct
  source 1..120: mol_type = other DNA
gggtctctaaggctgtgtttattttctttaaattttgttgatttacttttatactccatttgattttttctatctctcaccttttctcagactcagtcatcccacaggtctgtaaggctc

SEQ ID NO: 115215 - DNA, 120 bp, synthetic construct
  source 1..120: mol_type = other DNA
gctgcgtggtccatatctaggtcgggcctctcacggagactttcccaccagtgtaataaagaggagaaaacgtcacagcggaagggcctgaccctgctgcatccactaaggaaacagcta

SEQ ID NO: 115216 - DNA, 120 bp, synthetic construct; identical to SEQ ID NO: 16446
  source 1..120: mol_type = other DNA

SEQ ID NO: 115217 - DNA, 120 bp, synthetic construct
  source 1..120: mol_type = other DNA
aatgcctaatctatcataatctttaggtagatatttggaggcctgcacacttaaatgggttggtgaaatgtcataccagacacatggctgggaattgggtttttctcctccgctcttagc

SEQ ID NO: 115218 - DNA, 120 bp, synthetic construct
  source 1..120: mol_type = other DNA
gaaggaggaggaatacttccaaactcattttatgaagccagcattacactgatacaaaaaccagagatggacattacaagaaaaacaattacaggccaatatccctgatgaacatagatg

SEQ ID NO: 115219 - DNA, 120 bp, synthetic construct; identical to SEQ ID NO: 16436
  source 1..120: mol_type = other DNA

SEQ ID NO: 115220 - DNA, 120 bp, synthetic construct; identical to SEQ ID NO: 16435
  source 1..120: mol_type = other DNA

SEQ ID NO: 115221 - DNA, 120 bp, synthetic construct
  source 1..120: mol_type = other DNA
gtgctggtattaaaggtgagatccactatgcctggccacatatatacaacttataaataaaaataaccttatatacaaggttaaatgcaaatatcccacagtgaaggccgggcttcagca

SEQ ID NO: 115222 - DNA, 120 bp, synthetic construct; identical to SEQ ID NO: 16434
  source 1..120: mol_type = other DNA

SEQ ID NO: 115223 - DNA, 120 bp, synthetic construct
  source 1..120: mol_type = other DNA
tattacagtatatggtacattatagcattacactattatagtatgttattgtagtcttagcaattggtagtataatgtgtttcagtttctcccaaggtcacagaattatccagaccaacc

SEQ ID NO: 115224 - DNA, 120 bp, synthetic construct
  source 1..120: mol_type = other DNA
ctgtcacatgcactctcacgatgaggggctcattccttgtgccttatggttcaggcactgatgagaaataaaaaagagaaagataacttaatattagtccctcccaaaacttactgggta

SEQ ID NO: 115225 - DNA, 120 bp, synthetic construct
  source 1..120: mol_type = other DNA
tcaccattgacaataatgttaaccatgggattgtcctatagcttataaagaacatatctctttattttgaggtatattctttctatacctaatttgttatagattttatttggaatggat

SEQ ID NO: 115226 - DNA, 120 bp, synthetic construct
  source 1..120: mol_type = other DNA
aagcaaagcacaagctgagccgccttggaaagacaaccacggcctggcctgggaatgcgcaagttcagagctttgcagggagtgaccatgggctgtggcttcgtgaaaatgtcacgttca

SEQ ID NO: 115227 - DNA, 120 bp, synthetic construct
  source 1..120: mol_type = other DNA
ttttctcaccccgcctcctcctcagccccaccctccttcgctcctcctcttgtcactccctttcagacatgcgcagtgcggcccgtccctagggctgggttaagggccgcggatgtggca

SEQ ID NO: 115228 - DNA, 120 bp, synthetic construct
  source 1..120: mol_type = other DNA
tgtgtggtgaggtcagggatagtgtctgcgcttctaccctgaatagggctcccttggaaaataatatctctttttaaatacccccttggaccacttttaatagttttctgatagaactaa

SEQ ID NO: 115229 - DNA, 120 bp, synthetic construct
  source 1..120: mol_type = other DNA
tcacatctattcatttatgagaatattttcctttgccctcatgagcgtgtttataatagctgccttcaaattcttgtctgccgtttacatcttggacatcttggagatggctactgcctg

SEQ ID NO: 115230 - DNA, 120 bp, synthetic construct
  source 1..120: mol_type = other DNA
atagagaaagacagataaaaaagaaaaagcagttagaagggtgtgtaaaatttatcactatggtgtctcaagttttagagcagtgaggccccggccccagacacattactggtcatggtg

SEQ ID NO: 115231 - DNA, 120 bp, synthetic construct
  source 1..120: mol_type = other DNA
ttcttcctttattagtgttgattatatgttcttaggaggtagacagccaagattcatgagaaaggcttcctgacacaggactagacctcatcccttatacttcctatgctgcaccaccac

SEQ ID NO: 115232 - DNA, 120 bp, synthetic construct
  source 1..120: mol_type = other DNA
taagcacttcttagttacctctatggtgtgattttaataaatcacaaagtcagatcgtccccaccctcactcttcgtctaatctactctgagcctagctctcccaggccctttctctagt

SEQ ID NO: 115233 - DNA, 120 bp, synthetic construct
  source 1..120: mol_type = other DNA
tcactggaattgctatcccacaaattgggtttgaggctatgaagaagacttcacctcttcgatgatccaccgagagagattcccacacagagctctctctttatccactccctgcagttg

SEQ ID NO: 115234 - DNA, 120 bp, synthetic construct
  source 1..120: mol_type = other DNA
ggatagtcccacattgcttgaagattggaagagagagcactttatgaaatgtccttttggacacattttcattgacgtttctatgtcccaagaggcaatgagacaagtcatgataaactg

SEQ ID NO: 115235 - DNA, 120 bp, synthetic construct; identical to SEQ ID NO: 16434
  source 1..120: mol_type = other DNA

SEQ ID NO: 115236 - DNA, 120 bp, synthetic construct
  source 1..120: mol_type = other DNA
atatggtacattatagcattacactattatagtatgttattgtagtcttagcaattggtagtataatgtgtttcagtttctcccaaggtcacagaattatccagaccaaccaataacaac

SEQ ID NO: 115237 - DNA, 120 bp, synthetic construct; identical to SEQ ID NO: 115224
  source 1..120: mol_type = other DNA

SEQ ID NO: 115238 - DNA, 120 bp, synthetic construct; identical to SEQ ID NO: 115225
  source 1..120: mol_type = other DNA

SEQ ID NO: 115239 - DNA, 120 bp, synthetic construct; identical to SEQ ID NO: 115226
  source 1..120: mol_type = other DNA

SEQ ID NO: 115240 - DNA, 120 bp, synthetic construct; identical to SEQ ID NO: 115227
  source 1..120: mol_type = other DNA

SEQ ID NO: 115241 - DNA, 120 bp, synthetic construct; identical to SEQ ID NO: 115228
  source 1..120: mol_type = other DNA

SEQ ID NO: 115242 - DNA, 120 bp, synthetic construct; identical to SEQ ID NO: 115229
  source 1..120: mol_type = other DNA

SEQ ID NO: 115243 - DNA, 120 bp, synthetic construct; identical to SEQ ID NO: 115230
  source 1..120: mol_type = other DNA

SEQ ID NO: 115244 - DNA, 120 bp, synthetic construct; identical to SEQ ID NO: 115231
  source 1..120: mol_type = other DNA

SEQ ID NO: 115245 - DNA, 120 bp, synthetic construct; identical to SEQ ID NO: 115232
  source 1..120: mol_type = other DNA

SEQ ID NO: 115246 - DNA, 120 bp, synthetic construct; identical to SEQ ID NO: 115233
  source 1..120: mol_type = other DNA

SEQ ID NO: 115247 - DNA, 120 bp, synthetic construct; identical to SEQ ID NO: 115234
  source 1..120: mol_type = other DNA

SEQ ID NO: 115248 - DNA, 120 bp, synthetic construct; identical to SEQ ID NO: 16434
  source 1..120: mol_type = other DNA

SEQ ID NO: 115249 - DNA, 120 bp, synthetic construct; identical to SEQ ID NO: 16435
  source 1..120: mol_type = other DNA

SEQ ID NO: 115250 - DNA, 120 bp, synthetic construct; identical to SEQ ID NO: 16436
  source 1..120: mol_type = other DNA

SEQ ID NO: 115251 - DNA, 120 bp, synthetic construct; identical to SEQ ID NO: 16437
  source 1..120: mol_type = other DNA

SEQ ID NO: 115252 - DNA, 120 bp, synthetic construct; identical to SEQ ID NO: 16438
  source 1..120: mol_type = other DNA

SEQ ID NO: 115253 - DNA, 120 bp, synthetic construct
  source 1..120: mol_type = other DNA
ggctgggagatgcagggtgaggcgcgcatcgcggtgcatactgggagttgtagtctctccaccgttccccacggtggatggtggggctacaggaggacaatcccagattgagacaggagc

SEQ ID NO: 115254 - DNA, 120 bp, synthetic construct; identical to SEQ ID NO: 16439
  source 1..120: mol_type = other DNA

SEQ ID NO: 115255 - DNA, 120 bp, synthetic construct; identical to SEQ ID NO: 16440
  source 1..120: mol_type = other DNA

SEQ ID NO: 115256 - DNA, 120 bp, synthetic construct; identical to SEQ ID NO: 16441
  source 1..120: mol_type = other DNA

SEQ ID NO: 115257 - DNA, 120 bp, synthetic construct; identical to SEQ ID NO: 16442
  source 1..120: mol_type = other DNA

SEQ ID NO: 115258 - DNA, 120 bp, synthetic construct; identical to SEQ ID NO: 16443
  source 1..120: mol_type = other DNA

SEQ ID NO: 115259 - DNA, 120 bp, synthetic construct; identical to SEQ ID NO: 16444
  source 1..120: mol_type = other DNA

SEQ ID NO: 115260 - DNA, 120 bp, synthetic construct; identical to SEQ ID NO: 16445
  source 1..120: mol_type = other DNA

SEQ ID NO: 115261 - DNA, 120 bp, synthetic construct; identical to SEQ ID NO: 16434
  source 1..120: mol_type = other DNA

SEQ ID NO: 115262 - DNA, 120 bp, synthetic construct; identical to SEQ ID NO: 115236
  source 1..120: mol_type = other DNA

SEQ ID NO: 115263 - DNA, 120 bp, synthetic construct; identical to SEQ ID NO: 115224
  source 1..120: mol_type = other DNA

SEQ ID NO: 115264 - DNA, 120 bp, synthetic construct; identical to SEQ ID NO: 115225
  source 1..120: mol_type = other DNA

SEQ ID NO: 115265 - DNA, 120 bp, synthetic construct; identical to SEQ ID NO: 115226
  source 1..120: mol_type = other DNA

SEQ ID NO: 115266 - DNA, 120 bp, synthetic construct; identical to SEQ ID NO: 115227
  source 1..120: mol_type = other DNA

SEQ ID NO: 115267 - DNA, 120 bp, synthetic construct; identical to SEQ ID NO: 115228
  source 1..120: mol_type = other DNA

SEQ ID NO: 115268 - DNA, 120 bp, synthetic construct; identical to SEQ ID NO: 115229
  source 1..120: mol_type = other DNA

SEQ ID NO: 115269 - DNA, 120 bp, synthetic construct; identical to SEQ ID NO: 115230
  source 1..120: mol_type = other DNA

SEQ ID NO: 115270 - DNA, 120 bp, synthetic construct; identical to SEQ ID NO: 115231
  source 1..120: mol_type = other DNA

SEQ ID NO: 115271 - DNA, 120 bp, synthetic construct; identical to SEQ ID NO: 115232
  source 1..120: mol_type = other DNA

SEQ ID NO: 115272 - DNA, 120 bp, synthetic construct; identical to SEQ ID NO: 115233
  source 1..120: mol_type = other DNA

SEQ ID NO: 115273 - DNA, 120 bp, synthetic construct; identical to SEQ ID NO: 115234
  source 1..120: mol_type = other DNA

SEQ ID NO: 115274 - DNA, 120 bp, synthetic construct; identical to SEQ ID NO: 16434
  source 1..120: mol_type = other DNA

SEQ ID NO: 115275 - DNA, 120 bp, synthetic construct; identical to SEQ ID NO: 115223
  source 1..120: mol_type = other DNA

SEQ ID NO: 115276 - DNA, 120 bp, synthetic construct; identical to SEQ ID NO: 115224
  source 1..120: mol_type = other DNA

SEQ ID NO: 115277 - DNA, 120 bp, synthetic construct; identical to SEQ ID NO: 115225
  source 1..120: mol_type = other DNA

SEQ ID NO: 115278 - DNA, 120 bp, synthetic construct; identical to SEQ ID NO: 115226
  source 1..120: mol_type = other DNA

SEQ ID NO: 115279 - DNA, 120 bp, synthetic construct; identical to SEQ ID NO: 115227
  source 1..120: mol_type = other DNA

SEQ ID NO: 115280 - DNA, 120 bp, synthetic construct; identical to SEQ ID NO: 115228
  source 1..120: mol_type = other DNA

SEQ ID NO: 115281 - DNA, 120 bp, synthetic construct; identical to SEQ ID NO: 115229
  source 1..120: mol_type = other DNA

SEQ ID NO: 115282 - DNA, 120 bp, synthetic construct; identical to SEQ ID NO: 115230
  source 1..120: mol_type = other DNA

SEQ ID NO: 115283 - DNA, 120 bp, synthetic construct; identical to SEQ ID NO: 115231
  source 1..120: mol_type = other DNA

SEQ ID NO: 115284 - DNA, 120 bp, synthetic construct; identical to SEQ ID NO: 115232
  source 1..120: mol_type = other DNA

SEQ ID NO: 115285 - DNA, 120 bp, synthetic construct; identical to SEQ ID NO: 115233
  source 1..120: mol_type = other DNA

SEQ ID NO: 115286 - DNA, 120 bp, synthetic construct; identical to SEQ ID NO: 115234
  source 1..120: mol_type = other DNA

SEQ ID NO: 115287 - DNA, 120 bp, synthetic construct
  source 1..120: mol_type = other DNA
gggatatcttcactcctgtttattgcagcactatttgcaatagccaagatatgcaatcaacctaagtgtccatcaaaggataaatggataagaaaatgttgtgtataggccgggcgcggt

SEQ ID NO: 115288 - DNA, 120 bp, synthetic construct; identical to SEQ ID NO: 6985
  source 1..120: mol_type = other DNA

SEQ ID NO: 115289 - DNA, 120 bp, synthetic construct; identical to SEQ ID NO: 6986
  source 1..120: mol_type = other DNA

SEQ ID NO: 115290 - DNA, 120 bp, synthetic construct; identical to SEQ ID NO: 6987
  source 1..120: mol_type = other DNA

SEQ ID NO: 115291 - DNA, 120 bp, synthetic construct; identical to SEQ ID NO: 6984
  source 1..120: mol_type = other DNA

SEQ ID NO: 115292 - DNA, 120 bp, synthetic construct
  source 1..120: mol_type = other DNA
tagagggatgggtagatggggtgggtggatggatggatggatagactgatattgttgaatggatgagtgggtggatggatgtttagatggatggatagataataaatgggggagtggatg

SEQ ID NO: 115293 - DNA, 120 bp, synthetic construct
  source 1..120: mol_type = other DNA
ggatgggtagataataagtgggggagtggatggatggatggatggggtggatggatgcatggatagacgggtgggtggatggatggggtggatggatggatggattgattgatattgaat

SEQ ID NO: 115294 - DNA, 120 bp, synthetic construct
  source 1..120: mol_type = other DNA
tgtaatcccaacactttgagaggctgagctgggtggatgacttgagcccaggagttcaagaccagactggggaacatggtgatgaaaccctgtctctacaaaaaaatacaaaaaattagc

SEQ ID NO: 115295 - DNA, 120 bp, synthetic construct; identical to SEQ ID NO: 12034
  source 1..120: mol_type = other DNA

SEQ ID NO: 115296 - DNA, 120 bp, synthetic construct; identical to SEQ ID NO: 12035
  source 1..120: mol_type = other DNA

SEQ ID NO: 115297 - DNA, 120 bp, synthetic construct; identical to SEQ ID NO: 12036
  source 1..120: mol_type = other DNA

SEQ ID NO: 115298 - DNA, 120 bp, synthetic construct; identical to SEQ ID NO: 12037
  source 1..120: mol_type = other DNA

SEQ ID NO: 115299 - DNA, 120 bp, synthetic construct; identical to SEQ ID NO: 12038
  source 1..120: mol_type = other DNA

SEQ ID NO: 115300 - DNA, 120 bp, synthetic construct; identical to SEQ ID NO: 12039
  source 1..120: mol_type = other DNA

SEQ ID NO: 115301 - DNA, 120 bp, synthetic construct; identical to SEQ ID NO: 12040
  source 1..120: mol_type = other DNA

SEQ ID NO: 115302 - DNA, 120 bp, synthetic construct; identical to SEQ ID NO: 12041
  source 1..120: mol_type = other DNA

SEQ ID NO: 115303 - DNA, 120 bp, synthetic construct
  source 1..120: mol_type = other DNA
aaatggttaatttttatgttaaatgaatttcatggaagaagttaggaaagaaaaaagtaagaagggagggaaaggagaggaggaatgggggggaatggcagagggagggagggggagggg

SEQ ID NO: 115304 - DNA, 120 bp, synthetic construct
  source 1..120: mol_type = other DNA
tccagcctggcgacagagagagactccatctaaaaaacatatatgtgtgtgtgtgtgtgtgtgtgtgtgtgtgtatgtgtgtatatacatgtacacatagatatgcgtgtatatacatgt

SEQ ID NO: 115305 - DNA, 120 bp, synthetic construct; identical to SEQ ID NO: 31623
  source 1..120: mol_type = other DNA

SEQ ID NO: 115306 - DNA, 120 bp, synthetic construct
  source 1..120: mol_type = other DNA
acctgcacaatgtgcacatgtaccctaaaacttaaagtataataaaaaataaattaattaattaaaaaaaaaaatttcagtctttgaggttaaaaaaaaaacaagcacactcacacacac

SEQ ID NO: 115307 - DNA, 120 bp, synthetic construct
  source 1..120: mol_type = other DNA
ttcgtgacatttgaaaattaaattacataagttcacatttcagtgtccatacattaagtcttactgaaacacagccttggccaggcctggtggctcacgcctgtaatcccagcactttgg

SEQ ID NO: 115308 - DNA, 120 bp, synthetic construct; identical to SEQ ID NO: 22729
  source 1..120: mol_type = other DNA

SEQ ID NO: 115309 - DNA, 120 bp, synthetic construct
  source 1..120: mol_type = other DNA
catggttttatgcatttgttatttcagggaaaatcaaggttaaagatgtcttcagaatttgtatttttgggctgggcacggtggctcacacctgtaatcccaacacttttggaggctgag

SEQ ID NO: 115310 - DNA, 120 bp, synthetic construct; identical to SEQ ID NO: 22730
  source 1..120: mol_type = other DNA

SEQ ID NO: 115311 - DNA, 120 bp, synthetic construct
  source 1..120: mol_type = other DNA
actttgcagcaactttaagaggattttaaaatttctatgactactactattaggttagagctgatttcactaattccttcttcactggggccagatgccccagacagatgcctgccgttg

SEQ ID NO: 115312 - DNA, 120 bp, synthetic construct
  source 1..120: mol_type = other DNA
gggctgggaggaggaggcccaggctgggtagaggctgggaggagggagatccaggttgggaggaggcccaggctgggtagaggctgggaggagggagatccaggttgggaggaggccgag

SEQ ID NO: 115313 - DNA, 120 bp, synthetic construct
  source 1..120: mol_type = other DNA
ccaacgtccccgtctccgcagggccgccttcaacaacaacgtgagcgtggcctacgagtgcctgagcgccggcgggcgcaggaagaggccggggctggacgggcgcacctacagcgagct

SEQ ID NO: 115314 - DNA, 120 bp, synthetic construct
  source 1..120: mol_type = other DNA
atatatagcattctggcaatattcagaaaaaatatatatatagttgttttgttttgagatggggtctctgtcgtccaggctgaggtacagtggcacgatctcagctcactacaacctccg

SEQ ID NO: 115315 - DNA, 120 bp, synthetic construct
  source 1..120: mol_type = other DNA
ttttttttttaacttttactttaggtttaggggtacatgtgaaggtttgttacataggtaaacacatgtcatggggttttgttgtacatattatttcatcacccaggtgttaagcctagt

SEQ ID NO: 115316 - DNA, 120 bp, synthetic construct; identical to SEQ ID NO: 30231
  source 1..120: mol_type = other DNA

SEQ ID NO: 115317 - DNA, 120 bp, synthetic construct
  source 1..120: mol_type = other DNA
aattctgttttaaattctctgaggaatttccacactgctttccacaatggctgaactaatttacacttcctcagcagagtataaagcattcccttttttctgtgaccctgccagcatctt

SEQ ID NO: 115318 - DNA, 120 bp, synthetic construct
  source 1..120: mol_type = other DNA
agacctaaaaccataaaaatcctagaagaaaacctaggcattaccactcaggacataggcatggacaaggacttcatgtctaaaacactaaaagcaatggcaacaaaagccaaaattgac

SEQ ID NO: 115319 - DNA, 120 bp, synthetic construct; identical to SEQ ID NO: 30232
  source 1..120: mol_type = other DNA

SEQ ID NO: 115320 - DNA, 120 bp, synthetic construct; identical to SEQ ID NO: 30233
  source 1..120: mol_type = other DNA

SEQ ID NO: 115321 - DNA, 120 bp, synthetic construct; identical to SEQ ID NO: 30234
  source 1..120: mol_type = other DNA

SEQ ID NO: 115322 - DNA, 120 bp, synthetic construct; identical to SEQ ID NO: 30235
  source 1..120: mol_type = other DNA

SEQ ID NO: 115323 - DNA, 120 bp, synthetic construct
  source 1..120: mol_type = other DNA
ccacagtccccagagtgtgatattccccttcctgtgtccatgtgatctcattgttcaattcccacctatgagtgagaatatgtggcgtttggttttttgttcttgccatagtttactgag

SEQ ID NO: 115324 - DNA, 120 bp, synthetic construct
  source 1..120: mol_type = other DNA
ttccccattgcttgtttttctcaggtttgtcaaagatcagatagttgtagatatgcggcgttatttctgagggctctgttctgttccattgatctgtatctctgttttggtaccagtacc

SEQ ID NO: 115325 - DNA, 120 bp, synthetic construct
  source 1..120: mol_type = other DNA
gttttctcactattgagttctaggagttccttatgtattttagaaattaaccccttatcagatacatggtttgcaaatattttctcctattccataggttgccttttcactccattgctt

SEQ ID NO: 115326 - DNA, 120 bp, synthetic construct
  source 1..120: mol_type = other DNA
actggttcctggcctgttaggaactggctgggcagcaggaggtgagcagtaggcatgcaagcattaccacctgagcttgcataatataatatactatattatatagtatataatatagta

SEQ ID NO: 115327 - DNA, 120 bp, synthetic construct
  source 1..120: mol_type = other DNA
aaagaaggaagggaaacgcaagagccaggcttagtctaacttagtctggtctgaggacgcttatttcccttctctggttcccatggcccgcgaaatcaagtcctagaggcgctttattct

SEQ ID NO: 115328 - DNA, 120 bp, synthetic construct
  source 1..120: mol_type = other DNA
agctggtgtcactgcaaaagaaactcaagggcaccgaagatgaactggacaaatactctgaggctctcaaagatgcccaggagaagctggagctggcagagaaaaaggccaccgatgtaa

SEQ ID NO: 115329 - DNA, 120 bp, synthetic construct
  source 1..120: mol_type = other DNA
ggaccaacttcttttcacaccgttggattccattctaaaagctaattaagcctagaggcccaattagaaaagaattccttgggaagttggtaacaattccaagaatgtgtgagcaccagg

SEQ ID NO: 115330 - DNA, 120 bp, synthetic construct
  source 1..120: mol_type = other DNA
agggggataaggtctgagacatgtgtcgttaggtgatttattcattgtgcaaacaccatagagtgtatggtacttacacaaacctagagggtatagcctactaaacacctaggctacaaa

SEQ ID NO: 115331 - DNA, 120 bp, synthetic construct
  source 1..120: mol_type = other DNA
caacctacagacaaggatgagaaaactctcctaaactcttgtataatgacatcggcatgaaaatgaactcacctgaaactgaccttcccaggacattaagtcactagttggctgcttatg

SEQ ID NO: 115332 - DNA, 120 bp, synthetic construct
  source 1..120: mol_type = other DNA
tacaaggtattgtgctaagcgctttacagtccttcataattctcatagcagccccatggggaaagtactattattattcccacttttacagatgacgcccagagaagacaggtaatgtgt

SEQ ID NO: 115333 - DNA, 120 bp, synthetic construct
  source 1..120: mol_type = other DNA
gcaggaagatccggagcctgcaggagcaggcggacgccgctgaggagcgcgcgggcaccctgcagcgcgagctggaccacgagaggaagctgagggagaccgtaagggatacacccatca

SEQ ID NO: 115334 - DNA, 120 bp, synthetic construct
  source 1..120: mol_type = other DNA
aggaaattaataggcaaaagataattctcagtatttgctttataggacgagtcagcaaaagtcctgtggatatccctgaacttggctgggtggtaaactaattccgactcccttactcgc

SEQ ID NO: 115335 - DNA, 120 bp, synthetic construct
  source 1..120: mol_type = other DNA
gctcctggcctagtgattgatgttagacacaaaagataaattttatgaagggcacattattacttttattcttaccttctcttttgcacgtcgtttttataacagaactcttcctgtgcc

SEQ ID NO: 115336 - DNA, 120 bp, synthetic construct
  source 1..120: mol_type = other DNA
aaggcagaggcactacaatgccttgttcatgtctgttctccctcattatacaaatatgcttcataaattatgggctttggcacacacaggaggttgtgtttatctgttatccatgggagt

SEQ ID NO: 115337 - DNA, 120 bp, synthetic construct
  source 1..120: mol_type = other DNA
tgggagacagagctagactccatctcaaagaaaaaagaagaagaagaagaaagctaactcagtacactaagagtgatttacatgcctgcaaataatttgtgtctggggtcttgaccctcc

SEQ ID NO: 115338 - DNA, 120 bp, synthetic construct
  source 1..120: mol_type = other DNA
acttctgtgcccagggtcagagttccctcctgccgcctgtttctagtcaagagctagaagaatagccagcttctttgggtggtggcaaaggggattgtttatttatagtacagattcctg

SEQ ID NO: 115339 - DNA, 120 bp, synthetic construct
  source 1..120: mol_type = other DNA
aagcataaacagtcgtctttctgtgagtacaaagtccttgaggttcaggcccagatctaaagcagagcagagaacttggaacttggtagctacaaaaaagttttgaaaatcttgctggca

SEQ ID NO: 115340 - DNA, 120 bp, synthetic construct
  source 1..120: mol_type = other DNA
acgttgcttttattaaaattaggttggttttactcatcttactgagcccatactctgtgcagagaactgtgagttctctggatgtgagcagcttacagttcaatgacaaagacagggctg

SEQ ID NO: 115341 - DNA, 120 bp, synthetic construct
  source 1..120: mol_type = other DNA
agatcgtgccactgcaccccagcctgggtgatagagcgagaccctgtctcaaaaacaaaacaaaacaaaacaaaaaaatctacggaagaaaggaaccatgtgaaagagcgtttgctaatg

SEQ ID NO: 115342 - DNA, 120 bp, synthetic construct
  source 1..120: mol_type = other DNA
ggtagtaaaggaaagcatggttcgtatagaccagcacagccttgtgtggtctaaaaggcattttcccttaagctcaactgttggaagtaaggatttgccatattgcatagaagtacttca

SEQ ID NO: 115343 - DNA, 120 bp, synthetic construct
  source 1..120: mol_type = other DNA
aggtggaggttgcagtgagccaagatcacaccaccgcactccaacctgggtgacagagcgagactctgtctcaaaaaataaaaataaaaaaatagtggttcacttatactgcctacttaa

SEQ ID NO: 115344 - DNA, 120 bp, synthetic construct
  source 1..120: mol_type = other DNA
agggagcaatgtacagtcttgattcccgagtgaggccatctgctttgttggcagaaatgggtggttttgagaagcagagttcctttgtgtccagaaaacggttctaattttaatcctgct

SEQ ID NO: 115345 - DNA, 120 bp, synthetic construct
  source 1..120: mol_type = other DNA
ctctggtctaccagaaagaggatcatattgtttgtagacaaaacccttagggcctgatgggatctgatctctacccccatgcccttctgttacacaaagcttgcaagacccatggtgtgt

SEQ ID NO: 115346 - DNA, 120 bp, synthetic construct
  source 1..120: mol_type = other DNA
aaaacctaaacattttaatacctgatgatttggctactttaaggcagcccttcgtctctaggactcagttttcattttttcccatccctctcctttttctctcctccttcctttggcttg

SEQ ID NO: 115347 - DNA, 120 bp, synthetic construct
  source 1..120: mol_type = other DNA
tcatcctctagttttccctatgtttgtagctacaggaaacataaaacttcccaactttaactcaaataaatcattacaggctgagactcgggctgagtttgcggagaggtcagtaactaa

SEQ ID NO: 115348 - DNA, 120 bp, synthetic construct
  source 1..120: mol_type = other DNA
atgacaaatggttgcaaaatgatctgccaaagtgcagcaaagtatgaaacctgcagcattacaaaaactaagttgcagacttgccatataaagtgtggcgcccattgcttttcaagcctc

SEQ ID NO: 115349 - DNA, 120 bp, synthetic construct
  source 1..120: mol_type = other DNA
ttgtaaacgctgaactagagcagtgaactagaatgagtgaccttgagcactgtccttttgggaaattaagctaaactcaagtaaaactagaaggccatgccgtttgttgtacaggaactt

SEQ ID NO: 115350 - DNA, 120 bp, synthetic construct
  source 1..120: mol_type = other DNA
aatgtcattttccaagcccacctgtcattcatttacccatgcagaaaaaatggtaacttgaagagagtggcatgtgcctgctgccttagaggttatagaatccccacagtcaacaaaaaa

SEQ ID NO: 115351 - DNA, 120 bp, synthetic construct
  source 1..120: mol_type = other DNA
tatatcaggagtttctaaagcagtagttccttgttgaacttcaaaaaaatacccaggcctgcattccctctcagagttctgattttcaaaggttagaatgaggtctggacatctgggggg

SEQ ID NO: 115352 - DNA, 120 bp, synthetic construct
  source 1..120: mol_type = other DNA
tagtatggtggaattttagaatctggacaatgtctctcccttgagtttataaagacttccatgatttcatgcttttcttttcttaaggctccttgggcctgcttctgactatgattcctt

SEQ ID NO: 115353 - DNA, 120 bp, synthetic construct
  source 1..120: mol_type = other DNA
tggaaaggctctttgtcctcaataagctgggcatctgatggggagatagaggagtgaagcgagtccgaactaataggcatgtgtatttggaggcaacaaggaagagagaaccattctgac

SEQ ID NO: 115354 - DNA, 120 bp, synthetic construct
  source 1..120: mol_type = other DNA
acactatcaaagctagacaggagtcagaatgtgtaccctgtattgtggtgactgggggaaggacagagacttaattccaaatttcaaaaaatttcagtgcagcaaaagcagtaaccccca

SEQ ID NO: 115355 - DNA, 120 bp, synthetic construct
  source 1..120: mol_type = other DNA
ccatgtgcagaaaatctaagactgtcctaccttcaactaatagagttgaaaacagttgctttctgcagaaatgcaaatgcaaggaattggctgaaaggctggccttgcctgcttgtttct

SEQ ID NO: 115356 - DNA, 120 bp, synthetic construct
  source 1..120: mol_type = other DNA
ctcatcctgtgtttgtgattgatgtttgcctgcctaaatgtacaaaccaccattgtgtccaaagcacagctattcatgacttaattttctaatctcaccacagagaaagtggctcatgcc

SEQ ID NO: 115357 - DNA, 120 bp, synthetic construct
  source 1..120: mol_type = other DNA
cagtccttcatgttaaagatttagacaccacatacaactggtaaaggacgttttcttgagagttttaactatatgtaaacattgtataatgatatggaataaaatgcacattgtaggaca

SEQ ID NO: 115358 - DNA, 120 bp, synthetic construct
  source 1..120: mol_type = other DNA
tccccagtgaagacacatattacataaatgatcaactacctaaggatatctcatttgtatttaagattctttgggcacaactgcaagcggaaaggactctatcccatggacacagggtgt

SEQ ID NO: 115359 - DNA, 120 bp, synthetic construct
  source 1..120: mol_type = other DNA
accccaaaccttgcattaacaacctttaagccagcacatgtgcgtgcatgcgtgcacacacacacgtaactcgttttttataatacacaaccatcctattaacatgagctaaacaatcta

SEQ ID NO: 115360 - DNA, 120 bp, synthetic construct
  source 1..120: mol_type = other DNA
gcaccattgcactccaggttgggcaacaagaacgaaactccatctcaaaaaaataaaacaaaataaatgccagtttttctgtgtgtattatatttaatatgcattgcattttgaaatatt

SEQ ID NO: 115361 - DNA, 120 bp, synthetic construct
  source 1..120: mol_type = other DNA
ggaatgctaagggcaaatttcctgaactctgaattgttattatcacttttaactcccaagagtaaaaataaatacaccactgggcatggcggctcatgcctctaatcccagtactttggg

SEQ ID NO: 115362 - DNA, 120 bp, synthetic construct
  source 1..120: mol_type = other DNA
aattgacttactgagaggatggcaatgttacatccccatcatatccatctttagcttagatgagacagctaaaccggtcaagggacttaggctcattgaaatcagagtggattccatcag

SEQ ID NO: 115363 - DNA, 120 bp, synthetic construct
  source 1..120: mol_type = other DNA
taaaacttcagaaattaaaaaaggacaataatttagagtttttcctgcacaacttctgcatccccatattcacttctcaccccgtgcttgtgtatgtgaaggcatctgtccaacacatca

SEQ ID NO: 115364 - DNA, 120 bp, synthetic construct
  source 1..120: mol_type = other DNA
ctgggtgactgggacccctccaggggccttatgtaagagaaaacacaatttttttcctctatttagttagaaatgagagtaacaagcaggccaaaaaaaggtggcatgaaattaaagctc

SEQ ID NO: 115365 - DNA, 120 bp, synthetic construct
  source 1..120: mol_type = other DNA
cagaaaaatgaggtctgccctactggtttacattaggcaagaactcgagagtcacagcagaaaatacatcagtacttgacaatgtacaatctaaggagaagacacccagtcctaacgaaa

SEQ ID NO: 115366 - DNA, 120 bp, synthetic construct
  source 1..120: mol_type = other DNA
catgtgatgtggatgtttgggagaaagaacagagctggaaatgtaaagactgtcagagcgaataccatgtataatctgttcagttacttgccccgcctctggcatactatctatttggaa

SEQ ID NO: 115367 - DNA, 120 bp, synthetic construct
  source 1..120: mol_type = other DNA
caggcgtgagccactgcgcccagcctcctttttggccaagtgatgagtctgctccatacaactaagtaattcaatatttccatgctatatccaagtaagcacataaatgacattatttta

SEQ ID NO: 115368 - DNA, 120 bp, synthetic construct
  source 1..120: mol_type = other DNA
ataattttaaaaatattttgtagaggtggcgtcttgctttgttgcccagactggtctcaaactcctgggctcaagtaatcctcctgctttggcctcccacagtgctgggattacatgtat

SEQ ID NO: 115369 - DNA, 120 bp, synthetic construct
  source 1..120: mol_type = other DNA
cccatgcctgcactgcctggcaagcattcaaattttttaaagtgcagatgtagtattcaacctacctgggaagatcaaaaatactgcaacagtacaatgaaatgttccccgaagaactct

SEQ ID NO: 115370 - DNA, 120 bp, synthetic construct
  source 1..120: mol_type = other DNA
cagcttacacctgtaattccagcactttgggaggctgaagcaggcagatcgcttgagcccaggagtatgagaccagcctgggcaacatggcaaaactccaactctacagaaaaaattaga

SEQ ID NO: 115371 - DNA, 120 bp, synthetic construct
  source 1..120: mol_type = other DNA
caggactagccctttttggactgagtaaactccttggattctttaatgctttgagaatgaggtgggaggaagatgtgaaataaaaaataccatcaagcttcctactgatctgagcaacaa

SEQ ID NO: 115372 - DNA, 120 bp, synthetic construct
  source 1..120: mol_type = other DNA
ttcacaacctctgcagtgacttggtcaatgactgccagcttccctgatttttactaccacacttcttccaatttaggatcagccagagaaaggcaaacatgctccccaaaccaatcacat

SEQ ID NO: 115373 - DNA, 120 bp, synthetic construct
  source 1..120: mol_type = other DNA
gagtgaggggggtgtgctgtgttatctttatctcttcaatgtcttaggcagggtctggcacatgatgggttctcagaaaatgcgtgttaataaaaataaaacaagcctaaaagcttgagt

SEQ ID NO: 115374 - DNA, 120 bp, synthetic construct
  source 1..120: mol_type = other DNA
tctgtcgctgtccaataaaataggcattagccacattggttcctcgtgattgaggaactgaattttacattttatttagtttacatttaaatagccacatgtggctagtagctactgtac

SEQ ID NO: 115375 - DNA, 120 bp, synthetic construct
  source 1..120: mol_type = other DNA
tgtcaagtgaaataaaaacatagttctgctataatgtaacaagtgccttcctaaaatcactgcactatgctaaatcacgcactaaaaatccccaggctggtggggaaagtgagggcacag

SEQ ID NO: 115376 - DNA, 120 bp, synthetic construct
  source 1..120: mol_type = other DNA
aggagttcaaggttgcagtgagctatgatcatgccactgcactccaccctgggtgacagagtgggactgtctcaaaaaaccaaaaacctaaacctaaatatcttaaacattttgttttaa

SEQ ID NO: 115377 - DNA, 120 bp, synthetic construct
  source 1..120: mol_type = other DNA
ttaatattttattttaaatttattttttgaggcagggtctatgttgtccagactggtctcaaattcctgggctcaagagatccttctgtcttggcctcccaaagtgctgggattacaggc

SEQ ID NO: 115378 - DNA, 120 bp, synthetic construct
  source 1..120: mol_type = other DNA
tcattaaggcaagataattctgttaatgtttatctgctcataccatttcatctcaaccgcttttccgcaaagaggaaaaaataccctcagtccactcttgcctttaaggaaagtatctaa

SEQ ID NO: 115379 - DNA, 120 bp, synthetic construct
  source 1..120: mol_type = other DNA
atgtcatcatttgtaagccacaccattatttacacactgtgggaagaaaagactctgccaattaaactacatcatgccacagatgcactgtgactcgggagacacaaaaatgtgaagaat

SEQ ID NO: 115380 - DNA, 120 bp, synthetic construct
  source 1..120: mol_type = other DNA
ctgtcttggcctcgcaaagcactgggattacaagtgtgagtcactgcaccttgccatttcaacatccaataagaagtgataacaaaaaattactttcagtgcgtctggtggtagaataat

SEQ ID NO: 115381 - DNA, 120 bp, synthetic construct
  source 1..120: mol_type = other DNA
aagaaaaagaatgtttttccattttgcatgtataaaacacggttagactattcctcatccttgatgcatagctctgctgggtatcaaattcttggttagaagtgtgggggccataggggg

SEQ ID NO: 115382 - DNA, 120 bp, synthetic construct
  source 1..120: mol_type = other DNA
acaccctcatgcctggctaatgtctttaatttccttgtggtagtcagactttccatagatggatctcccaattcctgtcttaaggattctgtcgttggagccactgtcatatactcatat

SEQ ID NO: 115383 - DNA, 120 bp, synthetic construct
  source 1..120: mol_type = other DNA
gccaagagtagatagagcgtcagatacaactctatacctcctctcttgctaaccacaattaggctttgttctataaggacttaagggaaaccagccctttcaaaagattctaccactgat

SEQ ID NO: 115384 - DNA, 120 bp, synthetic construct
  source 1..120: mol_type = other DNA
ctgggaacatgaattcacttcttagcaaatatttgttgacaaatggcttctgcaagaccctgatggtatcaggaggtgactctgagttttctgagaggtcagtagaaagtatctgattta

SEQ ID NO: 115385 - DNA, 120 bp, synthetic construct
  source 1..120: mol_type = other DNA
tacagcaccccagtttcccacatcaccagggatcactcactatttggcagtacttattttttcccaaaaatcactaatacaccaggctggggaaaaaaccgagagtccgtttctataaaa

SEQ ID NO: 115386 - DNA, 120 bp, synthetic construct; identical to SEQ ID NO: 20220
  source 1..120: mol_type = other DNA

SEQ ID NO: 115387 - DNA, 120 bp, synthetic construct
  source 1..120: mol_type = other DNA
tgctgcacccattaactcgtcatttaacatttggtatatctcctaatttaacatttggtatatctcctaatgctatccttcccccctcccccaaccccacaacaggccctggtgtgtgat

SEQ ID NO: 115388 - DNA, 120 bp, synthetic construct
  source 1..120: mol_type = other DNA
gtcaaatgagtaggttgcaaaaattttctcccattctgtaggttgcctgttcagtctgatagtagtttcttttgctgtgcagaagctctttagtttaattagatcccatttgtcaatttt

SEQ ID NO: 115389 - DNA, 120 bp, synthetic construct
  source 1..120: mol_type = other DNA
ccttcaagaggtccttcacatcccttgtaagttggattcctaggtattttattctctttgaagcaattgtgaatgggagttcactcatgatttggctctctgtttgtctgttattggtgt

SEQ ID NO: 115390 - DNA, 120 bp, synthetic construct
  source 1..120: mol_type = other DNA
ccgctttttgtattgattggaatagtttcagaaggaatggtaccagctcctccttgtacctctggtagaattcggctgtgaatccatctggtcctggactttttttggttggtaagctat

SEQ ID NO: 115391 - DNA, 120 bp, synthetic construct; identical to SEQ ID NO: 20221
  source 1..120: mol_type = other DNA

SEQ ID NO: 115392 - DNA, 120 bp, synthetic construct; identical to SEQ ID NO: 20222
  source 1..120: mol_type = other DNA

SEQ ID NO: 115393 - DNA, 120 bp, synthetic construct; identical to SEQ ID NO: 20223
  source 1..120: mol_type = other DNA

SEQ ID NO: 115394 - DNA, 120 bp, synthetic construct; identical to SEQ ID NO: 20224
  source 1..120: mol_type = other DNA

SEQ ID NO: 115395 - DNA, 120 bp, synthetic construct; identical to SEQ ID NO: 20225
  source 1..120: mol_type = other DNA

SEQ ID NO: 115396 - DNA, 120 bp, synthetic construct; identical to SEQ ID NO: 20226
  source 1..120: mol_type = other DNA

SEQ ID NO: 115397 - DNA, 120 bp, synthetic construct; identical to SEQ ID NO: 20227
  source 1..120: mol_type = other DNA

SEQ ID NO: 115398 - DNA, 120 bp, synthetic construct; identical to SEQ ID NO: 20228
  source 1..120: mol_type = other DNA

SEQ ID NO: 115399 - DNA, 120 bp, synthetic construct; identical to SEQ ID NO: 20229
  source 1..120: mol_type = other DNA

SEQ ID NO: 115400 - DNA, 120 bp, synthetic construct; identical to SEQ ID NO: 20230
  source 1..120: mol_type = other DNA

SEQ ID NO: 115401 - DNA, 120 bp, synthetic construct; identical to SEQ ID NO: 20231
  source 1..120: mol_type = other DNA

SEQ ID NO: 115402 - DNA, 120 bp, synthetic construct; identical to SEQ ID NO: 20232
  source 1..120: mol_type = other DNA

SEQ ID NO: 115403 - DNA, 120 bp, synthetic construct; identical to SEQ ID NO: 20233
  source 1..120: mol_type = other DNA

SEQ ID NO: 115404 - DNA, 120 bp, synthetic construct; identical to SEQ ID NO: 20234
  source 1..120: mol_type = other DNA

SEQ ID NO: 115405 - DNA, 120 bp, synthetic construct; identical to SEQ ID NO: 20235
  source 1..120: mol_type = other DNA

SEQ ID NO: 115406 - DNA, 120 bp, synthetic construct; identical to SEQ ID NO: 20236
  source 1..120: mol_type = other DNA

SEQ ID NO: 115407 - DNA, 120 bp, synthetic construct; identical to SEQ ID NO: 20237
  source 1..120: mol_type = other DNA

SEQ ID NO: 115408 - DNA, 120 bp, synthetic construct; identical to SEQ ID NO: 20238
  source 1..120: mol_type = other DNA

SEQ ID NO: 115409 - DNA, 120 bp, synthetic construct; identical to SEQ ID NO: 20239
  source 1..120: mol_type = other DNA

SEQ ID NO: 115410 - DNA, 120 bp, synthetic construct; identical to SEQ ID NO: 20240
  source 1..120: mol_type = other DNA

SEQ ID NO: 115411 - DNA, 120 bp, synthetic construct; identical to SEQ ID NO: 20206
  source 1..120: mol_type = other DNA

SEQ ID NO: 115412 - DNA, 120 bp, synthetic construct; identical to SEQ ID NO: 20207
  source 1..120: mol_type = other DNA

SEQ ID NO: 115413 - DNA, 120 bp, synthetic construct; identical to SEQ ID NO: 20208
  source 1..120: mol_type = other DNA

SEQ ID NO: 115414 - DNA, 120 bp, synthetic construct; identical to SEQ ID NO: 20209
  source 1..120: mol_type = other DNA

SEQ ID NO: 115415 - DNA, 120 bp, synthetic construct; identical to SEQ ID NO: 20210
  source 1..120: mol_type = other DNA

SEQ ID NO: 115416 - DNA, 120 bp, synthetic construct; identical to SEQ ID NO: 20211
  source 1..120: mol_type = other DNA

SEQ ID NO: 115417 - DNA, 120 bp, synthetic construct; identical to SEQ ID NO: 20212
  source 1..120: mol_type = other DNA

SEQ ID NO: 115418 - DNA, 120 bp, synthetic construct; identical to SEQ ID NO: 20213
  source 1..120: mol_type = other DNA

SEQ ID NO: 115419 - DNA, 120 bp, synthetic construct
  source 1..120: mol_type = other DNA
cttcttgtttatatgatccagttattgctgcaggaggcaccatgttggaagggaatggggcaggcgccttcttgtttgtatgatccagtcattgctgcaggaggtaccatgttggaaggg

SEQ ID NO: 115420 - DNA, 120 bp, synthetic construct
  source 1..120: mol_type = other DNA
gggaatgagcaggctccttcttgtttgtatgatccagtcattgctgcaggaggtaccctgttggaaggtaatgggcaggctccttcttgtttgtatgatccagtcattgctgcaggaggc

SEQ ID NO: 115421 - DNA, 120 bp, synthetic construct; identical to SEQ ID NO: 20214
  source 1..120: mol_type = other DNA

SEQ ID NO: 115422 - DNA, 120 bp, synthetic construct; identical to SEQ ID NO: 20215
  source 1..120: mol_type = other DNA

SEQ ID NO: 115423 - DNA, 120 bp, synthetic construct; identical to SEQ ID NO: 20216
  source 1..120: mol_type = other DNA

SEQ ID NO: 115424 - DNA, 120 bp, synthetic construct
  source 1..120: mol_type = other DNA
tctagtgctgtcagtggagtgttgcagtcccccactattactgtgttgctgtctatctcatttctcagttctgttagtaattgttttataaatttgggaactccagtgttaggtgcacat

SEQ ID NO: 115425 - DNA, 120 bp, synthetic construct; identical to SEQ ID NO: 20217
  source 1..120: mol_type = other DNA

SEQ ID NO: 115426 - DNA, 120 bp, synthetic construct; identical to SEQ ID NO: 20218
  source 1..120: mol_type = other DNA

SEQ ID NO: 115427 - DNA, 120 bp, synthetic construct; identical to SEQ ID NO: 20219
  source 1..120: mol_type = other DNA

SEQ ID NO: 115428 - DNA, 120 bp, synthetic construct; identical to SEQ ID NO: 26122
  source 1..120: mol_type = other DNA

SEQ ID NO: 115429 - DNA, 120 bp, synthetic construct; identical to SEQ ID NO: 26123
  source 1..120: mol_type = other DNA

SEQ ID NO: 115430 - DNA, 120 bp, synthetic construct; identical to SEQ ID NO: 26124
  source 1..120: mol_type = other DNA

SEQ ID NO: 115431 - DNA, 120 bp, synthetic construct; identical to SEQ ID NO: 26125
  source 1..120: mol_type = other DNA

SEQ ID NO: 115432 - DNA, 120 bp, synthetic construct; identical to SEQ ID NO: 26126
  source 1..120: mol_type = other DNA

SEQ ID NO: 115433 - DNA, 120 bp, synthetic construct; identical to SEQ ID NO: 26127
  source 1..120: mol_type = other DNA

SEQ ID NO: 115434 - DNA, 120 bp, synthetic construct; identical to SEQ ID NO: 26128
  source 1..120: mol_type = other DNA

SEQ ID NO: 115435 - DNA, 120 bp, synthetic construct; identical to SEQ ID NO: 26129
  source 1..120: mol_type = other DNA

SEQ ID NO: 115436 - DNA, 120 bp, synthetic construct
  source 1..120: mol_type = other DNA
cttgggcctggagcctgttactagggcctggggtctgtcactatggccaggggcctgtcagtcactagggccaggacctgtcccttgggcctggagcctattactaggacctggggtctg

SEQ ID NO: 115437 - DNA, 120 bp, synthetic construct; identical to SEQ ID NO: 26132
  source 1..120: mol_type = other DNA

SEQ ID NO: 115438 - DNA, 120 bp, synthetic construct; identical to SEQ ID NO: 26133
  source 1..120: mol_type = other DNA

SEQ ID NO: 115439 - DNA, 120 bp, synthetic construct; identical to SEQ ID NO: 26134
  source 1..120: mol_type = other DNA

SEQ ID NO: 115440 - DNA, 120 bp, synthetic construct; identical to SEQ ID NO: 26135
  source 1..120: mol_type = other DNA

SEQ ID NO: 115441 - DNA, 120 bp, synthetic construct; identical to SEQ ID NO: 26136
  source 1..120: mol_type = other DNA

SEQ ID NO: 115442 - DNA, 120 bp, synthetic construct; identical to SEQ ID NO: 26137
  source 1..120: mol_type = other DNA

SEQ ID NO: 115443 - DNA, 120 bp, synthetic construct; identical to SEQ ID NO: 26138
  source 1..120: mol_type = other DNA

SEQ ID NO: 115444 - DNA, 120 bp, synthetic construct; identical to SEQ ID NO: 26139
  source 1..120: mol_type = other DNA

SEQ ID NO: 115445 - DNA, 120 bp, synthetic construct; identical to SEQ ID NO: 26140
  source 1..120: mol_type = other DNA

SEQ ID NO: 115446 - DNA, 120 bp, synthetic construct
  source 1..120: mol_type = other DNA
actatggggctccaagaggaaacaaaaacaattcttgtttcttctttttatctccggaaaccatagcacttacatttaaagccatacagtcatttatcaataagacttaaaattaggtct

SEQ ID NO: 115447 - DNA, 120 bp, synthetic construct; identical to SEQ ID NO: 24961
  source 1..120: mol_type = other DNA

SEQ ID NO: 115448 - DNA, 120 bp, synthetic construct; identical to SEQ ID NO: 24962
  source 1..120: mol_type = other DNA

SEQ ID NO: 115449 - DNA, 120 bp, synthetic construct; identical to SEQ ID NO: 24963
  source 1..120: mol_type = other DNA

SEQ ID NO: 115450 - DNA, 120 bp, synthetic construct
  source 1..120: mol_type = other DNA
ccgcaataaacatatgtgtgcatgtgtctttatagcagcatgtttcctatttaataaatggtgttgggaaaactgcctagccatatgtagaaagctgaaactggatcccttccttacacc

SEQ ID NO: 115451 - DNA, 120 bp, synthetic construct
  source 1..120: mol_type = other DNA
gatgaccatgaaagaatttcgagagtttgcgcggaggctggccagcgcccgggcctggaggtcccccaaggggatggtctccataactggcttgggggccggccgtatctcgaaggagtc

SEQ ID NO: 115452 - DNA, 120 bp, synthetic construct; identical to SEQ ID NO: 19854
  source 1..120: mol_type = other DNA

SEQ ID NO: 115453 - DNA, 120 bp, synthetic construct
  source 1..120: mol_type = other DNA
cactcaactgcatggtttaatttctttccttctttctttttcttggaggggatctcgctctgtcacccaggctggagtgcagtgatgtgatcacggctcaagtcagcctccacttcctgg

SEQ ID NO: 115454 - DNA, 120 bp, synthetic construct; identical to SEQ ID NO: 19855
  source 1..120: mol_type = other DNA

SEQ ID NO: 115455 - DNA, 120 bp, synthetic construct; identical to SEQ ID NO: 19856
  source 1..120: mol_type = other DNA

SEQ ID NO: 115456 - DNA, 120 bp, synthetic construct
  source 1..120: mol_type = other DNA
ctgccccgtcccctcccatccaagggttatagggaccctgacacttgcaggggagccgccacctgcccagtcctctgctccactcaactgcatggtttaatttctttccttctttctttt

SEQ ID NO: 115457 - DNA, 120 bp, synthetic construct; identical to SEQ ID NO: 19857
  source 1..120: mol_type = other DNA

SEQ ID NO: 115458 - DNA, 120 bp, synthetic construct; identical to SEQ ID NO: 15799
  source 1..120: mol_type = other DNA

SEQ ID NO: 115459 - DNA, 120 bp, synthetic construct; identical to SEQ ID NO: 15800
  source 1..120: mol_type = other DNA

SEQ ID NO: 115460 - DNA, 120 bp, synthetic construct
  source 1..120: mol_type = other DNA
cagcatctggggagcaaggaggagcatcgtgggcctggccgggcctcacagggcagggctgggggctacagattgtggggtgaagaatggagctgggacggggggaccggggtgggtcca

SEQ ID NO: 115461 - DNA, 120 bp, synthetic construct; identical to SEQ ID NO: 15801
  source 1..120: mol_type = other DNA

SEQ ID NO: 115462 - DNA, 120 bp, synthetic construct; identical to SEQ ID NO: 15795
  source 1..120: mol_type = other DNA

SEQ ID NO: 115463 - DNA, 120 bp, synthetic construct; identical to SEQ ID NO: 15802
  source 1..120: mol_type = other DNA

SEQ ID NO: 115464 - DNA, 120 bp, synthetic construct
  source 1..120: mol_type = other DNA
gccggtgtaaggaaaggtggacagcaggggccggtcactgggtggagggggagggcgggctccagccccagagcttcccaaattagatctaagatccctgggaagctcagtgaagctcag

SEQ ID NO: 115465 - DNA, 120 bp, synthetic construct; identical to SEQ ID NO: 15795
  source 1..120: mol_type = other DNA

SEQ ID NO: 115466 - DNA, 120 bp, synthetic construct; identical to SEQ ID NO: 15801
  source 1..120: mol_type = other DNA

SEQ ID NO: 115467 - DNA, 120 bp, synthetic construct
  source 1..120: mol_type = other DNA
ggaaggataaatggggaggggagagcccactgggtagaaggaacagggagcggccagggtaagtccccactctcagagaccctgacatcagcgtcacctggagcagagtggcccagcctc

SEQ ID NO: 115468 - DNA, 120 bp, synthetic construct
  source 1..120: mol_type = other DNA
agctggggccggggatgagaccatggggagctggggctggggctgggactagtccatggggagctggggctgaagttgggggtgagtccatggggagctgggctgggcctcctggggttg

SEQ ID NO: 115469 - DNA, 120 bp, synthetic construct
  source 1..120: mol_type = other DNA
ccgtcaccccatcccctcacctcctgggctcctgaaggtcccatcttgtgggcctcattcatggaaccaggacggggcaggtggaggcctctggggagtttgtccagagaatggaggaga

SEQ ID NO: 115470 - DNA, 120 bp, synthetic construct; identical to SEQ ID NO: 15796
  source 1..120: mol_type = other DNA

SEQ ID NO: 115471 - DNA, 120 bp, synthetic construct; identical to SEQ ID NO: 15797
  source 1..120: mol_type = other DNA

SEQ ID NO: 115472 - DNA, 120 bp, synthetic construct; identical to SEQ ID NO: 15798
  source 1..120: mol_type = other DNA

SEQ ID NO: 115473 - DNA, 120 bp, synthetic construct; identical to SEQ ID NO: 15803
  source 1..120: mol_type = other DNA

SEQ ID NO: 115474 - DNA, 120 bp, synthetic construct; identical to SEQ ID NO: 15804
  source 1..120: mol_type = other DNA

SEQ ID NO: 115475 - DNA, 120 bp, synthetic construct; identical to SEQ ID NO: 29190
  source 1..120: mol_type = other DNA

SEQ ID NO: 115476 - DNA, 120 bp, synthetic construct
  source 1..120: mol_type = other DNA
ccacactgacttccacaatggttgaactagtttacagtcccaccaacagtgtaaaagtgttcctatttctccgcatcctctccagcacctgttgtttcctgactttttaatgattgccat

SEQ ID NO: 115477 - DNA, 120 bp, synthetic construct; identical to SEQ ID NO: 69571
  source 1..120: mol_type = other DNA

SEQ ID NO: 115478 - DNA, 120 bp, synthetic construct
  source 1..120: mol_type = other DNA
agctttttgatgtgctgctggattcagtttgccagtattttattgaggatttttgcatcaatgttcatcaaggatattggtctaaaattctcttttttggttgtgtctctgcctggcttt

SEQ ID NO: 115479 - DNA, 120 bp, synthetic construct
  source 1..120: mol_type = other DNA
ccagtagtcattcaggagcaggttgttcagtttccatgtagttgagcggctttgagtgagattcttaatcctgagttctagtttgattgcactgtggtctgagagacagtttgttataat

SEQ ID NO: 115480 - DNA, 120 bp, synthetic construct; identical to SEQ ID NO: 115176
  source 1..120: mol_type = other DNA

SEQ ID NO: 115481 - DNA, 120 bp, synthetic construct; identical to SEQ ID NO: 71874
  source 1..120: mol_type = other DNA

SEQ ID NO: 115482 - DNA, 120 bp, synthetic construct
  source 1..120: mol_type = other DNA
tcctattcggccatcttggctcctcctcccccagaaaaatattttgaattagaaaaatttgggcctagtggcctggcacgctggctcatgcctgtaatcccagcactttgggaggtcgag

SEQ ID NO: 115483 - DNA, 120 bp, synthetic construct; identical to SEQ ID NO: 23694
  source 1..120: mol_type = other DNA

SEQ ID NO: 115484 - DNA, 120 bp, synthetic construct; identical to SEQ ID NO: 23695
  source 1..120: mol_type = other DNA

SEQ ID NO: 115485 - DNA, 120 bp, synthetic construct; identical to SEQ ID NO: 22991
  source 1..120: mol_type = other DNA

SEQ ID NO: 115486 - DNA, 120 bp, synthetic construct
  source 1..120: mol_type = other DNA
tttctccacatcctctccagcacctgttgtttcctgactttttaatgattgccattttcaaagaatagtatgtttttaagtctgtgcagtcttgggccaagctcgttctattccccattc

SEQ ID NO: 115487 - DNA, 120 bp, synthetic construct; identical to SEQ ID NO: 22992
  source 1..120: mol_type = other DNA

SEQ ID NO: 115488 - DNA, 120 bp, synthetic construct; identical to SEQ ID NO: 22993
  source 1..120: mol_type = other DNA

SEQ ID NO: 115489 - DNA, 120 bp, synthetic construct; identical to SEQ ID NO: 22994
  source 1..120: mol_type = other DNA

SEQ ID NO: 115490 - DNA, 120 bp, synthetic construct
  source 1..120: mol_type = other DNA
ttctggatattagtcctttgtcagatgagtagattccaaaaattttctcccattccgtaggttgcctgttcactctgatggtagtttcttttgctatgcagaagctctttagtttaatta

SEQ ID NO: 115491 - DNA, 120 bp, synthetic construct
  source 1..120: mol_type = other DNA
atggctgtatagtattccatggtatatatgtaccacattttctttatccaatctgtcattgatgggtacctaggttgattccatgtctttgctattgtaaatagtgctgcagtgaacatt

SEQ ID NO: 115492 - DNA, 120 bp, synthetic construct; identical to SEQ ID NO: 22995
  source 1..120: mol_type = other DNA

SEQ ID NO: 115493 - DNA, 120 bp, synthetic construct; identical to SEQ ID NO: 22996
  source 1..120: mol_type = other DNA

SEQ ID NO: 115494 - DNA, 120 bp, synthetic construct
  source 1..120: mol_type = other DNA
aacgacgcctgcctacaggatctagaaaatagcctcaaaaggacaaatctaagtggtattggccttaaagaggaggtggggagtgtagaaagtttattcaaagggatggtaacagaacat

SEQ ID NO: 115495 - DNA, 120 bp, synthetic construct
  source 1..120: mol_type = other DNA
ttttctggttgttttggggtcttctcttccttctttccttcctgtcttccaatagtgaaggtaattttctctggtgatatgatttagtttcttgttttttatttttcatgtatccactgt

SEQ ID NO: 115496 - DNA, 120 bp, synthetic construct; identical to SEQ ID NO: 22997
  source 1..120: mol_type = other DNA

SEQ ID NO: 115497 - DNA, 120 bp, synthetic construct; identical to SEQ ID NO: 22998
  source 1..120: mol_type = other DNA

SEQ ID NO: 115498 - DNA, 120 bp, synthetic construct; identical to SEQ ID NO: 22999
  source 1..120: mol_type = other DNA

SEQ ID NO: 115499 - DNA, 120 bp, synthetic construct; identical to SEQ ID NO: 13532
  source 1..120: mol_type = other DNA

SEQ ID NO: 115500 - DNA, 120 bp, synthetic construct; identical to SEQ ID NO: 13533
  source 1..120: mol_type = other DNA

SEQ ID NO: 115501 - DNA, 120 bp, synthetic construct; identical to SEQ ID NO: 13534
  source 1..120: mol_type = other DNA

SEQ ID NO: 115502 - DNA, 120 bp, synthetic construct; identical to SEQ ID NO: 13535
  source 1..120: mol_type = other DNA

SEQ ID NO: 115503 - DNA, 120 bp, synthetic construct
  source 1..120: mol_type = other DNA
acgccactgcactccagcctgggtgacagagtgagaccctgtctcaacttcttaattttttaaaaaagatgcaaaacaaaatgtaatcattgctatgcagtaaaacgtacctttgggttt

SEQ ID NO: 115504 - DNA, 120 bp, synthetic construct
  source 1..120: mol_type = other DNA
aggcaagaaactgtgatttctaatgacaaataaatatggtgttagtgaaaacaaaattaaatgaaaacaaacagcatatgagatgaacaaagataatacactagtttattaaaatatttg

SEQ ID NO: 115505 - DNA, 120 bp, synthetic construct
  source 1..120: mol_type = other DNA
atgttgcatattttgcacaagtgaaacatctctacaactggaatctccctccaagacggatactctttataaaacacttcattatttattcgattcctcgtaagtgctttatgtataatt

SEQ ID NO: 115506 - DNA, 120 bp, synthetic construct
  source 1..120: mol_type = other DNA
agaatcgcttgaacccaagaggtcgaggttgcagtgagctgagattgcaccactgcactctagtctgggtgacagagcgagactctgtctcaaaaattaaaaacaaaacaaaacaaagca

SEQ ID NO: 115507 - DNA, 120 bp, synthetic construct; identical to SEQ ID NO: 13526
  source 1..120: mol_type = other DNA

SEQ ID NO: 115508 - DNA, 120 bp, synthetic construct
  source 1..120: mol_type = other DNA
tgctgacactcagtgttatcattgataagtaagaactcactcctgctattttgttatttgttttctggttgttttggggtcttctcttccttctttccttcctgtcttccaatagtgaag

SEQ ID NO: 115509 - DNA, 120 bp, synthetic construct; identical to SEQ ID NO: 115494
  source 1..120: mol_type = other DNA

SEQ ID NO: 115510 - DNA, 120 bp, synthetic construct
  source 1..120: mol_type = other DNA
gtaggctaggagaacttgccatcctgaaggcaaggacacaggcctggctgtttttacgatgtgatgactgtagagccccagggccttcagtaaactcctgcaatagctaaggagtggtta

SEQ ID NO: 115511 - DNA, 120 bp, synthetic construct
  source 1..120: mol_type = other DNA
gagtgtgaacagtacttttcctggatatggatttactgagtcatagttatttccctgcaaactctgcacataactgcttgaagcttcatttacatagtactctttttttaagcaaaaaag

SEQ ID NO: 115512 - DNA, 120 bp, synthetic construct
  source 1..120: mol_type = other DNA
ccaaacactgcatgttctcactcataggtgggaattgaacaatgagaacccttggacaaaggaaggggaacatcacacaccggggcctgtcatggggtggggggattggggagggatagc

SEQ ID NO: 115513 - DNA, 120 bp, synthetic construct; identical to SEQ ID NO: 22993
  source 1..120: mol_type = other DNA

SEQ ID NO: 115514 - DNA, 120 bp, synthetic construct; identical to SEQ ID NO: 13527
  source 1..120: mol_type = other DNA

SEQ ID NO: 115515 - DNA, 120 bp, synthetic construct; identical to SEQ ID NO: 13528
  source 1..120: mol_type = other DNA

SEQ ID NO: 115516 - DNA, 120 bp, synthetic construct
  source 1..120: mol_type = other DNA
aaactaacaaacagaaaggacatccacaccaaaaacccatctgtacatcaccatgatcaaagaccaaaagtagataaaaccacaaagatggggaaaaaacagaacagaaaaactggaaac

SEQ ID NO: 115517 - DNA, 120 bp, synthetic construct
  source 1..120: mol_type = other DNA
tatggaaaggaacaaccggtaccagccactgcaaaatcatgccaaaacgtaaagaccatcgagactaggaagaaactgcatcaactaacgcgcaaaaaaaccagctaacatcataatgac

SEQ ID NO: 115518 - DNA, 120 bp, synthetic construct
  source 1..120: mol_type = other DNA
agaaggcaagaaataactaaaatcagagcagagctgaaggaaatagagacacaaaaaacccttcaaaaaattaatgaatccaggagctggatttttgaaaggatcaacaaaattgataga

SEQ ID NO: 115519 - DNA, 120 bp, synthetic construct
  source 1..120: mol_type = other DNA
aaaccacatgattatctcaatagatgcagaaaaagcctttgacaaaattcaacatcccttcatggtaaaaactctcaataaattaggtattgatgggatgtatttcaaaataataagagc

SEQ ID NO: 115520 - DNA, 120 bp, synthetic construct
  source 1..120: mol_type = other DNA
cgcatatctacaactatctgatctttgacaaacctgagaaaaacaagcaatggggaaaggattccctatttaataaatggtgctgggaaaactggctagccataagtagaaagcagaaac

SEQ ID NO: 115521 - DNA, 120 bp, synthetic construct
  source 1..120: mol_type = other DNA
ccaaacaccacatattctcactcataggtgggaattgaacaatgagatcacatggacacaggaaggggaatatcacactctggggactgttgtggggtagggggaggggggagggatagc

SEQ ID NO: 115522 - DNA, 120 bp, synthetic construct; identical to SEQ ID NO: 13529
  source 1..120: mol_type = other DNA

SEQ ID NO: 115523 - DNA, 120 bp, synthetic construct; identical to SEQ ID NO: 13530
  source 1..120: mol_type = other DNA

SEQ ID NO: 115524 - DNA, 120 bp, synthetic construct
  source 1..120: mol_type = other DNA
tgacaagtgcgatctaataaaactaatgagcttctgcacaaaaaaagaaatttcaataaacagacaacctacagaatgagagaaaatatctgcaaactatgcaaccaacaaaggtctaat

SEQ ID NO: 115525 - DNA, 120 bp, synthetic construct; identical to SEQ ID NO: 13531
  source 1..120: mol_type = other DNA

SEQ ID NO: 115526 - DNA, 120 bp, synthetic construct
  source 1..120: mol_type = other DNA
gtcccactatcggctgtccctttcgtgcgggactgacggctcacagaacagttacatttcaatatcattcgactgaaaaccatcctgtggacgccgtgcgagcattgtccccatttcaca

SEQ ID NO: 115527 - DNA, 120 bp, synthetic construct; identical to SEQ ID NO: 7595
  source 1..120: mol_type = other DNA

SEQ ID NO: 115528 - DNA, 120 bp, synthetic construct; identical to SEQ ID NO: 7596
  source 1..120: mol_type = other DNA

SEQ ID NO: 115529 - DNA, 120 bp, synthetic construct; identical to SEQ ID NO: 7597
  source 1..120: mol_type = other DNA

SEQ ID NO: 115530 - DNA, 120 bp, synthetic construct
  source 1..120: mol_type = other DNA
ccaggagaacttccccaacctagcaacgcaggccaacattcaaattcagtaaatacagagaccaccacgaagatattcttcgataagagcaactccaagacacataattgtcaaattcac

SEQ ID NO: 115531 - DNA, 120 bp, synthetic construct
  source 1..120: mol_type = other DNA
ataatgggagactttaacaccacactgtcaacattagtcagatcagtgagacagacagttaacaaggatatccaggaattgaactcagctctgcaccaaccggacctaatagacctctac

SEQ ID NO: 115532 - DNA, 120 bp, synthetic construct
  source 1..120: mol_type = other DNA
gggctttaagcattgcacatgattcttcctcaatagcctttgatttttcttccaggacttgatcaaataggttcaactcaagcatcaagaccaggttgcggtttcaaccaaagccactag

SEQ ID NO: 115533 - DNA, 120 bp, synthetic construct; identical to SEQ ID NO: 33172
  source 1..120: mol_type = other DNA

SEQ ID NO: 115534 - DNA, 120 bp, synthetic construct; identical to SEQ ID NO: 33173
  source 1..120: mol_type = other DNA

SEQ ID NO: 115535 - DNA, 120 bp, synthetic construct; identical to SEQ ID NO: 3819
  source 1..120: mol_type = other DNA

SEQ ID NO: 115536 - DNA, 120 bp, synthetic construct; identical to SEQ ID NO: 14662
  source 1..120: mol_type = other DNA

SEQ ID NO: 115537 - DNA, 120 bp, synthetic construct; identical to SEQ ID NO: 14663
  source 1..120: mol_type = other DNA

SEQ ID NO: 115538 - DNA, 120 bp, synthetic construct; identical to SEQ ID NO: 22170
  source 1..120: mol_type = other DNA

SEQ ID NO: 115539 - DNA, 120 bp, synthetic construct; identical to SEQ ID NO: 22171
  source 1..120: mol_type = other DNA

SEQ ID NO: 115540 - DNA, 120 bp, synthetic construct
  source 1..120: mol_type = other DNA
aatgtttatatttaccatactagaaattaaaacagttggccaggtgccgtgcatcatgtctgtaaatcccagcactttggaaggctgatgcaggaagatcacctgaggtcaggaattaga

SEQ ID NO: 115541 - DNA, 120 bp, synthetic construct
  source 1..120: mol_type = other DNA
tgcagtgagccaagactgcaccactgcattccagcctgggcgatgggagtgaaactctgtctcaaaaaagaaaaagaaaaagaaccatattttcaaaaacaaaattagtgacaggagtat

SEQ ID NO: 115542 - DNA, 120 bp, synthetic construct; identical to SEQ ID NO: 9308
  source 1..120: mol_type = other DNA

SEQ ID NO: 115543 - DNA, 120 bp, synthetic construct; identical to SEQ ID NO: 9309
  source 1..120: mol_type = other DNA

SEQ ID NO: 115544 - DNA, 120 bp, synthetic construct; identical to SEQ ID NO: 9310
  source 1..120: mol_type = other DNA

SEQ ID NO: 115545 - DNA, 120 bp, synthetic construct; identical to SEQ ID NO: 11848
  source 1..120: mol_type = other DNA

SEQ ID NO: 115546 - DNA, 120 bp, synthetic construct
  source 1..120: mol_type = other DNA
ttaatttttgtatttttttgtagagacaggattttgccatattgcccaggctggtctcaagctatcctcccacctcagcctcccgaagtgctgggattacaggcatgagccattatgcca

SEQ ID NO: 115547 - DNA, 120 bp, synthetic construct; identical to SEQ ID NO: 15856
  source 1..120: mol_type = other DNA

SEQ ID NO: 115548 - DNA, 120 bp, synthetic construct; identical to SEQ ID NO: 15857
  source 1..120: mol_type = other DNA

SEQ ID NO: 115549 - DNA, 120 bp, synthetic construct; identical to SEQ ID NO: 15858
  source 1..120: mol_type = other DNA

SEQ ID NO: 115550 - DNA, 120 bp, synthetic construct
  source 1..120: mol_type = other DNA
ttggcacccccccaccactcccacatgcagaaaaaggagaaggaaatattccacatgtcaaccataagtacctctatgataactccctattttccaaattctcaatgagtgtgtttttac

SEQ ID NO: 115551 - DNA, 120 bp, synthetic construct; identical to SEQ ID NO: 24239
  source 1..120: mol_type = other DNA

SEQ ID NO: 115552 - DNA, 120 bp, synthetic construct
  source 1..120: mol_type = other DNA
aaccaagttgggaaacactcttcaggatattatccaggagaacttccccaacctagcgaggcaggccaacattcaaattcaggaaatacagagaacggcacaaagatactcctcaagaag

SEQ ID NO: 115553 - DNA, 120 bp, synthetic construct; identical to SEQ ID NO: 24240
  source 1..120: mol_type = other DNA

SEQ ID NO: 115554 - DNA, 120 bp, synthetic construct; identical to SEQ ID NO: 24241
  source 1..120: mol_type = other DNA

SEQ ID NO: 115555 - DNA, 120 bp, synthetic construct; identical to SEQ ID NO: 21910
  source 1..120: mol_type = other DNA

SEQ ID NO: 115556 - DNA, 120 bp, synthetic construct; identical to SEQ ID NO: 21911
  source 1..120: mol_type = other DNA

SEQ ID NO: 115557 - DNA, 120 bp, synthetic construct
  source 1..120: mol_type = other DNA
aaaccaaaaaagctgtgttataaagaacaggatgcccaattctcatttaagagtcccagtttttggcacaagacagggatggcctctctcaccactcctattcaacacagtgttggaagt

SEQ ID NO: 115558 - DNA, 120 bp, synthetic construct
  source 1..120: mol_type = other DNA
attaaagacttacatgttagacctaaaaacataaaaaccctagaagaaaacctaggcaataccattcaggacataggcatgggcaaggacttcatgtctaaaacaccaaaagcaatggca

SEQ ID NO: 115559 - DNA, 120 bp, synthetic construct
  source 1..120: mol_type = other DNA
cgacacaggaggaggaacatcacactctggggactgttgtggggtgggggaggggggagggatagcattaggagatatacctaatgctaaatgacgagttaatgggtgcagcacaccaac

SEQ ID NO: 115560 - DNA, 120 bp, synthetic construct; identical to SEQ ID NO: 27825
  source 1..120: mol_type = other DNA

SEQ ID NO: 115561 - DNA, 120 bp, synthetic construct; identical to SEQ ID NO: 27826
  source 1..120: mol_type = other DNA

SEQ ID NO: 115562 - DNA, 120 bp, synthetic construct
  source 1..120: mol_type = other DNA
taccatggtattgaatgctctttactgataaaggaagcaactacagagagcttttgtttctttgttcaaagtaaccagttctactgatgaaaaaaaacaacaaacccaacaactctccca

SEQ ID NO: 115563 - DNA, 120 bp, synthetic construct
  source 1..120: mol_type = other DNA
aaatttggcatatacatacagtggagtactatttagccttagaaaggaaggaaatcctgacacaagatacaacatggatgaaccttcagggcatcatgctaagtgaaataagccagtcac

SEQ ID NO: 115564 - DNA, 120 bp, synthetic construct; identical to SEQ ID NO: 23236
  source 1..120: mol_type = other DNA

SEQ ID NO: 115565 - DNA, 120 bp, synthetic construct; identical to SEQ ID NO: 20313
  source 1..120: mol_type = other DNA

SEQ ID NO: 115566 - DNA, 120 bp, synthetic construct; identical to SEQ ID NO: 20314
  source 1..120: mol_type = other DNA

SEQ ID NO: 115567 - DNA, 120 bp, synthetic construct; identical to SEQ ID NO: 20315
  source 1..120: mol_type = other DNA

SEQ ID NO: 115568 - DNA, 120 bp, synthetic construct; identical to SEQ ID NO: 20316
  source 1..120: mol_type = other DNA

SEQ ID NO: 115569 - DNA, 120 bp, synthetic construct; identical to SEQ ID NO: 20317
  source 1..120: mol_type = other DNA

SEQ ID NO: 115570 - DNA, 120 bp, synthetic construct; identical to SEQ ID NO: 20318
  source 1..120: mol_type = other DNA

SEQ ID NO: 115571 - DNA, 120 bp, synthetic construct; identical to SEQ ID NO: 20319
  source 1..120: mol_type = other DNA

SEQ ID NO: 115572 - DNA, 120 bp, synthetic construct; identical to SEQ ID NO: 20320
  source 1..120: mol_type = other DNA

SEQ ID NO: 115573 - DNA, 120 bp, synthetic construct; identical to SEQ ID NO: 20321
  source 1..120: mol_type = other DNA

SEQ ID NO: 115574 - DNA, 120 bp, synthetic construct; identical to SEQ ID NO: 20322
  source 1..120: mol_type = other DNA

SEQ ID NO: 115575 - DNA, 120 bp, synthetic construct; identical to SEQ ID NO: 33482
  source 1..120: mol_type = other DNA

SEQ ID NO: 115576 - DNA, 120 bp, synthetic construct; identical to SEQ ID NO: 33483
  source 1..120: mol_type = other DNA

SEQ ID NO: 115577 - DNA, 120 bp, synthetic construct; identical to SEQ ID NO: 4317
  source 1..120: mol_type = other DNA

SEQ ID NO: 115578 - DNA, 120 bp, synthetic construct
  source 1..120: mol_type = other DNA
aataaaaacaaaataaaataataaaaatacaaaaaaattagccaggcatggtggtgcatgcctgtaggcccagctactcgggaggttgaggcaggagaatcacttgaacctgggagatgg

SEQ ID NO: 115579 - DNA, 120 bp, synthetic construct; identical to SEQ ID NO: 31838
  source 1..120: mol_type = other DNA

SEQ ID NO: 115580 - DNA, 120 bp, synthetic construct; identical to SEQ ID NO: 31839
  source 1..120: mol_type = other DNA

SEQ ID NO: 115581 - DNA, 120 bp, synthetic construct; identical to SEQ ID NO: 31840
  source 1..120: mol_type = other DNA

SEQ ID NO: 115582 - DNA, 120 bp, synthetic construct; identical to SEQ ID NO: 31841
  source 1..120: mol_type = other DNA

SEQ ID NO: 115583 - DNA, 120 bp, synthetic construct; identical to SEQ ID NO: 31842
  source 1..120: mol_type = other DNA

SEQ ID NO: 115584 - DNA, 120 bp, synthetic construct; identical to SEQ ID NO: 31843
  source 1..120: mol_type = other DNA

SEQ ID NO: 115585 - DNA, 120 bp, synthetic construct; identical to SEQ ID NO: 31844
  source 1..120: mol_type = other DNA

SEQ ID NO: 115586 - DNA, 120 bp, synthetic construct
  source 1..120: mol_type = other DNA
ttttcgcaacctactcatctgacaaagggctaatatccagaatctacaatgaactcaaacaaatttacaagaaaaaaacaaacaaccccatcaaaaagtgggcaaaggaatcaacagaca

SEQ ID NO: 115587 - DNA, 120 bp, synthetic construct; identical to SEQ ID NO: 31845
  source 1..120: mol_type = other DNA

SEQ ID NO: 115588 - DNA, 120 bp, synthetic construct; identical to SEQ ID NO: 31846
  source 1..120: mol_type = other DNA

SEQ ID NO: 115589 - DNA, 120 bp, synthetic construct; identical to SEQ ID NO: 31847
  source 1..120: mol_type = other DNA

SEQ ID NO: 115590 - DNA, 120 bp, synthetic construct; identical to SEQ ID NO: 31848
  source 1..120: mol_type = other DNA

SEQ ID NO: 115591 - DNA, 120 bp, synthetic construct; identical to SEQ ID NO: 31849
  source 1..120: mol_type = other DNA

SEQ ID NO: 115592 - DNA, 120 bp, synthetic construct
  source 1..120: mol_type = other DNA
agtctttaatgtttttaactaaactttaagctaagtctttaactaaactttaatgttaagttaaaaccataaaaaccctagaagaaaacctaggcaataccattcaggacataggcacgg

SEQ ID NO: 115593 - DNA, 120 bp, synthetic construct
  source 1..120: mol_type = other DNA
gaaatgtagcacatgtacaccatggaatactatgcagccataaaaaaggatgagttcatgtcctttgtagggacatggatgaagctggaaaccatcattctcagcaaactatcgcaagga

SEQ ID NO: 115594 - DNA, 120 bp, synthetic construct
  source 1..120: mol_type = other DNA
gaaccagggaagcagaggttgcagtgagctgagatcacacattgcactccagcctgggcaacaaaagcgagactgtctcaaaaaaaataataataaataaataaatagtcatcatctgga

SEQ ID NO: 115595 - DNA, 120 bp, synthetic construct; identical to SEQ ID NO: 31818
  source 1..120: mol_type = other DNA

SEQ ID NO: 115596 - DNA, 120 bp, synthetic construct; identical to SEQ ID NO: 31819
  source 1..120: mol_type = other DNA

SEQ ID NO: 115597 - DNA, 120 bp, synthetic construct; identical to SEQ ID NO: 31820
  source 1..120: mol_type = other DNA

SEQ ID NO: 115598 - DNA, 120 bp, synthetic construct; identical to SEQ ID NO: 31821
  source 1..120: mol_type = other DNA

SEQ ID NO: 115599 - DNA, 120 bp, synthetic construct; identical to SEQ ID NO: 31822
  source 1..120: mol_type = other DNA

SEQ ID NO: 115600 - DNA, 120 bp, synthetic construct; identical to SEQ ID NO: 31823
  source 1..120: mol_type = other DNA

SEQ ID NO: 115601 - DNA, 120 bp, synthetic construct; identical to SEQ ID NO: 31824
  source 1..120: mol_type = other DNA

SEQ ID NO: 115602 - DNA, 120 bp, synthetic construct; identical to SEQ ID NO: 31825
  source 1..120: mol_type = other DNA

SEQ ID NO: 115603 - DNA, 120 bp, synthetic construct; identical to SEQ ID NO: 31826
  source 1..120: mol_type = other DNA

SEQ ID NO: 115604 - DNA, 120 bp, synthetic construct; identical to SEQ ID NO: 31827
  source 1..120: mol_type = other DNA

SEQ ID NO: 115605 - DNA, 120 bp, synthetic construct; identical to SEQ ID NO: 31828
  source 1..120: mol_type = other DNA

SEQ ID NO: 115606 - DNA, 120 bp, synthetic construct; identical to SEQ ID NO: 31829
  source 1..120: mol_type = other DNA

SEQ ID NO: 115607 - DNA, 120 bp, synthetic construct; identical to SEQ ID NO: 31830
  source 1..120: mol_type = other DNA

SEQ ID NO: 115608 - DNA, 120 bp, synthetic construct; identical to SEQ ID NO: 31831
  source 1..120: mol_type = other DNA

SEQ ID NO: 115609 - DNA, 120 bp, synthetic construct; identical to SEQ ID NO: 31832
  source 1..120: mol_type = other DNA

SEQ ID NO: 115610 - DNA, 120 bp, synthetic construct
  source 1..120: mol_type = other DNA
cctcctgtctcaggtcaaacacataccacacacacacatacacacacacacacaaatgccacacacatatacagacacatacacacacacaaaacacacaccatacacatatacacacat

SEQ ID NO: 115611 - DNA, 120 bp, synthetic construct; identical to SEQ ID NO: 31833
  source 1..120: mol_type = other DNA

SEQ ID NO: 115612 - DNA, 120 bp, synthetic construct; identical to SEQ ID NO: 31834
  source 1..120: mol_type = other DNA

SEQ ID NO: 115613 - DNA, 120 bp, synthetic construct; identical to SEQ ID NO: 31835
  source 1..120: mol_type = other DNA

SEQ ID NO: 115614 - DNA, 120 bp, synthetic construct; identical to SEQ ID NO: 31836
  source 1..120: mol_type = other DNA

SEQ ID NO: 115615 - DNA, 120 bp, synthetic construct; identical to SEQ ID NO: 31837
  source 1..120: mol_type = other DNA

SEQ ID NO: 115616 - DNA, 120 bp, synthetic construct
  source 1..120: mol_type = other DNA
aagtgattctcctgcctcagcctcccgagcagccgggactacaggcatatgccatcaagcccggctgatatttgtatttttagtagagacaaggtttcaccatgttggtcaggctggtct

SEQ ID NO: 115617 - DNA, 120 bp, synthetic construct
  source 1..120: mol_type = other DNA
gctcctcgtccccctccagcttctcatcccccacgggttccccatcccccatgggttccccatccccctccagcttctcatcccccacgggttccccaccccccacgggctcctcatccc

SEQ ID NO: 115618 - DNA, 120 bp, synthetic construct
  source 1..120: mol_type = other DNA
gtaagcatgaccagcattgccgatagttccatatttcatccttatcttgcttgacctatgccggacacggcactgtcagccactccctccttctttcccatcttgtgcttcccagatgct

SEQ ID NO: 115619 - DNA, 120 bp, synthetic construct
  source 1..120: mol_type = other DNA
tcttcaagaagatctaccaatcactgctcaatgacataaaagaggatacaaacaaatggaagaacattccatgctcagggataggaagaatcaatattgtgaaaatggccacattgccca

SEQ ID NO: 115620 - DNA, 120 bp, synthetic construct
  source 1..120: mol_type = other DNA
aaaactacaatgagataccatctcacaccagttagaatggcaatcattaaaaactcaggaaacaacaggtgctggagaggatgtggagaaataggaacacttttacactgttggtgggac

SEQ ID NO: 115621 - DNA, 120 bp, synthetic construct
  source 1..120: mol_type = other DNA
ggtcattcactatgtcagaatagcgctgggaatctaatttattatatttttcttgtacaatacagcacctaacacagcgccctaaaagagtaggtattcaataaacagtcattgaatgaa

SEQ ID NO: 115622 - DNA, 120 bp, synthetic construct
  source 1..120: mol_type = other DNA
taagacacagtctggagaaatttcagaattccacatctcatttgctaatattttaaacaaacgattcaccagacctgactaattgaatggtgtatttccactggactgaatgtcctaatt

SEQ ID NO: 115623 - DNA, 120 bp, synthetic construct
  source 1..120: mol_type = other DNA
cagataaggtcacagattctgccagcagcctccgtagctgttggcaagttactaaacttcactgtgtcttggagtctttatgtataacatcaaaacaacgaaaaccgcacagaaatatta

SEQ ID NO: 115624 - DNA, 120 bp, synthetic construct
  source 1..120: mol_type = other DNA
gcacaaggagaaatggaaatccattgctaaaagtagaagggcccatcaatgacaggctgccttccagctgcttatcagaagtggacactgttttgacacatttatttaattgatgttgaa

SEQ ID NO: 115625 - DNA, 120 bp, synthetic construct
  source 1..120: mol_type = other DNA
ggaagaaccgaaataatgagaaacttgggcattgaattttgtaactgcacatgaatattgattggattctaaaataaatgatcccaaagtttgaatatttagaacctaccatacatctag

SEQ ID NO: 115626 - DNA, 120 bp, synthetic construct
  source 1..120: mol_type = other DNA
cattttagtcaaaataatcccaaatttggagggacatatgtttttcgtgatcatccttgccatgaaagtagagcagcagcccagtatcctgcattcttcccttttcacgtctgattcact

SEQ ID NO: 115627 - DNA, 120 bp, synthetic construct
  source 1..120: mol_type = other DNA
aacatctcacaccagtaagcatggctattatgaaaaagtcaaaaaataacatatgttgaggagcttgcagagagaagagaacacttgtagactgttggtgggtgtgcaaattagttcaac

SEQ ID NO: 115628 - DNA, 120 bp, synthetic construct
  source 1..120: mol_type = other DNA
agacagcaaactcacctttagctttctttgaagctggtacatcttcaacatcttctagagtacagaaaaaaggcacatagaatcacagtcaatttttcagttttcccagaggaagtattg

SEQ ID NO: 115629 - DNA, 120 bp, synthetic construct
  source 1..120: mol_type = other DNA
ggaggttgatacctaaaatatataagacattgatacaactcaataacaaaaaacaaataaatgggcaaaggatctgaacagacacttttccaaagacatacaaatgaccaacaggcacgt

SEQ ID NO: 115630 - DNA, 120 bp, synthetic construct
  source 1..120: mol_type = other DNA
tgaaagaaggtcagttttgtcttatttatttagattttgcatactaactgttcactaataaatgaaaaaggggtaagatagggtcagtatgcaaatttcgtctaacaggaaagcaatgtg

SEQ ID NO: 115631 - DNA, 120 bp, synthetic construct
  source 1..120: mol_type = other DNA
gctagagacagcgaaggacagagatattcagggagtagaggagacgttctggaaaacttggataagattatcatgtggaacatcttatacatcaggctaagtaccctcaactaaatttca

SEQ ID NO: 115632 - DNA, 120 bp, synthetic construct
  source 1..120: mol_type = other DNA
tatactgaatctactgtacaaatagaggagagagaggtcctgcccaaggtcacaaaactcatgagtggcagagacagaacaagaacataatccaaatctcctatatcagggcctcttgaa

SEQ ID NO: 115633 - DNA, 120 bp, synthetic construct
  source 1..120: mol_type = other DNA
aggcattccactaacccccttaaaatgagagggggtgctaaatgtgtccctctgcacttctaacaatctactctccctcagtggcgatgaaaagttacttagttgtctttgaaaataaag

SEQ ID NO: 115634 - DNA, 120 bp, synthetic construct
  source 1..120: mol_type = other DNA
gataagtgaattcgcaaattttatactaaaatgcagatttctcattctcagcaagcaatcttatcttggttctacattttattctctagagcggtggctttcacttttttcttcacagaa

SEQ ID NO: 115635 - DNA, 120 bp, synthetic construct
  source 1..120: mol_type = other DNA
gtgccaggtatgctactaggtactagattttacacatgtgttttaacctaagtctcaccaatacccttatgaattatggggaaaatatctgattttacaagagaactttgagccccaaag

SEQ ID NO: 115636 - DNA, 120 bp, synthetic construct
  source 1..120: mol_type = other DNA
gtagaatcccctcttgggatatggagagggtagaaggataagggcaagaagaagtttatgatatgaagatcagttgtaaacttgtgcagacaaagggcgaagttaggaattgaatgtgac

SEQ ID NO: 115637 - DNA, 120 bp, synthetic construct
  source 1..120: mol_type = other DNA
cctcagccctcttcctttatcaaattcgctgcctctctctgtttctgcagagatacccaaagctccaaattattttctcaactaactggccaaattgtgtgtaaccggtttaacagaata

SEQ ID NO: 115638 - DNA, 120 bp, synthetic construct
  source 1..120: mol_type = other DNA
ctattgaagcacaaaaatgttaagtaatttttccaagttattcagctttttaagtcatgatgggaaccagtacttctgacgctagtttccctggtatcgactactaccctatgataccat

SEQ ID NO: 115639 - DNA, 120 bp, synthetic construct
  source 1..120: mol_type = other DNA
aagatagctacatattgagacaaatgaatagtcaaaaatctacaaggaatcaaagtctgtggaagaggaagcagagggaaaccatggggagtctgagagatggggatcagtctctcagat

SEQ ID NO: 115640 - DNA, 120 bp, synthetic construct
  source 1..120: mol_type = other DNA
actctcagttttctatagtgccagtaccattttgccttcccgacagcaatgtatgaaagttctggttgtttcaaatgcttgccagcacttgtttttgtttttccatgttttaaaaagtta

SEQ ID NO: 115641 - DNA, 120 bp, synthetic construct
  source 1..120: mol_type = other DNA
ttgcatgttgcatgtgggaaataatgagttttctgtattaactttataccctactactttgtttttttttgagatggagtctcgctctgtcgcccaggctggagtgcagtggcacaatct

SEQ ID NO: 115642 - DNA, 120 bp, synthetic construct
  source 1..120: mol_type = other DNA
caaaattaccatgtaagtcaagattagatgtgttggaatttagatgttttcatattcctctcttgtttagaaggggttttcaagtagcaattttatactttgttaggtgggtatggttaa

SEQ ID NO: 115643 - DNA, 120 bp, synthetic construct
  source 1..120: mol_type = other DNA
caaagaagatacagggtaattaaaaagacaattaagcttgatttaacggctatagaattgtgctttcaaccattagcaaagacacaatcttctcaatcatatatacagtatttactgaaa

SEQ ID NO: 115644 - DNA, 120 bp, synthetic construct
  source 1..120: mol_type = other DNA
aattatgatctctctcccaaaacttcattttccaataaattattttagaaatgggaaggtctttttttctctttctgtttttgatttcagtatataatcaatcttacttgctgaaacaac

SEQ ID NO: 115645 - DNA, 120 bp, synthetic construct
  source 1..120: mol_type = other DNA
attataaggacaaatatgatgctttagttatggttaattatagtcattaaaagaatctttactagatattcatttcacagttttcttttcagacgtaagatacactaaacatgtaaattc

SEQ ID NO: 115646 - DNA, 120 bp, synthetic construct
  source 1..120: mol_type = other DNA
agaatgtgggatttttttgcttttaatttttaaaataataagtactaaatataataaaatctcacacatcctcctcccaatgtcttcctccaaactccatgagaagcacattatttatca

SEQ ID NO: 115647 - DNA, 120 bp, synthetic construct
  source 1..120: mol_type = other DNA
tcaccatggtcactaaggagggagagggaaggcaggccattttcacacagccaaaatcaaagcaacaactgttacaccagatgcatagatagcaacataaggatatggaaaacaaaacaa

SEQ ID NO: 115648 - DNA, 120 bp, synthetic construct
  source 1..120: mol_type = other DNA
cttcagaaggtgggtaataacaaactcttccaagctaaaggagcatgttctgaccaaatgcaaggaagctaagagccatgagaaaagattacaggagctgctaactagaataaccagttt

SEQ ID NO: 115649 - DNA, 120 bp, synthetic construct
  source 1..120: mol_type = other DNA
gatggaggaagatttaccaagcaaatggaaagaaaaaaaaagcaggggtagcaaatcctagtctctgataaaatagactttacaccaacaaagatgaaaagagacaaaggagggcattac

SEQ ID NO: 115650 - DNA, 120 bp, synthetic construct
  source 1..120: mol_type = other DNA
ttctgaaattgaggcactaattaatagcctatcaaccaaaaaaaaaaggcccacgagcagatggattcacagccaagttctaccagaggtacaaagaggagttagtaccataccttctga

SEQ ID NO: 115651 - DNA, 120 bp, synthetic construct
  source 1..120: mol_type = other DNA
tgaaggacctcttcaaggagaactacaaaccattgcttaagaaaataagagaggaaacaaacaaatggataaacattccatgattatggaggggaagaatcaatatcgttaaaatgaccc

SEQ ID NO: 115652 - DNA, 120 bp, synthetic construct
  source 1..120: mol_type = other DNA
caccaagatcgaatcaagaagaaataggacctgaacagaccaactgtagcaaaatttagtcagtaataaaacaatctctcatcaaagaaaattccaggactggatggattcacagtcaaa

SEQ ID NO: 115653 - DNA, 120 bp, synthetic construct
  source 1..120: mol_type = other DNA
tgtattttgcagcaacatggatggagttgaagcccatcatcatacgtgaaataactgaaacagaaaatcaaatttatcatgcattatcacttacaagtgggagctaaatgatgtgtacac

SEQ ID NO: 115654 - DNA, 120 bp, synthetic construct
  source 1..120: mol_type = other DNA
cataatcttactcttactactactactgctattactatgaagttaggtgtcccaataattccttgactttttacttccttctaggaggaagtaaaccatagctttctgtggcacattcta

SEQ ID NO: 115655 - DNA, 120 bp, synthetic construct
  source 1..120: mol_type = other DNA
tacagttatatcctatatacatagaatttctatctgtacctggatcctgatattctagagaatctattctgggagctgtggtttatactataggagatacatccattcctaactatgctg

SEQ ID NO: 115656 - DNA, 120 bp, synthetic construct
  source 1..120: mol_type = other DNA
tcaagcaatcctccctcctctgcctcccgagtagctggtattacaggtgtgagttactatgcctggctgattctttgaatatcttggttaatctattttatctaagaaaatatgtcagct

SEQ ID NO: 115657 - DNA, 120 bp, synthetic construct
  source 1..120: mol_type = other DNA
ttcacagaacagagtgagaagtctgaatcagaagtctgaatctcttgtacagctgagttacagaggtttcctcaaatcatctctctagtagatcactcccttgggggcaaattgggatat

SEQ ID NO: 115658 - DNA, 120 bp, synthetic construct
  source 1..120: mol_type = other DNA
gttctgatttcttcatgttttcttattttctattgaaatataagctttctgctagattttctacctgtccacttcctctgctattaagagaagtttgcatcttctagatttctttgttcc

SEQ ID NO: 115659 - DNA, 120 bp, synthetic construct
  source 1..120: mol_type = other DNA
ctaagatgcttcatgtctgctttttctgtatagaagaaacagtaacagggtaatttatttttttatttatttttaattatactttaagttctgggatacatgtgcagaacatgcaggttt

SEQ ID NO: 115660 - DNA, 120 bp, synthetic construct
  source 1..120: mol_type = other DNA
catttaaatctttttcttttcttttctttctttttttttttttagacagagtctcactctggcaccaagctagagtgcagtggcatgatcttggctcactgcaacctctgcctctcaggt

SEQ ID NO: 115661 - DNA, 120 bp, synthetic construct
  source 1..120: mol_type = other DNA
aattctgtgaattagtagctttatggaaatagcattgaatttataaattactttaggcagtatggccatcttcacaatattgattcttcctgtccatgagcatggaaggttttccatttg

SEQ ID NO: 115662 - DNA, 120 bp, synthetic construct
  source 1..120: mol_type = other DNA
tttttttgttatgtctctgccaggttttggtgtaaggttgacgctggcctcacaaaatgagttagggaggattccctctttttgtattgtttggagtcattttagaaggaatggtaccag

SEQ ID NO: 115663 - DNA, 120 bp, synthetic construct
  source 1..120: mol_type = other DNA
actttctttttcagatatttcagttttcttctttcctaggggaaagaaaaacaacaagaaaccatcattttaaaaaacatgactttcttactcattcttggagtaaacagttggagatga

SEQ ID NO: 115664 - DNA, 120 bp, synthetic construct
  source 1..120: mol_type = other DNA
gccttttgggaagtcattatgcctgttctgtagaacagaatatctggaatttgagcagctaagggattttctaaatgttatacatctagaaacttaaatttacatactgtttccacaact

SEQ ID NO: 115665 - DNA, 120 bp, synthetic construct
  source 1..120: mol_type = other DNA
tatttgccttttgcctatgctcatacagaaccatgctttcttcttgttccttcagtaaacttacagattaatatttctaagtataacctggaaagttttttttaaaaaaaactttgtgtc

SEQ ID NO: 115666 - DNA, 120 bp, synthetic construct
  source 1..120: mol_type = other DNA
cacaggtattagttatcatggtaaatgtgttagcaaaccaggtatatcaacagaaaacatgataggcattccctcatacatcctggtccagtgtcatagacctaagaggtgctcaataaa

SEQ ID NO: 115667 - DNA, 120 bp, synthetic construct
  source 1..120: mol_type = other DNA
aaaacctaatctacagcaaggccctaactcccttcaattctatgaaggctgagagaagtgaggaaactgcagaagaaaagttggaagctaccagaggttggttcatgaaatttaaggaat

SEQ ID NO: 115668 - DNA, 120 bp, synthetic construct
  source 1..120: mol_type = other DNA
tgagagggagtccaaatgtcagtatcaacaggagtttgaaagaaattgattttgactcttacggatgacttcgagaggtttaaggattcagtagaagaagtaactgcagatgtggtggaa

SEQ ID NO: 115669 - DNA, 120 bp, synthetic construct; identical to SEQ ID NO: 28258
  source 1..120: mol_type = other DNA

SEQ ID NO: 115670 - DNA, 120 bp, synthetic construct; identical to SEQ ID NO: 28259
  source 1..120: mol_type = other DNA

SEQ ID NO: 115671 - DNA, 120 bp, synthetic construct; identical to SEQ ID NO: 28260
  source 1..120: mol_type = other DNA

SEQ ID NO: 115672 - DNA, 120 bp, synthetic construct
  source 1..120: mol_type = other DNA
ctgtcaattgagtaggactctggaacagaccaagtgttacctctaatgacctctatggtcagttcttctgagctgttcttgatgtttacttgtcctttctttccctcactcttgaatttg

SEQ ID NO: 115673 - DNA, 120 bp, synthetic construct
  source 1..120: mol_type = other DNA
attcattacgtatgtttaaaagatttccaacctaccttaacttactgtgagtggtattttatagcctatatggattccctcttttaatattaaccacagtgacagacttctggatatttc

SEQ ID NO: 115674 - DNA, 120 bp, synthetic construct; identical to SEQ ID NO: 28261
  source 1..120: mol_type = other DNA

SEQ ID NO: 115675 - DNA, 120 bp, synthetic construct; identical to SEQ ID NO: 28262
  source 1..120: mol_type = other DNA

SEQ ID NO: 115676 - DNA, 120 bp, synthetic construct; identical to SEQ ID NO: 28263
  source 1..120: mol_type = other DNA

SEQ ID NO: 115677 - DNA, 120 bp, synthetic construct
  source 1..120: mol_type = other DNA
ttattgtaaatagaactaggcataactagctttaaatagtactgggtttctggttaaagaaaagtaaaactggcaaaaatacaaaatgcttatatctggtaaaacatatccacctacagc

SEQ ID NO: 115678 - DNA, 120 bp, synthetic construct
  source 1..120: mol_type = other DNA
tctaggtgttttagtctagggaatattcccattctcacctaatccagtgctataaaatcatgttgagcaatggagttgacaaaataatgaggaacttggagactatgtgcatgtctccct

SEQ ID NO: 115679 - DNA, 120 bp, synthetic construct
  source 1..120: mol_type = other DNA
tgaccacgcgataatagaggcagagattgaagtcatatatcttcacaccaagaaacaccgaagattgccagaaaacaccagaagctaggagaagcaaacaaatattctcctctacggttt

SEQ ID NO: 115680 - DNA, 120 bp, synthetic construct
  source 1..120: mol_type = other DNA
aagatacacataaattgaagaagataccgttaatcgaataagaactggcacttactgatttgaaaattctcagcctatctagacagtgtgccatggagatagagccaaggttgtggttgg

SEQ ID NO: 115681 - DNA, 120 bp, synthetic construct
  source 1..120: mol_type = other DNA
atgtaattagttaagatgtggtcatggggcagtagggtgggtatttaatccaatatgactggtgtacttattagaggagaagggtttacagagctagagacacaaagggagaaggtttcc

SEQ ID NO: 115682 - DNA, 120 bp, synthetic construct
  source 1..120: mol_type = other DNA
gtcatattaaccatattcttatgattgtggcaaactagtacgtaacaacagattcctcactattattccagtaagaaatattttgagagccaggcatggtggctcatgcctgtaatctta

SEQ ID NO: 115683 - DNA, 120 bp, synthetic construct
  source 1..120: mol_type = other DNA
ctagtggccagtctgtgggccattttgtcagcctctgctctattcatagtcagttttaattttctctcttttttgcatcaacaaatatttgaatagtcaacacttttctctgattctgtt

SEQ ID NO: 115684 - DNA, 120 bp, synthetic construct
  source 1..120: mol_type = other DNA
ttcggtaccgtgtttgctattctggatctttttccattccacgtaaactttatattcagtttgtcaacacacacaaaataattttctgggaattttccataattgcattgactctatagg

SEQ ID NO: 115685 - DNA, 120 bp, synthetic construct
  source 1..120: mol_type = other DNA
ccccacctactgctcttaacatgcaccagagatacaatacaaagcacagttcaataagaggaaagtcacttttggcccaataaatgtgatttagggacatagctatgtgctctggctaaa

SEQ ID NO: 115686 - DNA, 120 bp, synthetic construct
  source 1..120: mol_type = other DNA
atgtcaataaaggcttgtacataatctgttttataccaaatttcttcctaagatgattaatcaacagtgatcaacagtgaaataatatcatttaataatctttctgatccacatatctgt

SEQ ID NO: 115687 - DNA, 120 bp, synthetic construct
  source 1..120: mol_type = other DNA
tttgaactcaatgataatagtgaaacaagctatcaaaaagtctgtgacacagcaaaggtggtgctaagaggaaaattcatagccttaaatgcctacatcaaaaagtctaaaagagcacaa

SEQ ID NO: 115688 - DNA, 120 bp, synthetic construct
  source 1..120: mol_type = other DNA
atgcactaactcttgccccccccccaaaaattggtaccaattctgttgacattattcgacaagacagagaaagaaggaatccaccctaaatcattgtatgaagccagcattaccctaata

SEQ ID NO: 115689 - DNA, 120 bp, synthetic construct
  source 1..120: mol_type = other DNA
ggaaacatatcacatgctcatggatggatagaatcagtattgtgaaaatgaccagggtagaatcaatatgtgaaaatgaccacattgcccaaagcaatctacaaattcagttcaattccc

SEQ ID NO: 115690 - DNA, 120 bp, synthetic construct
  source 1..120: mol_type = other DNA
gaagatacataaatggccagcgaaaatgtgaaaaaatgttcaacatcactaataatcagggaaacacaaatcaaaaccacaatatgataccaccttactcctgcaagaatggccataatc

SEQ ID NO: 115691 - DNA, 120 bp, synthetic construct
  source 1..120: mol_type = other DNA
ccagacctatcaaatcagaaactctggaggtggggcccaggaatttgtcacttaacatccttctcaaatgatcctgatggccacttagatgtacaaattattgctctgaagggataaaat

SEQ ID NO: 115692 - DNA, 120 bp, synthetic construct
  source 1..120: mol_type = other DNA
cttgatgttctaatggaggtaataattggctgtgtatgatggaatatgtttcaaatagtgagtagcaatataagagtagacacacacacccatatatgtttattgtaatgatagggactt

SEQ ID NO: 115693 - DNA, 120 bp, synthetic construct
  source 1..120: mol_type = other DNA
agtgttgatgagaatgaggagaaaaggaatcccttgtacactgctggtgaaaacataaattagtacaggcactttggagaatagcatgaaggctcctcaaaaaaactagaattaccatat

SEQ ID NO: 115694 - DNA, 120 bp, synthetic construct
  source 1..120: mol_type = other DNA
agaaatgtctgcataatcttcaccttaatcttcatgcaattgaaagtgggtataaatatgactgcaaaactgccctgagctgctactctctgcctatggggtagtctcttttccctcaga

SEQ ID NO: 115695 - DNA, 120 bp, synthetic construct
  source 1..120: mol_type = other DNA
acggaatcgatgcttaaataatgaacttattgtgtggtttaaagtcttaaaatgatagaataatcctcacctatagaatgtcaatgtctgctgggcagttcaggatttcttcctttctag

SEQ ID NO: 115696 - DNA, 120 bp, synthetic construct
  source 1..120: mol_type = other DNA
tcacaccactgcactccaacctgggcgacagagtgagactccgtcacacaaaaaagaaagaggtagtataggacaagtcagaaatttcaagcaagttttagatagtctgtgtaatttgtg

SEQ ID NO: 115697 - DNA, 120 bp, synthetic construct
  source 1..120: mol_type = other DNA
agacttacttttgctaaaacttggaaagaagaatcccctgaagatcaactacaaccaaaatggaagggcccttatcaggtgtcattgagtaccccctctgctgttaaacttcagggaata

SEQ ID NO: 115698 - DNA, 120 bp, synthetic construct
  source 1..120: mol_type = other DNA
cacttgtaagttaggagaccatatatggtgcattcttccagatcacaacatacaagggaaaaatcactgcctagtctggaaaggtaggagtaccccccttctgaaaaataaagattgtcc

SEQ ID NO: 115699 - DNA, 120 bp, synthetic construct
  source 1..120: mol_type = other DNA
caacgtagatcccttgcacacgcagttaacaatagggtttgcactcatatgagatttaatgctgctgttaatctaacaggaagtgtagatcagacaataatgctcactggcttgtccatc

SEQ ID NO: 115700 - DNA, 120 bp, synthetic construct
  source 1..120: mol_type = other DNA
ggctatttttatgtacctttggcttgcccttgaattctttcctaggcaaagccaagaacacttgcaggctaagcttcactttggggctcacctgccctgcatctataatgtattatatat

SEQ ID NO: 115701 - DNA, 120 bp, synthetic construct
  source 1..120: mol_type = other DNA
aagaccagtgattctgatgcagatatatctatgcctaccactacttagaacagagcagaggttgactttgctgtagatatacatcttagccagaaagaaccatccgacaggcattttacc

SEQ ID NO: 115702 - DNA, 120 bp, synthetic construct
  source 1..120: mol_type = other DNA
caagcatcttactgttgaccattctgttctcacttttcatctcagacagttatctgatattttgcctcaaatgagtagtgagaaaccctttgtgttctgcctcttgatgttcaaaggtga

SEQ ID NO: 115703 - DNA, 120 bp, synthetic construct
  source 1..120: mol_type = other DNA
agaaaaaccggggattgggactaggttctaataatgaaactagccatctctattgtccatagagtcctgttgattctattttgtaaagatatctcgagtatgaccccacttgtttatttc

SEQ ID NO: 115704 - DNA, 120 bp, synthetic construct
  source 1..120: mol_type = other DNA
agggtttgtgagaaggagagcacagtaaaatgtctgaatcttgatggacatggctaaagtagtcaagcatggcccttaaaggaaccattatttgtctcaggtttgctatttgtcacatcc

SEQ ID NO: 115705 - DNA, 120 bp, synthetic construct
  source 1..120: mol_type = other DNA
agtctgaagaaagctcaaaaagttcaaattatggcttttggaggagtctcaaatacagccaattgaagattaacaagattaactatctgaatagtggtcaacactgtttacagtatatgc

SEQ ID NO: 115706 - DNA, 120 bp, synthetic construct
  source 1..120: mol_type = other DNA
gaaatcaagttggccatgtgagtaaggtcattgataagttgaaagaagccaggtcatctatcaactttgtaacctgaacatccaattgatctttgtgagtccacttccctgcctgtagct

SEQ ID NO: 115707 - DNA, 120 bp, synthetic construct
  source 1..120: mol_type = other DNA
atgccaaccagtgctcaggaatggcgaagacctcaccgttagttagcaagcattgatacagtaacttggtgcatagtcattcaacagatagggataatggaataagtgaataaaacactg

SEQ ID NO: 115708 - DNA, 120 bp, synthetic construct
  source 1..120: mol_type = other DNA
acataactcacagaacagataatataggagctaagacacaaggttagaataaatctatgcaacaaacgacatgaataccacatgatacattagaagaaaacatgtgcaaacagaccaagg

SEQ ID NO: 115709 - DNA, 120 bp, synthetic construct
  source 1..120: mol_type = other DNA
ttttctttttttttttttttttttgagacggagtcttgctctgttgccagactggagtgcagtggcgccatctcagctcactgcaacctccgcctccttggttcaagggattcccctgcc

SEQ ID NO: 115710 - DNA, 120 bp, synthetic construct
  source 1..120: mol_type = other DNA
gagttcccattcttacaataagtaaataaaaactgtcatttcctggaaggcccaggaaccttaagacagtaagcaaattctaaagtctgccttggtttggcttcctagcttcaagagttt

SEQ ID NO: 115711 - DNA, 120 bp, synthetic construct
  source 1..120: mol_type = other DNA
atttgttacttaaatgtggcctaagtctctgatgaccccaaacatttccccagacatgggacagagacaactaggacaggttcatcttggcatgaagggataattaagcctaactgtaaa

SEQ ID NO: 115712 - DNA, 120 bp, synthetic construct
  source 1..120: mol_type = other DNA
taatattgctgaggggtcataataagcaagaaaaccatcctccggatttggcaataaatgttattggtcacctttataggagaggatttagaagaaaagattaccaagcagtacttcttc

SEQ ID NO: 115713 - DNA, 120 bp, synthetic construct
  source 1..120: mol_type = other DNA
ttgccatctttatgtccatgagtatctaatgtttagctcccagttataactgagaacttgcagtatttgcttttctgttcctgcactgattcacttaggataacgacttccagctgcatc

SEQ ID NO: 115714 - DNA, 120 bp, synthetic construct
  source 1..120: mol_type = other DNA
attccaccttcttctcgattatggcctcaagaatccaaatttcactttagtcttctaagcccccattcctggatttaaacagccatcttcttatggctgtatcctactactgcaactttg

SEQ ID NO: 115715 - DNA, 120 bp, synthetic construct
  source 1..120: mol_type = other DNA
ctctcttgctactattgtgatgaactgaagttttgtgggtagctgcttaaaatgctgtgtgacattaatctctgcataagcagttcatctgtccagtaaatcgcatatttcagtaaaagg

SEQ ID NO: 115716 - DNA, 120 bp, synthetic construct
  source 1..120: mol_type = other DNA
ataccgaagactgggtaattttataaagaaaagaggcttaattgactcatagttcgcatggctggggagacctcaggaaacttacaatcatggcagaaagggaagcaggaacattttacg

SEQ ID NO: 115717 - DNA, 120 bp, synthetic construct
  source 1..120: mol_type = other DNA
aagatgagtacttctgaatgagtaccagacaaagaggtagcagatttggaagaagtagtaccagaaacacattggcattagagaatctgacagaggggttccagttactcaagactgctt

SEQ ID NO: 115718 - DNA, 120 bp, synthetic construct
  source 1..120: mol_type = other DNA
ctatcaggtcacttatgttattctctatgctagctattttgtctgtcagctcctacaatgttttaccataatttttagcttccttgcattgcattagaatgtgctcctttagcttagtga

SEQ ID NO: 115719 - DNA, 120 bp, synthetic construct
  source 1..120: mol_type = other DNA
attagagaaatgcaaatcaaaaccccaatgagaccatctcacaccagccagaatagctattattaaagtctaaaagtaacagataccgatgaggttgtggagaaaaaggaacgcatatac

SEQ ID NO: 115720 - DNA, 120 bp, synthetic construct
  source 1..120: mol_type = other DNA
ttatgcaaagaggaaaggacaacataatgcaccttttatctgattagtgagttttcactactccagtaaaaatgctaacaataataaagcaattttttgtacgcagtttttccttttctg

SEQ ID NO: 115721 - DNA, 120 bp, synthetic construct
  source 1..120: mol_type = other DNA
ggagcctctgacatttaaggtgccctcttagcatttcataaacagtgttcaattgcccagtaaataaacaaagagcagcgtatgtgctaatggttctagtgctttgataaacttacccaa

SEQ ID NO: 115722 - DNA, 120 bp, synthetic construct
  source 1..120: mol_type = other DNA
tctcttattgtcctaggacaatgtcttttgtccagaaattctgcattctaaaaacaccagtatagaataaattcataccttttttaaactattcaagtaatactcatagcacaaccctaa

SEQ ID NO: 115723 - DNA, 120 bp, synthetic construct
  source 1..120: mol_type = other DNA
agtgatgtctttatgtgtccaatgatagcaaatatggcctgcaacaattcaatgataccttcaattattgggtttcctggtgctatgttttgtctcagtcagtttaggctaaagttaatt

SEQ ID NO: 115724 - DNA, 120 bp, synthetic construct
  source 1..120: mol_type = other DNA
taacgtgtggctgtgggccctcttactagaatagaactactggctttagtgttatgtgaacagtaatgctaaagatgaccttaggacaagttcttttggtgtatgaagagtcggtttttg

SEQ ID NO: 115725 - DNA, 120 bp, synthetic construct
  source 1..120: mol_type = other DNA
cattggggaaatatggaaccaaaaagtccccatgctaagttgttgaggcaggcagcctgccatttcctatgcagcactgacttttccaggctgttgatttcatttgtgaaatgtaaattg

SEQ ID NO: 115726 - DNA, 120 bp, synthetic construct
  source 1..120: mol_type = other DNA
caagccagtctttaaatcatgaatcgtattatatagtttcctacgttgagctggtaaaactaagcagtctgagcattaatagaaaatgaataactctctcacacactcctggagtagtat

SEQ ID NO: 115727 - DNA, 120 bp, synthetic construct
  source 1..120: mol_type = other DNA
gataagcctccctaaataagtcttaagaggaatgcttattttgcaaagattcagtctgctatactagatggtatctgatttcttctgctgcagacacaatgctttgtggtccggataaat

SEQ ID NO: 115728 - DNA, 120 bp, synthetic construct
  source 1..120: mol_type = other DNA
tggcgcaatctcggctcactgcaacctccacctcctggattcatgccattctcctgcctcagcctccccagcagctgggactataggtgcctaccaccacgcccagctaatttttgtatt

SEQ ID NO: 115729 - DNA, 120 bp, synthetic construct
  source 1..120: mol_type = other DNA
gcaggcgcttaagtcatgactcaatgctttatgcctaagtcctgattctgcaatccttccttggcaaaattcccaatggagtttgatgcttacagaaaaactttgctgagtggacattaa

SEQ ID NO: 115730 - DNA, 120 bp, synthetic construct
  source 1..120: mol_type = other DNA
gctgaggcaggaggagctcttgagcccaggagtttgaggccagcctgagcaacagagcaagacctcatctctgaaaagaaaaaacaaaaaacaaaacgaaacaaaataaaacaaaaaaac

SEQ ID NO: 115731 - DNA, 120 bp, synthetic construct
  source 1..120: mol_type = other DNA
aatctttgggcatcaatttcttcactgttaacatgacagttgtagtatttctccttaaaatacttcagggcagaattaaatcatgctaagaatttatattagagactaggcaccaagaaa

SEQ ID NO: 115732 - DNA, 120 bp, synthetic construct
  source 1..120: mol_type = other DNA
agaaatcgcacccatgcatggcatgccaacatcttcaaattcagaatacaggttcacaagtgtatctccaacccaaatattttttctgatactcacacccaaatagccagcttccagctc

SEQ ID NO: 115733 - DNA, 120 bp, synthetic construct
  source 1..120: mol_type = other DNA
tgtggttttccatttattttctcaatgatacatctgtcatctaatgtattttcctacatttagggcttcatttctgggctcgctgttatgttctctcagtgtgcgttcctatacccgtac

SEQ ID NO: 115734 - DNA, 120 bp, synthetic construct
  source 1..120: mol_type = other DNA
aaaggcatgtaatggcagaaaatcctgactagccaacacaacttgttcttcattccttctctcacccagaatccctcgcagttaaatgtatcaagaatctaaatcttccctggtggcaag

SEQ ID NO: 115735 - DNA, 120 bp, synthetic construct
  source 1..120: mol_type = other DNA
tgagaagagccttcaaatcttgaaaatgcacttccatattcctggaaaatgagagttaaaaagccagagtccttgtctccactacatgattactgaatcagaatctttggtcatgagtcc

SEQ ID NO: 115736 - DNA, 120 bp, synthetic construct
  source 1..120: mol_type = other DNA
agctaatgcatcttcttcaacatgatatatgttgcccctgtccccatcactaatatctctaacgatgaaatggctggtgctagatccaaccacctggtatgggattatggaaagaagata

SEQ ID NO: 115737 - DNA, 120 bp, synthetic construct
  source 1..120: mol_type = other DNA
tctcccgctgatctccataccacttccaaccccaatccatgcttatgtaagctcaccagaaatccttctcttatcaataaaaaaatcccagtaagatgaaagttgtacagctaagtccct

SEQ ID NO: 115738 - DNA, 120 bp, synthetic construct
  source 1..120: mol_type = other DNA
atatgcaaaaggcagatcaatgtggcttcacatttcattgtataatattacctttttcctttagggaagctggaactttctcttctttccctttaataggttctgaaaagaaacatcgga

SEQ ID NO: 115739 - DNA, 120 bp, synthetic construct
  source 1..120: mol_type = other DNA
cagcccctttttctattcccaccatattatttgggtgaaaatacagagactgtgatggtggtgcttgtaaatggagatgccactctagtaaacacttagaattaactgagtccagatagt

SEQ ID NO: 115740 - DNA, 120 bp, synthetic construct
  source 1..120: mol_type = other DNA
gtccacagacttctctgaggaatctctaactacccaaggaagtgaggaggatattaaatctgacaaaaaagtgaagagattattacatggaaactctgcacttctgcattaggaaggaga

SEQ ID NO: 115741 - DNA, 120 bp, synthetic construct
  source 1..120: mol_type = other DNA
gcaacggtcatccctagaactctatatgtccttacttaaaggcaaaagcctaataatgtatctctgaatgcccccagtgactcatggttatcacaactctgataaatgcagctccaaatg

SEQ ID NO: 115742 - DNA, 120 bp, synthetic construct
  source 1..120: mol_type = other DNA
ttacaaaagcctacttaatgaagtggtcagtgtggatttatttcctccagataatgttttccaggacagattttaacaattattcctccaactagtttaagctttggtacatgtgaagat

SEQ ID NO: 115743 - DNA, 120 bp, synthetic construct
  source 1..120: mol_type = other DNA
cctcacattccttgttcacaaaaatagaggtagctagcacattttgctgaaacaaatatgtaaagtaggtatcaaggtgcctggcaaagagtagatgcaccacttttggacttcctccaa

SEQ ID NO: 115744 - DNA, 120 bp, synthetic construct
  source 1..120: mol_type = other DNA
actttcttggtaataatgagaagaaataattttagagacaaacaaataaacacaagtttttaaaaatatgtgtgtgacctctgcagttctggtttacatatttgcaaaggggatgcagct

SEQ ID NO: 115745 - DNA, 120 bp, synthetic construct
  source 1..120: mol_type = other DNA
aggtgatgctgtgtgacttccaaggcgaaatcaaaaaaggtcatgcagtattcacctgctaatctagtgacacctgctttgggaaatgcagctgccatgtgagtaatctaattaacacca

SEQ ID NO: 115746 - DNA, 120 bp, synthetic construct
  source 1..120: mol_type = other DNA
gtctcccaaagtgctgggattacaggcgtgagccaccatgcccggccatgtattaggtttttttgtttttgtttttgttttttaagctgagaatggttcttagagttcttacttggctta

SEQ ID NO: 115747 - DNA, 120 bp, synthetic construct
  source 1..120: mol_type = other DNA
gaggctcatgaaaaagacaagacaaaagactgaaatagtggaaagtcttataacagaggatatcagccctagagttctttcctgacacaagcataaacattttgaatccaaactacaagt

SEQ ID NO: 115748 - DNA, 120 bp, synthetic construct
  source 1..120: mol_type = other DNA
tttactgtagacacttcattaactttgtaattaaatataacttggtcaggacactgtctttaactttctctttgtcataatgatacatttaactgttttgtattctattgggctaaagaa

SEQ ID NO: 115749 - DNA, 120 bp, synthetic construct
  source 1..120: mol_type = other DNA
gttggggagatgagatgaactaggatatcttagggacagggttggctactgaaccactaaagaatactctttcaaagaaaattttattagtcatgaaatttttctagtgtagtcccatca

SEQ ID NO: 115750 - DNA, 120 bp, synthetic construct
  source 1..120: mol_type = other DNA
ttctatattgtcttttgaactttttaaaatggaaatcctgtcctaaaacacatttatgtgggatctcaagaatcattctcattatagtgtaactgttcaaattgaaacttaatttataag

SEQ ID NO: 115751 - DNA, 120 bp, synthetic construct
  source 1..120: mol_type = other DNA
ttaccctaaaaattctctatgctccacctattcacccttctctcctccccaaaccctagtaaccactgagtttttaactttctccatacttttgccttttccagaatgtcatacagttgt

SEQ ID NO: 115752 - DNA, 120 bp, synthetic construct
  source 1..120: mol_type = other DNA
atgtccagttgttgcaacaccaatttgttcaaaagtctatcctttctccagcaaattgttttttctcctttgtcaaagatcagctgattatatttttgtgagtgcatttctgagttctct

SEQ ID NO: 115753 - DNA, 120 bp, synthetic construct
  source 1..120: mol_type = other DNA
atgcttttaccattactattcatagggtcatgtgtttttttcttctttagcctgttgatgttattgattacttaaacacttttcaaatgtcaaactagacttgcatatctggaatacgta

SEQ ID NO: 115754 - DNA, 120 bp, synthetic construct
  source 1..120: mol_type = other DNA
aaaaactgacagtacaaagtcattattgccatgttgtaaaaataatcagaaaccacccgtcacacacagttgttatctacattatcttatctccagagacattaagttcttctgccccat

SEQ ID NO: 115755 - DNA, 120 bp, synthetic construct
  source 1..120: mol_type = other DNA
cattccaagatctgagttaaattttgactcttaaagcattgctttacaactagcttgtaatatatcattggtctataaaaattgggacaataatagtcactaagatgcaggtaaatgttg

SEQ ID NO: 115756 - DNA, 120 bp, synthetic construct
  source 1..120: mol_type = other DNA
aagagtaagaagaagtaaaatgtattatgtgagtaagtgaggcagtggagtggagaattgagttgctaatggttctcttgaaaatatataaactacataaacaaggagagtatcctcgtt

SEQ ID NO: 115757 - DNA, 120 bp, synthetic construct
  source 1..120: mol_type = other DNA
atctgataaggtggatgaggacagtgatagatttacaaagcttgcaatagcacttgggttttgcctggtgttgtgacaacgtaaaacactattacaattatgtagggaaccattgtttac

SEQ ID NO: 115758 - DNA, 120 bp, synthetic construct
  source 1..120: mol_type = other DNA
agagcctaagctttaataagataaaagaagattttagtaaacaaaattataaaatcatctgaaggagtaagatcctatctctaagaaccatttccagtctcttgtccactagaggagaca

SEQ ID NO: 115759 - DNA, 120 bp, synthetic construct
  source 1..120: mol_type = other DNA
aagagcaatgacatgagggaacgacaattaaaattattagcacacttgagctctaagagaagccacatcactttaaatgttttaagtttagtgtactgtagcatttttctcaagcagagt

SEQ ID NO: 115760 - DNA, 120 bp, synthetic construct
  source 1..120: mol_type = other DNA
caagctctacatagaattccacttgacaggactatgattaatctacttgcattccaggttattgctggagtcatttagtgtcttgtaaatgtcaactagatgctcctttatattcgtgct

SEQ ID NO: 115761 - DNA, 120 bp, synthetic construct
  source 1..120: mol_type = other DNA
taccaatgaatgctatgctctttattttgctgtttttgttagattatagtcaatattagggttaggacagtgggaaggggtaggcaagttggccttcaatgctgaaataaaggcacaagt

SEQ ID NO: 115762 - DNA, 120 bp, synthetic construct
  source 1..120: mol_type = other DNA
agtgtgaggaagaagtgatatttgaagagataatagctagaacttctccagaatttcaggcaccagcaataggactctggaagcacaagaaatctaagtagggaaaggatggcctaattt

SEQ ID NO: 115763 - DNA, 120 bp, synthetic construct
  source 1..120: mol_type = other DNA
tgctaggattttgactgggattatgatgaattaatagatcattttgagaattgatatctttacaaaatcaagtcatctgattggtgaacataaaatatccctccattgagttttgtgttc

SEQ ID NO: 115764 - DNA, 120 bp, synthetic construct
  source 1..120: mol_type = other DNA
atattacctctttttctattctctggaaaatttgatgtaagattggtgctaattttttcttaaatgtttgaaataattcaccagtgaaaccatctggctaaaattgagggaggggaatag

SEQ ID NO: 115765 - DNA, 120 bp, synthetic construct
  source 1..120: mol_type = other DNA
gaggagataagggatagtctaaaaatagagaataggaccaaatgcagaaacctttgaaagccaaattagagctacactttacaatgtacgctataagaggctagtaagatgtgtagtgcc

SEQ ID NO: 115766 - DNA, 120 bp, synthetic construct
  source 1..120: mol_type = other DNA
gatgtatgccctttattagcagtattagcaggtacttttttttttttatggagttttgcatttgtcgcccaggctggagtgtaatggtgcaatcttggctcactgcaacctctgccttct

SEQ ID NO: 115767 - DNA, 120 bp, synthetic construct
  source 1..120: mol_type = other DNA
agtcttctaacatagtcggaattatgaacatagcattataggattgttgtagcatagaaaacaaggcatgtctaaagatgaagttggaaaaggatataggagccagttcttggggcactc

SEQ ID NO: 115768 - DNA, 120 bp, synthetic construct
  source 1..120: mol_type = other DNA
ggtaaacgtgtgccatggtggtttgctgtaccttatcaacctatcacctaggtattaagcccagcatgcattagctattgtgaagctgaatttgaagatatttattgggcagttgaacat

SEQ ID NO: 115769 - DNA, 120 bp, synthetic construct
  source 1..120: mol_type = other DNA
aggaaaaactggagaaactggtcctgaagagaaggagaaacactacctctgagattaaaagatagatggatatgtgccacattttctttatccagtctatcattgatgggcatttgggtt

SEQ ID NO: 115770 - DNA, 120 bp, synthetic construct
  source 1..120: mol_type = other DNA
ctccatgcaaagggcaccaatgtatacatctccagcctatcattgtctggagctctagttttatttctagaaccacctatgtgatgctaccttcatgtgctactagcactttgacttaaa

SEQ ID NO: 115771 - DNA, 120 bp, synthetic construct
  source 1..120: mol_type = other DNA
agcaagctgctatcatattaatgactaaatactatgtatctccaaataaaatatgacttaaaagtaggcttaagataagacaatttatgctgcagataaattgacacattacagtgaaca

SEQ ID NO: 115772 - DNA, 120 bp, synthetic construct
  source 1..120: mol_type = other DNA
ttctaccctaaatactgttcaatcaagcctagcctgaagttgcctccttacatattttgagtttggcgtagaggtttctctgtacatagtgaacccaaatggaggtagaaacaggctgta

SEQ ID NO: 115773 - DNA, 120 bp, synthetic construct
  source 1..120: mol_type = other DNA
ttttgaacataagttggccacacttttgtcctttcaacataaatcagtgccttggccttaagtccacttactgggcccatgaactctgtatctatgtctatgttagtgattttctctgac

SEQ ID NO: 115774 - DNA, 120 bp, synthetic construct
  source 1..120: mol_type = other DNA
ttagtggagtatgtgtgtaagggtatgtgtgcaggtttgcgtgtgtgtatgcatcagtgtatgttgaggataggcttattaaattgtctcttgatatacttccaaagacattggctacat

SEQ ID NO: 115775 - DNA, 120 bp, synthetic construct
  source 1..120: mol_type = other DNA
aatttattagtctacaatttttttttttaaacggagattggctcttgttgcccaggctggaatgcagtggcgcaatctcgactcactgcaacctctccctcccaggttcaagcaattccc

SEQ ID NO: 115776 - DNA, 120 bp, synthetic construct
  source 1..120: mol_type = other DNA
ctgttttataccttccaggtaaagactttagatcaatggctcttaaacttaagcatgcatcaggttcacgctggagggctattgaaacagatgctgagcgcaaaaggtctgattcagtat

SEQ ID NO: 115777 - DNA, 120 bp, synthetic construct
  source 1..120: mol_type = other DNA
tcattcttaaccctgtctgcaccttagaataagctggggagtttttctaagcctatgatattcagatatctggagtgggcaacagagctttgagattctaagttaatgagtctggcgtga

SEQ ID NO: 115778 - DNA, 120 bp, synthetic construct
  source 1..120: mol_type = other DNA
ccaccctgcagcagacctcacttcaaatgtggatcacatttatgagatcacttagcactggccagtaatattaccacagacccaataaagttgctttctcatactcttaacaaaagttga

SEQ ID NO: 115779 - DNA, 120 bp, synthetic construct
  source 1..120: mol_type = other DNA
ctgctgtctagcattccaatgtttggtctacaaactatggatttattctcctgccagtggacactaggtcacaaccagttttgtgttttctaaataattctgctatgaacattcctgcac

SEQ ID NO: 115780 - DNA, 120 bp, synthetic construct
  source 1..120: mol_type = other DNA
ctacaccaataccattctaccctttataatacaatatctggggactgctttattactaacacttaggacacatagtcctgatctcaatagccatgctttatagtgccatgttgctgtgtt

SEQ ID NO: 115781 - DNA, 120 bp, synthetic construct
  source 1..120: mol_type = other DNA
gagctaaaaatgactatattttggctttatcctgggctttggtggctattttcctcaaaattcaaactgactactggctggctgaccatgcatatggaatacatgatcccagccctaagg

SEQ ID NO: 115782 - DNA, 120 bp, synthetic construct
  source 1..120: mol_type = other DNA
gggctgtcagttcattaaacctctttctttggtaaattgcccagtgtgggatatgtctttatcagcagcatgaaaagggactaatatatgctctattctgaaggtgatgtacgtcccaag

SEQ ID NO: 115783 - DNA, 120 bp, synthetic construct
  source 1..120: mol_type = other DNA
gctctctcccagtgctacaaaattatcagatttgtttgatatattttcttgattaagcatttctacagactaagtatcagcatagcaaagactccataatatagagttccaatcagcttt

SEQ ID NO: 115784 - DNA, 120 bp, synthetic construct
  source 1..120: mol_type = other DNA
agacaggatattcatagtagacaaattaggttgcctactggtttgatcaactgattaatctttaggataattcagtctgatgtgtactgaagagttcacttattatactgcaaaatgaga

SEQ ID NO: 115785 - DNA, 120 bp, synthetic construct
  source 1..120: mol_type = other DNA
ctctctgtctttctataatgcacacactatcttaggttcttcttacatgcgtaagtgagaagatgtgttatgcttgaggaaatgcaactctgaaccaacagggtgttctctgtaaagtag

SEQ ID NO: 115786 - DNA, 120 bp, synthetic construct
  source 1..120: mol_type = other DNA
aggtttatttgtcttgtctagttgtttgactctcaatcagtttttttctcatcagaatgtaaatatattttgggcaaaatctacttttgctctcactgcaactcccctgagcactcagga

SEQ ID NO: 115787 - DNA, 120 bp, synthetic construct
  source 1..120: mol_type = other DNA
gcatgtgctgatgccagattgcagcaactaataatggcttacataaaaaggctaagattatatacttaaaataattcttttttccatttatcttgggagtttccttatggggcagcatca

SEQ ID NO: 115788 - DNA, 120 bp, synthetic construct
  source 1..120: mol_type = other DNA
gaatatgttcatactgaaagaactctacaaactatattttaaaaatatagagtgtcatagaatgctacggtcatcacatcaatttcccaagtatacaattttgttagtcaggcttctaat

SEQ ID NO: 115789 - DNA, 120 bp, synthetic construct
  source 1..120: mol_type = other DNA
aagaactgataggtgttttgaagaaaactatttcttctccttattgctgcccgagtcacaatctgaggaccttctcaaggagggaaacagttgggttgtgaatgaatgcgtgaaaaggca

SEQ ID NO: 115790 - DNA, 120 bp, synthetic construct
  source 1..120: mol_type = other DNA
ggaatgcagttttacttttgattacaagcccgtcaagagtattgttagatgattgcatgagcttgagaaagagttctaaaaatgattactatgcttctcagtccactctaacccccagac

SEQ ID NO: 115791 - DNA, 120 bp, synthetic construct
  source 1..120: mol_type = other DNA
aggtatgctgtttcatggttcatcaaacataaggcagaaaaaaagaaatatgtccagtaccttctgcaggtttttttgttttcttggaatctgaaaacacaaagataaattattaataaa

SEQ ID NO: 115792 - DNA, 120 bp, synthetic construct
  source 1..120: mol_type = other DNA
atctggcttggaacctagaacagtagacattcactaatagtttgcaagttaatggatttctgtgccttacagaggtgtggtggtatcacgacttcacttccatgatgaagaaagggaact

SEQ ID NO: 115793 - DNA, 120 bp, synthetic construct
  source 1..120: mol_type = other DNA
atcgattcctgagacaaaacatttgcttagtcatcatttgttaaacactgttgtgtccagcacactacaatgaaaataattttagaatagatttttcttaattaaccccagctctgaaaa

SEQ ID NO: 115794 - DNA, 120 bp, synthetic construct
  source 1..120: mol_type = other DNA
atagtgcttggagtccaaagatcacatactgaccctgaagagctattaatactagctggtaatattcatgctattaaacttcattatgccctttcagcattcttggctcaaacagcttaa

SEQ ID NO: 115795 - DNA, 120 bp, synthetic construct
  source 1..120: mol_type = other DNA
ccggttgctaggaattcatcactcaatctgagtttagatgaataaaatctacctggatctgctcgtagaattcaaggagcagctagtgattacacacacctaagaaggacagtcaatagc

SEQ ID NO: 115796 - DNA, 120 bp, synthetic construct
  source 1..120: mol_type = other DNA
ggcttcatcctttttggtgtgtggggcaacaaccttggagagctggaacctctggctactcttacatttgctatgaaagtaataaattgtctcaatctcaaaaagggatcattgcatctt

SEQ ID NO: 115797 - DNA, 120 bp, synthetic construct
  source 1..120: mol_type = other DNA
gggttgaagctgataccaatatttcagtcttgctgcctacaaggagtgttttatatgttttttagctggtcatggacactggatctcttgaatctacaaaagcacagctcatcccaagct

SEQ ID NO: 115798 - DNA, 120 bp, synthetic construct
  source 1..120: mol_type = other DNA
ttagctactgaggaattatatactagtctgcagtctacatttgcacttataataaccatgtataaaatgcccaatttcaggaagggaaaataaatatcctaccctccttttagcaaactt

SEQ ID NO: 115799 - DNA, 120 bp, synthetic construct
  source 1..120: mol_type = other DNA
agataacaccgaaaatgaattaaatgatatggacatggcctgatgaatttcaaagccatgaggtttaattttagtaagtctctgagtttgactcaacagactttgttgttgattctttac

SEQ ID NO: 115800 - DNA, 120 bp, synthetic construct
  source 1..120: mol_type = other DNA
gtatccaggagattcttaatgtttgcttcaggaatccagaagaaaaaagccagtggaaatacactaacacagagtgcacataccccatcttttaagccgagttccattacggcatgtgtt

SEQ ID NO: 115801 - DNA, 120 bp, synthetic construct
  source 1..120: mol_type = other DNA
ggaggatttgcaaagacgcgaatgatatgcagttctgctttgatgtgtccctgcattggtgtgtcatttttattttagtaaacgcatacacagaatacctcactcttgccttgttcactg

SEQ ID NO: 115802 - DNA, 120 bp, synthetic construct
  source 1..120: mol_type = other DNA
ctcagatgtaatacattcggtcatacatcatgtgatgtgctaagaagtctgctatgagagccttctacccctgaaaattgtaccaccacctatgtgcatctcctttattgcttgatatta

SEQ ID NO: 115803 - DNA, 120 bp, synthetic construct
  source 1..120: mol_type = other DNA
gaattgctgagaatggagcttactgaaagaaaaacatgactgaagcaatttaaatcataagataaagattccaaacactgttttgcctcactgttaactggccatggaatatcactttgc

SEQ ID NO: 115804 - DNA, 120 bp, synthetic construct
  source 1..120: mol_type = other DNA
atatcttttgccaaaactgaattcagtctacccttgatatttacataattaattttttttctggaggaaaactgcatgcatgctagtaccatctttgtcaaacctagactaaatggtctc

SEQ ID NO: 115805 - DNA, 120 bp, synthetic construct
  source 1..120: mol_type = other DNA
atctcgggatcatagcagtatcatgtttgtccctcataactccatctattccttctctgattttaagctttaaagttcatttatgaggttggtgcaaatgcaattgcagttgcacgaacc

SEQ ID NO: 115806 - DNA, 120 bp, synthetic construct
  source 1..120: mol_type = other DNA
acactgtttatattttgacttcatttaatgtaaagtgcaaatccattacattttcaaaaataggtttcacataactttagtggcaaatggactgctacactgtcagcagccagaattggt

SEQ ID NO: 115807 - DNA, 120 bp, synthetic construct
  source 1..120: mol_type = other DNA
tggaattctacttaagagcatgtttgagataaacattttttcaggattcaaattatgaatcaaatttattttattaatcttccaaagaaatgaaaacagctttaaagctgtctcttgcta

SEQ ID NO: 115808 - DNA, 120 bp, synthetic construct
  source 1..120: mol_type = other DNA
ctccaggaaagcatatttcatgggcattgcttcatttcagtatgataattaccctattgagatgaaattaatcatgaagcagcctttggccatcctgtgtgaccaaggggactgaagcct

SEQ ID NO: 115809 - DNA, 120 bp, synthetic construct
  source 1..120: mol_type = other DNA
accagctggtcactcaaggttcctttctaccttctatagcaactttctaaaatcagtgattatgaacacagataaaagtattagaagaatttgcctacatcatttttgatggcaaatttc

SEQ ID NO: 115810 - DNA, 120 bp, synthetic construct
  source 1..120: mol_type = other DNA
cagggtttggggacccgtgctctaatgcccactttacatataaggtagagagagtgctttcctcattaaagggtgtcatagaacagtatgatctaaatatagcacttaaaaaaccagccc

SEQ ID NO: 115811 - DNA, 120 bp, synthetic construct
  source 1..120: mol_type = other DNA
ataaagtgtatggtactctgagttttagagattggcaatttttaaggaggcaggatatagacaagatttaaaggaggccgggtgtagtgcctcatgcctataatcccagcactttgggac

SEQ ID NO: 115812 - DNA, 120 bp, synthetic construct
  source 1..120: mol_type = other DNA
gatagacttttgtcttagtacattgagcgctactgcatttttgggcaggaaagttacacggcagtgttttgaagagataaaagtgtccatgattgtctgggaaagggcttctgtcccttt

SEQ ID NO: 115813 - DNA, 120 bp, synthetic construct
  source 1..120: mol_type = other DNA
gaaaagtctgggaaatgggaagacaattagggtagcaagatcccagaatgtgtgggaagaaataagaaaaaagcataggtataagtatctgcctagggagataaagtacatcttagtctg

SEQ ID NO: 115814 - DNA, 120 bp, synthetic construct
  source 1..120: mol_type = other DNA
atgtgtggtgaactattttttgtttttttgtgttttgagaagtttctgtcacccaggcgggagtgcagtgatgagatctcaggtaactgcaacctccacttcccaagtacaagtaattct

SEQ ID NO: 115815 - DNA, 120 bp, synthetic construct
  source 1..120: mol_type = other DNA
gttattggtcttctaacaaatggctcaactgaaatctacttttacagctactaggctttccagttagcccatctccatcatctcaagatggtctgaattccaactaacccatctgaaggc

SEQ ID NO: 115816 - DNA, 120 bp, synthetic construct
  source 1..120: mol_type = other DNA
ttactgcacttgatctgtatcattactttgtaagataggccactaggcctggactaaactgcaagcattctgaccctagcccagcatgttgtcaatataacaagaattaccacttctctt

SEQ ID NO: 115817 - DNA, 120 bp, synthetic construct
  source 1..120: mol_type = other DNA
cactttttaccctccaaagtaaatactatcatttcttggaaacttttctgatcctcgtagtgcaattgttttctccctccttggggccaacatagtgcttcaccaggactttcttaaggc

SEQ ID NO: 115818 - DNA, 120 bp, synthetic construct
  source 1..120: mol_type = other DNA
aaagtacaaaattctcatacctatgtcttagagaagtaacttgacaataattgttttgggccaggcacggtggctcatgcctgtaatcccaacactttgggaggccgaggtgggtggatc

SEQ ID NO: 115819 - DNA, 120 bp, synthetic construct
  source 1..120: mol_type = other DNA
ggtcacgctttgaatcttggctttgccatttcatattttccttgagcatgcttaagttttcaaaggctcatattgctgtgaggattaaatgaggtgacatatgtaaagtaccaaccataa

SEQ ID NO: 115820 - DNA, 120 bp, synthetic construct
  source 1..120: mol_type = other DNA
agacaaaggctgcggagtccaagagctgtgggcagatataagagatcaaattggtaagacatttctatgcccaatcacataaagtaaaacagaacaccatgcattttctccccttttgca

SEQ ID NO: 115821 - DNA, 120 bp, synthetic construct
  source 1..120: mol_type = other DNA
atgctgggattagaagcatgagccaccgcacccagcctgaataactactttctaaggaagattgattatggcaaataaagggtccttcaagcaacaggatgagtgtgaatatcaaaagga

SEQ ID NO: 115822 - DNA, 120 bp, synthetic construct
  source 1..120: mol_type = other DNA
accacaatttacttcccaagtctatattattggaaaacaagggaaatgggtgggagctggggagaacatggtaaatttaaagattaggcagtgctgtccaatatggcagccaataactgt

SEQ ID NO: 115823 - DNA, 120 bp, synthetic construct
  source 1..120: mol_type = other DNA
attcccagtgttggggcaacagtagcagtaatgccaatgacatcagcatctcagtctctcagtctgaatcttggactcaatgtcctgtgattgctcccaaaacaattatcaaaaacactt

SEQ ID NO: 115824 - DNA, 120 bp, synthetic construct
  source 1..120: mol_type = other DNA
tgcattcagcccattttcttaccttttaatcacacatcagaaggcaccttttcaaatgctttgctacacatgcatcaagcctgcacaatttctctgatcttcaagttcgctatctgatga

SEQ ID NO: 115825 - DNA, 120 bp, synthetic construct
  source 1..120: mol_type = other DNA
agtcctttctaattcattcattcagcaaatattaattgagcatctactctgtgccagatgccactctaggctctgtgaacacaattattaaacactcagaggcttgtccttttgtagctt

SEQ ID NO: 115826 - DNA, 120 bp, synthetic construct
  source 1..120: mol_type = other DNA
aggatggagtatgacgttcacaactacgaccaccagatggcactagtcttatccttttctgaagagaatttcatatgcaaaattcagtgacagcagtgtcactaaagttaaggggacaga

SEQ ID NO: 115827 - DNA, 120 bp, synthetic construct
  source 1..120: mol_type = other DNA
ctcccaaagttgtgggattacaggcgtgagccaccacgcccagccaccattattctttagtacccagaaaagcatctttctaatgaaaggactcaataagtgaacaaatgaattaatgaa

SEQ ID NO: 115828 - DNA, 120 bp, synthetic construct
  source 1..120: mol_type = other DNA
gggattcagacactaataagaacatgctgtaataattttgacccagaggtagcttgtcataataggtagggtaagtgtgaccgttatttccctggtttaggaatacacaccagctggcaa

SEQ ID NO: 115829 - DNA, 120 bp, synthetic construct
  source 1..120: mol_type = other DNA
gtttcaagatgagcaggtctatctatgtgaacctactcccaaaggccatgggagctgagaggctaaaaaaagaaactgatagatccagtttctctgaaagaagcatttcctagggattta

SEQ ID NO: 115830 - DNA, 120 bp, synthetic construct
  source 1..120: mol_type = other DNA
cgtcagtacccagtggagtgattgaaaccttgtaaacaaaagtgaatattgacacaaatggtcaaaccacaggaaaaaggggatcctgaagttttaaggagttaatgcaagcaaagtgct

SEQ ID NO: 115831 - DNA, 120 bp, synthetic construct
  source 1..120: mol_type = other DNA
tttgggttccccaaaatattgtttaacaacaactgaaccagccaactgaagtgctcatatgaaaacagtatgtttttaaaaagtcatcatgacagaacggtatctatttccctctgattc

SEQ ID NO: 115832 - DNA, 120 bp, synthetic construct
  source 1..120: mol_type = other DNA
ccaggaggactgcttgagcctaggggtttgaagttgtagtgagccataatagcaccactgcacttcagcctacagagaaaggtcacatctcaaaaaaaagaaatatttccaagaaaacaa

SEQ ID NO: 115833 - DNA, 120 bp, synthetic construct
  source 1..120: mol_type = other DNA
tactatgtagcacaaaggatagtggattttttctaactataattactagcaaagcagataaatgtaacagcgttatgggtagctgtgtctaatttgtcttgggctgtctcgctgtgttta

SEQ ID NO: 115834 - DNA, 120 bp, synthetic construct
  source 1..120: mol_type = other DNA
aaaataaatcatcttccttttttcctttttacttaaagactatggacagcactctggcctaacttgggtcatgggcccacactcatggggaaagtgacaggtggaacaatgacagtaact

SEQ ID NO: 115835 - DNA, 120 bp, synthetic construct
  source 1..120: mol_type = other DNA
aataacaaatgattacaaatggcaagcatgtgtgattaggacctcagttaatggctttgctgcatgagaaaagctgcccaggtgttatcgtcgcccttcagttgatgaatagccttttac

SEQ ID NO: 115836 - DNA, 120 bp, synthetic construct
  source 1..120: mol_type = other DNA
gaccagagaacttaaaaggaaagaatgttgtctaagagggtgagtgaagaaagagataggctgtgaaatgctcttgagaaggagttcacctttggacatggtaatgtggagagttgacaa

SEQ ID NO: 115837 - DNA, 120 bp, synthetic construct
  source 1..120: mol_type = other DNA
ttcctgggaatgttagtgtctatacatatttttagagggaagacagcccaagtggtttaccacattccgctgataggcttatatcacatgttcaagccatggtgtattttcttctttctc

SEQ ID NO: 115838 - DNA, 120 bp, synthetic construct
  source 1..120: mol_type = other DNA
ccactctttctctgtttgaaaacttcaaatggcagtgttcactgacttaaaagattccccatataatcttaaacatcccacattgtctacttctaacttccaccatggagtcctcattct

SEQ ID NO: 115839 - DNA, 120 bp, synthetic construct
  source 1..120: mol_type = other DNA
cggtggtgtccctgttctagatctctaatagtcactcacctaccacaaaagagaagtaatttctatacttctgccttgatttttgcgtgaggccttgtatttaccctattatagtgctca

SEQ ID NO: 115840 - DNA, 120 bp, synthetic construct
  source 1..120: mol_type = other DNA
aacgacaaaatttgcctggatatttcacatctgcattattaaatatgtatctcaagtcacaaggaaaactcaggccacactgtcacattattgtctaacaaattgatcaaaatctctcca

SEQ ID NO: 115841 - DNA, 120 bp, synthetic construct
  source 1..120: mol_type = other DNA
gccgagatcgcgccactgcactccagcctggtgacagagcaagactctgtctcaaaaaaataaatataatataataatataatataacacacctctcaagttcagaggtgatcttgtttt

SEQ ID NO: 115842 - DNA, 120 bp, synthetic construct
  source 1..120: mol_type = other DNA
aaggaatctactattgccttgtaattgtggagcctcactaagtcaaggctgggaaatactgattaaaccaggtctaatgtgtactagattttccattttttacttatctgaatgaatttt

SEQ ID NO: 115843 - DNA, 120 bp, synthetic construct
  source 1..120: mol_type = other DNA
tcaccagagccacctaatcatatattgtatatcttacaaatgcatgcctctcttttaaggcaatctgcatagaatcctagtcataatttgaaaacatcaactttttaaatatcacagcac

SEQ ID NO: 115844 - DNA, 120 bp, synthetic construct
  source 1..120: mol_type = other DNA
gctgtctctcagagaggcctgctctaataatcttatctatttaaataacttcccaccccaacgcattatattctatcattgccttaagtttattttctccactgcccttactcagagttg

SEQ ID NO: 115845 - DNA, 120 bp, synthetic construct
  source 1..120: mol_type = other DNA
actgaaagcagaaatggtttggcagagcagatgaatgatttggcaaatgaagatgttagtaatctgctgaggcttgcctcaacatttccaggatctagtctttgtggttgtgagaagaca

SEQ ID NO: 115846 - DNA, 120 bp, synthetic construct
  source 1..120: mol_type = other DNA
gagttaaaaactagcactaactgaaactcaatctctctgtctctctctctctctctctctctgacacagacacacacaaacacaaacacacacacacacacatgcacacactgttttgag

SEQ ID NO: 115847 - DNA, 120 bp, synthetic construct
  source 1..120: mol_type = other DNA
tagactacaataatacagccttaataatggaaatttggatgcaaaggaatgggcaatcaactcttggacacacagaatgtctggctgatccttcttgctcatttcatgggccacataatc

SEQ ID NO: 115848 - DNA, 120 bp, synthetic construct
  source 1..120: mol_type = other DNA
cagatttttttttttttttttttttttttttgtagggggatgaggagacagggtcttcctctgctacccaggctggagtgcagtagtgcaattatggtgctcactacagcctcaacctcc

SEQ ID NO: 115849 - DNA, 120 bp, synthetic construct
  source 1..120: mol_type = other DNA
cagggcatgcatgactaccagtgaggcatctaatttatcttgtatagagaaatcttaaatcagccataagtcatgtcaaatatgaataaggtagcaccttcataacagactagtggctta

SEQ ID NO: 115850 - DNA, 120 bp, synthetic construct
  source 1..120: mol_type = other DNA
cctttagggaaatttagtatgaaagcaaaaccaaggttgaaatgaaggatttttgttaagtcagttctgcctccagctagctttgtgactgagcaagtaatttaatcccactaagtctta

SEQ ID NO: 115851 - DNA, 120 bp, synthetic construct
  source 1..120: mol_type = other DNA
aatgtactgatttttatcttcaattagcagtgctatttaccttatatttgaaattcctttctctttgtcagttgtctctcatctcaggtacaggtacattcaaagacttccgttacccag

SEQ ID NO: 115852 - DNA, 120 bp, synthetic construct
  source 1..120: mol_type = other DNA
tggtgatacagtattcttgtcttcgtccaaattgaattaatgctcctattatacactctgcttgtgattacagtcatacactgtgagagtcatgaataagagcagaagtccacaaaatgc

SEQ ID NO: 115853 - DNA, 120 bp, synthetic construct; identical to SEQ ID NO: 28264
  source 1..120: mol_type = other DNA

SEQ ID NO: 115854 - DNA, 120 bp, synthetic construct; identical to SEQ ID NO: 28265
  source 1..120: mol_type = other DNA

SEQ ID NO: 115855 - DNA, 120 bp, synthetic construct
  source 1..120: mol_type = other DNA
atagatatgcggcgttatttctgagggctctgttctgttctattgatctatatctctgttttggtaccagtaccatgctgttttggttactgtagccttgtagtatagtttgaagtcagg

SEQ ID NO: 115856 - DNA, 120 bp, synthetic construct
  source 1..120: mol_type = other DNA
tcatggtggataagctttttgatgtgctgatggatttgttttgccagtattttattgaggatttttccatcaatgttcatcaaggatattggtctaaaattctcttttttggttgtgtct

SEQ ID NO: 115857 - DNA, 120 bp, synthetic construct
  source 1..120: mol_type = other DNA
aaccaacccaaatgtccaacaatgatagaccggattaagaaaatgtggcacatatactccatggaatactatgaagccataaaaaatgatgagttcatgttctttgtagggacatggatg

SEQ ID NO: 115858 - DNA, 120 bp, synthetic construct; identical to SEQ ID NO: 28266
  source 1..120: mol_type = other DNA

SEQ ID NO: 115859 - DNA, 120 bp, synthetic construct
  source 1..120: mol_type = other DNA
tttcaaaaaaaaaaaaaaaaggtcgttgtgaatgttagctccagatcaactgcaagaacaaatcagcaatcccaagaggacccacagaccctctgaaggaagcagactgcttctgcagga

SEQ ID NO: 115860 - DNA, 120 bp, synthetic construct
  source 1..120: mol_type = other DNA
catactactgcagctgatgctctctggaaagcaccacctcctgcactttggtgcaggaggccaaccagcacaataatagagcattaaaccacaaaagctaagaaccctcacagagtccat

SEQ ID NO: 115861 - DNA, 120 bp, synthetic construct
  source 1..120: mol_type = other DNA
aggaataagagaattctaaaatcttgtaaaacatatttgggggaataatcaaggaaaactactccagccttgctagagacttagacatccaaatacaagaagcacaaagaacacctggga

SEQ ID NO: 115862 - DNA, 120 bp, synthetic construct
  source 1..120: mol_type = other DNA
gcacctaacactggagctcccaaagttataaaacaattactaacagacctaagaaattagatagatagcaacacaaaaatagtgggggactttaatactccactgacagcactaaactga

SEQ ID NO: 115863 - DNA, 120 bp, synthetic construct
  source 1..120: mol_type = other DNA
aacaaaaaaaagtccaggaccagttggattcacagaattctaccagacattccaagaagaattggtgccaatacttttgacactattccacaagatagagaaataaggaattctccccaa

SEQ ID NO: 115864 - DNA, 120 bp, synthetic construct
  source 1..120: mol_type = other DNA
aaacacatcccacgcttatggatggatataatcaatcttgggaaaatgaccatactgccaaaagcaatctgcaaattcaatgcaatccccaacaaaataccaccgtaattcttcgcagag

SEQ ID NO: 115865 - DNA, 120 bp, synthetic construct
  source 1..120: mol_type = other DNA
acaccaccttactcctgcaagaatggccataataaaaaaaataaaaaaacagtagtggcatgtatgtggtgattagggaacacttctacactgctggtggggatgtaaactagtacagcc

SEQ ID NO: 115866 - DNA, 120 bp, synthetic construct
  source 1..120: mol_type = other DNA
tgtatgcactagaatatacttcattctcaggtaaaagtctacacatcttataacctgtgaggaaatgggctcaggaaagatgacgaatgtggccaacttcacaggtcatatgagtcaggg

SEQ ID NO: 115867 - DNA, 120 bp, synthetic construct
  source 1..120: mol_type = other DNA
gtgtgtgtgtgtgtgtgtgtgtctgtgtgtgttagagaaacaaagagagaagaaaagaggagcgagacgggagaaggaaaaggagatgctatattttatttttccactcagtgcttttgc

SEQ ID NO: 115868 - DNA, 120 bp, synthetic construct
  source 1..120: mol_type = other DNA
atataaaattctcatttaattgaagcaggcattttttttttctttttttgagacagggcctcactttgttacccaggctagagtgcagtcgtgggatctcggctcactgcaacctctgtt

SEQ ID NO: 115869 - DNA, 120 bp, synthetic construct
  source 1..120: mol_type = other DNA
acattcctggtcttcagagtaaatacctcttgatactgaacagtcaagacagacagatgcccctatctatcttggcagctgtagagggtaagaaaaacaaaactgcttcctcttatggat

SEQ ID NO: 115870 - DNA, 120 bp, synthetic construct
  source 1..120: mol_type = other DNA
atttaaatcatagactttgaataaagcagattaccctctgtaatgtgggatgggccttgtctaatcagttgaaggccttaaagagaaaagactgaagtcccccaaggaggaaggaagtct

SEQ ID NO: 115871 - DNA, 120 bp, synthetic construct
  source 1..120: mol_type = other DNA
ataatacagtaagacaaagagagagatctgggcatctattctctagtttcctcccaggctcactgagaattttacatacatcattttacagagtgttggttggtggttgtggtcccctac

SEQ ID NO: 115872 - DNA, 120 bp, synthetic construct
  source 1..120: mol_type = other DNA
ctgtgtatacaaaacattccaagatatggttccagtcctgtattgaaaaattatattagagttttatgtatactgaccaatgtcatgaaagcaatcaccttactagcttctgtggatacc

SEQ ID NO: 115873 - DNA, 120 bp, synthetic construct
  source 1..120: mol_type = other DNA
ttggttcataggtgaagaaattgaggccctaagaagtcaattgatttgtcaaagaccatgcaactcattagtatcaaagctgagattgggcaggactctggtcttctctctagagttctc

SEQ ID NO: 115874 - DNA, 120 bp, synthetic construct
  source 1..120: mol_type = other DNA
gtccctttgtatcaaaaaattcaaagtaataaaagcttcattatggcagacaaagcacgcaatgtggggacaacacagaaatccaagaaaggcaagaccaatttcaaggcactaaataag

SEQ ID NO: 115875 - DNA, 120 bp, synthetic construct
  source 1..120: mol_type = other DNA
aataaataaatacaataacagaacctaagcgtcctacttaacaaatgacacatccttttccaagtgacagattgctaagcaaaatatttgctacttggtgttttatgagcctctgctagg

SEQ ID NO: 115876 - DNA, 120 bp, synthetic construct
  source 1..120: mol_type = other DNA
aacagtatttgtgtgtgtgtgagtgtgtgtgtatatatatatttcaatcctcacaataacgctaggagatcagtgctctgcttatatcatcttagagatggcaaaactcatgaagagtta

SEQ ID NO: 115877 - DNA, 120 bp, synthetic construct
  source 1..120: mol_type = other DNA
gaacagatacatttttccctaccataataaatgacctgtagttaagtaaataatgagccaaagagaaaatatattcagttttatagaactttgaaagcttctctcaagtctctgtctgag

SEQ ID NO: 115878 - DNA, 120 bp, synthetic construct
  source 1..120: mol_type = other DNA
gctgctaataagtggaattggatttcaatgcaggttcccaagttgcaattcttaaagttcctctcagattgcctatgcttaacagaagggtcatctatcaggagtccatgactatagctg

SEQ ID NO: 115879 - DNA, 120 bp, synthetic construct
  source 1..120: mol_type = other DNA
ttgatatcagaaattctgcacaactataatgctctttttattctgctctctaacatggctgatggcatggttgtaaggcagtggacacaatgggtaacaatgggaaagtaggaccacaag

SEQ ID NO: 115880 - DNA, 120 bp, synthetic construct
  source 1..120: mol_type = other DNA
caagctattacctgaaaatccctctgacattcaaacacagtaagttggcttcatttctgttccttgagtgatttgggctggcttatttccataatacctgaatggtaggttggcaaattg

SEQ ID NO: 115881 - DNA, 120 bp, synthetic construct
  source 1..120: mol_type = other DNA
cttgtacttttggaccacttagggatggaaagaggagaccctagagatatggggtgctaaccactcctccctttcccaaccccatctattaaaaataattgaattgccactcatataata

SEQ ID NO: 115882 - DNA, 120 bp, synthetic construct
  source 1..120: mol_type = other DNA
taggacttcctctgaggatacaataatgtatatgatggacaagatacgtaaaagtgccttgaagagacttggtcttgtgaggggacagacaggaaacaggcaattatcacctaacttagg

SEQ ID NO: 115883 - DNA, 120 bp, synthetic construct
  source 1..120: mol_type = other DNA
attcactcagcaacttatgaactcatttgcttagtctttattgcctcttgcattatgtagttttcactttgctggagtacttgtatagaagatcaccagtgaagaagccagagatggttt

SEQ ID NO: 115884 - DNA, 120 bp, synthetic construct
  source 1..120: mol_type = other DNA
aggtcagtgggtgcgcgcaccgtgcgcaagccaaagcagggggaggcattgcctcagtcgggaagtgcaaggggtcagggagttccccttccgagtcaaagaaaggggtgacggacagca

SEQ ID NO: 115885 - DNA, 120 bp, synthetic construct
  source 1..120: mol_type = other DNA
aatgaatgaaatgaagcgagaagggaagtttagagaaaaaagaataaaaagaagtgagcaaagcctccaagaaatatgggactatgtgaaaagaccaaatctacgtctgattggtgtacc

SEQ ID NO: 115886 - DNA, 120 bp, synthetic construct
  source 1..120: mol_type = other DNA
tagagtcaagacccatcagtgtgctgtattcaggaaacccatctcatatgcagagacacacataggctcaaaataaaaggatggaggaagatctaccaagcaaatggaaaacaaaaaaag

SEQ ID NO: 115887 - DNA, 120 bp, synthetic construct
  source 1..120: mol_type = other DNA
agagatacaaaaaacccttcaaaaaattaatgaatccaggagctggttttttgaaaggatcaacaaaattgatagaccactagcaagactaataaagaaaaaaagagagaagaatcaaat

SEQ ID NO: 115888 - DNA, 120 bp, synthetic construct
  source 1..120: mol_type = other DNA
atctagaaaaccccattgtctcagaccaaaatctccttaagctgataagcaacttcagcaaagtctcaggatacaaaatcaatgtacaaaaatcacaagcattcttatacaccaacaaca

SEQ ID NO: 115889 - DNA, 120 bp, synthetic construct
  source 1..120: mol_type = other DNA
aaattgacaaatgggatctaattaaactaaagagcttctgcacagcaaaagaaactaccatcagagtgaacaggcaactacaaaatgggagaaaattttcgcaacctactcatctgacaa

SEQ ID NO: 115890 - DNA, 120 bp, synthetic construct; identical to SEQ ID NO: 1476
  source 1..120: mol_type = other DNA

SEQ ID NO: 115891 - DNA, 120 bp, synthetic construct
  source 1..120: mol_type = other DNA
agtgggaaaaagtgaactaaagcttcaagatgaagaaagatagcttcattatttaaacagctctactaacatatagcacttgtaatatattctgaatatctataattccccacaagtgga

SEQ ID NO: 115892 - DNA, 120 bp, synthetic construct
  source 1..120: mol_type = other DNA
atgactttcaagaaaaaacacaaaactttaagtaaaacttcaagctaaaatctcacgcttaatttatatccctcggcatgcccttcacctctcacatgttaacatactgactcactaata

SEQ ID NO: 115893 - DNA, 120 bp, synthetic construct
  source 1..120: mol_type = other DNA
tgtggtttctatgccagattcctttcactcaccaaccaacaaaggcagctaaaagctatcagccaattatctgctttgtcaattatattgacaaggtttgggtgtgtatgtcatatttaa

SEQ ID NO: 115894 - DNA, 120 bp, synthetic construct
  source 1..120: mol_type = other DNA
ctgtgttcacaagaaattcaaagagacatgaaaagcgtaaagcagagctatacagccaattaaaaagaaatctggttttggagtttacctcagaaggagaaaaaagaacttgaggtttta

SEQ ID NO: 115895 - DNA, 120 bp, synthetic construct
  source 1..120: mol_type = other DNA
tagccaggatggtctcggtctcctgaccttgtgatccacccgccttgtcttcccaaggcgctgagattacaggcgtgagccactgcgcccggccagtattattaatttttaaaaactaca

SEQ ID NO: 115896 - DNA, 120 bp, synthetic construct
  source 1..120: mol_type = other DNA
ccgcttaagaaaaggggtaagaactatgcatttatggaaatggttagaaagagtcctattctctattttgtatccactaggccacacaaataaaccttagaacagcactggaagaatata

SEQ ID NO: 115897 - DNA, 120 bp, synthetic construct
  source 1..120: mol_type = other DNA
ttctacaccctgaacttaattcaacaaacatatcaggtttctggcaaggtatgaggcagtggagatttaaagacaaatatttattgaaggtatatataagcagcagaaaaagatgttcta

SEQ ID NO: 115898 - DNA, 120 bp, synthetic construct
  source 1..120: mol_type = other DNA
gcttatcgggtattttccctcaatttggagatctagaatatctcctctgtgtaaagatgccaatctatttttgcagtcttattcaataaattcattatactatagaagttgccgtttagc

SEQ ID NO: 115899 - DNA, 120 bp, synthetic construct
  source 1..120: mol_type = other DNA
cagccaaaggaggaaagaaagatatattgctccatttcaggttataaacaggtcaagttctagcagcttccttactgcattatatttttagtggatagtcatgcacatgtcactgttggt

SEQ ID NO: 115900 - DNA, 120 bp, synthetic construct
  source 1..120: mol_type = other DNA
atgctgagcctgggactgctgagcatgcagaagatatttaatatttatactctaacttattttactcactgtcctagtgaccccttcttcacctctgacctttctccaaaactccacact

SEQ ID NO: 115901 - DNA, 120 bp, synthetic construct
  source 1..120: mol_type = other DNA
attaggattatataagatttccatagcctggtggagagtaaatatttagcaactggtactcacagaaatcacttaacattttgtgattctgtgctttaatattatcaccttagccttgta

SEQ ID NO: 115902 - DNA, 120 bp, synthetic construct
  source 1..120: mol_type = other DNA
ctagaaagatgatgcaactgtaaaatatatcattattgccccatcatcactatgattgtttatagtgttgactgaagtattacatcatcattcaagaagatataaaagaagcctggagac

SEQ ID NO: 115903 - DNA, 120 bp, synthetic construct
  source 1..120: mol_type = other DNA
gtgaatttaaaaataattgaatgcattattgtaatctatgtttgtaaatacaaaaatgaaaacctgcccaggcacagtggctcacgcctgtaatcccagcactttgagaggccgaggtgg

SEQ ID NO: 115904 - DNA, 120 bp, synthetic construct
  source 1..120: mol_type = other DNA
gattggaattagagtgaatatgtttttatggaactatgcctaccttggagcaggatttttttcagaagtctaaagcaaagctaaatggtacctagtcttgtctaatacaagcagtgagct

SEQ ID NO: 115905 - DNA, 120 bp, synthetic construct
  source 1..120: mol_type = other DNA
tccccgactctcctctctctgtcttccctaaggcaggttatgagttattaaaacacatcctgtataacgctgaccatcggcacaaccaaagatctcaatatgaagatgttagttcattaa

SEQ ID NO: 115906 - DNA, 120 bp, synthetic construct
  source 1..120: mol_type = other DNA
caggcatattacataggctttccttctctcccttcttccttttcaactcctggacaagaaatactcgcttttcaagtatttctttcatttcttaaaccttcaaaataatgaatgtaggta

SEQ ID NO: 115907 - DNA, 120 bp, synthetic construct
  source 1..120: mol_type = other DNA
cctcccaaaatgcttgcattataggcatgacccacctggcccggccagattgaacttttaaattatttatttattttgagacagggtctcaccctgtagcccagaatggaatgtgatagt

SEQ ID NO: 115908 - DNA, 120 bp, synthetic construct
  source 1..120: mol_type = other DNA
ggtagagttcaattatttgctcaagacctaatactagaaaaggatggagttaagaattatcactgtatttctgtccaaagccttgtctttccaccatatcacactaccttcctgaaggtt

SEQ ID NO: 115909 - DNA, 120 bp, synthetic construct
  source 1..120: mol_type = other DNA
tcaactgacttcatttgcaataggccatgcagtgactgaaagtaaaattaagaccttaatgccagttattaccgctttttattggttttattctagatctacacatgcattatgcaattt

SEQ ID NO: 115910 - DNA, 120 bp, synthetic construct
  source 1..120: mol_type = other DNA
gcagacctggtcttcaggagttggttttttttctattccctctagattaaagacattgcacttaactttaaatcctcacagaactttagattctcctgaggtcaatccaactcaaagctc

SEQ ID NO: 115911 - DNA, 120 bp, synthetic construct; identical to SEQ ID NO: 28269
  source 1..120: mol_type = other DNA

SEQ ID NO: 115912 - DNA, 120 bp, synthetic construct; identical to SEQ ID NO: 28270
  source 1..120: mol_type = other DNA

SEQ ID NO: 115913 - DNA, 120 bp, synthetic construct
  source 1..120: mol_type = other DNA
tatcaaatagttgttttaaaagaaagaatgagtgaaggagcaaagtgtgtggcagctggaaaattcgtttctccttccccacagacctcctagaggtcatcagaaaactagggagcaatg

SEQ ID NO: 115914 - DNA, 120 bp, synthetic construct
  source 1..120: mol_type = other DNA
ctgattactgatagaaatgaaatacaatatttgtggcctggaaaataaacattattttaaagtgttccggtgatgagtttttatcaataaaatgtggctcccaaatccccaaagatatga

SEQ ID NO: 115915 - DNA, 120 bp, synthetic construct
  source 1..120: mol_type = other DNA
ccaacatgtaccccttcacaaactccttaggaattgctgtcattttgggggaccactttcctccaaagagtatgacacatacaatctttattccacctcttaatagacattccatatctc

SEQ ID NO: 115916 - DNA, 120 bp, synthetic construct
  source 1..120: mol_type = other DNA
gcaatagtaacttagcatgtcaacaaggaggcatttgtagcatgcaggggatggatgtacaggaatttctgtgaaagacaatttccataccaaacagcccagtgaagtagtctcctttta

SEQ ID NO: 115917 - DNA, 120 bp, synthetic construct
  source 1..120: mol_type = other DNA
ccaagataatatcagaaggtcccattgagagaatgaaaatgataatgccagatgctggttagcttgcaaaccaaaaatcatctgtggtatcgcacttaattgactacgccagcacttccc

SEQ ID NO: 115918 - DNA, 120 bp, synthetic construct
  source 1..120: mol_type = other DNA
acctgaataaattttagcacagcaaaattaaaaccgtgcaatatctggcttcctcctatctcccatgttacagcacttttccaaaaatttattcctctactggactgctttctttctttt

SEQ ID NO: 115919 - DNA, 120 bp, synthetic construct
  source 1..120: mol_type = other DNA
ggaactatagatgtgtgaaattcagatttctttttaatgccattataatttataagtgggcaatgattattttctaagaggtagaaccacatatatagccaactcattataatcattgac

SEQ ID NO: 115920 - DNA, 120 bp, synthetic construct
  source 1..120: mol_type = other DNA
catataagggcagatataaatatacatgaaccatgtgaaagcgataaaatgtcttcctgaaagtgaccaaggcagcaataacctctgccacatcatcaaacacacagacatctgaaggtc

SEQ ID NO: 115921 - DNA, 120 bp, synthetic construct
  source 1..120: mol_type = other DNA
acgtaaatatttaaatggaaagtatttatggcaagcagactcaagatggctcccagtgactcccaacttgtggcattcatatccttgtgcaatcatcttcccttcaatatgggttgccct

SEQ ID NO: 115922 - DNA, 120 bp, synthetic construct
  source 1..120: mol_type = other DNA
ttgatcaagatttatgcatgaccacttttttttttttttttttatttagacagtctcactctgttgcccaggccggagtgcagtggcgcaatctcagctcactgcaacctctgcgtccag

SEQ ID NO: 115923 - DNA, 120 bp, synthetic construct
  source 1..120: mol_type = other DNA
aaattaaaacaaacttagccacttaaaataacacccatttattatcttccagtttttatgattccaaagtgttggctcagcatggctctactgaattctctgcttagggcccacgaggct

SEQ ID NO: 115924 - DNA, 120 bp, synthetic construct
  source 1..120: mol_type = other DNA
attcaatgttaaagtctaggcattaagacttagcaagcttgttgaaaatcagatctactctttctcaagtcattatttcaaacaggtaaagctttcagggaagacaaactgaaagggaaa

SEQ ID NO: 115925 - DNA, 120 bp, synthetic construct
  source 1..120: mol_type = other DNA
tttcattgagtcagaatacacagagcctagtgctaataattctgcttaacccaatatcagacaagaaatggttacctatttctagaacagagaaaggagatggctatattgaagttcatg

SEQ ID NO: 115926 - DNA, 120 bp, synthetic construct
  source 1..120: mol_type = other DNA
ttgcaccactgcacttcagtctgggtggcagagtgagactctgtctcaaaacaaaaaaacaatcttttttaaacttgaggaaaatattggtggctattgaattaattcttgaatgaagat

SEQ ID NO: 115927 - DNA, 120 bp, synthetic construct
  source 1..120: mol_type = other DNA
gagaacacaaataaaaaatacaaaggaaggagaaaaataattcatgatctgaatgtgaaattcagtaaagagatagatatcataagaaagacccaaacagaaatcctagaaatgaagaac

SEQ ID NO: 115928 - DNA, 120 bp, synthetic construct
  source 1..120: mol_type = other DNA
aactgcgtggtcatctaaaatctgaatgtaaagagtaggaagtcaatgggaaaggactcagtgtgttaaacagtaataaaagtaacttcatacctttcttttcaggtttttctttttctc

SEQ ID NO: 115929 - DNA, 120 bp, synthetic construct
  source 1..120: mol_type = other DNA
aaagactctcctcaacaagatagagttcattcctgtcgccatgatgtcaataagctaatgactagtggatgctaagcaaataattacaaaggtgggtaactgcagggagtcgaactgcta

SEQ ID NO: 115930 - DNA, 120 bp, synthetic construct
  source 1..120: mol_type = other DNA
cacaaggtctcagtcacatagtggactctgtaatatttttgaataagtgaaattctaaaatatgttaagagctagttttatcgtctagttaaattctatttatggatgatgatgtggtag

SEQ ID NO: 115931 - DNA, 120 bp, synthetic construct
  source 1..120: mol_type = other DNA
tgaaatgactttcaacacagcaatgcaacaatcagcaactgccttggtaatcactctaaaataaaaatcacctatagagcagctgcattcgcttgagcgtctctgcttagagcccacaac

SEQ ID NO: 115932 - DNA, 120 bp, synthetic construct
  source 1..120: mol_type = other DNA
aatttgtaatgttttatgaaagagcatgatacacattcattttaaacccttaaaaaaattctgtttcagccaccattaaacaataaggccagatctcttggttagtgtgtatgtctttgt

SEQ ID NO: 115933 - DNA, 120 bp, synthetic construct
  source 1..120: mol_type = other DNA
ctgtaatcgctttctcataagtgaacattcactatggacactgtgatgcatagctttgtgcacactcttctggtttccttgtccaggtttatttttcatgattgccagagagggaaagaa

SEQ ID NO: 115934 - DNA, 120 bp, synthetic construct
  source 1..120: mol_type = other DNA
gaaaactgcagacagacttactcaacaactgaggttgccaaaccccaaactacatctctcctcgaggacatctctgtgaagtacttactacacgtggtataattgtgtatttactttttc

SEQ ID NO: 115935 - DNA, 120 bp, synthetic construct
  source 1..120: mol_type = other DNA
tgtttgttgccactaaccacagacatttgacttaaattacagtggcttaattaaagctaaatggaaagttgtctgtaggaatgtcaaatgcaaagttgtctgtaggaatccagtagagat

SEQ ID NO: 115936 - DNA, 120 bp, synthetic construct
  source 1..120: mol_type = other DNA
gctaagtagggttgagctctactgctgaaagagacaaaaaggtctatggcagggacaagctttggtgttgaaagagaacaagaagtctatggcaggaactaaaattcaaatgccttcata

SEQ ID NO: 115937 - DNA, 120 bp, synthetic construct
  source 1..120: mol_type = other DNA
taagatatgtgcacattaaagatgcatttttaatgaggaatttatatcttaagggaatgatggcactacattggccatacacaaactgtgtcctattgtcaaggtgactaagctcttcac

SEQ ID NO: 115938 - DNA, 120 bp, synthetic construct
  source 1..120: mol_type = other DNA
acagacactagggatctcaaaaaatggggagattggaatgggaactgaggcttgaaaaattacctattgagtattatgttgaatatttgggtgatggacacactagaagagctcaatccc

SEQ ID NO: 115939 - DNA, 120 bp, synthetic construct
  source 1..120: mol_type = other DNA
tggtgctacagactcagcaggcaccaaagaacaaaaagaagaaagaaaattggatataggatatactggaaaagccacatgttcttacgttagagataacaggcaaaaatgtggctctac

SEQ ID NO: 115940 - DNA, 120 bp, synthetic construct
  source 1..120: mol_type = other DNA
ctgtgggcagagttatttatgattacaaaggaaactcagactgttgactgctagagaagactggttaacatttcttatcattcaacatgtggaccatgggtatccattgttggatatagt

SEQ ID NO: 115941 - DNA, 120 bp, synthetic construct
  source 1..120: mol_type = other DNA
ctcccaaggctctcccgatgagttccatgcttctaaaacctttcagaatatcatattgtcccttgaaggggaaaaaaactatagagaaatagaatgtgatctagcttccaccataacgaa

SEQ ID NO: 115942 - DNA, 120 bp, synthetic construct
  source 1..120: mol_type = other DNA
tgtttaaccttcagcagatagaaacacagagccagttcagtcatggttcgcttagtcaatccgtactcaagagctgtgtccaacttctgtgatcaaaggaattaagaaccgaaaaaagga

SEQ ID NO: 115943 - DNA, 120 bp, synthetic construct
  source 1..120: mol_type = other DNA
aataagggaaaaattggagttatctcaaaattagagttatttggaaaagcttaaacatttaatagacagagctatgttgtcaccattttcagtgctaaaattggtcacaaactataatta

SEQ ID NO: 115944 - DNA, 120 bp, synthetic construct
  source 1..120: mol_type = other DNA
gtgatgaagatatgaacaggtaaggcactcattcttgtccctgaaaacaattctccaaaatgtaaggaaatatctccaaatgacataggaaatgcccatcttcctgtctctctcaccatt

SEQ ID NO: 115945 - DNA, 120 bp, synthetic construct
  source 1..120: mol_type = other DNA
gcttctaggctcaacttgcctgtgatcctcccttcctgacttcctgtcatatgggttcaaaaatgcctggccagttcccacaatcgcataatccaattccttgtaataattttttaaaag

SEQ ID NO: 115946 - DNA, 120 bp, synthetic construct
  source 1..120: mol_type = other DNA
tatacatgtatgtcttccacagataccagctgaccattcaaaagaataaagaagggattctggagctcacacgggagaataagacgtgggttagactcttccatagaatccagtgctgaa

SEQ ID NO: 115947 - DNA, 120 bp, synthetic construct
  source 1..120: mol_type = other DNA
caggaagacaaaaaattatttctgatgattcagacttaaggagaaattaaatgtttctttgcatgttttattgcaactttgcgttctctttggggactggattccatcactggtgtcact

SEQ ID NO: 115948 - DNA, 120 bp, synthetic construct
  source 1..120: mol_type = other DNA
taggaagtgtatttctacttcttttactactcctgactttcccctaacacttttctggtggctggtagggaggtatgagtgaagataagggaggaaaaagtagtatctcctcttagatcc

SEQ ID NO: 115949 - DNA, 120 bp, synthetic construct
  source 1..120: mol_type = other DNA
gaaataagatatgccaaaggtacttataaactgcaacgattggccaggtgcagtatctcacacctgtaattccagcaatttggaaagctgagttgggcagattgcttgaatccaggaatt

SEQ ID NO: 115950 - DNA, 120 bp, synthetic construct
  source 1..120: mol_type = other DNA
ttttccccagactctctgagctcaacttccatatgtaactgggaagaaaggccacaggcattcaaaatgagaaggctggtagtagcagcaaccaatggaacaaaaatcagtgaaaataga

SEQ ID NO: 115951 - DNA, 120 bp, synthetic construct
  source 1..120: mol_type = other DNA
tggggaaagcgtactactcaccattaatgaagactataaaaaggaatactctctcccccttgaagcacctagtatgtgtatgacttaatgggcaaccactccagatacagtgataagaag

SEQ ID NO: 115952 - DNA, 120 bp, synthetic construct
  source 1..120: mol_type = other DNA
aaatctggcagttttgttttacaggtgtgagaactgagagccactgaagtgacttgaccatagctggttaacagcagaaagggaaacaataccaatacctccttgttgcattcattcaag

SEQ ID NO: 115953 - DNA, 120 bp, synthetic construct
  source 1..120: mol_type = other DNA
cagaagccaactctatttatgccttttaatcacttgaacagaaaaagtgtttttttgtttgcttgtttgtttgtttgagtctcgctctgtcacccagactggagtgcagtggcgccacct

SEQ ID NO: 115954 - DNA, 120 bp, synthetic construct
  source 1..120: mol_type = other DNA
gacaggtagaagataaagctctaagctcctcatgcagcctgagagcgatatgcgatggtgcagttatggagatgagctttgatctagatttatttagaggagacatccaaagataaatgt

SEQ ID NO: 115955 - DNA, 120 bp, synthetic construct
  source 1..120: mol_type = other DNA
ggaggtttaagtgagaataaactgtaaaaaggagatagagataggtgtatctgttaagttgcacttaaaagtgttaataccagtattttattagtaaaataaaccagtcataaaccagta

SEQ ID NO: 115956 - DNA, 120 bp, synthetic construct
  source 1..120: mol_type = other DNA
aaactctgcatcccttcctacaagttctaaaatttttcatcataagttgaaggattacaagtgatataatttatagattattgtaaatgttgacatttaaaaataaagttgccatatccc

SEQ ID NO: 115957 - DNA, 120 bp, synthetic construct
  source 1..120: mol_type = other DNA
tcagtgccttggggtctcatcatgaagtgtttagtaatagaacttagtattttaaaattttgacaagttgaaaaatatgcatgaagaatataaagacactaggtactacatgtaataccc

SEQ ID NO: 115958 - DNA, 120 bp, synthetic construct
  source 1..120: mol_type = other DNA
tattcaggtgatttaaagtcaattctcctaattctgagtatgtaatctttaaggacattagtgcacatgtgttgaaggacatatatcccttagactatttttgactaataaacatttcta

SEQ ID NO: 115959 - DNA, 120 bp, synthetic construct
  source 1..120: mol_type = other DNA
aaatctctgtcttctgaaattcctgccccattgctgtcctcctttgtcctaggtttatcgttcttatcattcaggttgtgaccacttcactcagtcaccttatctattcctgcaagtaat

SEQ ID NO: 115960 - DNA, 120 bp, synthetic construct
  source 1..120: mol_type = other DNA
gttgaactcttactggggccaaaacaaatataatttcaggaaaagttataaaaatactctaataataaaagctttcctggtagtcaaggctgaatacatgatttctgatgactaagactg

SEQ ID NO: 115961 - DNA, 120 bp, synthetic construct
  source 1..120: mol_type = other DNA
atctcctggctacaattttttgcgcagaaatagaaacttcatcttgctataatatgcatgcatgccaagaaagaaaatgcccttgggaagtttataatccaaataagagttagcactgga

SEQ ID NO: 115962 - DNA, 120 bp, synthetic construct
  source 1..120: mol_type = other DNA
aagtgatttgacttcctttactgtgttgaagtttgaaagggtgccaggctgggaacagggagatgagtatgaagccaactgaaatcatccaagagaaagatgatcatgatttctatcagg

SEQ ID NO: 115963 - DNA, 120 bp, synthetic construct
  source 1..120: mol_type = other DNA
gatttctggggaaatttttaattttatattccattctgagggattcgtggagcacacagaccattcagtgaccccaggaataaaatgctgctttctgggaagcctgtctccatgattcat

SEQ ID NO: 115964 - DNA, 120 bp, synthetic construct
  source 1..120: mol_type = other DNA
ggagattttagaaggggttttcttgctcttaaaaggaagaacaaagactttactgcatgggaataaaaaagcttgcagctgcttcagtcatcttgtaaccatgagaacagtagctggctc

SEQ ID NO: 115965 - DNA, 120 bp, synthetic construct
  source 1..120: mol_type = other DNA
atgccttgctttcccaaagtcactattccaaatcaagacctcaactttccagtgcctgttattcctctattcaaactctctgtactccaatttagaacatattcagttagtgggaaaaag

SEQ ID NO: 115966 - DNA, 120 bp, synthetic construct
  source 1..120: mol_type = other DNA
ggggccctcccacaacatgtgggaatcatgggagctctaattcaagatgatatttgggtggggacactatcaaaccatatcagcatagagggcagataatatggtttaataaatgttaga

SEQ ID NO: 115967 - DNA, 120 bp, synthetic construct
  source 1..120: mol_type = other DNA
gggtcagtatatgcataaaacaatgctctttccactaagtcaataggtttcttagactcagaaatgtagctgagagaatacaaagacttatgaaacagtttgggctcaaggtctggcatt

SEQ ID NO: 115968 - DNA, 120 bp, synthetic construct
  source 1..120: mol_type = other DNA
aaataataattggggaagaactgactaactgatagcaatttgagaggaacaaaggtaaaaataataatgaaatgcagaggtggaggccaatgaaaattgaatccagctactgtgctataa

SEQ ID NO: 115969 - DNA, 120 bp, synthetic construct
  source 1..120: mol_type = other DNA
tcttcttcctcttcctcctattcctcttcctcttcttcttcttcctcttcctcttcttcttcttttctctctcactgtctctaaatctcactcactctctctccttatgacttctggata

SEQ ID NO: 115970 - DNA, 120 bp, synthetic construct
  source 1..120: mol_type = other DNA
tttatccatgaacccaaaactccggagccggtcacggactcgggaaaacagtcttcccttggtgtttaatcacgcggggacaactgcctgattattcacccacgtttcagaggtgtgtga

SEQ ID NO: 115971 - DNA, 120 bp, synthetic construct
  source 1..120: mol_type = other DNA
catggcttgtttggcagcaaccttgagatgctttacagccctataccctaaaatgtcaaaaggccatcttattctcaatatacattttattacccaatctgctcccgacattaaataaga

SEQ ID NO: 115972 - DNA, 120 bp, synthetic construct
  source 1..120: mol_type = other DNA
tgctacagcatggcttttaaagcctataaactctccttacaattcccccgttttacctgtcctaaaaccagacaagccttacaagttagttcaggatctgcgccttatcaaccaaattgt

SEQ ID NO: 115973 - DNA, 120 bp, synthetic construct
  source 1..120: mol_type = other DNA
cttatgctgataaggtaattaaaaaagcagctagcattccaacttctatccctcgtgcagattttctccttctcatctggccactctcacccactccctcactgaaacttccatctatca

SEQ ID NO: 115974 - DNA, 120 bp, synthetic construct
  source 1..120: mol_type = other DNA
catttagtttttcaattcatacaaaaccgtatccaggccatcaccaataattctatatgacaaatgtttcttctaacaaccccacaatatcaccccttaccacaggatcttccttcagct

SEQ ID NO: 115975 - DNA, 120 bp, synthetic construct
  source 1..120: mol_type = other DNA
agaagcctatgagctacagagtaggttctcacagataccaaaactgctggcaacttgatctggaatttcccagcctccagaattgtgagaaataatgtctgtttataagctatccagttt

SEQ ID NO: 115976 - DNA, 120 bp, synthetic construct
  source 1..120: mol_type = other DNA
gggaacacatggttttttgtaggtttatagatttccataaatttgtttccaagctacgattcaacagaaataattttctggtggcataaaagtcaaaatattatactactccagttggat

SEQ ID NO: 115977 - DNA, 120 bp, synthetic construct
  source 1..120: mol_type = other DNA
aatttgtactttctgactgactttgggccttccctaaatgattttactctgctaaattcatagcctgacaaaccgtgcacctgcttaactgggctaagcgccaagaaaagaaaaaaagtc

SEQ ID NO: 115978 - DNA, 120 bp, synthetic construct
  source 1..120: mol_type = other DNA
gagaactaaagtcaatgtggataacagagcgatcatacaccttggtttgtgtctgatgtcctgaggtaaatcttaattgctccccatttcactctcacaagtatcctgtttcagctgtta

SEQ ID NO: 115979 - DNA, 120 bp, synthetic construct
  source 1..120: mol_type = other DNA
cacagacaagaaaagataagttcctagtcatgttagcttgtaggttcatagagctgaataacgaacccaaatcatctaaatgaaccacaaataaaagccaattctgcatgtccccaacta

SEQ ID NO: 115980 - DNA, 120 bp, synthetic construct
  source 1..120: mol_type = other DNA
ttctttgatatcacgggacttttctctacttgttagatgagaatctaactcattggtagtccagctaccaatggtatgctggcagagtcaactcaatcacaccttgtattaggttgttcc

SEQ ID NO: 115981 - DNA, 120 bp, synthetic construct
  source 1..120: mol_type = other DNA
ctaatagaggttctctgtttgggctctgccactgcaacaagcttctgcctgggcacccagaatttcccatacattctctgaaatctaggtggaggctgccaagcctctttaactcttgca

SEQ ID NO: 115982 - DNA, 120 bp, synthetic construct
  source 1..120: mol_type = other DNA
atcttcttctgagcaatccaaactctttgaacttctgcccattacccagttcccaagttgcttccacattttctggtatccttatagcaataccccactactggtgccaattttctgtat

SEQ ID NO: 115983 - DNA, 120 bp, synthetic construct
  source 1..120: mol_type = other DNA
acaattatatgtaattttgtgaaaaactctctttattttcaggaactcaaaataggatggccggtggcagaagcaaagagtttgtctggcaaggacacttaggaccagatgacagcaggg

SEQ ID NO: 115984 - DNA, 120 bp, synthetic construct
  source 1..120: mol_type = other DNA
tttcctcagcatttactattctccctaaaactcgtgcgctcatataatcagtgtttctcatctcctaagtcctctgagggagaatcaacacaagtgataaaatggttcaaatggataaaa

SEQ ID NO: 115985 - DNA, 120 bp, synthetic construct
  source 1..120: mol_type = other DNA
cagaacgtacatctaacaatggtgtaactcattcttcttctataaaattgatactactgtatggctagaaagcctcctggatggagagaaaacatgtctcattatctgggctacacttga

SEQ ID NO: 115986 - DNA, 120 bp, synthetic construct
  source 1..120: mol_type = other DNA
atcaccttcattgctaccagcacaactatgactctcactacaactacaaatatcactctaagaaaaggctagaaaggcaggattaacctcggaaacaaaggtggaagcaccaactcttca

SEQ ID NO: 115987 - DNA, 120 bp, synthetic construct
  source 1..120: mol_type = other DNA
cattgattattgtgccaaattcacatcactcctaatggtagttctgaaaatggatgaatgataggagtgctttgaaatgcaatttaagacccaagtggggctacaagtgaatcaaacctt

SEQ ID NO: 115988 - DNA, 120 bp, synthetic construct
  source 1..120: mol_type = other DNA
ggtaaatattaccgagcaatttgacatgggctatgcctcttgaaagttggtatctcagaattggagcagagcagctaggatatgtaaagcactttccaggcctgctttttaattctattc

SEQ ID NO: 115989 - DNA, 120 bp, synthetic construct
  source 1..120: mol_type = other DNA
atttatctatttattttaacattatctggcactccttcctacctacccactccattcactcttccattgagtggaacggatgaggagtctctcccaggccgcttttataaggtcactaat

SEQ ID NO: 115990 - DNA, 120 bp, synthetic construct
  source 1..120: mol_type = other DNA
ttcatgtctttgctatttgataatgctgcaaaacatttgcatgcatgtgtctttaaggtagaataatttctatttctctaagcatagacccagtatgggattgctgggttgaatgagttc

SEQ ID NO: 115991 - DNA, 120 bp, synthetic construct
  source 1..120: mol_type = other DNA
tccccattgcttgtttttgtcagctttgtcgaagatcagagggtcgtaggtatggggccttatttttgtgccctatattctgttccattggtctatgtgactgtttttgtatgagtacca

SEQ ID NO: 115992 - DNA, 120 bp, synthetic construct
  source 1..120: mol_type = other DNA
gttccatttatttgatgaatcaaatttattgatttgcatatgttgaaccaacctggcatcacagggatgaagactacttgatagtgatcgattagctttttgatgtgctgacggatttgg

SEQ ID NO: 115993 - DNA, 120 bp, synthetic construct
  source 1..120: mol_type = other DNA
ggactgtgatctgagttacctagagttacaacttctcagattatagattaactcacctgcatatttttcttgttctctgcaatggctagacagaattaaatgacatcagggaaaacctct

SEQ ID NO: 115994 - DNA, 120 bp, synthetic construct
  source 1..120: mol_type = other DNA
aacaaggccctaggtagggatcaagtcatctatcctttcatagcacttagcatagcacattttgcacagttaaggccccaatagttattaaatatgagaaatattagaagtgttgctaca

SEQ ID NO: 115995 - DNA, 120 bp, synthetic construct
  source 1..120: mol_type = other DNA
ggtaggtaaaggaaaaaggggggttgttctctggcaggcaggagtggggggcacaggtactcagtgggggcgcttttgagccaggatgagccaggagaaggaatttcacaaaacaatgtc

SEQ ID NO: 115996 - DNA, 120 bp, synthetic construct
  source 1..120: mol_type = other DNA
tgaggacaggtctgacttctgagaagggaaagtcataaaagtattatccagtcctttttaagttggtggctgagcttggtgaggtgtgtttttaaaagacctttagtctgttctactttt

SEQ ID NO: 115997 - DNA, 120 bp, synthetic construct
  source 1..120: mol_type = other DNA
tattagggtggcagcagccgctgcacggagacatgatgcctaggctaaaacagtaaggtcaagttgtttggacagaaaggctacagggtgcggtcctggctcttgtgtaagaattctgac

SEQ ID NO: 115998 - DNA, 120 bp, synthetic construct
  source 1..120: mol_type = other DNA
caagggaaacaggcccttgaaaagaaggtaatgtggagtgagtagccttggtattgattaagatggggacagacttatccttcactgttagagttacccgaagctcggcatccatgatgg

SEQ ID NO: 115999 - DNA, 120 bp, synthetic construct
  source 1..120: mol_type = other DNA
gatgtgtctgtagaaaaggaagagtagaaagactcagtgatgcttggggttgggactgaggggacaggtgggagggaaaggaggaagatttgggatgagttgcattgggaacagagacta

SEQ ID NO: 116000 - DNA, 120 bp, synthetic construct
  source 1..120: mol_type = other DNA
cccgatttaaaattggtgagatgttccttgggctggtcggtctgaggacctgaggtcgtaagtggatctttctcacggagcaaagaacaggaggacaggggattgatctcccaagggagg

SEQ ID NO: 116001 - DNA, 120 bp, synthetic construct
  source 1..120: mol_type = other DNA
tttaatgttaatgctggcaagttgcacctgaattccaaagggaaggagatataaggagacatgtctgacacctccttcccatcatggcctgaactagtttttcaggtttactttggagtt

SEQ ID NO: 116002 - DNA, 120 bp, synthetic construct
  source 1..120: mol_type = other DNA
gctgacacattttcttcctgggccaaatttgcacaaataaaactttacctagccccagcattcctcctactaaattgtcccattgtcattgaattgcaaacccactgaaacagaaaagcc

SEQ ID NO: 116003 - DNA, 120 bp, synthetic construct
  source 1..120: mol_type = other DNA
atctaatgcctgatgatctgtcactgtctccaatcgcccccaggtgggactgtccagttacagggaacacacttcagagtttctaccaattctacattatggtgagttgtataattattt

SEQ ID NO: 116004 - DNA, 120 bp, synthetic construct
  source 1..120: mol_type = other DNA
atcattatatttgttttacctgaacccaaatatttttttttctttgagatggaatttcactcttgttgcccaggctggggtgcagtggcacgatcttggctcactgcaacctccacctcc

SEQ ID NO: 116005 - DNA, 120 bp, synthetic construct
  source 1..120: mol_type = other DNA
aattacatcctcagcatctaaaggaggttaaaaaataaatgaaaaatgagacccttgtcctctaagaaccaatttgatatttactgtcgggggactcaaccttgtattactgctagagac

SEQ ID NO: 116006 - DNA, 120 bp, synthetic construct
  source 1..120: mol_type = other DNA
acatctctgcaccagtgaaactgaaaatcatcacacaagccagatttctggaggtatatatgactttctgagaaatattccatcatttcagaagccacaatggctcaaagagcacttcgg

SEQ ID NO: 116007 - DNA, 120 bp, synthetic construct
  source 1..120: mol_type = other DNA
ttaaaagatgtatgcatgtgtgcacatacatgcaaacaccataggtcagtgaggcatatgccatcaacatattttaatgaaatgataatgtcagaattcagagtaactacaatttgacca

SEQ ID NO: 116008 - DNA, 120 bp, synthetic construct
  source 1..120: mol_type = other DNA
tgtgccatcttgagactcacagttccttatacagaaaataatgaacatttttgagtctttggaattcataataatgttaaaatgtgtgttatagcaaaatagcaacatttcctggtgtcc

SEQ ID NO: 116009 - DNA, 120 bp, synthetic construct
  source 1..120: mol_type = other DNA
gcttagtgaggaagccatgttcaaagctgagctaggccaaaagctaggccttttgcaccaaacagctaagttgtgagtgcaaaggaaaagttattgaaagaaattaaaaagtgctaccct

SEQ ID NO: 116010 - DNA, 120 bp, synthetic construct
  source 1..120: mol_type = other DNA
gggattcaaagtaggaggtcaaaatatcaacattatcaggatttccttaacagttgattccaaccctcatgatcactttaaggggttcaagacttccgtggaggaaacaactgcagatgt

SEQ ID NO: 116011 - DNA, 120 bp, synthetic construct
  source 1..120: mol_type = other DNA
gaagaagagtttgctggggaccctagaggtatcacttcatttgtctaaaaactagtcattttctgcaaatgtaaatcagggactgaccctcccttctacagtgaccaagatcaatggaaa

SEQ ID NO: 116012 - DNA, 120 bp, synthetic construct
  source 1..120: mol_type = other DNA
tgctttttcgtggatatgatcattggggttatataactgagaatataagccctggaggcttagagtttcatttatttgaagagcctttacattgcaaagtacacaactgatgctaaactc

SEQ ID NO: 116013 - DNA, 120 bp, synthetic construct
  source 1..120: mol_type = other DNA
ttttgtgttaccgttcccaggcatttattccaggagcatgttttgtatctgaacctgtatcaccagatcctcacggtatctgaagacttattaatgtgaataagcagagtgctctccctt

SEQ ID NO: 116014 - DNA, 120 bp, synthetic construct
  source 1..120: mol_type = other DNA
tacttggaaaaacatacatgttgtatctacctaattccttattttttccccactctctcaccagaaaaagtagacaatttatctgtgttattataaaaggctggccaagaaaggctattt

SEQ ID NO: 116015 - DNA, 120 bp, synthetic construct
  source 1..120: mol_type = other DNA
ggttggttggcagctagtctcattctcactttagaaagaggaaactgaggctcagaaacattatgtgataagtactggaaaatggtggtatcaagactagaactcagagagctagacttt

SEQ ID NO: 116016 - DNA, 120 bp, synthetic construct
  source 1..120: mol_type = other DNA
tgcacttatggtggaaagagcaccttttaaaaggaagctcttgttatttccatatgtcagtggactagcactcacagcccaggacaaaatctcaaaccagcaacaaagtaaaaacaactt

SEQ ID NO: 116017 - DNA, 120 bp, synthetic construct
  source 1..120: mol_type = other DNA
ctttgcttactgccattgtccatgttccatagattctgaaccctttgctgataatgacaactggaaattcccttggatatctactttgcaatcacttcgtaaaagttagatctttccaga

SEQ ID NO: 116018 - DNA, 120 bp, synthetic construct
  source 1..120: mol_type = other DNA
caggaaacagtgtctgcaggacttaaattgtttgatgattagagagtgtttgtgttgggaggggtaatgatatgataaatcgagggtggggaaggtcaatgatttgattattagtgttct

SEQ ID NO: 116019 - DNA, 120 bp, synthetic construct
  source 1..120: mol_type = other DNA
gcattttgggaggcctagtgttcgagaccagcctgggcaatatggcgaaaccctctctacaaaaaaaaaaaaaaaatattagccaagtgtggttgtatagacttataacccagctactca

SEQ ID NO: 116020 - DNA, 120 bp, synthetic construct
  source 1..120: mol_type = other DNA
gacttctattgaacaagcatggtttttttccctttgtttcctatttgctttttttatgccataatttgttgtaccatagattttgtgtgtgtatgtgtgtgatggacatatgaatatgtc

SEQ ID NO: 116021 - DNA, 120 bp, synthetic construct
  source 1..120: mol_type = other DNA
ttaatttagaagattactgggccttaacatgtggagattgtattttcagcacatggccctctgctgtatcaaacaagcgtttggataaaggttgtagtctctccgcacatggcttgtgtt

SEQ ID NO: 116022 - DNA, 120 bp, synthetic construct
  source 1..120: mol_type = other DNA
atcttctagggcagctatgataatttaatttaaaaaatacttgtcagtcacttgcaattctatcctgatcccagcacggtcttcaaaagtgttatcttcttgccaatttcactttagcct

SEQ ID NO: 116023 - DNA, 120 bp, synthetic construct
  source 1..120: mol_type = other DNA
acaatatatccatgcatatatatgtggagtaaaacttatatttactgataggaaaaaattcaagaaatttttattagagaactcatcataaaacattagtcagcataaccccatttttgt

SEQ ID NO: 116024 - DNA, 120 bp, synthetic construct
  source 1..120: mol_type = other DNA
agaacaacatggctcagccatagtaatgcaccattctcactgtgaatttctttcttcccttaaaacaggtcccagcttcaaatcaatgcagcctctattgcttcctgatgcttgataaca

SEQ ID NO: 116025 - DNA, 120 bp, synthetic construct
  source 1..120: mol_type = other DNA
aacacaagggcccaataagctgaatcaactctgagaagactatttaccttagtcatttgtgagcattcttagagctgaaagaagtaatttacttaggaacttcataattcctgtaaaata

SEQ ID NO: 116026 - DNA, 120 bp, synthetic construct
  source 1..120: mol_type = other DNA
aaaagctaagaacgatgttcaagattagtgttctacaaaacaaagagtctctataaagacagtggtgatctgccattttcaagttcgaaaatagaagagggggccgggcgcaatggctca

SEQ ID NO: 116027 - DNA, 120 bp, synthetic construct
  source 1..120: mol_type = other DNA
cgactgcatcatccttcacttaccaaagcattgggaaattttatgcattgaacaaatctgaggctcatattgtgtgccaacagtatcctagaaaacagactcatgatttgggaatggtca

SEQ ID NO: 116028 - DNA, 120 bp, synthetic construct
  source 1..120: mol_type = other DNA
ggaatgcaggttctcaggctccatcccagaactactaaatcagaacctgccttttgacaagatcctcaagtgattcatatacatgttaaggtttgggaggcatggctgtaggtatgtata

SEQ ID NO: 116029 - DNA, 120 bp, synthetic construct
  source 1..120: mol_type = other DNA
acacacacacacacacacacacaatggaatattatttgtccctaaaaaagaatgaaatcctgtcattcacagcaacgtggatgagctatgtcaagtgagataggctagacacaaaaagac

SEQ ID NO: 116030 - DNA, 120 bp, synthetic construct
  source 1..120: mol_type = other DNA
gttgttttccttcctgaatattttcttttaatactcctcatcaaaggtatgtctacattctgccctttaaataacatccagtatttccaggtcaaactgatacaacttgctttcctgcaa

SEQ ID NO: 116031 - DNA, 120 bp, synthetic construct
  source 1..120: mol_type = other DNA
gctagataacttcatttcttggcttgaaagtcattgctacagaaagaataatcttgttcgtcaatgtatcattagttgtcacaatcatgagctctgtgaccttgataaaggaactccttt

SEQ ID NO: 116032 - DNA, 120 bp, synthetic construct
  source 1..120: mol_type = other DNA
tcagggtcctctctcccgctcgaggttcttaataaaaccacatctgcaaattctcttttccaggtaaggtaacatatttacagattctggggattaggacatgaatattttgggggacaa

SEQ ID NO: 116033 - DNA, 120 bp, synthetic construct
  source 1..120: mol_type = other DNA
gtctctttcattatgggcctgcctccaggctgctttaattttttcacagcatagtttcaaaagcaggtatcccaaaccagcaacctggatatgtctggtatttttatgatctaaccttgg

SEQ ID NO: 116034 - DNA, 120 bp, synthetic construct
  source 1..120: mol_type = other DNA
aataagtgcccaggtgatgttgacactgctggtctggggactacacactgacaaactctgatctgggagaataaaacttattcggaattttctcaaagttgttatgtccatatagctcac

SEQ ID NO: 116035 - DNA, 120 bp, synthetic construct
  source 1..120: mol_type = other DNA
gagacacccacaaggtcaccctttctccacattttccaattagatttaaacaatccagtttgagtgagcaaggtgtcttcttcatgctgaattcaacttttcaccatagaacatagtgcc

SEQ ID NO: 116036 - DNA, 120 bp, synthetic construct
  source 1..120: mol_type = other DNA
tatatatacagacacacacacacacacacacacacacacaggcacacgcacacacatataacatacaaaatatgtgttaatcaacaatgtttttggtaaagcctctggtcaacagtaggc

SEQ ID NO: 116037 - DNA, 120 bp, synthetic construct
  source 1..120: mol_type = other DNA
gaggtgctactgggtactaattattttgcaatctttagggaagatcgttgcaacaaatttttccaccctgaatgccaataaagtgtgtctccttcagcttggttcactgaacccaagatc

SEQ ID NO: 116038 - DNA, 120 bp, synthetic construct
  source 1..120: mol_type = other DNA
tatgaacaaaggccctagagaattctgctgacttattgccttaatctagtcattactgctaccctaagtactttctgctcacattttcagaggcttggtctatggaccctgtcatgcttt

SEQ ID NO: 116039 - DNA, 120 bp, synthetic construct
  source 1..120: mol_type = other DNA
acaatagtgactacagtcaacagtaattcattgtacatttaaaaataactaaaagagtataactggactgtttctaacacaaagaaaggataaatgcttgaggtcatggataccccgctt

SEQ ID NO: 116040 - DNA, 120 bp, synthetic construct
  source 1..120: mol_type = other DNA
gaggcagaggttgcagtgagccaagactgtgccagtgcatgccgaactagacactggctcaaaagaaaaaaaaacaacaacaaaaaagtcactcttcatccattcaagtttaatcatgag

SEQ ID NO: 116041 - DNA, 120 bp, synthetic construct
  source 1..120: mol_type = other DNA
catgcaggctttattatctcattgatagagcacaggcaaagtaaatttattgtaattctttagagccctggaattgtcataatggtaaaccagcattggcttcaacttgaagtcaccagc

SEQ ID NO: 116042 - DNA, 120 bp, synthetic construct
  source 1..120: mol_type = other DNA
cacagatcaccgaaacagacataccaataacgaaaacatttgaaatactgtgagaattaccaaaatgtgacacagagacaggaaatgaacgcatgctgttggaaaaatggtggtgatagc

SEQ ID NO: 116043 - DNA, 120 bp, synthetic construct
  source 1..120: mol_type = other DNA
ccctagaccatattaaaactaagtttgaaatactaagagtttttccttcttttgtttttctcaacacttcagtaacctgtgtcagggaggggagaatgatgcagcaaatgcgtagcaaag

SEQ ID NO: 116044 - DNA, 120 bp, synthetic construct
  source 1..120: mol_type = other DNA
aacatgtccccaacgggtttctttttgtttgaaagaagaaaagaataatgttttaatactatctttaagctccaactaagcataactataaaaccaaaagctttactggaaaatcttaac

SEQ ID NO: 116045 - DNA, 120 bp, synthetic construct
  source 1..120: mol_type = other DNA
ctaatcaggtttatgtgatacctgcctttcacagtttttgtgatatttcaaagagatagtcatacaaaagcttcatacttaataccctgtcaataaatgcaatgttccaagccatagcac

SEQ ID NO: 116046 - DNA, 120 bp, synthetic construct
  source 1..120: mol_type = other DNA
acattgtgatgggttgctaactttttacatttcttttcatctgttctccagattttcttgttcttgttcccaggaacttatttgaagtaactgggttgtttgtactgtagaggttcccag

SEQ ID NO: 116047 - DNA, 120 bp, synthetic construct
  source 1..120: mol_type = other DNA
ttcccagcaacttggatacattacattgcaaggaagataaaggactgtttatagccctaaacctgtgtgctgtttgagtgtaatccagtctgggcctgattcaacctacctaaatgtaac

SEQ ID NO: 116048 - DNA, 120 bp, synthetic construct
  source 1..120: mol_type = other DNA
tgggaggcagaggcaagagaatcttggcttgaggccagtagttaagtacagcctggtcaacataaggaggtcgtgtctttacaaaaataataataaaaaaaaaattagccaggcatggtg

SEQ ID NO: 116049 - DNA, 120 bp, synthetic construct
  source 1..120: mol_type = other DNA
tgacctcctgaatcacctgggagcccaaaccctgaacagaggtagagaaacagaagattaagacgctcgtagctatcttaataacttgtgcagagctaaacaagaagtttttatacatag

SEQ ID NO: 116050 - DNA, 120 bp, synthetic construct
  source 1..120: mol_type = other DNA
atgaatttacaaaaagaaccagaattctaacacttaattgctttattttaaaaatcatactgattcacagtaagtttgtggaattccagtctttatctctgaatttccattaatggtcaa

SEQ ID NO: 116051 - DNA, 120 bp, synthetic construct
  source 1..120: mol_type = other DNA
ctattattattattattattatttgagatagagttttgctcttgttgccccgactggagtgcaatggcatgatcttggctcactgcaacctccacatcccaagttcaagcgactctcctg

SEQ ID NO: 116052 - DNA, 120 bp, synthetic construct
  source 1..120: mol_type = other DNA
tgtcccttccaacggtggaaaattttggtaaaaatcaatgacaggctgggcgtggtggtgcatgcctgtgattccagctactcaggaggctgaggcacgagaatctctcgaacccgggag

SEQ ID NO: 116053 - DNA, 120 bp, synthetic construct; identical to SEQ ID NO: 27754
  source 1..120: mol_type = other DNA

SEQ ID NO: 116054 - DNA, 120 bp, synthetic construct; identical to SEQ ID NO: 27762
  source 1..120: mol_type = other DNA

SEQ ID NO: 116055 - DNA, 120 bp, synthetic construct; identical to SEQ ID NO: 27763
  source 1..120: mol_type = other DNA

SEQ ID NO: 116056 - DNA, 120 bp, synthetic construct
  source 1..120: mol_type = other DNA
cgcatatctacaactatctgatctttgacaaacctgagaaaaacaagcaattaaaaggattccctatttaataaatggtgctgggaaaactggctagccatatgtagaaagctgaaactg

SEQ ID NO: 116057 - DNA, 120 bp, synthetic construct
  source 1..120: mol_type = other DNA
atacaccatggaatactatgcagccataaaaaatgatgagttcatgtcctttgtagggacatggatgaaattggaaatcatcattctcagtaaactatcgcaagaacaaaaaaacaaacg

SEQ ID NO: 116058 - DNA, 120 bp, synthetic construct; identical to SEQ ID NO: 27764
  source 1..120: mol_type = other DNA

SEQ ID NO: 116059 - DNA, 120 bp, synthetic construct; identical to SEQ ID NO: 27765
  source 1..120: mol_type = other DNA

SEQ ID NO: 116060 - DNA, 120 bp, synthetic construct; identical to SEQ ID NO: 13061
  source 1..120: mol_type = other DNA

SEQ ID NO: 116061 - DNA, 120 bp, synthetic construct
  source 1..120: mol_type = other DNA
ttctggatactagccctttgtcagatgagtaggttgcgaaatttttctcccattttgtaggttgcctgttcactctgatggtagtttcttttgctgtgcagaagctctttagtttaatta

SEQ ID NO: 116062 - DNA, 120 bp, synthetic construct
  source 1..120: mol_type = other DNA
atgaggccagcatcatcctgataccaaagctgggcagagacacaaccaaaaaagaattttagtccaatatccttgatgaacattgatgccaaaatcctcaataaaatactggcaaaccga

SEQ ID NO: 116063 - DNA, 120 bp, synthetic construct
  source 1..120: mol_type = other DNA
tcctgtgtccatgtgttctcattgttcagttcccatctatgagtgagaacatgtggtgtttggttttctgtccttggggtagtttactgagaatgatgatttccagtttcatccatgtcc

SEQ ID NO: 116064 - DNA, 120 bp, synthetic construct
  source 1..120: mol_type = other DNA
tgtttttctcaggtttgtcaaagatcagatggttgtagatatgcggcactatttctgagggctctgttctgttccattgatctatatctctgttttggtaccagtaccatgctgttttgg

SEQ ID NO: 116065 - DNA, 120 bp, synthetic construct; identical to SEQ ID NO: 13062
  source 1..120: mol_type = other DNA

SEQ ID NO: 116066 - DNA, 120 bp, synthetic construct
  source 1..120: mol_type = other DNA
tgccacactgacttccacaatggttgaactagtttacagtcccaccaacagtgtaaaagtgttcctatttctccacatcctctccagcacctgttgtttcctgactttttaatgattgcc

SEQ ID NO: 116067 - DNA, 120 bp, synthetic construct
  source 1..120: mol_type = other DNA
gaactttaaagtagttttttccaattctgtgaagaaagtcattggtagcttgatggggatggcattgaatctgtaaattaccttgggcagtatggccatattcatggtattgattcttcc

SEQ ID NO: 116068 - DNA, 120 bp, synthetic construct
  source 1..120: mol_type = other DNA
tttttgatgtgctgctggattcagtttgccagtattttattgagtattttggcatcaatgttcatcaaggatattggtctaaaattctcttttttggttgtgtctctgccaggctttggt

SEQ ID NO: 116069 - DNA, 120 bp, synthetic construct
  source 1..120: mol_type = other DNA
gttgtcattcaggagcaggttgttcagtttccatgtaattgagcggttttgagtgagattcttaatcctgagttctagtttgattgcactgtggtctgagagatagtttgttataatttc

SEQ ID NO: 116070 - DNA, 120 bp, synthetic construct
  source 1..120: mol_type = other DNA
acttatgaagcttagtttggctggatatgaaattctgggttgaaaattcttttctttaagaatgttgaatattggcccccactctcttctggctggtagagtttctgccgagagatctgc

SEQ ID NO: 116071 - DNA, 120 bp, synthetic construct
  source 1..120: mol_type = other DNA
ctgcaggtctgttggagtacctggccctgtgaggtgtcagtctgctgctagggggtgcctcccagtgaggctgtttgggggtcaggggtcagggacccacttcaggaggcagtctgcccg

SEQ ID NO: 116072 - DNA, 120 bp, synthetic construct
  source 1..120: mol_type = other DNA
attttataaggcagtttcatgtttttggaaatattttcaaacttttacttatgaactactctaatgtggcaattcctcagggatctagaactagaaataacatttgacccagccatccca

SEQ ID NO: 116073 - DNA, 120 bp, synthetic construct; identical to SEQ ID NO: 13063
  source 1..120: mol_type = other DNA

SEQ ID NO: 116074 - DNA, 120 bp, synthetic construct; identical to SEQ ID NO: 13064
  source 1..120: mol_type = other DNA

SEQ ID NO: 116075 - DNA, 120 bp, synthetic construct
  source 1..120: mol_type = other DNA
gtgcatgtgtctttatagcagcatgatttatagtcctttgggtatatacccagtaatgggatggctggatcaaatggtatttctagttctagatccctgaggaatcgccacactgacttc

SEQ ID NO: 116076 - DNA, 120 bp, synthetic construct
  source 1..120: mol_type = other DNA
cattgagcagtggtttgtagttctccttgaagaggtccttcagatcccttgtaagttggattcctaggtattttattctctttgaagcaattgtgaatgggagttcactcatgatttggc

SEQ ID NO: 116077 - DNA, 120 bp, synthetic construct
  source 1..120: mol_type = other DNA
gtgtttgtgtcgaggcatttatccatttcttctagattttctagtttatttgcatagaggtgtttgtaatattctctgatggtagtttgtatttctgtgggattggtggtgatatcccct

SEQ ID NO: 116078 - DNA, 120 bp, synthetic construct
  source 1..120: mol_type = other DNA
atctgggtgctcctgtattgggtgcatatatatttaggatagttagctcttcttgttgaattgatccctttaccattatgtaatggccttctttgtctcttttgatctttgttggttgaa

SEQ ID NO: 116079 - DNA, 120 bp, synthetic construct
  source 1..120: mol_type = other DNA
gtacaccaatcagacgtagatttggtcttttcacatagtcccatatttcttggaggctttgctcatttctttttattcttttttctctaaacttcctttctcgcttcatttcattcattt

SEQ ID NO: 116080 - DNA, 120 bp, synthetic construct
  source 1..120: mol_type = other DNA
gggtgggagtgacccgatcttccaggtgccgtctgtcacccctttctttgacaaggaaagggaactccctgaccccctgcgcttcccgagtgaggcaatgcctcgccctgctttggctcg

SEQ ID NO: 116081 - DNA, 120 bp, synthetic construct; identical to SEQ ID NO: 31721
  source 1..120: mol_type = other DNA

SEQ ID NO: 116082 - DNA, 120 bp, synthetic construct; identical to SEQ ID NO: 31722
  source 1..120: mol_type = other DNA

SEQ ID NO: 116083 - DNA, 120 bp, synthetic construct; identical to SEQ ID NO: 31723
  source 1..120: mol_type = other DNA

SEQ ID NO: 116084 - DNA, 120 bp, synthetic construct
  source 1..120: mol_type = other DNA
aaggccttttctgcatctattgagataatcatgtggtttttgtcgttggttctgtttataagctggattacatttattgatttgcgtatgttgaaccagccttgcatcccagggatgaag

SEQ ID NO: 116085 - DNA, 120 bp, synthetic construct
  source 1..120: mol_type = other DNA
agggttgggcttttttttttgttcctaaaaatgcaacgaacaaaaaaaaaagtacaacaatccaaacccaaccatcttaattgcacggcagcttaactgggagactttcttcccgggcgg

SEQ ID NO: 116086 - DNA, 120 bp, synthetic construct
  source 1..120: mol_type = other DNA
tctccacatcccctagaaaagaaaagacgggtgtgggccttaggttacagcgcgccgccagcgtttggttgcatggcgccgggggagggcgccctaaccgagaagctgcttaatacaaag

SEQ ID NO: 116087 - DNA, 120 bp, synthetic construct
  source 1..120: mol_type = other DNA
caggtggcaagcttcaaagaaaagaatatttacgactggagaaatgcagactctcctttttttttttttttttgagacggagtctcactctgttgctggagtgcagtggccacgatgctc

SEQ ID NO: 116088 - DNA, 120 bp, synthetic construct
  source 1..120: mol_type = other DNA
cttgcagtgagctgagatcgcgccactgcactccagcctgggcgagagagcgagactatgtctcaaaaaaaaaaaaaaagaaaaaaagaaataagccaagcttgagaattatatctagga

SEQ ID NO: 116089 - DNA, 120 bp, synthetic construct; identical to SEQ ID NO: 17535
  source 1..120: mol_type = other DNA

SEQ ID NO: 116090 - DNA, 120 bp, synthetic construct; identical to SEQ ID NO: 17536
  source 1..120: mol_type = other DNA

SEQ ID NO: 116091 - DNA, 120 bp, synthetic construct
  source 1..120: mol_type = other DNA
tgggaggcggagcttgcagtgagccgagattgtgccactgcactccagcctgcgcaacagagcgagactccgtctcaaaaaaaaaaaaaataaaataaaataaaataaaggaaggcaata

SEQ ID NO: 116092 - DNA, 120 bp, synthetic construct
  source 1..120: mol_type = other DNA
agccaagatcgcgccactgctctccagcctgggcaacagtgcgagactccgtctcaaaaaaaaaaaaaagaattactgcaaacacatagagaacagcaccatatggagcaaaagagagca

SEQ ID NO: 116093 - DNA, 120 bp, synthetic construct; identical to SEQ ID NO: 17506
  source 1..120: mol_type = other DNA

SEQ ID NO: 116094 - DNA, 120 bp, synthetic construct; identical to SEQ ID NO: 17507
  source 1..120: mol_type = other DNA

SEQ ID NO: 116095 - DNA, 120 bp, synthetic construct; identical to SEQ ID NO: 17508
  source 1..120: mol_type = other DNA

SEQ ID NO: 116096 - DNA, 120 bp, synthetic construct
  source 1..120: mol_type = other DNA
cattagtaacataccctgtctgaagcatggctttgaaaatgagacatttgactgggcacggtggctcacacctgtaatcccagcactttgggaggctgaggtgggcagatcatttgaggt

SEQ ID NO: 116097 - DNA, 120 bp, synthetic construct; identical to SEQ ID NO: 17509
  source 1..120: mol_type = other DNA

SEQ ID NO: 116098 - DNA, 120 bp, synthetic construct
  source 1..120: mol_type = other DNA
caagatggtgaaaccccatctctactaaaaataaaaaaaatttggccaggcacggtggctcatgcctgtaatcccagcactttgtggggccgaggcgggtggatcacgaggtcaggagat

SEQ ID NO: 116099 - DNA, 120 bp, synthetic construct; identical to SEQ ID NO: 17510
  source 1..120: mol_type = other DNA

SEQ ID NO: 116100 - DNA, 120 bp, synthetic construct; identical to SEQ ID NO: 17511
  source 1..120: mol_type = other DNA

SEQ ID NO: 116101 - DNA, 120 bp, synthetic construct
  source 1..120: mol_type = other DNA
cagccgccccgtccgggaggtgaggggcgcctctgcccggccgcccctactgggaagtgaggagcccctctgcccggccaccaccccgtctgggaggtgtgcccaacagctcattgagaa

SEQ ID NO: 116102 - DNA, 120 bp, synthetic construct; identical to SEQ ID NO: 17512
  source 1..120: mol_type = other DNA

SEQ ID NO: 116103 - DNA, 120 bp, synthetic construct; identical to SEQ ID NO: 17513
  source 1..120: mol_type = other DNA

SEQ ID NO: 116104 - DNA, 120 bp, synthetic construct; identical to SEQ ID NO: 17514
  source 1..120: mol_type = other DNA

SEQ ID NO: 116105 - DNA, 120 bp, synthetic construct; identical to SEQ ID NO: 17515
  source 1..120: mol_type = other DNA

SEQ ID NO: 116106 - DNA, 120 bp, synthetic construct; identical to SEQ ID NO: 17516
  source 1..120: mol_type = other DNA

SEQ ID NO: 116107 - DNA, 120 bp, synthetic construct
  source 1..120: mol_type = other DNA
agttgtcccacctttccagaccaaaccaaattacatcttacatgtatttgattgatgtctcatgtctccctaaaatgtatactaggctgtaccccaaccaccttgggcacatgttctcag

SEQ ID NO: 116108 - DNA, 120 bp, synthetic construct; identical to SEQ ID NO: 17517
  source 1..120: mol_type = other DNA

SEQ ID NO: 116109 - DNA, 120 bp, synthetic construct; identical to SEQ ID NO: 17518
  source 1..120: mol_type = other DNA

SEQ ID NO: 116110 - DNA, 120 bp, synthetic construct; identical to SEQ ID NO: 17519
  source 1..120: mol_type = other DNA

SEQ ID NO: 116111 - DNA, 120 bp, synthetic construct; identical to SEQ ID NO: 17520
  source 1..120: mol_type = other DNA

SEQ ID NO: 116112 - DNA, 120 bp, synthetic construct; identical to SEQ ID NO: 17521
  source 1..120: mol_type = other DNA

SEQ ID NO: 116113 - DNA, 120 bp, synthetic construct; identical to SEQ ID NO: 17522
  source 1..120: mol_type = other DNA

SEQ ID NO: 116114 - DNA, 120 bp, synthetic construct; identical to SEQ ID NO: 17523
  source 1..120: mol_type = other DNA

SEQ ID NO: 116115 - DNA, 120 bp, synthetic construct; identical to SEQ ID NO: 17524
  source 1..120: mol_type = other DNA

SEQ ID NO: 116116 - DNA, 120 bp, synthetic construct; identical to SEQ ID NO: 17525
  source 1..120: mol_type = other DNA

SEQ ID NO: 116117 - DNA, 120 bp, synthetic construct; identical to SEQ ID NO: 17526
  source 1..120: mol_type = other DNA

SEQ ID NO: 116118 - DNA, 120 bp, synthetic construct; identical to SEQ ID NO: 17527
  source 1..120: mol_type = other DNA

SEQ ID NO: 116119 - DNA, 120 bp, synthetic construct; identical to SEQ ID NO: 17528
  source 1..120: mol_type = other DNA

SEQ ID NO: 116120 - DNA, 120 bp, synthetic construct; identical to SEQ ID NO: 17529
  source 1..120: mol_type = other DNA

SEQ ID NO: 116121 - DNA, 120 bp, synthetic construct; identical to SEQ ID NO: 17530
  source 1..120: mol_type = other DNA

SEQ ID NO: 116122 - DNA, 120 bp, synthetic construct; identical to SEQ ID NO: 17531
  source 1..120: mol_type = other DNA

SEQ ID NO: 116123 - DNA, 120 bp, synthetic construct
  source 1..120: mol_type = other DNA
ttttcttgagatggagtctcgctctgtcacccaggctggagtgcaatggcatgatctcggctcgctgcaagccccacctcctggggttcacgccattctcctgcctcaacctcccaagta

SEQ ID NO: 116124 - DNA, 120 bp, synthetic construct; identical to SEQ ID NO: 25880
  source 1..120: mol_type = other DNA

SEQ ID NO: 116125 - DNA, 120 bp, synthetic construct; identical to SEQ ID NO: 25881
  source 1..120: mol_type = other DNA

SEQ ID NO: 116126 - DNA, 120 bp, synthetic construct
  source 1..120: mol_type = other DNA
tgggattacacacatgagctactgtgccactgccatcttcttcttcttcttcttcttgttcttcttgttcttcttcttcttcttcttcttcttctcctccttcttcttctcctccttttc

SEQ ID NO: 116127 - DNA, 120 bp, synthetic construct; identical to SEQ ID NO: 25882
  source 1..120: mol_type = other DNA

SEQ ID NO: 116128 - DNA, 120 bp, synthetic construct; identical to SEQ ID NO: 25883
  source 1..120: mol_type = other DNA

SEQ ID NO: 116129 - DNA, 120 bp, synthetic construct
  source 1..120: mol_type = other DNA
gaaatgcaaatcaaaaccacaatgagataccatctcacaccagttagaatggcgatcattaaaaagtcaggaaacaacaggtgctggagaggatgtggagaaataggaatacttttacac

SEQ ID NO: 116130 - DNA, 120 bp, synthetic construct; identical to SEQ ID NO: 30096
  source 1..120: mol_type = other DNA

SEQ ID NO: 116131 - DNA, 120 bp, synthetic construct; identical to SEQ ID NO: 20152
  source 1..120: mol_type = other DNA

SEQ ID NO: 116132 - DNA, 120 bp, synthetic construct; identical to SEQ ID NO: 20153
  source 1..120: mol_type = other DNA

SEQ ID NO: 116133 - DNA, 120 bp, synthetic construct; identical to SEQ ID NO: 3212
  source 1..120: mol_type = other DNA

SEQ ID NO: 116134 - DNA, 120 bp, synthetic construct; identical to SEQ ID NO: 24765
  source 1..120: mol_type = other DNA

SEQ ID NO: 116135 - DNA, 120 bp, synthetic construct; identical to SEQ ID NO: 20779
  source 1..120: mol_type = other DNA

SEQ ID NO: 116136 - DNA, 120 bp, synthetic construct
  source 1..120: mol_type = other DNA
aattctagtttattggataaatggcgtgatatgtattctagttcaaatttgaaggttggtataaaccttttcagacactggagatgagacatttcaccaagattgggtgtgaggaagagg

SEQ ID NO: 116137 - DNA, 120 bp, synthetic construct; identical to SEQ ID NO: 20780
  source 1..120: mol_type = other DNA

SEQ ID NO: 116138 - DNA, 120 bp, synthetic construct
  source 1..120: mol_type = other DNA
gtctgagtccattttcctaaggaaagaaaaccacaggaatttaatcttctaccctggagagacaaagatccaagcaaagtttgaatcagatcgtgatcgaataatatcctttctttctaa

SEQ ID NO: 116139 - DNA, 120 bp, synthetic construct; identical to SEQ ID NO: 20781
  source 1..120: mol_type = other DNA

SEQ ID NO: 116140 - DNA, 120 bp, synthetic construct
  source 1..120: mol_type = other DNA
acaggatgatgagttaagcaagaccttccttcaaaatttatgtaattcatcaattcccaaacacctgcaaaaaagccctttaggtttaaatgtttaaatcaaatcggaaatacaattaga

SEQ ID NO: 116141 - DNA, 120 bp, synthetic construct
  source 1..120: mol_type = other DNA
gttttgaaaacctaaagaccagataggcagaatagcaacttttttgtgtgtttattttgagacagagtcttcttctgtcacccagactgaagtccaatggcccaatctcagctcactgca

SEQ ID NO: 116142 - DNA, 120 bp, synthetic construct
  source 1..120: mol_type = other DNA
atataaatacctattcacaggctattctcttcttctagatgaaagatcattacactgggaaagctgcccatagaaaaccataattgaaggcattgcatgtggatcccaccaacagggcca

SEQ ID NO: 116143 - DNA, 120 bp, synthetic construct; identical to SEQ ID NO: 20782
  source 1..120: mol_type = other DNA

SEQ ID NO: 116144 - DNA, 120 bp, synthetic construct
  source 1..120: mol_type = other DNA
ataggagggaactctcacacttacaagtgcattgtacaaaaccccgtctgcccatgatgtacaaaagttgttcctgaatgagatcattaagttggaatcacacacccacatatttccaga

SEQ ID NO: 116145 - DNA, 120 bp, synthetic construct
  source 1..120: mol_type = other DNA
aagaatatttacctggtcaattgtcaattgcccttttccaggaatctggaacttgaatggtgtttctataaggggctcgttggatctcatgttttacaggacccccagtctctggatata

SEQ ID NO: 116146 - DNA, 120 bp, synthetic construct; identical to SEQ ID NO: 20783
  source 1..120: mol_type = other DNA

SEQ ID NO: 116147 - DNA, 120 bp, synthetic construct
  source 1..120: mol_type = other DNA
atataattttgatattcgatcctgaaaagtgtgttacaagaaatgcaaattgcagtacagactctaaaataaatataggtgcaacaattcaaaaaagctagctagtcaaatcttgtgaga

SEQ ID NO: 116148 - DNA, 120 bp, synthetic construct
  source 1..120: mol_type = other DNA
aaattgtagaatattgattaaaaagcatacagtagataaaatcaatgaagtaggctttttttttgtttgtttgagacagagtctcactctgtcacccaggctggagtgcagtggtgcgat

SEQ ID NO: 116149 - DNA, 120 bp, synthetic construct
  source 1..120: mol_type = other DNA
ctttacccgggtgttgtggcaagcacctgtagtcccagctactggggaggctgaggtgggaggattgctggagcacagggtgttgaggctgcagttagctggaatgcccatctctgcatg

SEQ ID NO: 116150 - DNA, 120 bp, synthetic construct
  source 1..120: mol_type = other DNA
ccattagttatttttcctgatcctctccctcttctaatcccccaccctcctataggtcccagcgtgtgttgttcccctctatgtgtccatatgttctcattatttagctcccacttataa

SEQ ID NO: 116151 - DNA, 120 bp, synthetic construct
  source 1..120: mol_type = other DNA
tttttttcttaaatgttgtgaatatttcactgaaaaagatcaccaggtttttcgctgggagaagttttgttttttaaataatagggtaaatttttagaatctaaatcatatcttagattt

SEQ ID NO: 116152 - DNA, 120 bp, synthetic construct
  source 1..120: mol_type = other DNA
gagtcatgcatgcttctaagacaatagttaaaagtgagagtaagccagacgcattggctgacacctataatcccagcacatatatatacatacacacacacacacacacacacacacaca

SEQ ID NO: 116153 - DNA, 120 bp, synthetic construct; identical to SEQ ID NO: 20772
  source 1..120: mol_type = other DNA

SEQ ID NO: 116154 - DNA, 120 bp, synthetic construct
  source 1..120: mol_type = other DNA
atatattcaaacggcctttccaggtagctccctgggcttgctcacagcatggtagataattttccacagtgaagattcccatagagtcaggagaattgtatactaccattattccagaga

SEQ ID NO: 116155 - DNA, 120 bp, synthetic construct; identical to SEQ ID NO: 20773
  source 1..120: mol_type = other DNA

SEQ ID NO: 116156 - DNA, 120 bp, synthetic construct
  source 1..120: mol_type = other DNA
tttatttgggactaagaatagctccccacctcatctcctgtccaaagcctcctgctctgccctgacagagacgagacaatgaaggttaattttatggctatggacttggctgcagtggag

SEQ ID NO: 116157 - DNA, 120 bp, synthetic construct
  source 1..120: mol_type = other DNA
cctaagagccacaaacccatcctagcgttgtggaggtacattacggtatcagaagtgggtttgaatgaagcattttctgttggaatctgtttcttaaacacagacatcagaaagttaacc

SEQ ID NO: 116158 - DNA, 120 bp, synthetic construct
  source 1..120: mol_type = other DNA
cacaagcttcctcctccagcacatttcattaaaactctggaagaaaaaatttcatgcttgatttgagccacattacactttggggactagccctgaaaaagaccacattgtagacagctg

SEQ ID NO: 116159 - DNA, 120 bp, synthetic construct; identical to SEQ ID NO: 20774
  source 1..120: mol_type = other DNA

SEQ ID NO: 116160 - DNA, 120 bp, synthetic construct; identical to SEQ ID NO: 20775
  source 1..120: mol_type = other DNA

SEQ ID NO: 116161 - DNA, 120 bp, synthetic construct; identical to SEQ ID NO: 20776
  source 1..120: mol_type = other DNA

SEQ ID NO: 116162 - DNA, 120 bp, synthetic construct
  source 1..120: mol_type = other DNA
ttgaacctggaaggcggaggttgcagtgagccaagagcgccgccgcactccagcctggcaatagagcgtgattccatctcaaaataaataaataaacaaataaataaatagctgaacatg

SEQ ID NO: 116163 - DNA, 120 bp, synthetic construct
  source 1..120: mol_type = other DNA
tctaaatgttgggtcattctcacttgactgtcttgtagttgttggaaaagctatttggcttcgctgtccagtgcctgcagatgaagttgcttctcctcatcgagaaatagatgcatcttt

SEQ ID NO: 116164 - DNA, 120 bp, synthetic construct
  source 1..120: mol_type = other DNA
gtattccatggtgtatatgtgccacgttttcttttttttttttaattttattatacctttaagttttagggtacatgtgcacaatgtgcaggtttggtacatatgtatacatgtgccacg

SEQ ID NO: 116165 - DNA, 120 bp, synthetic construct
  source 1..120: mol_type = other DNA
gtggagaaataggaacacttttacagtgttggtgggactgtaaactagttcaaccattatggaagtcagtgagtgtggcgattcctcagggatctagaactagaaataccatttgaccca

SEQ ID NO: 116166 - DNA, 120 bp, synthetic construct
  source 1..120: mol_type = other DNA
ccagctttgttcttttggcttaggattgacttggcaatgggcttcatccctgggatgcaagtctggttcaacatacgcaaatcaataaacataatccagcatataaacagaaccaaagac

SEQ ID NO: 116167 - DNA, 120 bp, synthetic construct
  source 1..120: mol_type = other DNA
agagtgcctctccttctccaaaggaacacagctcctcaccagcaacggaacaaagctggatggagaatgactttgacgagttgagagaagaaggcttcagacgatcaaactactccgagc

SEQ ID NO: 116168 - DNA, 120 bp, synthetic construct
  source 1..120: mol_type = other DNA
actgcaaaatcatgccaagttgtaaagaccatcgatgctcggaagaaactgcatcaactaatgagcaaaataaccagctaacatcataatgacaggatcaaattcacacataacaatatt

SEQ ID NO: 116169 - DNA, 120 bp, synthetic construct
  source 1..120: mol_type = other DNA
gggacacattcaaagcagtgtgtagagggaaatttatagcactaaatgcccacaagagaaagcaggaaagatccaaaattgataccctaacatcacaattaaaagaactagaaaagcaag

SEQ ID NO: 116170 - DNA, 120 bp, synthetic construct
  source 1..120: mol_type = other DNA
catatctcaaaataataagagctatctttgacaaacccacagccaatatcatactgaatgggcaaaaactggaagcattccctttgaaaactggcacaagacagggatgccctctctcac

SEQ ID NO: 116171 - DNA, 120 bp, synthetic construct
  source 1..120: mol_type = other DNA
agacttacatgttagacctaaaaccataaaaatcctagaaaacccaggcaataccattcaagacacaggcatgggcaaggacttcacgtctaaaacaccaaaagcaatggcaacaaaagc

SEQ ID NO: 116172 - DNA, 120 bp, synthetic construct
  source 1..120: mol_type = other DNA
ctaacctgcacattgtgcacatgtaccctaaaacttaaaatataataataataaaaaataaataaaaaatgaaaacacattaaaataaataaataaacatgcactgatgttgccatgccc

SEQ ID NO: 116173 - DNA, 120 bp, synthetic construct; identical to SEQ ID NO: 11838
  source 1..120: mol_type = other DNA

SEQ ID NO: 116174 - DNA, 120 bp, synthetic construct
  source 1..120: mol_type = other DNA
tccacatcctctccagcacctgttgtttcctgactttttaatgatcaccagtcttactggtgtgagatgatatctcattgtggttttgatttgcatttctccaatggccagtaatgatga

SEQ ID NO: 116175 - DNA, 120 bp, synthetic construct
  source 1..120: mol_type = other DNA
ttaggattgacttggcaatgtgggctcttttttggttccatatgaactttaaagtagttttttccaattctgtgaagaaagtcattggtagcttcatggggatgacattgaatctataaa

SEQ ID NO: 116176 - DNA, 120 bp, synthetic construct
  source 1..120: mol_type = other DNA
gttcttttacatttgctgaggaatgctttacttccacctatgtggtcaattttggaataagtgcgatgtggtgctgagaagaatgtatattctgttgatttggggtggagagttctgtag

SEQ ID NO: 116177 - DNA, 120 bp, synthetic construct
  source 1..120: mol_type = other DNA
attctgggttgaaaattcttttcttttagaattttgaatattggcccccactctcttctggcttgtagggtttctgcccagagatccactgttagtctgatgggcttccctttgtgggta

SEQ ID NO: 116178 - DNA, 120 bp, synthetic construct
  source 1..120: mol_type = other DNA
ttgtagcaggctataccatctaggtttgtaaaggtagattctatcatgtcaaaacaataaaacaataaaacctaggcgcagtgactcatgcctgtaatcccagcacttttggaggccgtg

SEQ ID NO: 116179 - DNA, 120 bp, synthetic construct
  source 1..120: mol_type = other DNA
gtttttctatttcgctttggatttggttttttattttactttaattttatattattttcagtcctgagataaacgtgcaggacatgcaggcttgttacacaggtaaacatgtgccatggt

SEQ ID NO: 116180 - DNA, 120 bp, synthetic construct
  source 1..120: mol_type = other DNA
agtgggctgctgaggaacactgggtaagtgatgcctctgaagatctatttctataaaggacacatgaaattcctgtggccctattttcttggagattgggtaaagccaactctgagtccc

SEQ ID NO: 116181 - DNA, 120 bp, synthetic construct
  source 1..120: mol_type = other DNA
acacatacactctcccaagactaaaccaggaagaagttgaatccctgaatagatcaataacaggctctgaaattaaggcaataattatgagcctacaaaccaaataaagtccgggtccgg

SEQ ID NO: 116182 - DNA, 120 bp, synthetic construct
  source 1..120: mol_type = other DNA
acttggctgtgagggctcttttttggttccacatgaactttaaagtagttttttccaattctgtgaagaaagtcattggtagcttgatggggatggcattgaatctataaattaccttgg

SEQ ID NO: 116183 - DNA, 120 bp, synthetic construct
  source 1..120: mol_type = other DNA
atgtggagaagtaggaacacttttacacgttggtgggactgtaaactagttcaaccattgtagaagacagtgtggcgattcctcaaagatctagaactagaaataccatttgatccagcc

SEQ ID NO: 116184 - DNA, 120 bp, synthetic construct; identical to SEQ ID NO: 2157
  source 1..120: mol_type = other DNA

SEQ ID NO: 116185 - DNA, 120 bp, synthetic construct
  source 1..120: mol_type = other DNA
gacgagcacactaataatgaaggattatttatatctgtggtgagaattgcaaaataaagcccagcatagaaggtcaaatagtattacctcaaaggatagattaatacaatgaaacctgat

SEQ ID NO: 116186 - DNA, 120 bp, synthetic construct
  source 1..120: mol_type = other DNA
ttcttcatgatgcagagtaatatgcactgcaaaaaaaaaaaaaaagaaaacatgcatagacatgtgtaaataagaaaaaaataattgttctatcaagaagttactttaccagcaaatgta

SEQ ID NO: 116187 - DNA, 120 bp, synthetic construct
  source 1..120: mol_type = other DNA
cagaaagtatttctttttcactatctttcaaacttaatgctataaatctgactgtaaatacagacacggataccaaagggttgcatggttatattgttcacttatgtcttaaaagaagta

SEQ ID NO: 116188 - DNA, 120 bp, synthetic construct
  source 1..120: mol_type = other DNA
ctcaccattcacaaaaaaaaacttatctttctcctgtgcaggctttcaagcaataaaacaaaatcaggggccgggcgcggtggttcacgcctgtaatcccagcactttgggaggccgagg

SEQ ID NO: 116189 - DNA, 120 bp, synthetic construct
  source 1..120: mol_type = other DNA
taacctaaatgtaaatgaatcactcactattctatacatgtttaacaacccaaagtatattattgaattagatggggaatatttcttggggctgttaccttgaccattccacaaagtttt

SEQ ID NO: 116190 - DNA, 120 bp, synthetic construct
  source 1..120: mol_type = other DNA
gtgtggttgtgtgtatatatgtatgtatgtatgtatgtatgtatgtgtgtgtgtttgtatacatatatatgtaattctagttggagagaatagcatatgcagtaattttgagtttgtgta

SEQ ID NO: 116191 - DNA, 120 bp, synthetic construct
  source 1..120: mol_type = other DNA
ccactttttctcagtgttttctctcgcctttttttttttactgtatcccagaaacattacagtttgatatcaagttcctattttaagagtcacccatttgcccaccataagttcctggag

SEQ ID NO: 116192 - DNA, 120 bp, synthetic construct
  source 1..120: mol_type = other DNA
tgttcattaaagtacaacaaactatttcttctgttacaaacttaaaaatttacacttagagggagtctcctggctttctaacagatattactaaccagaggactcacagtcccttctact

SEQ ID NO: 116193 - DNA, 120 bp, synthetic construct
  source 1..120: mol_type = other DNA
agcctatattggaactctctagactccataatcaagcaaattaattttcctgatgaattctgtcccatgtagaatcatgtatagcttgtggacagatgtatgttctgagaaatgtgtcag

SEQ ID NO: 116194 - DNA, 120 bp, synthetic construct; identical to SEQ ID NO: 476
  source 1..120: mol_type = other DNA

SEQ ID NO: 116195 - DNA, 120 bp, synthetic construct
  source 1..120: mol_type = other DNA
actgtttattgagtttcttccatgatacaggcattcctctaagtgcacatttatttattctagagaaagggtctccttctggagtgcagtagcataatcatagctccctgcagccttgaa

SEQ ID NO: 116196 - DNA, 120 bp, synthetic construct
  source 1..120: mol_type = other DNA
acaaatctatcagacccaggtctgtccaggttcaaagacaaaagcagaacccataagatatatgtatagttagggagattcacatatgaattaagtgcaaagacttgacttacccaattg

SEQ ID NO: 116197 - DNA, 120 bp, synthetic construct
  source 1..120: mol_type = other DNA
ttattaaaaggagaagcactgggaaataaggaaatattccaaattggctggagtgtcctttatccacatcacggattgttcttgcctatacccacctctactctctcttctggattgggt

SEQ ID NO: 116198 - DNA, 120 bp, synthetic construct
  source 1..120: mol_type = other DNA
ctgggactacaggcgcccgccaccatgcccggctaatttttttgtacttttagtagagacgggattacactgtgttagccaggatggtctcaatctcctgacctcgtgatccgcccgcct

SEQ ID NO: 116199 - DNA, 120 bp, synthetic construct
  source 1..120: mol_type = other DNA
gtttataaaatttccaaggaacagagcagaatgtaaggttagcatatcttgtgtttttacctcccctaagcccaaaggatcatgagtactacatacagaaatctttcctccttacccctg

SEQ ID NO: 116200 - DNA, 120 bp, synthetic construct
  source 1..120: mol_type = other DNA
tccacagttaaaaaaataaacacaaattcatgtgcttgtattccagttgggttttttttccaaacgatgagcattaatgaaatactataccttaaaacctttttctaaatatatttgaga

SEQ ID NO: 116201 - DNA, 120 bp, synthetic construct
  source 1..120: mol_type = other DNA
gataaagtaggagggacctttggcctggtagaatcccttagtggggctatactctcccaacaaagtagcattagttatgtgaatgtgtttttggaaacacatcatggaaataaaagtagg

SEQ ID NO: 116202 - DNA, 120 bp, synthetic construct; identical to SEQ ID NO: 116188
  source 1..120: mol_type = other DNA

SEQ ID NO: 116203 - DNA, 120 bp, synthetic construct; identical to SEQ ID NO: 11893
  source 1..120: mol_type = other DNA

SEQ ID NO: 116204 - DNA, 120 bp, synthetic construct
  source 1..120: mol_type = other DNA
aagccaacagtgatatctttctgtatgaaattttgagaagcatgtgtattggatgtgaccatcaagatgtaccctatttcactgcaacacctagaagttttcttgcatggggtgttcaga

SEQ ID NO: 116205 - DNA, 120 bp, synthetic construct
  source 1..120: mol_type = other DNA
cataacatgccaaataatgcataaggtaatataatacaaaatgggggctaggcatagcctagcctctaggctctaatcctggcattgaggaggccaaggtatgaggatggattcaggtca

SEQ ID NO: 116206 - DNA, 120 bp, synthetic construct
  source 1..120: mol_type = other DNA
ttatagcccaacagaaggtagaggattttggagtgagatgcaagaatcttaacctgacataggttgttcacagacattacaactgaaacaattatttcattaagtaatgttttgtttcac

SEQ ID NO: 116207 - DNA, 120 bp, synthetic construct; identical to SEQ ID NO: 116199
  source 1..120: mol_type = other DNA

SEQ ID NO: 116208 - DNA, 120 bp, synthetic construct
  source 1..120: mol_type = other DNA
tccatcccatacaggaaacaggaccataaaaagattgcttacgaccgggagcggtggctcacgtctgtaatcccagcactttgggaggctgagccgcgcggatcacgaggtcaggagatt

SEQ ID NO: 116209 - DNA, 120 bp, synthetic construct; identical to SEQ ID NO: 116197
  source 1..120: mol_type = other DNA

SEQ ID NO: 116210 - DNA, 120 bp, synthetic construct
  source 1..120: mol_type = other DNA
gggtacagtccatcaggaaaagaaatcccccgctggctggatcccagtggtcatgaatcaaagctttggtttaaagtcaatagggggcaactggaagattagagtcccatttgccattta

SEQ ID NO: 116211 - DNA, 120 bp, synthetic construct
  source 1..120: mol_type = other DNA
ctctgacaggatttatgttacatgtgattcattcaggcactggtgttcagaatgaaagtgtgatgataatttaatcagagctgcaaaggtgtgttctaaatactgcataaacctaatcat

SEQ ID NO: 116212 - DNA, 120 bp, synthetic construct; identical to SEQ ID NO: 476
  source 1..120: mol_type = other DNA

SEQ ID NO: 116213 - DNA, 120 bp, synthetic construct; identical to SEQ ID NO: 477
  source 1..120: mol_type = other DNA

SEQ ID NO: 116214 - DNA, 120 bp, synthetic construct
  source 1..120: mol_type = other DNA
cttaaaaatttacacttagagggagtctcctggctttctaacagatattactaaccagaggactcacagtcccttctactcctagttcctgtctgtagcataatacaaacctattcaact

SEQ ID NO: 116215 - DNA, 120 bp, synthetic construct; identical to SEQ ID NO: 116191
  source 1..120: mol_type = other DNA

SEQ ID NO: 116216 - DNA, 120 bp, synthetic construct; identical to SEQ ID NO: 116190
  source 1..120: mol_type = other DNA

SEQ ID NO: 116217 - DNA, 120 bp, synthetic construct
  source 1..120: mol_type = other DNA
gcaaaggtccctcctactttatccaccagccacaaaactttgtggaatggtcaaggtaacagccccaagaaatattccccatctaattcaataatatactttgggttgttaaacatgtat

SEQ ID NO: 116218 - DNA, 120 bp, synthetic construct
  source 1..120: mol_type = other DNA
tcccaaagtgctgggattacaggcgtgaaccaccgtgcccggcccctgattttgttttattgcttgaaagcctgcacaggagaaagataagagttttgttttgtgaatggtgagaaagtc

SEQ ID NO: 116219 - DNA, 120 bp, synthetic construct
  source 1..120: mol_type = other DNA
tgcacaattttgtatttaacattaaataattcaccattctgagcattatttcatttgctcctttttaaaattttctacactactcctttttcccgttatataactcagtacatattatgc

SEQ ID NO: 116220 - DNA, 120 bp, synthetic construct
  source 1..120: mol_type = other DNA
atggtcacatccaatacacatgcttctcaaaatttcatacagaaagatatcattgttggcttcttcatgatgcagagtaatatgcactgcaaaaaaaaaaaaaaagaaaacatgcataga

SEQ ID NO: 116221 - DNA, 120 bp, synthetic construct; identical to SEQ ID NO: 116185
  source 1..120: mol_type = other DNA

SEQ ID NO: 116222 - DNA, 120 bp, synthetic construct
  source 1..120: mol_type = other DNA
tataacttttaagacccaaaatgtcaaataatgcataaggtagtagaataaaataggagcccaggcatggtggcacacacctccaatcccaccacttggggagaccaaggagtgagaatg

SEQ ID NO: 116223 - DNA, 120 bp, synthetic construct
  source 1..120: mol_type = other DNA
cccttcctgtgtccaagtgatctcactgttcaattcccacctatgagtgagaatatgcactgttcgttttttcgtccttgtgatagtttgctgagaatgatggtttccagcttcatccat

SEQ ID NO: 116224 - DNA, 120 bp, synthetic construct
  source 1..120: mol_type = other DNA
taaaacaccaaaagcaatggcaataaaaaccaaaattgaccaatgggatctaattaaactaaagagctcctgcacagcaaaagcaactatcatcagagtgaacaggcaacctacagaatg

SEQ ID NO: 116225 - DNA, 120 bp, synthetic construct
  source 1..120: mol_type = other DNA
ggacgtatctcaaaataataagagctatttatgacaatcccacagccaataaatatcatactgagtgggcaaaaactggaagcatgcccttagaaaagtggtgcaagacagggatactct

SEQ ID NO: 116226 - DNA, 120 bp, synthetic construct
  source 1..120: mol_type = other DNA
agtgctataaatttccctctacacactgctttaaatgtgtcccagagattgcagtgtgttgtgtctttgttctcgttggtttcaaagaacatctttatttctgccttcatttcgttatgt

SEQ ID NO: 116227 - DNA, 120 bp, synthetic construct; identical to SEQ ID NO: 12215
  source 1..120: mol_type = other DNA

SEQ ID NO: 116228 - DNA, 120 bp, synthetic construct; identical to SEQ ID NO: 12216
  source 1..120: mol_type = other DNA

SEQ ID NO: 116229 - DNA, 120 bp, synthetic construct
  source 1..120: mol_type = other DNA
agtgttattgtgtcagcgaatgattgaagcagtccctaaaggcttacaatgttaggccctttgcgtagttgtatgtagcctgagtttttgttaaatgagtgatttaaaatcaatactgat

SEQ ID NO: 116230 - DNA, 120 bp, synthetic construct; identical to SEQ ID NO: 12217
  source 1..120: mol_type = other DNA

SEQ ID NO: 116231 - DNA, 120 bp, synthetic construct; identical to SEQ ID NO: 12218
  source 1..120: mol_type = other DNA

SEQ ID NO: 116232 - DNA, 120 bp, synthetic construct; identical to SEQ ID NO: 12219
  source 1..120: mol_type = other DNA

SEQ ID NO: 116233 - DNA, 120 bp, synthetic construct; identical to SEQ ID NO: 12220
  source 1..120: mol_type = other DNA

SEQ ID NO: 116234 - DNA, 120 bp, synthetic construct; identical to SEQ ID NO: 12221
  source 1..120: mol_type = other DNA

SEQ ID NO: 116235 - DNA, 120 bp, synthetic construct; identical to SEQ ID NO: 12222
  source 1..120: mol_type = other DNA

SEQ ID NO: 116236 - DNA, 120 bp, synthetic construct
  source 1..120: mol_type = other DNA
cacacacacacacacacacacacacacacaaacacacaaacacacatatacatatacatgtatacacactcatggtccacatatatatccatacacactttcgtgctccccttccgcttt

SEQ ID NO: 116237 - DNA, 120 bp, synthetic construct; identical to SEQ ID NO: 12223
  source 1..120: mol_type = other DNA

SEQ ID NO: 116238 - DNA, 120 bp, synthetic construct; identical to SEQ ID NO: 12224
  source 1..120: mol_type = other DNA

SEQ ID NO: 116239 - DNA, 120 bp, synthetic construct
  source 1..120: mol_type = other DNA
tacaagctgattgaatggtacccactcaaactgagggatgatggtcccactcagctcaccaactcacatgtctctctcctccggaaacaccttcacagacccacccagaaacaatgctgc

SEQ ID NO: 116240 - DNA, 120 bp, synthetic construct
  source 1..120: mol_type = other DNA
attctaagatttttcatttctttcactaaaattcagcagtgttatcaaataaaggagagtaaagaaaaggacttaaaattgccaaagaccatagtttatatattagtcagggctctccag

SEQ ID NO: 116241 - DNA, 120 bp, synthetic construct; identical to SEQ ID NO: 12225
  source 1..120: mol_type = other DNA

SEQ ID NO: 116242 - DNA, 120 bp, synthetic construct; identical to SEQ ID NO: 12226
  source 1..120: mol_type = other DNA

SEQ ID NO: 116243 - DNA, 120 bp, synthetic construct
  source 1..120: mol_type = other DNA
gcatctctcatcattaccttactaatttaaagctatgtgtaaatgccgaatgaatggattaacattcattaacgtcttctcaattcaattgtataatattaatacactcattacacacat

SEQ ID NO: 116244 - DNA, 120 bp, synthetic construct
  source 1..120: mol_type = other DNA
gatatatgttctgagaaatgtgtaaggaggttttatttatttactttttgagatggagacccactgtgtcacccaggctggagtgcagtggtgcaatctcggctcactgcaacctccgcc

SEQ ID NO: 116245 - DNA, 120 bp, synthetic construct
  source 1..120: mol_type = other DNA
ctcccggctttatagtagatattactgactagatgactcacaaccccttctactcctagtgcctgtctgtaacacaataccaatctattcaatttcccatttttctgaatgtggatctgg

SEQ ID NO: 116246 - DNA, 120 bp, synthetic construct
  source 1..120: mol_type = other DNA
ggacaataaagtaacatgcagaccgtttcatagggagggggcccagaatgagagacaaataagtccccagtaaatggcatttcttctgtttcccttctgcttcgtcaaatctcggaggtt

SEQ ID NO: 116247 - DNA, 120 bp, synthetic construct; identical to SEQ ID NO: 473
  source 1..120: mol_type = other DNA

SEQ ID NO: 116248 - DNA, 120 bp, synthetic construct; identical to SEQ ID NO: 474
  source 1..120: mol_type = other DNA

SEQ ID NO: 116249 - DNA, 120 bp, synthetic construct
  source 1..120: mol_type = other DNA
agtcttgaagacattctctaaagaagtgaagggagaagaggcccagagagtctatgctccatggtaacctcgaataacctactcagtcatctttcccagaacctattacccaaatgagtg

SEQ ID NO: 116250 - DNA, 120 bp, synthetic construct
  source 1..120: mol_type = other DNA
tcgatttacagtttccgaattttaaagcacagtgggagagtctgagtcagaattcagtctgatctttcctattttttgccccaaatgtttaaggttccttagccttacggccttgagaat

SEQ ID NO: 116251 - DNA, 120 bp, synthetic construct
  source 1..120: mol_type = other DNA
tctagataactgggtaaaaatccataagtacatgtcataagtgatcatttaaagcagatttctgcaaaatcttttaccagtctctctgttggccctccatgctagcttggggctgaagct

SEQ ID NO: 116252 - DNA, 120 bp, synthetic construct
  source 1..120: mol_type = other DNA
gataaaggggttcccacagcagatgaacacatatctgatttgtctctggtcagaggtgaacacagcaaaagataggcctgagaggaggtgagaaggagcaattagggatggtgtgtatag

SEQ ID NO: 116253 - DNA, 120 bp, synthetic construct; identical to SEQ ID NO: 12218
  source 1..120: mol_type = other DNA

SEQ ID NO: 116254 - DNA, 120 bp, synthetic construct
  source 1..120: mol_type = other DNA
taagggagcttcggcagtagtaaaattacagggttaatttattcatataggtattacagggtaaccaaacaagattccaaattctttcatcagcaaagcccagtgtaatcctaaaccagg

SEQ ID NO: 116255 - DNA, 120 bp, synthetic construct
  source 1..120: mol_type = other DNA
tgttatcattaatataactatttaataataattatcattattatcagtattgattttaaatcactcatttaacaaaaactcaggctacatacaactacgcaaagggcctaacattgtaag

SEQ ID NO: 116256 - DNA, 120 bp, synthetic construct
  source 1..120: mol_type = other DNA
ccccatgtgatactgaaagtaatatcatcctcttctctcctggatcatgggaacaatatcactagggtggtgtacactttctgcaatattggcagtaatatcctcttcgccttggaatat

SEQ ID NO: 116257 - DNA, 120 bp, synthetic construct
  source 1..120: mol_type = other DNA
cgatattgctgtaatatcatcctctcgccctccgggtattaagaacaatatcacagaaggggcgtacactccctgtgatattgggagtaatatcattttctccttccatgaatattagga

SEQ ID NO: 116258 - DNA, 120 bp, synthetic construct
  source 1..120: mol_type = other DNA
aaggatgcccctgggggtgctagctttcttgcatttctttttttttttttttcttctgttgtgttttttttgtttttgtttttgttttattatactttaagttttagagtacatgtgcac

SEQ ID NO: 116259 - DNA, 120 bp, synthetic construct
  source 1..120: mol_type = other DNA
aaaacagagatatagatcaatggaacagaacagagccctcagaaataacgacgcatatctacaactatctgatctttgacaaacctgagaaaaacaagcaatggggaaaggattccctat

SEQ ID NO: 116260 - DNA, 120 bp, synthetic construct
  source 1..120: mol_type = other DNA
tcctgggcctcccaaagtgctgggattacaggcgtgagccaccgcgcccagcctttactagtgaattctattgagcatataaagaagaaatgatagcagttatttaattcttttcagaaa

SEQ ID NO: 116261 - DNA, 120 bp, synthetic construct
  source 1..120: mol_type = other DNA
cccagtttccgcagctgtaaaacaaaagactgcagtgaaaaaaactggtcccttgaagatatgtgtgtgtgtgtgtgtgtgtgtgtgtgtgtgtgtgtgtctacattttttactcaaatt

SEQ ID NO: 116262 - DNA, 120 bp, synthetic construct; identical to SEQ ID NO: 11891
  source 1..120: mol_type = other DNA

SEQ ID NO: 116263 - DNA, 120 bp, synthetic construct; identical to SEQ ID NO: 11892
  source 1..120: mol_type = other DNA

SEQ ID NO: 116264 - DNA, 120 bp, synthetic construct
  source 1..120: mol_type = other DNA
gaaggtcgaggctgcagtgaactgagatcgagccactgcactccagccttggtgacagagtgagaccttgtctcaaatatatatatatagatagatagatagatagatagatatagatat

SEQ ID NO: 116265 - DNA, 120 bp, synthetic construct
  source 1..120: mol_type = other DNA
aggagaatcatttgaacccaggaggtggaagttgcagtgagctcagatcgcaccattgcactccagcctgggtaacaagaatgaaactccatctcaaaaaaaaagaaaaagaaaagaaag

SEQ ID NO: 116266 - DNA, 120 bp, synthetic construct
  source 1..120: mol_type = other DNA
cccgtgctctctgaaatatgtgctgtgtccactcagggttaaatggattaagggcggtgcaagatgtgctttgttaaacagatgcttgaaggcagcatgctccttaagagtcatcaccac

SEQ ID NO: 116267 - DNA, 120 bp, synthetic construct; identical to SEQ ID NO: 29783
  source 1..120: mol_type = other DNA

SEQ ID NO: 116268 - DNA, 120 bp, synthetic construct
  source 1..120: mol_type = other DNA
agaagattgctcgagcccaggagttcaaggctgcagtgagctctgattgtgccactgcactccagcctgagtgacagagcaaaacctggtttcctaagggggggataaaagagggagaga

SEQ ID NO: 116269 - DNA, 120 bp, synthetic construct; identical to SEQ ID NO: 9773
  source 1..120: mol_type = other DNA

SEQ ID NO: 116270 - DNA, 120 bp, synthetic construct; identical to SEQ ID NO: 9774
  source 1..120: mol_type = other DNA

SEQ ID NO: 116271 - DNA, 120 bp, synthetic construct; identical to SEQ ID NO: 25923
  source 1..120: mol_type = other DNA

SEQ ID NO: 116272 - DNA, 120 bp, synthetic construct; identical to SEQ ID NO: 25924
  source 1..120: mol_type = other DNA

SEQ ID NO: 116273 - DNA, 120 bp, synthetic construct
  source 1..120: mol_type = other DNA
aatacaacgtgtgacccctgattgaatctgagatcttgaaatcaaaacaaaacaaaacaaaaaaatgctgggaacaggctgggtgtggtggctcacacctataatcccagcattttgggg

SEQ ID NO: 116274 - DNA, 120 bp, synthetic construct
  source 1..120: mol_type = other DNA
gtcttgacggaccctgaatcttcctttcatttgaataaatgctatccatctatctatctatctacttacctatctatctatctgaacacttaaggaccagtggaaaaaaatcaagtacca

SEQ ID NO: 116275 - DNA, 120 bp, synthetic construct
  source 1..120: mol_type = other DNA
gtggcaagttaaagaaatacaaggaactcacccttactagaaaccaaggcatttgtgggaagaacaattcatacattgagcatcaaatacatcaagtacgttttggaagacatcgagagg

SEQ ID NO: 116276 - DNA, 120 bp, synthetic construct
  source 1..120: mol_type = other DNA
gaccaaaacctgcacaatacttgaaagctttgtcaacgttcaatcaattcggccagcatgcaagaagcatccccccaaaatattgtatgtaatttggtggcttaggaacatactttggca

SEQ ID NO: 116277 - DNA, 120 bp, synthetic construct
  source 1..120: mol_type = other DNA
tgggattacaggcatgagccatggcacctggctgctatttatacaataattatgtgcataattatctttaatggtgcctgaaagttatttttaacatggttgccatactaaccgattttg

SEQ ID NO: 116278 - DNA, 120 bp, synthetic construct
  source 1..120: mol_type = other DNA
aggcagaggttgcagtgagctgagaccgagccattgcactccagccttggcgacagagcgagataccgtctcaaaaaaaaaaaaaaaaaaaaaaaaaagcatgtgataatatgtagtgaa

SEQ ID NO: 116279 - DNA, 120 bp, synthetic construct
  source 1..120: mol_type = other DNA
tcagcttactgcaagctccacctcccaggttcaaacaattctcctgccgcagcctcctgagtagctggtattacaggtgcccaccaccacgccaggatgatttttttggatttttagtag

SEQ ID NO: 116280 - DNA, 120 bp, synthetic construct
  source 1..120: mol_type = other DNA
cacccaggctttaagcttgtctaggtaactgggaatgactgagagcacggcttgtttaacaaaaatgccatgaggactgttgtctcattttctcatttgcatcacagttgttcgttgttc

SEQ ID NO: 116281 - DNA, 120 bp, synthetic construct
  source 1..120: mol_type = other DNA
aagttgggcttctctgaggtttttctgcacgaagggcagcgcattggtgctctgccttcttctgagcagaggcagaggcagggcctgcaaaagctgtgcccacagtcaatggtgaccgga

SEQ ID NO: 116282 - DNA, 120 bp, synthetic construct
  source 1..120: mol_type = other DNA
cgtttatccaatatactagaattcatttggctagcttgtgtgggcttctctgtttgcaactcctattacatcaattgaaatcactacattttcttgggatgaaatcactatcttgcaacg

SEQ ID NO: 116283 - DNA, 120 bp, synthetic construct
  source 1..120: mol_type = other DNA
gttctcttcaatataatttggagtactatccacacagagagatcatctaaaatcgttagaactctaggccaggggaaggttagtaatactccatttatatgccccagttcctcctctctc

SEQ ID NO: 116284 - DNA, 120 bp, synthetic construct
  source 1..120: mol_type = other DNA
atacgttattctcagacattatacaacttctaaagtcattaaaagtcattgcctccctctgcccatcacaccccttgagggtatgcagaaatcctggaaatatttcagagagcagaaaac

SEQ ID NO: 116285 - DNA, 120 bp, synthetic construct
  source 1..120: mol_type = other DNA
gaccataccacaggggaaataatgatttaatgtctacatctgcatagttggtttcagggcatatgcaaaatgtttttttttcttcaatagaaaactctccttgtattatttgtttttaag

SEQ ID NO: 116286 - DNA, 120 bp, synthetic construct
  source 1..120: mol_type = other DNA
agtacacattcaaggtggttatcccattcataaccacatagtaattacattccatgaagttacaatgagctcacaggctctcgcacatagtgtcttaggacagtatttgcctcatatgtg

SEQ ID NO: 116287 - DNA, 120 bp, synthetic construct
  source 1..120: mol_type = other DNA
aggtttataccactttatgcttagcaagtaattatatgtcagtttaaataaggacagcctccattattctaagtcctgttcctgttccccatcatcttatataggaaccttcctctttcc

SEQ ID NO: 116288 - DNA, 120 bp, synthetic construct
  source 1..120: mol_type = other DNA
aagctcacaaaacataggtgaaaatccaaaaggagtgctgggttggagccctaaggtgagtaattttatcatctcagatcacttggaaaaaagcagcgagtccaaaagaagctggggata

SEQ ID NO: 116289 - DNA, 120 bp, synthetic construct; identical to SEQ ID NO: 471
  source 1..120: mol_type = other DNA

SEQ ID NO: 116290 - DNA, 120 bp, synthetic construct; identical to SEQ ID NO: 475
  source 1..120: mol_type = other DNA

SEQ ID NO: 116291 - DNA, 120 bp, synthetic construct
  source 1..120: mol_type = other DNA
gtctgcccgacacccgcagcatcgcctgggacgactctttgtaccctttccaggaggaggaggagcacggcgtcgagggcgtggagagcgtcctggaggagggcgtcctggaggagggcg

SEQ ID NO: 116292 - DNA, 120 bp, synthetic construct
  source 1..120: mol_type = other DNA
gttcgggttgaaagccgccatgcagggtcgaaccgatcgcatccgagccctgagctagcaggggcgggtgtccacgcgagggcccccgccgtgggaggtcgccaaaggagtggccactta

SEQ ID NO: 116293 - DNA, 120 bp, synthetic construct; identical to SEQ ID NO: 12206
  source 1..120: mol_type = other DNA

SEQ ID NO: 116294 - DNA, 120 bp, synthetic construct
  source 1..120: mol_type = other DNA
catgctggagtgcaatggcacaatcagaactcactgcagttttatagtcctggactcaagcaatcctcccaactcagcccctgagaagctgggacaacaggtgcacaccaccactcaagg

SEQ ID NO: 116295 - DNA, 120 bp, synthetic construct; identical to SEQ ID NO: 12207
  source 1..120: mol_type = other DNA

SEQ ID NO: 116296 - DNA, 120 bp, synthetic construct
  source 1..120: mol_type = other DNA
aagaaaagtaggagggacaagagtatttggctttaaggaaagcacctggtgttcctcacaatgcttttgttcccgtcctatagctacaaaattaggcagatgggacaccaagttgtaatg

SEQ ID NO: 116297 - DNA, 120 bp, synthetic construct; identical to SEQ ID NO: 12208
  source 1..120: mol_type = other DNA

SEQ ID NO: 116298 - DNA, 120 bp, synthetic construct
  source 1..120: mol_type = other DNA
gaaatgattccttgctatataagcctttctgaggatgtgagatatgtgatatttggagatgaccatctcagtgctcccacggatccccagggagtggacagctttgctgtgtggggagcg

SEQ ID NO: 116299 - DNA, 120 bp, synthetic construct
  source 1..120: mol_type = other DNA
ctgcttggcattccagcctcaaattatttccttattgggtcccttggttgaggattttcccatttaagttttattagttttgacatgtaggtaatacatagttttccgaaacatgtgcat

SEQ ID NO: 116300 - DNA, 120 bp, synthetic construct; identical to SEQ ID NO: 12209
  source 1..120: mol_type = other DNA

SEQ ID NO: 116301 - DNA, 120 bp, synthetic construct; identical to SEQ ID NO: 12210
  source 1..120: mol_type = other DNA

SEQ ID NO: 116302 - DNA, 120 bp, synthetic construct; identical to SEQ ID NO: 12211
  source 1..120: mol_type = other DNA

SEQ ID NO: 116303 - DNA, 120 bp, synthetic construct; identical to SEQ ID NO: 12212
  source 1..120: mol_type = other DNA

SEQ ID NO: 116304 - DNA, 120 bp, synthetic construct; identical to SEQ ID NO: 12213
  source 1..120: mol_type = other DNA

SEQ ID NO: 116305 - DNA, 120 bp, synthetic construct
  source 1..120: mol_type = other DNA
gttataacgtaagccaaagcgaacgttaaaaatgttgaattactttgaaaattcttgttgcaaaggtcttatttgctgtctcttcaaaatttgcaatttgcagactagatttgaaagctg

SEQ ID NO: 116306 - DNA, 120 bp, synthetic construct
  source 1..120: mol_type = other DNA
tgtatttttagtagagacggggtttcaccatgttgctcaggctggtctcaaactcctgatgtcaggtaatctgcccacctcggcctcccaaagtgctgggattacaagcgtgagccactg

SEQ ID NO: 116307 - DNA, 120 bp, synthetic construct
  source 1..120: mol_type = other DNA
acatactaatttgcaatgccatggactgattaaaaagacagccacttcatctttttctaggatatgctggcttttatgaattttataattttttaaatgtctattaatctgcaaatggtg

SEQ ID NO: 116308 - DNA, 120 bp, synthetic construct; identical to SEQ ID NO: 116276
  source 1..120: mol_type = other DNA

SEQ ID NO: 116309 - DNA, 120 bp, synthetic construct
  source 1..120: mol_type = other DNA
ttccatttcagaaagcattctggtctagatagaatagaaggatatcaacccaggaagagaacagaactaatattttgtgtgtgtgtgtgtgagacagggtctcactctgtcacccagact

SEQ ID NO: 116310 - DNA, 120 bp, synthetic construct; identical to SEQ ID NO: 12214
  source 1..120: mol_type = other DNA

SEQ ID NO: 116311 - DNA, 120 bp, synthetic construct; identical to SEQ ID NO: 9445
  source 1..120: mol_type = other DNA

SEQ ID NO: 116312 - DNA, 120 bp, synthetic construct
  source 1..120: mol_type = other DNA
aacgcagttcctcaccagcaacaaaacaaagctggatggagaatgactttgacaagttgagagaagaaggcttcagatgatccaactactccgagctacaggaggaaattcaaaccaaag

SEQ ID NO: 116313 - DNA, 120 bp, synthetic construct
  source 1..120: mol_type = other DNA
acaccctaacatcacaattaaaagaactagaaaagcaagagcaaacacattcaaaagctagcagaaggcaagaaataactaaaatcagagcagaactgaaggaaaaagagacacaataaa

SEQ ID NO: 116314 - DNA, 120 bp, synthetic construct
  source 1..120: mol_type = other DNA
acaaacccacagccaatatcatactgaatgggcaaaaactggaagcattccctttgaaaactggcacaagacagggatgccctctctcaccactcctattcaacatagtgttgaaagttc

SEQ ID NO: 116315 - DNA, 120 bp, synthetic construct
  source 1..120: mol_type = other DNA
taaatggtgctgggaaaactggctagccatatgtagaaagctggaactggatcccttccctacaccttatacaaaaattaattcaagactgattaaagacttaaacattagacctaaaac

SEQ ID NO: 116316 - DNA, 120 bp, synthetic construct
  source 1..120: mol_type = other DNA
gcaaggacaaaaaaccaaacactgcatgttctcactcataggtgggaattgaacactgagaacacatggacacaggaaggggaacatcacactctggggactgttgtggggtggggggag

SEQ ID NO: 116317 - DNA, 120 bp, synthetic construct; identical to SEQ ID NO: 5071
  source 1..120: mol_type = other DNA

SEQ ID NO: 116318 - DNA, 120 bp, synthetic construct; identical to SEQ ID NO: 24181
  source 1..120: mol_type = other DNA

SEQ ID NO: 116319 - DNA, 120 bp, synthetic construct; identical to SEQ ID NO: 29307
  source 1..120: mol_type = other DNA

SEQ ID NO: 116320 - DNA, 120 bp, synthetic construct
  source 1..120: mol_type = other DNA
atcttgagataaatggtagtcctcttaagggttttaagtcatggagtgctgtgttcatgtatacttctttaaagatcagtctggccaggtgcggtggctcacacctgtaatcctagcact

SEQ ID NO: 116321 - DNA, 120 bp, synthetic construct; identical to SEQ ID NO: 29308
  source 1..120: mol_type = other DNA

SEQ ID NO: 116322 - DNA, 120 bp, synthetic construct
  source 1..120: mol_type = other DNA
agtgagctacagttgcaccactgcgctccagcctgggtgacagagcaagatcctgtctctaaaaataaagactcaaggctgggcacggtggctcacgcctgtaatcccagcactttggga

SEQ ID NO: 116323 - DNA, 120 bp, synthetic construct; identical to SEQ ID NO: 29309
  source 1..120: mol_type = other DNA

SEQ ID NO: 116324 - DNA, 120 bp, synthetic construct; identical to SEQ ID NO: 29310
  source 1..120: mol_type = other DNA

SEQ ID NO: 116325 - DNA, 120 bp, synthetic construct; identical to SEQ ID NO: 29311
  source 1..120: mol_type = other DNA

SEQ ID NO: 116326 - DNA, 120 bp, synthetic construct
  source 1..120: mol_type = other DNA
aaaaattagccgggcatggtggcgggcacctgtagtcccagctactccggaggctgagtcaggagaatggcatgaacttgggaggaggaggttgcagtgagccgagattgcgccacagca

SEQ ID NO: 116327 - DNA, 120 bp, synthetic construct; identical to SEQ ID NO: 29312
  source 1..120: mol_type = other DNA

SEQ ID NO: 116328 - DNA, 120 bp, synthetic construct; identical to SEQ ID NO: 29313
  source 1..120: mol_type = other DNA

SEQ ID NO: 116329 - DNA, 120 bp, synthetic construct; identical to SEQ ID NO: 29314
  source 1..120: mol_type = other DNA

SEQ ID NO: 116330 - DNA, 120 bp, synthetic construct; identical to SEQ ID NO: 29315
  source 1..120: mol_type = other DNA

SEQ ID NO: 116331 - DNA, 120 bp, synthetic construct; identical to SEQ ID NO: 29316
  source 1..120: mol_type = other DNA

SEQ ID NO: 116332 - DNA, 120 bp, synthetic construct
  source 1..120: mol_type = other DNA
ttttttttttattttattgttttatttactttagtagagacaggggtctcactttgttgcctgggctggttttgaactcctggcctcaagcaatcctcctacctcagcctcccaaagtgc

SEQ ID NO: 116333 - DNA, 120 bp, synthetic construct
  source 1..120: mol_type = other DNA
taatcccagcactttgggaggtcaagactggaggatcgcttgaagccaggagttcaagaccagcctaggcaacaaagctacaaaccatcttaccagcaaattaaaaactaaaaaataaat

SEQ ID NO: 116334 - DNA, 120 bp, synthetic construct; identical to SEQ ID NO: 29317
  source 1..120: mol_type = other DNA

SEQ ID NO: 116335 - DNA, 120 bp, synthetic construct
  source 1..120: mol_type = other DNA
ggctaatttttaatatttttgtagagatggggcactttctatgttgcccaggctggtctcagactcctggtcccaagtgatcctcccacctcagcctccccagtagctgggattacaagc

SEQ ID NO: 116336 - DNA, 120 bp, synthetic construct; identical to SEQ ID NO: 29318
  source 1..120: mol_type = other DNA

SEQ ID NO: 116337 - DNA, 120 bp, synthetic construct; identical to SEQ ID NO: 29319
  source 1..120: mol_type = other DNA

SEQ ID NO: 116338 - DNA, 120 bp, synthetic construct
  source 1..120: mol_type = other DNA
ggaggatcgcttgaggccaggaattttagaccagccggggcaacatagtgaaaccccatctctacaaaataaaaataaaaattagctgggcgtggtggcgtgtgcctgtagtttcagcta

SEQ ID NO: 116339 - DNA, 120 bp, synthetic construct; identical to SEQ ID NO: 29320
  source 1..120: mol_type = other DNA

SEQ ID NO: 116340 - DNA, 120 bp, synthetic construct; identical to SEQ ID NO: 14338
  source 1..120: mol_type = other DNA

SEQ ID NO: 116341 - DNA, 120 bp, synthetic construct; identical to SEQ ID NO: 26318
  source 1..120: mol_type = other DNA

SEQ ID NO: 116342 - DNA, 120 bp, synthetic construct
  source 1..120: mol_type = other DNA
acttttttatattcagttttgcttttcaaaatatacctttaaggaaatggtctgggtaaggtggctcacacctgtaatcccagcactttgagaggctgaggtgggaggttggcttgaggc

SEQ ID NO: 116343 - DNA, 120 bp, synthetic construct; identical to SEQ ID NO: 26320
  source 1..120: mol_type = other DNA

SEQ ID NO: 116344 - DNA, 120 bp, synthetic construct; identical to SEQ ID NO: 26321
  source 1..120: mol_type = other DNA

SEQ ID NO: 116345 - DNA, 120 bp, synthetic construct; identical to SEQ ID NO: 26322
  source 1..120: mol_type = other DNA

SEQ ID NO: 116346 - DNA, 120 bp, synthetic construct; identical to SEQ ID NO: 26323
  source 1..120: mol_type = other DNA

SEQ ID NO: 116347 - DNA, 120 bp, synthetic construct
  source 1..120: mol_type = other DNA
aactcctgggctcaagtgatcctcccaccttggcctcccaaaatattgggattacaggtgtgagcctccacacctggcctataaatgtctttttatacatggttttaattaaaattcaaa

SEQ ID NO: 116348 - DNA, 120 bp, synthetic construct; identical to SEQ ID NO: 26324
  source 1..120: mol_type = other DNA

SEQ ID NO: 116349 - DNA, 120 bp, synthetic construct; identical to SEQ ID NO: 26325
  source 1..120: mol_type = other DNA

SEQ ID NO: 116350 - DNA, 120 bp, synthetic construct; identical to SEQ ID NO: 26326
  source 1..120: mol_type = other DNA

SEQ ID NO: 116351 - DNA, 120 bp, synthetic construct; identical to SEQ ID NO: 26327
  source 1..120: mol_type = other DNA

SEQ ID NO: 116352 - DNA, 120 bp, synthetic construct; identical to SEQ ID NO: 23795
  source 1..120: mol_type = other DNA

SEQ ID NO: 116353 - DNA, 120 bp, synthetic construct; identical to SEQ ID NO: 23796
  source 1..120: mol_type = other DNA

SEQ ID NO: 116354 - DNA, 120 bp, synthetic construct; identical to SEQ ID NO: 23797
  source 1..120: mol_type = other DNA

SEQ ID NO: 116355 - DNA, 120 bp, synthetic construct; identical to SEQ ID NO: 22046
  source 1..120: mol_type = other DNA

SEQ ID NO: 116356 - DNA, 120 bp, synthetic construct; identical to SEQ ID NO: 22047
  source 1..120: mol_type = other DNA

SEQ ID NO: 116357 - DNA, 120 bp, synthetic construct; identical to SEQ ID NO: 22048
  source 1..120: mol_type = other DNA

SEQ ID NO: 116358 - DNA, 120 bp, synthetic construct; identical to SEQ ID NO: 22049
  source 1..120: mol_type = other DNA

SEQ ID NO: 116359 - DNA, 120 bp, synthetic construct
  source 1..120: mol_type = other DNA
ttaggatgttttctctcttatgaaatggaaagtatatcacaaaagaggaaagtagagatttccagtgtgggaccatactgttcctttgggtgggtaccttagagttcctggctaacggag

SEQ ID NO: 116360 - DNA, 120 bp, synthetic construct
  source 1..120: mol_type = other DNA
tggggaaacaggtggatttggatgggctctggcaggccaagcccagggcttcatgcagtcagtgtgtggggaaacaggtggatttggatgggctctggcaggccaagcccagggcttcat

SEQ ID NO: 116361 - DNA, 120 bp, synthetic construct
  source 1..120: mol_type = other DNA
caggccaagcccagggcttcattcagtcagtgtgtggggaaacaggtggatttggatgggctctggcaggccaagcccagggcttcattcagtgtgtggggaaacaggtggatttggatg

SEQ ID NO: 116362 - DNA, 120 bp, synthetic construct; identical to SEQ ID NO: 116360
  source 1..120: mol_type = other DNA

SEQ ID NO: 116363 - DNA, 120 bp, synthetic construct; identical to SEQ ID NO: 32852
  source 1..120: mol_type = other DNA

SEQ ID NO: 116364 - DNA, 120 bp, synthetic construct
  source 1..120: mol_type = other DNA
aattctctccctgttgcccaaaggggagactcatgtgtcctgcagtggaggaaagggaggagggacctcacctccttaaacctcttgcaaggaaatgtcttgagccgggcagcccgctgg

SEQ ID NO: 116365 - DNA, 120 bp, synthetic construct
  source 1..120: mol_type = other DNA
tttttttagttttctggtagagatggagtcttaattactgtgttgcccaggctggtttcattcctgggctcaagcgatcttcccgccttggcccccaaagcactgggattataggaatga

SEQ ID NO: 116366 - DNA, 120 bp, synthetic construct
  source 1..120: mol_type = other DNA
atttttttattctttttgagatggagtctcgctctgtcgcccaggctggagtgcaatggcgcgatctagactcaccgcaacctctgcctcccaggttcaagcgattctcctgtctcagcc

SEQ ID NO: 116367 - DNA, 120 bp, synthetic construct
  source 1..120: mol_type = other DNA
tttttttttttttgagatggagtctcgctctgtcgctcaggctggagtgcaatggcgcaatcttggctcaccacagcctccgcctcctgggtttaagcgattctcctgcctcagcctccc

SEQ ID NO: 116368 - DNA, 120 bp, synthetic construct
  source 1..120: mol_type = other DNA
gtgtacatatatatttatttatttatttgttagagatagggtcttactacgttgcccaggttggcctcaagtgatcttcctgcctcagcctcccaaggtactgggattacaggaatgaga

SEQ ID NO: 116369 - DNA, 120 bp, synthetic construct
  source 1..120: mol_type = other DNA
agttcccagcgtgaccacgacaccccaactcctcccttagactggctctgtcccttaagaagccccagatcccccagggcaaggtcctgtctcctctctcaatccaccaccgctctctgc

SEQ ID NO: 116370 - DNA, 120 bp, synthetic construct
  source 1..120: mol_type = other DNA
atctcaaaaaagaaaaaaaagcaaaacggctagggctttcctgctagtgtgagactctgatatgggaaaggagacagcatttcccgggctgacttcatgacaggaccctttaggaacaag

SEQ ID NO: 116371 - DNA, 120 bp, synthetic construct
  source 1..120: mol_type = other DNA
actacaggtgcccgctaccatgcctggctaagtttttgtatgtttagtggagatcagatttcaccatgttagccaggatggtctcaatctcctgacctcatgatccgcccacctcgactt

SEQ ID NO: 116372 - DNA, 120 bp, synthetic construct
  source 1..120: mol_type = other DNA
cagtgccatccccacctcacctccttcactcacagcctgcacagctgcatccaggaaggtggctgggctgccataggggtccagatcgatgacgtcaaacctctccgacaccctctggtg

SEQ ID NO: 116373 - DNA, 120 bp, synthetic construct
  source 1..120: mol_type = other DNA
tcaagcgatcctcctgccttggcctctcaaaatgcttgattacaggcatgagtcaccatgcccagctaattacttttcattgtctgtgattactatttggattctagtaaggtcagaaaa

SEQ ID NO: 116374 - DNA, 120 bp, synthetic construct
  source 1..120: mol_type = other DNA
atagtttgccaactcttgcgaaggtcaccaattttgcatgttttgtttcctgatgcatttccagttcttgaaaacggtgcctgacacatagcagacactggatatactatggctcatttg

SEQ ID NO: 116375 - DNA, 120 bp, synthetic construct
  source 1..120: mol_type = other DNA
ctttttgcgtgtccttctctcctggaaccttgactgcagccacccagaggcacaagtcagagaataacaaggtcccctctgagaaacctccccttaatctccaaaatatcgtccctgaaa

SEQ ID NO: 116376 - DNA, 120 bp, synthetic construct
  source 1..120: mol_type = other DNA
tccgaatccctccccgcgctgcctagcccgtcctcacctgctctcgtagccacagaaaaccgaattagtcaaggtgcacgtttcccgaattaggacctgggcgccgccatgttggcacag

SEQ ID NO: 116377 - DNA, 120 bp, synthetic construct; identical to SEQ ID NO: 25678
  source 1..120: mol_type = other DNA

SEQ ID NO: 116378 - DNA, 120 bp, synthetic construct; identical to SEQ ID NO: 25679
  source 1..120: mol_type = other DNA

SEQ ID NO: 116379 - DNA, 120 bp, synthetic construct
  source 1..120: mol_type = other DNA
tgctggtgtaaacaaacctactgacagcacagtaagtttgtttacaccagcatgaccacaaacatgtaagtaacccatgtgctgaaatgttacaacagctatgatgtcactaggccatag

SEQ ID NO: 116380 - DNA, 120 bp, synthetic construct
  source 1..120: mol_type = other DNA
ataaataaataaataaaataaaatataaaaaaaattagctgggcgtggtggctggtgcctgtaatcccagctactcgagaggctgaggcaggagaatcacttgaacctggaaggtggagg

SEQ ID NO: 116381 - DNA, 120 bp, synthetic construct
  source 1..120: mol_type = other DNA
tgaagaactaaatacttttttaattttttttagagagagggtctcactctcgtcacccaatctggagtgcagtagtaagatcttggctcactgcagccttgatttcccaagctcaggtga

SEQ ID NO: 116382 - DNA, 120 bp, synthetic construct
  source 1..120: mol_type = other DNA
caagaaagaaacttcatctcgaaaaaaaaaaaaaaacaataaacaaaaaaacaggctgggtgtggtggctcacgcttgtaatcccagcactttgggagactgaggcaggcagatcacctg

SEQ ID NO: 116383 - DNA, 120 bp, synthetic construct; identical to SEQ ID NO: 23922
  source 1..120: mol_type = other DNA

SEQ ID NO: 116384 - DNA, 120 bp, synthetic construct
  source 1..120: mol_type = other DNA
tgtttctcctctagaaacaggtcattctctaggatgggattggtaaggacaggggcttgggcttcagaaaaaatagggaaagttgaagcagtccagttcctcttgttaaaaataagccat

SEQ ID NO: 116385 - DNA, 120 bp, synthetic construct; identical to SEQ ID NO: 24051
  source 1..120: mol_type = other DNA

SEQ ID NO: 116386 - DNA, 120 bp, synthetic construct
  source 1..120: mol_type = other DNA
ctataaatcatgctgctataaagagacatgcacacgtatgtttattgcggcactattcacaatagcaaagacttggaaccaacccaaatgtccaacaatgatagactggattaagaaaat

SEQ ID NO: 116387 - DNA, 120 bp, synthetic construct
  source 1..120: mol_type = other DNA
agtgtttctcacattcttggcactcagtgaatgttgactgagatctatattgtgcaatgctacacaaggtttgaggagagggaagactgaaaagaccccttgtctttatgatcaggagat

SEQ ID NO: 116388 - DNA, 120 bp, synthetic construct
  source 1..120: mol_type = other DNA
agggacagaaaagtccacatggtgccacccataggttctttcaacatgaagctttccaggaagcagcttaggttaggtagacctcaacctaatatttaagactatcatctaaggcattat

SEQ ID NO: 116389 - DNA, 120 bp, synthetic construct
  source 1..120: mol_type = other DNA
ttatagagaaaggttaagcagattgcccagggtcacagttattacgtacctagttgaataggggtttgaactcaggtactaactaactgtaaaaccctcatgcttaatgactgcccacca

SEQ ID NO: 116390 - DNA, 120 bp, synthetic construct
  source 1..120: mol_type = other DNA
tggattgcacaggctaatgaattgtgctgacattgttgcaaggaggaaccaggactttttcattttttcctgtaggggatatgtcaggagagggtgaaacgtgaaagcattgaagtttgg

SEQ ID NO: 116391 - DNA, 120 bp, synthetic construct
  source 1..120: mol_type = other DNA
atgctgttcttgtgatagtaagtgagttctcatgagatccggtggttttataattgtttggttgttcctcatgcgttcgttctccttcctgctgcctgtgaagaaggtgccttgcttccc

SEQ ID NO: 116392 - DNA, 120 bp, synthetic construct
  source 1..120: mol_type = other DNA
tgttcaatgctggagatttaaagaagaaaagggtagttcatactcttgcggtgttgcaatactacaaaatgtgcacaactggacagtgtgaatgcgtgtgtgcacgtgcacacatgtata

SEQ ID NO: 116393 - DNA, 120 bp, synthetic construct
  source 1..120: mol_type = other DNA
tgcacgctgcggatttccctttctaatttgcagtggagatataaatgtttatggactgtctgcagctgccaaaactgtggtggaaagtggagataccaacatttaaaaatacccaaacag

SEQ ID NO: 116394 - DNA, 120 bp, synthetic construct
  source 1..120: mol_type = other DNA
gcagaagggctgataataactctccactaacttacaaaataacttgaagcacttcatcatttagtgccctttgctaaggtttttctttgctggttttgaataaacccccctatcatctgc

SEQ ID NO: 116395 - DNA, 120 bp, synthetic construct
  source 1..120: mol_type = other DNA
aatgagagagatgtcacaagagaacaaaacctcatggatgcagttaaaacttcaacataaatcatgctgtggggaccctgtgattccctgcacaaaatataaggagctcctttgaacagc

SEQ ID NO: 116396 - DNA, 120 bp, synthetic construct
  source 1..120: mol_type = other DNA
ggtagtgtataaatagcataagttaattgcttatggttctgcaggctgggaagtccaaaataaagactcgggcagaactggtttctggtaagaacccattcctcataggtggcaccttct

SEQ ID NO: 116397 - DNA, 120 bp, synthetic construct
  source 1..120: mol_type = other DNA
aactagcactgagaactggatatagtcaggaaataggtttcactggacaggataatattgttttggtttttaatttgcaagtgttcagatgggtgttctctccaatttacattgaccccc

SEQ ID NO: 116398 - DNA, 120 bp, synthetic construct
  source 1..120: mol_type = other DNA
agctcacagggacctttgcttgctatgctgatgggtttggactgaattaaagcttttgaagaggcatggaaaatatttttaaaagccactgatgtgttcagtttttcattagcagagcat

SEQ ID NO: 116399 - DNA, 120 bp, synthetic construct
  source 1..120: mol_type = other DNA
tgcatgagagacttccccacttgaatctctggtcaatggtaagttcgagcatagagatatgttccataaaggtctctgcctaaactctgaccccctctccaactccaaaacatcacacac

SEQ ID NO: 116400 - DNA, 120 bp, synthetic construct
  source 1..120: mol_type = other DNA
ctgtcttacctgtaaattcaggaggatgtaaaagctgagtccaaaagccagaagaaggaagataaatacaactgtagacctcaacaaagttttcaaaattacctccaacataacaataaa

SEQ ID NO: 116401 - DNA, 120 bp, synthetic construct
  source 1..120: mol_type = other DNA
gcggcactcaactctatcactgtgcttatgacacagcaatgcagaagatatatggtgaaaaaaacatgcttcctggagtcagaaagactttgggtaaatacctgtatcctgactgactag

SEQ ID NO: 116402 - DNA, 120 bp, synthetic construct
  source 1..120: mol_type = other DNA
ttcatccaatagaagtaaacagcaattgctccacattgccactgcagatgagctggtatttcaacaaacaagggcagcacaaaaatgatgcccgtcgtgtagataatccattcaagaaca

SEQ ID NO: 116403 - DNA, 120 bp, synthetic construct
  source 1..120: mol_type = other DNA
tgaacatatacaaaaaaattataaagactttcaacctccatactgagaaaagaaggatcaacttttgccatttatcaaccaaaggtaggacctgcagataatttatacacttggttctga

SEQ ID NO: 116404 - DNA, 120 bp, synthetic construct
  source 1..120: mol_type = other DNA
tgtccactttgagttaaacagaaaatttaactgacaccaatactcatataatttactagagatgaacacaccctcatttaggaatgtccttattaagtgaagttcaaaaattgctaattg

SEQ ID NO: 116405 - DNA, 120 bp, synthetic construct
  source 1..120: mol_type = other DNA
cctcaagttctaagcaaattacgacttaacaaattaatgaaagagccaggatgttagcccatataatctgtcggcaatatgagtgctcttcctagaacacacctctttcttcattgtcag

SEQ ID NO: 116406 - DNA, 120 bp, synthetic construct
  source 1..120: mol_type = other DNA
tacataaatagagggactgatgccaacaagggagcaaaataggaagtcccaggccctccttcctccatagagatatggaattgaaaacaatacacagaacattttctttgtgagcaatcc

SEQ ID NO: 116407 - DNA, 120 bp, synthetic construct
  source 1..120: mol_type = other DNA
ctgaagggagaaataaacagcaacacaataatggtaggcgacttcactatctgactttcagttatggatagaacaaccagacagaagttcaataaggaaacagaagacgtgaaccacagc

SEQ ID NO: 116408 - DNA, 120 bp, synthetic construct
  source 1..120: mol_type = other DNA
ggaactcctacaactcaacaagacaataaataacccaattgacaaatgggtcaaggctgtgaataggcatttctccaaagaagatacatgaatagtcaataagcactattgtttatgact

SEQ ID NO: 116409 - DNA, 120 bp, synthetic construct
  source 1..120: mol_type = other DNA
aacatcgggataaggccatagttctcaccacacctaagcctcagttctaggcaggcctccatttcctcaatagtatcatcattgcttacttgtacatccttccaaatccttttctatatt

SEQ ID NO: 116410 - DNA, 120 bp, synthetic construct
  source 1..120: mol_type = other DNA
ctcaagcattctgggttagtaggtctaagatgggccttaggaaccttcattttaacaagaaccacaataattctgattcaagcagccagagattccagtttaaaaactactactgtgaca

SEQ ID NO: 116411 - DNA, 120 bp, synthetic construct
  source 1..120: mol_type = other DNA
ctgtagtgtagttactgttagatcactgggctattgattatgaactatactaatagcaaaacacaacatactcaaggagagctaaagcgcttacagcaatggttagtcagttgccatcac

SEQ ID NO: 116412 - DNA, 120 bp, synthetic construct
  source 1..120: mol_type = other DNA
ggctgtgaaatatcaccccttgcattttcctgtggtttacacaggagaaaactcttgaatatgtaggtggatagaggtggcaagcaagtgttacctgtgttgtccatggtttatttgatt

SEQ ID NO: 116413 - DNA, 120 bp, synthetic construct
  source 1..120: mol_type = other DNA
agaattataacaaaataaatttcagataatgatgataaaataaacttacataatagtctcggcaggacttgtcttctgtggaatgcaacatgcagaaatctaaaagtacctttgaaagag

SEQ ID NO: 116414 - DNA, 120 bp, synthetic construct
  source 1..120: mol_type = other DNA
ctttgctgggtaccttactgtgacaacttattgttcttaatcaagatttttcatcccagcaatggagtctttctatggtttagttcccatcttctgaactgccccagtctggagtaatgt

SEQ ID NO: 116415 - DNA, 120 bp, synthetic construct
  source 1..120: mol_type = other DNA
tgagattaggtatttatgtgtcctttgatgagatgtaggcacctaaaaagttaatctgtatgccatttgtgtactggactggctccaattttcattaggcatcataaaaaaaccgtccaa

SEQ ID NO: 116416 - DNA, 120 bp, synthetic construct
  source 1..120: mol_type = other DNA
acccattaacttgtcatttacattaggtatttatcctaatgctatcactcccctctccccccaccccacgacaggccccggtgtgtgatgttccccaccctgtgtccaagtgttctcatt

SEQ ID NO: 116417 - DNA, 120 bp, synthetic construct
  source 1..120: mol_type = other DNA
gcaatgctcacccttggttccaatggaaccaacatgtaaagcaagatcaactcagtaataggatccttgcccattaatggacattaggaatgtgggcaaatttcaggatggctattataa

SEQ ID NO: 116418 - DNA, 120 bp, synthetic construct
  source 1..120: mol_type = other DNA
cccaccaacacctgaacccctggagtctcacaagagtgatgtgaagcttggttttatgtgcccacattttattttttaagaaatataaactaaagatcagagaggttaagcaatgtgcct

SEQ ID NO: 116419 - DNA, 120 bp, synthetic construct
  source 1..120: mol_type = other DNA
cacttaaaactggtgttcagaatcaagcttcaaaataatgagtttatagttctagcatggtgtgtgtgcatgtgtgggaagtggatctgtgtgtgtgtgtgtgtgtgtgtgtgtgtgaga

SEQ ID NO: 116420 - DNA, 120 bp, synthetic construct
  source 1..120: mol_type = other DNA
tggtctgagtgtacccgcccatggacgcatgatgcaaagctgtccagccattgtggtcactggtaaagagttaagaaaagatgtgtgcatacacttaacagatgaaatgcgggatgggat

SEQ ID NO: 116421 - DNA, 120 bp, synthetic construct
  source 1..120: mol_type = other DNA
aaaaactgagcaaaacattcattcatgtagctgtagcaccaatttgctggcatcaatattatggtaaggaaatgtgtttttgaacattagcctaataagctctttgctactgctatggta

SEQ ID NO: 116422 - DNA, 120 bp, synthetic construct
  source 1..120: mol_type = other DNA
gctgcaaaatgcagaggtgatttcttatctttgcttttggaatgaatggacacattaaagccaagtaggttatttacagaaccagggcccccctgtctacatgcataatgtagaggagta

SEQ ID NO: 116423 - DNA, 120 bp, synthetic construct
  source 1..120: mol_type = other DNA
atcatagatgactgcatattaagtttctttgtaagttaaaaaactcagtctcactacaattaattatcattgtcataatcatcaccaccaccaccatcaccatgttgtaactaaatagtc

SEQ ID NO: 116424 - DNA, 120 bp, synthetic construct
  source 1..120: mol_type = other DNA
tcatttggcacacagtgaatgttcatccaaccaaattgagtggcacttcaaaagacttggcttgttccctcttggtacctttagagagtagcaaatttacaatattccaagatgcagaag

SEQ ID NO: 116425 - DNA, 120 bp, synthetic construct
  source 1..120: mol_type = other DNA
ttgcctggtgaagagatggcagcctttgcaggaaaccatgcatgactatggtttatggtttatggcatataatgcatagtttatggcatataatgagtctccccagcactcttctctgta

SEQ ID NO: 116426 - DNA, 120 bp, synthetic construct
  source 1..120: mol_type = other DNA
attatacgatttcttaaattataaatagtaataaaaataaaccagtaaaaggaatagttaccactgaaattaaatagtctgctagctcatggtgatcaaacaatgaagctctgaaaaaac

SEQ ID NO: 116427 - DNA, 120 bp, synthetic construct
  source 1..120: mol_type = other DNA
tgagattcatcttaaagattttcatatcttctaggttataaattggcactgggattttgtgagctacccacgtgattctaatgtgcaacagtttgagaatttctggtctagaggttagtc

SEQ ID NO: 116428 - DNA, 120 bp, synthetic construct
  source 1..120: mol_type = other DNA
ggaacatacgcgattccggttgatccacagggtctttgttatctttgcccttttcctttgaaccacaaaatctttgctagcattagtgctaactgctccttgcaatgtctaatttcactc

SEQ ID NO: 116429 - DNA, 120 bp, synthetic construct
  source 1..120: mol_type = other DNA
cctggctgaacattatcatcttctgagggtaggccttaacttctttaatggcaactgcactagatatatagtctttgttgtatctatatttgtgtctgcaattgttttggggagctctga

SEQ ID NO: 116430 - DNA, 120 bp, synthetic construct
  source 1..120: mol_type = other DNA
agcttggtgaatagggaaacatccccatttatttgatttacatggcttagctccttttttaagctggaagaaaagacaaaatgaaaaatgacaccagttaaaccccaaatcgcaagggtg

SEQ ID NO: 116431 - DNA, 120 bp, synthetic construct
  source 1..120: mol_type = other DNA
tctgagatggtgaagaggcaaaatcaagtggtaaaaatacagatgctggcctagataacatacaagtaactaacgaatatttgaaaaaagtctatttgccggcattctaacagcacactc

SEQ ID NO: 116432 - DNA, 120 bp, synthetic construct
  source 1..120: mol_type = other DNA
ggtacttgccttccactagagtttaagttttcaaataccagggaccatgtctgtttatcttttattcatccttctctcacacaatctggcacaaaatcttgcacattgtgggtactaact

SEQ ID NO: 116433 - DNA, 120 bp, synthetic construct
  source 1..120: mol_type = other DNA
agggaaatgagaacataagattccttccatggactttaggcatcatcgcattctgttcttaagaaactctagtttcacatggaaaatagctaccaaagtctacaagaagaggcttttctc

SEQ ID NO: 116434 - DNA, 120 bp, synthetic construct
  source 1..120: mol_type = other DNA
acccagatgatacagaaatagcacttggctcatgaataatgaataaaaaaataacagcttgttgccagaggactttctagtaacctcttcagggagccaccctgacccatctcataggta

SEQ ID NO: 116435 - DNA, 120 bp, synthetic construct
  source 1..120: mol_type = other DNA
tttggcacctcagtgtactcagctatgaaataagaatactagtggaattacttcatagtgggtttgcttagatgagaattcaataaacaaacacacacaaagctctcatgaaaatgcccg

SEQ ID NO: 116436 - DNA, 120 bp, synthetic construct
  source 1..120: mol_type = other DNA
attcaagcctccaatagcctgcaaagtaacaccatgacaaattttcagaaggaggaagatgttgaggtccagagaggttaaaagtcttgccaacatcacagagctagtaaggaagtatga

SEQ ID NO: 116437 - DNA, 120 bp, synthetic construct
  source 1..120: mol_type = other DNA
aaatcatttttatttttatagaggtcactggacccttctaatgtaggggctttatcttgatctccttcctacttgatctctttgtggcaagggctccttctaactcttctgtccccgtaa

SEQ ID NO: 116438 - DNA, 120 bp, synthetic construct
  source 1..120: mol_type = other DNA
caaggtagagtgtacaaggctggcatctggaaaacatcactgtgggagtatggtacaccttcttgaggtgtcaattttatttaatgatgataatttaaatgtaaaataacctcaatggaa

SEQ ID NO: 116439 - DNA, 120 bp, synthetic construct
  source 1..120: mol_type = other DNA
tatatgcttagaaataaaggccgttcttcctcattgtaaaggaaatgcagaaatcttccccaaatgattcagatacttgcttcaattctaccattgaccataactagtctcatatgccac

SEQ ID NO: 116440 - DNA, 120 bp, synthetic construct
  source 1..120: mol_type = other DNA
gtcacttcagattcttttggaatctgaactatgtgattagattcagaacataatagactagatcacttttagataagctaattctaactaaaccctttaaaacagatatatcaaatacat

SEQ ID NO: 116441 - DNA, 120 bp, synthetic construct
  source 1..120: mol_type = other DNA
aattaaagctgtacatacctcttgaccctgctaggactttgacatacagacatatccataaaggtaccaagggacagacagacagagaagctacatctaaactcacagacatactctgtc

SEQ ID NO: 116442 - DNA, 120 bp, synthetic construct
  source 1..120: mol_type = other DNA
atactttttgagtaggtttccctggactgcagttgcccgtccaggagcaagaattcggttggacaaacaagcaaacaaaatagataaagcaggcgctgtgtgggcgcgtcattagtaggg

SEQ ID NO: 116443 - DNA, 120 bp, synthetic construct
  source 1..120: mol_type = other DNA
gaagagggaatgactgggtatattggaaagatttttagttttcaggagttttttctaactaaaatcctacagacctgtgtttcccaccacgtgcaccttcttctggcggcctctttgatt

SEQ ID NO: 116444 - DNA, 120 bp, synthetic construct
  source 1..120: mol_type = other DNA
catgagtatggcttgctggaggatacaggtgttcaacttcacctttgcactcttttctcatcagcatctgtgttcagggtatgcaagataagaatcagttgcacaacttgctatgattta

SEQ ID NO: 116445 - DNA, 120 bp, synthetic construct
  source 1..120: mol_type = other DNA
atgtaaacaggaacaagatggtatctagctatttacaatcaagatcttatttcatttgaagtttattgatgaatagcagtaatgtgcaagctttttatatcagttatactcttaaaatga

SEQ ID NO: 116446 - DNA, 120 bp, synthetic construct
  source 1..120: mol_type = other DNA
gagtaatgtgataagtatgtgtttagctttgtatgaaaatgcctaattaccttccaaagtggatgtaccattttatatggcctccagcagtgtatgaggattctacttactccatagcct

SEQ ID NO: 116447 - DNA, 120 bp, synthetic construct
  source 1..120: mol_type = other DNA
gatgccttgatggctgatgaagcattgtttctgggtatgcctgttgcatttagtctatagattgatttggtgggaagggccatgtttaaaatattgagtcttctgatccataaacatggt

SEQ ID NO: 116448 - DNA, 120 bp, synthetic construct
  source 1..120: mol_type = other DNA
agatttctgtgtttaggctcaagaagaatattgatctgtagttgcctctttttgtgatatctttgtatagctttgctatcagtatagtagtggcctccctgaataagtttaaaactgttg

SEQ ID NO: 116449 - DNA, 120 bp, synthetic construct
  source 1..120: mol_type = other DNA
cttctcacaattctgtcaggatttatactccattgagcgagtgtctttgttcttagatgcatacttataattattgtcttcccactatattttcctttttatcattatgaaatttccttt

SEQ ID NO: 116450 - DNA, 120 bp, synthetic construct
  source 1..120: mol_type = other DNA
ggcaagtctgcttggaaaataaaataaggaatactttttgctggatatagaagttttgtttgatacacatttctttcatcactttgagtattattacattgccttctggcctccattgtt

SEQ ID NO: 116451 - DNA, 120 bp, synthetic construct
  source 1..120: mol_type = other DNA
tcacgcctgtaatcccagcactttgggaggccgaggcgggtggatcacgaggtcaagggatcgagaccatcctggctaacatagtgaaaccccttctctactaaaaatacaaaaaaaaaa

SEQ ID NO: 116452 - DNA, 120 bp, synthetic construct
  source 1..120: mol_type = other DNA
ttccctatatctgttcccactgtcttgcttctgatgtttatttgtaatttgtaagattttttttatttcttagagatttgattttttaaggaaacaacttttggttttagcagtcctatt

SEQ ID NO: 116453 - DNA, 120 bp, synthetic construct
  source 1..120: mol_type = other DNA
caattgttcttcaagtcttctacctcattatttttcatttacttgatatgcaaacatgtatagtaagggattccaccacagttgtggaattgacagtttagtcatgtatataatcagtta

SEQ ID NO: 116454 - DNA, 120 bp, synthetic construct
  source 1..120: mol_type = other DNA
cttctcccatccatagttatacattctgtaatttttatcattctttgtctcgtattcaaattaggttttccgcattctgtacacacataattcttccagaggtggtatgttggtactaaa

SEQ ID NO: 116455 - DNA, 120 bp, synthetic construct
  source 1..120: mol_type = other DNA
aggcatggagccagctttacccaaattgaatttgagtaaactcagaatggattgagaatgagacaagaatagtttccattgccctaagagaaactgaagtatgccgttggcaaaagaagg

SEQ ID NO: 116456 - DNA, 120 bp, synthetic construct
  source 1..120: mol_type = other DNA
cactcttcccatcacagcattcttttgcctatgtttagttcatgttttgcttcagtttaacaactttgtatattcaatcctatctactgtctatctttccagaatcctttaacatttcta

SEQ ID NO: 116457 - DNA, 120 bp, synthetic construct
  source 1..120: mol_type = other DNA
cttctatggtgcaactttccttgctatgcacttaatttatacccagatcatttcacaccacaacccacacgagtaagaccacaaaaaaaagttcttatctcatgaagaatctttgctatt

SEQ ID NO: 116458 - DNA, 120 bp, synthetic construct
  source 1..120: mol_type = other DNA
acaaaccaaagtccagtagtttccccttatccatgggagatactttctaagaccccccagtggatgcctgaaactcagatagtactgaaccctatatatactatcttttccttataaata

SEQ ID NO: 116459 - DNA, 120 bp, synthetic construct
  source 1..120: mol_type = other DNA
gttttctatgttgtcatgttcacttatattgaaccatgaaagggaaagagcatagagcagttctggggacattgttttggatcaggtctgttgtggccatgtagctacaataactgcaag

SEQ ID NO: 116460 - DNA, 120 bp, synthetic construct
  source 1..120: mol_type = other DNA
acagagggaggaaaaagtggggtatgttcagaggcaggaggaggaaaagactccgtcatcaagaaagccatgagatgacagttttaaaatggtagaaaaatataactgcaaaagttgcaa

SEQ ID NO: 116461 - DNA, 120 bp, synthetic construct
  source 1..120: mol_type = other DNA
gttataaaataagacaaaacatagaccaatacagacagcactacaaaaattgatctatttccccaataggaaatcagcaaaccatacccaaattacctggctatccaccgaagactccac

SEQ ID NO: 116462 - DNA, 120 bp, synthetic construct
  source 1..120: mol_type = other DNA
ctgcctcccctcctcctttcactgctctactcatgtaattattattttcatctgtaaacattgagccttcatggtctgattcatcctgactgtgcttcataaatatgtccacaaaaattg

SEQ ID NO: 116463 - DNA, 120 bp, synthetic construct; identical to SEQ ID NO: 24779
  source 1..120: mol_type = other DNA

SEQ ID NO: 116464 - DNA, 120 bp, synthetic construct
  source 1..120: mol_type = other DNA
agtttataaaatgacaagcagaaattatctttaaggctttttccagttttaaaatcctttattagtattaagtgaaggggtggcctgcccctccacacctgtgggtatttctagttgggt

SEQ ID NO: 116465 - DNA, 120 bp, synthetic construct
  source 1..120: mol_type = other DNA
gattttatacaacacatgtttttgtgagctccaagttgagtcaaagtggctgggtcagagtggctggggcaaagctacaaattaacaacatctcagcaaagcaattgtttaaagtacagg

SEQ ID NO: 116466 - DNA, 120 bp, synthetic construct
  source 1..120: mol_type = other DNA
tccacatctttgcttgcatttgttattgtgtgccattctgatacaaactattttaactggagtgcgatgatactgcattgtgattttgatttgcatttctctggtgatttgtgatgttga

SEQ ID NO: 116467 - DNA, 120 bp, synthetic construct
  source 1..120: mol_type = other DNA
tacccagtaatgggatggctgggtcaaatggtatttctagttctagatccttgagaaatcaccacactgtctttcacaatggttgaactagtttacagtcccaccaacagtgtaaaagta

SEQ ID NO: 116468 - DNA, 120 bp, synthetic construct; identical to SEQ ID NO: 13653
  source 1..120: mol_type = other DNA

SEQ ID NO: 116469 - DNA, 120 bp, synthetic construct; identical to SEQ ID NO: 3617
  source 1..120: mol_type = other DNA

SEQ ID NO: 116470 - DNA, 120 bp, synthetic construct; identical to SEQ ID NO: 13655
  source 1..120: mol_type = other DNA

SEQ ID NO: 116471 - DNA, 120 bp, synthetic construct; identical to SEQ ID NO: 13656
  source 1..120: mol_type = other DNA

SEQ ID NO: 116472 - DNA, 120 bp, synthetic construct
  source 1..120: mol_type = other DNA
aagtggacatgaacagacacttttccaaagaagacatacacaaagccaataggcatgtgaaagaaggctcaacatcacagattattagagaaatgcaaatcaaaaccacaatgagatacc

SEQ ID NO: 116473 - DNA, 120 bp, synthetic construct
  source 1..120: mol_type = other DNA
tctcccattttgtaggttgcctgttcactctgatggtagtttcttttgctgtgcagaagctctttagtttaattagatcccatttgtcatttttggcttttgttgccattgcttttggtg

SEQ ID NO: 116474 - DNA, 120 bp, synthetic construct
  source 1..120: mol_type = other DNA
agcttaaggagattttgggctgagacaatggggttttctagatataaaatcatgtcatctgcaaacagggacaatttgacttcctcttttcctaattgaataccctttatttccttctcc

SEQ ID NO: 116475 - DNA, 120 bp, synthetic construct
  source 1..120: mol_type = other DNA
aaaacccttcaaaaaattaatgaatccaggagctggttttttgaaaggatcaacaaaatagatagaccactagcaagactactaaagaaaaaaagagagaagaatcaaatagacgcaata

SEQ ID NO: 116476 - DNA, 120 bp, synthetic construct
  source 1..120: mol_type = other DNA
aatctgggtgctcctgtattgggtgcatatatatttaggatagttagctcttcttgttgaattgatccctttaccattatgtaatggccttctttgtctcttttgatctttgttggctta

SEQ ID NO: 116477 - DNA, 120 bp, synthetic construct
  source 1..120: mol_type = other DNA
ttttattcttttttctctaaacttcccttctcacttcatttcattcgtttcatcttccattgctgataccctttcttccagttgatcgcatcggctcctgaggcttctgcattcttcacg

SEQ ID NO: 116478 - DNA, 120 bp, synthetic construct
  source 1..120: mol_type = other DNA
actccatgggcgtaggaccctccgagccaggtgcgggatataatctcgtggtgggccgttttttaagcccgtcggaaaagtgcagtactcgggtgggagtgacccgattttccaggtgcc

SEQ ID NO: 116479 - DNA, 120 bp, synthetic construct
  source 1..120: mol_type = other DNA
gtgggggggggcgggtatagggtataaattaggtgaaaaggcaaagtttttattttgagctgtctcctcaacctcatttttaatgagaaccaaataatcatggtggggtttccataggca

SEQ ID NO: 116480 - DNA, 120 bp, synthetic construct; identical to SEQ ID NO: 22462
  source 1..120: mol_type = other DNA

SEQ ID NO: 116481 - DNA, 120 bp, synthetic construct; identical to SEQ ID NO: 22463
  source 1..120: mol_type = other DNA

SEQ ID NO: 116482 - DNA, 120 bp, synthetic construct; identical to SEQ ID NO: 22464
  source 1..120: mol_type = other DNA

SEQ ID NO: 116483 - DNA, 120 bp, synthetic construct; identical to SEQ ID NO: 22465
  source 1..120: mol_type = other DNA

SEQ ID NO: 116484 - DNA, 120 bp, synthetic construct
  source 1..120: mol_type = other DNA
gaatatccataatattgaatagttaagaggtgctactttgccagtgttatggattaaacataatttagctggctgggcatggtggctcacatctgtaatcccagtgctttgggaggctga

SEQ ID NO: 116485 - DNA, 120 bp, synthetic construct; identical to SEQ ID NO: 35149
  source 1..120: mol_type = other DNA

SEQ ID NO: 116486 - DNA, 120 bp, synthetic construct
  source 1..120: mol_type = other DNA
gtgtgaggtggtatctcattgtggttttgatttgcatttctctgatggccagtgatggagagcattttttcatgtgttttttggctgcataaatgtcttcttttgagaagtgtctgttca

SEQ ID NO: 116487 - DNA, 120 bp, synthetic construct
  source 1..120: mol_type = other DNA
ttgtgatttttgtacattgattttgtatcccgagactttgctgaagttgcctatcagcttaaggagattttgggctgagacgatggggttttctagatatacaatcatgtcgtctgcaaa

SEQ ID NO: 116488 - DNA, 120 bp, synthetic construct
  source 1..120: mol_type = other DNA
gcagtcatgaaagtgggcatccttgtcttattccagatcttagaggaaaggaaaggatcattcagtacgatagtagctgtggtctgttgtatgcggcttttattgtgttgaaatgtgttc

SEQ ID NO: 116489 - DNA, 120 bp, synthetic construct
  source 1..120: mol_type = other DNA
tcagcccaaaatctccttacactgataagcaacttcagcaaagtctcaggatacaaaatcagtgtacaaaaatcacaagcattcttataaaccaataacagacaaacagagagccaaatc

SEQ ID NO: 116490 - DNA, 120 bp, synthetic construct
  source 1..120: mol_type = other DNA
aaagaaaccaccatcagagtgaacaggcaacctacagaatgggagaaaattttttcaacctactcctctgacaaagggctcatatccagaatctacaataaactcaaacaaatttacaag

SEQ ID NO: 116491 - DNA, 120 bp, synthetic construct
  source 1..120: mol_type = other DNA
aataaaaacaacaaaaaaaataaataaataacaaaacaaaacaaaaaaaattgccacagccacttcaaccttcagcaacccccacccttatcagtcagcctgatcagtcagcagtcatca

SEQ ID NO: 116492 - DNA, 120 bp, synthetic construct
  source 1..120: mol_type = other DNA
ctgattacaacaatgtgaagccctctgttaaacttgtctgtggggattgaggaagatttttttttttattttttatttttgagacggagtctcgccctgtcacccaagctggagtgcagt

SEQ ID NO: 116493 - DNA, 120 bp, synthetic construct; identical to SEQ ID NO: 35152
  source 1..120: mol_type = other DNA

SEQ ID NO: 116494 - DNA, 120 bp, synthetic construct; identical to SEQ ID NO: 35153
  source 1..120: mol_type = other DNA

SEQ ID NO: 116495 - DNA, 120 bp, synthetic construct; identical to SEQ ID NO: 12307
  source 1..120: mol_type = other DNA

SEQ ID NO: 116496 - DNA, 120 bp, synthetic construct; identical to SEQ ID NO: 12308
  source 1..120: mol_type = other DNA

SEQ ID NO: 116497 - DNA, 120 bp, synthetic construct; identical to SEQ ID NO: 12309
  source 1..120: mol_type = other DNA

SEQ ID NO: 116498 - DNA, 120 bp, synthetic construct
  source 1..120: mol_type = other DNA
cctaatagacatctacagaactctccaccccaaatcaacagaatatacattcttttcagcaccacaccacaccaattccaaaattgaccacatagttggaagtaaagcactcctcagcaa

SEQ ID NO: 116499 - DNA, 120 bp, synthetic construct
  source 1..120: mol_type = other DNA
aacacctctatgcaaataaactagaaaatctagaagaaatggataaattccttgacacatacaccctcccaagactaaaccaggaagaagctgaatctctgaatagaccaataacaggct

SEQ ID NO: 116500 - DNA, 120 bp, synthetic construct
  source 1..120: mol_type = other DNA
gtctcaggatacaaaatcaatgtgcaaaaatcacaagcattcttatacacaaataacggacaaacagagagccaaatcatgagtgaactcccattcacaattgcttcaaagagaataaaa

SEQ ID NO: 116501 - DNA, 120 bp, synthetic construct
  source 1..120: mol_type = other DNA
ctgacaaatggttaatatccagaatctacaatgaactcaaacaaatttacaagaaaaaaacaaacaaccccatcaaaaagtgggcgaaggatatgaacagacacttctcaaaagaagaca

SEQ ID NO: 116502 - DNA, 120 bp, synthetic construct
  source 1..120: mol_type = other DNA
ctgttacctatctcggcataattctcataaaaacacacgtgctctccctgctaatcatgtccaattaaccttccaaacctcaatcccttacaaaacaacaactcctttccttcctaggca

SEQ ID NO: 116503 - DNA, 120 bp, synthetic construct
  source 1..120: mol_type = other DNA
ttacagtcctccatcttcaagaaatgtagaacagactaaaggtcttttaaaaacacacctcaccaagcacagccaccaacttaaaaaggactggacaatacttttaccactttcccttct

SEQ ID NO: 116504 - DNA, 120 bp, synthetic construct; identical to SEQ ID NO: 3842
  source 1..120: mol_type = other DNA

SEQ ID NO: 116505 - DNA, 120 bp, synthetic construct; identical to SEQ ID NO: 23287
  source 1..120: mol_type = other DNA

SEQ ID NO: 116506 - DNA, 120 bp, synthetic construct; identical to SEQ ID NO: 23288
  source 1..120: mol_type = other DNA

SEQ ID NO: 116507 - DNA, 120 bp, synthetic construct; identical to SEQ ID NO: 23289
  source 1..120: mol_type = other DNA

SEQ ID NO: 116508 - DNA, 120 bp, synthetic construct; identical to SEQ ID NO: 23290
  source 1..120: mol_type = other DNA

SEQ ID NO: 116509 - DNA, 120 bp, synthetic construct; identical to SEQ ID NO: 23271
  source 1..120: mol_type = other DNA

SEQ ID NO: 116510 - DNA, 120 bp, synthetic construct; identical to SEQ ID NO: 23272
  source 1..120: mol_type = other DNA

SEQ ID NO: 116511 - DNA, 120 bp, synthetic construct; identical to SEQ ID NO: 23273
  source 1..120: mol_type = other DNA

SEQ ID NO: 116512 - DNA, 120 bp, synthetic construct; identical to SEQ ID NO: 23274
  source 1..120: mol_type = other DNA

SEQ ID NO: 116513 - DNA, 120 bp, synthetic construct; identical to SEQ ID NO: 23275
  source 1..120: mol_type = other DNA

SEQ ID NO: 116514 - DNA, 120 bp, synthetic construct
  source 1..120: mol_type = other DNA
tccaacactgggaaggacttggggcacctggagttggagaacaaagaacttagctctaggcaggaaaggaattttttttttttttgagacggagtcttgctctgttgcccaggctggagt

SEQ ID NO: 116515 - DNA, 120 bp, synthetic construct; identical to SEQ ID NO: 23276
  source 1..120: mol_type = other DNA

SEQ ID NO: 116516 - DNA, 120 bp, synthetic construct; identical to SEQ ID NO: 23277
  source 1..120: mol_type = other DNA

SEQ ID NO: 116517 - DNA, 120 bp, synthetic construct
  source 1..120: mol_type = other DNA
gccccctgaaatggaatgtcaccctgtatcccctttccctctcacctcaatcagaaataacttccttcttctcttgatggaaataattcattcctcccttcctcccttccttccttccat

SEQ ID NO: 116518 - DNA, 120 bp, synthetic construct; identical to SEQ ID NO: 23278
  source 1..120: mol_type = other DNA

SEQ ID NO: 116519 - DNA, 120 bp, synthetic construct; identical to SEQ ID NO: 23279
  source 1..120: mol_type = other DNA

SEQ ID NO: 116520 - DNA, 120 bp, synthetic construct; identical to SEQ ID NO: 23280
  source 1..120: mol_type = other DNA

SEQ ID NO: 116521 - DNA, 120 bp, synthetic construct; identical to SEQ ID NO: 23281
  source 1..120: mol_type = other DNA

SEQ ID NO: 116522 - DNA, 120 bp, synthetic construct; identical to SEQ ID NO: 23282
  source 1..120: mol_type = other DNA

SEQ ID NO: 116523 - DNA, 120 bp, synthetic construct; identical to SEQ ID NO: 23283
  source 1..120: mol_type = other DNA

SEQ ID NO: 116524 - DNA, 120 bp, synthetic construct; identical to SEQ ID NO: 23284
  source 1..120: mol_type = other DNA

SEQ ID NO: 116525 - DNA, 120 bp, synthetic construct; identical to SEQ ID NO: 23285
  source 1..120: mol_type = other DNA

SEQ ID NO: 116526 - DNA, 120 bp, synthetic construct; identical to SEQ ID NO: 23286
  source 1..120: mol_type = other DNA

SEQ ID NO: 116527 - DNA, 120 bp, synthetic construct
  source 1..120: mol_type = other DNA
agcacccgatcaaaaccaagcacagaagcggtggtttctgtggcatttaatgcctgtgactgtggggaatttagtgattgtctcatatcaatgtcaggcttcaaattagtctttttttcc

SEQ ID NO: 116528 - DNA, 120 bp, synthetic construct
  source 1..120: mol_type = other DNA
accatcaatttacaggacagggtaaaaagaatcttagttataaagaaagagccaggcctacactacagacttgaacttgctctctaatcctttggcaagagcacctactgactggtcaca

SEQ ID NO: 116529 - DNA, 120 bp, synthetic construct
  source 1..120: mol_type = other DNA
agctaaatttagcagtgaggacaattacaaaattaagtactactcaataggtccctaaaattctgaatgaaaagaaaattcatgggtttataccaggtataatagacaattctaattcct

SEQ ID NO: 116530 - DNA, 120 bp, synthetic construct
  source 1..120: mol_type = other DNA
cattgaacacactcagcaatcacagaaccacccgtgtcaacgtggcaaggactgggaaagaactcacaagtcacttaacagaaaagcatattttagcagttttctgaaacaattgtccta

SEQ ID NO: 116531 - DNA, 120 bp, synthetic construct
  source 1..120: mol_type = other DNA
tataacaatataatatatcaggccacttaagtggctcttgccttgagcaagtcatctaacttcttgttttcctttctttttgagacagggtcttgctctgtcatccagggtggagtgcag

SEQ ID NO: 116532 - DNA, 120 bp, synthetic construct
  source 1..120: mol_type = other DNA
ctcattctgatatggtaattttgtgttataaatctgggagaatgttggacaggctgaggtccagttattccaacaactgctactgtaaatccttcattccctcagtagttgccctcttcc

SEQ ID NO: 116533 - DNA, 120 bp, synthetic construct
  source 1..120: mol_type = other DNA
ttgcttccattcaaatgctacaatattatgcagtctgtagtagatgtccatgcacagcattcacattcaactttaatatttaggaaagcttttgttaggcagacgtgggagtggtatgct

SEQ ID NO: 116534 - DNA, 120 bp, synthetic construct
  source 1..120: mol_type = other DNA
ccaagaaagatgtgccggatgggaactagaggtcatctagattgcattctgtctaatcagatcatatgaaggtaagatttctgggctgaagagttaaaagtgtatccttctcacattaga

SEQ ID NO: 116535 - DNA, 120 bp, synthetic construct
  source 1..120: mol_type = other DNA
tgtgatatattagcacaagatggtttccttctcctggaagttcttttttcacttagcttctaggacatcacatctttctggtcttctttccatctcactggctgcttcttttcaggtctc

SEQ ID NO: 116536 - DNA, 120 bp, synthetic construct
  source 1..120: mol_type = other DNA
aacagcagtgaatagagagctcctcctctctgaggtttaccccacctcgtcctatcccatcccatctcattgctctgcacctattaagttcttcttttaattttttttctcattgtacat

SEQ ID NO: 116537 - DNA, 120 bp, synthetic construct
  source 1..120: mol_type = other DNA
gcatttgaagctgaagactagtcctggcactttcaagctctatctgtgttaggattggggtcctctcctccagtcacttttctttttgtccataatggaagttgcaagttgacacttata

SEQ ID NO: 116538 - DNA, 120 bp, synthetic construct
  source 1..120: mol_type = other DNA
ataagagaagtgctaagcatgataagtgtcactatgaaaggaagagaagaaggaaaggggaaactgctttatatagagtgatcagggaaggcttcctggaggaggtgatgtacaagctga

SEQ ID NO: 116539 - DNA, 120 bp, synthetic construct
  source 1..120: mol_type = other DNA
gatgataacagcaagacaggagaggtaggcatcggccaaaccatgccactgaatgacataacagctgaatgacctctagcaaattatttatcttctccagacacttttttttgtccctaa

SEQ ID NO: 116540 - DNA, 120 bp, synthetic construct
  source 1..120: mol_type = other DNA
cagctgatagccatgtgcccataacaaacagtggaattgtgccagttttcaaagggaattcttacaaccattgtggaagacagtgtggtgattcctcaaggatctagaactagaaatacc

SEQ ID NO: 116541 - DNA, 120 bp, synthetic construct
  source 1..120: mol_type = other DNA
tcaactgattagcaaggaagagaaagcacaaagtatctggttttcagacacctggcttacaagtaatctatgcatatagatagtttccctagctccttcctgtctattttcttctcaacc

SEQ ID NO: 116542 - DNA, 120 bp, synthetic construct
  source 1..120: mol_type = other DNA
atgcttaaagaacattaaatatttatccaaatgtggcacctctgaggactatgaggagtttatggcttctgtgattttaacttagttgctaccacggagaggaccccagagcagtggttc

SEQ ID NO: 116543 - DNA, 120 bp, synthetic construct
  source 1..120: mol_type = other DNA
tagcaggatgaccatataatttataatttaagtcaggatacctttgtaagtggagggctgctattaatagttacgctgggccacaagcacaaactgggctatctcaggaaaatgaggacc

SEQ ID NO: 116544 - DNA, 120 bp, synthetic construct
  source 1..120: mol_type = other DNA
ggctagatccagaagagaaataacaatgactgcagttaagttctctggaagcccctttcctagaggaagggagagaatactatatcacgggagcacgctgcgggacaaaagaatctgaac

SEQ ID NO: 116545 - DNA, 120 bp, synthetic construct
  source 1..120: mol_type = other DNA
ctgtgaggcaaaagcatcaggtaacctataaaggaaaacctatcagattaacagcagatctctcagcagaaatcctgcaagctagaagaaattggggccctatatctagcctccttaaat

SEQ ID NO: 116546 - DNA, 120 bp, synthetic construct
  source 1..120: mol_type = other DNA
gcccactaccggtgggaagaaaagaaccatgacagtttgtcaacttcctctttgttctctaaagtacagaattcaatctcctcttatttcctggaaaaccatcaatttacaggacagggt

SEQ ID NO: 116547 - DNA, 120 bp, synthetic construct; identical to SEQ ID NO: 116529
  source 1..120: mol_type = other DNA

SEQ ID NO: 116548 - DNA, 120 bp, synthetic construct; identical to SEQ ID NO: 116530
  source 1..120: mol_type = other DNA

SEQ ID NO: 116549 - DNA, 120 bp, synthetic construct; identical to SEQ ID NO: 116531
  source 1..120: mol_type = other DNA

SEQ ID NO: 116550 - DNA, 120 bp, synthetic construct; identical to SEQ ID NO: 116532
  source 1..120: mol_type = other DNA

SEQ ID NO: 116551 - DNA, 120 bp, synthetic construct; identical to SEQ ID NO: 116533
  source 1..120: mol_type = other DNA

SEQ ID NO: 116552 - DNA, 120 bp, synthetic construct; identical to SEQ ID NO: 116534
  source 1..120: mol_type = other DNA

SEQ ID NO: 116553 - DNA, 120 bp, synthetic construct; identical to SEQ ID NO: 116535
  source 1..120: mol_type = other DNA

SEQ ID NO: 116554 - DNA, 120 bp, synthetic construct; identical to SEQ ID NO: 116536
  source 1..120: mol_type = other DNA

SEQ ID NO: 116555 - DNA, 120 bp, synthetic construct; identical to SEQ ID NO: 116537
  source 1..120: mol_type = other DNA

SEQ ID NO: 116556 - DNA, 120 bp, synthetic construct; identical to SEQ ID NO: 116538
  source 1..120: mol_type = other DNA

SEQ ID NO: 116557 - DNA, 120 bp, synthetic construct; identical to SEQ ID NO: 116539
  source 1..120: mol_type = other DNA

SEQ ID NO: 116558 - DNA, 120 bp, synthetic construct; identical to SEQ ID NO: 116540
  source 1..120: mol_type = other DNA

SEQ ID NO: 116559 - DNA, 120 bp, synthetic construct; identical to SEQ ID NO: 116541
  source 1..120: mol_type = other DNA

SEQ ID NO: 116560 - DNA, 120 bp, synthetic construct; identical to SEQ ID NO: 116542
  source 1..120: mol_type = other DNA

SEQ ID NO: 116561 - DNA, 120 bp, synthetic construct; identical to SEQ ID NO: 116543
  source 1..120: mol_type = other DNA

SEQ ID NO: 116562 - DNA, 120 bp, synthetic construct; identical to SEQ ID NO: 116544
  source 1..120: mol_type = other DNA

SEQ ID NO: 116563 - DNA, 120 bp, synthetic construct; identical to SEQ ID NO: 116545
  source 1..120: mol_type = other DNA

SEQ ID NO: 116564 - DNA, 120 bp, synthetic construct; identical to SEQ ID NO: 32617
  source 1..120: mol_type = other DNA

SEQ ID NO: 116565 - DNA, 120 bp, synthetic construct; identical to SEQ ID NO: 32618
  source 1..120: mol_type = other DNA

SEQ ID NO: 116566 - DNA, 120 bp, synthetic construct; identical to SEQ ID NO: 32619
  source 1..120: mol_type = other DNA

SEQ ID NO: 116567 - DNA, 120 bp, synthetic construct
  source 1..120: mol_type = other DNA
ctaagagggccccttgtccccgctaccagctactactctctcactatcctgacttttttttttttttttttaatatactttaagttttagggtacatatgcacattgtgcaggttagtta

SEQ ID NO: 116568 - DNA, 120 bp, synthetic construct; identical to SEQ ID NO: 32620
  source 1..120: mol_type = other DNA

SEQ ID NO: 116569 - DNA, 120 bp, synthetic construct; identical to SEQ ID NO: 32621
  source 1..120: mol_type = other DNA

SEQ ID NO: 116570 - DNA, 120 bp, synthetic construct
  source 1..120: mol_type = other DNA
gttttgcaggcacctacattctcactaagcagctcactcacaataaattgttttttttttttggtggctgggggacggagtctggctctgtcgcccaggctggagtgcagtggcgcgatc

SEQ ID NO: 116571 - DNA, 120 bp, synthetic construct; identical to SEQ ID NO: 32622
  source 1..120: mol_type = other DNA

SEQ ID NO: 116572 - DNA, 120 bp, synthetic construct
  source 1..120: mol_type = other DNA
cagtgatgatgagcattttttcatgtgtcttttggctgcataaatgtcttcttttaggaagtcaaggtggtgattcctcagggatctagaactagaaataccatttgacccagccatccc

SEQ ID NO: 116573 - DNA, 120 bp, synthetic construct; identical to SEQ ID NO: 32623
  source 1..120: mol_type = other DNA

SEQ ID NO: 116574 - DNA, 120 bp, synthetic construct
  source 1..120: mol_type = other DNA
cagaatttcccacttctgagatcatgggagatttatacattccctttttatatgtaaaaatctcaacttcagggtcaaggctggagccattggggtaatcctaccctaaatgtgtttggc

SEQ ID NO: 116575 - DNA, 120 bp, synthetic construct; identical to SEQ ID NO: 19885
  source 1..120: mol_type = other DNA

SEQ ID NO: 116576 - DNA, 120 bp, synthetic construct; identical to SEQ ID NO: 19886
  source 1..120: mol_type = other DNA

SEQ ID NO: 116577 - DNA, 120 bp, synthetic construct
  source 1..120: mol_type = other DNA
gatcaagccactgcactccagcctgggcgacaaagcaatactccatctcaaacaaacaaacagactttattttgaaatttctcatacatacagaaaaatgcacgaaggtggacagcttga

SEQ ID NO: 116578 - DNA, 120 bp, synthetic construct; identical to SEQ ID NO: 19887
  source 1..120: mol_type = other DNA

SEQ ID NO: 116579 - DNA, 120 bp, synthetic construct; identical to SEQ ID NO: 19888
  source 1..120: mol_type = other DNA

SEQ ID NO: 116580 - DNA, 120 bp, synthetic construct; identical to SEQ ID NO: 22110
  source 1..120: mol_type = other DNA

SEQ ID NO: 116581 - DNA, 120 bp, synthetic construct; identical to SEQ ID NO: 22111
  source 1..120: mol_type = other DNA

SEQ ID NO: 116582 - DNA, 120 bp, synthetic construct; identical to SEQ ID NO: 31732
  source 1..120: mol_type = other DNA

SEQ ID NO: 116583 - DNA, 120 bp, synthetic construct; identical to SEQ ID NO: 31733
  source 1..120: mol_type = other DNA

SEQ ID NO: 116584 - DNA, 120 bp, synthetic construct; identical to SEQ ID NO: 31734
  source 1..120: mol_type = other DNA

SEQ ID NO: 116585 - DNA, 120 bp, synthetic construct; identical to SEQ ID NO: 31735
  source 1..120: mol_type = other DNA

SEQ ID NO: 116586 - DNA, 120 bp, synthetic construct; identical to SEQ ID NO: 31736
  source 1..120: mol_type = other DNA

SEQ ID NO: 116587 - DNA, 120 bp, synthetic construct; identical to SEQ ID NO: 31737
  source 1..120: mol_type = other DNA

SEQ ID NO: 116588 - DNA, 120 bp, synthetic construct; identical to SEQ ID NO: 17359
  source 1..120: mol_type = other DNA

SEQ ID NO: 116589 - DNA, 120 bp, synthetic construct; identical to SEQ ID NO: 30126
  source 1..120: mol_type = other DNA

SEQ ID NO: 116590 - DNA, 120 bp, synthetic construct
  source 1..120: mol_type = other DNA
tccgtaatatatttgtggtccatagaagtcttctgaaaagtgattactgattcttcctagtgcaaaatgcgtggctgcctctttcataagccaaagtacttgctacacagagcagcacca

SEQ ID NO: 116591 - DNA, 120 bp, synthetic construct
  source 1..120: mol_type = other DNA
tgtggtctcagagatcctttcatccccatgaccattttatacatcctcccctcaacaactgctagagttttatctttcccaacaaatataccagaaactatgtgtgctgttgcaaatggg

SEQ ID NO: 116592 - DNA, 120 bp, synthetic construct
  source 1..120: mol_type = other DNA
atcaagtgacctgttgactcttggcaggtttatcatgtccaaaaccaaaccaaacctaactactgactctggagttctttgcaacatgaaagcctacatttttaggttgggcaccttcaa

SEQ ID NO: 116593 - DNA, 120 bp, synthetic construct
  source 1..120: mol_type = other DNA
ctctgctcgaggcctccgtgggcactaagatttcgtaccgtgacagttttttacctctttatgactgaatccttctattctttttaatgaaagatagaaacaggaaagccaagttcactg

SEQ ID NO: 116594 - DNA, 120 bp, synthetic construct
  source 1..120: mol_type = other DNA
aaaaccagacttacctgcaatgcaacaaactacctggtctaattgagagccaacccagttatctgaacttcgggaaagcagaaagtggtgtgttagactcaaagattaaatttggcctca

SEQ ID NO: 116595 - DNA, 120 bp, synthetic construct
  source 1..120: mol_type = other DNA
aaaggagctggtgattggactgtccacattcggaggatgtggaattacactgacactcactcacactgacactgaactccgctagcccactctctgttttataatactggactcaagaga

SEQ ID NO: 116596 - DNA, 120 bp, synthetic construct
  source 1..120: mol_type = other DNA
tgtaagaaggactgagaaggcattttagtatactgataacagaaatataaactagtacaactttatggaaagtaagctggtagtattatcctagtaacccttccttgaaatctatcccca

SEQ ID NO: 116597 - DNA, 120 bp, synthetic construct
  source 1..120: mol_type = other DNA
caatgactaggctagggatgggcacaggacaggcctggccaacaggggtgatgagaagtatggtgggatcatctgggaaaggttttcttttccttttcttttttttggagacagagtctt

SEQ ID NO: 116598 - DNA, 120 bp, synthetic construct
  source 1..120: mol_type = other DNA
ttccaaatagttggcactgtaggcatgtgtcaccgtgcccagccctagtttggtttttgttgtctacaattgaaggcatcctgactatcacaactcagctgcatcacccgttttatgaac

SEQ ID NO: 116599 - DNA, 120 bp, synthetic construct
  source 1..120: mol_type = other DNA
aacactttacacctactctctaccaactaccattaggtgctttcagtgtgagttaacttcaaagcaacccaataggagaaacaagctcacatggtggctggaaagtgcttgtatagctgg

SEQ ID NO: 116600 - DNA, 120 bp, synthetic construct
  source 1..120: mol_type = other DNA
aaatgtcagggactatgggggcagcagaaccacttcctgttgggaacccatgacacagacactcaagtaatctatttctttaacctgtctgaaggaagaatgttagcaaatggtgtttca

SEQ ID NO: 116601 - DNA, 120 bp, synthetic construct
  source 1..120: mol_type = other DNA
tgactgagacactaagggagctactatatgaaccaacaaagttggggaacctctgtcctaagtaagattcacctgccatgaagaatttctgccatgatttcagagagaaaagcattcagc

SEQ ID NO: 116602 - DNA, 120 bp, synthetic construct
  source 1..120: mol_type = other DNA
ataaaatcatcttctgacccttcatcatcatggccagttacatgcaaacatacacacacaaaatcacttgtccccacggtttctgagaattatgagggaattccgaggtgtcaccattca

SEQ ID NO: 116603 - DNA, 120 bp, synthetic construct
  source 1..120: mol_type = other DNA
gtaacaactttacctccaaagtgggtccagtcgacagacttgctgggtaaaggcaacctaggaagaaagtttttgagtaacaaagttaccgatcttaccaagaaaaaaacgtatctggac

SEQ ID NO: 116604 - DNA, 120 bp, synthetic construct
  source 1..120: mol_type = other DNA
tagaaggacatctgacaaacagcagagaaccagctgcctcaaggtgggagtgtgaagaatgattcttgttcctctcttacactttctgtacttcacaataaaatggaccatttaacacag

SEQ ID NO: 116605 - DNA, 120 bp, synthetic construct
  source 1..120: mol_type = other DNA
aaaaaaaaaagtggcatcactttacctggcataggtcccagactaaaccacccatcttgttacctcaagagaagaaaaatccagcaagcctgtgagcaatggcacaaaatcccagattta

SEQ ID NO: 116606 - DNA, 120 bp, synthetic construct
  source 1..120: mol_type = other DNA
atgttctcgagcatattgtaaagtagtttaaaggtcagccgagtgcagtgattctcaaattgttgggatgttttcttttctttttttttgaggtggagtttcgctcttgttgcccaggct

SEQ ID NO: 116607 - DNA, 120 bp, synthetic construct
  source 1..120: mol_type = other DNA
gtataaagaaaatctggggccccacagatatgtaattgcaaaagtaaacatatgtgttgttgtttttctttttgagacagggtctggctctgtcacctaggctggaatgcagtggcgtga

SEQ ID NO: 116608 - DNA, 120 bp, synthetic construct
  source 1..120: mol_type = other DNA
atcttgatttccacctgagagttgacttttattgttggcaacaaatactgtcagttgtttatcttgaagtgacagactcagctcatcatttgagaagctgcctgccaaacacccaagtct

SEQ ID NO: 116609 - DNA, 120 bp, synthetic construct
  source 1..120: mol_type = other DNA
ccacccaggggtcggcagatcacaccttgagagcagcttgttagtccattttcaattattctgattcaaacccattgcattttaggtcagaattctatctggcataattaggcttctcaa

SEQ ID NO: 116610 - DNA, 120 bp, synthetic construct
  source 1..120: mol_type = other DNA
tttctttgctaatatcatggatccttaaaagtgactcctgaaatgagcagtgtgaaattttcccaaccacatactaaatctgacccaaagggtcagcttcaccagaaagcagaggagaga

SEQ ID NO: 116611 - DNA, 120 bp, synthetic construct
  source 1..120: mol_type = other DNA
gtgagacacagaatagccatcttcatatgaggcttctgtgggatccagagagattttggcacactcgatcacaacatcatgagtttctaatctcttccacctgtaaaatgcaatgaaagt

SEQ ID NO: 116612 - DNA, 120 bp, synthetic construct
  source 1..120: mol_type = other DNA
aagttttgacaaaagtcccgatcataataaagaacatgtccatcaccccaaaagttcctttgtgccctttgtggtgagtctcttcccccacttcttgcaactatcgatctgctaaaagca

SEQ ID NO: 116613 - DNA, 120 bp, synthetic construct
  source 1..120: mol_type = other DNA
tgatccatggtttcacttctaagaatttatcctatagaaacagacatacaacaatgttcagcacagcacagcttgtaatggaaagaagaaaggaaataacccaaagttcaaccaaaggga

SEQ ID NO: 116614 - DNA, 120 bp, synthetic construct
  source 1..120: mol_type = other DNA
aagaaaaaaaaaaaatcatgctttccacgtgcctgtactctcagccaccggggaggctgaagcaggaggatcacttgagcccaggagttcgagatcagcttgggcaacatagcaagactg

SEQ ID NO: 116615 - DNA, 120 bp, synthetic construct
  source 1..120: mol_type = other DNA
ataaaatagaagtacagcacacatctaacggcatctgagatccaatgaaatatggtagtttaaaaagtcaatacggtactaaaggttcctcccatccctccccactgcaaccactctggc

SEQ ID NO: 116616 - DNA, 120 bp, synthetic construct
  source 1..120: mol_type = other DNA
attttttttttgttgtattatttctttcacaatttcttcctccaccaaagttttcttctctctctttttctgagatggattctcgctctgtcacccaggctggcgtgcagtagcacgatc

SEQ ID NO: 116617 - DNA, 120 bp, synthetic construct
  source 1..120: mol_type = other DNA
ctaagctgccactgtctcaaagtgaagagtcaactgattatactacagaatccttaaaatcatgaggaacttatagcatctggtacttctggaacaggagatgagcagcaggtagacaag

SEQ ID NO: 116618 - DNA, 120 bp, synthetic construct
  source 1..120: mol_type = other DNA
gtggtggtataatctcgcagaaccactatcatctatggagcccatcattgactgaaatgtcattatgtggtgcagggatgaactggatttctagaaggaaagacagagaaaacaggaaat

SEQ ID NO: 116619 - DNA, 120 bp, synthetic construct
  source 1..120: mol_type = other DNA
gctgtgaaacctcagggacagtgaaaccacaccaagactcagatgcgctggtcctcctctcatctcctggaaaccttcaactactagtgacaagactgcccttctcttaaccaggctttg

SEQ ID NO: 116620 - DNA, 120 bp, synthetic construct
  source 1..120: mol_type = other DNA
ttctccattttgcaaagccagatttatatatatgctaaattgtttttctgcagtccccttgtttttagccatatgcttcacctcctgcatcgccccatcactggcactactgaggtgtaa

SEQ ID NO: 116621 - DNA, 120 bp, synthetic construct
  source 1..120: mol_type = other DNA
ttcttcaaaagtctccaggttttctttcatactgtaatgagaacgcaaaaaggagacgaagttgcaagggtacattccataaaggcgatgaaagagtgcgtacacactggcatggagatg

SEQ ID NO: 116622 - DNA, 120 bp, synthetic construct
  source 1..120: mol_type = other DNA
ttctgtctcacaggtctgacatacttcacccttttgatagaaatacctcacactgggataacccaaagattccaaatttcacatgcttacagcttctgatccctttgatagagctctgct

SEQ ID NO: 116623 - DNA, 120 bp, synthetic construct
  source 1..120: mol_type = other DNA
atcacaaatcacaagttgactcacgtactcatttccctatccctaaggattactgaagggataacattcaaacagactcaacagaacactgagccccaactctactgtaatgagtcagtg

SEQ ID NO: 116624 - DNA, 120 bp, synthetic construct
  source 1..120: mol_type = other DNA
caatccatttgtttaaaaaacattaagttgttaaaactgttcctattttttctgaattaaatgcatgtttttataataccctgccaatgtgactccttgggacccacctctagggataat

SEQ ID NO: 116625 - DNA, 120 bp, synthetic construct
  source 1..120: mol_type = other DNA
ggcggctttgcccacatattcgttaatcctgtccaagaggtgctgaaaatgtaaaagaacaagggcagtcctcacatgaatgtatgaagttaacacaaataaagacagcaatgatgtgct

SEQ ID NO: 116626 - DNA, 120 bp, synthetic construct
  source 1..120: mol_type = other DNA
atttctttaaacaagatcttttttttttttgagacagtttcactcttgttgccctggagtgcaatggtgcaatctcaggtcactgcaacctccgcctcccaggttcaagcgattctcctg

SEQ ID NO: 116627 - DNA, 120 bp, synthetic construct
  source 1..120: mol_type = other DNA
ctgcaacctctgcctcctgggttcaagcaattctcgtgcctcagcctcccaagtagctagctgggattacaggcacctgccaccacgcctggctaatttttgtatttttactagagatgg

SEQ ID NO: 116628 - DNA, 120 bp, synthetic construct
  source 1..120: mol_type = other DNA
taaagcaacatctggaatttgctttaaaatatttggagggtgggagagtcagggaggaaagaatttgaaactggattcatggggttcactgcatgattcttacttcatgtgtgtgcatac

SEQ ID NO: 116629 - DNA, 120 bp, synthetic construct
  source 1..120: mol_type = other DNA
ggttaggtcacaagtctgttaagtccaacatctagcataaactggggatcatttctctgttttagcatatacctctcatctgagacatctaattgcacacccaaataccactggctacag

SEQ ID NO: 116630 - DNA, 120 bp, synthetic construct
  source 1..120: mol_type = other DNA
cacctaaggtcaagagttcgagaccaacctggccaacatggtgaagccccgtctctactaaaaatacaaaaattagctggtgtggtggcgtgtgcctgtagtcccacctactcaggaggc

SEQ ID NO: 116631 - DNA, 120 bp, synthetic construct
  source 1..120: mol_type = other DNA
taaacaaagatggcgcccatccagtcaacttggcgatagtgtgggctaatcagcttgggccacctagcttgtttttccatttgcaaagtaaggttttattctaaaacacattagaaacac

SEQ ID NO: 116632 - DNA, 120 bp, synthetic construct
  source 1..120: mol_type = other DNA
aagggagcagcagcccccctcactactctccttgcttgtattcatgctaccctacaaaattcatttgcctccaaataaccacaagagacattgagatataaacatcagaatctcactcct

SEQ ID NO: 116633 - DNA, 120 bp, synthetic construct
  source 1..120: mol_type = other DNA
aatcccaggtacaaggttccttccagaaaaccatctaccagaaactttcctgaattctgctttgtccaaaaatgttaccaatgacgctgtgtgccagttgagatgatactacacatgtga

SEQ ID NO: 116634 - DNA, 120 bp, synthetic construct
  source 1..120: mol_type = other DNA
gcactagttaaatgacttgtgccagcacacaggctttaattgaatgaagtggtcacaaccaaactttgctgctaaacagagctgaattgagtccactaagtaccagctatgcatctttag

SEQ ID NO: 116635 - DNA, 120 bp, synthetic construct
  source 1..120: mol_type = other DNA
tcttaagtctccaatgtctaaccgtaagttacctcgtctgtaaagttagaataatgatggcatcaagctcacaaggcttgtggggattacatgagatgatgcattccattgccctcggca

SEQ ID NO: 116636 - DNA, 120 bp, synthetic construct
  source 1..120: mol_type = other DNA
aggtgctagtattacagacgtgagccactgcacctggccagtatttcttaaataaatgtgcaaagcctaattctgccttcaggcagcatgacttaagtttactacaaaagagacataaaa

SEQ ID NO: 116637 - DNA, 120 bp, synthetic construct
  source 1..120: mol_type = other DNA
ccagtgagtcatatagacttcctcttgcgactaatcccggttggacattttacctgaaaagaaatatctaaggcaagggtaaaattaggatctacgctagatgagatcctgtagactgcc

SEQ ID NO: 116638 - DNA, 120 bp, synthetic construct
  source 1..120: mol_type = other DNA
ctgttcatcttaactaatatcattctttaggtgtttacagacggatggcttatatgcctaggattacacatgaactctagcctaacagccatggacagctgtcattagcaggacccgtac

SEQ ID NO: 116639 - DNA, 120 bp, synthetic construct
  source 1..120: mol_type = other DNA
caagcaaactgtgagatatctttaggtttcaggtttataggaccaaaatagaagtattctagggaagaagggtatagtttgatagtctagggcagtggttctcaaaatgtggtcctggca

SEQ ID NO: 116640 - DNA, 120 bp, synthetic construct
  source 1..120: mol_type = other DNA
tatgaggtcagcagatgaagcagtttatcacagtggaagactaaatgtttgggctgtggagtcaaccaaaaaggttcatatcccagcttagccactgaataagtgactataggcaactta

SEQ ID NO: 116641 - DNA, 120 bp, synthetic construct
  source 1..120: mol_type = other DNA
caagcaaacagccacagattttaacgctattaagtacacttttctttcacgccttcagctacttaaatgacaaaaccaatgcaaagactaacctttcagagatttataatatgggaaact

SEQ ID NO: 116642 - DNA, 120 bp, synthetic construct
  source 1..120: mol_type = other DNA
ggcatcatattacaccacaacagtagcagtatcagtttttactcttaacccagtgaggaagaggacaactgagtcacaggacctgaagcactctaattttatggaaacaagaaggctggt

SEQ ID NO: 116643 - DNA, 120 bp, synthetic construct
  source 1..120: mol_type = other DNA
aatcacttacaggccagctttgatcaaataacagataaatttaagagtcatatctttggagtcagtcagatcccagcagttccagtcctggctcagatacaattggggtgtgaacttagg

SEQ ID NO: 116644 - DNA, 120 bp, synthetic construct
  source 1..120: mol_type = other DNA
atagcgtgtaataagagggaggggagagctctccgaaccccccttccccgggatccctaccaagcaagtgagtctcttgctccagcccctccgagcctccccggctggagtcatggtgcc

SEQ ID NO: 116645 - DNA, 120 bp, synthetic construct; identical to SEQ ID NO: 11740
  source 1..120: mol_type = other DNA

SEQ ID NO: 116646 - DNA, 120 bp, synthetic construct; identical to SEQ ID NO: 11741
  source 1..120: mol_type = other DNA

SEQ ID NO: 116647 - DNA, 120 bp, synthetic construct
  source 1..120: mol_type = other DNA
ccactcttattcaacattctgttggaagtgctgaccagggcaattaggcaggagaaagaaacaaagggtattcaaataggaaaagaggaagtcaaattggccctgtttgcagaagacatg

SEQ ID NO: 116648 - DNA, 120 bp, synthetic construct
  source 1..120: mol_type = other DNA
aagatggattaaagacttacatgtttgacctaaaaccataaaaaccttagaagaaaacctaggcaataccgttcaggacataggcatgggcaaggacttcatgtctaaaacaccaaaagc

SEQ ID NO: 116649 - DNA, 120 bp, synthetic construct; identical to SEQ ID NO: 20978
  source 1..120: mol_type = other DNA

SEQ ID NO: 116650 - DNA, 120 bp, synthetic construct; identical to SEQ ID NO: 20979
  source 1..120: mol_type = other DNA

SEQ ID NO: 116651 - DNA, 120 bp, synthetic construct; identical to SEQ ID NO: 20980
  source 1..120: mol_type = other DNA

SEQ ID NO: 116652 - DNA, 120 bp, synthetic construct; identical to SEQ ID NO: 14548
  source 1..120: mol_type = other DNA

SEQ ID NO: 116653 - DNA, 120 bp, synthetic construct
  source 1..120: mol_type = other DNA
aatatgagttaagtgttttctcctgcggagattgcagtgagccgagatcgcgccactgcactccagactggcgacagagggagactctgtctcaaaataaataaataaataaataaataa

SEQ ID NO: 116654 - DNA, 120 bp, synthetic construct
  source 1..120: mol_type = other DNA
gaagtgtctgttcatgtccttcgcccactttttgatggggttgtttgtttttttcttgtaaatttgtttgagttcattgtagattctggatattagccctttgtcagatgactaggttgc

SEQ ID NO: 116655 - DNA, 120 bp, synthetic construct; identical to SEQ ID NO: 14549
  source 1..120: mol_type = other DNA

SEQ ID NO: 116656 - DNA, 120 bp, synthetic construct; identical to SEQ ID NO: 14550
  source 1..120: mol_type = other DNA

SEQ ID NO: 116657 - DNA, 120 bp, synthetic construct; identical to SEQ ID NO: 14551
  source 1..120: mol_type = other DNA

SEQ ID NO: 116658 - DNA, 120 bp, synthetic construct
  source 1..120: mol_type = other DNA
aaagacagcagtaacctccgcagacttaaatgtccctgtctgacagctttgaagagagccgtggttctaccagcacgcagctggagatctgagaacaggcagactgcctcctcaagtggg

SEQ ID NO: 116659 - DNA, 120 bp, synthetic construct
  source 1..120: mol_type = other DNA
tggaaaacactctgcaggatattatccaggagaaattccccaatatagcaaggcaggccaacgttcagattcaggaaatacagagaatgccacaaagatactcctcgagaagagcaactc

SEQ ID NO: 116660 - DNA, 120 bp, synthetic construct
  source 1..120: mol_type = other DNA
gcacccagattcataaagcaagtcctgagtgacctacaaagagacttagactcccacacattaataatgggagactttaacaccccaatgtcaacattagacagatcaacgagacagaaa

SEQ ID NO: 116661 - DNA, 120 bp, synthetic construct
  source 1..120: mol_type = other DNA
gacacatacactctcccaagactaaaccaggaagaagttgaatctctgaatagaccaataacaggagctgaaattgtggcaataatcaatagcttaccaaccaaagagtccagatggatt

SEQ ID NO: 116662 - DNA, 120 bp, synthetic construct
  source 1..120: mol_type = other DNA
tccactgctcaaggaaataaaagaggatacaaacaaatggaagaacattccatgctcatgggtaggaagaatcaatattgtgaaaatggtcatactgcccaaggtaatttatagattcaa

SEQ ID NO: 116663 - DNA, 120 bp, synthetic construct
  source 1..120: mol_type = other DNA
aaaaaatgttcatcatcactggccatcagagaaatgcaaatcaaaaccacattgagataccatctcacaccagttagaatggcaatcattaaaaagtcaggaaacaacaggtgctggaga

SEQ ID NO: 116664 - DNA, 120 bp, synthetic construct; identical to SEQ ID NO: 14552
  source 1..120: mol_type = other DNA

SEQ ID NO: 116665 - DNA, 120 bp, synthetic construct; identical to SEQ ID NO: 22578
  source 1..120: mol_type = other DNA

SEQ ID NO: 116666 - DNA, 120 bp, synthetic construct
  source 1..120: mol_type = other DNA
tttcctgactttttaatgattgccattctaactggtgtgaaatggtatctcattgtggttttgatttgcatttctctgatggccagtgatgatgagcattttttcatgtgttttttggct

SEQ ID NO: 116667 - DNA, 120 bp, synthetic construct
  source 1..120: mol_type = other DNA
gatattgattcttcctacccatgagcatggaatgttcttccagttgtttgtatcctcttttatttctttgagcagcagtttgtagttctccttgaagaggtccttcacatcccttgtaag

SEQ ID NO: 116668 - DNA, 120 bp, synthetic construct
  source 1..120: mol_type = other DNA
atttcttctagattttctagtttatttgtgtagaggtgtttgtagtattctctgatggtagtttgtatttctgtgggatcagtggtgatatcccctttgtcattttttattacatctatt

SEQ ID NO: 116669 - DNA, 120 bp, synthetic construct
  source 1..120: mol_type = other DNA
gctgtattcaggaaacccatctcaagtgcagagacacacataggctcaaaataaaaggatggaggaagatctaccaagcaaatggaaaacaaaaaaaggcaggggttgcaatcctagtct

SEQ ID NO: 116670 - DNA, 120 bp, synthetic construct
  source 1..120: mol_type = other DNA
ggttattctagttatgcattcttctaaagttttttcaaagttttcaacttctttgcctttggtttgaatgtcctcccgtagctcagagtaatttgatcgtctgaagccttcttctctcag

SEQ ID NO: 116671 - DNA, 120 bp, synthetic construct
  source 1..120: mol_type = other DNA
ccctgctttggctggcgcacggtgtgcgcacccactgacctgcgcccactgtctggcactccctagtgagatgaacccagtacctcagatggaaatgcagaaatcacccgtcttctgcgt

SEQ ID NO: 116672 - DNA, 120 bp, synthetic construct
  source 1..120: mol_type = other DNA
agtggcagacagtgggcgcaggtcagtgggtgcgcgcaccgtgcgcgagccgaagcagggtgaggcattgcctcactcgggaagcgcaaggggtcagggagttccctttccgagtcaaag

SEQ ID NO: 116673 - DNA, 120 bp, synthetic construct
  source 1..120: mol_type = other DNA
tgcttaaaggagctgatggagctgaaaaccaaggctggagaactacgtgaagaaggcagaaacctcaggaagcgatgcaatcaactggaagaaagggtatcagcgatggaagatgaaatg

SEQ ID NO: 116674 - DNA, 120 bp, synthetic construct; identical to SEQ ID NO: 116669
  source 1..120: mol_type = other DNA

SEQ ID NO: 116675 - DNA, 120 bp, synthetic construct
  source 1..120: mol_type = other DNA
ttaatgaatccaggagctggtttcttgaaaggatcaacaaaattgatagaccactagcaagactaataaagaagaaaagagagaagaatcaaatagacgcaataaaaaatgacaaagggg

SEQ ID NO: 116676 - DNA, 120 bp, synthetic construct
  source 1..120: mol_type = other DNA
tgacatgattgtatatctagaaaaccccattgtctcaccccaaaatctccttaagctgataagcaacttcagcaaagtctcaggatacaaaatcaatgtgcaaaaatcacaagcattctt

SEQ ID NO: 116677 - DNA, 120 bp, synthetic construct
  source 1..120: mol_type = other DNA
caaaagcaatggcaacaaaagacaaaattgacaattgggatctaattaaactaaagagcttctgcacagcaaaagaaactaccatcagagtgaacaggcaacctacaaaatgggagaaaa

SEQ ID NO: 116678 - DNA, 120 bp, synthetic construct; identical to SEQ ID NO: 22579
  source 1..120: mol_type = other DNA

SEQ ID NO: 116679 - DNA, 120 bp, synthetic construct; identical to SEQ ID NO: 22567
  source 1..120: mol_type = other DNA

SEQ ID NO: 116680 - DNA, 120 bp, synthetic construct; identical to SEQ ID NO: 22568
  source 1..120: mol_type = other DNA

SEQ ID NO: 116681 - DNA, 120 bp, synthetic construct; identical to SEQ ID NO: 22569
  source 1..120: mol_type = other DNA

SEQ ID NO: 116682 - DNA, 120 bp, synthetic construct; identical to SEQ ID NO: 22570
  source 1..120: mol_type = other DNA

SEQ ID NO: 116683 - DNA, 120 bp, synthetic construct; identical to SEQ ID NO: 22571
  source 1..120: mol_type = other DNA

SEQ ID NO: 116684 - DNA, 120 bp, synthetic construct; identical to SEQ ID NO: 22572
  source 1..120: mol_type = other DNA

SEQ ID NO: 116685 - DNA, 120 bp, synthetic construct; identical to SEQ ID NO: 22573
  source 1..120: mol_type = other DNA

SEQ ID NO: 116686 - DNA, 120 bp, synthetic construct; identical to SEQ ID NO: 22574
  source 1..120: mol_type = other DNA

SEQ ID NO: 116687 - DNA, 120 bp, synthetic construct; identical to SEQ ID NO: 22575
  source 1..120: mol_type = other DNA

SEQ ID NO: 116688 - DNA, 120 bp, synthetic construct
  source 1..120: mol_type = other DNA
atacaccatggaatactacgtagccataaaaaaggatgagttcatgtcctttgtagggacatggatgaagctggaaaccatcattctgagcaaactatcgcaaggacagaaaaccaaaca

SEQ ID NO: 116689 - DNA, 120 bp, synthetic construct; identical to SEQ ID NO: 22576
  source 1..120: mol_type = other DNA

SEQ ID NO: 116690 - DNA, 120 bp, synthetic construct; identical to SEQ ID NO: 22577
  source 1..120: mol_type = other DNA

SEQ ID NO: 116691 - DNA, 120 bp, synthetic construct; identical to SEQ ID NO: 12121
  source 1..120: mol_type = other DNA

SEQ ID NO: 116692 - DNA, 120 bp, synthetic construct; identical to SEQ ID NO: 31878
  source 1..120: mol_type = other DNA

SEQ ID NO: 116693 - DNA, 120 bp, synthetic construct; identical to SEQ ID NO: 31879
  source 1..120: mol_type = other DNA

SEQ ID NO: 116694 - DNA, 120 bp, synthetic construct; identical to SEQ ID NO: 31880
  source 1..120: mol_type = other DNA

SEQ ID NO: 116695 - DNA, 120 bp, synthetic construct; identical to SEQ ID NO: 31881
  source 1..120: mol_type = other DNA

SEQ ID NO: 116696 - DNA, 120 bp, synthetic construct; identical to SEQ ID NO: 31882
  source 1..120: mol_type = other DNA

SEQ ID NO: 116697 - DNA, 120 bp, synthetic construct; identical to SEQ ID NO: 31883
  source 1..120: mol_type = other DNA

SEQ ID NO: 116698 - DNA, 120 bp, synthetic construct; identical to SEQ ID NO: 31884
  source 1..120: mol_type = other DNA

SEQ ID NO: 116699 - DNA, 120 bp, synthetic construct; identical to SEQ ID NO: 31885
  source 1..120: mol_type = other DNA

SEQ ID NO: 116700 - DNA, 120 bp, synthetic construct; identical to SEQ ID NO: 31886
  source 1..120: mol_type = other DNA

SEQ ID NO: 116701 - DNA, 120 bp, synthetic construct; identical to SEQ ID NO: 31887
  source 1..120: mol_type = other DNA

SEQ ID NO: 116702 - DNA, 120 bp, synthetic construct; identical to SEQ ID NO: 31888
  source 1..120: mol_type = other DNA

SEQ ID NO: 116703 - DNA, 120 bp, synthetic construct; identical to SEQ ID NO: 31889
  source 1..120: mol_type = other DNA

SEQ ID NO: 116704 - DNA, 120 bp, synthetic construct; identical to SEQ ID NO: 31890
  source 1..120: mol_type = other DNA

SEQ ID NO: 116705 - DNA, 120 bp, synthetic construct; identical to SEQ ID NO: 31862
  source 1..120: mol_type = other DNA

SEQ ID NO: 116706 - DNA, 120 bp, synthetic construct
  source 1..120: mol_type = other DNA
agaaagaaagaaagaaagaaagaaagaaagaaagaaagaaagaaaaaagggaaagaaagaaaaagcaagcaagcaacggcgtaaggaatggctgaccccacaagaggcttgggcccctct

SEQ ID NO: 116707 - DNA, 120 bp, synthetic construct; identical to SEQ ID NO: 31863
  source 1..120: mol_type = other DNA

SEQ ID NO: 116708 - DNA, 120 bp, synthetic construct; identical to SEQ ID NO: 31864
  source 1..120: mol_type = other DNA

SEQ ID NO: 116709 - DNA, 120 bp, synthetic construct; identical to SEQ ID NO: 31865
  source 1..120: mol_type = other DNA

SEQ ID NO: 116710 - DNA, 120 bp, synthetic construct; identical to SEQ ID NO: 31866
  source 1..120: mol_type = other DNA

SEQ ID NO: 116711 - DNA, 120 bp, synthetic construct; identical to SEQ ID NO: 31867
  source 1..120: mol_type = other DNA

SEQ ID NO: 116712 - DNA, 120 bp, synthetic construct
  source 1..120: mol_type = other DNA
ggacctgatgatttttaaaatgggcagaggacctgaatagacatttcttgaaagagacatacaaaaagctaacagggccgggcacggtggttcatgcctgtaatcccagcacttcgggag

SEQ ID NO: 116713 - DNA, 120 bp, synthetic construct; identical to SEQ ID NO: 31868
  source 1..120: mol_type = other DNA

SEQ ID NO: 116714 - DNA, 120 bp, synthetic construct; identical to SEQ ID NO: 31869
  source 1..120: mol_type = other DNA

SEQ ID NO: 116715 - DNA, 120 bp, synthetic construct
  source 1..120: mol_type = other DNA
atgaacctgtcagtaagaactcagcaccgtaagacagaggtcactttctttatcccattctcccagtgccctatgcagtgcctagtatggaggactcaacaccatcaccctaatacctac

SEQ ID NO: 116716 - DNA, 120 bp, synthetic construct
  source 1..120: mol_type = other DNA
accactgtcaccatcaccaccaccatcaccatcaccaccaccatcatcaccaccaccactgtcaccatcaccatcactatcaccaccaccaccatcaccatcaccatcatcaccatcacc

SEQ ID NO: 116717 - DNA, 120 bp, synthetic construct; identical to SEQ ID NO: 31872
  source 1..120: mol_type = other DNA

SEQ ID NO: 116718 - DNA, 120 bp, synthetic construct; identical to SEQ ID NO: 31873
  source 1..120: mol_type = other DNA

SEQ ID NO: 116719 - DNA, 120 bp, synthetic construct; identical to SEQ ID NO: 31874
  source 1..120: mol_type = other DNA

SEQ ID NO: 116720 - DNA, 120 bp, synthetic construct; identical to SEQ ID NO: 31875
  source 1..120: mol_type = other DNA

SEQ ID NO: 116721 - DNA, 120 bp, synthetic construct; identical to SEQ ID NO: 31876
  source 1..120: mol_type = other DNA

SEQ ID NO: 116722 - DNA, 120 bp, synthetic construct; identical to SEQ ID NO: 31877
  source 1..120: mol_type = other DNA

SEQ ID NO: 116723 - DNA, 120 bp, synthetic construct
  source 1..120: mol_type = other DNA
gaaagatccaaattattattattattattattatttttttttttttgcgacgagtctcgctctgccgcctaggccgcagtgcagtggcatgatcttggctcactgcaagctctgcttccc

SEQ ID NO: 116724 - DNA, 120 bp, synthetic construct
  source 1..120: mol_type = other DNA
tcttaaaaaaattttttttctggctgggcacagtggcccagagattacaggcgcccgccaccatgtccagctaatttttgtatttttagtagagttggggttttactgtgttggccaggc

SEQ ID NO: 116725 - DNA, 120 bp, synthetic construct; identical to SEQ ID NO: 16539
  source 1..120: mol_type = other DNA

SEQ ID NO: 116726 - DNA, 120 bp, synthetic construct
  source 1..120: mol_type = other DNA
aaaaaataaataaataaataaataaataatacaggccgggagcagtgagtggctcatgcttgtaatcccaacactttaggagtctgaggtgggtacatcatttggggtcaggagttcaag

SEQ ID NO: 116727 - DNA, 120 bp, synthetic construct
  source 1..120: mol_type = other DNA
ctacaaaatattatatatatatatatatatatatatatttagatagagtctcgctctgtcaccaggctggagtgcagtggcacaacctcggctcactgcaacctccgcctcctcggttca

SEQ ID NO: 116728 - DNA, 120 bp, synthetic construct
  source 1..120: mol_type = other DNA
aagtagctgggattacaggtgtgtgccaccacgcccggctaattttttttttttttttttttttagtagagatgaggtttctccacgttgctcaggctggtctcgaattcccgacctcag

SEQ ID NO: 116729 - DNA, 120 bp, synthetic construct; identical to SEQ ID NO: 12797
  source 1..120: mol_type = other DNA

SEQ ID NO: 116730 - DNA, 120 bp, synthetic construct
  source 1..120: mol_type = other DNA
acttgagaccaggaggtcgagaccagcctggccaacatggcaaaaccctgtctccattaagaatataaaaattccacaatggttgaactagtttacagtcccaccaacagtgtaaaagtg

SEQ ID NO: 116731 - DNA, 120 bp, synthetic construct
  source 1..120: mol_type = other DNA
atatggactttaaagtggttttttccaattctgtgaagaaagtcattggtagcttgatggggatggcattgaatctataaattaccttgggcagtatggccattttcatgatattgattc

SEQ ID NO: 116732 - DNA, 120 bp, synthetic construct
  source 1..120: mol_type = other DNA
atatacacacacacacacacacacacacacacatacatatatatattcacatatatatttttgagacaggatctcactctgttgcccaggctggagtgcggtaaggggatcatggctcac

SEQ ID NO: 116733 - DNA, 120 bp, synthetic construct
  source 1..120: mol_type = other DNA
aaataaataaattaaaaaaaaaaaaaaaaaaaactcctggcctcaagcgatcctcctaactcagcctcccaaagtgctgggattacaggggtagccaccacactggcctacgttttttga

SEQ ID NO: 116734 - DNA, 120 bp, synthetic construct
  source 1..120: mol_type = other DNA
tgtatttcatgtagattcattcttttatatttatgtatttatttagagacgggttcttgctctgtcactcaggctggatggagtacagtggtgcaaacatggctcactgcagccttgacc

SEQ ID NO: 116735 - DNA, 120 bp, synthetic construct; identical to SEQ ID NO: 11620
  source 1..120: mol_type = other DNA

SEQ ID NO: 116736 - DNA, 120 bp, synthetic construct; identical to SEQ ID NO: 11621
  source 1..120: mol_type = other DNA

SEQ ID NO: 116737 - DNA, 120 bp, synthetic construct; identical to SEQ ID NO: 11622
  source 1..120: mol_type = other DNA

SEQ ID NO: 116738 - DNA, 120 bp, synthetic construct; identical to SEQ ID NO: 11544
  source 1..120: mol_type = other DNA

SEQ ID NO: 116739 - DNA, 120 bp, synthetic construct; identical to SEQ ID NO: 11545
  source 1..120: mol_type = other DNA

SEQ ID NO: 116740 - DNA, 120 bp, synthetic construct; identical to SEQ ID NO: 25669
  source 1..120: mol_type = other DNA

SEQ ID NO: 116741 - DNA, 120 bp, synthetic construct; identical to SEQ ID NO: 25670
  source 1..120: mol_type = other DNA

SEQ ID NO: 116742 - DNA, 120 bp, synthetic construct
  source 1..120: mol_type = other DNA
ttccaatttcatccatgtccctacaaaggatatgaactcatcattttttatggctgcacagtattccatggtgtatatgtgccacattttcttaatccagtctatcattgttggacatct

SEQ ID NO: 116743 - DNA, 120 bp, synthetic construct
  source 1..120: mol_type = other DNA
gatagttgtagatatgcggcattatttctgagggctctgttctgttccattgatctatatctctgttttggtaccagtaccatgctgttttggttactgtagccttgtagcatagtttga

SEQ ID NO: 116744 - DNA, 120 bp, synthetic construct
  source 1..120: mol_type = other DNA
gatattggctgtgggtttgtcatagatagctcttatattttgaaatacgtcccatcaatacctaatttattgagagtttttagcatgaagggttgttgaattttgtcaaaggctttttct

SEQ ID NO: 116745 - DNA, 120 bp, synthetic construct
  source 1..120: mol_type = other DNA
taaatttccctctacacactgctttgaatgcgtcccagagattctggtatgtggtgtctttgctctcgttggtttcgaagaacatctttatttctgccttcatttcgttatgtacccagt

SEQ ID NO: 116746 - DNA, 120 bp, synthetic construct
  source 1..120: mol_type = other DNA
tgtctataaagtattttatttctccttcacttatgaagcttagtttggccggatatgaaattctgggttgaaaattcttttctttaagaatgttgaatattggcccccactctcttctgg

SEQ ID NO: 116747 - DNA, 120 bp, synthetic construct
  source 1..120: mol_type = other DNA
agacttaagtgtccctgtctgacagctttgaagagagcagtggttctcccagcacgcagctggagatctgagaacgggcagactgcctcctcaagtgggtccctgacccctgacccccga

SEQ ID NO: 116748 - DNA, 120 bp, synthetic construct; identical to SEQ ID NO: 25671
  source 1..120: mol_type = other DNA

SEQ ID NO: 116749 - DNA, 120 bp, synthetic construct; identical to SEQ ID NO: 33750
  source 1..120: mol_type = other DNA

SEQ ID NO: 116750 - DNA, 120 bp, synthetic construct
  source 1..120: mol_type = other DNA
cgtaaatggatactggcaaaccgaatccagcagcacatcaaaaagcttatccaccatgatcaagtgggcttcatccctgggatgcaaggctggttcaatatacacaaatcaataaatgta

SEQ ID NO: 116751 - DNA, 120 bp, synthetic construct
  source 1..120: mol_type = other DNA
aactatctgatctttgacaaacctgacaaaaacaagcaatgtggaaaggattccctatttaataaatggtgctgggaaaactggctagccatatgtagaaagctgaaactggatcccttc

SEQ ID NO: 116752 - DNA, 120 bp, synthetic construct
  source 1..120: mol_type = other DNA
gtcgaggctgcagtgagctaatatcacactgctgtactccagcctgggcaagagagtgagatcctgtctctattttttgtttttaaaaatagctgcttcagtaaggcacaagtgtatatc

SEQ ID NO: 116753 - DNA, 120 bp, synthetic construct; identical to SEQ ID NO: 6593
  source 1..120: mol_type = other DNA

SEQ ID NO: 116754 - DNA, 120 bp, synthetic construct; identical to SEQ ID NO: 13057
  source 1..120: mol_type = other DNA

SEQ ID NO: 116755 - DNA, 120 bp, synthetic construct
  source 1..120: mol_type = other DNA
actcctgacctcaggtgatcctccagcctcagcctcccaaagtactgcgattacaggcgtgagccaacacgcccggcaaaaatcaataatcttttttttttttttttttttttgttttta

SEQ ID NO: 116756 - DNA, 120 bp, synthetic construct
  source 1..120: mol_type = other DNA
ccgggcggagggctgaccccccccacctccctcccggacggggcggctggccaggcagaggggctcctcacttcccagatggggcggcggggcagaggcgctccccacatctcagacgat

SEQ ID NO: 116757 - DNA, 120 bp, synthetic construct; identical to SEQ ID NO: 12602
  source 1..120: mol_type = other DNA

SEQ ID NO: 116758 - DNA, 120 bp, synthetic construct; identical to SEQ ID NO: 12603
  source 1..120: mol_type = other DNA

SEQ ID NO: 116759 - DNA, 120 bp, synthetic construct; identical to SEQ ID NO: 12604
  source 1..120: mol_type = other DNA

SEQ ID NO: 116760 - DNA, 120 bp, synthetic construct
  source 1..120: mol_type = other DNA
gtgcttggatttgagggtgtatatatatggctgaggcagaaggattgcttgagcccaggagtttgaggccagcctaggcaacataacaagaccccatctcttaaaaaaattttatatata

SEQ ID NO: 116761 - DNA, 120 bp, synthetic construct; identical to SEQ ID NO: 12606
  source 1..120: mol_type = other DNA

SEQ ID NO: 116762 - DNA, 120 bp, synthetic construct; identical to SEQ ID NO: 12607
  source 1..120: mol_type = other DNA

SEQ ID NO: 116763 - DNA, 120 bp, synthetic construct; identical to SEQ ID NO: 12608
  source 1..120: mol_type = other DNA

SEQ ID NO: 116764 - DNA, 120 bp, synthetic construct; identical to SEQ ID NO: 12609
  source 1..120: mol_type = other DNA

SEQ ID NO: 116765 - DNA, 120 bp, synthetic construct; identical to SEQ ID NO: 23291
  source 1..120: mol_type = other DNA

SEQ ID NO: 116766 - DNA, 120 bp, synthetic construct; identical to SEQ ID NO: 23292
  source 1..120: mol_type = other DNA

SEQ ID NO: 116767 - DNA, 120 bp, synthetic construct; identical to SEQ ID NO: 23293
  source 1..120: mol_type = other DNA

SEQ ID NO: 116768 - DNA, 120 bp, synthetic construct; identical to SEQ ID NO: 23294
  source 1..120: mol_type = other DNA

SEQ ID NO: 116769 - DNA, 120 bp, synthetic construct
  source 1..120: mol_type = other DNA
agaggtgatgagcacaggtggtgagaggagcaggggctgactggaggggcgaggtgagggggcgcggtggatgggaagggcagggtggataggggccttctaattagccctctaatgggg

SEQ ID NO: 116770 - DNA, 120 bp, synthetic construct
  source 1..120: mol_type = other DNA
tttctctttctctttttttctttcttccccttccttccttcctttcttgtttttgtttgtttgtttgagacagggtctcactctggtatgcaggctggagtgcagtgatgcaatcatagc

SEQ ID NO: 116771 - DNA, 120 bp, synthetic construct; identical to SEQ ID NO: 23869
  source 1..120: mol_type = other DNA

SEQ ID NO: 116772 - DNA, 120 bp, synthetic construct
  source 1..120: mol_type = other DNA
agcaggcggctttgggggaggaggcggtgctgctgttggatgacataatggcggaggtggaggtggtggcggaggaggagggcctcgtggagcggcgggaggaggcccagcgggcacagc

SEQ ID NO: 116773 - DNA, 120 bp, synthetic construct
  source 1..120: mol_type = other DNA
tagagggtttagcgggggagggtaagggaaataattcattcctgtaagcaagagtgagcacctcacccgaaaacctatctaagctttctccaccttgtcctgacaggtgggagaagagaa

SEQ ID NO: 116774 - DNA, 120 bp, synthetic construct
  source 1..120: mol_type = other DNA
ccccatgagattgggctccctgaatgtgcgtcctggtcatccttgccccaaaccacaaaggactgtttagattgatggatttccttaagctgttgccccatcagacttgtgtgtgctttt

SEQ ID NO: 116775 - DNA, 120 bp, synthetic construct; identical to SEQ ID NO: 6617
  source 1..120: mol_type = other DNA

SEQ ID NO: 116776 - DNA, 120 bp, synthetic construct; identical to SEQ ID NO: 27771
  source 1..120: mol_type = other DNA

SEQ ID NO: 116777 - DNA, 120 bp, synthetic construct; identical to SEQ ID NO: 15158
  source 1..120: mol_type = other DNA

SEQ ID NO: 116778 - DNA, 120 bp, synthetic construct; identical to SEQ ID NO: 9444
  source 1..120: mol_type = other DNA

SEQ ID NO: 116779 - DNA, 120 bp, synthetic construct
  source 1..120: mol_type = other DNA
gttagccaggatagtctcaatctcctgacctcgtgatccgcccgccttggcctcccaaagtgctgggattacaggcctgagccaccacgcccggcccaatttattctttctttttagaat

SEQ ID NO: 116780 - DNA, 120 bp, synthetic construct
  source 1..120: mol_type = other DNA
tggaccactcaactaccatgtcaggtccttgttccactgttgctcagccctggctctgtgctaggcctgtgctgcaccccatgggaagcaaaagatgagagaagcatgtcatccctgtcc

SEQ ID NO: 116781 - DNA, 120 bp, synthetic construct
  source 1..120: mol_type = other DNA
agctttgggactcggactggcttctttgctcctcggcttacagacagcctattgtgggacactgtgatcgtgtgagttaatattctttaataaactcccatatgtatatatggagtatat

SEQ ID NO: 116782 - DNA, 120 bp, synthetic construct
  source 1..120: mol_type = other DNA
tcgcttgaacctgggaggtggaggttgcagtgagcagatcatgccactgcactccagcctgggcgacagaagcaagactccatctcaaaaataaaaataaaataaaaaataaaaataaat

SEQ ID NO: 116783 - DNA, 120 bp, synthetic construct
  source 1..120: mol_type = other DNA
cctccctcccggacggggtggctgccgggcggggatgctcctcacttcccagacggggcggctgctgggtggaggggctcctcacttctcagacggggcggctgccgggcagaggggctc

SEQ ID NO: 116784 - DNA, 120 bp, synthetic construct
  source 1..120: mol_type = other DNA
cataaagtggggaaaggacgacctattcaacaaaaggtgctgggacaactgtcaagccacaggtagaagaatgaaactggatcctcatctctcaccttatacaaaaatcaattcaagatg

SEQ ID NO: 116785 - DNA, 120 bp, synthetic construct
  source 1..120: mol_type = other DNA
tgggatgtgaggagcgcctctgcccggccgcaaccccgtctgggaggcgaggagcgtctctgcccggccgccccgtctgagaagtgaggagaccctctgcctggcagccaccccgtctga

SEQ ID NO: 116786 - DNA, 120 bp, synthetic construct
  source 1..120: mol_type = other DNA
aagattctagaagacaacattggaaaaacccttctagacactggcttaggcaaacacttcatgaccaagaacccaaacacaaatgcatcaacaaaataagatacattgatgggacttaat

SEQ ID NO: 116787 - DNA, 120 bp, synthetic construct
  source 1..120: mol_type = other DNA
aaagaattttcaacccataatttcatatccagccaaactaagcttcataggtgaaggagaaataaaagccttttttttaatttttttttttttttattatactctaagttttagggtaca

SEQ ID NO: 116788 - DNA, 120 bp, synthetic construct
  source 1..120: mol_type = other DNA
aattcgggaggtggaggttgcagtgacctgagattgtgctactgcactccagcctggaagacagagtgaggctccgtctcaaaaaaaaaaagaaaaagaagaaaatttaaattaaaaatt

SEQ ID NO: 116789 - DNA, 120 bp, synthetic construct
  source 1..120: mol_type = other DNA
acaaaaccggctcctgcttgcaggaagcctactctctaaaacagtgcttgccaagctcgcctgatcacaacttcggagcttgtttaagttcaaaatcggcttccctgctgtggtgagcca

SEQ ID NO: 116790 - DNA, 120 bp, synthetic construct
  source 1..120: mol_type = other DNA
ttgcgtgttagggtcagggcttcgggacttgtttctcctaaatcttttttttttttcttttttgagacggagtcttggtctgtcacgcaggctggagtgctgtggcgcgatctcagctca

SEQ ID NO: 116791 - DNA, 120 bp, synthetic construct; identical to SEQ ID NO: 23705
  source 1..120: mol_type = other DNA

SEQ ID NO: 116792 - DNA, 120 bp, synthetic construct
  source 1..120: mol_type = other DNA
agctccaactgggtggagcccaccacagctcaaggaggcctgcctgcctctgtaggctccacctctgggggcagggcacagacaaacaaaaagacagcagtaacctctgcagacttaagt

SEQ ID NO: 116793 - DNA, 120 bp, synthetic construct
  source 1..120: mol_type = other DNA
gaaccaagttggaaaacactctgcaggatattatccaggagaacttccccaatctagcaaggcaggccaacgttcagattcaggaagtacagagaacaccacaaagatactcctcgagaa

SEQ ID NO: 116794 - DNA, 120 bp, synthetic construct; identical to SEQ ID NO: 108851
  source 1..120: mol_type = other DNA

SEQ ID NO: 116795 - DNA, 120 bp, synthetic construct
  source 1..120: mol_type = other DNA
tttaccaaccaaaaagagtccaggaccagatggattcactgccgaattctaccagaggtacaaggaggaactggtaccattccttctgaaactattccaatcaatagaaaaagagggaat

SEQ ID NO: 116796 - DNA, 120 bp, synthetic construct
  source 1..120: mol_type = other DNA
taatttacagattcaatgccatccccatcaagctaccaatgactttcttcacagaattggaaaaaactactttaaagttcatatggaaccaaaaaagagcccgcattgccaagtcaatcc

SEQ ID NO: 116797 - DNA, 120 bp, synthetic construct
  source 1..120: mol_type = other DNA
ataccatttgacccagccatcccattactgggtatatacccaaatgagtataaatcatgctgctataaagacacatgcacacgtatgtttattgcggcactattcacaatagcaaagact

SEQ ID NO: 116798 - DNA, 120 bp, synthetic construct; identical to SEQ ID NO: 23699
  source 1..120: mol_type = other DNA

SEQ ID NO: 116799 - DNA, 120 bp, synthetic construct; identical to SEQ ID NO: 23700
  source 1..120: mol_type = other DNA

SEQ ID NO: 116800 - DNA, 120 bp, synthetic construct
  source 1..120: mol_type = other DNA
agggtatcagtgatggaagacgaaatgaatcaaatgaaacgtgaagagaagtttagagaaaaaagaataaaaagaaatgaacaaaccctccaagaaatatgggactatgtgaaaacacca

SEQ ID NO: 116801 - DNA, 120 bp, synthetic construct
  source 1..120: mol_type = other DNA
tcaagacccatcagtgtgctgtattcaggaaacccacctcacgtgcagagacacacataggctcaaaataaaaggatggaggaacatctaccaagcaaatggaaaacaaaaaaaggcagg

SEQ ID NO: 116802 - DNA, 120 bp, synthetic construct
  source 1..120: mol_type = other DNA
actagcaagactaataaagaaaagagagaagaatcaaatagatgcaataaaaaatgataaaggggatatcaccaccgatcccacagaaatacaaactaccatcagagaatactacaaaca

SEQ ID NO: 116803 - DNA, 120 bp, synthetic construct
  source 1..120: mol_type = other DNA
caccaccgatcccacagaaatacaaactaccatcagagaataccagaaacacctctacggaaataaactagaaaatctagaagaaatggataaattcctcaacaaatacacccacccaag

SEQ ID NO: 116804 - DNA, 120 bp, synthetic construct
  source 1..120: mol_type = other DNA
gtgaaggacctcttcaaggagaactacaaaccactgctcaacaaaataaaagaggtcacaaacaaatggaagaacattccatgctccgggataggaagaatcaatatcatgaaaatggcc

SEQ ID NO: 116805 - DNA, 120 bp, synthetic construct
  source 1..120: mol_type = other DNA
aaaaatgctcatcatcattggccatcagagaaatgcaaatcaaaaccacaccagttagtatggcgatcattaaaaagtcaggaaacaacaggtgctggagaggatgtggagaaataggaa

SEQ ID NO: 116806 - DNA, 120 bp, synthetic construct; identical to SEQ ID NO: 23701
  source 1..120: mol_type = other DNA

SEQ ID NO: 116807 - DNA, 120 bp, synthetic construct; identical to SEQ ID NO: 116803
  source 1..120: mol_type = other DNA

SEQ ID NO: 116808 - DNA, 120 bp, synthetic construct; identical to SEQ ID NO: 116804
  source 1..120: mol_type = other DNA

SEQ ID NO: 116809 - DNA, 120 bp, synthetic construct
  source 1..120: mol_type = other DNA
caaacaacctcatcaaaaagtgggtgaaggatatgaacagacacatctcaaaagaagacatttatgcagccaacagttacatgaaaaattgctcatcatcaatggccatcaaagaaatgc

SEQ ID NO: 116810 - DNA, 120 bp, synthetic construct; identical to SEQ ID NO: 23702
  source 1..120: mol_type = other DNA

SEQ ID NO: 116811 - DNA, 120 bp, synthetic construct
  source 1..120: mol_type = other DNA
ctagtttacaatcccaccaacggtgtaaaagtgttcctatttctccacatcctctccagcacctgttgtttcctgactttttaatgatacccattctaactggtgtgagatggtatctca

SEQ ID NO: 116812 - DNA, 120 bp, synthetic construct
  source 1..120: mol_type = other DNA
gattgcaacacctgcctttttttgttttccatttgcttggtagatgttcctccatccctttattttgagcctatgtgtgtctctgcacgtgagatgggtttcctgaatacagcacactga

SEQ ID NO: 116813 - DNA, 120 bp, synthetic construct
  source 1..120: mol_type = other DNA
ggttccattctccccatgactttcaggtacaccaatcagacgtagatttggtcttttcacatagtcccatatttcttggaggctttgtttgtttctttttattctttttcctctaaactt

SEQ ID NO: 116814 - DNA, 120 bp, synthetic construct; identical to SEQ ID NO: 23703
  source 1..120: mol_type = other DNA

SEQ ID NO: 116815 - DNA, 120 bp, synthetic construct; identical to SEQ ID NO: 23704
  source 1..120: mol_type = other DNA

SEQ ID NO: 116816 - DNA, 120 bp, synthetic construct
  source 1..120: mol_type = other DNA
agggtacatgtgcacaatgtgcaggtttgttacatatgcatacatgtgccatgctggtgccctgcacccactaacttgtcatctagcattaggtatatcacccaatgctatccctcccca

SEQ ID NO: 116817 - DNA, 120 bp, synthetic construct
  source 1..120: mol_type = other DNA
tagtttcttttgctgtgcagaagctctttagtttaattagatcccatttgtcaattttggctttggttgccattgcttttggtgttttagacacgaagtccttacccatgcctatgtgct

SEQ ID NO: 116818 - DNA, 120 bp, synthetic construct
  source 1..120: mol_type = other DNA
tgacttttgtacattgattttgtatcctgagaatttgctcaagttgcttatcagcttaaggagattttgggctgagacaatggggttttctagatatacaatcatgtcatctgcaaacag

SEQ ID NO: 116819 - DNA, 120 bp, synthetic construct
  source 1..120: mol_type = other DNA
ttagtcttgggagggtgtatgtgtcgaggaatttatccatttcttctagattttctagtttatttgcgtagaggtgtttgtagtattctctgatggtagtttgtatttctgtggtatcag

SEQ ID NO: 116820 - DNA, 120 bp, synthetic construct
  source 1..120: mol_type = other DNA
ctttgctggtttaaagtctgttttatcagagactaggattacaacccctgcctttttttgttttccatttgcttggtagatcttcctccatccttttattttgagcctatgtgtgtctct

SEQ ID NO: 116821 - DNA, 120 bp, synthetic construct
  source 1..120: mol_type = other DNA
ccctttcttccagttgattgcatcagctcctgaggcttctgcattcttcacatagttctcgagccttggttttcagctccaggagctcctttaagcacttctctgtattggttattctag

SEQ ID NO: 116822 - DNA, 120 bp, synthetic construct; identical to SEQ ID NO: 25851
  source 1..120: mol_type = other DNA

SEQ ID NO: 116823 - DNA, 120 bp, synthetic construct
  source 1..120: mol_type = other DNA
ggcaatcaggcaggagaagggaataacgggcattcaattaggaaaagaggaagtcaaattgtccctgtttgcagatgacatgattgtatatctagaaaaccccattgtctcagcccaaaa

SEQ ID NO: 116824 - DNA, 120 bp, synthetic construct
  source 1..120: mol_type = other DNA
aacctaggcaataccattcaggacataggcatgggcaaggacttcatgtctaaaaaaccaaaagcaatggcaacaaaagccaaaattgacaaatgggatctaattaaactaaagagcttc

SEQ ID NO: 116825 - DNA, 120 bp, synthetic construct
  source 1..120: mol_type = other DNA
atcaaaacagagcccgcatcaccaagtcaatcctaagccaaaagaacaaagctggaggcatcatgctacctgacttcaaactatactacaaggctacagtaaccaaaacagcatggtact

SEQ ID NO: 116826 - DNA, 120 bp, synthetic construct
  source 1..120: mol_type = other DNA
caatggggaaaggattccctatttaataaatggtgctgggaaaattggctagccgtatatatcaaaagctgaaactggatcccttccttacaccttatacaaaaattaattcaagatgga

SEQ ID NO: 116827 - DNA, 120 bp, synthetic construct
  source 1..120: mol_type = other DNA
aggggggagggatagcattaggagatatacctaatgttaaatgacgagttaatgggtgttgtacaccaacatggcacatgtatacatatgtaactaacctacacgttgtgcacatgtacc

SEQ ID NO: 116828 - DNA, 120 bp, synthetic construct
  source 1..120: mol_type = other DNA
gcgatggaagatgaaatgaatgaaatgaagcatgaagataagtttagagaaaaagaataaaaagaaacaaacaaagcctccaagaaatatgggactgtgtgaaaagaccaaatctacgtc

SEQ ID NO: 116829 - DNA, 120 bp, synthetic construct
  source 1..120: mol_type = other DNA
ggtaccaaaacagagatatagaccaatggaacagaacagagccctcagaaataataccacacatctacaactatctgatctttgacaaacctgacaaaaacaagaaataggcaaaggatt

SEQ ID NO: 116830 - DNA, 120 bp, synthetic construct
  source 1..120: mol_type = other DNA
gtatatacccaaaggattataaatcatgctgctataaagacacatgcacacatatgtttattgcggcactattcacaatagcaaagacttggaaccaacccaaatgtccctcagtgatag

SEQ ID NO: 116831 - DNA, 120 bp, synthetic construct
  source 1..120: mol_type = other DNA
aattaggccagttatctattctctgccggcggaaaagtggctttttaaatttttttttttattttttagatggagtcttgctctgtcgcccaggctggagtgcagtggcatgatcttggc

SEQ ID NO: 116832 - DNA, 120 bp, synthetic construct; identical to SEQ ID NO: 23073
  source 1..120: mol_type = other DNA

SEQ ID NO: 116833 - DNA, 120 bp, synthetic construct
  source 1..120: mol_type = other DNA
tgtcaaatagaaaagggggaaatgtggggaaaaggagagatcggattgttactgtgtctgggtagaaagaagtagacatgggagactccattttgttctgtactaagaaaaattcttctg

SEQ ID NO: 116834 - DNA, 120 bp, synthetic construct
  source 1..120: mol_type = other DNA
aatgtgtgacagcctgaaacagcattctccaatcccaggtgaggatctgacaacctggaatagaactccacaccggcaggtgagcatctgacagcattgaatggcacccaaacccataga

SEQ ID NO: 116835 - DNA, 120 bp, synthetic construct
  source 1..120: mol_type = other DNA
acacccccaggtgagcatctgatatcctggaacagcacgcacacccccaggtgagcatctgacagcctggagcagcacgcacacccccagtgagcatctgacagcctggaacagcaccca

SEQ ID NO: 116836 - DNA, 120 bp, synthetic construct
  source 1..120: mol_type = other DNA
ctgcacccccaggtgagcatctgacagcctggaacagcacacacacccccaggtgagcatctgacagcctggaacagcacccacacccccaggcgagcatctgacagcatgtaacagcac

SEQ ID NO: 116837 - DNA, 120 bp, synthetic construct
  source 1..120: mol_type = other DNA
catctgacagtctggaacagcacccatacgctcagatgagcatctgacagcctggaacaggaccctgcacccccaggtgagcatctgacagtctggaacagcacccacacacccaggcga

SEQ ID NO: 116838 - DNA, 120 bp, synthetic construct; identical to SEQ ID NO: 12
  source 1..120: mol_type = other DNA

SEQ ID NO: 116839 - DNA, 120 bp, synthetic construct
  source 1..120: mol_type = other DNA
gcacacccaggtgagcatctgacagcctggaacagcacacacacacccaggtgagcatctgaaagcctggaagagcacccacacccccaggcgagcatctgacagcatgcaacagcactc

SEQ ID NO: 116840 - DNA, 120 bp, synthetic construct
  source 1..120: mol_type = other DNA
cacccatagcccaaggtgagcatctgacaacctgaagcagcacccacacaccgaggtgagcatctgacctcccggagcagcaccagtacccccaggcgagcatctgaactcatggagcag

SEQ ID NO: 116841 - DNA, 120 bp, synthetic construct
  source 1..120: mol_type = other DNA
cagcacccacagcccaaggtgagcatctgacaacctggagcagcacccacgcccccaggcgagcatctgaacacacggagcagcacccaaacccccaggcgagcatccgacagcctggag

SEQ ID NO: 116842 - DNA, 120 bp, synthetic construct
  source 1..120: mol_type = other DNA
aggtgagcatctgacatcgtagagcagcaccccacacccacaggtgagcatctgacagcctggagcagcagccacatccccaggtgagaatctgacagcctggaacagcaccctgcaccc

SEQ ID NO: 116843 - DNA, 120 bp, synthetic construct; identical to SEQ ID NO: 13
  source 1..120: mol_type = other DNA

SEQ ID NO: 116844 - DNA, 120 bp, synthetic construct
  source 1..120: mol_type = other DNA
tcaggtaagcatctgacagactggaacagcacccacacgcccaggtgagcctctgacagcctggaacagcacgcgcaaacccaggtgagcatctgacagcctggaacagcacccacaccc

SEQ ID NO: 116845 - DNA, 120 bp, synthetic construct
  source 1..120: mol_type = other DNA
cacccccagttgagcaactgatggtctggagcagcacccacaaccacaggtgaacatcagagagtctggagcaacgcccacaaccccaggcgagcatctgacagcctggagcagtgccca

SEQ ID NO: 116846 - DNA, 120 bp, synthetic construct
  source 1..120: mol_type = other DNA
ccacacccccaggtgagcatctgtccgcatcacatggcatcctcacccccagttgcgcatctgatggtctggagcagcacccacacccacaggtgagcatcagacagcctggaaccgcag

SEQ ID NO: 116847 - DNA, 120 bp, synthetic construct; identical to SEQ ID NO: 14
  source 1..120: mol_type = other DNA

SEQ ID NO: 116848 - DNA, 120 bp, synthetic construct; identical to SEQ ID NO: 15
  source 1..120: mol_type = other DNA

SEQ ID NO: 116849 - DNA, 120 bp, synthetic construct
  source 1..120: mol_type = other DNA
acgcgcaaacccaggtgagcatctgacagcctggaacagcacccacacccacaggtgagcatctgacagcatgtaacagcacccacacccccaggtgagcatctgacagcctgcaacagc

SEQ ID NO: 116850 - DNA, 120 bp, synthetic construct; identical to SEQ ID NO: 116845
  source 1..120: mol_type = other DNA

SEQ ID NO: 116851 - DNA, 120 bp, synthetic construct; identical to SEQ ID NO: 116846
  source 1..120: mol_type = other DNA

SEQ ID NO: 116852 - DNA, 120 bp, synthetic construct; identical to SEQ ID NO: 14
  source 1..120: mol_type = other DNA

SEQ ID NO: 116853 - DNA, 120 bp, synthetic construct; identical to SEQ ID NO: 15
  source 1..120: mol_type = other DNA

SEQ ID NO: 116854 - DNA, 120 bp, synthetic construct; identical to SEQ ID NO: 116849
  source 1..120: mol_type = other DNA

SEQ ID NO: 116855 - DNA, 120 bp, synthetic construct; identical to SEQ ID NO: 16
  source 1..120: mol_type = other DNA

SEQ ID NO: 116856 - DNA, 120 bp, synthetic construct
  source 1..120: mol_type = other DNA
cagcacccacacccccaggtgagcatctgatgatctggagcagcacccacaaccacaggtgagcatcggagagtcaggagcagtgcccacacacccaggcgagcatctgacagcctagag

SEQ ID NO: 116857 - DNA, 120 bp, synthetic construct
  source 1..120: mol_type = other DNA
aacagcaccaacaccccaaggcgagcatctgacggcctggaacagcacccacacccccaggtgagcatcagacagcctggaacaacacccatacccacaggtgagcatctgacattgtgg

SEQ ID NO: 116858 - DNA, 120 bp, synthetic construct
  source 1..120: mol_type = other DNA
tgagcatctgacagcctggaacagcacccacacccccaggcgagcatctgatagcctggaacagcacccacacccccaggagagcatccggcagcctgcagcagaacccacaccaacagg

SEQ ID NO: 116859 - DNA, 120 bp, synthetic construct
  source 1..120: mol_type = other DNA
gcctggaacagcacgcgcaaccccaggtgagcatctgacagcctggaacagcacccacacccacaggtgagcatctgacagcatgtaacagcacccacactcccaggtgagcatctgaca

SEQ ID NO: 116860 - DNA, 120 bp, synthetic construct; identical to SEQ ID NO: 16
  source 1..120: mol_type = other DNA

SEQ ID NO: 116861 - DNA, 120 bp, synthetic construct; identical to SEQ ID NO: 116856
  source 1..120: mol_type = other DNA

SEQ ID NO: 116862 - DNA, 120 bp, synthetic construct
  source 1..120: mol_type = other DNA
cccaggcgagcatctgacagcctggagcagtgcccacacccccaggtgagcatctgacatcgtggagcagcaccccacacccacaggtgagcatctgacagactggagcagcacccacac

SEQ ID NO: 116863 - DNA, 120 bp, synthetic construct
  source 1..120: mol_type = other DNA
ccccaaggcgagcatctgacggcctggaacggcacccacaaccccaggcgagcatcggacagcctggagcagcaccccacacccccaggtgagcatccgacagcctggagcagcacccac

SEQ ID NO: 116864 - DNA, 120 bp, synthetic construct
  source 1..120: mol_type = other DNA
cacccacacaccgaggtgagcatctgacctcccggagcagcaccagtacccccaggcgagcatctgaactcatggagcagcacccacacccccaggcgagcatctgaccgaacggagcag

SEQ ID NO: 116865 - DNA, 120 bp, synthetic construct
  source 1..120: mol_type = other DNA
cccacaggcgagcatctgaaaccacggagcagcacccacacctcccggcgagcatccgacagcctggagcagcacccacacacccaggtgcgcatctgatggtctggagcagcacccaca

SEQ ID NO: 116866 - DNA, 120 bp, synthetic construct
  source 1..120: mol_type = other DNA
accacacctccaggtgagcatctgacaacagggagcagcacccatagcccatggtgagcatctgacaacctggagcagcacccacacccccaggtgagcatctgatgatctggagcagca

SEQ ID NO: 116867 - DNA, 120 bp, synthetic construct
  source 1..120: mol_type = other DNA
gatggtctggagcagcacccacaaccacaggtgagcatccgacagcctggaacagcacccacacactcaggcgagcatctgacatccttgagcagcacccacacccccaggtgagcatct

SEQ ID NO: 116868 - DNA, 120 bp, synthetic construct
  source 1..120: mol_type = other DNA
ggtgagcatccgatagcctggagcaacacccatacccccaggtgagcatctgaccgcatggaatggcatcctcacctccaggtgagcatccgacagcctggagcagcacccacacgccca

SEQ ID NO: 116869 - DNA, 120 bp, synthetic construct
  source 1..120: mol_type = other DNA
cccacactgcagggcgagcatctgacagcctggagcagtgcccacacccccaggtgagcatctgacaccatggagcagcacccacagaccaaggtgagcatctgacaacctggagcagca

SEQ ID NO: 116870 - DNA, 120 bp, synthetic construct
  source 1..120: mol_type = other DNA
ccaggtgagcatctgacagactggaacagctcccaaatgcccagctgagcctctgacagcctggaacagcaccttgcacccccaggggagcatctgacagcctggaacagcacgcacacc

SEQ ID NO: 116871 - DNA, 120 bp, synthetic construct
  source 1..120: mol_type = other DNA
agcacgctgcacccccaggtgacgatctgacagcctggaacagcacccacacccccaggtgagcagctgatatcctggaacagcacccacacccccaggtgagcatctgacaggctggag

SEQ ID NO: 116872 - DNA, 120 bp, synthetic construct
  source 1..120: mol_type = other DNA
cacctgaacccacggagcagcacccacaccttccggcgcgcatccgacagcctggagcagcacccacacccccaggtgcgcatctgatggtctggagtagcacccacaaccacaggtgag

SEQ ID NO: 116873 - DNA, 120 bp, synthetic construct
  source 1..120: mol_type = other DNA
gacagcctggagcagtgcccagagccccaggtgagcatctgacagcatggttcagaacccatagcccaaggtgagcatctgacaacctggagcagcacccatacccccaggcgagcatct

SEQ ID NO: 116874 - DNA, 120 bp, synthetic construct; identical to SEQ ID NO: 17
  source 1..120: mol_type = other DNA

SEQ ID NO: 116875 - DNA, 120 bp, synthetic construct
  source 1..120: mol_type = other DNA
agcacccacatgcccaggtgagaccctgacagcctggaacagcaccctgcacccccaggtgcgcacgtgacagcctggaacagcaccgacacccccaggtgagcatctgacggcctggaa

SEQ ID NO: 116876 - DNA, 120 bp, synthetic construct
  source 1..120: mol_type = other DNA
cacccccaggtgagcatctgacatcgtggagcagcaccccacacccacaggtgagcttctgacagcctggagcagcacccacaccccaggtgagcatctgagagcctggaacagcaccct

SEQ ID NO: 116877 - DNA, 120 bp, synthetic construct
  source 1..120: mol_type = other DNA
cccacacccccaggcgagcatctgacagcctggagcagtgcccacacccccaggtgagcatctgacagcgtggaggagcacccacacccccaggcgagcatctgaacgcaaggagcagca

SEQ ID NO: 116878 - DNA, 120 bp, synthetic construct; identical to SEQ ID NO: 18
  source 1..120: mol_type = other DNA

SEQ ID NO: 116879 - DNA, 120 bp, synthetic construct
  source 1..120: mol_type = other DNA
tgacagcctggaacagcacccacacccccaggtgagcatctgacagcctggaacagcacccacacccccaggtgagcagctgaaatcctggaacagcacccacacccctaggtgagcatc

SEQ ID NO: 116880 - DNA, 120 bp, synthetic construct
  source 1..120: mol_type = other DNA
catctgacagcctggaacagcacccacactcccagacgagcataggacagcctggagcagcacccacatcgccaggcgagcatccgccagcctggaacagcacccacacccccaggtgag

SEQ ID NO: 116881 - DNA, 120 bp, synthetic construct
  source 1..120: mol_type = other DNA
catacccccaggtgagcatctgaccgcatggaatggcatcctcacctccaggtgagcatccgacagcctggagcagcacccacacccccaggtgagcatctgacagcctggaagagcaac

SEQ ID NO: 116882 - DNA, 120 bp, synthetic construct
  source 1..120: mol_type = other DNA
aagcagcaccccacacccccaggtgagcatcgggcagcctggagcagcacccacacccccagatgagcatctgacagcctggaacagcacccacactcccagacgagcatcggacagcct

SEQ ID NO: 116883 - DNA, 120 bp, synthetic construct
  source 1..120: mol_type = other DNA
tcagcatctgacagcctggtgaagcgcccaaaccccaaggtgagcatctgacagcctggagcagcgcccacacctccaggtgagcatctgacagcctggagcagcacccacacccccatt

SEQ ID NO: 116884 - DNA, 120 bp, synthetic construct; identical to SEQ ID NO: 21
  source 1..120: mol_type = other DNA

SEQ ID NO: 116885 - DNA, 120 bp, synthetic construct; identical to SEQ ID NO: 19
  source 1..120: mol_type = other DNA

SEQ ID NO: 116886 - DNA, 120 bp, synthetic construct
  source 1..120: mol_type = other DNA
caggtgagtatctgacagcctggagtagcacccacacccccaggtgagcatctgacagcctggaacagcatccactcccccaggtgagcatctgaccacattgaatggcatcctcacctc

SEQ ID NO: 116887 - DNA, 120 bp, synthetic construct
  source 1..120: mol_type = other DNA
agcatctgacagcctggaacagcaccctgcacccccaggtgagcatcggacaccctggaacagcacacacacccccaggcgagcatctgacaccctggaactgcacacacacccccaggc

SEQ ID NO: 116888 - DNA, 120 bp, synthetic construct
  source 1..120: mol_type = other DNA
tgtgatagcctggaacagcacccacaccgccaggcgagcatctgacggcctggaacagcacccacacccccaggtgagtatctgactgcctggaacagcacccacaccccaaggtgagca

SEQ ID NO: 116889 - DNA, 120 bp, synthetic construct
  source 1..120: mol_type = other DNA
cacccacaaacccaggtgagcatctgatgctttggagcagcacccacaccttcaggtgagcatctgacagcctggaacagaacccacaccgccaggggagtatctgacagactggaacag

SEQ ID NO: 116890 - DNA, 120 bp, synthetic construct
  source 1..120: mol_type = other DNA
tgaacatccgacagcctggagcagaacccacacccccaggcgagcatctgacagcctgggtcggcacccacaaccccaggcgagcatctgacggcctggaacagcacacacaccgccagg

SEQ ID NO: 116891 - DNA, 120 bp, synthetic construct; identical to SEQ ID NO: 20
  source 1..120: mol_type = other DNA

SEQ ID NO: 116892 - DNA, 120 bp, synthetic construct
  source 1..120: mol_type = other DNA
aggtgagcatctgacagcctgcaacagcacgcacacccccaggtgcgcacgtgacagcctgcaacagcacccacacccccaggcgagcatctgacggcctggaacagcacccacaccccc

SEQ ID NO: 116893 - DNA, 120 bp, synthetic construct
  source 1..120: mol_type = other DNA
ccccaggtgagcatctgacagcctggaacagcaccttgcacccccaggtgagaatctgacaacctggaacaggacaaacacccccaggcgagcatctgacaccctggaactgcacacaca

SEQ ID NO: 116894 - DNA, 120 bp, synthetic construct; identical to SEQ ID NO: 116876
  source 1..120: mol_type = other DNA

SEQ ID NO: 116895 - DNA, 120 bp, synthetic construct
  source 1..120: mol_type = other DNA
tgcccacacccccaggtgagcatctgacagcgtggaggagcacccacacccccaggcgagcatctgaacgcacggagcagcacccacacctccaggcgagcatccgacagcctggagcag

SEQ ID NO: 116896 - DNA, 120 bp, synthetic construct
  source 1..120: mol_type = other DNA
gcaccccacacccacaggtgagcatctgacagcctggaacagtacccacacccacaggcgagcatctgaaaccacggagcagcacccacacctcccggcgagcatccgacagcctggagc

SEQ ID NO: 116897 - DNA, 120 bp, synthetic construct
  source 1..120: mol_type = other DNA
agcatctgacagcctgaagcagcacccacaccaacaggtgagcatctgacagcctggaacagcacccacacccccaggtgagcatctgacagcctggaacagctctcacaaccccaggtg

SEQ ID NO: 116898 - DNA, 120 bp, synthetic construct; identical to SEQ ID NO: 116880
  source 1..120: mol_type = other DNA

SEQ ID NO: 116899 - DNA, 120 bp, synthetic construct; identical to SEQ ID NO: 116881
  source 1..120: mol_type = other DNA

SEQ ID NO: 116900 - DNA, 120 bp, synthetic construct; identical to SEQ ID NO: 116882
  source 1..120: mol_type = other DNA

SEQ ID NO: 116901 - DNA, 120 bp, synthetic construct; identical to SEQ ID NO: 116883
  source 1..120: mol_type = other DNA

SEQ ID NO: 116902 - DNA, 120 bp, synthetic construct; identical to SEQ ID NO: 21
  source 1..120: mol_type = other DNA

SEQ ID NO: 116903 - DNA, 120 bp, synthetic construct; identical to SEQ ID NO: 19
  source 1..120: mol_type = other DNA

SEQ ID NO: 116904 - DNA, 120 bp, synthetic construct
  source 1..120: mol_type = other DNA
gcctggaaccgcacccacacccccaggcgagcatctgacagcctggagcagcacccacacccccaggtgagcatctgacagcctggagcagcacccacacccccaggggagcatctgacc

SEQ ID NO: 116905 - DNA, 120 bp, synthetic construct
  source 1..120: mol_type = other DNA
gtgcccacacccccgggcgagcatctgacagcctggagcagcacccacacccccaggtgagcatctgacagcctggggcagtgcccacagccccaggtgagcatctgacagcctggagca

SEQ ID NO: 116906 - DNA, 120 bp, synthetic construct
  source 1..120: mol_type = other DNA
ccaggtgagcatctgacagcttggaacagaactccacacccacaggtgagcatctgacagcctggagcagcaccccacacccccaggggagcatctgacagtctggaacagcactccaca

SEQ ID NO: 116907 - DNA, 120 bp, synthetic construct
  source 1..120: mol_type = other DNA
gcaatgtcatcctcacctccaggtgagcatcggacagcctggaacagaattctcaagccccaggtgaggatctgacaacctggaacagaaccccactcttccaggtgagaatctgacagc

SEQ ID NO: 116908 - DNA, 120 bp, synthetic construct
  source 1..120: mol_type = other DNA
gcatcctcacctccaggtgagcatctgacagcctggaacagaattctccaaccacaggtgaggatctgacagcctggaacagaaccccactcttccaggtgagaatctgacacataaaac

SEQ ID NO: 116909 - DNA, 120 bp, synthetic construct
  source 1..120: mol_type = other DNA
tccccgccctcaggtgagtgtctgacagcctggaacagcaccccacaactgcaggtgagcatctgatagcctggataggcactccacacagccaggtgagcagctgaaagcctggaatgg

SEQ ID NO: 116910 - DNA, 120 bp, synthetic construct
  source 1..120: mol_type = other DNA
cagtgagcatctgacaacctggagcagcaccccacacctccaggggagcatctgacatcctggaacagcaccccacacctccagggggagcatctgacagcctggaacagcacccacacc

SEQ ID NO: 116911 - DNA, 120 bp, synthetic construct
  source 1..120: mol_type = other DNA
taaaacagcacccctactggcagatgagcatatgacagcctggaacagcacccacacccgctggcgagaatctgacagcctggagcaacacccacacccccaggtgagcatctgacagcc

SEQ ID NO: 116912 - DNA, 120 bp, synthetic construct
  source 1..120: mol_type = other DNA
gcacacacaaccccaggcgagcatctgacagcctggagcagcgcccacacccccaagtgagcaggtgacagcctggagcagtgcccacacccccgggcgagcatctgacagcctggagca

SEQ ID NO: 116913 - DNA, 120 bp, synthetic construct
  source 1..120: mol_type = other DNA
tggagcagcacccacacccccaggcgagcatcggacatcgtggaacagcaccccacacccccaggtgagcatctgacagcttggaacagaactccacacccacaggtgagcatctgacag

SEQ ID NO: 116914 - DNA, 120 bp, synthetic construct; identical to SEQ ID NO: 19
  source 1..120: mol_type = other DNA

SEQ ID NO: 116915 - DNA, 120 bp, synthetic construct; identical to SEQ ID NO: 116886
  source 1..120: mol_type = other DNA

SEQ ID NO: 116916 - DNA, 120 bp, synthetic construct; identical to SEQ ID NO: 22
  source 1..120: mol_type = other DNA

SEQ ID NO: 116917 - DNA, 120 bp, synthetic construct; identical to SEQ ID NO: 2242
  source 1..120: mol_type = other DNA

SEQ ID NO: 116918 - DNA, 120 bp, synthetic construct; identical to SEQ ID NO: 2243
  source 1..120: mol_type = other DNA

SEQ ID NO: 116919 - DNA, 120 bp, synthetic construct; identical to SEQ ID NO: 6925
  source 1..120: mol_type = other DNA

SEQ ID NO: 116920 - DNA, 120 bp, synthetic construct; identical to SEQ ID NO: 6926
  source 1..120: mol_type = other DNA

SEQ ID NO: 116921 - DNA, 120 bp, synthetic construct; identical to SEQ ID NO: 6941
  source 1..120: mol_type = other DNA

SEQ ID NO: 116922 - DNA, 120 bp, synthetic construct; identical to SEQ ID NO: 6942
  source 1..120: mol_type = other DNA

SEQ ID NO: 116923 - DNA, 120 bp, synthetic construct; identical to SEQ ID NO: 26912
  source 1..120: mol_type = other DNA

SEQ ID NO: 116924 - DNA, 120 bp, synthetic construct; identical to SEQ ID NO: 7615
  source 1..120: mol_type = other DNA

SEQ ID NO: 116925 - DNA, 120 bp, synthetic construct; identical to SEQ ID NO: 7616
  source 1..120: mol_type = other DNA

SEQ ID NO: 116926 - DNA, 120 bp, synthetic construct; identical to SEQ ID NO: 32096
  source 1..120: mol_type = other DNA

SEQ ID NO: 116927 - DNA, 120 bp, synthetic construct
  source 1..120: mol_type = other DNA
gtgaggagtgtctctgcccggccgccccgtctgagaagtgaggagtccctctgcccggcagccgccccatctgagaagtgaggagcccctccatccggcagccaccccgtctgggaagtg

SEQ ID NO: 116928 - DNA, 120 bp, synthetic construct; identical to SEQ ID NO: 32097
  source 1..120: mol_type = other DNA

SEQ ID NO: 116929 - DNA, 120 bp, synthetic construct; identical to SEQ ID NO: 4311
  source 1..120: mol_type = other DNA

SEQ ID NO: 116930 - DNA, 120 bp, synthetic construct; identical to SEQ ID NO: 18914
  source 1..120: mol_type = other DNA

SEQ ID NO: 116931 - DNA, 120 bp, synthetic construct; identical to SEQ ID NO: 18915
  source 1..120: mol_type = other DNA

SEQ ID NO: 116932 - DNA, 120 bp, synthetic construct
  source 1..120: mol_type = other DNA
ggggtccagatgagataagtactttgtgaaagtgtacatagttattttaggattaaggaagacctagaattcaggctttctttctttcctttcttttccttccctccctccctccctccc

SEQ ID NO: 116933 - DNA, 120 bp, synthetic construct; identical to SEQ ID NO: 14315
  source 1..120: mol_type = other DNA

SEQ ID NO: 116934 - DNA, 120 bp, synthetic construct
  source 1..120: mol_type = other DNA
cagtgaacatacacatgcatgtgtctttatggtacaatgatttatatttctttgggtatatacccaataatgtgattgctgggttgaatggtaattctgctttgagttctttgagaaatc

SEQ ID NO: 116935 - DNA, 120 bp, synthetic construct
  source 1..120: mol_type = other DNA
cctttgtcagatgagtaggctgcgaaaattttctcccattttgtaggttgcctgttcactctgatggtagtttcttttgctgtgcagaagctctttagtttaattagatcccatttgtca

SEQ ID NO: 116936 - DNA, 120 bp, synthetic construct
  source 1..120: mol_type = other DNA
gattcctacgtattttattctccttgaagcaattgtgaatgggagttcactcatgatttggctctctgtttgtctgttgttggtgtataagaatgcttgtgatttttgtacattgatttt

SEQ ID NO: 116937 - DNA, 120 bp, synthetic construct
  source 1..120: mol_type = other DNA
ctgttattggtctattcagagattcaacttcttcctggtttagtcttgggagagtgtatgtgtcgaggcatttatccatttcttctagattttctagtttatttctgtagaggtatttgt

SEQ ID NO: 116938 - DNA, 120 bp, synthetic construct
  source 1..120: mol_type = other DNA
tatccttgttgactttctgtctcattgaactgtctaatgttgaccgtggggtgttaaagtctcccattattaatgtgtgggagtctaagtctctttgtaggtcactcaggacttgcttta

SEQ ID NO: 116939 - DNA, 120 bp, synthetic construct
  source 1..120: mol_type = other DNA
cctttctgtctggctgcacttaacattttttccttcatttcaactttggtgaatctgacaattatgtgtcttggagttgctcttctcaaggagtatctttgtggcgttctctgtatttcc

SEQ ID NO: 116940 - DNA, 120 bp, synthetic construct
  source 1..120: mol_type = other DNA
tggcctcctggccaaggaattagactttccagaggcgtggccacctgactcagagaatagcctgctttttcactcaattatgtgttttctataaaaatagaactcttcattaaaacagct

SEQ ID NO: 116941 - DNA, 120 bp, synthetic construct; identical to SEQ ID NO: 14584
  source 1..120: mol_type = other DNA

SEQ ID NO: 116942 - DNA, 120 bp, synthetic construct; identical to SEQ ID NO: 14585
  source 1..120: mol_type = other DNA

SEQ ID NO: 116943 - DNA, 120 bp, synthetic construct; identical to SEQ ID NO: 14586
  source 1..120: mol_type = other DNA

SEQ ID NO: 116944 - DNA, 120 bp, synthetic construct
  source 1..120: mol_type = other DNA
gtcacccaagagctctgatggagatgtataaggagataaaagttgttttcatgcctgctaacacaacatccattctgtagcccaagggtcaaggagtaattctgacttactgtttaccat

SEQ ID NO: 116945 - DNA, 120 bp, synthetic construct; identical to SEQ ID NO: 14587
  source 1..120: mol_type = other DNA

SEQ ID NO: 116946 - DNA, 120 bp, synthetic construct; identical to SEQ ID NO: 14588
  source 1..120: mol_type = other DNA

SEQ ID NO: 116947 - DNA, 120 bp, synthetic construct
  source 1..120: mol_type = other DNA
ccgtgactgcaccactgcactccagcttgggtgacaaagcaagaccctgcctcaaaaaaacaaacaaaaacaacaaaaataacctgaggttaactttccagttttgtttccctagaaagc

SEQ ID NO: 116948 - DNA, 120 bp, synthetic construct; identical to SEQ ID NO: 14443
  source 1..120: mol_type = other DNA

SEQ ID NO: 116949 - DNA, 120 bp, synthetic construct; identical to SEQ ID NO: 33050
  source 1..120: mol_type = other DNA

SEQ ID NO: 116950 - DNA, 120 bp, synthetic construct; identical to SEQ ID NO: 33051
  source 1..120: mol_type = other DNA

SEQ ID NO: 116951 - DNA, 120 bp, synthetic construct; identical to SEQ ID NO: 33052
  source 1..120: mol_type = other DNA

SEQ ID NO: 116952 - DNA, 120 bp, synthetic construct
  source 1..120: mol_type = other DNA
agtagctgggattacaggcatgtgccaccacgctgggctaattttgtacttttagtagagacagggtttctccatgttggtcagtctggtcttgaactctttttttttttttttttttta

SEQ ID NO: 116953 - DNA, 120 bp, synthetic construct
  source 1..120: mol_type = other DNA
gatatcatctcacaccagttagaatggcaatcattaaaaagtcaggaaacaacaggtgctggagaggatgcggagaaataggaacacttttacactgttggtgggactgtaaactagttc

SEQ ID NO: 116954 - DNA, 120 bp, synthetic construct; identical to SEQ ID NO: 99588
  source 1..120: mol_type = other DNA

SEQ ID NO: 116955 - DNA, 120 bp, synthetic construct; identical to SEQ ID NO: 68550
  source 1..120: mol_type = other DNA

SEQ ID NO: 116956 - DNA, 120 bp, synthetic construct
  source 1..120: mol_type = other DNA
gtcctcagtgacctacaaagagacttagactcccacacattaataatgggagactttaacaccccactgtcaacattagacagatcaacgagacagaaagtcaacaaggatacccaggaa

SEQ ID NO: 116957 - DNA, 120 bp, synthetic construct
  source 1..120: mol_type = other DNA
tttgtggcgttctctgtatttcctgaatctgaacgttggcctgccttgctagattggggaagttctcctggataatatcctgcagagtgttttccaacttggttccattctccacatcac

SEQ ID NO: 116958 - DNA, 120 bp, synthetic construct
  source 1..120: mol_type = other DNA
aggcaggcctccttgagctgtggtgggctccacccagttcgagcttcctggctgctttgtttacctaatcaagcctgggcaatggccggcgcccctcccccagcctcgttgctgccttgt

SEQ ID NO: 116959 - DNA, 120 bp, synthetic construct
  source 1..120: mol_type = other DNA
atgatctcagttcactacagcctcgacttcctgggctcaagcgatcctcccaactcaacctcttttttttgagacagagtctcactctgtcacccaggctggagtgcagtggtgccatct

SEQ ID NO: 116960 - DNA, 120 bp, synthetic construct; identical to SEQ ID NO: 21328
  source 1..120: mol_type = other DNA

SEQ ID NO: 116961 - DNA, 120 bp, synthetic construct
  source 1..120: mol_type = other DNA
tggccaacatggtgaaaccctgttcctactaaaaaatacaaaaattagccaggcatggtggcgggcgcctgtaatcgcaggtatttaggaggctgaggcagaagaatcgcttgggcccag

SEQ ID NO: 116962 - DNA, 120 bp, synthetic construct; identical to SEQ ID NO: 21329
  source 1..120: mol_type = other DNA

SEQ ID NO: 116963 - DNA, 120 bp, synthetic construct; identical to SEQ ID NO: 21330
  source 1..120: mol_type = other DNA

SEQ ID NO: 116964 - DNA, 120 bp, synthetic construct
  source 1..120: mol_type = other DNA
gggaggggaggttgcagtgagctgagattgcaccattgcactccagcctgggtaacagagtgagactcctgtgtcaaaaaaaaaaaaaaaaaaatcttttctataaaaatgacttgtgga

SEQ ID NO: 116965 - DNA, 120 bp, synthetic construct
  source 1..120: mol_type = other DNA
gtcctgaattaatttttgtataaggtgtaaggaagggatccagtttcagctttctatgtatggctagccagttttcccagcaccatttattaaatagggaatcctttcctcatttcttgt

SEQ ID NO: 116966 - DNA, 120 bp, synthetic construct
  source 1..120: mol_type = other DNA
cccatcaatacctagtttattgagagtttttagcatgaaggttgttgaattttgtcaaaggccttttctgcatctattgagataatcatgtggtttttgtctttggttctgtttatatga

SEQ ID NO: 116967 - DNA, 120 bp, synthetic construct; identical to SEQ ID NO: 23867
  source 1..120: mol_type = other DNA

SEQ ID NO: 116968 - DNA, 120 bp, synthetic construct; identical to SEQ ID NO: 23868
  source 1..120: mol_type = other DNA

SEQ ID NO: 116969 - DNA, 120 bp, synthetic construct; identical to SEQ ID NO: 6799
  source 1..120: mol_type = other DNA

SEQ ID NO: 116970 - DNA, 120 bp, synthetic construct; identical to SEQ ID NO: 6800
  source 1..120: mol_type = other DNA

SEQ ID NO: 116971 - DNA, 120 bp, synthetic construct; identical to SEQ ID NO: 6801
  source 1..120: mol_type = other DNA

SEQ ID NO: 116972 - DNA, 120 bp, synthetic construct; identical to SEQ ID NO: 6802
  source 1..120: mol_type = other DNA

SEQ ID NO: 116973 - DNA, 120 bp, synthetic construct; identical to SEQ ID NO: 32978
  source 1..120: mol_type = other DNA

SEQ ID NO: 116974 - DNA, 120 bp, synthetic construct; identical to SEQ ID NO: 32979
  source 1..120: mol_type = other DNA

SEQ ID NO: 116975 - DNA, 120 bp, synthetic construct
  source 1..120: mol_type = other DNA
ttgcagcactagtcacaatagcaaagacttggaaccaaagcaaatgcccatcaatgatagactggataaagaaaatgtggccggccagccgccccatccgggagggaggtgggggggtca

SEQ ID NO: 116976 - DNA, 120 bp, synthetic construct
  source 1..120: mol_type = other DNA
accatggcacgtgtatacctatgtaacaaacctatatgttctgcacatgtatcccagaacttaaagtatgaaaaagaaaaaaaaaaaaaaagaatgctgatgtgtcaaagtcatcctaag

SEQ ID NO: 116977 - DNA, 120 bp, synthetic construct; identical to SEQ ID NO: 6424
  source 1..120: mol_type = other DNA

SEQ ID NO: 116978 - DNA, 120 bp, synthetic construct
  source 1..120: mol_type = other DNA
agggctgtgtcaggctcgggtgtgtggaggacctaaagttcccaacgcagccctcagccggtctcgggcccgggcagatcagggccgcaggtaccccggtctcctgctgtcactcttcgg

SEQ ID NO: 116979 - DNA, 120 bp, synthetic construct; identical to SEQ ID NO: 28566
  source 1..120: mol_type = other DNA

SEQ ID NO: 116980 - DNA, 120 bp, synthetic construct
  source 1..120: mol_type = other DNA
aaatatgtcccatcaatacctaatttattgagagtttttagcatgaagcgttgttgaattttgtcaaaggctttttctgcatctattgagataatcatgtggtttttgtctttggctctg

SEQ ID NO: 116981 - DNA, 120 bp, synthetic construct
  source 1..120: mol_type = other DNA
agttctagtctgattgcactgtggtctgagagatagtttgttataatttctcttcttttacatttgctgaggagagctttacttccaactatgtggtcaattttggaataggtgtggtgt

SEQ ID NO: 116982 - DNA, 120 bp, synthetic construct
  source 1..120: mol_type = other DNA
tgaacagacacttctcaaaagaagacatttatgcagccaaaaaacacatgaaaaaatgctcatcatcactggccatcagagaaatgcaaatcaaaaccactatgagattccatctcacac

SEQ ID NO: 116983 - DNA, 120 bp, synthetic construct; identical to SEQ ID NO: 28567
  source 1..120: mol_type = other DNA

SEQ ID NO: 116984 - DNA, 120 bp, synthetic construct; identical to SEQ ID NO: 22005
  source 1..120: mol_type = other DNA

SEQ ID NO: 116985 - DNA, 120 bp, synthetic construct
  source 1..120: mol_type = other DNA
ccaacacttagggaaatagaaaagaacctatgttgaaatattgggggtggttcccccgatagccagaagcattaacttctgataagcctagttcacaaagtagagggtactgtctccaga

SEQ ID NO: 116986 - DNA, 120 bp, synthetic construct
  source 1..120: mol_type = other DNA
atgtaatggccttctttgtctcttttgatctttattggtttaaagtctattttgtctatgtattttaaagactaggattgcaaccccagctttttttttttttgctttccatttgcctgg

SEQ ID NO: 116987 - DNA, 120 bp, synthetic construct
  source 1..120: mol_type = other DNA
tcactttccagactgggcagccaggcagagggtctcctcacgtcccagacgatgggcggccaggcagagacgctcctcacttcccagacgggctgggggcccggcagaggctgcaatctc

SEQ ID NO: 116988 - DNA, 120 bp, synthetic construct; identical to SEQ ID NO: 18268
  source 1..120: mol_type = other DNA

SEQ ID NO: 116989 - DNA, 120 bp, synthetic construct
  source 1..120: mol_type = other DNA
agtgtttcaaagtcatggcttaatttcttctatcctgaatagtactacaacttacaaatattaaaacttagattcaatgccatccgcatcaagctaccaatgactttcctcacagaattg

SEQ ID NO: 116990 - DNA, 120 bp, synthetic construct
  source 1..120: mol_type = other DNA
tagttcaaccattgtggaagtcagtgtggcgattcctcagggatctagacctagaaataccatttgacccagccatcccattactgggtatatacccaaaggactataaatcatgctgct

SEQ ID NO: 116991 - DNA, 120 bp, synthetic construct; identical to SEQ ID NO: 7770
  source 1..120: mol_type = other DNA

SEQ ID NO: 116992 - DNA, 120 bp, synthetic construct; identical to SEQ ID NO: 7771
  source 1..120: mol_type = other DNA

SEQ ID NO: 116993 - DNA, 120 bp, synthetic construct
  source 1..120: mol_type = other DNA
agaaatacaaatcaaaaccacaatgagataccatctcacaccagttagaatggccatcagtaaaaagtcaggaaataacaggtgctggagaggatgtggagaaataggaacacttttaca

SEQ ID NO: 116994 - DNA, 120 bp, synthetic construct; identical to SEQ ID NO: 23988
  source 1..120: mol_type = other DNA

SEQ ID NO: 116995 - DNA, 120 bp, synthetic construct; identical to SEQ ID NO: 23989
  source 1..120: mol_type = other DNA

SEQ ID NO: 116996 - DNA, 120 bp, synthetic construct; identical to SEQ ID NO: 23990
  source 1..120: mol_type = other DNA

SEQ ID NO: 116997 - DNA, 120 bp, synthetic construct; identical to SEQ ID NO: 23991
  source 1..120: mol_type = other DNA

SEQ ID NO: 116998 - DNA, 120 bp, synthetic construct; identical to SEQ ID NO: 23992
  source 1..120: mol_type = other DNA

SEQ ID NO: 116999 - DNA, 120 bp, synthetic construct
  source 1..120: mol_type = other DNA
ctggcacacaggcaatacacgatacccactattttcttctctcccgtctccatctgaagaagaagccaacgatagccccttcctctctggttccatactggcctccgacagcttgccctt

SEQ ID NO: 117000 - DNA, 120 bp, synthetic construct
  source 1..120: mol_type = other DNA
ttgtgggcatcaggtctcaattggggatcaggtctaggtcgagggggaggtctgggttgggggtgcaggtctaggttaatgaggagaggtatggggttctgaaggcagaggggagtggac

SEQ ID NO: 117001 - DNA, 120 bp, synthetic construct
  source 1..120: mol_type = other DNA
ggtttttcaggtgcaattaaaatttagaactaccacacaaaggcattggctgcactctgggacctccaagagttggcactgctctggcataggaatacttgaatagcttggttaaatgaa

SEQ ID NO: 117002 - DNA, 120 bp, synthetic construct
  source 1..120: mol_type = other DNA
tgtatattcacagtggcagagtcagatccaaattcattccctaaactcagggtataaagtccaccatcttgtttctgtacgtccatgatgatcagggttgtcaggtcatctgtgttttca

SEQ ID NO: 117003 - DNA, 120 bp, synthetic construct
  source 1..120: mol_type = other DNA
aatgttacacggcagttggtagctttactttgaaatgtaatctatccaagtttctgtgtagctataaagaaagtttgactacaagaatgaattcacatcagttggctgtccctctttcac

SEQ ID NO: 117004 - DNA, 120 bp, synthetic construct
  source 1..120: mol_type = other DNA
ctcatggacaatggatttttccagggaggttgctgctgatttcttgacttcttcagaaatcagaacctttgaagcttcctctttgagggctaacttttcttgagattttgcctctgacat

SEQ ID NO: 117005 - DNA, 120 bp, synthetic construct
  source 1..120: mol_type = other DNA
gttaatttgcagctagaggacacagatccagctgaattttttactgtacaagtataaagtccactgtcagaagtatcagtcttatgaatttctaagaagaaccctcccttgtcttcagag

SEQ ID NO: 117006 - DNA, 120 bp, synthetic construct
  source 1..120: mol_type = other DNA
ttgaatagtcagagtgaactctgcttcttgtttcccttcactgttttctaccaccacgctgtaattgccctcatcggaagcctggactgaagagatctcaaaggttgatttgtactttgt

SEQ ID NO: 117007 - DNA, 120 bp, synthetic construct
  source 1..120: mol_type = other DNA
gaggggcatggtccagtgtgaaaggctgctgactcaaaacttcatacttcctttctgatgtcttctgagtttttaaagcagctttcatggactcatacctggaaaagatatcaaatcttg

SEQ ID NO: 117008 - DNA, 120 bp, synthetic construct
  source 1..120: mol_type = other DNA
ctcttcctctgttcttttcattgctaagtagtcatcaatggggaggagtaattcttcatcagagatgtccccaagagaacgtcttctaggtcggtagtaaaagtcataatcaggagaagg

SEQ ID NO: 117009 - DNA, 120 bp, synthetic construct
  source 1..120: mol_type = other DNA
cagtaaccttttgaacatgggtcttaaggtactatctgttggaggtgggtgtagggttactgtcagctttgctttacagctgtcttcaccatatttgttccttgccacaacagtatattc

SEQ ID NO: 117010 - DNA, 120 bp, synthetic construct
  source 1..120: mol_type = other DNA
tatattcagcattcatgatattctcaatgatctgttggttagtttcagccaggaatgggttgataccactcaatagcacatataccagtgttccaagtgaccacatgtctgtggctgtgc

SEQ ID NO: 117011 - DNA, 120 bp, synthetic construct
  source 1..120: mol_type = other DNA
ctgatcaattccaaatctgtttttagcacagaccacatagaaaccagcatcttttctctctaccccattggggaaaacaagtgatgtgaaggatcttgtgacaataacttggtagtggcc

SEQ ID NO: 117012 - DNA, 120 bp, synthetic construct
  source 1..120: mol_type = other DNA
cttttgtgacagcagtaatagttggtttgccaggagcacctggcttttctattaaacaaaaaaaagatttgagtcatgagatgaaacaggcagctttattaaagcttatttttttaaaaa

SEQ ID NO: 117013 - DNA, 120 bp, synthetic construct
  source 1..120: mol_type = other DNA
tttccacatcaaggatggcatcaactgttccaaaaacattgctgagctggactttgtatttcccagcatgagtcttacgttggacattcttcatgacaagatgagtatagtgctcagtgt

SEQ ID NO: 117014 - DNA, 120 bp, synthetic construct
  source 1..120: mol_type = other DNA
attgcattagagggaattactcaaggaaagtgctcagttcactccatctaacatctgctgaggttgtgtgcttggaatggtttcctgtagaacttgtcatatttcctgtgtgtgtacttg

SEQ ID NO: 117015 - DNA, 120 bp, synthetic construct
  source 1..120: mol_type = other DNA
gaaagggcacttactcaatggtgtttttggtgtgactggttcctcagatttcaagggtttgcttatgccaaactggttttctgctgaaacacggaaatggtattctacattctctttgag

SEQ ID NO: 117016 - DNA, 120 bp, synthetic construct
  source 1..120: mol_type = other DNA
ttcatgttgatctactttttgcatttcaatcaagtagcctgtgactttagatcctccttcatcttctggaacactccaggccagggagactgatgtccttgttgtatcagtaactcttgg

SEQ ID NO: 117017 - DNA, 120 bp, synthetic construct
  source 1..120: mol_type = other DNA
taaattgtaactcaatcaatttgactgatacaaaatgtccttaccaattggatccatggcaacgatgggtttggaaggacgacttggtttcccagaccctcttgcattaatggctgtgac

SEQ ID NO: 117018 - DNA, 120 bp, synthetic construct
  source 1..120: mol_type = other DNA
cctcagactgcaagtaagagccaatcccgaagcggtttgttgcagccacacggaacacatactcatttccttcggtgagtctggtaaacttaaacgtggacctagtcactgattcagaaa

SEQ ID NO: 117019 - DNA, 120 bp, synthetic construct
  source 1..120: mol_type = other DNA
aaataagtattgttcaccttcatttaaggaagtaacagtgtgctctaggactgtgggttttaaggtgacaaccttcatccatctctctgtgccagctttgcaggcctcgagaacatatcc

SEQ ID NO: 117020 - DNA, 120 bp, synthetic construct
  source 1..120: mol_type = other DNA
gatacagacaccatcaagcgcaaggaggccccagccctgatggtcacagtcttctttagatcatctgcaagctcaagatctggtatttctggaaagttaatgacaaaatttaattaattc

SEQ ID NO: 117021 - DNA, 120 bp, synthetic construct
  source 1..120: mol_type = other DNA
cacttgccaccaatacatttctaatgaatacaagaattggtttccttagcttccccaattcagtcccagtgactattcctttatagttcttgggctcagactctgtaaaaggatttgcca

SEQ ID NO: 117022 - DNA, 120 bp, synthetic construct
  source 1..120: mol_type = other DNA
gttaatacttactgaatgagtttctggctacaattggctctgattcaacaggcacaccagggccatatttgtttactgccctcactcggaatatgtactcattgttcttgatgagcctgg

SEQ ID NO: 117023 - DNA, 120 bp, synthetic construct
  source 1..120: mol_type = other DNA
caaatcagtgatactgttgatcttgtgacatctgtcacctctggtctgcctggtgcatctggaagggatgcaaaaataaggttaaaatataccactctgagttctactagaatcagtaat

SEQ ID NO: 117024 - DNA, 120 bp, synthetic construct
  source 1..120: mol_type = other DNA
actgtgacgctaaatgttttaacaccagctgtattttccagggtcaagaagtatcttccagagtcacctctcatgctgtcctttacagtcagtgtggttctgtcttttgttgttgtaatg

SEQ ID NO: 117025 - DNA, 120 bp, synthetic construct
  source 1..120: mol_type = other DNA
ttgcatctatgtctaactcaggagctgttaaccggtcaactgctttaattgtgccagtcacttcacagctgtcgccttttccagcaccattgatagcactaactcggaatttgtattctt

SEQ ID NO: 117026 - DNA, 120 bp, synthetic construct
  source 1..120: mol_type = other DNA
accgtcattgagtggggcatcccaccacagagtcatcttctccccagtaatattggtgaatcttattggcccaactacttttcctggtgtatctataagaaaaagtttctagagttagtt

SEQ ID NO: 117027 - DNA, 120 bp, synthetic construct
  source 1..120: mol_type = other DNA
ggccatcagctgcattcaagcaaggggatgattgtgttgttggatgtatgttgtattttaataacttcagtaaagatggacacttattctcgagaaccttttctttatgtactgttaagt

SEQ ID NO: 117028 - DNA, 120 bp, synthetic construct
  source 1..120: mol_type = other DNA
ataatcacttacctactggagaaacagctaaggtaaatttgcttgggtcactaggtgagcttaggccagcagaattttcagcatatacacggaattggtaatccagaccttctaccagtc

SEQ ID NO: 117029 - DNA, 120 bp, synthetic construct
  source 1..120: mol_type = other DNA
cagggatatctgacaggtcaacttcaggtgtaataataagttctttcactgtaattggcccaatagtgacaggatcactcagtcctttctcatttttggcaaacactctgaactccagga

SEQ ID NO: 117030 - DNA, 120 bp, synthetic construct
  source 1..120: mol_type = other DNA
ttgtacaggttcattcatttctataggttctccttgtccagcacagtttacagcagatacccggaagtagtaattgactccaggtttcaggttggataccacatattctgtagttctgac

SEQ ID NO: 117031 - DNA, 120 bp, synthetic construct
  source 1..120: mol_type = other DNA
tttaaatttttcacgtttcagttttctaatgaaatcatgtctcaccaaatgcgttcttggctacaacggaatcagattccagtggctcgccaattccatatttgttcacggctcggaccc

SEQ ID NO: 117032 - DNA, 120 bp, synthetic construct
  source 1..120: mol_type = other DNA
ctttccttttcttctacgcacctcctattctttttcttttcccatcccagttcactgatatccaagtgtggatggttcatgtcagacacttaaagtctgaattctctacccacagagcta

SEQ ID NO: 117033 - DNA, 120 bp, synthetic construct
  source 1..120: mol_type = other DNA
cataaaaggttgaagttggaaaggcccatagatatcctgaggtctaaatctctcactttacagtcaagtcaagagggctggaaaggtatttaaggaattttcctcagactcccagctagt

SEQ ID NO: 117034 - DNA, 120 bp, synthetic construct
  source 1..120: mol_type = other DNA
ccagcccacagtgatgctttctcgagtaacattagtgacccatggtgtagatggtggtccaggtgttgctacaaaagagagaaatcctatagattagtacagacaataacacatttatgg

SEQ ID NO: 117035 - DNA, 120 bp, synthetic construct
  source 1..120: mol_type = other DNA
attcagaattctctctcagaccggaaacaacgtgatgggttgactttgccactgcacatttaacccagtttttctgtcctttttctagtgcttcaacgacatagtgtacaattctgcttc

SEQ ID NO: 117036 - DNA, 120 bp, synthetic construct
  source 1..120: mol_type = other DNA
accaacaccaaactcattttctccagagactctgaagtaatagatagctccttcttgtaaattggtaactttgtaggagaggcggttacagttgttggtcacagagacccatgctttctt

SEQ ID NO: 117037 - DNA, 120 bp, synthetic construct
  source 1..120: mol_type = other DNA
tatccagatatttcactacctccatcactctcgggtcttgaccagcaaagtgtcatagattctttggtcacagaagtaatttccaaagacgtgggtggacttggaactgtaaatggatct

SEQ ID NO: 117038 - DNA, 120 bp, synthetic construct
  source 1..120: mol_type = other DNA
gtataattgcacttcagccaccggccatctggtagttctctgcgttcaacaatgtatcctgtgatcttagctccaccatcataatgtggtttagaccatttaagtgacactgattttctt

SEQ ID NO: 117039 - DNA, 120 bp, synthetic construct
  source 1..120: mol_type = other DNA
aagtatggaaaggaagctcaactgaaggctttatttcaatatcccttgcaattactggcactccaagttgtcttggatcacttcttcccttttcgttaactgcagctaccctgaagacat

SEQ ID NO: 117040 - DNA, 120 bp, synthetic construct
  source 1..120: mol_type = other DNA
accactgagccaggtagagttgcaggttcacctacaccttcagaattgatggcacaaatacggaagttatattcagtgttttctttaagcttggtcactgtgaactgctttccttgtaat

SEQ ID NO: 117041 - DNA, 120 bp, synthetic construct
  source 1..120: mol_type = other DNA
gtcggcttcaagaacaaaagtctctcctgcatgaacaacgatgacatctttatattttggatccagagaggcatttggtgcatcaatttcatctcttgcagtaatggcaccactactatc

SEQ ID NO: 117042 - DNA, 120 bp, synthetic construct
  source 1..120: mol_type = other DNA
gccaactggaggtccaggcttttctaaaacgataacactgagattttctgttgctgtgcctgcactatttgttgccgttacggtgtattttccaaagtcatctttgttaccttctttaat

SEQ ID NO: 117043 - DNA, 120 bp, synthetic construct
  source 1..120: mol_type = other DNA
ggaaggcagaatcttttctcacttctttgactgccaaattctgtggtggtcctggagtgtcaagaactttcacagttacaaaagcagactttgatccactgctgttttccaacttaagaa

SEQ ID NO: 117044 - DNA, 120 bp, synthetic construct
  source 1..120: mol_type = other DNA
ttaccttctaagagtttggtaactttcagagaattggtcacaacttctgaagcaacaacagtccaggcaagtcgactggtttctcgcttttcaacaacatagtgagaaatgtcactgcca

SEQ ID NO: 117045 - DNA, 120 bp, synthetic construct
  source 1..120: mol_type = other DNA
ggtgtcatgaataatagttttgttgacctttgtccacaaaatactgtttctttcttttctctccaggtggtaacctatgacggggcttccaccattgttgactggttcatgccactgtat

SEQ ID NO: 117046 - DNA, 120 bp, synthetic construct
  source 1..120: mol_type = other DNA
gttttacatctggctcaattaccagatctttggcaactattggaactgcaagggaccgaggatcacttctccccttttcatttacagcaacaactctaaaaagatattcttccccttgag

SEQ ID NO: 117047 - DNA, 120 bp, synthetic construct
  source 1..120: mol_type = other DNA
cagccaccatcatatattggtttgctccaagaaaggaatactgaagatctggttatgtctatgactttggggttgtttgggggtcctggtttataaataggatcacaagccttttggtaa

SEQ ID NO: 117048 - DNA, 120 bp, synthetic construct
  source 1..120: mol_type = other DNA
tctgaaggctcactaaacactcctgcggcatttcgggctataacccggaactcatatctgtgatcttcaactaggccagttacttcaaaatgagtgtcaataatatttgtaaaactggct

SEQ ID NO: 117049 - DNA, 120 bp, synthetic construct
  source 1..120: mol_type = other DNA
gtgaattattttctgtgctctctgcatttactctagttgtctgcttcagtggtacattatctttatgccaggttacagctggggtagggcggccaatgaatggaacatcaacttttaggt

SEQ ID NO: 117050 - DNA, 120 bp, synthetic construct
  source 1..120: mol_type = other DNA
tcggaattcatggcatagatgcggatcttatattcctgattctctgtgaggccagtgatagtatacgaagttgccttgagtcctgctggtggagtgacaatctgccattcatcttcctct

SEQ ID NO: 117051 - DNA, 120 bp, synthetic construct
  source 1..120: mol_type = other DNA
gggcctggtctgtcaagaactttgacattgaaaatgtgtttagcaaagccaccaggattagtcgctgtaagggtataggcaccactatcccttcttgttgaatctttgtttaccagatta

SEQ ID NO: 117052 - DNA, 120 bp, synthetic construct
  source 1..120: mol_type = other DNA
ttaaatggatagttggcaactatgcatgctgatgtgatgcctggtccaactccatatctattctgagcttttacacggaactgatactctaatccagtagtaaggcgggtggctttatag

SEQ ID NO: 117053 - DNA, 120 bp, synthetic construct
  source 1..120: mol_type = other DNA
cttcagacaagccggtaactttatatgtgcatttatggcacttagtggtggctgtggaataagatttccgtgttgcttcacgtttctctacaatgtagtttgttatacgtgagcctccat

SEQ ID NO: 117054 - DNA, 120 bp, synthetic construct
  source 1..120: mol_type = other DNA
taaaatattggcactctggaatgaacggtgttgaaaaagacaaatactaacatgctgcatctttcatcagaacagaatctgaagcctcactgggtggaccaattcctgctctgttttctg

SEQ ID NO: 117055 - DNA, 120 bp, synthetic construct
  source 1..120: mol_type = other DNA
tttcctgccttggaccaacttgattttggaaggggtttgccaagaatgctaatggcattcaaaacaatggtatcccctgctttaattgttagcccatcttttattgtgggatcaaggaca

SEQ ID NO: 117056 - DNA, 120 bp, synthetic construct
  source 1..120: mol_type = other DNA
ctctcttccacaaaaggctgtttctttccttgaactcgagatgataccctacaaaagacccagggatgtatcaagtataaatgcagcttgattttacaatatatatgtgttgcccaaatt

SEQ ID NO: 117057 - DNA, 120 bp, synthetic construct
  source 1..120: mol_type = other DNA
tattttccagcatcagatttttggcaatcgtacactataagagttgtgttaaccgcagatgactcaacactgactctagtgtcagttgctagaggatcttcccctttcttccaggagact

SEQ ID NO: 117058 - DNA, 120 bp, synthetic construct
  source 1..120: mol_type = other DNA
tccgccatcaataatgggaggctcccaggtaacataagcagagtctttggatatttccttaacagtcacattgacaggtggcccaggagtatctggataaatagtaggtaaataagaaat

SEQ ID NO: 117059 - DNA, 120 bp, synthetic construct
  source 1..120: mol_type = other DNA
gggaaattaagatggagagcccaccagtcacatacttagggagatggtggattggaaaacagaaaccctaagaatagtaaatagctcactacttagttaaaaggcctctttattcctaaa

SEQ ID NO: 117060 - DNA, 120 bp, synthetic construct
  source 1..120: mol_type = other DNA
ggccttggatgcgtcactgggtttgcctggtccagctttatttatagctgtaacacggaactcatattcggtaccttcttgaagacctgttgcttttaatgttctttctataataggttt

SEQ ID NO: 117061 - DNA, 120 bp, synthetic construct
  source 1..120: mol_type = other DNA
tttattagttacctaacactttaagcttaatggtggctgatttagaaccacttgaattttcagcagtaatggtatagtctcctgagtccttccggttcacgctgaatagctccaaggtgc

SEQ ID NO: 117062 - DNA, 120 bp, synthetic construct
  source 1..120: mol_type = other DNA
catccctgctgctaagtaacaagctcaacaggaagacaattatcccattttaataaccgtccaactagtatgcacttttgagtccttgctgtatgctttaaaggaaattatatgtccttt

SEQ ID NO: 117063 - DNA, 120 bp, synthetic construct
  source 1..120: mol_type = other DNA
tcaaatggaggctgaggggggccgggggcatctacatgaaccaagaggaaagaaatgtaagaacaaggatttgatacgtaaaaatatttctgagcttcatatttagatggccatttgtct

SEQ ID NO: 117064 - DNA, 120 bp, synthetic construct
  source 1..120: mol_type = other DNA
tctttgctattgtgaacagtgccacaataaacatacatgtgcatgtgtctttatagtagaatgatttataatcctttgggtatatacccagtaatgagattgctgggtcaaatggtattt

SEQ ID NO: 117065 - DNA, 120 bp, synthetic construct
  source 1..120: mol_type = other DNA
ggtattagtatcttgaccttgctaaaataggagactggggttaaaaggaggaagaaagcataatacttacttagaggatctgatgcaagcactggttttgggacatctgttgggacgcca

SEQ ID NO: 117066 - DNA, 120 bp, synthetic construct
  source 1..120: mol_type = other DNA
aattaagtgtgaatgaatcacatgctaagggaaggacttacctagtatttctttaggtttgatagcttcctttagctctgcagggcgcccaataccaacttggttttgggcacacaccct

SEQ ID NO: 117067 - DNA, 120 bp, synthetic construct
  source 1..120: mol_type = other DNA
tggaggccctgtgcctattttattttctgcacggactctgaaaatatattcatttccttctatgagacgtgttactgtagtaccaggtgtcaagacagtagcagaataggtagaccaaac

SEQ ID NO: 117068 - DNA, 120 bp, synthetic construct
  source 1..120: mol_type = other DNA
ttgttatttctgagccaccattatctagtgggttttcccaagaaattgtacagttctctttggttacattggtaaccttcaaattctggcaaggcccaggtctgtcaaggacgttaacga

SEQ ID NO: 117069 - DNA, 120 bp, synthetic construct
  source 1..120: mol_type = other DNA
tgttgctgcattttcagtaatgtcagtaaccactggtttaccaggaggagacggaggactaaatttatgcttagcaacagtaggtgtggagtcaaggggaggaccaacacctatcttatt

SEQ ID NO: 117070 - DNA, 120 bp, synthetic construct
  source 1..120: mol_type = other DNA
gcttattccagactagggagacttcagtcttgtcaacatctacatggtgcaggtccttgggtggccctgggggatcttttcaaagaagaagttatgatgaaaaagtaatattcttaaaga

SEQ ID NO: 117071 - DNA, 120 bp, synthetic construct
  source 1..120: mol_type = other DNA
aacaatataacccagaatcttgctcccaccatcatgacgtggtggctgccaagttagatcgactgaattgcatgttgtatctattgcttcaggattaacaggtggacttggtttagctaa

SEQ ID NO: 117072 - DNA, 120 bp, synthetic construct
  source 1..120: mol_type = other DNA
caataatataattggtgattttactgcctccatcatctaaaggaggcttccaagagataaccatgtaatctttggtcacctcatcaaaactaactggtcctactggtggtccaggacggt

SEQ ID NO: 117073 - DNA, 120 bp, synthetic construct
  source 1..120: mol_type = other DNA
ttaggaggattccaagtcaaagttacagtatttttagtaacttctttgacttccaggtcttcaggacgctctggtacagctgcgaatataagtataggaattgtggtagaaaaaaatgtc

SEQ ID NO: 117074 - DNA, 120 bp, synthetic construct
  source 1..120: mol_type = other DNA
accatgtcagtttgcaggactcattggttaggttgtgagctaggaatggtgttccaacgggacctggaacatctggaaataagaagaaaataattcaagctgtttgccttcaatgaaaga

SEQ ID NO: 117075 - DNA, 120 bp, synthetic construct
  source 1..120: mol_type = other DNA
acatagaactggcaattttcacataaaaactgtggctggagtattgttgtgcctagagacatgcttagaaagagccctgagtggaaaggcttcgtgttctgagcaaatcactggactaaa

SEQ ID NO: 117076 - DNA, 120 bp, synthetic construct
  source 1..120: mol_type = other DNA
ttcggatcacccctccagcatggacaacaattctatctctgacactggcatctagctgaaggtcaggtgaaactggaagcaattgaaaattacaaatgtgatttttccccttcaatctga

SEQ ID NO: 117077 - DNA, 120 bp, synthetic construct
  source 1..120: mol_type = other DNA
gatctgcagatgatttagtccaatctgtcactttgggaaatggaggaccaggaggggctgcaaagagccagtatacgttagtattcttgacttttccaaggcacttttggaaaataagat

SEQ ID NO: 117078 - DNA, 120 bp, synthetic construct
  source 1..120: mol_type = other DNA
aataactaaagtgcaagtatcatctaccaccagtttgttgacatgggtgtcatagagaacaggttctttgttatcaggcttctttggaggagctttaaaccaggttagtgtcgggaatgg

SEQ ID NO: 117079 - DNA, 120 bp, synthetic construct
  source 1..120: mol_type = other DNA
gtctcagcagttgctaagaaaatgactggttactttctgtcccttttgaggagcatgcagagaaattgctttagcctctgataaataaaacagactgcgaggaaaattacagcgaggaaa

SEQ ID NO: 117080 - DNA, 120 bp, synthetic construct
  source 1..120: mol_type = other DNA
tggcatcttccatgaaagtctgcaactaccccttgtgatatcactgactttcagatctttgggtgggcctggtacatctgttggatgtaaatcacaatataagcaacgttccttaaatgc

SEQ ID NO: 117081 - DNA, 120 bp, synthetic construct
  source 1..120: mol_type = other DNA
aagtttgtctggttcatttactcttttccagtcagtagtaccttcttcttgcatttctacaatgtatcctttgattgggctgccaccatctttggctggaggtttccatcctagtgagat

SEQ ID NO: 117082 - DNA, 120 bp, synthetic construct
  source 1..120: mol_type = other DNA
tttgttgaattcctactggaaggtctgactgtttagtgggagagatgatttccccagtatctaatgagatagaaatttatttaaagtatcagaagacataggagtttatagtccaggtct

SEQ ID NO: 117083 - DNA, 120 bp, synthetic construct
  source 1..120: mol_type = other DNA
tgtacctgatagtggatctcaattaaaagagtatctgtgtatcaaacgctatgtactaaggagccttatgtgtgtggggctaaacactacaataacaaaataacagcttatcgtgtgtgg

SEQ ID NO: 117084 - DNA, 120 bp, synthetic construct
  source 1..120: mol_type = other DNA
taagaggtagggatggttcactttcaccaatttcattgacagctttgacacggaactcatacatttggtgttcatcaagattttcaaccagaaaagatgtggttgggcagagtcgcttgt

SEQ ID NO: 117085 - DNA, 120 bp, synthetic construct
  source 1..120: mol_type = other DNA
cctcaaagcctttgctttcttagatgggatgtcagtgtgcattactgtgtgtgcaattttagtgtttcgtattgatttctgggagattccctctggttggttttctattctttggaggct

SEQ ID NO: 117086 - DNA, 120 bp, synthetic construct
  source 1..120: mol_type = other DNA
acagctatttgtagctgtaatcacatatctgccatggtcttttcgcagtgcatccttgataattagttcagatttggttccaacgttgtctattacaacacggtctttatccagctcccc

SEQ ID NO: 117087 - DNA, 120 bp, synthetic construct
  source 1..120: mol_type = other DNA
aaacttaccaaatggatctttagccacaagtggctttgaaacacatggtggacctggcccaaatctgttttcagctcttacacggaagaggtactcttttccttcaatcagttttgttac

SEQ ID NO: 117088 - DNA, 120 bp, synthetic construct
  source 1..120: mol_type = other DNA
attattttcatttatttcaaaatgggaaagtggcaactccatgaaacaaaacttaccaatgggatctacagctttggttggaggagtagcccgagaaggttcactaatacccgcggcgtt

SEQ ID NO: 117089 - DNA, 120 bp, synthetic construct
  source 1..120: mol_type = other DNA
atggccccacaaatttccagacattatttgcagggctggggggaatgcagaaaatgttactatccctggttaagaacactatgggaaaatgtgaagctgtgcaattaaaaaattgtggtc

SEQ ID NO: 117090 - DNA, 120 bp, synthetic construct
  source 1..120: mol_type = other DNA
accttgaatttcaagtcctttattgggcgagaattaactctcatccatttctcagtgcctactggacacatttcaacatggtatcctatgataggacttccaccatttttctctggaggc

SEQ ID NO: 117091 - DNA, 120 bp, synthetic construct
  source 1..120: mol_type = other DNA
tagttggtgatgggggaccctccatctttctcaggaactgtccattttaggtctgctgtattttttgtgatattaataacttcaagccagcgtggtggtgatggaggatctgaaaaagaa

SEQ ID NO: 117092 - DNA, 120 bp, synthetic construct
  source 1..120: mol_type = other DNA
ctttttaactgccacacactttagactgggccaaacataccaatctaattataatatctatgacagtggtcattatcataatatactgggggatcaaacactttgaaacttcctgaaggt

SEQ ID NO: 117093 - DNA, 120 bp, synthetic construct
  source 1..120: mol_type = other DNA
ttatttttttctttcaagaaagtaactgcaaagagtttatccccttttaaaatgagaaccttccttacctaagacgttcacttccaccacagcagtggcccggccacacacattcacagc

SEQ ID NO: 117094 - DNA, 120 bp, synthetic construct
  source 1..120: mol_type = other DNA
ttgtttctgcaacaggttctccacaggcaacccatttatcagaaccacgtggacatctttcaactatatatcctttgatgcgtgaaccaccatcatttttaggtggatcccatgttaaga

SEQ ID NO: 117095 - DNA, 120 bp, synthetic construct
  source 1..120: mol_type = other DNA
agctacctcaggaagcattagcaccgatgcattcttaaaaagtttttgtacattttcagtgaggtaaaggtaagaagttgtagcacataagacttttgtatggcatcccaaccttctggg

SEQ ID NO: 117096 - DNA, 120 bp, synthetic construct
  source 1..120: mol_type = other DNA
caattatcttttccttcttcgcatcgctcaattatatagcctaatattgggcttcctccatctttcagaggaggttcccatttgagctgaactgatgactgagtctgatctgaggaagtt

SEQ ID NO: 117097 - DNA, 120 bp, synthetic construct
  source 1..120: mol_type = other DNA
caacgtaacctatgattttgcttccaccatcagttaaaggttcttcccaagcaaggctcacttcaccatcaaatgtttctgtcacttctaagttacgtactggcccaggaacatctgaaa

SEQ ID NO: 117098 - DNA, 120 bp, synthetic construct
  source 1..120: mol_type = other DNA
aagtaggagagtataagaccgtctttagatttgccaagactctcagggtgatagcttagttgtagcctaagttcataaatagtcatcatgtactagcaactgtccaaggctctggcatgt

SEQ ID NO: 117099 - DNA, 120 bp, synthetic construct
  source 1..120: mol_type = other DNA
ataaaaagatcttgcttactttttgccttctttgatttctctcccatttctgtaccattttacattggctttctctctggagagctggcaggagaagacagcgtcatcgaactcagtgac

SEQ ID NO: 117100 - DNA, 120 bp, synthetic construct
  source 1..120: mol_type = other DNA
cccatatcttgtaatgtggcatctttcacaactaggaccctctttttaccatcagcaataacgtcatatttatctccagattcaagtgtcttatcatccctcttccactggactggaaag

SEQ ID NO: 117101 - DNA, 120 bp, synthetic construct
  source 1..120: mol_type = other DNA
tccttcacacaggtgtccttaagaaaaactatgatcctgagtttttctgaaagcaaccaacaagacttcatagtgtgaagaagaaccaaggtggcagacacaaatataaacaaaccccaa

SEQ ID NO: 117102 - DNA, 120 bp, synthetic construct
  source 1..120: mol_type = other DNA
gaacacgtgaagcactatggccagccttgtgtatggctaagaggcatgaggctgtaattgaaacatacatttagctttttaaaaaaatcagctttgaagacgtcacatataagtcaggca

SEQ ID NO: 117103 - DNA, 120 bp, synthetic construct
  source 1..120: mol_type = other DNA
tcatccatatcaggatatccatacagtaggctgaccccatgtagacaaagagcacatctactcactactcagtgagagaaaagaagcatagggaaaagtgattgctccatcattaatcag

SEQ ID NO: 117104 - DNA, 120 bp, synthetic construct
  source 1..120: mol_type = other DNA
tggcgtgagttttgaaatcttttgctgttagttggacttccccagcatcttctaactttacatccctcagagtaagtgtatgaacttttccttctgaacgtgggaccacctagttgtttt

SEQ ID NO: 117105 - DNA, 120 bp, synthetic construct
  source 1..120: mol_type = other DNA
aaaatcagatgtcaatggtgcgacagataggggtcattctgacagcaaagataagagacttgggggttcttccagttctatgatataaaattcctaagaagctgtgccctgtcatccaga

SEQ ID NO: 117106 - DNA, 120 bp, synthetic construct
  source 1..120: mol_type = other DNA
ctgccacatgtaacaaaatgattttattacttcaaagtttatatttaagttctttttgaaaagagacatttaagtaatgcaagagcaagttcacaaaaggctaaggtatttcgggtgcct

SEQ ID NO: 117107 - DNA, 120 bp, synthetic construct
  source 1..120: mol_type = other DNA
gtcttcaaagtttgatttttgttgagatctttatagcacatttaatagtatttctgaaatattgggggaatatgtcacagaacaatgtactgtcctgtgctttatttccaacccaggctg

SEQ ID NO: 117108 - DNA, 120 bp, synthetic construct
  source 1..120: mol_type = other DNA
ttcccctgcagtcacggtgacatcctttaaaggcctcagaagaccaattactcgtgcttttcgagagggaagaaacagctttgcgttactcattttgtaatcccaaaagaataaatagag

SEQ ID NO: 117109 - DNA, 120 bp, synthetic construct
  source 1..120: mol_type = other DNA
tccaccccacccgtctggtccaggcgacagttgtgcaaaacaagggagtgtattttgccttcttccttaatttcacaatcctgtaccaacaaaacagaaaaactttcatagaaaataatt

SEQ ID NO: 117110 - DNA, 120 bp, synthetic construct
  source 1..120: mol_type = other DNA
aatgtcaagttttcctgaggtcttatctgtcccacagtcacaggtgtactgtccaatatctgatttcaaggctttctttaggattagcatgcgtttcttgccatctgccttaataacagc

SEQ ID NO: 117111 - DNA, 120 bp, synthetic construct
  source 1..120: mol_type = other DNA
tttgtgggtgtaagctagaatcttcattaacttatagtaatgaaggtaaagtgttttagaaataagcctgattacatatgtgatagcttcttaaggagttgggctgctttcatgcaatat

SEQ ID NO: 117112 - DNA, 120 bp, synthetic construct
  source 1..120: mol_type = other DNA
atcaagatattttatgccttttttcaccctacacaaccaagcaacccctctcctatataattagctaatcttgacttacaggggaagctgtcaaaggctgtcctttcagcttccactggc

SEQ ID NO: 117113 - DNA, 120 bp, synthetic construct
  source 1..120: mol_type = other DNA
aggtgacatgaatttcagtcttatacctgaaatgcaagcatagataatgcctcagaaacacaattcaccttcagaaagattccattctaatctgcctgagtaaaagggacccatttcaca

SEQ ID NO: 117114 - DNA, 120 bp, synthetic construct
  source 1..120: mol_type = other DNA
acacaaattgttcaagttgtccccaaatgatacgtaaaatttctttccttcttggagactttagaagactccattaactccattattattaaagcaacccgaatctaggatatagatcct

SEQ ID NO: 117115 - DNA, 120 bp, synthetic construct
  source 1..120: mol_type = other DNA
cgctctttgtttaactcgcagctcaagtacaatggctgtcctttgaccactgtgacttcctcttccagtgtttttacaaaacgcacaggaagttctatggagaatttcagtatatatttc

SEQ ID NO: 117116 - DNA, 120 bp, synthetic construct
  source 1..120: mol_type = other DNA
gtttcaggcaggaaaatgagatggtataaggaatccatgaataataaatgtcccttttctcaagttttaatctgaagtataaaatagccagattaatgtctaattattttatctgccatg

SEQ ID NO: 117117 - DNA, 120 bp, synthetic construct
  source 1..120: mol_type = other DNA
agtgtagggaaaagggaaatggctgagaggttaccaaaagcctttctttttatgtctaaattgggcagacaaacaaatccagggaagactaaggaaaaagagtccatgtaccacacatgc

SEQ ID NO: 117118 - DNA, 120 bp, synthetic construct
  source 1..120: mol_type = other DNA
tacccttacagggtctctgcctgtctccttagtttttatcagccccaaacatattcattacttaatctccaaagcatatgaaagaaatggtgcaacccaggaacgtacattccagttaag

SEQ ID NO: 117119 - DNA, 120 bp, synthetic construct
  source 1..120: mol_type = other DNA
tagagacaactaagaatgacagtagatttgtaccttttgttggttcaggaatcttcctttccctttttgtaacagtaggtacttcaacctcttcaacaggttttggaggtggtggttctg

SEQ ID NO: 117120 - DNA, 120 bp, synthetic construct
  source 1..120: mol_type = other DNA
ttgtcaattataatagcactcaaagttactttgtttctatctagatagagggtctattctgagacaagtctgtgggagaaacagctccaacacaaaatgaataatttgaatagcaacgaa

SEQ ID NO: 117121 - DNA, 120 bp, synthetic construct
  source 1..120: mol_type = other DNA
gcttttcagaacaacttcttcctttggttcaggtttacgttccggaagtaatttgcgaactttcttttcacctccaggcacttaaaagaatatgatttcaaattttgaagtgaatttata

SEQ ID NO: 117122 - DNA, 120 bp, synthetic construct
  source 1..120: mol_type = other DNA
cctcttttgctattatggccctcatagatttgaatggtgaaagaaaggaacacgtggtgattattaaaccattttcctctctactaatgtcaattaaaatctaatttaaaacagtattta

SEQ ID NO: 117123 - DNA, 120 bp, synthetic construct
  source 1..120: mol_type = other DNA
acctacagtaataaggaaatttttctgaaatgtgagttccgtacccctcagagaatgacttagagccagtgagaagagagtgacatgaaagtcctaaggaaatccctacaaataacctta

SEQ ID NO: 117124 - DNA, 120 bp, synthetic construct
  source 1..120: mol_type = other DNA
atattttacattaagggaaatgtatttatgtgtgtgtcttcatggagtgtcaattaacagatgggtggcctttcaagaggtgccagaaggtccccctaatggctatgagggttgtagagg

SEQ ID NO: 117125 - DNA, 120 bp, synthetic construct
  source 1..120: mol_type = other DNA
accatggggcagcagaagagacagctctatgcaatctcacagtacaatcatgtctgaaagtacacacttctaaaagtcatacatttcttgcaagcatcatttcagatggctggatagaag

SEQ ID NO: 117126 - DNA, 120 bp, synthetic construct
  source 1..120: mol_type = other DNA
tattgatggcaaatgagatgacttttaaaatttgataccgtgttatcatttgaggatccaaggcaattattccattttgcttcagtaaactgtaccttttggaaattgtaattaccaaca

SEQ ID NO: 117127 - DNA, 120 bp, synthetic construct
  source 1..120: mol_type = other DNA
gttagttcagagacccaatgaaccattcttttggccatctagctttaaaccttacaatgatcttgggctcctcaatttccctaatggttttgataatggtcagaggccactaagtctcca

SEQ ID NO: 117128 - DNA, 120 bp, synthetic construct
  source 1..120: mol_type = other DNA
gtttaacacagcttcccatgatgcctctgcctgaacttaatcttttcttgccgtgtgtttctgcagcccttttgtattcacttgctatgtgtaatcacttcctgtctgtattagagtcct

SEQ ID NO: 117129 - DNA, 120 bp, synthetic construct
  source 1..120: mol_type = other DNA
gacaccacaaaaatgaagtattcattttaacatgagtacctttaggaggcggtgcttctggttttttgatgacaggaactttcttctctgggatgatcttcttgggctcttcaggcactt

SEQ ID NO: 117130 - DNA, 120 bp, synthetic construct
  source 1..120: mol_type = other DNA
agaaaatgaccaagaaataatgagttaggaaggaagaagaacaaagcttaaattagaaatagtcgcaagtggcaaggtcattaatcaccggtctcacgtgtaccttctgggggaggagac

SEQ ID NO: 117131 - DNA, 120 bp, synthetic construct
  source 1..120: mol_type = other DNA
acgacagcaggtgctttcttttctgggacaggtttcttaggtggtacggtcactaaagaattagaaggtatgttttagaaagaacgaagattgagaaacaagacaaaagctcagagcacc

SEQ ID NO: 117132 - DNA, 120 bp, synthetic construct; identical to SEQ ID NO: 21835
  source 1..120: mol_type = other DNA

SEQ ID NO: 117133 - DNA, 120 bp, synthetic construct; identical to SEQ ID NO: 21836
  source 1..120: mol_type = other DNA

SEQ ID NO: 117134 - DNA, 120 bp, synthetic construct; identical to SEQ ID NO: 21837
  source 1..120: mol_type = other DNA

SEQ ID NO: 117135 - DNA, 120 bp, synthetic construct
  source 1..120: mol_type = other DNA
cagcaaagtctcaggatacaaaatcaatgtgcaaagatcacaagcattcttatgcaccaataacagacaaacagagagccaaatcgtgagtgacctcccattcacagttgcttcaaagag

SEQ ID NO: 117136 - DNA, 120 bp, synthetic construct
  source 1..120: mol_type = other DNA
cagttagaatggtgatcattaaaaagtcaggaaacgacaggcgctggagaggatgtggagcaataggaacacttttacaatgttgctgggactgtaaactagttcaaccattgtggaagt

SEQ ID NO: 117137 - DNA, 120 bp, synthetic construct; identical to SEQ ID NO: 21836
  source 1..120: mol_type = other DNA

SEQ ID NO: 117138 - DNA, 120 bp, synthetic construct; identical to SEQ ID NO: 21837
  source 1..120: mol_type = other DNA

SEQ ID NO: 117139 - DNA, 120 bp, synthetic construct; identical to SEQ ID NO: 117135
  source 1..120: mol_type = other DNA

SEQ ID NO: 117140 - DNA, 120 bp, synthetic construct; identical to SEQ ID NO: 117136
  source 1..120: mol_type = other DNA

SEQ ID NO: 117141 - DNA, 120 bp, synthetic construct; identical to SEQ ID NO: 21836
  source 1..120: mol_type = other DNA

SEQ ID NO: 117142 - DNA, 120 bp, synthetic construct; identical to SEQ ID NO: 21837
  source 1..120: mol_type = other DNA

SEQ ID NO: 117143 - DNA, 120 bp, synthetic construct; identical to SEQ ID NO: 21838
  source 1..120: mol_type = other DNA

SEQ ID NO: 117144 - DNA, 120 bp, synthetic construct
  source 1..120: mol_type = other DNA
acagtaaccacaataagttaggaaatataaccacattttcttctctttcctccatcctccctttgttccaccaataggctaagtcttttaaggggttagtggatccttgagaggaggtgc

SEQ ID NO: 117145 - DNA, 120 bp, synthetic construct
  source 1..120: mol_type = other DNA
ttacagccacttcgaaaaatctaggtcggcatttttttgtattcacacctcaggcaccttaaaaaggtgagtgtttttcaagtttaggagagaggagaacaaccaaaagattccagactg

SEQ ID NO: 117146 - DNA, 120 bp, synthetic construct
  source 1..120: mol_type = other DNA
ctaactagagaattataccttcagttggaggatgttctggaatttcaggaatagcctcaggtggctccacctctggaaaaatgcctctggttgtatcaggttctttaaagatattagtag

SEQ ID NO: 117147 - DNA, 120 bp, synthetic construct
  source 1..120: mol_type = other DNA
gtataacaggatgaacaacaagaaagttgagtttcaacaggaaattttttagattaaaaaaaatggaagcgggtctggtgtagtggctcatgcctgtaatcccagcactttgggaggctg

SEQ ID NO: 117148 - DNA, 120 bp, synthetic construct
  source 1..120: mol_type = other DNA
gacataaatgaaacgaaaaagaaccactaatttttctacactcactgtacatctctgtgtcttcagaaataacaataggtgatttttcttcttgaacacttttcttaggcatcccaggaa

SEQ ID NO: 117149 - DNA, 120 bp, synthetic construct
  source 1..120: mol_type = other DNA
aaggattttatattaatgatgaatgagaaaagccagttacctttagttggtggaactctgggctcttcaggaacacgtactttttcttctaccacaattttcttaggcacctccggtact

SEQ ID NO: 117150 - DNA, 120 bp, synthetic construct
  source 1..120: mol_type = other DNA
acacacacattccttcatattacacatatattgttaatttgtgcaagatctagagtggtattgcagataacttatttgtgctatggcttgtcttcacagtatgctagaatacaggtgcca

SEQ ID NO: 117151 - DNA, 120 bp, synthetic construct
  source 1..120: mol_type = other DNA
aggattgcatgcaacaatacacgaaaatccaggatctttccaaaaatacctttagctgggggaacagcttcctttttaggcacaaggactttcttttctgggactttctttggtacttca

SEQ ID NO: 117152 - DNA, 120 bp, synthetic construct
  source 1..120: mol_type = other DNA
aaactccgttccacttatggaataaaatctaaaatgtggggaagagggatccattgctatgtgtataagtatatagagacatactaatatattaaaattctcagttaagaagcttctaga

SEQ ID NO: 117153 - DNA, 120 bp, synthetic construct
  source 1..120: mol_type = other DNA
ttagctactgagaaagatttggaacaccaggaattttaaatgttcaatccttaaaagcggttatacctctaggtggtgccacctcttcaacttcctctatgctaggtggttcttctggga

SEQ ID NO: 117154 - DNA, 120 bp, synthetic construct
  source 1..120: mol_type = other DNA
gggagaatgattcgtttttcttccaccttcttaggcacctcaggaacttgagagacattgattattttagacacttaaaatgcaagaaccaaagaagaataaagaccacgtttccagttt

SEQ ID NO: 117155 - DNA, 120 bp, synthetic construct
  source 1..120: mol_type = other DNA
aacagtcgctcaagacaggtctgtcatgttagttgggagcccagatattataatgtaattgggatttgtaaagcaagggaccagcagcatatgtcattatcagaggacagatgctattag

SEQ ID NO: 117156 - DNA, 120 bp, synthetic construct
  source 1..120: mol_type = other DNA
aattttcctaaaacccagtttcatcataatttatgtgaccaagctatgggtgaacaatgtgtattcactttggggaggtgtacctttgggtggtggtggaggttccacttttttaggggc

SEQ ID NO: 117157 - DNA, 120 bp, synthetic construct
  source 1..120: mol_type = other DNA
gttacagattaatgtacctttgggtggtggtgcttccacttttttcggaacaggtgttggtttcttttcttctgggatgagcttcttgggcacctctggcactttaaagatattatttat

SEQ ID NO: 117158 - DNA, 120 bp, synthetic construct
  source 1..120: mol_type = other DNA
cagttgagaggcgcttgtcatggcattaatgttgttaatattgtcatggggaaagatctgctatggctcaccaagttatgctgcatgggtgaattatcatgctattccactgatggatta

SEQ ID NO: 117159 - DNA, 120 bp, synthetic construct
  source 1..120: mol_type = other DNA
agaggaattcaacagcaaaagacgaacaaaacattaaaatgagtgccattaggtacctctaacaggtggtgctacttcttttctagggacaggtactttttcttctgcgacaaccctctt

SEQ ID NO: 117160 - DNA, 120 bp, synthetic construct
  source 1..120: mol_type = other DNA
acaaagttgtttttggtgattattactcagtaatgtacctttgggtggtggaggtttgagtttcttaggaatgggcactggtactttttcttcagggacagctttcttcagcacttcaaa

SEQ ID NO: 117161 - DNA, 120 bp, synthetic construct
  source 1..120: mol_type = other DNA
tgtactagaatgatcacgggcacttgaagataaacttgtaacctttttgaaaaagaaacttagggacatttgctattttgcatacgagcaaaaatgaggggggtattagattattcccgg

SEQ ID NO: 117162 - DNA, 120 bp, synthetic construct
  source 1..120: mol_type = other DNA
gtgtgtgtgaagagaaattttgttcaaacaattcaaggacaaagacaaccataacagtgcctgattaaactttcatttaaaaagcaagaaaatcaatagacttggaaataaacttactct

SEQ ID NO: 117163 - DNA, 120 bp, synthetic construct
  source 1..120: mol_type = other DNA
tacaaggcacacacacaaaaacatcacaagtaatactctacccaaagacaccattgtcacccaccaacatataaacagtatgacccaaagaacagcagcagagagaaagaaagacaagcc

SEQ ID NO: 117164 - DNA, 120 bp, synthetic construct
  source 1..120: mol_type = other DNA
gaaggagacaagctaacatagggataaaactaattaaagagtcagcataccttcagctggctcagcttccactctcttagaaataatgtgcagcttttcttccacaacatattcctcagg

SEQ ID NO: 117165 - DNA, 120 bp, synthetic construct
  source 1..120: mol_type = other DNA
ccagttttaattttttttaagacaatgtcttgctttgttgcccaggctaaaatgcagtggtgtaatcacagctcactgtaacctcgaactcctgggttcaaatgatcctcctgcatcagc

SEQ ID NO: 117166 - DNA, 120 bp, synthetic construct
  source 1..120: mol_type = other DNA
ttggccacatggctctagccagaatgctggattttagttggaaacctggtgctgccttaattcattgaaaaaatatcccaatggaatagtttgttggttctgtccttaagaaactataga

SEQ ID NO: 117167 - DNA, 120 bp, synthetic construct
  source 1..120: mol_type = other DNA
ttgcattgtttaccttcatattctgtaacctctgcttcttcctcctcctctctttcttcttctctataaactgaaatggacacaccttcctcctcttctgagtaactccattcctcctct

SEQ ID NO: 117168 - DNA, 120 bp, synthetic construct
  source 1..120: mol_type = other DNA
ctttctcctctgggacgggtttcttaggcagagctggcactttagagacattatgcacttttagaaatttaatgtgatctcattgaagcccagtgcaaaacaaagaaatacacccacagt

SEQ ID NO: 117169 - DNA, 120 bp, synthetic construct
  source 1..120: mol_type = other DNA
cctctgggacttaaagtttttgaaacacaatgttagttcagacatatatcacttttatgaaagaacataggcacatgcacaaatctttatgtagtacattaatgttgttatggattatct

SEQ ID NO: 117170 - DNA, 120 bp, synthetic construct
  source 1..120: mol_type = other DNA
gatgcctctgtgtctcctttagaagacatatatgactttgctgaaaacgaattagtgattacacaaacagtcaagaatgttcagatagtatatagaaaaggttctttatgctttgtatgg

SEQ ID NO: 117171 - DNA, 120 bp, synthetic construct
  source 1..120: mol_type = other DNA
ttggtgatgtcttaggaatattcagtataataaataaagtatgtcaagagcatggcacggaagctgacaaacagtaaaaacacaagaagaatgtaaaagagacaaaagacaaaggcagca

SEQ ID NO: 117172 - DNA, 120 bp, synthetic construct
  source 1..120: mol_type = other DNA
cctctactttgtcaggaacaggtaggagcaatcctccctcggaggtgcctgtgtcagttcctcagaaaccagctttttatgaacatcgataactatgaagttagtttttttttttgtaac

SEQ ID NO: 117173 - DNA, 120 bp, synthetic construct
  source 1..120: mol_type = other DNA
aggagacagaaatgtctacacgatcacaaattagacaacaagagggataaaaatctgcctaaaacccttccatttgagcccccacattccagtttgccttatacctgtgactgacacctc

SEQ ID NO: 117174 - DNA, 120 bp, synthetic construct
  source 1..120: mol_type = other DNA
aactaatgtgagtatagatcagtaaacatattacttgtgtacatgggtgctaggaatgttttaaataatacctttggtgacttgaactttttcttcctccattcttcgagaagtcttttc

SEQ ID NO: 117175 - DNA, 120 bp, synthetic construct
  source 1..120: mol_type = other DNA
agaaaagagggaaacaagtcattcagtttatacataccttcatagacctccttttgaacttgaattacttccctttcttggtaagcctcttcccactcttcctccccttcgtcatagcct

SEQ ID NO: 117176 - DNA, 120 bp, synthetic construct
  source 1..120: mol_type = other DNA
ttaacatttgtgttaactacaataaaaaaataaggaatggcccttcctttctagccctcacttcttctttctctgagaccattgcacagaggcagcataaacatctgcctgggtttgttt

SEQ ID NO: 117177 - DNA, 120 bp, synthetic construct
  source 1..120: mol_type = other DNA
gatcacctaaatcaggaaagatactgaggtgggttgcagcaacctcttaaaattagcagcaacccttgatcttacattgatgtgactttatcaagaccagctgttgggtacttccatgtt

SEQ ID NO: 117178 - DNA, 120 bp, synthetic construct
  source 1..120: mol_type = other DNA
aaagacgagggcgaaagtgagtgaagggagaggtaccattttgtgattgcaaactcttacccttccttcaccctccactgtttagaatttaaaagttttggccaagaaaaaagtgttaag

SEQ ID NO: 117179 - DNA, 120 bp, synthetic construct
  source 1..120: mol_type = other DNA
gcctcggcctcccaaagtgctgggattacaggcgtgagccaccgcgcccagcccactcttttttaatttttttttttttttttttttgagacggagtctcactctgtcacccaggctgga

SEQ ID NO: 117180 - DNA, 120 bp, synthetic construct
  source 1..120: mol_type = other DNA
gaaaagccacaagctataatttgcaatttggctgtaaactactatggtttatttctataagctgcactagaaattggttccattattctttttgttatacatagtagttaggaaaatatg

SEQ ID NO: 117181 - DNA, 120 bp, synthetic construct
  source 1..120: mol_type = other DNA
cttctggtggcactgctctgataggcatggttgggattggaactctggagtcaggaatatctggaaagggacatgtaataagcatagagagactgagaacaagctatttattagaaaact

SEQ ID NO: 117182 - DNA, 120 bp, synthetic construct
  source 1..120: mol_type = other DNA
aaaggacacttcacactcaaaggtggcagactgatgctcactcaccacgatgttctgtatgcgctttgtaaactgaattggttcagctgtttaagtacaaagagggttcaaagttagatt

SEQ ID NO: 117183 - DNA, 120 bp, synthetic construct
  source 1..120: mol_type = other DNA
cagagaaagtcagactaagtcctataaacaaaatatcaattcctagccaagatcctccagatttacatctatgagatcttgtcctttcctagctttctttctacaatcctagatatgaga

SEQ ID NO: 117184 - DNA, 120 bp, synthetic construct
  source 1..120: mol_type = other DNA
cggtcaccatcaatgcttatttcaaatttatcactgggttccagtttttcagttcctttgtaccacgaaagcttgatttctggataattaattttaatgtcaatttcaaagacagcatca

SEQ ID NO: 117185 - DNA, 120 bp, synthetic construct
  source 1..120: mol_type = other DNA
aaccaaagagcctagctaatgaattataatatcagaaaaaataataatagcaatggaaaactttaataatagaatagtatacatatcacggaaacgatgtgtggaaattgagtgtggatt

SEQ ID NO: 117186 - DNA, 120 bp, synthetic construct
  source 1..120: mol_type = other DNA
actttcaatttcaccatgttcgttaaatgccacgcatcggtataacccagaatcagtttttgtggtgtccctaatctccagttttgcttcatcgcctttttggtggatgaaaacacgacc

SEQ ID NO: 117187 - DNA, 120 bp, synthetic construct
  source 1..120: mol_type = other DNA
cttttgaggtgtctgtacctttaatggtcacttttgatttggtagtgtcacttccagccacatttgaagctttacacacataatctcccgaatctgctttagccacatctctgagttcca

SEQ ID NO: 117188 - DNA, 120 bp, synthetic construct
  source 1..120: mol_type = other DNA
ctgatgtctatcctttaaaaacattttataaatagcttcagaattctatagaaagcatttatctgcccatggtaaaaccatcatgagtgtaaatcatgaagataagccactgctaagtat

SEQ ID NO: 117189 - DNA, 120 bp, synthetic construct
  source 1..120: mol_type = other DNA
ttggtcaagatatcataagaaatgctcatggatatataacaggcagtgaagaaaaacacaacaggttggggctgtgaggataactcacctttgatgacgattgaagacgtgcacagagca

SEQ ID NO: 117190 - DNA, 120 bp, synthetic construct
  source 1..120: mol_type = other DNA
tacacttttgttggaccacttgcaaaataaacgataccttttatattcagctgagctgtgcaagagtcttttcccacttcattcacagcatagcaggtatattgtccagaatctcctttg

SEQ ID NO: 117191 - DNA, 120 bp, synthetic construct
  source 1..120: mol_type = other DNA
gcaaaacagtatgaaaaccaataaagcaattggttggctgaaggcatgtctctgggcaagcagcagattcctgtaattttaaagactgccttctagcaatttgcatgagatacttacggg

SEQ ID NO: 117192 - DNA, 120 bp, synthetic construct
  source 1..120: mol_type = other DNA
aaatgggaggagttccagtgaatgtaccctctaggatcaggggttttcctttctctatgctgtaatcattcagcctcttcacaaatttggctggggctaaagtgaccaaattgaaaatat

SEQ ID NO: 117193 - DNA, 120 bp, synthetic construct
  source 1..120: mol_type = other DNA
agattggaggtgacccatagactttacactccattacaactgaggagccggatagaccatttgtctctttcaattttcttgtgaatgaaggaggaacggttcggtctgaatgatacaaaa

SEQ ID NO: 117194 - DNA, 120 bp, synthetic construct
  source 1..120: mol_type = other DNA
aaatccatatgttgtcactttctctaacgatttctcccttatctttgaaccacaccactgaaatgggttcagcgccttcaatggtagtctgcagctgaacttctttaccaacgacagtag

SEQ ID NO: 117195 - DNA, 120 bp, synthetic construct
  source 1..120: mol_type = other DNA
ctttgttgtgtcctttccctattttaaaacatcgttgaagagtcaaacaggaagttaagaggacaattaaagaggaggctaatgtgaaaaacacacaggtggggagagcgctgaccttta

SEQ ID NO: 117196 - DNA, 120 bp, synthetic construct
  source 1..120: mol_type = other DNA
gaactatttaatttctgacagtagcagcgataaacatgtggcagaaacacatgactgccttccataatagcagatactgatctacttactccccagcccctgacctccactattatttaa

SEQ ID NO: 117197 - DNA, 120 bp, synthetic construct
  source 1..120: mol_type = other DNA
agaatgagcttggcactggatgaagcagtcccaagaggattagaagcagagcaattatactgccctatgtggctctggtcagtttgtaaaatctgaagagttgctacattatgaacaaaa

SEQ ID NO: 117198 - DNA, 120 bp, synthetic construct
  source 1..120: mol_type = other DNA
tttccagtatggtagatttttctgtcatagtaatactgcatctctcagattgtgaaataagatactcgtcctttatccagctcactgagattggaggtgtgccagtgtatgtggcctcga

SEQ ID NO: 117199 - DNA, 120 bp, synthetic construct
  source 1..120: mol_type = other DNA
ggggaagggtagttttgcgtttaaagagaagttttattctgtgcccctccaccccctggaaatattgtatattcataaaaatctcattctactcaccagaaacatggacggatacagtgc

SEQ ID NO: 117200 - DNA, 120 bp, synthetic construct
  source 1..120: mol_type = other DNA
tgaacttgacagagcaagaacacgtgtcacttcccacctcattagtagctttgcagtgatattccccgacatcggaggcttcaagattaaggatatgaagacttgtatcaaaatgttttg

SEQ ID NO: 117201 - DNA, 120 bp, synthetic construct
  source 1..120: mol_type = other DNA
tttgccaacatcattggttgcttggcaagtatattgaccagagtctcctttgcctactttaagaattctcaaatgaggagtgtttcccacacatgtgattgtatagtttcctccaggacg

SEQ ID NO: 117202 - DNA, 120 bp, synthetic construct
  source 1..120: mol_type = other DNA
cattgtaaagaaaccgaatctccaactgctgcctccagaggttccagttccgtaacaaaataaggcggttctaaggaagaaaggctcacagttagcaactggaattaatgaatatcaaag

SEQ ID NO: 117203 - DNA, 120 bp, synthetic construct
  source 1..120: mol_type = other DNA
cattagcagccacgcatgtgtaattgcccatatctgaggaatccagagaattcaactgcaatgtgcagacattatctgaaaatgtggtttggtactttgctccactgacaatcttggttt

SEQ ID NO: 117204 - DNA, 120 bp, synthetic construct
  source 1..120: mol_type = other DNA
tgtgcattagatagtatatattgatttccacttgaccctctgtagatcaaagtctacaggttattgtgaattacttggtatttttgctctaccttaaggtgctaaagacaattctttgaa

SEQ ID NO: 117205 - DNA, 120 bp, synthetic construct
  source 1..120: mol_type = other DNA
ggtattcaccgatgtctgaagtgtccacattgagaatgtgaatacttgtgtggaagtttttggatgcaatcttgtatttcttgctgcttctgagttgccgcttgtctttgtaccatacca

SEQ ID NO: 117206 - DNA, 120 bp, synthetic construct
  source 1..120: mol_type = other DNA
tgcctacttcatttttttgtgcagttttgaaacatcacgtttgatgtttggcaaatgtgttgaggtaatcagaattatgacactggaataacaaaaatatttcataatgactagttacat

SEQ ID NO: 117207 - DNA, 120 bp, synthetic construct
  source 1..120: mol_type = other DNA
cctgagacaagttccacatcatccttaaaccattttattttaaatggtggtgttccttttagtattgccttaaattccactgtagaatcaggtatggcttgctgtcgcccaggtttcact

SEQ ID NO: 117208 - DNA, 120 bp, synthetic construct
  source 1..120: mol_type = other DNA
atctactgggaactatttgtttcccgtctttaagccatttcactttgagttctggtgttccagccacaacacattccaaggtcatgggatctttctccgtaacatcaactgatttagctt

SEQ ID NO: 117209 - DNA, 120 bp, synthetic construct
  source 1..120: mol_type = other DNA
taaagattcaaaaggaagacagtagcttactcaagggaagaccccaaacttatcaggcagcacagccaaaatggagaatagattccattcacgaacctttcactttgagttcaatgctgc

SEQ ID NO: 117210 - DNA, 120 bp, synthetic construct
  source 1..120: mol_type = other DNA
atgtcccactgtctgtaccttccagctggctgatttccaagaaggcagtattgtcatgaaaagagaatttgtacttttcactagctgatatttcttggtcatctttgaaccactggatgc

SEQ ID NO: 117211 - DNA, 120 bp, synthetic construct
  source 1..120: mol_type = other DNA
caatattatccctatagcaaaagtggcttaaaaaaaagaattgactcttcagaaaagccagtccctcactggaaccaacactaacctcttaaagtcaccctggcactgcagatgctgctg

SEQ ID NO: 117212 - DNA, 120 bp, synthetic construct
  source 1..120: mol_type = other DNA
cccgaatcagaggtttttactaaatagagttccagggaactctctaaagcttctttggtaatatagcagcttccaccagaaaccagctctttgttgcccttaaaccatctgattgtgaga

SEQ ID NO: 117213 - DNA, 120 bp, synthetic construct
  source 1..120: mol_type = other DNA
aactattaattccccaacagatgtttggcttccagcttcattttcagccaggcacgtgtatttgcctccaaaactaatctgaacatcagggattatcaagactgcaacaccattggaaaa

SEQ ID NO: 117214 - DNA, 120 bp, synthetic construct
  source 1..120: mol_type = other DNA
tgcagctatcactgccgacgtcattcactgcttcacatgagtaactcccactgtcttcaacttttacatccgtaatatcaagtatagcctcagaattgacaaaatacattcggactgtgt

SEQ ID NO: 117215 - DNA, 120 bp, synthetic construct
  source 1..120: mol_type = other DNA
ttgctccacgtaactgtgacttttctgtcttcatctacttggcactcaaggtggaccttcttattgatagcggactgcacaggctctaattctttaatgaaatgtggcttatcaatgatg

SEQ ID NO: 117216 - DNA, 120 bp, synthetic construct
  source 1..120: mol_type = other DNA
tccaaacgcgtcagtatgaataatatcatgtacttggttttatggagacattttgaccagagtgaaaagcactggttgggtcatcatgggcctgggtttttcttaggatcacgtaaaagg

SEQ ID NO: 117217 - DNA, 120 bp, synthetic construct
  source 1..120: mol_type = other DNA
ctcaaataataaattattttttctttggtcagtagtagaaatgtgactgtaaataatgatttcttatcccatataggctctgcagtacctacctaccatgttactgtcttggttgttggt

SEQ ID NO: 117218 - DNA, 120 bp, synthetic construct
  source 1..120: mol_type = other DNA
aatatgttttatttttaaaataaatagtaccatggatatgatagcatagcacccaacagggcagtaagggaaaaggtgagttcataaccatgattatgtctgtgatttcattcttactct

SEQ ID NO: 117219 - DNA, 120 bp, synthetic construct
  source 1..120: mol_type = other DNA
ggttcagtaatgggttcaaccttctgtgaacctgaaaaagaatccatttcttcttgcaaacttgttttggctccttgctgaattctaggaccctcagctgttaggatgtctatttcctca

SEQ ID NO: 117220 - DNA, 120 bp, synthetic construct
  source 1..120: mol_type = other DNA
attaatttgttctatggacatggcacttgggaagattttctcggtatctgatagaactgcctgtgtctcaggctcttcaggcattagaataccttctttggagaaggttttctgggactg

SEQ ID NO: 117221 - DNA, 120 bp, synthetic construct
  source 1..120: mol_type = other DNA
gttacagacagtgtagccacatcccccatgcttatatcagcatttgacacttctttgatgaaaattgggccagtgccttccttttcggaatcaaatttagttgggtaaactggagattca

SEQ ID NO: 117222 - DNA, 120 bp, synthetic construct
  source 1..120: mol_type = other DNA
taagaaaacctatacagaaccactgagcaagaaacaaagcagtgcataacagagactctttaaacagtatcctggatgacaggatgaaagacatgtaattttaaacaaggaattcgattt

SEQ ID NO: 117223 - DNA, 120 bp, synthetic construct
  source 1..120: mol_type = other DNA
acaaggtttgaactgttgctgtgctgtatgatgtttgagtaaagcatgcttgtcatgtttgcctcaatctgagtttctcgttaattttaacatccattatgtgactaagtgcagaataaa

SEQ ID NO: 117224 - DNA, 120 bp, synthetic construct
  source 1..120: mol_type = other DNA
gaatgatcacctctaaggtcttttggtcctacccttcattttcagaattttttatatttgtcgagtcttatatgagaagacttgggtccacattagtatataggtaagatattaaggagt

SEQ ID NO: 117225 - DNA, 120 bp, synthetic construct
  source 1..120: mol_type = other DNA
acattgtacttttgcatatatggtttatctgctaaaagagagtccattccactgaaacactttgtggaggaggcatgagggtaaatagaagtacaaacaattaggtagccaaggagagat

SEQ ID NO: 117226 - DNA, 120 bp, synthetic construct
  source 1..120: mol_type = other DNA
tccctcccttgaatccatatttggatctacaaaattaaatggaagaacatctagactcacaatcatacttttatggtcaggagtaaattcgggaactgtcactattttcacctgcttctc

SEQ ID NO: 117227 - DNA, 120 bp, synthetic construct
  source 1..120: mol_type = other DNA
aatgctcatttggtgtaccgtcttccctttctatttttgatggatatgttttaaaagtaccagtggggtttggtcctccagtaggaatagaatatctctctagtgcctcccctgggggtg

SEQ ID NO: 117228 - DNA, 120 bp, synthetic construct
  source 1..120: mol_type = other DNA
tcataacatttttcttctccagaggcatgaatgtttgtacttatttgttcacctggattctgttgttcttcagtcatcaagagtgggaagcactgactcagggagagctgtctatggagt

SEQ ID NO: 117229 - DNA, 120 bp, synthetic construct
  source 1..120: mol_type = other DNA
ttcaaattcgataattctatgcttcacctttttccccgggtagtgtatctcttcaccaagggattcttcatatacaatggcagatgaatcttttgtattgtaactgtcagaaattctctc

SEQ ID NO: 117230 - DNA, 120 bp, synthetic construct
  source 1..120: mol_type = other DNA
cattgctttaggttccagctcctcagtttgaaacacttctttagactctttatcctgttctgggataggagtagctgctgttacctgaatttctacaggaaaggaaagcaattctgtgtc

SEQ ID NO: 117231 - DNA, 120 bp, synthetic construct
  source 1..120: mol_type = other DNA
tccatttgattagaaagggcatgtggattttgcacaatactctcagctgaatgatctaccttataactttcagctagatcagacatagatctgattttcatgtcctctctagagaacaga

SEQ ID NO: 117232 - DNA, 120 bp, synthetic construct
  source 1..120: mol_type = other DNA
aggagcttgtagatgatattctacttgcatatcttttagcagccatggatttgtggtctatgtcttcagaatctgaaaaggcgtcacgtgtatccctttctgaatgttcagattccccct

SEQ ID NO: 117233 - DNA, 120 bp, synthetic construct
  source 1..120: mol_type = other DNA
gacattgcattctgagaatgacagctaggttattgtctattttcaatgtaattcaccgtgattttgaaaacaaacttctacttcatgatttcatgcattaagatgacaacttctcctaat

SEQ ID NO: 117234 - DNA, 120 bp, synthetic construct
  source 1..120: mol_type = other DNA
tggggctctcgtatcactctcagtcttcagtccacgtggtatcctgtcagtagactttattcccttgttctcagtttcttacggtttttggcatgaagttaatgacaaacttgatgtttt

SEQ ID NO: 117235 - DNA, 120 bp, synthetic construct
  source 1..120: mol_type = other DNA
gtgattactgtgctagccagcagctgtagtgaaattgagggtcaactctctggctggtggaattttctatctaatttacataactagacctcagttcttgagatattgcctttgtaggct

SEQ ID NO: 117236 - DNA, 120 bp, synthetic construct
  source 1..120: mol_type = other DNA
tcctgacctcaagtgatctggctgcctcggcctcccaaagtgctgggattacaggcatgagtcactgtacttggtcccaattttctattttcatggcccctttgtaaacaactagaacct

SEQ ID NO: 117237 - DNA, 120 bp, synthetic construct; identical to SEQ ID NO: 21841
  source 1..120: mol_type = other DNA

SEQ ID NO: 117238 - DNA, 120 bp, synthetic construct; identical to SEQ ID NO: 21842
  source 1..120: mol_type = other DNA

SEQ ID NO: 117239 - DNA, 120 bp, synthetic construct
  source 1..120: mol_type = other DNA
aagagccccaactaacagaaatgttaaaccactttaggactggacttcttaacactaagacattcttgagaggaggatgaatatagctcgctggtgtacagacctgaaacggtctagctt

SEQ ID NO: 117240 - DNA, 120 bp, synthetic construct
  source 1..120: mol_type = other DNA
catattcagtgactttgagaaaaagacagtcctaagaagagtcatcaggaaaggtttgatctgggcttgtagttgccttctgggacaggaaatgagaaaaatctccacttttggtttgca

SEQ ID NO: 117241 - DNA, 120 bp, synthetic construct
  source 1..120: mol_type = other DNA
tgcagtgagccgagatctccagcctggtgacagagcaagactccatcaaaatatatacatataaagaaaatgaaatcttgacactacaacttgtcagctgtgtggccttggaaatgtcat

SEQ ID NO: 117242 - DNA, 120 bp, synthetic construct
  source 1..120: mol_type = other DNA
tggagatgttgttttctcatcataggatgccactgtgttcaatgatcctacatatttttcaatgctcagttcacacatctttctctggctctctcccagacagagaatgatgagtacgtg

SEQ ID NO: 117243 - DNA, 120 bp, synthetic construct
  source 1..120: mol_type = other DNA
tttaaagacattggttatgcagaaaagatagtgaaatttttctctttctaccccaattggtgtcttgtagagtgcttcaggtgtatttctacaacactttaaaggcaatactaccatatg

SEQ ID NO: 117244 - DNA, 120 bp, synthetic construct
  source 1..120: mol_type = other DNA
tatgtatcaggtgatattctggggcaaccatccactcttgttttcatagagcttaccttctagcaggtactatttttcagatgccaaattctaggcactaaaacggaattcctagcctca

SEQ ID NO: 117245 - DNA, 120 bp, synthetic construct
  source 1..120: mol_type = other DNA
tccaaattgtatttttaaatgcactgggaaaggacaaaagcctgcttcttaggttttattttcagctggaagtagcgaggcattcctaccttccactgagagtgaagctgatgttgtggc

SEQ ID NO: 117246 - DNA, 120 bp, synthetic construct
  source 1..120: mol_type = other DNA
tcagtttctccactactaatacagagataataagaactggatgccatgaccatttggtcttctaggaacctagggaatgctggcgatatggttcatctttgtgaatcttgagattacccc

SEQ ID NO: 117247 - DNA, 120 bp, synthetic construct
  source 1..120: mol_type = other DNA
tccactacatatttgtgtcgttcttgaacttggaaattgatttcaatgccatctttataccagtgggcatcaacatcgtcttcattgacctcaaattcaacaacagcacgctgtttctca

SEQ ID NO: 117248 - DNA, 120 bp, synthetic construct
  source 1..120: mol_type = other DNA
ttagacagctgctagggacacccttattccctgagtggaaactgtgactaaattgaggtcagcataagagagtctaagccaagtaagaatgagctgatttaattctttaaaggatggtgg

SEQ ID NO: 117249 - DNA, 120 bp, synthetic construct
  source 1..120: mol_type = other DNA
atgtaacccttagccatcaccccaaggacttttctattgtctcccctgtagacctaagcaaccaccaatctacatctctatagatttgtgtatcttggacatttcatataaatggaatca

SEQ ID NO: 117250 - DNA, 120 bp, synthetic construct
  source 1..120: mol_type = other DNA
gtgctttactcagtgtaaccacatactagatgtttcaattaacaattttttttctttattttttgaggcaggttctcactttgtcgcccaggctgcagtgcagtgccgtgattgtggctc

SEQ ID NO: 117251 - DNA, 120 bp, synthetic construct
  source 1..120: mol_type = other DNA
ctggaacagtgtcatgggaaacactaacttcaaaggcaacagtggcattttccaaggctgtcacatcctttggctttttaatgatcttgacagctaagaggaaaattggagcaattcagt

SEQ ID NO: 117252 - DNA, 120 bp, synthetic construct
  source 1..120: mol_type = other DNA
aggacaaatcctatgttacttgccttcaactttgagtttggcagatgttttggaggtggccaccttgtaggtatattctccaatgtcatctaatttggtggcagcaatgataagtctcct

SEQ ID NO: 117253 - DNA, 120 bp, synthetic construct
  source 1..120: mol_type = other DNA
acgtaagtaagtataaaccatgaaactttcataccaaataagacaaatcattaccatatgacttgcttcaatactagatgtaatggacaacacgatctgaatgtaacatctcaactcctc

SEQ ID NO: 117254 - DNA, 120 bp, synthetic construct
  source 1..120: mol_type = other DNA
ttatatttagaactgggcttgatttccttgtccttaaaattccacaggacatcaattccagagtgggacagctcaacctcaaacaccacattttgagtttctgtacaggtaaggtcacga

SEQ ID NO: 117255 - DNA, 120 bp, synthetic construct
  source 1..120: mol_type = other DNA
cactaagtccttgtaggatagcaatggggcgggctgtgaaatatggggagaaaaagaatgttatgatcattttttatcaataaaccataatgatgctcactgcaggctgacaggaatggg

SEQ ID NO: 117256 - DNA, 120 bp, synthetic construct
  source 1..120: mol_type = other DNA
gcagtcgttttgacattttcatcttccacaagtacacagctgtaatcttcagcatcagacgtatcaatggtcagtatggagaggaagtgaacctttctgtcagagtgcatcctgtattta

SEQ ID NO: 117257 - DNA, 120 bp, synthetic construct
  source 1..120: mol_type = other DNA
cttgaatttactgcgcagctcttccgactcttcaggcactttttcatgggtaattctttcagcccttttcaacttcacaacttctttggtttcagtggtgtcaacaggtctatccacttt

SEQ ID NO: 117258 - DNA, 120 bp, synthetic construct
  source 1..120: mol_type = other DNA
gatgattaactttctctctggctcaggctctgcaaactcaacttcaacatttactttgcatcttgtagtgtctctgccagctttattaatagcagtcgcagtataccaggcagaatcttg

SEQ ID NO: 117259 - DNA, 120 bp, synthetic construct
  source 1..120: mol_type = other DNA
ggagacatgcgtataggagacctgctcactgaacgtggagagagagatctgcaaaacaaagacacacaatactttcgtgaggcataaagaaaactcagcaaaacaaacttcattttgtct

SEQ ID NO: 117260 - DNA, 120 bp, synthetic construct
  source 1..120: mol_type = other DNA
attgctggcaaatgcagtgtagattccttcatcttctggaagaacaacaggtatacgcagactagctctgccatcttgtagaaagtccatttggtatctttctccatgtttgatgcgctt

SEQ ID NO: 117261 - DNA, 120 bp, synthetic construct
  source 1..120: mol_type = other DNA
tactcagagtatacaaatccaggtgctgtttctccaactttaggttcttgaacaaatgcagtcacttgtgtctgataaagcatttcttgctgggacttcatcagtaactcataatcagct

SEQ ID NO: 117262 - DNA, 120 bp, synthetic construct
  source 1..120: mol_type = other DNA
gagttgcacttaccttcttcaagcaaggaagcagatgcagaagtttctccatgcttattgcgaacaacaatagtgtattctccagcatcatcagcaaaagtcatagaaatcaccagcttg

SEQ ID NO: 117263 - DNA, 120 bp, synthetic construct
  source 1..120: mol_type = other DNA
gtaaaaatacctcaaaacaaactaagaaggctccacaatgaaagagcctatgctcagggtcggtggggtgagtaaattctactctaggcttcatgcacgtattatacaagtcacagagaa

SEQ ID NO: 117264 - DNA, 120 bp, synthetic construct
  source 1..120: mol_type = other DNA
tattagtaaagagctgtaaggctcaatagcaaatgctacctattcaacaaagctttgccatggtatcaccaactggaatgaatctatgcctcccatggattctccttctgttgtgatgtt

SEQ ID NO: 117265 - DNA, 120 bp, synthetic construct
  source 1..120: mol_type = other DNA
caccgatttggtgatcttctgagcagaagatgtggctgacaactctttttgtaatgtggcaatagcactaccggctattgatgcctacatggaaacagagtcagaaaataaagtcattta

SEQ ID NO: 117266 - DNA, 120 bp, synthetic construct
  source 1..120: mol_type = other DNA
tttctcctgatgacagagattataagggagaagatagggcactaatccagagctatttgattccacaatccaacccgaccaccatacagtaccacctctccatcttgctatattgagtat

SEQ ID NO: 117267 - DNA, 120 bp, synthetic construct
  source 1..120: mol_type = other DNA
acaaggtttccagaattaatacataggaatatcgagatcaggctggaatatctcctgggcatcaggacaggcagatggcgtccacattatacagcagtgttaacgtgtctagaaatgtat

SEQ ID NO: 117268 - DNA, 120 bp, synthetic construct
  source 1..120: mol_type = other DNA
cagaaacattcttcaactatgctacctgcatatctttaaaaattattctctgaaccattcaagatataaatgagatttttctgagatggaattgggtctttagtgatcatgggctttatc

SEQ ID NO: 117269 - DNA, 120 bp, synthetic construct
  source 1..120: mol_type = other DNA
cactactagaaatgctcactgttcaactggaggatggactgaatctaaccatctctattgttttattgatcagttaaacaattagatggaacactagaagcacaattcacgacggatgaa

SEQ ID NO: 117270 - DNA, 120 bp, synthetic construct
  source 1..120: mol_type = other DNA
gttcatgggcctcttaaaattagcctgcatgcaattttaatcaacttctggaagattcccagatgttaataaaatgttgacaataatggtgaagagataagtggagaaagggatatgtag

SEQ ID NO: 117271 - DNA, 120 bp, synthetic construct
  source 1..120: mol_type = other DNA
gctcaaatatctgtattcaccttctcctgagttatttgcacttgttctcttttggtagtaatgccttctctacctcttgatactaaatcttgttctttgactttgggtgtggcaactatg

SEQ ID NO: 117272 - DNA, 120 bp, synthetic construct
  source 1..120: mol_type = other DNA
ccttgaaacactcaggaaaatacaggatgcttagtggtgaacgataaaatgtcagatttccatttcaggggcctacacttgtgcttaatacatagactgctttcctgaggaatgggcttc

SEQ ID NO: 117273 - DNA, 120 bp, synthetic construct
  source 1..120: mol_type = other DNA
gttcatagatgtgccctaaactgttctgtagacaatctcctgaaaactgatcaagtgagtggaaaatagtgcaatgtgaacataatttccatcctgagtttcaatactagacatagagga

SEQ ID NO: 117274 - DNA, 120 bp, synthetic construct
  source 1..120: mol_type = other DNA
tcaccttttctggtcatttggcttgttaaagccatgctgtccattccacttcaaactcatgtgcaaatgtcttccgaaggagccaggaagcagttgctaagatttctaaagcaaagtgag

SEQ ID NO: 117275 - DNA, 120 bp, synthetic construct
  source 1..120: mol_type = other DNA
agtaaaaacaaaagtcctttggggaaacttagagaaatgtaatgccttccctgaaatagtagtttccacatccagtgtgtgcagtgactgagctctggaattgactggtctctgtttctc

SEQ ID NO: 117276 - DNA, 120 bp, synthetic construct
  source 1..120: mol_type = other DNA
agttggagaaactagaatgtgaaataaggaaaaacaaaaccattctgacagtacctctttagcaccagtggcaacagcctctgctgcgtagctagcactggccgacacactggcggcagc

SEQ ID NO: 117277 - DNA, 120 bp, synthetic construct
  source 1..120: mol_type = other DNA
tacaggttgtgcagtgcactttgcaaattgctgctttagccgaagtgtttgtggacagctacttttaatttcctccatatttgtttacactcgccccccttgtattgcactctggactta

SEQ ID NO: 117278 - DNA, 120 bp, synthetic construct
  source 1..120: mol_type = other DNA
agcaggacacaggtaagcccataactgtgaaaatcattgtaattttggtcattataggagagtgcttatttctgtacttacaacaaaaaataatcacctggtcacagcgagatacaatgc

SEQ ID NO: 117279 - DNA, 120 bp, synthetic construct
  source 1..120: mol_type = other DNA
tctaggctggtgttgtctaccttgtagccattttatgtttattgtgatacttttatggcagaggcaatgaagtaccttgaggaggagaaaggtcttaaaattttttcacaagtgctgttt

SEQ ID NO: 117280 - DNA, 120 bp, synthetic construct
  source 1..120: mol_type = other DNA
tatttacaaggcactttcaactaattatctcattgaagccccaaaatgcagcttgagatcattcttattgtgactctctttaatttacagatgacacaactgaaaccttaaataaactgc

SEQ ID NO: 117281 - DNA, 120 bp, synthetic construct
  source 1..120: mol_type = other DNA
aatagacggtggtgttggggatcttgactttggcttcggaggaatcctgggaggtgttttatgtggcagctgttgcccagcggcaccatctatgaccatctcaactgttgcaattgatct

SEQ ID NO: 117282 - DNA, 120 bp, synthetic construct
  source 1..120: mol_type = other DNA
gaagtagctcttccaacgctattggtggcatttactgaataggtccctgagtcctcagggtatgcttctgcaatcagtaagctgtagaggtcgccttcttgtgaaatttggaaatcaagg

SEQ ID NO: 117283 - DNA, 120 bp, synthetic construct
  source 1..120: mol_type = other DNA
tgtaaaggcatgcaatattctgtatactaatgtctcactaggtagtaaaggatagagaaaaacaacagaggccactaagattggtgataagttttctggggaaacagtgtcatgcatttg

SEQ ID NO: 117284 - DNA, 120 bp, synthetic construct
  source 1..120: mol_type = other DNA
ctaatgatttttccaaggtccttcagctagcagtgacacagaggggactagaatttccatctcctgcctgcctgcctagggctctatctgatgcaatttaatagacaacattaaaatcat

SEQ ID NO: 117285 - DNA, 120 bp, synthetic construct
  source 1..120: mol_type = other DNA
gaaggaacaagaagatatgaagtagccagattccactacttctcaaggaggcaaattcccactgaagtcatatgtgttctgctcagttcagaagttactgagtgttaccagataaatagg

SEQ ID NO: 117286 - DNA, 120 bp, synthetic construct
  source 1..120: mol_type = other DNA
cttaaaatgacctttccatagtgttggactaattttccgaagtgaaagcagggcttaaacttggcgtcaagtcctgcagcaacgttaacttactggagaggaggcaaaggaaaaaaaaac

SEQ ID NO: 117287 - DNA, 120 bp, synthetic construct
  source 1..120: mol_type = other DNA
attacttaaaatagttgccagaagtaaaaatctgaactttgtaatctctttcctgactggagaagctttggcaagccttatcaaatatgcaagctttttgtagacggcatacggtgcttt

SEQ ID NO: 117288 - DNA, 120 bp, synthetic construct
  source 1..120: mol_type = other DNA
ggaagatgagaaatcaaagtgtatttagaagtaagaaacctttcctttaaacattatttcttacccttcttagtgtcaacatttatctcaaaatatataattggactgtgtgctgagtta

SEQ ID NO: 117289 - DNA, 120 bp, synthetic construct
  source 1..120: mol_type = other DNA
tgcttctgaaacgacgtcctatggagagttggtttttctgaccatctccgacatgaatcggtgagcctctaatcctaaaaacaaaactacacagtcaagactgtgtagttttgcttttct

SEQ ID NO: 117290 - DNA, 120 bp, synthetic construct
  source 1..120: mol_type = other DNA
tcaaaagctagcagaagataagaaacaactaagatcacagcagaactgaaagagatagagatacaaaaaaccctttgaaaaatcaatgaatctagaagctggttttttgaaacgatcaac

SEQ ID NO: 117291 - DNA, 120 bp, synthetic construct
  source 1..120: mol_type = other DNA
cttctgaaactattccaatcaatagaaaaagaggggatcctcacaaactcattttatgaggccagcatcatcctgatatcaaagcctggcagagacacaacaaaaaaagagaattttaga

SEQ ID NO: 117292 - DNA, 120 bp, synthetic construct; identical to SEQ ID NO: 22538
  source 1..120: mol_type = other DNA

SEQ ID NO: 117293 - DNA, 120 bp, synthetic construct; identical to SEQ ID NO: 12917
  source 1..120: mol_type = other DNA

SEQ ID NO: 117294 - DNA, 120 bp, synthetic construct; identical to SEQ ID NO: 12918
  source 1..120: mol_type = other DNA

SEQ ID NO: 117295 - DNA, 120 bp, synthetic construct; identical to SEQ ID NO: 12916
  source 1..120: mol_type = other DNA

SEQ ID NO: 117296 - DNA, 120 bp, synthetic construct
  source 1..120: mol_type = other DNA
caatgaggccatctatgacatctgtcgtagaaacctcgatatcgagcgcccaacctacactaaccttaaccgccttattagccagattgtgtcctccatcactgcttccctgagatttga

SEQ ID NO: 117297 - DNA, 120 bp, synthetic construct; identical to SEQ ID NO: 12919
  source 1..120: mol_type = other DNA

SEQ ID NO: 117298 - DNA, 120 bp, synthetic construct
  source 1..120: mol_type = other DNA
gaatccacaccaacctcctcataatccttctcaagggcagccatgtcctcacgggcctctgaaaactcaccttcctccatcccctccccaacgtaccagtgaacaaaggcacgtttggca

SEQ ID NO: 117299 - DNA, 120 bp, synthetic construct
  source 1..120: mol_type = other DNA
gtagcagtttttgattatgtcctgatcaaaggataaggtagtcgggttgggtaaggaaatacagagtaggtcccaggtcaccatggtccaagcccaggtgctcagtgtgtgtcctctctc

SEQ ID NO: 117300 - DNA, 120 bp, synthetic construct
  source 1..120: mol_type = other DNA
acctgagcagggctgaggcagccatgagggaatctcttcacagcccatcttactgctggcaaagcagcttttccctgtaggtcaggttttcctaaattaggagccgagtctcacagacac

SEQ ID NO: 117301 - DNA, 120 bp, synthetic construct
  source 1..120: mol_type = other DNA
agctaattttcgtatttttagtagacatagagtttcaccatgtaggccaggctggtctcaaactcctgacctcaggtaatccacctgctttagcctctcaaagtgctgggattacacgtg

SEQ ID NO: 117302 - DNA, 120 bp, synthetic construct; identical to SEQ ID NO: 21487
  source 1..120: mol_type = other DNA

SEQ ID NO: 117303 - DNA, 120 bp, synthetic construct
  source 1..120: mol_type = other DNA
gcaattcttctgcctcagcctctcaagtagctggcagtacaggtgtgtgccaccacacccagctaattttcgtatttttagtagacatagagtttcaccatgtaggccaggctggtctca

SEQ ID NO: 117304 - DNA, 120 bp, synthetic construct; identical to SEQ ID NO: 21488
  source 1..120: mol_type = other DNA

SEQ ID NO: 117305 - DNA, 120 bp, synthetic construct; identical to SEQ ID NO: 21489
  source 1..120: mol_type = other DNA

SEQ ID NO: 117306 - DNA, 120 bp, synthetic construct; identical to SEQ ID NO: 27450
  source 1..120: mol_type = other DNA

SEQ ID NO: 117307 - DNA, 120 bp, synthetic construct; identical to SEQ ID NO: 27451
  source 1..120: mol_type = other DNA

SEQ ID NO: 117308 - DNA, 120 bp, synthetic construct; identical to SEQ ID NO: 4108
  source 1..120: mol_type = other DNA

SEQ ID NO: 117309 - DNA, 120 bp, synthetic construct
  source 1..120: mol_type = other DNA
tgcagcctgggcaacagagcgagactccgtctcaaaataataataataataataataataaataataacaattatagccaggtgtgctggtgagcgatcgtagtccctggctactcggga

SEQ ID NO: 117310 - DNA, 120 bp, synthetic construct
  source 1..120: mol_type = other DNA
atccgccgtcagtttattcaaacagctcgattcagcctatcctgagggtctgagcgcttgaacgggaccacccgttagcgttgtgaaatcaacgtagcggttcctgcccagccttctctg

SEQ ID NO: 117311 - DNA, 120 bp, synthetic construct
  source 1..120: mol_type = other DNA
actatctgatctttgacaaacctgagaaaaacaagcaatggggaaaggattccctatttaataaatgatgctggcaaaactggctagccatatgtagaaagctgaaactggattccttcc

SEQ ID NO: 117312 - DNA, 120 bp, synthetic construct
  source 1..120: mol_type = other DNA
caacgcaaatgtccaacaatgataaactggattaagaaaatgtggcacatatacaccatggaatactatgcagccataaaaaatgatgagttcatgtcctttgtagggacatggatgaaa

SEQ ID NO: 117313 - DNA, 120 bp, synthetic construct; identical to SEQ ID NO: 9872
  source 1..120: mol_type = other DNA

SEQ ID NO: 117314 - DNA, 120 bp, synthetic construct; identical to SEQ ID NO: 9873
  source 1..120: mol_type = other DNA

SEQ ID NO: 117315 - DNA, 120 bp, synthetic construct; identical to SEQ ID NO: 9874
  source 1..120: mol_type = other DNA

SEQ ID NO: 117316 - DNA, 120 bp, synthetic construct; identical to SEQ ID NO: 9875
  source 1..120: mol_type = other DNA

SEQ ID NO: 117317 - DNA, 120 bp, synthetic construct; identical to SEQ ID NO: 9876
  source 1..120: mol_type = other DNA

SEQ ID NO: 117318 - DNA, 120 bp, synthetic construct; identical to SEQ ID NO: 9877
  source 1..120: mol_type = other DNA

SEQ ID NO: 117319 - DNA, 120 bp, synthetic construct; identical to SEQ ID NO: 9878
  source 1..120: mol_type = other DNA

SEQ ID NO: 117320 - DNA, 120 bp, synthetic construct
  source 1..120: mol_type = other DNA
gtccatggtgcccggctccagatccacgagcacagcgcggggcacgtacctgccacctgcgtggggcgggagggcatgagcgaggggagggccgcgttcccaggagggcggtgggagaag

SEQ ID NO: 117321 - DNA, 120 bp, synthetic construct; identical to SEQ ID NO: 117311
  source 1..120: mol_type = other DNA

SEQ ID NO: 117322 - DNA, 120 bp, synthetic construct; identical to SEQ ID NO: 117312
  source 1..120: mol_type = other DNA

SEQ ID NO: 117323 - DNA, 120 bp, synthetic construct; identical to SEQ ID NO: 9872
  source 1..120: mol_type = other DNA

SEQ ID NO: 117324 - DNA, 120 bp, synthetic construct; identical to SEQ ID NO: 9873
  source 1..120: mol_type = other DNA

SEQ ID NO: 117325 - DNA, 120 bp, synthetic construct; identical to SEQ ID NO: 9874
  source 1..120: mol_type = other DNA

SEQ ID NO: 117326 - DNA, 120 bp, synthetic construct; identical to SEQ ID NO: 9875
  source 1..120: mol_type = other DNA

SEQ ID NO: 117327 - DNA, 120 bp, synthetic construct; identical to SEQ ID NO: 9876
  source 1..120: mol_type = other DNA

SEQ ID NO: 117328 - DNA, 120 bp, synthetic construct; identical to SEQ ID NO: 9877
  source 1..120: mol_type = other DNA

SEQ ID NO: 117329 - DNA, 120 bp, synthetic construct; identical to SEQ ID NO: 9878
  source 1..120: mol_type = other DNA

SEQ ID NO: 117330 - DNA, 120 bp, synthetic construct
  source 1..120: mol_type = other DNA
gcaccgctggcctcgtggtggtgcacgttgatgcgctccagctgcaggtggctgtccccgtggtaggtgccagcggagtcgatggcatgttcatcagagatcacctcccagaactgcaag

SEQ ID NO: 117331 - DNA, 120 bp, synthetic construct; identical to SEQ ID NO: 11476
  source 1..120: mol_type = other DNA

SEQ ID NO: 117332 - DNA, 120 bp, synthetic construct; identical to SEQ ID NO: 11477
  source 1..120: mol_type = other DNA

SEQ ID NO: 117333 - DNA, 120 bp, synthetic construct; identical to SEQ ID NO: 11478
  source 1..120: mol_type = other DNA

SEQ ID NO: 117334 - DNA, 120 bp, synthetic construct; identical to SEQ ID NO: 13964
  source 1..120: mol_type = other DNA

SEQ ID NO: 117335 - DNA, 120 bp, synthetic construct; identical to SEQ ID NO: 13965
  source 1..120: mol_type = other DNA

SEQ ID NO: 117336 - DNA, 120 bp, synthetic construct; identical to SEQ ID NO: 13966
  source 1..120: mol_type = other DNA

SEQ ID NO: 117337 - DNA, 120 bp, synthetic construct; identical to SEQ ID NO: 13967
  source 1..120: mol_type = other DNA

SEQ ID NO: 117338 - DNA, 120 bp, synthetic construct; identical to SEQ ID NO: 13968
  source 1..120: mol_type = other DNA

SEQ ID NO: 117339 - DNA, 120 bp, synthetic construct; identical to SEQ ID NO: 13969
  source 1..120: mol_type = other DNA

SEQ ID NO: 117340 - DNA, 120 bp, synthetic construct; identical to SEQ ID NO: 13970
  source 1..120: mol_type = other DNA

SEQ ID NO: 117341 - DNA, 120 bp, synthetic construct; identical to SEQ ID NO: 13971
  source 1..120: mol_type = other DNA

SEQ ID NO: 117342 - DNA, 120 bp, synthetic construct; identical to SEQ ID NO: 23999
  source 1..120: mol_type = other DNA

SEQ ID NO: 117343 - DNA, 120 bp, synthetic construct; identical to SEQ ID NO: 24000
  source 1..120: mol_type = other DNA

SEQ ID NO: 117344 - DNA, 120 bp, synthetic construct
  source 1..120: mol_type = other DNA
ctcttcttccaatatcctgagtgattgtgcattttcctaccttttggaaggccaagttttcatatacacagtcaccatccattccagggtttggtcccatattgggtgacttgtgtgcat

SEQ ID NO: 117345 - DNA, 120 bp, synthetic construct
  source 1..120: mol_type = other DNA
gatcctccatatgctgaacgctggttccctgggtccccttatttctttctctatactttgtctctgtgtctttttcttttccaagtctctcgttccacctaacgaacccacaggtgtgga

SEQ ID NO: 117346 - DNA, 120 bp, synthetic construct
  source 1..120: mol_type = other DNA
ctcacttcccagatggggcagctgggcagaggcgctcctcacttcctatacggggcggccgggcagaggcgctcctcacctcccagacaaagggcggccgggcagaggtgctcctcactt

SEQ ID NO: 117347 - DNA, 120 bp, synthetic construct
  source 1..120: mol_type = other DNA
ggcagaggtgctcctcaattcccagacggggtggctgggcagaggcactcctcacttcctcccagacggggcggccgggcagaggcgctcctcacctcccagatggggcggccgggcaga

SEQ ID NO: 117348 - DNA, 120 bp, synthetic construct; identical to SEQ ID NO: 28460
  source 1..120: mol_type = other DNA

SEQ ID NO: 117349 - DNA, 120 bp, synthetic construct; identical to SEQ ID NO: 28461
  source 1..120: mol_type = other DNA

SEQ ID NO: 117350 - DNA, 120 bp, synthetic construct; identical to SEQ ID NO: 28462
  source 1..120: mol_type = other DNA

SEQ ID NO: 117351 - DNA, 120 bp, synthetic construct; identical to SEQ ID NO: 28463
  source 1..120: mol_type = other DNA

SEQ ID NO: 117352 - DNA, 120 bp, synthetic construct
  source 1..120: mol_type = other DNA
cattttaattattacctaactagatatctaaatctaacctaaaaatgttttcagttatttacaggatgctttcagcggggtacggtggctcacgcctgtaatcccagcactttgggaggc

SEQ ID NO: 117353 - DNA, 120 bp, synthetic construct; identical to SEQ ID NO: 28464
  source 1..120: mol_type = other DNA

SEQ ID NO: 117354 - DNA, 120 bp, synthetic construct
  source 1..120: mol_type = other DNA
ggctcaagtgatccccctgccttggcctcccagagtgctgggattacagtattacagtcttaaaatgagaaattgttaggcagttaatggtaaccttcatttctctcatattttacttcg

SEQ ID NO: 117355 - DNA, 120 bp, synthetic construct
  source 1..120: mol_type = other DNA
ttgggttggttccaagtctttgctgttgtgaataatgccacagtaaacatacgtgtgcatgtgtccttatagcaatacgatttatagtcctttgggtatatacccagtaatgggatggct

SEQ ID NO: 117356 - DNA, 120 bp, synthetic construct
  source 1..120: mol_type = other DNA
agatatgcggtgttatttctgagggctctgttctgttccattgatctatatctctgttttggtaccagtaccatgctgttttggttactgtagccttgtagtatagtttgaagtcaggta

SEQ ID NO: 117357 - DNA, 120 bp, synthetic construct
  source 1..120: mol_type = other DNA
tgagataatcatgtggtttttgtctttggctctgtttatatgctggattacatttattgatttgcgtatattgaaccagccttgccgtcccagggatgaagcccacttgatcatggtgga

SEQ ID NO: 117358 - DNA, 120 bp, synthetic construct
  source 1..120: mol_type = other DNA
ttatgtacccagtagtcattcaggagcaggttgttcagtttccatgtagttgagcagttttgagtgagattcttaaccctgagttctagtttgattgcactgtggtctgacagacagttt

SEQ ID NO: 117359 - DNA, 120 bp, synthetic construct
  source 1..120: mol_type = other DNA
ttgaaatttcttgtctttaagaatgttgaatattggcccccactctcttctggcttgtagggtttctgctgagagatccgctgttagtctgatgggcttccctttgagggtaacccgacc

SEQ ID NO: 117360 - DNA, 120 bp, synthetic construct
  source 1..120: mol_type = other DNA
aaaagctgtcagacagggacatttaagtctgcagaggttactgctgtccttttgtttgtctgtgccctgcccccagaggtggagcctacagaggcaggcaggcctccttgagctgtggtg

SEQ ID NO: 117361 - DNA, 120 bp, synthetic construct; identical to SEQ ID NO: 31366
  source 1..120: mol_type = other DNA

SEQ ID NO: 117362 - DNA, 120 bp, synthetic construct
  source 1..120: mol_type = other DNA
atgattgccattctaactggtgtgagatggtatctcattgtggttttgatttgcatttctctgatggccagtgatgatgagcattttttcatgtgtttcttggctgcataaatgtcttct

SEQ ID NO: 117363 - DNA, 120 bp, synthetic construct
  source 1..120: mol_type = other DNA
tagcttgatggggatggcattgaatctgtaaattaccttgggcagtacggccatttttatgatactgattcttcctacccatgagcatggaatgttcttccatttgtttgtatcctcttt

SEQ ID NO: 117364 - DNA, 120 bp, synthetic construct
  source 1..120: mol_type = other DNA
ggccctcataaaatgagttagggaggattccctctttttctattgattggaatagtttcagaaggaatggtaccagttcctccttgtacctctggtagaattcagctgtgaatccatctg

SEQ ID NO: 117365 - DNA, 120 bp, synthetic construct
  source 1..120: mol_type = other DNA
gttcaattcctgggtatccttgttgactttctgtctcgttgatttgtctaatgttgacagtggggtgttaaagtctcccattattaatgtgtgggagtctaagtctctttgtaggtcact

SEQ ID NO: 117366 - DNA, 120 bp, synthetic construct
  source 1..120: mol_type = other DNA
ttccctgtatttccttaatctgaacgttggcctgccttgctagattggggaagttctcctggataatatcctgcagagtgttttccaacttggttccattctccccatcactttcaggta

SEQ ID NO: 117367 - DNA, 120 bp, synthetic construct
  source 1..120: mol_type = other DNA
cgtgctgggagaaccactgctctcttcaaagctgtcagacagggacccttaagtctgcagaggttactgctgtctttttgtttgtctgtgccctgcccccagaggtggagcctacagagg

SEQ ID NO: 117368 - DNA, 120 bp, synthetic construct
  source 1..120: mol_type = other DNA
gatttttatgtatagtgtaaggaagggatccagtttcagtcatctgcatatggctagcaagttatcccagcaccccttactgaatagggaatcctttccccattgtttgtttttgtcagg

SEQ ID NO: 117369 - DNA, 120 bp, synthetic construct
  source 1..120: mol_type = other DNA
gtctccagctcctaaccacgagtgatccgccagccttggcctccggaggtgccgggattgcagacggagtctcgttcactcagtgctcaatggtgcccaggctggagtgcagtggcgtga

SEQ ID NO: 117370 - DNA, 120 bp, synthetic construct
  source 1..120: mol_type = other DNA
aagaaaaattcttctgccttgggatcctgttgatctgtgaccttacccccaaccctgtgctctctgaaacctgctgtatccactcagggttgaatggattaagggcggtgcaagatgtgc

SEQ ID NO: 117371 - DNA, 120 bp, synthetic construct; identical to SEQ ID NO: 17715
  source 1..120: mol_type = other DNA

SEQ ID NO: 117372 - DNA, 120 bp, synthetic construct; identical to SEQ ID NO: 17471
  source 1..120: mol_type = other DNA

SEQ ID NO: 117373 - DNA, 120 bp, synthetic construct
  source 1..120: mol_type = other DNA
gtatttgttgaaggcatgagtaaataagcaaaggagacgataatatacagctgactgtgatcagggctgagaaatctaagtgcaaatgggagccagggaaggaagcaaatcattcctact

SEQ ID NO: 117374 - DNA, 120 bp, synthetic construct
  source 1..120: mol_type = other DNA
ttgcagtgaattgaggcgtgaaccactcttagaagcctaaggttatggggccgggcatggtggctcacgcctgtaatcccagcaatgggaggccgaggcggctggatcacaaggtcatga

SEQ ID NO: 117375 - DNA, 120 bp, synthetic construct; identical to SEQ ID NO: 17716
  source 1..120: mol_type = other DNA

SEQ ID NO: 117376 - DNA, 120 bp, synthetic construct
  source 1..120: mol_type = other DNA
ctggcagtcattccccatttaccttcaaacccctcagcttctagcaacagctaatctatcttctgtctctacagatttgcctattctggacatttcatataaatgaaatcatacaatatg

SEQ ID NO: 117377 - DNA, 120 bp, synthetic construct; identical to SEQ ID NO: 17717
  source 1..120: mol_type = other DNA

SEQ ID NO: 117378 - DNA, 120 bp, synthetic construct; identical to SEQ ID NO: 17718
  source 1..120: mol_type = other DNA

SEQ ID NO: 117379 - DNA, 120 bp, synthetic construct
  source 1..120: mol_type = other DNA
gtccaatcttttggtttccctgggccacagtggaagaaagaattatcttgggccacacataaaatacactaacattagctgatgagcttaaaaaaaaaatcgcacacaaaaaaatctcat

SEQ ID NO: 117380 - DNA, 120 bp, synthetic construct
  source 1..120: mol_type = other DNA
atttggttagatcttttgtttggactttgatttctgaccaatcttagtattcttgtctttaaatgggtagtttaatcaaattacatttcctattataatgaatttgctattacttacatc

SEQ ID NO: 117381 - DNA, 120 bp, synthetic construct; identical to SEQ ID NO: 17719
  source 1..120: mol_type = other DNA

SEQ ID NO: 117382 - DNA, 120 bp, synthetic construct
  source 1..120: mol_type = other DNA
tgagctgagatcgccccgttgcatgccagcctgggcaacaagagcgaaactctgtctcaaaaacaaaaaacaaaaccaaacaaaaaacaaaactacaatattttgaggtaactgcagcaa

SEQ ID NO: 117383 - DNA, 120 bp, synthetic construct; identical to SEQ ID NO: 17469
  source 1..120: mol_type = other DNA

SEQ ID NO: 117384 - DNA, 120 bp, synthetic construct; identical to SEQ ID NO: 17720
  source 1..120: mol_type = other DNA

SEQ ID NO: 117385 - DNA, 120 bp, synthetic construct; identical to SEQ ID NO: 17721
  source 1..120: mol_type = other DNA

SEQ ID NO: 117386 - DNA, 120 bp, synthetic construct; identical to SEQ ID NO: 17722
  source 1..120: mol_type = other DNA

SEQ ID NO: 117387 - DNA, 120 bp, synthetic construct; identical to SEQ ID NO: 17723
  source 1..120: mol_type = other DNA

SEQ ID NO: 117388 - DNA, 120 bp, synthetic construct
  source 1..120: mol_type = other DNA
catttttttctcgggtcttttgcttttctataagttcctggggatggtaattagtgaaattttccttagagcttctttgcagagtttggagctatgtagagctgctccaacctggctctt

SEQ ID NO: 117389 - DNA, 120 bp, synthetic construct; identical to SEQ ID NO: 17466
  source 1..120: mol_type = other DNA

SEQ ID NO: 117390 - DNA, 120 bp, synthetic construct
  source 1..120: mol_type = other DNA
aatcttggctcactgcaacctctgccccccgggttcatgtgattctcctgcctcagccttatgagtagctgggattacaggcgcatgccaccacgcccagctaattttttgtgttttcag

SEQ ID NO: 117391 - DNA, 120 bp, synthetic construct; identical to SEQ ID NO: 878
  source 1..120: mol_type = other DNA

SEQ ID NO: 117392 - DNA, 120 bp, synthetic construct
  source 1..120: mol_type = other DNA
tgtaactgtaaattaaaccaatctacaaactattgtaggcatctgtaaattctgttgtaggtattataaactttgttgaagtcttaatcagcagattatgttgtgaatatatttgtacat

SEQ ID NO: 117393 - DNA, 120 bp, synthetic construct
  source 1..120: mol_type = other DNA
cactgcactccagcctgggtgacaagagcaaaaactctgtttcaaaaaaaaaaattcagacaagtagttcagggctactatacccacaagatgggattcagacagtatctacctcatttc

SEQ ID NO: 117394 - DNA, 120 bp, synthetic construct
  source 1..120: mol_type = other DNA
ttcaaacaggtcgccagatacgatggctcacgcctgtaatctcagtactttgggaggctgaggcgggcggatcacctaaggtcaggaattcgagactagcctggccattgtggtgaaatc

SEQ ID NO: 117395 - DNA, 120 bp, synthetic construct; identical to SEQ ID NO: 17465
  source 1..120: mol_type = other DNA

SEQ ID NO: 117396 - DNA, 120 bp, synthetic construct; identical to SEQ ID NO: 878
  source 1..120: mol_type = other DNA

SEQ ID NO: 117397 - DNA, 120 bp, synthetic construct
  source 1..120: mol_type = other DNA
tgtaatcccagcactttgggaggctgaggtgggcagatcacaaggtcatgagatggagaccatcctggctaacatgatgaaatcccatctctactgaaaatacaaaaaattagctgggcg

SEQ ID NO: 117398 - DNA, 120 bp, synthetic construct; identical to SEQ ID NO: 17466
  source 1..120: mol_type = other DNA

SEQ ID NO: 117399 - DNA, 120 bp, synthetic construct; identical to SEQ ID NO: 17467
  source 1..120: mol_type = other DNA

SEQ ID NO: 117400 - DNA, 120 bp, synthetic construct; identical to SEQ ID NO: 17723
  source 1..120: mol_type = other DNA

SEQ ID NO: 117401 - DNA, 120 bp, synthetic construct; identical to SEQ ID NO: 17722
  source 1..120: mol_type = other DNA

SEQ ID NO: 117402 - DNA, 120 bp, synthetic construct; identical to SEQ ID NO: 17721
  source 1..120: mol_type = other DNA

SEQ ID NO: 117403 - DNA, 120 bp, synthetic construct; identical to SEQ ID NO: 17468
  source 1..120: mol_type = other DNA

SEQ ID NO: 117404 - DNA, 120 bp, synthetic construct; identical to SEQ ID NO: 17469
  source 1..120: mol_type = other DNA

SEQ ID NO: 117405 - DNA, 120 bp, synthetic construct; identical to SEQ ID NO: 117382
  source 1..120: mol_type = other DNA

SEQ ID NO: 117406 - DNA, 120 bp, synthetic construct; identical to SEQ ID NO: 17719
  source 1..120: mol_type = other DNA

SEQ ID NO: 117407 - DNA, 120 bp, synthetic construct
  source 1..120: mol_type = other DNA
gtgatcatttacagttaaactttctgaatatgtcaaaaactgaattcagagggaaaataatagactaaagccttttattttagacaagaaagagggaaaataatggactacttgagtcca

SEQ ID NO: 117408 - DNA, 120 bp, synthetic construct
  source 1..120: mol_type = other DNA
actgccaagctccgcctcctgcctcagcctcctgaatagctgggactacaggcgcctgccaccatgcccggctcattttttttttttttttttttttagcagagatggggtttcaccatg

SEQ ID NO: 117409 - DNA, 120 bp, synthetic construct; identical to SEQ ID NO: 852
  source 1..120: mol_type = other DNA

SEQ ID NO: 117410 - DNA, 120 bp, synthetic construct; identical to SEQ ID NO: 853
  source 1..120: mol_type = other DNA

SEQ ID NO: 117411 - DNA, 120 bp, synthetic construct
  source 1..120: mol_type = other DNA
ttggtggcgcaatctcggctcactgcaaacttcacctcctgggttcacgccattgtcctgcctcagcctcccaagtagctgggactacaggcgcctgccaccacgcccggctaatttttt

SEQ ID NO: 117412 - DNA, 120 bp, synthetic construct; identical to SEQ ID NO: 854
  source 1..120: mol_type = other DNA

SEQ ID NO: 117413 - DNA, 120 bp, synthetic construct
  source 1..120: mol_type = other DNA
tgatcctgaatctcctcttcaatcctctaccttcccaaagcattgcttccttttaccttaggcttttttttttttttttgagatggagtcttgctctgtcgctcaggctggagtgcagtg

SEQ ID NO: 117414 - DNA, 120 bp, synthetic construct
  source 1..120: mol_type = other DNA
ggcgacagagcaagactctgtctcaaaaaaaaaaaaaaaaaccttgtcttctaggtcctccagcagcttaatctatatggaggtaggagcgggtagatgtgcaataagaatactctgaga

SEQ ID NO: 117415 - DNA, 120 bp, synthetic construct
  source 1..120: mol_type = other DNA
agactttttcacatcaaatcctatcattcccctactgaaacctctcagcactatgactgaaaaacagactccctatcatgacctatcatgatctggtccctgccaatctctaagacctta

SEQ ID NO: 117416 - DNA, 120 bp, synthetic construct
  source 1..120: mol_type = other DNA
ttccccatcttagtaaatgtaactccaggagtgcagagctatttgtcttttttttttttttttttaaatctgtaccacttacagcagtacctggcacttggtaggcactcagtatttact

SEQ ID NO: 117417 - DNA, 120 bp, synthetic construct
  source 1..120: mol_type = other DNA
tactttcttaataaacttgctttcactttgcactgtggactcaccctgaattccttcttgcctgatccaagactttttttgttttgtttgagacggagtctccctctgtagccaggctgg

SEQ ID NO: 117418 - DNA, 120 bp, synthetic construct; identical to SEQ ID NO: 17472
  source 1..120: mol_type = other DNA

SEQ ID NO: 117419 - DNA, 120 bp, synthetic construct; identical to SEQ ID NO: 17473
  source 1..120: mol_type = other DNA

SEQ ID NO: 117420 - DNA, 120 bp, synthetic construct; identical to SEQ ID NO: 17474
  source 1..120: mol_type = other DNA

SEQ ID NO: 117421 - DNA, 120 bp, synthetic construct; identical to SEQ ID NO: 17475
  source 1..120: mol_type = other DNA

SEQ ID NO: 117422 - DNA, 120 bp, synthetic construct
  source 1..120: mol_type = other DNA
gcctcccaagtagctgagactacaggcgtccgccaccatgcccggctaattttttgtatttttttttagtagagacggggtttcaccgtgttagccaggatggtctcgatctcctgacct

SEQ ID NO: 117423 - DNA, 120 bp, synthetic construct; identical to SEQ ID NO: 12885
  source 1..120: mol_type = other DNA

SEQ ID NO: 117424 - DNA, 120 bp, synthetic construct; identical to SEQ ID NO: 12886
  source 1..120: mol_type = other DNA

SEQ ID NO: 117425 - DNA, 120 bp, synthetic construct; identical to SEQ ID NO: 22172
  source 1..120: mol_type = other DNA

SEQ ID NO: 117426 - DNA, 120 bp, synthetic construct; identical to SEQ ID NO: 22173
  source 1..120: mol_type = other DNA

SEQ ID NO: 117427 - DNA, 120 bp, synthetic construct; identical to SEQ ID NO: 22174
  source 1..120: mol_type = other DNA

SEQ ID NO: 117428 - DNA, 120 bp, synthetic construct; identical to SEQ ID NO: 22175
  source 1..120: mol_type = other DNA

SEQ ID NO: 117429 - DNA, 120 bp, synthetic construct; identical to SEQ ID NO: 22176
  source 1..120: mol_type = other DNA

SEQ ID NO: 117430 - DNA, 120 bp, synthetic construct; identical to SEQ ID NO: 22177
  source 1..120: mol_type = other DNA

SEQ ID NO: 117431 - DNA, 120 bp, synthetic construct; identical to SEQ ID NO: 22178
  source 1..120: mol_type = other DNA

SEQ ID NO: 117432 - DNA, 120 bp, synthetic construct; identical to SEQ ID NO: 22179
  source 1..120: mol_type = other DNA

SEQ ID NO: 117433 - DNA, 120 bp, synthetic construct; identical to SEQ ID NO: 22180
  source 1..120: mol_type = other DNA

SEQ ID NO: 117434 - DNA, 120 bp, synthetic construct; identical to SEQ ID NO: 22181
  source 1..120: mol_type = other DNA

SEQ ID NO: 117435 - DNA, 120 bp, synthetic construct; identical to SEQ ID NO: 18788
  source 1..120: mol_type = other DNA

SEQ ID NO: 117436 - DNA, 120 bp, synthetic construct
  source 1..120: mol_type = other DNA
tgtttttaatgagtctaacctaagttcctgaggatcaagtttatacttgactgcctttgatgcaaaggttataatgagcaactcaaatacaggactccagactgggcgtggtggctcaca

SEQ ID NO: 117437 - DNA, 120 bp, synthetic construct; identical to SEQ ID NO: 28360
  source 1..120: mol_type = other DNA

SEQ ID NO: 117438 - DNA, 120 bp, synthetic construct
  source 1..120: mol_type = other DNA
acttgaggtcacaagttcgagaccagtctggccaacacagtgaaaccccgtctctactaaaaatataaaaattggccatgcatggtggcacgtggctgtaatcctagctacatgggagac

SEQ ID NO: 117439 - DNA, 120 bp, synthetic construct; identical to SEQ ID NO: 28361
  source 1..120: mol_type = other DNA

SEQ ID NO: 117440 - DNA, 120 bp, synthetic construct
  source 1..120: mol_type = other DNA
tatgtagcggtgaaatctgaagtctgggattttagtataaccatcactactaggaatagtataaattgggcccaataggtaatttctcatacctcactgtccgttgtccctccaccccag

SEQ ID NO: 117441 - DNA, 120 bp, synthetic construct; identical to SEQ ID NO: 33507
  source 1..120: mol_type = other DNA

SEQ ID NO: 117442 - DNA, 120 bp, synthetic construct; identical to SEQ ID NO: 33508
  source 1..120: mol_type = other DNA

SEQ ID NO: 117443 - DNA, 120 bp, synthetic construct; identical to SEQ ID NO: 27029
  source 1..120: mol_type = other DNA

SEQ ID NO: 117444 - DNA, 120 bp, synthetic construct
  source 1..120: mol_type = other DNA
tagtacagaacaaaatgaaaagtctcccatgtctacctctttctacacagacacggcaaccatccgatttctcaatcttttccccacctttcccccctttctattccacaaaactgccat

SEQ ID NO: 117445 - DNA, 120 bp, synthetic construct
  source 1..120: mol_type = other DNA
ggagctggagaccagcccggccaacacagcgaaaccccgtctccacccaaaaaatacgaaaaccagtcaggcgtggcggcgcgcgcctgcaatcgcaggcactcggcaggctgaggcagg

SEQ ID NO: 117446 - DNA, 120 bp, synthetic construct
  source 1..120: mol_type = other DNA
catcagagaatactataaacacctctacacaaataaactagaaaatctagaagaaatagataaattcctcgacacgtagactctcctaagactaaaccaggaagaagttgaatctctgaa

SEQ ID NO: 117447 - DNA, 120 bp, synthetic construct
  source 1..120: mol_type = other DNA
tcaacaacttaggtattgatgggatgtatctcaaaataataagagctatctatgacaaacccacagccaatatcatactgaatgggcaaaaactggaagcattccctttgaaaactggca

SEQ ID NO: 117448 - DNA, 120 bp, synthetic construct
  source 1..120: mol_type = other DNA
catcattctcagcaaagtattgcaaggacaaaaaaaccaaacaccgcatgttcttacttattgacaaaagaacacattgacacaagaaggggaacatcacacaccggggcctgttgtggg

SEQ ID NO: 117449 - DNA, 120 bp, synthetic construct
  source 1..120: mol_type = other DNA
agcaaactatcgcaaggacaaaaaaccaaacaccgcatgttctcacacataggtgggaattgaacaatgagaacatatggacacaggaaggggaacacactggggcctgttgtggggtgg

SEQ ID NO: 117450 - DNA, 120 bp, synthetic construct; identical to SEQ ID NO: 19055
  source 1..120: mol_type = other DNA

SEQ ID NO: 117451 - DNA, 120 bp, synthetic construct
  source 1..120: mol_type = other DNA
actattatttattggatacaaggcagaaggggcagggtaaagaatgtgagtcacctccaatgataggtaaggtcacgtgggtcatgtgtccactggacagggggcccttccctgcctggc

SEQ ID NO: 117452 - DNA, 120 bp, synthetic construct
  source 1..120: mol_type = other DNA
tgtcccaaagtgctgagattacaggcctgagccactgcgcctggcctgtagctgttttttagagtagaggtatatatgctatatttgcattagagctatgattcataaacaacagttgta

SEQ ID NO: 117453 - DNA, 120 bp, synthetic construct; identical to SEQ ID NO: 13185
  source 1..120: mol_type = other DNA

SEQ ID NO: 117454 - DNA, 120 bp, synthetic construct; identical to SEQ ID NO: 23524
  source 1..120: mol_type = other DNA

SEQ ID NO: 117455 - DNA, 120 bp, synthetic construct; identical to SEQ ID NO: 23525
  source 1..120: mol_type = other DNA

SEQ ID NO: 117456 - DNA, 120 bp, synthetic construct; identical to SEQ ID NO: 23526
  source 1..120: mol_type = other DNA

SEQ ID NO: 117457 - DNA, 120 bp, synthetic construct; identical to SEQ ID NO: 23527
  source 1..120: mol_type = other DNA

SEQ ID NO: 117458 - DNA, 120 bp, synthetic construct; identical to SEQ ID NO: 23528
  source 1..120: mol_type = other DNA

SEQ ID NO: 117459 - DNA, 120 bp, synthetic construct; identical to SEQ ID NO: 24657
  source 1..120: mol_type = other DNA

SEQ ID NO: 117460 - DNA, 120 bp, synthetic construct
  source 1..120: mol_type = other DNA
tgggtatatacccagtaatgggatggctgggtcaaatggtatttctagttcaagaaccgtgaggaattgccacactgacttccacaatggttgaactagttacagtcccaccaacagtgt

SEQ ID NO: 117461 - DNA, 120 bp, synthetic construct
  source 1..120: mol_type = other DNA
cattgcacttcagcctgggacagagcgagactccatctcaaaaaaaagaaaaaaagaaagactgtagtagatatatttggaagtgcaatttcctgtgcaggaggagggaaagcctttctt

SEQ ID NO: 117462 - DNA, 120 bp, synthetic construct
  source 1..120: mol_type = other DNA
attgcaggcttgaactcctgggctcaagcgatcctcttgcctcaggctctcaagttgctgggactacaggcatgtaccaccatgcctggctaatttctaaaaattattttgttgagacaa

SEQ ID NO: 117463 - DNA, 120 bp, synthetic construct
  source 1..120: mol_type = other DNA
gtggatgaatgggtggatgggtggatgggtgaaagggtgggtggatgggtgaatgggtgggtgaatgggtgggtggatgggtggatgggaggatggatggatgcatgggtggatggatgg

SEQ ID NO: 117464 - DNA, 120 bp, synthetic construct
  source 1..120: mol_type = other DNA
ttagtcctaacctcaatcctgcgagggaggggacgcatcgtcctcctcgccttacagacgccgaaacggagggtcccattagggacgtgactggcgcgggcaacacacacagcagcgaca

SEQ ID NO: 117465 - DNA, 120 bp, synthetic construct
  source 1..120: mol_type = other DNA
ttctgcagctccaagcccaggggcctttgatgagccatagacctcatttttaacccacctttctgcttagacattgagcaagttacttctcatatagcttccctatatgttaaaaatgga

SEQ ID NO: 117466 - DNA, 120 bp, synthetic construct
  source 1..120: mol_type = other DNA
catgtcaaaaacaaaaaaagacaccaccaaaggtcaaagcatatcattcctcaccctcaagcccttagtggctccatttcactcagtaagagccacggtccttatggtgtccgtttttca

SEQ ID NO: 117467 - DNA, 120 bp, synthetic construct
  source 1..120: mol_type = other DNA
aagggcttcaatttggatccagccccaggtctgccttagctctgtattcttggggtattttgttctgtattggcctatcttgactaacaatgaaccttggatttgaaacatatcatcaga

SEQ ID NO: 117468 - DNA, 120 bp, synthetic construct
  source 1..120: mol_type = other DNA
ggggaatcgcttgaacctgggaggtggagggtgccgtgagccacgatcgcgccattgcactccagcctgggcaacaagagcgaaactctcaaaaaacaaaaaaaaggatgggttccatat

SEQ ID NO: 117469 - DNA, 120 bp, synthetic construct
  source 1..120: mol_type = other DNA
attttcttaatccagtctatcattgttggacatttgggttggttccaagtctttgctattgtgaatagtgccacaataaacatacgtgtgcatgtgtctttatagcagcatgatttaata

SEQ ID NO: 117470 - DNA, 120 bp, synthetic construct
  source 1..120: mol_type = other DNA
ggtttgtcaaagatcagatagttgtagatatgcggtgttatttctgagggctctgttctgttccattgatctatatgtctgttttggtaccagtaccatactgttttggttactgtagcc

SEQ ID NO: 117471 - DNA, 120 bp, synthetic construct
  source 1..120: mol_type = other DNA
taatcatgtggtttttgtctttggatctgtttatatgctggattacatttattgatttgtgtatattgaaccagccttgcatcccagggatgaagcccacatgatcatggtggataagct

SEQ ID NO: 117472 - DNA, 120 bp, synthetic construct
  source 1..120: mol_type = other DNA
ttcgttatgtacccagtagtcattccggagcaggttgttcagtttccatgtagttgagcagttttgagtgagtttcttagttctgagttctagtttgattgcactgtggtctgagagata

SEQ ID NO: 117473 - DNA, 120 bp, synthetic construct
  source 1..120: mol_type = other DNA
tctaaggggacagtcacatttcacctccagccacctggaggaatttgggcctggtgatgtcagaattcttcaataaaagcctaaaatctatattttatgtgcggtcatgagatctgttaa

SEQ ID NO: 117474 - DNA, 120 bp, synthetic construct
  source 1..120: mol_type = other DNA
gtgatggtgatggtgatggtgatggtgatggagatgggtgatggtgatggttgcctaacatcaggaacgtgcttaatgcttctgaattgcacacaaaaatggcaagtttaatattatgtg

SEQ ID NO: 117475 - DNA, 120 bp, synthetic construct
  source 1..120: mol_type = other DNA
ggaaagggattaaaatccagagaccagaaatgggagcaaagtacaaggtggtgtaatcattacagaggtttcctgatgtttccaagtcagtcgtgtgttgagctgctaaactctaaagta

SEQ ID NO: 117476 - DNA, 120 bp, synthetic construct
  source 1..120: mol_type = other DNA
atgttggtcaggctggtcttgaactcctgacctcagatgatctgcctgcctcagcctcccaaccagatgatcttaatttgtgtatttatactcattcttacaccaaaaagggttttaaat

SEQ ID NO: 117477 - DNA, 120 bp, synthetic construct
  source 1..120: mol_type = other DNA
ctggtctccaccatatgagttggcttctgtttctctcctgttttactttgcctttagctgtggtctttcaaaccaccatccctccttatcttcctctgctggttcctcagatcttcctct

SEQ ID NO: 117478 - DNA, 120 bp, synthetic construct
  source 1..120: mol_type = other DNA
gtaagaattagatgttatacttttgggtttggtaccttctcttgataaaaggttgactgtggaacaggcatctgctcaatgctgtgtccaagataaagatgactgctccaaatgtggggc

SEQ ID NO: 117479 - DNA, 120 bp, synthetic construct
  source 1..120: mol_type = other DNA
cgtagagctactatgagttacagattgactgtgttcctgtctttaataaatttgccaagagtggttataagaacttacacctgatgaggcaccaggctcctgatgctgtgtaatgtcaca

SEQ ID NO: 117480 - DNA, 120 bp, synthetic construct
  source 1..120: mol_type = other DNA
ccctcaaatctgagggagctgagtaacaccatcgatcatgatgtagagtgtggttatgaactttaaagttatagttgttttatatgttgctataataaagaagtgttctgcattcgtcca

SEQ ID NO: 117481 - DNA, 120 bp, synthetic construct
  source 1..120: mol_type = other DNA
atatgtaacaaacctgcacattgctcacatgtaccctagaacttaaagtataataataataaaaaagaaatttagaggctgtttcaatttctgtcatatttccttgaggacagtgcaaga

SEQ ID NO: 117482 - DNA, 120 bp, synthetic construct
  source 1..120: mol_type = other DNA
ctctttcttttcttttccacgtgcctatcaccttcttttttttttttttttttttttttttgagacggaatctcaccctgctgccaaggctggagtgcagtggtgagatctcggctcact

SEQ ID NO: 117483 - DNA, 120 bp, synthetic construct; identical to SEQ ID NO: 29207
  source 1..120: mol_type = other DNA

SEQ ID NO: 117484 - DNA, 120 bp, synthetic construct
  source 1..120: mol_type = other DNA
caggccaacatagtgaaaccccatctctactaaaaatacaaaaaaaaaaaaattagacagacgtggtggtgtgcgcctgtaatcccagatactgaggaggctgaggcaggagaattgctt

SEQ ID NO: 117485 - DNA, 120 bp, synthetic construct
  source 1..120: mol_type = other DNA
ttgcagtgagctattttgccactgcaatccagcctgggtgatggagcgcaactccatctcaaaaacaaacaaacaaacaaacaaaacaaagatgtccaataggagtaggagaagacacat

SEQ ID NO: 117486 - DNA, 120 bp, synthetic construct
  source 1..120: mol_type = other DNA
acctaggtggcagtatttttggtttttttggagacggagtctcactctgttgcccaggctggagtgcggtggcactgtctcctctcactgcaatctgtgcctcctgggttcaagcgattc

SEQ ID NO: 117487 - DNA, 120 bp, synthetic construct; identical to SEQ ID NO: 1524
  source 1..120: mol_type = other DNA

SEQ ID NO: 117488 - DNA, 120 bp, synthetic construct
  source 1..120: mol_type = other DNA
ccaggttcaagtgattctcctgtctcagcctcctgagtagctgggtctacaggcgcctggcaccatgcccagctaatttttttattttattttttaatagagatgggctttcaccatgtt

SEQ ID NO: 117489 - DNA, 120 bp, synthetic construct
  source 1..120: mol_type = other DNA
cttggcctcccaaagtgctgggattacaggtgtgagccactgtgcctggctggagagaatattcatgtatgtttcatatgcaatccgcattttgatacacaaagaattcttttccctctt

SEQ ID NO: 117490 - DNA, 120 bp, synthetic construct; identical to SEQ ID NO: 29212
  source 1..120: mol_type = other DNA

SEQ ID NO: 117491 - DNA, 120 bp, synthetic construct; identical to SEQ ID NO: 29213
  source 1..120: mol_type = other DNA

SEQ ID NO: 117492 - DNA, 120 bp, synthetic construct
  source 1..120: mol_type = other DNA
gaggcagaggttgcagtgagctgagattgcaccactgtactctagcctgggtggcagagggagaatccatctcaaaaaaaaaaaaagaaaagaaaagaaaagaaaaaaagtatagtctag

SEQ ID NO: 117493 - DNA, 120 bp, synthetic construct
  source 1..120: mol_type = other DNA
ggccaggctggtctcaaactcctagcctcaagtgattcacccgcctcggccactgaaagtgttaggattacaggcttgagccacgcgcctggccctaaatttctgtttctaatcttaact

SEQ ID NO: 117494 - DNA, 120 bp, synthetic construct
  source 1..120: mol_type = other DNA
agaggttgcagtgagccaagatggcgccactgcactccagtctgggggacagagtgaaaccttgtctcaaaaaaaacaaaaaacaaaaaacaaaaaaaacaatctaagtgtgcgaattct

SEQ ID NO: 117495 - DNA, 120 bp, synthetic construct
  source 1..120: mol_type = other DNA
agtgattctcctgcctcagcctcccgagtagctgggactacaggtgtgcgccaccacatctggctgatttttgcatttttagtagagatggggtttcaccatgttggtcaggctggtctc

SEQ ID NO: 117496 - DNA, 120 bp, synthetic construct
  source 1..120: mol_type = other DNA
ggcagaggttgtagtgagccgagattgcgccactgcactccagcgtgggtgacagtgagacccctatctgaaaaaaaaaaaaaaaaaaaaaaaaaaaaagggtctgcaaatagtatacat

SEQ ID NO: 117497 - DNA, 120 bp, synthetic construct
  source 1..120: mol_type = other DNA
tcaagtgattctcatgcctcagcctccccagtagctaggattacaggtgtgtaccaccatgcccggctaatttttgtatttttagtagagatggggtttcaccatgttggccaggctggt

SEQ ID NO: 117498 - DNA, 120 bp, synthetic construct; identical to SEQ ID NO: 5975
  source 1..120: mol_type = other DNA

SEQ ID NO: 117499 - DNA, 120 bp, synthetic construct
  source 1..120: mol_type = other DNA
aggagcaagtcacatcttacatggatggtggcaggcaaaaaaaatgagagaacttgtgcaggggaaccccactttttgaagccatcagctctcgtgagacttattcactatcatgagaac

SEQ ID NO: 117500 - DNA, 120 bp, synthetic construct; identical to SEQ ID NO: 29216
  source 1..120: mol_type = other DNA

SEQ ID NO: 117501 - DNA, 120 bp, synthetic construct
  source 1..120: mol_type = other DNA
tgatctcagctcactgcagcctccacctcccgactcaagcaatcctcctgcctcagccttccgagtagctggaactacaggcgtgtgtcaccacacctggctaatttttgtattttttat

SEQ ID NO: 117502 - DNA, 120 bp, synthetic construct
  source 1..120: mol_type = other DNA
agcaccaacctgttcctgaaaatgctaaatgaagcatatttcacactattttaattgggaaaaattaaaatgtgttacacatcaactcaaaatctccagtttttaaaaatgaaaccagtc

SEQ ID NO: 117503 - DNA, 120 bp, synthetic construct
  source 1..120: mol_type = other DNA
ctccaaagctagaaaaatatcacatcagaaagattctaaaactggtagagaaaaagctaacaaactctaagagctgctcaaattttatttacatgatttttaacatttctaacaggcaaa

SEQ ID NO: 117504 - DNA, 120 bp, synthetic construct; identical to SEQ ID NO: 29217
  source 1..120: mol_type = other DNA

SEQ ID NO: 117505 - DNA, 120 bp, synthetic construct; identical to SEQ ID NO: 29218
  source 1..120: mol_type = other DNA

SEQ ID NO: 117506 - DNA, 120 bp, synthetic construct
  source 1..120: mol_type = other DNA
tcgtgatcagcccgcctcagcctcccaaagtgctgggattacagacatgagccaccacgcctggccccaaaaatttttaagttgagccagaggcggtggctagtgcctgtagtcttaccg

SEQ ID NO: 117507 - DNA, 120 bp, synthetic construct
  source 1..120: mol_type = other DNA
cacctgccttggcctcccaaagtgctgggattacaggcgtgagccactgctcccagcctagaacttcatcttttttgctgaatactattctcttggatggatatgtactatattttcttt

SEQ ID NO: 117508 - DNA, 120 bp, synthetic construct
  source 1..120: mol_type = other DNA
attgaggtagcattcacgtaacataaaatgaactgttttaacatgaacaacgaagtggcatttcatacatttacagtcttgtgtaattatcacctttatctagttcctaaacatttttat

SEQ ID NO: 117509 - DNA, 120 bp, synthetic construct
  source 1..120: mol_type = other DNA
ttttgttgtacattttacttttgcatattttttgaaccccacatgaccttaccattcttttttttgagatggagtctcactctgttgcccaggctggagtgcagcagcccagtctcagct

SEQ ID NO: 117510 - DNA, 120 bp, synthetic construct
  source 1..120: mol_type = other DNA
tcttgccaaaaactgaatatatcgtcaatcgagcctttagttgtaactaccattttacaggaattacaaagaaacacagactatattaaaagataccaaaaggactcaatcagccaaatt

SEQ ID NO: 117511 - DNA, 120 bp, synthetic construct
  source 1..120: mol_type = other DNA
tctagattggcagctcttggcaaatttcagccctttgaggctccatggtttgtgctctcatttctgttgtgcaatcaagtactggcctattgttgctcttttgaaagtaatctctcttta

SEQ ID NO: 117512 - DNA, 120 bp, synthetic construct
  source 1..120: mol_type = other DNA
ctcccaacctcaggtgatccacctgcctcagcctcccaaagtgctgggattacaggcataagccactgcgtccagccagttcagaatatttataccaaattctaagaagaataagacaaa

SEQ ID NO: 117513 - DNA, 120 bp, synthetic construct
  source 1..120: mol_type = other DNA
gagactgtcccgtgcattgtaggatattcagcagcagccctggcctttacccactagatgtcagtagcagcccccatttgtgaaaaccaaaaaattttctcaagatgttgctaattgtcc

SEQ ID NO: 117514 - DNA, 120 bp, synthetic construct
  source 1..120: mol_type = other DNA
atcctagcactttgggaggccaaggcaagaggattgcttgagcccaagagttcgagaccagcctgggcaacaaagtgagagcctgtctctacagaaaaaaaaaaagaaaaaaaaaaaaag

SEQ ID NO: 117515 - DNA, 120 bp, synthetic construct
  source 1..120: mol_type = other DNA
atttgcatgtaaatatgtgcataaatacagttgccaggagcccatacaatgcccattctgggtgcgctgcctatgagttagccctgctctgcaaggagctgtacccttcaataaaagatt

SEQ ID NO: 117516 - DNA, 120 bp, synthetic construct
  source 1..120: mol_type = other DNA
ggtcttccaatgtgctgagattacaggcgtgagccagtgcacccagctgaaacactaggcatttcataattataagtagaatatgctttctcttgaattttgaaattgctgattgctggc

SEQ ID NO: 117517 - DNA, 120 bp, synthetic construct; identical to SEQ ID NO: 29224
  source 1..120: mol_type = other DNA

SEQ ID NO: 117518 - DNA, 120 bp, synthetic construct
  source 1..120: mol_type = other DNA
gaaataaagtaaataaaataagagtagaaatcttttaggaatatatgctgaaataattctgggtaaatgatataattttggtggtttgctttaaaataatctgggctaagagcagagaaa

SEQ ID NO: 117519 - DNA, 120 bp, synthetic construct
  source 1..120: mol_type = other DNA
tcttggctcactgaaacctccgcctcccgggttcaagcgattctcctccctcagcctcccaagtagctggtgctacagctgcccactaccgcacctggctaatttttctgtttttagtag

SEQ ID NO: 117520 - DNA, 120 bp, synthetic construct
  source 1..120: mol_type = other DNA
gacaagagaagtgatgagaaaatgtaccctgtctgggaaagccaactctgctcatttccgtttatggctttgaaactgaaccctgtctgtgtcatatcagaggttttacagctgtctttt

SEQ ID NO: 117521 - DNA, 120 bp, synthetic construct
  source 1..120: mol_type = other DNA
acttgaatccaggaggcagaggctgcagtgagctgagatcatgccactgtactccagcctggtcaaaagagcgagactctgtctcaaaaaaaaattaataaataacaacaacaataataa

SEQ ID NO: 117522 - DNA, 120 bp, synthetic construct; identical to SEQ ID NO: 29227
  source 1..120: mol_type = other DNA

SEQ ID NO: 117523 - DNA, 120 bp, synthetic construct; identical to SEQ ID NO: 29228
  source 1..120: mol_type = other DNA

SEQ ID NO: 117524 - DNA, 120 bp, synthetic construct; identical to SEQ ID NO: 29229
  source 1..120: mol_type = other DNA

SEQ ID NO: 117525 - DNA, 120 bp, synthetic construct
  source 1..120: mol_type = other DNA
tggtgagccccgattgcgccactgcactccagcctaggcgacagagcaagactctgactcaaaaatgataataataataattttaaagggatccttatctgtcactttaaggaaaaagtt

SEQ ID NO: 117526 - DNA, 120 bp, synthetic construct
  source 1..120: mol_type = other DNA
ttctggtttgcaattttagaaggtgcatgctaacaaaacaaaagcaaaatgcccttgtaataacctctagtcctttcctggaatgacagggaaaagctaaaatagtaaatagtccccata

SEQ ID NO: 117527 - DNA, 120 bp, synthetic construct
  source 1..120: mol_type = other DNA
aagatgccttgtagtataaaaaagatcaatggactagagggagagaaggctgtgattccagtttgacacagccatttaagccagtttcttcaccgttcagacctcagattccatacggaa

SEQ ID NO: 117528 - DNA, 120 bp, synthetic construct; identical to SEQ ID NO: 29201
  source 1..120: mol_type = other DNA

SEQ ID NO: 117529 - DNA, 120 bp, synthetic construct
  source 1..120: mol_type = other DNA
ggcctcccaaagtgctgggattacagacgtgagccattgtgtccggccaagtaatcttaaaaatacaaatcagaccatgttaacctcctgtttaaaagtgatttttcattgctgctgctt

SEQ ID NO: 117530 - DNA, 120 bp, synthetic construct
  source 1..120: mol_type = other DNA
gggaggtggaggttgcagtgagtcgagcctgggcgactgcactccagcctgggcgacagggtgagactccatctcaaaaaaaaaaaaagaagatataaagtaaatattttaatttttata

SEQ ID NO: 117531 - DNA, 120 bp, synthetic construct; identical to SEQ ID NO: 29231
  source 1..120: mol_type = other DNA

SEQ ID NO: 117532 - DNA, 120 bp, synthetic construct; identical to SEQ ID NO: 29232
  source 1..120: mol_type = other DNA

SEQ ID NO: 117533 - DNA, 120 bp, synthetic construct; identical to SEQ ID NO: 29233
  source 1..120: mol_type = other DNA

SEQ ID NO: 117534 - DNA, 120 bp, synthetic construct; identical to SEQ ID NO: 29234
  source 1..120: mol_type = other DNA

SEQ ID NO: 117535 - DNA, 120 bp, synthetic construct
  source 1..120: mol_type = other DNA
aactttgattgtattgaaggacacaaagtattaatcctgggtgtttctgtatgggtgttgccaaaagagattaacatttgagtcagtgggctggggaaggcagacccacccttaatatgg

SEQ ID NO: 117536 - DNA, 120 bp, synthetic construct
  source 1..120: mol_type = other DNA
aataagcacagaaaaaaagtgctcagcatcacttattaggcaaatataagtcaaaactacaataagaactcagagtattgataaaattatctgcacaccaagccacataaccagtctcaa

SEQ ID NO: 117537 - DNA, 120 bp, synthetic construct; identical to SEQ ID NO: 29235
  source 1..120: mol_type = other DNA

SEQ ID NO: 117538 - DNA, 120 bp, synthetic construct
  source 1..120: mol_type = other DNA
gatccgcctgccttggcctcccaaagtgctgggattacaggcctaagccaccacgcctggcctcatttattgatttttaacttcatcccattgttcttggagaatatgctttgtatgata

SEQ ID NO: 117539 - DNA, 120 bp, synthetic construct; identical to SEQ ID NO: 29236
  source 1..120: mol_type = other DNA

SEQ ID NO: 117540 - DNA, 120 bp, synthetic construct
  source 1..120: mol_type = other DNA
tgccataataaaactatttcctttcctgtttctggaccaccagggaccattgcaagctgcagaaaatgagaagaccctactgaccagcccaagaagacagatgacaagatactgaggttg

SEQ ID NO: 117541 - DNA, 120 bp, synthetic construct; identical to SEQ ID NO: 29268
  source 1..120: mol_type = other DNA

SEQ ID NO: 117542 - DNA, 120 bp, synthetic construct
  source 1..120: mol_type = other DNA
gcttgcagtgagccgagatcaggccactacactccagcctgggctacagagtgagactctgtctcaaaaaaaaaaaaaaaaaaagacagtggcatgacaagtacttgtctgtttatgagt

SEQ ID NO: 117543 - DNA, 120 bp, synthetic construct
  source 1..120: mol_type = other DNA
gctttgatcccaaggacacaagacatcagagaaagaacaaatcaaaggctatttctggatgttgagattatctgatttcaaggtactgaaggacaaaaacttggatggcctcaaaaggtt

SEQ ID NO: 117544 - DNA, 120 bp, synthetic construct
  source 1..120: mol_type = other DNA
cacttgaggtcaggagttcgagaccagcctgaccaacatggtgaaaccccgtcttttctgaaaatgcaaaattagctgggtgtggtggcgcatgcctgtaattccagctgaccaaaaacc

SEQ ID NO: 117545 - DNA, 120 bp, synthetic construct
  source 1..120: mol_type = other DNA
cacccacctcggcctcccaaagtgctgggattacaggcgtgagctaccgcgcccggctggctgatatggacttaagatttaaaaaaatgatgtggacttaagatttaaaaaaatgtgcat

SEQ ID NO: 117546 - DNA, 120 bp, synthetic construct; identical to SEQ ID NO: 29202
  source 1..120: mol_type = other DNA

SEQ ID NO: 117547 - DNA, 120 bp, synthetic construct
  source 1..120: mol_type = other DNA
caattattacactaggaattgcaaacagctgattttctaattctctcatgccttacatagttagtatctagaagccttctcctacacaacacgcctcctgtttgagccgcacacagactg

SEQ ID NO: 117548 - DNA, 120 bp, synthetic construct
  source 1..120: mol_type = other DNA
agaagtaggaggcctggcgtgctgaattgcacatgtaatcccagcactttgggaggccgagacggatggatcacttaagcccaggagtttgagaccagcctgggcaacatggcaaaaccc

SEQ ID NO: 117549 - DNA, 120 bp, synthetic construct
  source 1..120: mol_type = other DNA
aaagtgctgggattacaggcgtgagccactgtgcccggccggttctattgttcttaagtccaaggctcccattgtcctcagatcagaatggttttgatatttcctttttttttttttttt

SEQ ID NO: 117550 - DNA, 120 bp, synthetic construct
  source 1..120: mol_type = other DNA
ctgtcaccagctgctggtctgccccactgggtctggcagccctcccaggatgggcccacaccctcctcctccagtccctgcccagcagctgcacttgatccctctgtagtctctttgctt

SEQ ID NO: 117551 - DNA, 120 bp, synthetic construct
  source 1..120: mol_type = other DNA
cggcctcccatagtgctcggattataggcgtgagccaacgtgcccagccacatatgggggacattgaatgttctcaaaagtacacagagtgatatagtgaattcttattacctattgcct

SEQ ID NO: 117552 - DNA, 120 bp, synthetic construct
  source 1..120: mol_type = other DNA
ccagcctggccaacatggcgaaaccctgtctatactaaaaatacaaaaaaattagcatgcctgtagtcccagctacttgggaggctgaggcatgagaattgcttgaacccgggaggtggt

SEQ ID NO: 117553 - DNA, 120 bp, synthetic construct; identical to SEQ ID NO: 29204
  source 1..120: mol_type = other DNA

SEQ ID NO: 117554 - DNA, 120 bp, synthetic construct
  source 1..120: mol_type = other DNA
gcaattctcattcctcagcctcctgagtagctaggattacaggtgtgtgctactatacctggctaattttttttttcttttttttgagacagagtctcgctctgtcacccaggctggagt

SEQ ID NO: 117555 - DNA, 120 bp, synthetic construct
  source 1..120: mol_type = other DNA
ggagtgagccaccgcgcctgacccctctctacccacttttaaaaaattcttattatagatttttttttaacataagcagagagagaacaatatattaaacctcggtgaacatttatcgtc

SEQ ID NO: 117556 - DNA, 120 bp, synthetic construct; identical to SEQ ID NO: 29205
  source 1..120: mol_type = other DNA

SEQ ID NO: 117557 - DNA, 120 bp, synthetic construct
  source 1..120: mol_type = other DNA
cttctctgatgggtattatttggttcaccaaactatgaacatcactaggaaatagataaagccttctgtctatagctgagatgttttgttttgttttgtttttctgagacagtcttgctc

SEQ ID NO: 117558 - DNA, 120 bp, synthetic construct
  source 1..120: mol_type = other DNA
tggttatagagggcagtagagtaggcacaacagtcacaaagtgagtggttagtccaagcaagagatggtttggggaaggtcagtgggactagggccggagagccgtgggtacatttagga

SEQ ID NO: 117559 - DNA, 120 bp, synthetic construct
  source 1..120: mol_type = other DNA
gtatcctgtggattggtgcctacagttagatcaagagaagattgattaaattcaggggtgcatgtgtgtgtgggtttgtttgtatttcaggaatatttcactggtggtcttgtatactcc

SEQ ID NO: 117560 - DNA, 120 bp, synthetic construct
  source 1..120: mol_type = other DNA
ctaggccttggggataatagcagtcaagaagaccaagctcttgctcttataaagctagtattttagtgggaggatggacagtccacacaaagtgagtcattaaaaaccatgtagtgacat

SEQ ID NO: 117561 - DNA, 120 bp, synthetic construct
  source 1..120: mol_type = other DNA
atgacgtgtgcctatagtcccagctacttgggaagctgaggcaggaggatcacttgagtccaggagattgaggctgtggtgagttaggattgcaccactgcactccagcctggagggcga

SEQ ID NO: 117562 - DNA, 120 bp, synthetic construct
  source 1..120: mol_type = other DNA
aacttgggaggtggaggctgcagtgagccatgatcgtaccaacgcactccagcctgggtgacagagcaagaccctgtctccaaaaaatatatatatatatatacgtgtatatatatatat

SEQ ID NO: 117563 - DNA, 120 bp, synthetic construct; identical to SEQ ID NO: 117515
  source 1..120: mol_type = other DNA

SEQ ID NO: 117564 - DNA, 120 bp, synthetic construct; identical to SEQ ID NO: 117514
  source 1..120: mol_type = other DNA

SEQ ID NO: 117565 - DNA, 120 bp, synthetic construct
  source 1..120: mol_type = other DNA
tcagtagcagcccccatttgtgaaaaccaaaaaattttctcaagatgttgctaattgtcccctgcggtgcagaatcgctcctggttgagaaccgtctctattggatatcaagtcttagtg

SEQ ID NO: 117566 - DNA, 120 bp, synthetic construct; identical to SEQ ID NO: 29275
  source 1..120: mol_type = other DNA

SEQ ID NO: 117567 - DNA, 120 bp, synthetic construct; identical to SEQ ID NO: 29276
  source 1..120: mol_type = other DNA

SEQ ID NO: 117568 - DNA, 120 bp, synthetic construct
  source 1..120: mol_type = other DNA
attgtattaggagtgataatggtattgtgtttatttttttaaattttttttaaattttttgtttttttgagacagggtttcactctgtcactcaggctggagtgcactggtgcatcacca

SEQ ID NO: 117569 - DNA, 120 bp, synthetic construct
  source 1..120: mol_type = other DNA
gatcacgaggtcaggagatcgagaccatctggctaacacagtgaaaccccgcctctactaaaaaaataaaaaacattagctgggtgtggtggcaggcgcctgaagtcccagctacttggg

SEQ ID NO: 117570 - DNA, 120 bp, synthetic construct
  source 1..120: mol_type = other DNA
tttggttttctcttacctattttattgatttctgctctgacttttataatttattttcctctgctcactttagcttaaattgctcttgtttttctactttcctaaaatgaaggcttcgat

SEQ ID NO: 117571 - DNA, 120 bp, synthetic construct; identical to SEQ ID NO: 29277
  source 1..120: mol_type = other DNA

SEQ ID NO: 117572 - DNA, 120 bp, synthetic construct; identical to SEQ ID NO: 29278
  source 1..120: mol_type = other DNA

SEQ ID NO: 117573 - DNA, 120 bp, synthetic construct
  source 1..120: mol_type = other DNA
tgtgttacacatcaactcaaaatctccagtttttaaaaatgaaaccagtcgggcgcggtggctcacacctgtaaccccagcactttgggagaccgaggcgggtggatcacgaggtcagga

SEQ ID NO: 117574 - DNA, 120 bp, synthetic construct
  source 1..120: mol_type = other DNA
caaaaccctgtctctataaaaaatacaaaaattagccaggtgtggtgacacaggcctgtagtcccagctactcggaaggctgagacaggaggatcgcttgagccgggaggtggaggctgc

SEQ ID NO: 117575 - DNA, 120 bp, synthetic construct
  source 1..120: mol_type = other DNA
taatagcagaagattagaagcaaactatccatcagtcaggagccagttaaaataagttatggttcaaccacacattgaattggttttgacccaagtgtctgggggtggagggagaccttt

SEQ ID NO: 117576 - DNA, 120 bp, synthetic construct
  source 1..120: mol_type = other DNA
aactgcatattacatacctgtgtatacaggtgtgtgtgtgtgtgtgtgtgtgtgtgtgtgtgtgtgtgtgtgtatgcccaaataaattcaggtcctcaaactgtaatgatcaccatattt

SEQ ID NO: 117577 - DNA, 120 bp, synthetic construct
  source 1..120: mol_type = other DNA
cttgaacccgggaggtagatgttgcagtgagccaagatcacgccaccacacaccagcctaggcaacagaaagagactccatctcaaaaaaaaaaaaaaaaaaaaaaagaagaaagaaata

SEQ ID NO: 117578 - DNA, 120 bp, synthetic construct
  source 1..120: mol_type = other DNA
ttaaaaaaatgacagtttcctggtcctcatggcatctgagatctgcttgttagacatcccaggcgtcatttggtatgcagccagatatgggagtcactgtcccagaaaacttgcctttct

SEQ ID NO: 117579 - DNA, 120 bp, synthetic construct
  source 1..120: mol_type = other DNA
gttatacattaaacctagactatactttttcttttctttttttttttttttttgagatggagtctccctctgccatccaggctagagtacagtggtgcaatctcagctcactgcaacctc

SEQ ID NO: 117580 - DNA, 120 bp, synthetic construct; identical to SEQ ID NO: 29279
  source 1..120: mol_type = other DNA

SEQ ID NO: 117581 - DNA, 120 bp, synthetic construct; identical to SEQ ID NO: 29266
  source 1..120: mol_type = other DNA

SEQ ID NO: 117582 - DNA, 120 bp, synthetic construct; identical to SEQ ID NO: 29267
  source 1..120: mol_type = other DNA

SEQ ID NO: 117583 - DNA, 120 bp, synthetic construct
  source 1..120: mol_type = other DNA
caacatggtgaaagcccatctctattaaaaaaaaaaaaaaattagctgggcatggtgccaggcacctgtagacccagctactcaggaggctgagacaggagaatcacttgaacctaggag

SEQ ID NO: 117584 - DNA, 120 bp, synthetic construct; identical to SEQ ID NO: 29280
  source 1..120: mol_type = other DNA

SEQ ID NO: 117585 - DNA, 120 bp, synthetic construct; identical to SEQ ID NO: 29281
  source 1..120: mol_type = other DNA

SEQ ID NO: 117586 - DNA, 120 bp, synthetic construct
  source 1..120: mol_type = other DNA
cacaatctcagctcactgcaagctccacctcctcggttcaagccattctcctgcctcagcctcccgagtagctgggactacaccgggctggtgcccaccaccatgcccggctaatttttt

SEQ ID NO: 117587 - DNA, 120 bp, synthetic construct; identical to SEQ ID NO: 29282
  source 1..120: mol_type = other DNA

SEQ ID NO: 117588 - DNA, 120 bp, synthetic construct; identical to SEQ ID NO: 29283
  source 1..120: mol_type = other DNA

SEQ ID NO: 117589 - DNA, 120 bp, synthetic construct; identical to SEQ ID NO: 29284
  source 1..120: mol_type = other DNA

SEQ ID NO: 117590 - DNA, 120 bp, synthetic construct
  source 1..120: mol_type = other DNA
accaaaaatataaaaacattagccgggcatggtggcaggtgcctgtaatcctagctattcgggaggctgagccaggagaattgcttgaacccaggaggcggaggttgcagtgaaccgaga

SEQ ID NO: 117591 - DNA, 120 bp, synthetic construct; identical to SEQ ID NO: 29285
  source 1..120: mol_type = other DNA

SEQ ID NO: 117592 - DNA, 120 bp, synthetic construct; identical to SEQ ID NO: 29286
  source 1..120: mol_type = other DNA

SEQ ID NO: 117593 - DNA, 120 bp, synthetic construct
  source 1..120: mol_type = other DNA
tatactattctctctctgcttacgttaaaaaaactctataataagaatttttttaaagtgggtagagaggggtcaggcgcagtggctcactcctgtaatctcagcactttgggaggccaa

SEQ ID NO: 117594 - DNA, 120 bp, synthetic construct
  source 1..120: mol_type = other DNA
cagagtgagactctgtctcaaaaaaaagaaaaaaaaattagccaggtgtagtagcacacacctgtaatcctagctactcaggaggctgaggcatgagaattgcttgaacccaggaagtgg

SEQ ID NO: 117595 - DNA, 120 bp, synthetic construct; identical to SEQ ID NO: 29288
  source 1..120: mol_type = other DNA

SEQ ID NO: 117596 - DNA, 120 bp, synthetic construct
  source 1..120: mol_type = other DNA
cgtctcccggggtcaagcaatcctcccaccttagcctcctagcagctgggattataggcacgcaccatcacgccaagctaatttttgtattttttgtagagacagggtttcgtcatattg

SEQ ID NO: 117597 - DNA, 120 bp, synthetic construct
  source 1..120: mol_type = other DNA
ggctggctcccttggtcgtgctggaacaagaggtattgcttgtgggtgccagccaggcagttctgcaggaatagtttaggatttcaatttgagatggccaaagagaagacaggattcttc

SEQ ID NO: 117598 - DNA, 120 bp, synthetic construct
  source 1..120: mol_type = other DNA
aagacctctatgacagcagtgatcaagtaacaacttccccacttttctttttttttttttttgagacagggtctaactcccgtcgcccagactagagtgcagtgacacgatctcggctca

SEQ ID NO: 117599 - DNA, 120 bp, synthetic construct
  source 1..120: mol_type = other DNA
tccccaaagacatttcacacaatccttgcttaaaccaatttgttttgttttgttttgtttttgagaaggaatcttgctctgttgcccagggtggagtgcaatggtgcaatctcagctcac

SEQ ID NO: 117600 - DNA, 120 bp, synthetic construct
  source 1..120: mol_type = other DNA
cccagaaataatcaatgtactaagcactcagatcttgtttttctgaatagcattccttatgataaagggctggtttcaggactggtgaaagaagggtaacagatgagccctgggacatct

SEQ ID NO: 117601 - DNA, 120 bp, synthetic construct
  source 1..120: mol_type = other DNA
cactccagcctgggcgacagagcaagactccgtctcaaaaaaaaaaaataagtcgatatcagcctccaaataaaatccaacaccacttggaaatcacattaatgcatatcaatccaccat

SEQ ID NO: 117602 - DNA, 120 bp, synthetic construct
  source 1..120: mol_type = other DNA
tcaagtgatccacctgccttggcctctcaaagggttgggattacaggcatgagccacggcaactgaccgggtctgcctttttttttttttttttttttttttgagacagagtcttgctct

SEQ ID NO: 117603 - DNA, 120 bp, synthetic construct; identical to SEQ ID NO: 29268
  source 1..120: mol_type = other DNA

SEQ ID NO: 117604 - DNA, 120 bp, synthetic construct
  source 1..120: mol_type = other DNA
cccaacctcagtatcttgtcatctgtcttcttgggctggtcagtagggtcttctcattttctgcagcttgcaatggtccctggtggtccagaaacaggaaaggaaatagttttattatgg

SEQ ID NO: 117605 - DNA, 120 bp, synthetic construct; identical to SEQ ID NO: 29236
  source 1..120: mol_type = other DNA

SEQ ID NO: 117606 - DNA, 120 bp, synthetic construct; identical to SEQ ID NO: 29291
  source 1..120: mol_type = other DNA

SEQ ID NO: 117607 - DNA, 120 bp, synthetic construct; identical to SEQ ID NO: 29292
  source 1..120: mol_type = other DNA

SEQ ID NO: 117608 - DNA, 120 bp, synthetic construct
  source 1..120: mol_type = other DNA
caagcagggcatggtggctcacatctgtaatcccagcacttcgggaggccaagatgggtggattacctgaggtcaggagtttgcgaccagcctgaccaacatggtgaaaccccatctcta

SEQ ID NO: 117609 - DNA, 120 bp, synthetic construct
  source 1..120: mol_type = other DNA
tagctgggattacaggcatgtgccaccacaccaggctaatttttgtattttttagtacaaatggggttttgccatgttggccaggctaatctcaaactcctgacctcaagtgacccacct

SEQ ID NO: 117610 - DNA, 120 bp, synthetic construct
  source 1..120: mol_type = other DNA
gactggccaacatgcagaaaccccatctcccctaaaaatacaaaaatcccagcactttgggaggccaatgccactgcactccagcctgggtgacagagtaagaccctgtctcaaaaaaaa

SEQ ID NO: 117611 - DNA, 120 bp, synthetic construct
  source 1..120: mol_type = other DNA
cgagatcacgccactgcactccagcctgggcaacaagagcaaaactccatctcaaaaaaagaaaaagaaagaaagaaaataaagcacttgaagggcacaataagccaacttgatttaaca

SEQ ID NO: 117612 - DNA, 120 bp, synthetic construct
  source 1..120: mol_type = other DNA
atcatttctgattttggtaattcgagtcttatttctctccttttaaaaattcatccagctaaaggtttgtcaattttgttgatcttttaaaagaaccagctttgggttttgtgggttttt

SEQ ID NO: 117613 - DNA, 120 bp, synthetic construct; identical to SEQ ID NO: 29269
  source 1..120: mol_type = other DNA

SEQ ID NO: 117614 - DNA, 120 bp, synthetic construct
  source 1..120: mol_type = other DNA
ggacttaaggtaatattcagctcataataggagatagggagtgttttctttcttttccctgaagttgcttgttctttgaagtcatctagggctgctgccttctatagataatttttttct

SEQ ID NO: 117615 - DNA, 120 bp, synthetic construct; identical to SEQ ID NO: 29234
  source 1..120: mol_type = other DNA

SEQ ID NO: 117616 - DNA, 120 bp, synthetic construct; identical to SEQ ID NO: 29270
  source 1..120: mol_type = other DNA

SEQ ID NO: 117617 - DNA, 120 bp, synthetic construct
  source 1..120: mol_type = other DNA
aaaagcacggagacatggcacattgagaaccacaagtagtttgggatggctgaaggtcaagagaagggttgcagggaaaggagattattaggcagggttaagatcacagatagcattgaa

SEQ ID NO: 117618 - DNA, 120 bp, synthetic construct
  source 1..120: mol_type = other DNA
acaaggcatctttcaaaaccattggcagtattcaaaggaacatttaaaacaggacaatttaattttagtctaatcctttacttcagtctgtaagatttcttctcttttcccatgaggata

SEQ ID NO: 117619 - DNA, 120 bp, synthetic construct; identical to SEQ ID NO: 117526
  source 1..120: mol_type = other DNA

SEQ ID NO: 117620 - DNA, 120 bp, synthetic construct
  source 1..120: mol_type = other DNA
tccttaaagtgacagataaggatccctttaaaattattactattatcattatttttgagacagagtcttgctctgtcacctaagctggagtgcagtggcacaatcgcggctcaccacaac

SEQ ID NO: 117621 - DNA, 120 bp, synthetic construct
  source 1..120: mol_type = other DNA
cggagattgcagcaagctgagatagtgcctctccactccagcctgggcaacagagcaagactctgtctcaaaacaaaacaaaacaaaaaccaaacaacaacaacaaaaccctctgaggga

SEQ ID NO: 117622 - DNA, 120 bp, synthetic construct
  source 1..120: mol_type = other DNA
atactgtggctatctgagcgttcaaacctcatgctgaaatgtgatccccagtgttgggggtggagcccaatgggaggtgtttgggtcacaaggacaatgtccatctgtctgtctctctgt

SEQ ID NO: 117623 - DNA, 120 bp, synthetic construct; identical to SEQ ID NO: 29274
  source 1..120: mol_type = other DNA

SEQ ID NO: 117624 - DNA, 120 bp, synthetic construct
  source 1..120: mol_type = other DNA
tggagaggtcttattattattattgctgttgttatttattaatttttttttgagatagagtcttgctcttttgaccaggctggagtacagtggcacgatctcagctcactgcagcctctg

SEQ ID NO: 117625 - DNA, 120 bp, synthetic construct; identical to SEQ ID NO: 7748
  source 1..120: mol_type = other DNA

SEQ ID NO: 117626 - DNA, 120 bp, synthetic construct
  source 1..120: mol_type = other DNA
gtgggtgggtcacctgaggtcaggagttcgagaccagcctggccaacatggcgaaaaatacaaaaatgagtcgggtgtggtggtgtgtactcgtggtcccagctattcaggaggctgagg

SEQ ID NO: 117627 - DNA, 120 bp, synthetic construct; identical to SEQ ID NO: 2197
  source 1..120: mol_type = other DNA

SEQ ID NO: 117628 - DNA, 120 bp, synthetic construct
  source 1..120: mol_type = other DNA
ctgccgtgggcacaccaccaataccttccccatactcagttcatttgaaggcaacagattttctccaattagcagggcaatgaccccattaatcatggtttcagaaatatttaaaatgat

SEQ ID NO: 117629 - DNA, 120 bp, synthetic construct; identical to SEQ ID NO: 87989
  source 1..120: mol_type = other DNA

SEQ ID NO: 117630 - DNA, 120 bp, synthetic construct; identical to SEQ ID NO: 22862
  source 1..120: mol_type = other DNA

SEQ ID NO: 117631 - DNA, 120 bp, synthetic construct; identical to SEQ ID NO: 22863
  source 1..120: mol_type = other DNA

SEQ ID NO: 117632 - DNA, 120 bp, synthetic construct; identical to SEQ ID NO: 22864
  source 1..120: mol_type = other DNA

SEQ ID NO: 117633 - DNA, 120 bp, synthetic construct
  source 1..120: mol_type = other DNA
agaaaccaaacatgtgagtaaacctaacttttccttagtccacacagcttctaaaccaacaggtactaaatattctacactgaaataacgatggctgtggtgtacggtccgtccttcagt

SEQ ID NO: 117634 - DNA, 120 bp, synthetic construct
  source 1..120: mol_type = other DNA
cattttcagaaactgtgaggaaaaagttgactctcaaactacaaattttttttttacacccacaagatgcagtctggctctgtcgcccaggctggagtgcagtggcaccatctcagctca

SEQ ID NO: 117635 - DNA, 120 bp, synthetic construct
  source 1..120: mol_type = other DNA
ttctatcaaatttaattaatttttttttcttttgagatggagtctctgtccactccaggctggagtgcagtggcgtgatcttggctcactgcaacctccacttcctaggttcaagcaatt

SEQ ID NO: 117636 - DNA, 120 bp, synthetic construct
  source 1..120: mol_type = other DNA
ttgaacttccaggaatctgctttcgaacccaaattttattaagtgtaactactcggacagcctgccaatcatatcacaggatatcccaattggaaagctattgggaatgtaccttcctcc

SEQ ID NO: 117637 - DNA, 120 bp, synthetic construct
  source 1..120: mol_type = other DNA
ctactatcaggtcagtattagcactgaaaagcatttagtgtcttggcaggaaaagttgacaagaaaatctcatccacacatagaaatgtgcaccactgtgcaaggaagcacaatccccag

SEQ ID NO: 117638 - DNA, 120 bp, synthetic construct
  source 1..120: mol_type = other DNA
tctaagagggaagaatatgactcgacgtttaattccagtacattccctctaggatgacggccaaagtaaaggaagaaggggcagcagcagctccagactgtttttttttttttttttgga

SEQ ID NO: 117639 - DNA, 120 bp, synthetic construct
  source 1..120: mol_type = other DNA
taacactgcggtgtaacggaggtctcatgatatgcccatcttgtacttctgcttacagaacgtgaaaactctccttttcaaaattccaattcaggtaaaagcacaaatagtttgccaggc

SEQ ID NO: 117640 - DNA, 120 bp, synthetic construct
  source 1..120: mol_type = other DNA
taatcatattcctcacacaagataatttttcaaaaccaaatgcgtaactcagctgtctgcagtacatcaagttctctggtctcctagcaaaacaggcacaccaaacaggtctgtcaactg

SEQ ID NO: 117641 - DNA, 120 bp, synthetic construct
  source 1..120: mol_type = other DNA
ctccaatgggctctccccagcactgacctggaatgcctaaattaacttcacatttcacattctcaggtaatctatgatccagaaaaacataaagaaagtgcctccagccagattaaagaa

SEQ ID NO: 117642 - DNA, 120 bp, synthetic construct
  source 1..120: mol_type = other DNA
cttttgattgaactgaactcagagcggatctaagcccaagataacaggcactcctcaattaaccaaacagacccgctaagagcaatttacggcccattttctacctttcagcttaatttt

SEQ ID NO: 117643 - DNA, 120 bp, synthetic construct
  source 1..120: mol_type = other DNA
agaaacatgacacagacttttttccgtggtattaagcacctcctcttccttgctgtattttaggacaacgtaacttcaacttccctttctgcaaacacactacttgttcagcaaagacgg

SEQ ID NO: 117644 - DNA, 120 bp, synthetic construct
  source 1..120: mol_type = other DNA
gaccatgaagactgactagccactgatttattatcaggtagcaataaagatgggaaagtccaaatttatcaggagaggaaagtgattatatatatttgcaaacttacaggtcttgagatt

SEQ ID NO: 117645 - DNA, 120 bp, synthetic construct
  source 1..120: mol_type = other DNA
aagccagatgctgagtctttaggttttcaaagtaagaattatccttcaaacgtctgaaaacattccatttagtctaaactacagccaactcactggaaattagtacgtgccaaggtggca

SEQ ID NO: 117646 - DNA, 120 bp, synthetic construct
  source 1..120: mol_type = other DNA
ctcccaccgcctcaaccaccctgcgccccgatcgcgcccaacccccggcggggggctcccactcacttgtctttctcggtgccgaagatggaggccagatactccgccatttcccacccg

SEQ ID NO: 117647 - DNA, 120 bp, synthetic construct; identical to SEQ ID NO: 1245
  source 1..120: mol_type = other DNA

SEQ ID NO: 117648 - DNA, 120 bp, synthetic construct; identical to SEQ ID NO: 1246
  source 1..120: mol_type = other DNA

SEQ ID NO: 117649 - DNA, 120 bp, synthetic construct
  source 1..120: mol_type = other DNA
tgcttgtctttttacagtttgcagccttttctctcattcgaaatttggtcaaggagaaagtgtcatctttaaaactggccatattctgaaacttggttcaactgacaaatctaaacattc

SEQ ID NO: 117650 - DNA, 120 bp, synthetic construct
  source 1..120: mol_type = other DNA
aatttttttttttttttttttgagacagagtttcattcttgttgcccaggctagagtgcagtggcacgatctcagcttgttgcaacctccccctcccgggttcaagcgattcttctgcct

SEQ ID NO: 117651 - DNA, 120 bp, synthetic construct; identical to SEQ ID NO: 1210
  source 1..120: mol_type = other DNA

SEQ ID NO: 117652 - DNA, 120 bp, synthetic construct
  source 1..120: mol_type = other DNA
gccttcttttttttttttttttttttttgagatggagtttcgctctcgtcacccaggctggagtgcaatggcatggtctaagctcactgcaacctccacctctcaggttcagtcaattct

SEQ ID NO: 117653 - DNA, 120 bp, synthetic construct; identical to SEQ ID NO: 20055
  source 1..120: mol_type = other DNA

SEQ ID NO: 117654 - DNA, 120 bp, synthetic construct; identical to SEQ ID NO: 20056
  source 1..120: mol_type = other DNA

SEQ ID NO: 117655 - DNA, 120 bp, synthetic construct; identical to SEQ ID NO: 24780
  source 1..120: mol_type = other DNA

SEQ ID NO: 117656 - DNA, 120 bp, synthetic construct
  source 1..120: mol_type = other DNA
gttctcaatgagctgttgggtacacctcccagacggggtggtggccgggtagaggggctcctcacttcccagtaggggcggccgggcagaggcgccgctcacctcccggacggggcggct

SEQ ID NO: 117657 - DNA, 120 bp, synthetic construct; identical to SEQ ID NO: 24781
  source 1..120: mol_type = other DNA

SEQ ID NO: 117658 - DNA, 120 bp, synthetic construct; identical to SEQ ID NO: 15426
  source 1..120: mol_type = other DNA

SEQ ID NO: 117659 - DNA, 120 bp, synthetic construct; identical to SEQ ID NO: 68250
  source 1..120: mol_type = other DNA

SEQ ID NO: 117660 - DNA, 120 bp, synthetic construct
  source 1..120: mol_type = other DNA
gaaggccattacataatggtaaagggatcaattcaacaagaggagctaactatcctaaatatttatgcacccaatacaggagcacccagattcataaagcaagtcctgagtgacctacaa

SEQ ID NO: 117661 - DNA, 120 bp, synthetic construct; identical to SEQ ID NO: 54568
  source 1..120: mol_type = other DNA

SEQ ID NO: 117662 - DNA, 120 bp, synthetic construct
  source 1..120: mol_type = other DNA
cactgctcaaggaaataaaagaggagacaaacaaatggaagaacattccatgctcatgggtaggaagaatcaatatcgtgaaaatggccatactgcccaaggtaatttacagattcaatg

SEQ ID NO: 117663 - DNA, 120 bp, synthetic construct
  source 1..120: mol_type = other DNA
atgcaaatcaaaaccactatgagatatcatctcacaccagttagaatggcaatcattaaaaagtcaggaaacaacaggtgctggagaggatgcggagaaataggaacacttttacactgt

SEQ ID NO: 117664 - DNA, 120 bp, synthetic construct; identical to SEQ ID NO: 15427
  source 1..120: mol_type = other DNA

SEQ ID NO: 117665 - DNA, 120 bp, synthetic construct
  source 1..120: mol_type = other DNA
agaccaatggaacagaacagagccctcagaaataatgccacatatctacaactatctgatctttgacaaacctgacaaaaacaagaaatggggaaaccattccctatttaataaatggtg

SEQ ID NO: 117666 - DNA, 120 bp, synthetic construct
  source 1..120: mol_type = other DNA
ggtatatacccaaaggattatagatcatgctgctataaagacacatgctgctataaagacacatatgtttattgcggcactgttcacaatagcaaggacttggaaccaacccaaatgtcc

SEQ ID NO: 117667 - DNA, 120 bp, synthetic construct; identical to SEQ ID NO: 25476
  source 1..120: mol_type = other DNA

SEQ ID NO: 117668 - DNA, 120 bp, synthetic construct; identical to SEQ ID NO: 13880
  source 1..120: mol_type = other DNA

SEQ ID NO: 117669 - DNA, 120 bp, synthetic construct
  source 1..120: mol_type = other DNA
gcggctggcctggccggggctgacccccacctctctcccggacggggtggctgccgggcggagacgctcctcacttcccagacggggtggctgccgggcggaggggctcctcacttctca

SEQ ID NO: 117670 - DNA, 120 bp, synthetic construct; identical to SEQ ID NO: 13881
  source 1..120: mol_type = other DNA

SEQ ID NO: 117671 - DNA, 120 bp, synthetic construct
  source 1..120: mol_type = other DNA
gatttcagattttctaactttttgcctcatacttattggttcagcatccctaatctgaaaaaaatgcccctgtgaacattgagttttgtcttgtctccctcccctcccctcctttcctct

SEQ ID NO: 117672 - DNA, 120 bp, synthetic construct
  source 1..120: mol_type = other DNA
gcagcctcaaatcctgagcttaagtgatcatctcacatcagcctcccaagtagctaggacaataggcatgcgtcaccacgcccagcgaatttttgattttcattaattaattatttttgt

SEQ ID NO: 117673 - DNA, 120 bp, synthetic construct
  source 1..120: mol_type = other DNA
tgactataatcaccctgttgtcttatcaaatggtagatcttattctatttttttctttgcttttttcttcaacagagtctcgctctgtcgcccaggctggagtgcagtggcgtgattttg

SEQ ID NO: 117674 - DNA, 120 bp, synthetic construct
  source 1..120: mol_type = other DNA
tgggattataggtgtgagccactgcacctggcctatccattcatctcttgatggacacttaggttgcttccaaatcttggctattgtgaacagggctgcaacaaacatgagagtgcagat

SEQ ID NO: 117675 - DNA, 120 bp, synthetic construct
  source 1..120: mol_type = other DNA
gccgaggtgggaggattgcttgagcccaggacttcgagatcagcctgggcagcatactgagatcttgtctttgtttctttatttaaaaagaataagaaatatattgtccactgctacccc

SEQ ID NO: 117676 - DNA, 120 bp, synthetic construct
  source 1..120: mol_type = other DNA
gccactgcgcccagattcctatgtgtttttaatgctctcagccatttgtgtgctttataagacaagattccttgagactagcctgggtaacatgatgaaaccccatctctacaaaaaaat

SEQ ID NO: 117677 - DNA, 120 bp, synthetic construct
  source 1..120: mol_type = other DNA
ggagagtgcactgagccaagatcacaccactgcacaccagcctgggtgacaatgcaagaacctgtctcaaaaataaataaataaaaatacagtaaataaaaacggtgagccacacgaaat

SEQ ID NO: 117678 - DNA, 120 bp, synthetic construct
  source 1..120: mol_type = other DNA
aatagaaaagggggaaatgtggggaaaagatagagaaatcagattgttgctgtgtttgtgtagaaagaagtagacataggagactccattttgttctgtactaagaaaaattcttctgcc

SEQ ID NO: 117679 - DNA, 120 bp, synthetic construct
  source 1..120: mol_type = other DNA
ctagggaggctggggcagaagaatcccttaaactcgggaggcggaggttgcagtgagccgagcccacgccattgcactccagcctgggtgacagaatgagactctgtctcaaaaaaaaaa

SEQ ID NO: 117680 - DNA, 120 bp, synthetic construct; identical to SEQ ID NO: 8831
  source 1..120: mol_type = other DNA

SEQ ID NO: 117681 - DNA, 120 bp, synthetic construct; identical to SEQ ID NO: 23131
  source 1..120: mol_type = other DNA

SEQ ID NO: 117682 - DNA, 120 bp, synthetic construct; identical to SEQ ID NO: 13338
  source 1..120: mol_type = other DNA

SEQ ID NO: 117683 - DNA, 120 bp, synthetic construct; identical to SEQ ID NO: 13339
  source 1..120: mol_type = other DNA

SEQ ID NO: 117684 - DNA, 120 bp, synthetic construct; identical to SEQ ID NO: 13340
  source 1..120: mol_type = other DNA

SEQ ID NO: 117685 - DNA, 120 bp, synthetic construct; identical to SEQ ID NO: 27024
  source 1..120: mol_type = other DNA

SEQ ID NO: 117686 - DNA, 120 bp, synthetic construct
  source 1..120: mol_type = other DNA
tagtacatgccactacacctttccagcctccccagtagctgggactgctagtacatgccactacacctggctaatttgtttttttttttttttttttgtagagacaggatctcactatgt

SEQ ID NO: 117687 - DNA, 120 bp, synthetic construct; identical to SEQ ID NO: 25688
  source 1..120: mol_type = other DNA

SEQ ID NO: 117688 - DNA, 120 bp, synthetic construct; identical to SEQ ID NO: 24155
  source 1..120: mol_type = other DNA

SEQ ID NO: 117689 - DNA, 120 bp, synthetic construct
  source 1..120: mol_type = other DNA
ttgggtacacctcccagacggggtggtggccgggcagaggggctcctcacttcccagtaggggcggccgggcagaggcgcccctcacctcccggactgggcggctggccgggcagaggag

SEQ ID NO: 117690 - DNA, 120 bp, synthetic construct
  source 1..120: mol_type = other DNA
ttgtagccggccgagatcacgccactgcgctccagcctgggcaccattgagcactgagtgaaccagactccgtctgcaatcccggcacctcgggaggccgaggctgacaaatcactcgct

SEQ ID NO: 117691 - DNA, 120 bp, synthetic construct; identical to SEQ ID NO: 24153
  source 1..120: mol_type = other DNA

SEQ ID NO: 117692 - DNA, 120 bp, synthetic construct
  source 1..120: mol_type = other DNA
gacacagtaacaatctgatctttcttttccccacaagatctaccattcaatccaacaatcctactactgggtatctacccaaaggaaaataagtcatttatatcaaaaagacacctgcac

SEQ ID NO: 117693 - DNA, 120 bp, synthetic construct; identical to SEQ ID NO: 24154
  source 1..120: mol_type = other DNA

SEQ ID NO: 117694 - DNA, 120 bp, synthetic construct
  source 1..120: mol_type = other DNA
tattagacctttgtcagatgggtagattacaaaaattttctcccattgtgtaggttgcctgttcactctgctggtagtttcttttgctgtgcagaagctctttagtttaattagatccca

SEQ ID NO: 117695 - DNA, 120 bp, synthetic construct
  source 1..120: mol_type = other DNA
gcttatcagcttaagaagattttgggctgagacaatgggattttctagatatacaatcatgtgacctgcaaacagggacaatttgacttcctcttttcctaattgaataccctttatttc

SEQ ID NO: 117696 - DNA, 120 bp, synthetic construct
  source 1..120: mol_type = other DNA
cgtcgcaggtctctgcttacaccgctcgtgccctagttccctccttcctcgctccccgtgcccggttccctacgccccctcccgcgagcctcctgcccccgtttctcgccctttctaccc

SEQ ID NO: 117697 - DNA, 120 bp, synthetic construct
  source 1..120: mol_type = other DNA
aatgaataagtctcacgagatctgatggttttataaggggaaaccccttttacttggctctcattcttctcttgtctgccaccatgtgatgcgtacctttcaccttcaccataattgtga

SEQ ID NO: 117698 - DNA, 120 bp, synthetic construct
  source 1..120: mol_type = other DNA
cctctcaagtagctgagactacaggattgggctaacacacctagctaaatttttatttttatttttttgtagagatggagtcttgctgtgttgcccaggctggtcttgaaactcatgacc

SEQ ID NO: 117699 - DNA, 120 bp, synthetic construct; identical to SEQ ID NO: 24149
  source 1..120: mol_type = other DNA

SEQ ID NO: 117700 - DNA, 120 bp, synthetic construct
  source 1..120: mol_type = other DNA
caaaattgatagaccgctagcaagactaataaagaagaaaagagagaagaatcaagtagacgcaataaaaaatgataaaggggatgtcaccactgatcccacagaaatacagactaccat

SEQ ID NO: 117701 - DNA, 120 bp, synthetic construct
  source 1..120: mol_type = other DNA
ttcaattaggaaaagaggaagtcaaattgtccctgtttgcagatgacatgattgtatatctagaaaaccccattgtctcagcccaaaatctccttaagctgataagcagcttcaacaaag

SEQ ID NO: 117702 - DNA, 120 bp, synthetic construct
  source 1..120: mol_type = other DNA
cttacaccttatacaaaaattaattcaagatggattagagacttaaacgttagacctaaaaccataaaaaccctagaagaaaacctaggcattactgttcaggacataggcatgggcaag

SEQ ID NO: 117703 - DNA, 120 bp, synthetic construct
  source 1..120: mol_type = other DNA
ggtttgtcaaagatcagacaatgagggctctgttctgttccattggtctatatctctgttttggtaccagtaccatgctgttttggttactgtagccttgtagtatagtttgaagtcagg

SEQ ID NO: 117704 - DNA, 120 bp, synthetic construct
  source 1..120: mol_type = other DNA
cttttagcatgaagagttgttgaattttgtcaaaggccttttctgcatctattgagataatcatgtggtttttgtctttggttctgtttatatgctggattacgtttattgatttgcata

SEQ ID NO: 117705 - DNA, 120 bp, synthetic construct
  source 1..120: mol_type = other DNA
aagaacatctttatttctgccttcatttcgttatgtacccagtagtcattcaggagcaggttgttcagtttccatgtagttgcacggttttgagtgagtttcttaatcctgagttctagt

SEQ ID NO: 117706 - DNA, 120 bp, synthetic construct
  source 1..120: mol_type = other DNA
tgaaaattcatttctttaagaatgttgaatattggtccccactgtcttctggcttgtagagtttctgccgagagatcagctgttagtctgatgggcttccctttgtgggtaacccgacct

SEQ ID NO: 117707 - DNA, 120 bp, synthetic construct; identical to SEQ ID NO: 24150
  source 1..120: mol_type = other DNA

SEQ ID NO: 117708 - DNA, 120 bp, synthetic construct
  source 1..120: mol_type = other DNA
cctttgggtatatacccagtaatatataccaggtgtatatttggctgggtcaaatggtatttccagttccagatccttgaggaaccaccacactgtcttccacaatggttgaattaggaa

SEQ ID NO: 117709 - DNA, 120 bp, synthetic construct
  source 1..120: mol_type = other DNA
aagagaaagcaggaaagatccaaaattgacaccctaacatcacaattaaaagagctagaaaaacaagagcaaacacattcaaaacctagcagaaggcaagaaataactaaaatcagagca

SEQ ID NO: 117710 - DNA, 120 bp, synthetic construct
  source 1..120: mol_type = other DNA
caacaacacttcatgctaaaaactctcaataaattaggtattgatgggacgtatctccaaataataagagctatctatgacaaacccacagccaatatcatactgaatgggcaaaaactg

SEQ ID NO: 117711 - DNA, 120 bp, synthetic construct
  source 1..120: mol_type = other DNA
agaaataacgccacatatctacaactatctgatctttgacaaacctgagaaaagcaagcaatggggaaaggattccctatttaataaatggtgctgggaaaactggctagccatatgtag

SEQ ID NO: 117712 - DNA, 120 bp, synthetic construct
  source 1..120: mol_type = other DNA
gaaattggaaatcatcattctcagtaaactatcacaaggacagaaaaacaaacacctcatgttctcactcataggtgggaattgaacagtgagaacacatggacacaggaaggggaacct

SEQ ID NO: 117713 - DNA, 120 bp, synthetic construct; identical to SEQ ID NO: 24151
  source 1..120: mol_type = other DNA

SEQ ID NO: 117714 - DNA, 120 bp, synthetic construct; identical to SEQ ID NO: 24152
  source 1..120: mol_type = other DNA

SEQ ID NO: 117715 - DNA, 120 bp, synthetic construct; identical to SEQ ID NO: 21852
  source 1..120: mol_type = other DNA

SEQ ID NO: 117716 - DNA, 120 bp, synthetic construct
  source 1..120: mol_type = other DNA
ctctctctctcttcctttcctttcctttccttctttcttttattctttctttacaacttttcttttaaatatactcccttccttccttccttcctccctccctcccttccttcctccctc

SEQ ID NO: 117717 - DNA, 120 bp, synthetic construct
  source 1..120: mol_type = other DNA
catgctgctataaagacacatacacatgtatgtttattgtggcagtattcacagtagcaaagacttggaaccaacccaaatgtccatcaatgatagactggattaagaaaatgtggcaca

SEQ ID NO: 117718 - DNA, 120 bp, synthetic construct; identical to SEQ ID NO: 21853
  source 1..120: mol_type = other DNA

SEQ ID NO: 117719 - DNA, 120 bp, synthetic construct
  source 1..120: mol_type = other DNA
ccaggttcaagcgattctcctgcctcaggctaccaagtagctgggattacaggcatgcgccaccacacccagataattttttttttttcctctttctgttttgtttttgtttttgttttt

SEQ ID NO: 117720 - DNA, 120 bp, synthetic construct; identical to SEQ ID NO: 17373
  source 1..120: mol_type = other DNA

SEQ ID NO: 117721 - DNA, 120 bp, synthetic construct; identical to SEQ ID NO: 17374
  source 1..120: mol_type = other DNA

SEQ ID NO: 117722 - DNA, 120 bp, synthetic construct
  source 1..120: mol_type = other DNA
ttgtgttgttctaagtagcatgatgaaatctcacactgtccctcctgcctatcacttagcagtgcctggtttcaagtaacccttattttacttaataatggccccagagtgcaagagtag

SEQ ID NO: 117723 - DNA, 120 bp, synthetic construct; identical to SEQ ID NO: 23303
  source 1..120: mol_type = other DNA

SEQ ID NO: 117724 - DNA, 120 bp, synthetic construct; identical to SEQ ID NO: 6066
  source 1..120: mol_type = other DNA

SEQ ID NO: 117725 - DNA, 120 bp, synthetic construct; identical to SEQ ID NO: 15805
  source 1..120: mol_type = other DNA

SEQ ID NO: 117726 - DNA, 120 bp, synthetic construct
  source 1..120: mol_type = other DNA
aggtgttttacagcaccttttgaaactgagttgcacaagtgaaatctaaataattaacatgtaaagttttactggccagcgaagtggctcacgcctgtaatcctagcactctgggagact

SEQ ID NO: 117727 - DNA, 120 bp, synthetic construct
  source 1..120: mol_type = other DNA
gccaggacgaaacctaaggactcagtatcacctaactagatgttagtgaggaaagacatggggagaaaggctctgagagaggtgtgattttcagaggagtgatgaatgaaaggataaata

SEQ ID NO: 117728 - DNA, 120 bp, synthetic construct; identical to SEQ ID NO: 2708
  source 1..120: mol_type = other DNA

SEQ ID NO: 117729 - DNA, 120 bp, synthetic construct
  source 1..120: mol_type = other DNA
agtagctgagactacagacgcatgccaccacgcctagctaatttttttttttttgtagagctgggatctcactatgttgcccaaggtggtctcaaactcctggcctcaactgattctcag

SEQ ID NO: 117730 - DNA, 120 bp, synthetic construct
  source 1..120: mol_type = other DNA
cacctcagccttccaaagtattgggattacagacatgagccaccatgcccaccctaattaacagtatttgtcaaattttaatgtgcatcagaatcacctggaggacctgttaaaacaacc

SEQ ID NO: 117731 - DNA, 120 bp, synthetic construct; identical to SEQ ID NO: 11909
  source 1..120: mol_type = other DNA

SEQ ID NO: 117732 - DNA, 120 bp, synthetic construct; identical to SEQ ID NO: 11910
  source 1..120: mol_type = other DNA

SEQ ID NO: 117733 - DNA, 120 bp, synthetic construct; identical to SEQ ID NO: 26266
  source 1..120: mol_type = other DNA

SEQ ID NO: 117734 - DNA, 120 bp, synthetic construct
  source 1..120: mol_type = other DNA
aggggcaccagcttgtcatttcagaagctgccgagtgccctgacattttgaggatttgttgggcatcttgggtagtggtagtgccaactttgcattccaatgggtggtggtgaagaatgg

SEQ ID NO: 117735 - DNA, 120 bp, synthetic construct
  source 1..120: mol_type = other DNA
tttttttctatcaatggcaaatgtcatcaagctaaaaggggtaagttcatcattattaagaagaaagcgccaggctgggcacagtggttcacatctgtaatcccaacactttgggaggcc

SEQ ID NO: 117736 - DNA, 120 bp, synthetic construct
  source 1..120: mol_type = other DNA
gatagtttgctgagaatgatggtttccagcttcatccgtgtccctacaaagtacatgaactcatcattttttatggctgcatagtattccatggtgtatatgtgtcacattttcttaatc

SEQ ID NO: 117737 - DNA, 120 bp, synthetic construct; identical to SEQ ID NO: 7676
  source 1..120: mol_type = other DNA

SEQ ID NO: 117738 - DNA, 120 bp, synthetic construct
  source 1..120: mol_type = other DNA
cccaaagtgctgggattacaggcgtgagccaccgcacttgccctgttttctttttttaaagattcctcactcccaatgaattttaaaagtcaattgtagtttgtctttggatccatactg

SEQ ID NO: 117739 - DNA, 120 bp, synthetic construct; identical to SEQ ID NO: 31606
  source 1..120: mol_type = other DNA

SEQ ID NO: 117740 - DNA, 120 bp, synthetic construct; identical to SEQ ID NO: 31607
  source 1..120: mol_type = other DNA

SEQ ID NO: 117741 - DNA, 120 bp, synthetic construct
  source 1..120: mol_type = other DNA
ggccatcagagaaatgcaaagcaaaaccacaatgagataccatctcacaccagttagaatggcaatcattaaaaagtcaggaaacaacaggtgctggagaggatgtggagaaataggaac

SEQ ID NO: 117742 - DNA, 120 bp, synthetic construct; identical to SEQ ID NO: 31608
  source 1..120: mol_type = other DNA

SEQ ID NO: 117743 - DNA, 120 bp, synthetic construct
  source 1..120: mol_type = other DNA
cagcctcccaaagtgctgggattacacgaatgagccaccatgcctggcctcttatttactatatattgttgattaatatcaaactcacagccaaaagcactataacacatgcctgaacaa

SEQ ID NO: 117744 - DNA, 120 bp, synthetic construct; identical to SEQ ID NO: 18270
  source 1..120: mol_type = other DNA

SEQ ID NO: 117745 - DNA, 120 bp, synthetic construct; identical to SEQ ID NO: 18271
  source 1..120: mol_type = other DNA

SEQ ID NO: 117746 - DNA, 120 bp, synthetic construct
  source 1..120: mol_type = other DNA
caaaaacaaacaaacaaacatttttttaagaatgtaataggattggtgtggtggctcatgcctgtaatcccagtgctttcagaggttgaggcaggcagatcacctgaggttaggagtttg

SEQ ID NO: 117747 - DNA, 120 bp, synthetic construct
  source 1..120: mol_type = other DNA
atctacctacatgagtgtgtgttaatgtagatatgcataattttttctgtttttggtagaggtagggtcttgctctgttgcccaggctgtcagaaactcctggccttgagtgatctccca

SEQ ID NO: 117748 - DNA, 120 bp, synthetic construct
  source 1..120: mol_type = other DNA
tgatccacccgttgtggcctcccaaaatgctgggattacagtcatgagccactgctcctggtcacgtaatttttaaatataattttagctgtatcttgtgttcagttttctaggctacct

SEQ ID NO: 117749 - DNA, 120 bp, synthetic construct; identical to SEQ ID NO: 28110
  source 1..120: mol_type = other DNA

SEQ ID NO: 117750 - DNA, 120 bp, synthetic construct; identical to SEQ ID NO: 12390
  source 1..120: mol_type = other DNA

SEQ ID NO: 117751 - DNA, 120 bp, synthetic construct; identical to SEQ ID NO: 13624
  source 1..120: mol_type = other DNA

SEQ ID NO: 117752 - DNA, 120 bp, synthetic construct
  source 1..120: mol_type = other DNA
ccaccacgcccggcgggaattattgtttaatgggcatagagtttcagttttgcaaaatgaaaagagttctggagacagattgtggtgatggtagcaaaacttcacaaatgtaaaatacca

SEQ ID NO: 117753 - DNA, 120 bp, synthetic construct
  source 1..120: mol_type = other DNA
atctaggaagtgaggagcctctctgcctggccacccattgtctgggatgtgaggagagcctctgcccagctgccccatctgggatgtgaggagcacctctgcccggccgccctgtctggg

SEQ ID NO: 117754 - DNA, 120 bp, synthetic construct
  source 1..120: mol_type = other DNA
cccatcgtctgggaggtgaggagtgcctctgcccggccaccccgtctgagaagtgaggagcgcctctgcccggcagccgccccgtctgggaagtgaggagtgcctctgcctggccgccca

SEQ ID NO: 117755 - DNA, 120 bp, synthetic construct
  source 1..120: mol_type = other DNA
aaaacagcctgggcaacatagcaagatcctgtctctaaaaacaaacaaataaaaggaaaagaaaagaagggaggagggaggaaagaagaaaaaaaggccaggttcagtggttcacgccta

SEQ ID NO: 117756 - DNA, 120 bp, synthetic construct
  source 1..120: mol_type = other DNA
gggtttcaccatgttggccaggatgctcttgatctcctgacctcatggatccgcccaccttggcctcccaaagtgctaggattacaggcgtgagccatcgtgcccggcccatatttttta

SEQ ID NO: 117757 - DNA, 120 bp, synthetic construct
  source 1..120: mol_type = other DNA
gacaaggtctccctatgttgccaggctaaaaccttttaatatttcttgtttttttgagatgcagtttcgctcttgttgcccaggctgtagtgcaatggcatgatctcagccacttttaat

SEQ ID NO: 117758 - DNA, 120 bp, synthetic construct
  source 1..120: mol_type = other DNA
cttttgaggggggctcaaactactggtgcctggggacacaagcaagacctgggtccatggaaatgtgtgtgtgtgtgcatataagcacatatgcttgaggaactaaagccaatatgaccc

SEQ ID NO: 117759 - DNA, 120 bp, synthetic construct
  source 1..120: mol_type = other DNA
atgtgctacaagacagggatgccctctctcaccactcctattcaacatagtgttggaagttctggccagggcaattaggcaggagaaggaaataaagggtattcaattaggaaaagagga

SEQ ID NO: 117760 - DNA, 120 bp, synthetic construct
  source 1..120: mol_type = other DNA
taatatccagaatccacaatgaactcaaacaaatttacaagaaacaaacaaacaaccccatcaaaaagtgggcaaaggacatgaacagacacttctcaaaagaagacatttatgcagcca

SEQ ID NO: 117761 - DNA, 120 bp, synthetic construct
  source 1..120: mol_type = other DNA
attatgtgctaaagaatgacatcatattttttaaatttgaagccatttaaaagatagctctcagccgggcatggtggctcatgcctgtaatcccagcactttgggaggctgaggtgggta

SEQ ID NO: 117762 - DNA, 120 bp, synthetic construct; identical to SEQ ID NO: 15159
  source 1..120: mol_type = other DNA

SEQ ID NO: 117763 - DNA, 120 bp, synthetic construct; identical to SEQ ID NO: 15160
  source 1..120: mol_type = other DNA

SEQ ID NO: 117764 - DNA, 120 bp, synthetic construct
  source 1..120: mol_type = other DNA
atctgggagggaggtgggggggcagcccctgcccagccagccgctccgtctgggaggtgggggggcgcctctgtccagccaccccgtctgggaagtgaggagcccctctgcccggccacc

SEQ ID NO: 117765 - DNA, 120 bp, synthetic construct
  source 1..120: mol_type = other DNA
ctgttgtggaccacaggctcatgcaaccatgcctggctaatatgtttgtaaagacgaggtttcgccatgttgcctaggctggtctcaaactcctgagctcaagtgatccacccacaccgg

SEQ ID NO: 117766 - DNA, 120 bp, synthetic construct
  source 1..120: mol_type = other DNA
ctctgccccaccgccccgtctgggatgtgagtgcctctgcccggccgcgaccccgtctgggaggtgaggagcgtctctgcccagccgccccgtctgagaagtgaggagaccctccgcctg

SEQ ID NO: 117767 - DNA, 120 bp, synthetic construct; identical to SEQ ID NO: 15161
  source 1..120: mol_type = other DNA

SEQ ID NO: 117768 - DNA, 120 bp, synthetic construct; identical to SEQ ID NO: 15162
  source 1..120: mol_type = other DNA

SEQ ID NO: 117769 - DNA, 120 bp, synthetic construct
  source 1..120: mol_type = other DNA
gcctgcagagtgcctgcgattgcaggcgcgcgccgccacgcctgactggttttcgttttttttttttttggtggagacggggttttgctgtgttggccgggccagtctccagcccctaac

SEQ ID NO: 117770 - DNA, 120 bp, synthetic construct
  source 1..120: mol_type = other DNA
gggaagtggggagcccctctgcccggccacgaccccgtctgggaggtgtgcccagcggctcattggggatgggccatgatgacaatggcggttttgtggaatagaagggcgggaagggtg

SEQ ID NO: 117771 - DNA, 120 bp, synthetic construct
  source 1..120: mol_type = other DNA
atcgtgccactgcactctagcctgggtgacagcgagaccttgtctcaaaaaaaaaaagaagaatataataatgtaagagcttaaacattacctagacagttgaagctccccagctgtctc

SEQ ID NO: 117772 - DNA, 120 bp, synthetic construct
  source 1..120: mol_type = other DNA
ttcccagacggggcggctgccgggcggaggggctcctcacttctcagacggggcagccggtcggagacactcctcacctcccagacagggtcgcggccgggcagaggcgctcctcacatc

SEQ ID NO: 117773 - DNA, 120 bp, synthetic construct
  source 1..120: mol_type = other DNA
cccatgactgggtatatacccaaagggttataaatcatgcctctataaagacacatgcacacgtatgtttatagcggcactattcacaatagcaaagacttggaaccaacccaaatgtcc

SEQ ID NO: 117774 - DNA, 120 bp, synthetic construct
  source 1..120: mol_type = other DNA
tgttatggtaacactgtattggtggattttttttttttggcaaccagttgcaattaaaatattctttggatgtccatcagtgatagactggattaagaaaatgtggcacatatacactgt

SEQ ID NO: 117775 - DNA, 120 bp, synthetic construct; identical to SEQ ID NO: 21788
  source 1..120: mol_type = other DNA

SEQ ID NO: 117776 - DNA, 120 bp, synthetic construct; identical to SEQ ID NO: 21789
  source 1..120: mol_type = other DNA

SEQ ID NO: 117777 - DNA, 120 bp, synthetic construct
  source 1..120: mol_type = other DNA
actttttgatggggttgtttgtttttttcttgtgaatttgtttgagttcatggtagattatggatattagccctttgtcaggtgagtaggttgcgaaaattttctcccattctgtaggtt

SEQ ID NO: 117778 - DNA, 120 bp, synthetic construct
  source 1..120: mol_type = other DNA
caccaccgatcccacagaaatacaaactaccatcagagaatactaaacacctctaagcaaataaactagaaaatccagaagaaattgataaattcctcgacacatacactctcccaagac

SEQ ID NO: 117779 - DNA, 120 bp, synthetic construct
  source 1..120: mol_type = other DNA
tgtacaaaaatcacaagcattcttatacaccaacaacagacaaacagagagccaaatcatgagtgaactcccattcacaattgcttccaagagaataaaatacctaggaatccaacttac

SEQ ID NO: 117780 - DNA, 120 bp, synthetic construct
  source 1..120: mol_type = other DNA
gaagcaaggacatcccagtagaaactggaatggggagttatattccacctccttgagggtaaaggcactatataaaatatttggcattcttctgctaaggaaacttatctgtgttccctt

SEQ ID NO: 117781 - DNA, 120 bp, synthetic construct; identical to SEQ ID NO: 21790
  source 1..120: mol_type = other DNA

SEQ ID NO: 117782 - DNA, 120 bp, synthetic construct; identical to SEQ ID NO: 21791
  source 1..120: mol_type = other DNA

SEQ ID NO: 117783 - DNA, 120 bp, synthetic construct
  source 1..120: mol_type = other DNA
gcttgaactgggtggagcccaccacagctcaaggaggccagcctgcctctgtaggctccacctctgggggcagggcacagacaaacaaaaagacagcagtaacctctgcagacttaaatg

SEQ ID NO: 117784 - DNA, 120 bp, synthetic construct
  source 1..120: mol_type = other DNA
ctctcggcagaaactctacaagccagaagacagtgggggccaatattcaacattcttaaagaaaagaactgtcaactcagaatttcatatccagccaaactaagcttcataagtgaagga

SEQ ID NO: 117785 - DNA, 120 bp, synthetic construct
  source 1..120: mol_type = other DNA
cctgaatgactactgggtacataacgaaatgaaggcagaaataaagatgttatttgaaaccaacgagaacaaagacacaacataccagaatctctgggacacattcaaagcagtgtgtag

SEQ ID NO: 117786 - DNA, 120 bp, synthetic construct
  source 1..120: mol_type = other DNA
agcacatcaaaaagcttatccaccatgatcaagtgggcttcatccctgggatgcaaggctggttcaatatacgcaaatcaaatgtaatccagcatataaacagaaccaaagacaaaaacc

SEQ ID NO: 117787 - DNA, 120 bp, synthetic construct
  source 1..120: mol_type = other DNA
gagatatagatcaatggaacagaacagagccctcagaaataatgccacatatctacaactatctgatctttgacaaacctgagaaaaacaagcagtggggaaaggattccctatttaata

SEQ ID NO: 117788 - DNA, 120 bp, synthetic construct
  source 1..120: mol_type = other DNA
attatcgcaaggacaaaaaaccaaacaacgcatattctcactcatagatgggaactgaacaatgagaacacatggacacaggaaggggaacatcacactctggggactgttgtggggtgg

SEQ ID NO: 117789 - DNA, 120 bp, synthetic construct
  source 1..120: mol_type = other DNA
aagtggtcaagtattagctattccatatggttcaaactaaaagtaatgcctacataggatgaacataggaaaagagacatttggccaggtatggtggctcacacctgtaagcccagcact

SEQ ID NO: 117790 - DNA, 120 bp, synthetic construct; identical to SEQ ID NO: 31699
  source 1..120: mol_type = other DNA

SEQ ID NO: 117791 - DNA, 120 bp, synthetic construct; identical to SEQ ID NO: 11064
  source 1..120: mol_type = other DNA

SEQ ID NO: 117792 - DNA, 120 bp, synthetic construct
  source 1..120: mol_type = other DNA
gggcggctggcctggcgggggctgacccccacctccctcccggacagggtggctgccgggcggagacgctcctcacttcccagacggggtggcagccgggcggagggtctcctcacttct

SEQ ID NO: 117793 - DNA, 120 bp, synthetic construct; identical to SEQ ID NO: 27200
  source 1..120: mol_type = other DNA

SEQ ID NO: 117794 - DNA, 120 bp, synthetic construct; identical to SEQ ID NO: 18026
  source 1..120: mol_type = other DNA

SEQ ID NO: 117795 - DNA, 120 bp, synthetic construct
  source 1..120: mol_type = other DNA
aatactgtcagatgtgggaacagaaatgaaagtagactcgttgccccagaaaaatcagacatgaattttccacctgggtgttatttaaaaatcaatgacaatataaaccagcactagagg

SEQ ID NO: 117796 - DNA, 120 bp, synthetic construct
  source 1..120: mol_type = other DNA
atttttagtagagatggggtttcaccatgtcagccaggatggtcttgatcttttgacctcgtgatctgcctgcctcagcctccaaagtgctgggattacaggcgtgaggctctgtgcctc

SEQ ID NO: 117797 - DNA, 120 bp, synthetic construct
  source 1..120: mol_type = other DNA
gagtctctcactttgttgcccaggcttgtctcaaactcctgagttcaaacgaccctccttttggatcttaggctccaaaagtgctgggattacaggcatgagtcaccatgcctggtcaca

SEQ ID NO: 117798 - DNA, 120 bp, synthetic construct; identical to SEQ ID NO: 478
  source 1..120: mol_type = other DNA

SEQ ID NO: 117799 - DNA, 120 bp, synthetic construct; identical to SEQ ID NO: 479
  source 1..120: mol_type = other DNA

SEQ ID NO: 117800 - DNA, 120 bp, synthetic construct
  source 1..120: mol_type = other DNA
tgaacaaaagccaaaaatacaggaacggtccagactttccaaagaggccccttactgcttacaatcgcttcttcaaggagagttggccccagtactcccaaatgtaccctgggatgagaa

SEQ ID NO: 117801 - DNA, 120 bp, synthetic construct
  source 1..120: mol_type = other DNA
ttttgtttgtttgttttcttttcttccttcctcccgcaaagtaggacaggttgggaagaaagaagcaacttggtgcagcactctcctacatcaagattatgaacctgggaggaactcttt

SEQ ID NO: 117802 - DNA, 120 bp, synthetic construct
  source 1..120: mol_type = other DNA
ttctggctattttcatacttcgttctcatgaatattagcatcacagaactagttgtattctttttgtataaaaaccattgaataatgagtgtttattttgtccctagatatcttaggaaa

SEQ ID NO: 117803 - DNA, 120 bp, synthetic construct
  source 1..120: mol_type = other DNA
ggctcactgcaagctccacctcccgggttcatgccattctcctgcctcagcctcccgagtagctgggactacaggctcccgccaccactcctgactaattttttttgtatttttattaga

SEQ ID NO: 117804 - DNA, 120 bp, synthetic construct
  source 1..120: mol_type = other DNA
tccatgtgatctcattgttcaattcccacctatgagtgagaatatgtggtgtttggttttttgttcttgcgatagtttactgagaatgatgttttccaatttcatccacgtccctacaaa

SEQ ID NO: 117805 - DNA, 120 bp, synthetic construct
  source 1..120: mol_type = other DNA
tctgccagggtttttatggttttaggtctaacgtttaagtctttagtccatcttgaattgatttttgtataaggtgtaaggaagggatccagtttcagctttctacatatggctagccag

SEQ ID NO: 117806 - DNA, 120 bp, synthetic construct
  source 1..120: mol_type = other DNA
tatgatattggctgtgagtttgtcatagatagctcttattattttgaaatacgtcccatcaatacctaatttattgagagtttttagcatgaagggttgttgaattttgtcaaaggcttt

SEQ ID NO: 117807 - DNA, 120 bp, synthetic construct
  source 1..120: mol_type = other DNA
atcacttcaacctaggaggcggaggttgcagtaagctgagacctcaccactgcactctagcctgggcaacagagcaagactctgtctcaaaaaaaaaaaaattatttgtataaatgtgtg

SEQ ID NO: 117808 - DNA, 120 bp, synthetic construct
  source 1..120: mol_type = other DNA
attgttactgctaaaaggaagggtgcaaagacacaattttcaaacaaaacaacaatattgggagggaataaaagagtcttgaataggccaggtgcagtggctcacacctgcaatcccagc

SEQ ID NO: 117809 - DNA, 120 bp, synthetic construct
  source 1..120: mol_type = other DNA
gcaaggagttcgagaccaccctgggcaacacagcaagaccccatctctaaaaagatttaaaataattgaatatatgcaatttaaaaagagagagtcttaaaaataatctaagtataccaa

SEQ ID NO: 117810 - DNA, 120 bp, synthetic construct; identical to SEQ ID NO: 25034
  source 1..120: mol_type = other DNA

SEQ ID NO: 117811 - DNA, 120 bp, synthetic construct; identical to SEQ ID NO: 25035
  source 1..120: mol_type = other DNA

SEQ ID NO: 117812 - DNA, 120 bp, synthetic construct; identical to SEQ ID NO: 8976
  source 1..120: mol_type = other DNA

SEQ ID NO: 117813 - DNA, 120 bp, synthetic construct; identical to SEQ ID NO: 8977
  source 1..120: mol_type = other DNA

SEQ ID NO: 117814 - DNA, 120 bp, synthetic construct; identical to SEQ ID NO: 22734
  source 1..120: mol_type = other DNA

SEQ ID NO: 117815 - DNA, 120 bp, synthetic construct; identical to SEQ ID NO: 22735
  source 1..120: mol_type = other DNA

SEQ ID NO: 117816 - DNA, 120 bp, synthetic construct; identical to SEQ ID NO: 22736
  source 1..120: mol_type = other DNA

SEQ ID NO: 117817 - DNA, 120 bp, synthetic construct; identical to SEQ ID NO: 10029
  source 1..120: mol_type = other DNA

SEQ ID NO: 117818 - DNA, 120 bp, synthetic construct; identical to SEQ ID NO: 10030
  source 1..120: mol_type = other DNA

SEQ ID NO: 117819 - DNA, 120 bp, synthetic construct; identical to SEQ ID NO: 10031
  source 1..120: mol_type = other DNA

SEQ ID NO: 117820 - DNA, 120 bp, synthetic construct; identical to SEQ ID NO: 23522
  source 1..120: mol_type = other DNA

SEQ ID NO: 117821 - DNA, 120 bp, synthetic construct; identical to SEQ ID NO: 32924
  source 1..120: mol_type = other DNA

SEQ ID NO: 117822 - DNA, 120 bp, synthetic construct; identical to SEQ ID NO: 21437
  source 1..120: mol_type = other DNA

SEQ ID NO: 117823 - DNA, 120 bp, synthetic construct
  source 1..120: mol_type = other DNA
cttgcattcctgggataaagttcatgtggtcacgattcatgatataagatcctttcttttaaatttttttagtatttattgatcattcttgggtgtttctcggagagcgggatttggcgg

SEQ ID NO: 117824 - DNA, 120 bp, synthetic construct
  source 1..120: mol_type = other DNA
cgtgtgcaatcccggcacctcgggaggccaaggctggcagatcactcacggttaggagctggagaccagcctggccgacacggcgaaaccccgtctccaccaaaaaaatatgaaaaccag

SEQ ID NO: 117825 - DNA, 120 bp, synthetic construct
  source 1..120: mol_type = other DNA
gttggacatttcggttggttccaagtctttgctactgtgaacaatgccgcaataaacatatgtgtgcatgtgtctttatagcaccatgatttatagtcctttgggtatatacccagtaat

SEQ ID NO: 117826 - DNA, 120 bp, synthetic construct
  source 1..120: mol_type = other DNA
ttaggattgacttggtgatgcgggctcttttttggttccatatgaactttaaagtatacattatctttaagaagatttattgttttgccttttatgtttagctctataatccatctggaa

SEQ ID NO: 117827 - DNA, 120 bp, synthetic construct
  source 1..120: mol_type = other DNA
caagaagaacaaccccaagacacataatcgtgagattcaccaaagttgaaatgaaggaaaaactgttaagggcatttccagttctagatccctgaggaatcgccacactgacttccacaa

SEQ ID NO: 117828 - DNA, 120 bp, synthetic construct
  source 1..120: mol_type = other DNA
tcactcataggtgggaattgaacaatgagatcacgtggacacaggaaggggaatatcacatactggggactgttgtggggtggggggaggggggagggatagcatcgggagatataccta

SEQ ID NO: 117829 - DNA, 120 bp, synthetic construct
  source 1..120: mol_type = other DNA
tccctgggtacttgagattcgggagtggtgatgactcttaacgaacatgctgccttgcagggtctgtttaacaaagcacatcttgcaccgcccttaatccatttaacccttagtggacac

SEQ ID NO: 117830 - DNA, 120 bp, synthetic construct
  source 1..120: mol_type = other DNA
cagaggtgctcttcacagcccagacggggcggcggggcaaaggcgctccccacatcccagaaggtgggtagccgggcagagacgctcctcacttcctagacgggatgacggccgggaaga

SEQ ID NO: 117831 - DNA, 120 bp, synthetic construct; identical to SEQ ID NO: 13861
  source 1..120: mol_type = other DNA

SEQ ID NO: 117832 - DNA, 120 bp, synthetic construct
  source 1..120: mol_type = other DNA
gaaatcatcattctcagtaaactatcacaaggacaaaaaaccaaacaccgccatgttctcactcataggtgggaattgaacaatgagaacacatggacacaggaaggggaacatcacact

SEQ ID NO: 117833 - DNA, 120 bp, synthetic construct; identical to SEQ ID NO: 13862
  source 1..120: mol_type = other DNA

SEQ ID NO: 117834 - DNA, 120 bp, synthetic construct
  source 1..120: mol_type = other DNA
gcgtgctgcatccagtaactcgtcatttaacattaggtatatctccaaatgctatccttccccccattgtatttttcatagcttaaaaatcattgacatagaataattcagctaaagtac

SEQ ID NO: 117835 - DNA, 120 bp, synthetic construct
  source 1..120: mol_type = other DNA
catctcagtctcatgagaagctaggactacaactgcacaccaccatgcctggctatatttttttattttttacacttttagatatgaggtgttgctgtagtgcccatactggtctggaac

SEQ ID NO: 117836 - DNA, 120 bp, synthetic construct
  source 1..120: mol_type = other DNA
taacctgatttctgatatcatagattagtattgtttatataattgaattaaataatacatattcatttctgtttttggttagcagttgtttaatagcattggtgtagagagtattcagtt

SEQ ID NO: 117837 - DNA, 120 bp, synthetic construct
  source 1..120: mol_type = other DNA
aatttaatgtgagtactggtaggttcacttttttgtttttttgcttttttgtttttttttgagatggagtctcgctctgtcaccaggagttcagtggcactatctcggctcactgcaacc

SEQ ID NO: 117838 - DNA, 120 bp, synthetic construct
  source 1..120: mol_type = other DNA
aatgtaaaaagctttcctatttctccccagcttcaccaggatctgttgttttttgactttttaatcatcgccattctgactggcatgagattgtatctcattgtggttttgatttgcatt

SEQ ID NO: 117839 - DNA, 120 bp, synthetic construct
  source 1..120: mol_type = other DNA
tagtttttttctaattctgtgaggaatgtcaatggtagtttgatgggaatagctttgaatatataaaatactttgggcagcatggccatttttacaatattgattctttttatccatgag

SEQ ID NO: 117840 - DNA, 120 bp, synthetic construct
  source 1..120: mol_type = other DNA
aacattgaaacctttgtatttcaaaaggcatcttccaaaaagtaaaaaaaaaaatctatctgtccatagtggaagaaaatatttgaaaatcacatatttgataagggattgtatctataa

SEQ ID NO: 117841 - DNA, 120 bp, synthetic construct
  source 1..120: mol_type = other DNA
ttatgtacatatctttaatttttttgattttataattcattgcagtcattggtgacccattaaatctgtggggttgaaatgtaactttgaaataattgtctggtggaaaataagagcaga

SEQ ID NO: 117842 - DNA, 120 bp, synthetic construct
  source 1..120: mol_type = other DNA
gacagacagaaaatccaggatgttatttaaaacctgtgagaggaaattacacctgaacaaagagatttttattctgaccataaagaatgtgactgtatgtaataaaatgccaactactat

SEQ ID NO: 117843 - DNA, 120 bp, synthetic construct
  source 1..120: mol_type = other DNA
ttggtaaccatgaagagattctgagtggaggttccctgacctttgataaatgtcctatcagtgcttggtaccagcatgagctaaatttatggctcaaacaaagaagacaattggctgagg

SEQ ID NO: 117844 - DNA, 120 bp, synthetic construct
  source 1..120: mol_type = other DNA
cttgaactcttttaaagaattcagaacaaaggcaccactcacccctttaggggtgtctgttttctttgtggagttccaagagttgtgggcagatttttttctcagtccaaagctctgttt

SEQ ID NO: 117845 - DNA, 120 bp, synthetic construct
  source 1..120: mol_type = other DNA
ataaaaaccacactatggattcaacaggtttttgtctgcaagctggtcaattttttttatctcatggctaaagttctgaagtaaaagccatagaatcttttgtgtgtgtgtacatgtgtt

SEQ ID NO: 117846 - DNA, 120 bp, synthetic construct
  source 1..120: mol_type = other DNA
cttctaaccctgtggccttaagcaatctagtccacaggcagtaaggtttgttttgggaaaaaactgttatcatttttatttcaaagctaaaccataaagggtgtgaaatggcaacactat

SEQ ID NO: 117847 - DNA, 120 bp, synthetic construct
  source 1..120: mol_type = other DNA
agccataaaattctaacaggtgctcttgaaaaaaagtttttgataattttggagattgtgacattagaatggaagaaaaactttcaggactcatggagaactaaaatgttcatgagtatc

SEQ ID NO: 117848 - DNA, 120 bp, synthetic construct
  source 1..120: mol_type = other DNA
gtaaactaagctatgctttcataaagccctacaaattaagctagacaacttaaactccagaagaaaataacagcaaccaatttacatacataatccactttcatacctgcctactgattt

SEQ ID NO: 117849 - DNA, 120 bp, synthetic construct; identical to SEQ ID NO: 25493
  source 1..120: mol_type = other DNA

SEQ ID NO: 117850 - DNA, 120 bp, synthetic construct; identical to SEQ ID NO: 25494
  source 1..120: mol_type = other DNA

SEQ ID NO: 117851 - DNA, 120 bp, synthetic construct; identical to SEQ ID NO: 25495
  source 1..120: mol_type = other DNA

SEQ ID NO: 117852 - DNA, 120 bp, synthetic construct
  source 1..120: mol_type = other DNA
ttaactttatgacatcttttttttttttccagatggagtctttctctgtcacccaggctggagtgcaatgatgcaatcttggctcattgcaacctctgcctcccaggttaaagcaattct

SEQ ID NO: 117853 - DNA, 120 bp, synthetic construct
  source 1..120: mol_type = other DNA
tgtgagtatattataaaggcaatgcctatatgcatttttcaaacacttgatactttttggcaagagtcttattcttttgaaatatacaaacattatctgagaatctaatacataatggaa

SEQ ID NO: 117854 - DNA, 120 bp, synthetic construct
  source 1..120: mol_type = other DNA
taactactttttttccacacagcacaatatgaagttgtgattattattataaaagtagtcatgattgcttaaactcatgtaaaagttcctaaatgatctttacattttacaaacttgcct

SEQ ID NO: 117855 - DNA, 120 bp, synthetic construct
  source 1..120: mol_type = other DNA
ttattttattttttatttttgttagagatgaggttttaccacgtttcccaggctggtctcaaactcctgagcccaagcaatcatgccttctctgcctcccaaagtgcagggattataggt

SEQ ID NO: 117856 - DNA, 120 bp, synthetic construct
  source 1..120: mol_type = other DNA
tctttaatgtaacatcagtatattcacaatcataaataattattaaaataagtcactaatatggtttgactgtccccacccaaatctcctctcatcttgaattataatccccataatccc

SEQ ID NO: 117857 - DNA, 120 bp, synthetic construct
  source 1..120: mol_type = other DNA
gaaactgaggaactcaaagagaaacaaattcctcaatcctgcattgataatttttctagaaatatgtgtaaatactaaatttatgtgtctgccttcatgaagatgtttcttgaggtatct

SEQ ID NO: 117858 - DNA, 120 bp, synthetic construct
  source 1..120: mol_type = other DNA
tgtgggccacactagcacctttccacagcttccagagctaaagtaacaactgagctgtatcagcagaaagactgacgtccatttcagagacatcctggtcttatgcaatgcttcttttcc

SEQ ID NO: 117859 - DNA, 120 bp, synthetic construct
  source 1..120: mol_type = other DNA
caagctttcggaaacaaaacaggcaaaattttgtgatgataaatatcacagttgccacgcaggccagcaggaatgctatcacatccaaagagtggtactggatccaggtgaggttgtgag

SEQ ID NO: 117860 - DNA, 120 bp, synthetic construct
  source 1..120: mol_type = other DNA
agcttctactctaatcttctgtcttctaccgtattttcctactagtagccagaacattttctaaattaatgtcaaattatgacagttgcctgtcaagatttccatctggtttcttgttac

SEQ ID NO: 117861 - DNA, 120 bp, synthetic construct
  source 1..120: mol_type = other DNA
cattttctggatgatttataatttgattctagtatgactagaacatactatttttatgaatttgaatcttatacaatttacttagcatttttttatggcccagcatatggtcaattccag

SEQ ID NO: 117862 - DNA, 120 bp, synthetic construct
  source 1..120: mol_type = other DNA
ttacataggtatatgtgtgccatggtggtttgcagcacctatcaatctgtcatctagattttaagtccctcatgtattagctatttgtcctgatactctcactcccattccatgccccga

SEQ ID NO: 117863 - DNA, 120 bp, synthetic construct
  source 1..120: mol_type = other DNA
tctttaatccatcttgagttaatttttgtataaggtgtaaggcaggggtatagtttctgttttttgcatatggccagccagtttccccagcaccatttattaaatagggaatcctttccc

SEQ ID NO: 117864 - DNA, 120 bp, synthetic construct
  source 1..120: mol_type = other DNA
tgtgaattcccttccctagccaaggataggggtaacagatggcacctggaaaattgggttactcccaccctaatactgcgcttttccaaaaggttttagcaaacggcacaccaggagatt

SEQ ID NO: 117865 - DNA, 120 bp, synthetic construct
  source 1..120: mol_type = other DNA
aacggtatcagtgatggaagatgaaatgaatgaaatgaagcaagaagagaagtttagacaaaaaagaataaaaagaaatgaacaaagcctccaagaaatatgggactatgtgaaaagacc

SEQ ID NO: 117866 - DNA, 120 bp, synthetic construct
  source 1..120: mol_type = other DNA
cttagatacctacaaagagacttagactcccacacaataataatgggacactttaacaaaccaccgtcaacattagacagatcaacgagaaaaagttaacaaggatatccaagaattgaa

SEQ ID NO: 117867 - DNA, 120 bp, synthetic construct
  source 1..120: mol_type = other DNA
attgatagactgctagcaagactaataaagaagaaaagagagacgaatcaaatagatggaataaaaatgattaagggggtatcaccaccgattccagagaaatacaaactaccatcagag

SEQ ID NO: 117868 - DNA, 120 bp, synthetic construct
  source 1..120: mol_type = other DNA
gggatgccctctctcaccactcctattcaacacagtgttggatgttctggccaggagaataaggcaggataaggaaatacagggtattcaattaggaaaagaggaagtcaaattgtccct

SEQ ID NO: 117869 - DNA, 120 bp, synthetic construct
  source 1..120: mol_type = other DNA
acctaggcaataccattcaggacataggcatgggcaaggacttcatgactaaaacaccaaaagcaatggcaacaaaagccaaaattgacaaatgggatctcattaaactaaagagcttct

SEQ ID NO: 117870 - DNA, 120 bp, synthetic construct
  source 1..120: mol_type = other DNA
gtgcagcacaccaacatggcacatgtatacatatgtagcaaagctgcaccttgtgcacagataccctaaaacttaaagtataataaaaaaaattactttgggcagcatggccatttttac

SEQ ID NO: 117871 - DNA, 120 bp, synthetic construct
  source 1..120: mol_type = other DNA
aaccttcatgtttcaaaaggcatcctccaaaaagtaaaaaaaaaaaaaaatctatctgcccatagtggaagaaaatatatgaaaatcgtatatttgataagggatagtatctataacata

SEQ ID NO: 117872 - DNA, 120 bp, synthetic construct
  source 1..120: mol_type = other DNA
ttaatgactgacttcaatgcattgagcaaatctctacttgacatggtcctgatgtccacactgagggctgctcccttggctttcatgtgagcaatgttatcatgttgatccgcaaacaag

SEQ ID NO: 117873 - DNA, 120 bp, synthetic construct; identical to SEQ ID NO: 117842
  source 1..120: mol_type = other DNA

SEQ ID NO: 117874 - DNA, 120 bp, synthetic construct
  source 1..120: mol_type = other DNA
tcacattttggtaaccatgaagagactctgagtggaggttccctgacctttgataaatgtcctgtcagtgcttggtaccagcatgagctaactttatggctcaaacaaataagacaattg

SEQ ID NO: 117875 - DNA, 120 bp, synthetic construct
  source 1..120: mol_type = other DNA
aatgatttgaactcttttaaagaattcagaacaaaggcaccactcacccctttgggggtgctctgttttctttgtggagtttcaagagttgtgggcagattttttcttaggtccaaagct

SEQ ID NO: 117876 - DNA, 120 bp, synthetic construct
  source 1..120: mol_type = other DNA
aaaaccactgttttgattcaacaggtttttgtctgcaagctggtgatttttttttatctcatagctaaatttctgaagtaaaaaccacataatcttttgtgtgtgtgtaagtgtttgcat

SEQ ID NO: 117877 - DNA, 120 bp, synthetic construct
  source 1..120: mol_type = other DNA
cctccttaagttagtttggcctacacccagaaataaacacggagagcttggaggttaaaagcaagatggagttaggtcagatctttttcactgtctcagttataattttgcaatggcaat

SEQ ID NO: 117878 - DNA, 120 bp, synthetic construct
  source 1..120: mol_type = other DNA
gctattcaactcctcaaggtccagggactatcacagaagaggtgggtgtgtgagattgaaagaactgatactaagagataaaataagttccgtttatgcataaattaatcattaatgtca

SEQ ID NO: 117879 - DNA, 120 bp, synthetic construct
  source 1..120: mol_type = other DNA
atggactgaaataatagaaaactaaagtaatctttttgactttgcttaaaacattgctgatcctttgttttgttttgtttttttttttagagtgaaggaatctttctttttttgagctat

SEQ ID NO: 117880 - DNA, 120 bp, synthetic construct
  source 1..120: mol_type = other DNA
tttcctccccttccacaatttttcctaatttggagtcactgtaaactaagctatgctttcataaagccctacaaattaagctagacaacttaaactccagaagaaaataacagcaaccaa

SEQ ID NO: 117881 - DNA, 120 bp, synthetic construct; identical to SEQ ID NO: 25485
  source 1..120: mol_type = other DNA

SEQ ID NO: 117882 - DNA, 120 bp, synthetic construct; identical to SEQ ID NO: 25486
  source 1..120: mol_type = other DNA

SEQ ID NO: 117883 - DNA, 120 bp, synthetic construct
  source 1..120: mol_type = other DNA
gaatgatattatatctacatttatttagcttctagctctctaaccctttatatttcacttaaagttagggtttcctagtcttaccccactacccctcactgcccccgacacccccacccc

SEQ ID NO: 117884 - DNA, 120 bp, synthetic construct
  source 1..120: mol_type = other DNA
tgacctcatgatccacctgcctcggcctcccaaagtggtgggattacaggcttgagccactgtgcccggtctgatatcagttttaattggagattcagtgtatggctattagagttaatt

SEQ ID NO: 117885 - DNA, 120 bp, synthetic construct
  source 1..120: mol_type = other DNA
aagaattagagaatcggtttcacaattatttacttagattcaagtctaccttttgcaggttaacaacaacagccagtgccgggcacggaggctcacacttgtaatcccagcactttggaa

SEQ ID NO: 117886 - DNA, 120 bp, synthetic construct
  source 1..120: mol_type = other DNA
atatatatatatattttttttttttgagacagagtctcactctgttgcccaggctgttgtgcaatagcatgatctcggctctctgcaacctctgcctcccgcgttcaagcgattctcctg

SEQ ID NO: 117887 - DNA, 120 bp, synthetic construct
  source 1..120: mol_type = other DNA
gtactcactttaattgtcaatgagtttgggatctcttctgcatatttctttatcattgtggtctttccttataacactttttagacttttctttttcacttgtttttattctatctttca

SEQ ID NO: 117888 - DNA, 120 bp, synthetic construct; identical to SEQ ID NO: 25487
  source 1..120: mol_type = other DNA

SEQ ID NO: 117889 - DNA, 120 bp, synthetic construct; identical to SEQ ID NO: 25488
  source 1..120: mol_type = other DNA

SEQ ID NO: 117890 - DNA, 120 bp, synthetic construct; identical to SEQ ID NO: 25489
  source 1..120: mol_type = other DNA

SEQ ID NO: 117891 - DNA, 120 bp, synthetic construct; identical to SEQ ID NO: 25490
  source 1..120: mol_type = other DNA

SEQ ID NO: 117892 - DNA, 120 bp, synthetic construct
  source 1..120: mol_type = other DNA
ggcctggagccaggctgcctgtctttggttttacttctttgttgttttttcttaaaacaggtactgagcataaaacaatataaaataatctgagagggtccttctcttccttcattcccc

SEQ ID NO: 117893 - DNA, 120 bp, synthetic construct
  source 1..120: mol_type = other DNA
taagctttgtgtccacatatatccagtataatccggtgggggccgtccagtcccagtggaattctgggtgggcccaaacagtctgcaactttggaaatttactgaatggatttctttctg

SEQ ID NO: 117894 - DNA, 120 bp, synthetic construct
  source 1..120: mol_type = other DNA
catgctgcttactattaatagcggcacaagtgtcaaattttaaggttacattttgaggagctctgtttttttcggttctacctattaccttacttgtgtcacatagaaaaggagcagtcc

SEQ ID NO: 117895 - DNA, 120 bp, synthetic construct
  source 1..120: mol_type = other DNA
ttaggtttttcctaagagttagcttatttgcttcttgtgttaacagggctgttgctgccagggcccttggacatgggggccagcctttggaaaccccgtctagttgttttgagagacagg

SEQ ID NO: 117896 - DNA, 120 bp, synthetic construct
  source 1..120: mol_type = other DNA
gtagtgggaaggggacaattagggcctctggcctgccatgtgcacaagcataacaattgcttttgtttattgtgtagttggaatatttgatccatttcaaccaggcatttgtagcttgat

SEQ ID NO: 117897 - DNA, 120 bp, synthetic construct
  source 1..120: mol_type = other DNA
agtgaactttctttatgtctttggactagactgtctaaggccacaagattagaagttaccataatatgtgttacactgtcaacttttagcaaacttcgcttttgttgaaaaccttgtaag

SEQ ID NO: 117898 - DNA, 120 bp, synthetic construct
  source 1..120: mol_type = other DNA
gttccttcccggtgttcagccactgtgttaatcctccacgggggcctgctacgtgttgatctggtgaggtgttccactggggcaatttcctacccaggagcgctctttggatctcatcac

SEQ ID NO: 117899 - DNA, 120 bp, synthetic construct
  source 1..120: mol_type = other DNA
gacttgacttgaattgctggatactttggtttcggtttttggcctggcttgaatttctgggtatgctgattttggttttgattttggtttggtataaactgcaaaagtgtgtgtgtgccc

SEQ ID NO: 117900 - DNA, 120 bp, synthetic construct
  source 1..120: mol_type = other DNA
aagttgagacatgttgaagaattgtcagtggaagtcgtgaaaaaaagttataaaaatttatgcaaaaaggttttataatttaaaagtaatttggcctcttgagtactattgaagaaacag

SEQ ID NO: 117901 - DNA, 120 bp, synthetic construct
  source 1..120: mol_type = other DNA
tctctcacagcagggaggagacagcattccttagagacctgaaaggatgcagtgagcttaagaattttcgaaaggttatcaatcagtcagccgttgttcatccccgagcagatgtgtggt

SEQ ID NO: 117902 - DNA, 120 bp, synthetic construct
  source 1..120: mol_type = other DNA
tcagtttattctagtaggcccaacctccgagacaatccttaaccatcagtagactaggagttgtatgtagataggagcagcgtcaccaacccctgcaaagtgactctgaagaagactaca

SEQ ID NO: 117903 - DNA, 120 bp, synthetic construct
  source 1..120: mol_type = other DNA
tgtaacattagacattaacagaaaaagactagatcctagtgtaagcatcctaataaaagaagaagttcaagaacactatccagaaccagtatttcagactttctatgatgaactaaatgt

SEQ ID NO: 117904 - DNA, 120 bp, synthetic construct
  source 1..120: mol_type = other DNA
atcaaggacaagtagttgaggatatagttaaagacataacaaaactggcacatgtacccatgcaagtgtggcacggacacaatctggaagccatgtttaaaaattagttcccagcaatag

SEQ ID NO: 117905 - DNA, 120 bp, synthetic construct
  source 1..120: mol_type = other DNA
agggatatttgcacatccatattcataacagcactattacaaaagctcagaccttgaaacaatcccagcatctatctgagcaaagtgtaggaacaaccgggtccgactggtctaaaatga

SEQ ID NO: 117906 - DNA, 120 bp, synthetic construct
  source 1..120: mol_type = other DNA
ccaaaaggcactcctgcaaagtttaagggaaggcgggagaaaggcaatcaatatagggaaaaatctcataggtgcttcagggtgcatatgaaagccccagccagttttataaaagactta

SEQ ID NO: 117907 - DNA, 120 bp, synthetic construct
  source 1..120: mol_type = other DNA
tcaaaaactgcaggtacagattacatttgggccacaagggaatgtaactttaaatctacctcacccggaggctatgatgttaacccgtactgtaccataggctgaagaatagaggctata

SEQ ID NO: 117908 - DNA, 120 bp, synthetic construct
  source 1..120: mol_type = other DNA
aagaagccttgactcaggccccaactttaggactgccagatctaactaagcctttctttttatatgtccatgagcaaaagggaatggccgtaagagttctaactcaagccataggattgt

SEQ ID NO: 117909 - DNA, 120 bp, synthetic construct
  source 1..120: mol_type = other DNA
catacctgaaatcttggcccccagatttgcaaaacagttccaaggaactcacatgagaaaaacggtgctagagacatgattagggtgtcatttctatgtgcaatggctcaccgctattac

SEQ ID NO: 117910 - DNA, 120 bp, synthetic construct
  source 1..120: mol_type = other DNA
ttgtttaggttaagaaatagactccaactattctgagccccatatgggacgggccccatattgtgatcttgtccactcccactgttgttaaaattgcaggtatcgtgccttggatccacc

SEQ ID NO: 117911 - DNA, 120 bp, synthetic construct
  source 1..120: mol_type = other DNA
tacctgggcacaagataggtcagggggtactgtacccctatttacatgcttaatcacatcataaggttgcaggtggtacttgaaatcatcactaatgagacagcaaatatgttagacttg

SEQ ID NO: 117912 - DNA, 120 bp, synthetic construct
  source 1..120: mol_type = other DNA
ttctctgtaactagtaacttcaagtattctgttttgtctaaaaggtactgcgaaggtcatgagacgcctgagaaggcctgaactacagctgtctgggcacctagtgaaggttataaggca

SEQ ID NO: 117913 - DNA, 120 bp, synthetic construct
  source 1..120: mol_type = other DNA
ttggccaatatctgataggaagatgtaatataaagaagggggatcaaatcctgcccttaaggtagacagaatctgtcaaggctttagagtgtaccatcaaagagttaacagccaacagaa

SEQ ID NO: 117914 - DNA, 120 bp, synthetic construct
  source 1..120: mol_type = other DNA
aaatgcaactgaaaaatgacagctcattttcatgatgatctcctgcattttctatgggagtaaatcctcggtctttatcatggagtgttggtaacacatttcatgatggagtgtggcctg

SEQ ID NO: 117915 - DNA, 120 bp, synthetic construct
  source 1..120: mol_type = other DNA
gaggttttaggatagtgcataagttctaaaatagccaaaaagtaaaataagaggaattactaaagatggtaacagaaggattataagaaagattgaggccaaagttgaagcagaaaacca

SEQ ID NO: 117916 - DNA, 120 bp, synthetic construct
  source 1..120: mol_type = other DNA
tgccctcttctgaaaaacacagttctccaactgtgtttttttaaataacaaggggagaagttacctccattgctattgctacagtgccatactttagcactttttggttttgacttggta

SEQ ID NO: 117917 - DNA, 120 bp, synthetic construct
  source 1..120: mol_type = other DNA
tgtaatgtagttatcaatcatttattatgatcagtctctgaagccattggaccaaaaactctcctggattgagtttgtcatgcaccacaatggagccacctaccaacagtctcacctggt

SEQ ID NO: 117918 - DNA, 120 bp, synthetic construct
  source 1..120: mol_type = other DNA
aactgagctcaactccaactaagacaaaggtaactgagacttttaaagaaaatccatttatgaataaaaaggaaatatgaggaaataaaaataaggaaaccaaaaacagagtagtgggct

SEQ ID NO: 117919 - DNA, 120 bp, synthetic construct
  source 1..120: mol_type = other DNA
gataataaaatgaattattataatgtctagaaaagagatatacactaaatattttactttactaaactttgaacacatagtcttgccactagaaagaaacaaatagccaagtacaagaaa

SEQ ID NO: 117920 - DNA, 120 bp, synthetic construct
  source 1..120: mol_type = other DNA
ctatcgatgtcaaggacaaatgctttatgtataagttttctgaattaatatctatgcagaatgcaatgtttcttaaaagataaaacaaatatgctaattaaaagtttccttcttatattc

SEQ ID NO: 117921 - DNA, 120 bp, synthetic construct
  source 1..120: mol_type = other DNA
gaataatcctcggtcaaataaggtgaactttgcagttggattaatccaccataatgaggacatgcaggttgcaagagttaagtcagaatgaaatacacttgagacaaacacattgaatag

SEQ ID NO: 117922 - DNA, 120 bp, synthetic construct
  source 1..120: mol_type = other DNA
cttgggtgaaaatcttccaactgcgtgtcactggttatttcctcatatggttttcttgaggaaatcttcaacatgtgttgatttctgcaacatccctcatattctctaatgtaagagaat

SEQ ID NO: 117923 - DNA, 120 bp, synthetic construct
  source 1..120: mol_type = other DNA
acagcataatttggaagactgtgttagaaaaggcagtacattatctctgtctctgttcgtctgtctgtctgtctctgtcttctacttataccttttcctctctttctctctccttctccc

SEQ ID NO: 117924 - DNA, 120 bp, synthetic construct
  source 1..120: mol_type = other DNA
gtgcatgtgtctttataatagaatgatgtattttaatcatttgggtatatgcccagcaatgggaatgctgagtcaaatggtatttctagttctagatccttgaagaatcactacactgtc

SEQ ID NO: 117925 - DNA, 120 bp, synthetic construct
  source 1..120: mol_type = other DNA
attttcacgatattgattcttcctatccatgagcatgggatgtttttccatttatttgtgtcctgtcttattttcttaagccgtggtttgtagatctccttgaagaggtcattcacatcc

SEQ ID NO: 117926 - DNA, 120 bp, synthetic construct
  source 1..120: mol_type = other DNA
atccatcttcatcaggcatattcgcctgaaattttcttttcttgttgtggttctgccaggttttggtatcaggatgatgctagcctcataaaatgagttagggaggactccctctttttc

SEQ ID NO: 117927 - DNA, 120 bp, synthetic construct
  source 1..120: mol_type = other DNA
ggtgtttcctgggacaacaggaagctgcacccttctgctgcattcagacagaagtgagactgctgggccggaagctctagcaaggatgatagcaatacaagttgattcttaattaattaa

SEQ ID NO: 117928 - DNA, 120 bp, synthetic construct
  source 1..120: mol_type = other DNA
attgtgaaatatgaaatatctgatcctttctccctctctcaaaaattctgtctgccaggtgtggtggctcacacctgtaatcccagcactttgggatgacaagatgtttggatcacctga

SEQ ID NO: 117929 - DNA, 120 bp, synthetic construct
  source 1..120: mol_type = other DNA
gtagaaaccatatcagtgtctttgttgatacaacactttcagcatcagatgtagtcagtaatcacaaattcaaattatattcctcacatttactattatcaatgcaagccacagccctat

SEQ ID NO: 117930 - DNA, 120 bp, synthetic construct
  source 1..120: mol_type = other DNA
atataagatgtccaacttaataaatgggtgtctcctgagtgccctacataccagttgtttcctagtctctctcccacacctcaggcctatttcctgagacacaacaacattgaaattaag

SEQ ID NO: 117931 - DNA, 120 bp, synthetic construct
  source 1..120: mol_type = other DNA
tggctaattcagctggtgagtttagttgaagccaatgttcatttattattttgaaagttctagagtccttgagaattatgagttgagagcccttgagaatctgctttgcctgtgtactat

SEQ ID NO: 117932 - DNA, 120 bp, synthetic construct
  source 1..120: mol_type = other DNA
tctcccttccagtggatgacctttcttttttctcttggctacttgctctggctagaaattctaatgatatattgaataagagtggtcaacgtggacatctttgtcttgttccagatctta

SEQ ID NO: 117933 - DNA, 120 bp, synthetic construct
  source 1..120: mol_type = other DNA
tttctgttcctgtgttagtttgctgagaatgatggtttccagcttggtctgtgtccctacaaagggcatgaactcattctttcttataaatgcatagtatttcatggtatatattgccac

SEQ ID NO: 117934 - DNA, 120 bp, synthetic construct
  source 1..120: mol_type = other DNA
tatgtcctgaatggcattgcctaggttttctcctagggtttttatggttttaggtttcacatataagtctttaatccatcttgagttagtactgaaactatcagttcatggttttttgtt

SEQ ID NO: 117935 - DNA, 120 bp, synthetic construct
  source 1..120: mol_type = other DNA
ttaattgttttctaggttagtttctgtatatcctttctctctcgctctgtctctctttctctctctctctctctgtctctctctctctgtgtcttcctttctctctcactctgtctctct

SEQ ID NO: 117936 - DNA, 120 bp, synthetic construct
  source 1..120: mol_type = other DNA
ttttttgctcttctgattgggtaattacatatgttttatctttaggattgctgattccttactctgtttgaccaagtctgctgttgaagttttctactgagtttttcaattcacttcaca

SEQ ID NO: 117937 - DNA, 120 bp, synthetic construct
  source 1..120: mol_type = other DNA
gtgtggaaggggtgccataatccaaaaaattattcattttacagatcatgagttttcccatgtctatgagtcttgggattttcttcttctctttttagctctggtgaattcagtgtggct

SEQ ID NO: 117938 - DNA, 120 bp, synthetic construct
  source 1..120: mol_type = other DNA
gtactaactccaaggaacataaaaagggagggctgatattacaaagatagagaagaattatgcccaagaatatcctcaacatatttgattgtataggaactccattcagtgtacttgggt

SEQ ID NO: 117939 - DNA, 120 bp, synthetic construct
  source 1..120: mol_type = other DNA
ctctgtgatccatacacattgggatgctcttcatatatccatgacctttactcattctgttctttattggaaaatcccttctttaccacacactgcctaggtccaatcaaagctttcatc

SEQ ID NO: 117940 - DNA, 120 bp, synthetic construct
  source 1..120: mol_type = other DNA
ttttttgtaaaatgtttgtactgagtaggtcttgttatgttacccaggctggtctcaaactcttggccttaaatgatcctctcatcttgcctcccaaagttctgggattacaggttgagc

SEQ ID NO: 117941 - DNA, 120 bp, synthetic construct
  source 1..120: mol_type = other DNA
ttaatactttggaagatttggaagacatatggtttgtcatacataatctccaaagcccacaggctggaattgctaagtcacccaaacagcaaagatggcggcccatatctctgtgagctc

SEQ ID NO: 117942 - DNA, 120 bp, synthetic construct
  source 1..120: mol_type = other DNA
aaggggctgtatttactcaccccttctgttcatctttgtgagagccatgcatattacctacttccggtcagtcatcctggccactcctccagcttaaaatatttttagagtatatctcat

SEQ ID NO: 117943 - DNA, 120 bp, synthetic construct
  source 1..120: mol_type = other DNA
tctcctgttgtcattcaacaatgttcataacatcttcaccaggagtagattccatctcaggaaacaagtttctttgcccctccaaaagtagtaactcctcacttatttgttttatcatga

SEQ ID NO: 117944 - DNA, 120 bp, synthetic construct
  source 1..120: mol_type = other DNA
cagaataggcaaatctatagagatagaaattcaattagcaattacctaggacaggggaaatgcagaaactaggggtggagagaaaaaggctaaggactatagggcttattttggggagat

SEQ ID NO: 117945 - DNA, 120 bp, synthetic construct
  source 1..120: mol_type = other DNA
agagatggtcagaccttccaaaagatacattttggttatatttttcacaagtacaggaaatcatgtcaatatttggtgacataactagaaagttctgtaaagatgtagtttcaaataaga

SEQ ID NO: 117946 - DNA, 120 bp, synthetic construct
  source 1..120: mol_type = other DNA
gaaatcaaaagatgttcccatattaccagaaggtttccttcacagtaaagagagataatgtctatacctcagatgcaaaaatcaataagggcaatttgaagtttctaatgtttctatact

SEQ ID NO: 117947 - DNA, 120 bp, synthetic construct
  source 1..120: mol_type = other DNA
cactcttaccaaatgttgattttgttggaggactccactgcaaacctgccaaacccctgcctaaggtaaacatacttttgttggttttattttgttggctttgaattttcagtagaaatg

SEQ ID NO: 117948 - DNA, 120 bp, synthetic construct
  source 1..120: mol_type = other DNA
tagaaccagattgttcagtacatcaaaattatattctcttgcagagtcatagttgacagataccctgtggacttgattaaaagtagacatatcagttttgacagtaagatgagctacttg

SEQ ID NO: 117949 - DNA, 120 bp, synthetic construct
  source 1..120: mol_type = other DNA
ctactcttgaaaaatttccccacccatactaagggaaaaactgatagtgtcagtaggagggggaagagaataggaggtgtagaaggacaagaaaagggatgactagtactaaaatagtga

SEQ ID NO: 117950 - DNA, 120 bp, synthetic construct
  source 1..120: mol_type = other DNA
aaatttaaacatcggcatatattggacaacgcaagtcagaataattctcaatcgattgcagccaagcacatcttcactaggaatgttacgtggtgtgtgtgagctactcaaaaaagagac

SEQ ID NO: 117951 - DNA, 120 bp, synthetic construct
  source 1..120: mol_type = other DNA
tttgcaccaattcttttggtagtgcccgctgtgctaatactcttttgtgatgaagcaaattctttcttcacaggaaatggaagactttgtacagagctctggagaaaatggtgttgtggt

SEQ ID NO: 117952 - DNA, 120 bp, synthetic construct
  source 1..120: mol_type = other DNA
agtaaaatttttgataattagcttcaaaacagttttcctaatctcagcagtatccaatgagtgaagaacacttgactgactcttgggtcacctctattacttattgtactctggaagctc

SEQ ID NO: 117953 - DNA, 120 bp, synthetic construct
  source 1..120: mol_type = other DNA
gtaacttcactaccacaataacaatagcaggtatttcaaaaagtctgacatgcatcatgcaatttagtcttggcatgtaatccagcctcttgtacttcctgtacattttggaagaggtgt

SEQ ID NO: 117954 - DNA, 120 bp, synthetic construct
  source 1..120: mol_type = other DNA
cttataagtagcttatttatggacttgttattttgtcaatcaaaggacaacaggctctaatataacaacctacacacaagtagatacatgtgaactacttcccaaattactcaaaaagat

SEQ ID NO: 117955 - DNA, 120 bp, synthetic construct
  source 1..120: mol_type = other DNA
cccagtaatgggattgctgggtttcatggtatttttacctctaggtttttgaggaatcgccagtcttccacaatggttgaacaaacttacattcccaccaacagattataagcaagcctt

SEQ ID NO: 117956 - DNA, 120 bp, synthetic construct
  source 1..120: mol_type = other DNA
tatcaccagtgactctgtattttctgaagaattaaactgctaatcttaatcatacagtgatgatacatttcacgatgaagtgtgacctgtccttcctcaatcctagcaccaccaccaaac

SEQ ID NO: 117957 - DNA, 120 bp, synthetic construct
  source 1..120: mol_type = other DNA
aatccaaatatatttagtatgtttacagagccatgaagccatcactattacataattttagaacatttttatcaacacaaaagaaactgcaatgacacagaagtcacttcctatgaccgc

SEQ ID NO: 117958 - DNA, 120 bp, synthetic construct
  source 1..120: mol_type = other DNA
aacccaaagatatcaatgtgcaaaattccttgtggagtccagctaccatcaattcagcatttatagctactatcaataatgtttttttatataagcagggtatcatctaaaggaatactt

SEQ ID NO: 117959 - DNA, 120 bp, synthetic construct
  source 1..120: mol_type = other DNA
tatttaaatgtttattttatgagatatataatgcattttaaaattctaggactcaaatagcaaaataagcacagaaaatagagaaaatcctagtggttccatcataatgtggccagtaaa

SEQ ID NO: 117960 - DNA, 120 bp, synthetic construct
  source 1..120: mol_type = other DNA
tgatgttgagcatgttctccgtatgtctgtttgagaactaagagtgtaattagattgttcataatacaaaggataaatgcataagggatgaatatcctattttccatgatgtgattattt

SEQ ID NO: 117961 - DNA, 120 bp, synthetic construct
  source 1..120: mol_type = other DNA
ttgagagaggagtcttgccgatgctcccagccgaataaaacccttccttctttaactcggtgtctgaggggttttgtctgtaactcttcctgctacattactgtctttatttttatcttt

SEQ ID NO: 117962 - DNA, 120 bp, synthetic construct; identical to SEQ ID NO: 26503
  source 1..120: mol_type = other DNA

SEQ ID NO: 117963 - DNA, 120 bp, synthetic construct; identical to SEQ ID NO: 26504
  source 1..120: mol_type = other DNA

SEQ ID NO: 117964 - DNA, 120 bp, synthetic construct
  source 1..120: mol_type = other DNA
aacctaggtaacggaggttgcagtgagccaagatcacaccactgcactccaacctgggagacagaggaagactctgactcaattaaaaaacatggctaaaatggtagattatgttatata

SEQ ID NO: 117965 - DNA, 120 bp, synthetic construct
  source 1..120: mol_type = other DNA
atgtgttttttggctgcataaatgtcttcttttgagaagtgtctgttcatgtccttcacccactttttgatggggttgtttgtttttttcttgtaaatttgtttgagttcactgtagatt

SEQ ID NO: 117966 - DNA, 120 bp, synthetic construct
  source 1..120: mol_type = other DNA
tggaagttgcagtgagccaagatcatgccactgtactccagcctggccaacagagcgagactctgtctcaaaaaaaaaaaaatggttttagaaatctgaacaatgacaaggcctgatatt

SEQ ID NO: 117967 - DNA, 120 bp, synthetic construct; identical to SEQ ID NO: 25762
  source 1..120: mol_type = other DNA

SEQ ID NO: 117968 - DNA, 120 bp, synthetic construct
  source 1..120: mol_type = other DNA
catgatttatagtcctttgggtatatacccagtaatgggatggctgggttctagatccctgaggaatcgccacattgacttgcacaatggttgaactagtttacagtcccaccaacagtg

SEQ ID NO: 117969 - DNA, 120 bp, synthetic construct
  source 1..120: mol_type = other DNA
aaactcctgacctcaagtgattcagccaccttggcttctcaaagtgctgggattacaggcatgagccactgccccagctggtactaagttattttaatgaattagaataactattctaat

SEQ ID NO: 117970 - DNA, 120 bp, synthetic construct; identical to SEQ ID NO: 25763
  source 1..120: mol_type = other DNA

SEQ ID NO: 117971 - DNA, 120 bp, synthetic construct; identical to SEQ ID NO: 19443
  source 1..120: mol_type = other DNA

SEQ ID NO: 117972 - DNA, 120 bp, synthetic construct; identical to SEQ ID NO: 19444
  source 1..120: mol_type = other DNA

SEQ ID NO: 117973 - DNA, 120 bp, synthetic construct; identical to SEQ ID NO: 19445
  source 1..120: mol_type = other DNA

SEQ ID NO: 117974 - DNA, 120 bp, synthetic construct; identical to SEQ ID NO: 27705
  source 1..120: mol_type = other DNA

SEQ ID NO: 117975 - DNA, 120 bp, synthetic construct; identical to SEQ ID NO: 32054
  source 1..120: mol_type = other DNA

SEQ ID NO: 117976 - DNA, 120 bp, synthetic construct; identical to SEQ ID NO: 32055
  source 1..120: mol_type = other DNA

SEQ ID NO: 117977 - DNA, 120 bp, synthetic construct; identical to SEQ ID NO: 32056
  source 1..120: mol_type = other DNA

SEQ ID NO: 117978 - DNA, 120 bp, synthetic construct
  source 1..120: mol_type = other DNA
aagacatcttcttcctggagaaataatatgttaataaggaagggatggtttgcattgaatcttaaaaaaaaaaaaaaattcagccctctctccctctccccctccccctccccctccgtc

SEQ ID NO: 117979 - DNA, 120 bp, synthetic construct
  source 1..120: mol_type = other DNA
ccgcccaggaggtgaggggcgcctctgcccggccgcccctactgggaagtgaggagcccctctgcccggccaccaccccgtctgggaggtgtgcccaacagctcattgagaacgggccag

SEQ ID NO: 117980 - DNA, 120 bp, synthetic construct
  source 1..120: mol_type = other DNA
gtcatcacagaaatgtcctctattgtgtgacactggtagtttattaggtttttccacagactagttgaaccatcccttaaaaattccattttctgattatttcaaccctccagatactgt

SEQ ID NO: 117981 - DNA, 120 bp, synthetic construct
  source 1..120: mol_type = other DNA
tgcccgcccgccaccccatctaagaagtgagcagtgtctctgcctggctgcccatcgtctaggatgtgaggagcccctctgcccggccaccccgtctgggaagtcaggagcgcctctacc

SEQ ID NO: 117982 - DNA, 120 bp, synthetic construct
  source 1..120: mol_type = other DNA
agaaagagagatcaggttgttactgtgcctgtgtagaaagaagtagacataggagactccattttgttctgtactaagaaaaattcttctgccttgggatgctgttaatctataacctta

SEQ ID NO: 117983 - DNA, 120 bp, synthetic construct; identical to SEQ ID NO: 28407
  source 1..120: mol_type = other DNA

SEQ ID NO: 117984 - DNA, 120 bp, synthetic construct; identical to SEQ ID NO: 28403
  source 1..120: mol_type = other DNA

SEQ ID NO: 117985 - DNA, 120 bp, synthetic construct; identical to SEQ ID NO: 28404
  source 1..120: mol_type = other DNA

SEQ ID NO: 117986 - DNA, 120 bp, synthetic construct
  source 1..120: mol_type = other DNA
gatacagtggtaggttagaggcatttatagttttcatgtaaaaatacaaaagggtcctgggcacggtggctcacgcctgtagtcccagcactttgtgaggtagaggtgggccgatcacaa

SEQ ID NO: 117987 - DNA, 120 bp, synthetic construct; identical to SEQ ID NO: 28405
  source 1..120: mol_type = other DNA

SEQ ID NO: 117988 - DNA, 120 bp, synthetic construct; identical to SEQ ID NO: 28406
  source 1..120: mol_type = other DNA

SEQ ID NO: 117989 - DNA, 120 bp, synthetic construct
  source 1..120: mol_type = other DNA
gctcttttgtttctccgttggggccgagcccgggccctagttggagccggagtcggagtcggagtcggatccggattcggattagcagcccgggaagagtgccgtggcacaggcgccgga

SEQ ID NO: 117990 - DNA, 120 bp, synthetic construct; identical to SEQ ID NO: 13442
  source 1..120: mol_type = other DNA

SEQ ID NO: 117991 - DNA, 120 bp, synthetic construct; identical to SEQ ID NO: 13443
  source 1..120: mol_type = other DNA

SEQ ID NO: 117992 - DNA, 120 bp, synthetic construct; identical to SEQ ID NO: 13444
  source 1..120: mol_type = other DNA

SEQ ID NO: 117993 - DNA, 120 bp, synthetic construct
  source 1..120: mol_type = other DNA
tagtttacagtcccgccaacagtgtaaaagtgttcctatttctccacatcctccccagcatctgttgtttcctgccctaaaagagctcctgaaggaagcactaaacatggaaaggaacaa

SEQ ID NO: 117994 - DNA, 120 bp, synthetic construct
  source 1..120: mol_type = other DNA
ttgaaaccaacgagaacaaagacacaacataccagaatctctgggacacattcaaagcagtgtgtagagggaaatttatagcactaaatgcccacaagagaaagcaagaaagatccaaaa

SEQ ID NO: 117995 - DNA, 120 bp, synthetic construct
  source 1..120: mol_type = other DNA
agagccatctatgacaaaaccacagccaatatcatactgaatgggcaaaaactggaagcattccctttgaaaactggcacaagacagggatgccctctctcaccactcctattcaacata

SEQ ID NO: 117996 - DNA, 120 bp, synthetic construct
  source 1..120: mol_type = other DNA
aaaaacaagcaatggggaaaggattccctatttaacaaatggtgctgggaaaactggctagccatatgtagaaagctgaaactggatcccttccttacaccttacacaaaaattaattca

SEQ ID NO: 117997 - DNA, 120 bp, synthetic construct; identical to SEQ ID NO: 24235
  source 1..120: mol_type = other DNA

SEQ ID NO: 117998 - DNA, 120 bp, synthetic construct
  source 1..120: mol_type = other DNA
cataaatgtcttcttttgagaagtgtctgttcatatcctttgaccagtttttgatggagttgtttattttcttgtaaatttgtttaagttctttgcagattctggatattagccctttgt

SEQ ID NO: 117999 - DNA, 120 bp, synthetic construct
  source 1..120: mol_type = other DNA
gttggattcctaggtattttattctctttgaagcaattgtgaatgggagttcactcatgatttggctctctgtttgtctgttattggtgtataagaatgcttgtgattgttgtatattga

SEQ ID NO: 118000 - DNA, 120 bp, synthetic construct
  source 1..120: mol_type = other DNA
gatactgttactggtctattcagagattcaacttcttcctggtttagtcttgggagggtgtatgtgtcgaggaatttatccatttcttctagattttctagtttatttgtgtagaggtgt

SEQ ID NO: 118001 - DNA, 120 bp, synthetic construct
  source 1..120: mol_type = other DNA
tgcttggtgcagagctgagttcaattcctgggtatccttgttaactttctgtcttgttgatctgtctaatgttgacagtagggtgtcaaagtctcccattattattgtgtgggagtctaa

SEQ ID NO: 118002 - DNA, 120 bp, synthetic construct
  source 1..120: mol_type = other DNA
ttgtgggtaacccgacctttctctatggctgcccttaacattttttccttcatttcaactatggtgaatctgacaattatgtgtcttggagttgctcttctcaaggagtatctttgtggc

SEQ ID NO: 118003 - DNA, 120 bp, synthetic construct
  source 1..120: mol_type = other DNA
tgggtatcagcagcggtggctgcagaacagcggattttcgcgaaccacaaatgctgctgtctgatcattcctctggaagttttgtctcagaggagtactgggccgtgtgaggtgtcagtc

SEQ ID NO: 118004 - DNA, 120 bp, synthetic construct; identical to SEQ ID NO: 24236
  source 1..120: mol_type = other DNA

SEQ ID NO: 118005 - DNA, 120 bp, synthetic construct
  source 1..120: mol_type = other DNA
ttttaatgattgccattctaactggtgtgagatggtatctcactgcggttttgatttgcatttctctgatggccagtgatgatgagcattttttcatgtgtgttttggctgcataaatgt

SEQ ID NO: 118006 - DNA, 120 bp, synthetic construct
  source 1..120: mol_type = other DNA
cactctggtgggttaccaccacagctattctttataccagaatctctgggacacatttaaagcactgtgtagagggaagtttatagctctaaatgcccacaagagaaaacaggaaagatc

SEQ ID NO: 118007 - DNA, 120 bp, synthetic construct
  source 1..120: mol_type = other DNA
aagtgggcttcatccctgggatgcaaggctggttcaacacacacaactcaatcaacataatccagcatataaacagaaccaaagacaaaaaccacatgattatctcaatagatgcagaaa

SEQ ID NO: 118008 - DNA, 120 bp, synthetic construct
  source 1..120: mol_type = other DNA
acacaagcaatgggaaaaggattccctatttaataaatggtgctgggaaaactggctagccatatgtagaaagctgaaactggatcccttccttacaccttatacaaaaatcaattcaag

SEQ ID NO: 118009 - DNA, 120 bp, synthetic construct
  source 1..120: mol_type = other DNA
catggatgaagctggaaaccatcattctcagtaaactattgcaaggacaaaaaaccaaacaccgcatgttctcactcataggtgggaattgaacaatgggaacacatggacacaggaagg

SEQ ID NO: 118010 - DNA, 120 bp, synthetic construct; identical to SEQ ID NO: 24237
  source 1..120: mol_type = other DNA

SEQ ID NO: 118011 - DNA, 120 bp, synthetic construct
  source 1..120: mol_type = other DNA
ttctgctagcttttgaatgtgtttgctcttgcttttctagttcttttaattgtgatgttagggtgtcaattttggatccttcctgctttctcttgtaggcatttagtgctataaatttcc

SEQ ID NO: 118012 - DNA, 120 bp, synthetic construct
  source 1..120: mol_type = other DNA
caaaacagagatatagatcaatggaacagaacagagccctcagaaataatgccgcatatctacaactatctgatttttgacaaacctgagaaaaacaagcaatggggaaaggattcccta

SEQ ID NO: 118013 - DNA, 120 bp, synthetic construct
  source 1..120: mol_type = other DNA
tatatacccaaaggattataaatcatgctgctataaagacacatgcacacgtatgtttattgcggcactattcacaatagcaaagacttggaaccaacccaaatgtccaacaatgataga

SEQ ID NO: 118014 - DNA, 120 bp, synthetic construct
  source 1..120: mol_type = other DNA
cactccccctaccccacaacagtccccagagagtgatgttccccttcctgtgtccatgtgttctcattgttcaattcccacctatgagtgagaacatgcggtgtttggttttttgtcctt

SEQ ID NO: 118015 - DNA, 120 bp, synthetic construct
  source 1..120: mol_type = other DNA
taggtctaacatttaagtctttaatccatcttgaattaatttttgtgtaaggtgtaaggaagggatccagtttcagctttctacatatggctagccagttttcccagcatcatttattaa

SEQ ID NO: 118016 - DNA, 120 bp, synthetic construct
  source 1..120: mol_type = other DNA
aatatcttttatttccttctcctgcctgattgccctggccagaacttccaacactatgttgaataggagtggtgagagagggcatccctgtcttgtgccagttttcaaagggaatgcttc

SEQ ID NO: 118017 - DNA, 120 bp, synthetic construct
  source 1..120: mol_type = other DNA
ctcttgcttttctagttcttttaattgtgatgttagggtgtcaattttggatctttcctgctttctcttgtgggcatttagtgctataaatttccctctacacactgctttgaacatgtc

SEQ ID NO: 118018 - DNA, 120 bp, synthetic construct; identical to SEQ ID NO: 118007
  source 1..120: mol_type = other DNA

SEQ ID NO: 118019 - DNA, 120 bp, synthetic construct
  source 1..120: mol_type = other DNA
agctgaaactggatcccttccttacaccttacacaaaaattaattcaagatggattaaagacttaaatgttagacctaaaaccataaaaaccctagaagaaaacctaggcaataccattc

SEQ ID NO: 118020 - DNA, 120 bp, synthetic construct; identical to SEQ ID NO: 24229
  source 1..120: mol_type = other DNA

SEQ ID NO: 118021 - DNA, 120 bp, synthetic construct
  source 1..120: mol_type = other DNA
tgcctagccacccattgtctgggatgtggggagcccctctgcctggctgccccatctgggaagtgaggagcgcctctgccctgccaccaccctgtctgggatgtgaggagcgcctctgcc

SEQ ID NO: 118022 - DNA, 120 bp, synthetic construct
  source 1..120: mol_type = other DNA
cgtcatttacattatgtgtatctcctaatgctatcccttcccctccccgcaccccacaacaggccctggtgtgtgatgttccccttcctgtgcccaagtgtcctcattgttcaattccca

SEQ ID NO: 118023 - DNA, 120 bp, synthetic construct
  source 1..120: mol_type = other DNA
cctaattgaataccctttatttctttctcctgcctgattgcccttgccagaatttccaacagtatgttgaataggagtggtgagagagggcgtccctgtcttgtgccagttttcaaaggg

SEQ ID NO: 118024 - DNA, 120 bp, synthetic construct
  source 1..120: mol_type = other DNA
ggggtttcaggaacagaaaaaggatgaaataggaagaaatctaagaaataatataaaagctaaaggagggatgaagaggctaggcatcgtggctcacacctgtaatcccggcactttggg

SEQ ID NO: 118025 - DNA, 120 bp, synthetic construct
  source 1..120: mol_type = other DNA
gggaggcaggcaggcaggcaggaaggagcaaattagtaaaaagagattcctagagacaatctagtaaaatttacaggcctgaaatgaaaagaaaagctaactcaaacaagtcacacagaa

SEQ ID NO: 118026 - DNA, 120 bp, synthetic construct
  source 1..120: mol_type = other DNA
ctttacaattcaatgttctaaactgtgatgaggcaaattggtttttccataacagcatggcttctttttttttttttttttttttttttgaggcggagtctcgctctgtcccccaggctg

SEQ ID NO: 118027 - DNA, 120 bp, synthetic construct; identical to SEQ ID NO: 24238
  source 1..120: mol_type = other DNA

SEQ ID NO: 118028 - DNA, 120 bp, synthetic construct
  source 1..120: mol_type = other DNA
atcaatgtgaaaatcctcaataaaatattgggaaatggaatccagcagcacatcagaaagctttccaccacaatcagttcgacttcatccctgggatgcaaggctggctcaatatatgca

SEQ ID NO: 118029 - DNA, 120 bp, synthetic construct
  source 1..120: mol_type = other DNA
tcatggataggaagaattgatatcgtgaaaatggccatactgcccaaggtaatttatagacttaatgccatccccatcaagctaccagactttcttcacagaattggaaaaaactacttt

SEQ ID NO: 118030 - DNA, 120 bp, synthetic construct; identical to SEQ ID NO: 24230
  source 1..120: mol_type = other DNA

SEQ ID NO: 118031 - DNA, 120 bp, synthetic construct
  source 1..120: mol_type = other DNA
tcactgcaagctccgcctcccgggttcatgccattatcctgcctcagccttccgagtagctgggactacaggcccccaccaccatgcccggctatttttttttgtattttttagtagaga

SEQ ID NO: 118032 - DNA, 120 bp, synthetic construct; identical to SEQ ID NO: 24231
  source 1..120: mol_type = other DNA

SEQ ID NO: 118033 - DNA, 120 bp, synthetic construct
  source 1..120: mol_type = other DNA
gtctgagaagtaaggagcccctccgcctggcagtcgccccgtctgagaagtgaggagcctctccgcccagcagccacccagtctgggaagtgaggagcgtctccgcccggccgccacccc

SEQ ID NO: 118034 - DNA, 120 bp, synthetic construct; identical to SEQ ID NO: 24232
  source 1..120: mol_type = other DNA

SEQ ID NO: 118035 - DNA, 120 bp, synthetic construct
  source 1..120: mol_type = other DNA
aaactactgctcaaggaaataaaagaggatacaaacaaatggaagaacactccatgttcatgggaaggaagaatcaatatcgtaaaaatggccataatacccaaggtaatttacagattc

SEQ ID NO: 118036 - DNA, 120 bp, synthetic construct
  source 1..120: mol_type = other DNA
agttagaatggcgatcattaaaaagtcaggaaacaacaggtgctgtagaggatgtggagaaataggaacacttttacactgttggtgggactgtaaactagttcaaccattgtggaagtc

SEQ ID NO: 118037 - DNA, 120 bp, synthetic construct
  source 1..120: mol_type = other DNA
gggaactgaacaatgagaacacttggacacagcaaggtgaacatcatataccggggcctgtcatggggtaggggagcggggagggatagcagtaaaagatatacctaatgtaaatgacga

SEQ ID NO: 118038 - DNA, 120 bp, synthetic construct
  source 1..120: mol_type = other DNA
ttgtggttttgatttgcatttctctgatggccagtgatgatgagcgttttttcatgtgtgttttggctgcataaatgtcttcttttgagaagtgtctgttcatatccttcacccacttgt

SEQ ID NO: 118039 - DNA, 120 bp, synthetic construct
  source 1..120: mol_type = other DNA
acaaacaaatggaagaacactccatgttcatgggaaggaagaatcaatatcgtaaaaatggccataatacccaaggtaatttacagattcaatgccatccccaacaagctaccaatgact

SEQ ID NO: 118040 - DNA, 120 bp, synthetic construct
  source 1..120: mol_type = other DNA
cttacgggcatttagtgctataaatttccctctacacactgctttgaatgtgtcccagagattctggtatgttgtgtctttgttctcgttggtttcaaagaacatctttatttctgcctt

SEQ ID NO: 118041 - DNA, 120 bp, synthetic construct; identical to SEQ ID NO: 24234
  source 1..120: mol_type = other DNA

SEQ ID NO: 118042 - DNA, 120 bp, synthetic construct
  source 1..120: mol_type = other DNA
gacggatcacaaagtcaggagtttgagatcaacctggccagtatggtgaaatcccatctctactttaaaaagatacaatctcaccactcctattcaacatagtgttggaagttctggcca

SEQ ID NO: 118043 - DNA, 120 bp, synthetic construct
  source 1..120: mol_type = other DNA
agcaatggcaacaaaagacaaaattgacaaatgggatctcattaaactaaagagcttctgcacagcaaaagaaaccaccatcagagtgaacaggcaacctacaaaatgggagaaaatttt

SEQ ID NO: 118044 - DNA, 120 bp, synthetic construct
  source 1..120: mol_type = other DNA
ggaagtatggaaattgagtcacataagtttacttaaaagacttttcattctattttaaaaatatatttgatccaccgcatattctcactcataggtgggaattgaacaatgagatcacat

SEQ ID NO: 118045 - DNA, 120 bp, synthetic construct; identical to SEQ ID NO: 23118
  source 1..120: mol_type = other DNA

SEQ ID NO: 118046 - DNA, 120 bp, synthetic construct; identical to SEQ ID NO: 23119
  source 1..120: mol_type = other DNA

SEQ ID NO: 118047 - DNA, 120 bp, synthetic construct; identical to SEQ ID NO: 23120
  source 1..120: mol_type = other DNA

SEQ ID NO: 118048 - DNA, 120 bp, synthetic construct; identical to SEQ ID NO: 23121
  source 1..120: mol_type = other DNA

SEQ ID NO: 118049 - DNA, 120 bp, synthetic construct; identical to SEQ ID NO: 23122
  source 1..120: mol_type = other DNA

SEQ ID NO: 118050 - DNA, 120 bp, synthetic construct; identical to SEQ ID NO: 23123
  source 1..120: mol_type = other DNA

SEQ ID NO: 118051 - DNA, 120 bp, synthetic construct
  source 1..120: mol_type = other DNA
caggccccctagataataccagctaaccagctctgatttacccttacccctgtgcatttttatttatttttatttatttttattttttgagtgggcatctccctctgtcacccaggctgg

SEQ ID NO: 118052 - DNA, 120 bp, synthetic construct
  source 1..120: mol_type = other DNA
cccacctcggcctctcaaagtgctgggattacaggcgtgagccactgtgcctggccgtcaagaacaattttaacttaagtcaaccaaatagaaataaatataactaaactgattatggtt

SEQ ID NO: 118053 - DNA, 120 bp, synthetic construct
  source 1..120: mol_type = other DNA
aggctgcagtgagccatgattgcatcactgcactccagcctgggcaacagagcaagaccccatctcaaaataaataaataaattcaattcaactcaacatttactgaacagtgactgtat

SEQ ID NO: 118054 - DNA, 120 bp, synthetic construct
  source 1..120: mol_type = other DNA
tgcctctctgagccccactcctctgaatcccctcctcgtctctgatctccacccctgcgagtcccctccacattcctgagccccttccatctctcagacccctccctttctcttggtccc

SEQ ID NO: 118055 - DNA, 120 bp, synthetic construct
  source 1..120: mol_type = other DNA
ctgtcaacctcttccccagccttgcccctcccagcgattcctctccactcagccgggcccctccctgtaaagtccacagaatccagcacagtcctcccccaacgtctctgtttctggaag

SEQ ID NO: 118056 - DNA, 120 bp, synthetic construct
  source 1..120: mol_type = other DNA
ggtctctggttttcctaggcagaggtccctgtggccttctgtagtgtttgtgtccctgggtacttgagattagggagtggtgatgactcttaacgagcatgctgccttcaagcatctgtt

SEQ ID NO: 118057 - DNA, 120 bp, synthetic construct
  source 1..120: mol_type = other DNA
tcacctcccaggcagggcggctgggcagaggcgctcctcacctcccagacggggcggccgggcagaggcactcctcacatcccagacgatgggcggccgggcagaggcgctcctcacttc

SEQ ID NO: 118058 - DNA, 120 bp, synthetic construct; identical to SEQ ID NO: 2228
  source 1..120: mol_type = other DNA

SEQ ID NO: 118059 - DNA, 120 bp, synthetic construct
  source 1..120: mol_type = other DNA
acccaccttggcctcccaaagtgctgggattacaggtgtgagccaccatgcccggccgggtcttgactcttatccaatttgccagtctgtgtcttttaattggaatatttagcccattta

SEQ ID NO: 118060 - DNA, 120 bp, synthetic construct
  source 1..120: mol_type = other DNA
caaggtcaggagttcgagactagcctgaccaacatagtgaaacactgtttctactaaaaatacaaaaaaattagccagccgtggtggcgagtacctgtaatctcagctacttgggaggct

SEQ ID NO: 118061 - DNA, 120 bp, synthetic construct
  source 1..120: mol_type = other DNA
gctagcaaggcagccccagctctcagacttaactctctgtgcttggcagatacatgggccctgtgcaagagtgtggctagcaaggcagccccagctctcagacttaactctctgggcttg

SEQ ID NO: 118062 - DNA, 120 bp, synthetic construct; identical to SEQ ID NO: 118061
  source 1..120: mol_type = other DNA

SEQ ID NO: 118063 - DNA, 120 bp, synthetic construct; identical to SEQ ID NO: 15324
  source 1..120: mol_type = other DNA

SEQ ID NO: 118064 - DNA, 120 bp, synthetic construct
  source 1..120: mol_type = other DNA
tgtctagctagagaattgtaaatgcaccaatcagcactctgtgtctagcttgggggtttgtggatgcatcaatcagcactctgtgtctagctaaagtttgtaaatgcaccaatcagtgct

SEQ ID NO: 118065 - DNA, 120 bp, synthetic construct; identical to SEQ ID NO: 15325
  source 1..120: mol_type = other DNA

SEQ ID NO: 118066 - DNA, 120 bp, synthetic construct
  source 1..120: mol_type = other DNA
tgttttttcctgactttttaatgattgccattctaactggcgtgagatggtatctcattgtggttttgatttgcatttctctgatggccagtgatgatgagcattttttcatgtgtcttt

SEQ ID NO: 118067 - DNA, 120 bp, synthetic construct
  source 1..120: mol_type = other DNA
aatctataaattaccttgggcagtacggccattttcatgatattgattcttcctacccatgagcatggaatgttcttccatttgtttgtatcctcttttatttccttgagcagtggtttg

SEQ ID NO: 118068 - DNA, 120 bp, synthetic construct
  source 1..120: mol_type = other DNA
tattcctggtttagtcttgggagagtgtatgtgtcgaggaatttatccgtgtcttctagattttctagtttatttgcgtagaggtgtttgtagtattctctgatggtagtttgtatttct

SEQ ID NO: 118069 - DNA, 120 bp, synthetic construct; identical to SEQ ID NO: 15326
  source 1..120: mol_type = other DNA

SEQ ID NO: 118070 - DNA, 120 bp, synthetic construct
  source 1..120: mol_type = other DNA
tcagaactcctatttaggagtattgatagataactgcctaaaggaacacaagatcaagaaaaatgaaacaatgtggggaactaattggttttctgtgtttggctatgatttgggattatt

SEQ ID NO: 118071 - DNA, 120 bp, synthetic construct; identical to SEQ ID NO: 15327
  source 1..120: mol_type = other DNA

SEQ ID NO: 118072 - DNA, 120 bp, synthetic construct; identical to SEQ ID NO: 15316
  source 1..120: mol_type = other DNA

SEQ ID NO: 118073 - DNA, 120 bp, synthetic construct; identical to SEQ ID NO: 15317
  source 1..120: mol_type = other DNA

SEQ ID NO: 118074 - DNA, 120 bp, synthetic construct
  source 1..120: mol_type = other DNA
gtagttctagatccctgaggaatcgccacactgacttccacaatggttgaactagtttacagtcccaccaacagtgtaaaagtgttcctatttctccacatcctctccagcacctgttgt

SEQ ID NO: 118075 - DNA, 120 bp, synthetic construct
  source 1..120: mol_type = other DNA
atgatcatgtgggcttcatccctgggatgcaaggctggttcaacatatgcaaatcaataaacgtaatccagcatataaacagaaccaaagacaaaaaccacatgattatctcgatagatg

SEQ ID NO: 118076 - DNA, 120 bp, synthetic construct
  source 1..120: mol_type = other DNA
aatttttgcaacctactcacctgatagagggctaatatccagaatctacaatgaactcaaacaaatttagaagaaaaaaacaaacaaccccatcaaaaagtgggcaaaggatatgaacag

SEQ ID NO: 118077 - DNA, 120 bp, synthetic construct
  source 1..120: mol_type = other DNA
atgacgagttaatgggtgcagcacaccaacgtggcacatgtatacatatgtaacaaacgtgcacgttgtgcacatgtaccctaaaacttaaagtataataataataaaaaaaaaaggaat

SEQ ID NO: 118078 - DNA, 120 bp, synthetic construct; identical to SEQ ID NO: 15318
  source 1..120: mol_type = other DNA

SEQ ID NO: 118079 - DNA, 120 bp, synthetic construct; identical to SEQ ID NO: 15319
  source 1..120: mol_type = other DNA

SEQ ID NO: 118080 - DNA, 120 bp, synthetic construct; identical to SEQ ID NO: 15320
  source 1..120: mol_type = other DNA

SEQ ID NO: 118081 - DNA, 120 bp, synthetic construct; identical to SEQ ID NO: 15321
  source 1..120: mol_type = other DNA

SEQ ID NO: 118082 - DNA, 120 bp, synthetic construct
  source 1..120: mol_type = other DNA
tggttttaggtctaacatttaagtctttaatccatcttgaattaatttttgtagaaggtgtaaggaaggaatcgagtttcagctttctccatatggctagccagttttcccagcaccatt

SEQ ID NO: 118083 - DNA, 120 bp, synthetic construct
  source 1..120: mol_type = other DNA
cccactgtctcagcccaaaatctccttaagctgataagcaacttcagcaaagtctcaggatacaaaatcaatgtgcaaaaatcacaagcattcttatacaccaataacagacaaacagag

SEQ ID NO: 118084 - DNA, 120 bp, synthetic construct; identical to SEQ ID NO: 15322
  source 1..120: mol_type = other DNA

SEQ ID NO: 118085 - DNA, 120 bp, synthetic construct
  source 1..120: mol_type = other DNA
tcatcactggccatcagagaaatgcaaatcaaaaccacagtgagataccaactcacaccagttagaatggcaatcattaaaaagtcaggaaacaacaggtgctggagaggatgtggagaa

SEQ ID NO: 118086 - DNA, 120 bp, synthetic construct; identical to SEQ ID NO: 15323
  source 1..120: mol_type = other DNA

SEQ ID NO: 118087 - DNA, 120 bp, synthetic construct
  source 1..120: mol_type = other DNA
accaacatggtaaaaccccatctctactaaaaatacaaaaattagacaggtgtggtggtgcgcctgtaattccagccactcaggaggctgaggcaggagaatcaattgaactgaacctgg

SEQ ID NO: 118088 - DNA, 120 bp, synthetic construct
  source 1..120: mol_type = other DNA
gcatgtgtgtgtgtgtgttgtgcgtgtgtgtgtgctggtgtgtgtgtgccggcgtatgtgtgtgctgctgtgtgctggcatgtgtgtgtgtgggtgttggtgtgtgtgcatgtgcatgtg

SEQ ID NO: 118089 - DNA, 120 bp, synthetic construct
  source 1..120: mol_type = other DNA
tgaaaggatcctaggtcctttggactgagcaggcactacctggcgttgtctttgatggacaagtacatggaaagcgaaagaaagaaagagagagagagaaggaaggaaggaaggaaggaa

SEQ ID NO: 118090 - DNA, 120 bp, synthetic construct; identical to SEQ ID NO: 27288
  source 1..120: mol_type = other DNA

SEQ ID NO: 118091 - DNA, 120 bp, synthetic construct; identical to SEQ ID NO: 27290
  source 1..120: mol_type = other DNA

SEQ ID NO: 118092 - DNA, 120 bp, synthetic construct
  source 1..120: mol_type = other DNA
acagcctcacatctgcccacactcgccccacaccacagcttcccatctgcccacactcgccccacaccacagcttcccatctgcccacactcaccaacaccacagcttcacatctgccca

SEQ ID NO: 118093 - DNA, 120 bp, synthetic construct
  source 1..120: mol_type = other DNA
acactcaccccacaccacagcttcccatctgcccacactcaccccacaccacagcttcacatctgcccacactcaccaacaccacagcttcccatctgcccacacctgccccaacaccac

SEQ ID NO: 118094 - DNA, 120 bp, synthetic construct; identical to SEQ ID NO: 27291
  source 1..120: mol_type = other DNA

SEQ ID NO: 118095 - DNA, 120 bp, synthetic construct
  source 1..120: mol_type = other DNA
ttcttagcatctttatccttttatgtgaacacaactagagcattgctcccagtggtccttcaagcacatgcacaggaaaaagccctcctgaaaggtataaaataattccactgttgccca

SEQ ID NO: 118096 - DNA, 120 bp, synthetic construct; identical to SEQ ID NO: 25654
  source 1..120: mol_type = other DNA

SEQ ID NO: 118097 - DNA, 120 bp, synthetic construct
  source 1..120: mol_type = other DNA
gggttgtttgtttttttcttgtaaatttgtttgagttcattgtagattctggatattagccctttgtcagatgagtaggttgcgaaaattttctcccattttgtaggttgcctgttgact

SEQ ID NO: 118098 - DNA, 120 bp, synthetic construct
  source 1..120: mol_type = other DNA
tgtctgttattggtgtataagaatgcttgtgatttttgtacattgattttgtatcctgagactttgctgaagttgcttatcagcttaaggagattttggactgagacgatggggttttct

SEQ ID NO: 118099 - DNA, 120 bp, synthetic construct
  source 1..120: mol_type = other DNA
taaaaaaaccagctactggattcattaattttttgaagggttttttgtgtctctatttccttcagttctgctctgattttagttatttcttgccttctgctagcttttgaatgtgtttgc

SEQ ID NO: 118100 - DNA, 120 bp, synthetic construct
  source 1..120: mol_type = other DNA
cctttaccattatgtaatggccttctttgtcttttttgatctttgttggtttaaagtctgttttatcagagactaggattgcaacccctgcctttttttgttttctatttgcttggtagg

SEQ ID NO: 118101 - DNA, 120 bp, synthetic construct
  source 1..120: mol_type = other DNA
ctaaacttccttctcgcttcatttcattcacttcatcttccatcgctgataccctttcttccagttgatcgcattggctcctgaggcttctgcattcttcacgtagttcttgagccttgg

SEQ ID NO: 118102 - DNA, 120 bp, synthetic construct
  source 1..120: mol_type = other DNA
ctggtgtgccgttttttaagcccgtgggaaaagcgcagtacttgggggggagtgacccgattttccaggtgccgtctgtcacccctttctttgactaggaaagggaactccctgacccct

SEQ ID NO: 118103 - DNA, 120 bp, synthetic construct; identical to SEQ ID NO: 25655
  source 1..120: mol_type = other DNA

SEQ ID NO: 118104 - DNA, 120 bp, synthetic construct; identical to SEQ ID NO: 25656
  source 1..120: mol_type = other DNA

SEQ ID NO: 118105 - DNA, 120 bp, synthetic construct; identical to SEQ ID NO: 25657
  source 1..120: mol_type = other DNA

SEQ ID NO: 118106 - DNA, 120 bp, synthetic construct
  source 1..120: mol_type = other DNA
atccagtctatcattgttggacatttgggttggttccaagtctttgctattgtgaataatgcctcaataaacatacgtgtgcatgtgtctttatagcagcatgatttatagtcctttggg

SEQ ID NO: 118107 - DNA, 120 bp, synthetic construct; identical to SEQ ID NO: 25658
  source 1..120: mol_type = other DNA

SEQ ID NO: 118108 - DNA, 120 bp, synthetic construct
  source 1..120: mol_type = other DNA
aacgttagacctaaaagcataaaaaccctagaagaaaacctaggcattaccattcaggacataggcatgggcaaggacttcatgtctaaaacaccaaaagcaatggcaacaaaagccaaa

SEQ ID NO: 118109 - DNA, 120 bp, synthetic construct
  source 1..120: mol_type = other DNA
aattgaacaatgagaacacatggacacaggaaggggaacatcacactctgcggactattgtggggtggggggaggggcgagggatagcattaggagatatacctaattctaaatgaccag

SEQ ID NO: 118110 - DNA, 120 bp, synthetic construct
  source 1..120: mol_type = other DNA
gcatattaagatgatcacaatggaattcgctgcaacagaagcagctctcacaagttagcccttgataagaatccagcagcacatcaaaaagcttatccaccatgatcaagtgggcttcat

SEQ ID NO: 118111 - DNA, 120 bp, synthetic construct
  source 1..120: mol_type = other DNA
cccacatcgccaagtcaatcctaagccaaaagaacaaaactggaggcatcactctacctgacttcaaactatctacaaggctacagtaaccaaaacagcatggtactggtaccaaaacag

SEQ ID NO: 118112 - DNA, 120 bp, synthetic construct
  source 1..120: mol_type = other DNA
cgtatgtttattgctgcactattcacaatagcaaagacttggaaccaacccaaatgtccaacaatgatagactggattaagaaaatgtggcacatatacaccatggaatactatgcagcc

SEQ ID NO: 118113 - DNA, 120 bp, synthetic construct
  source 1..120: mol_type = other DNA
ggcttacagaatgctgaggtcatgatatgatggatgcagtttggtgtagcagaaataatattgtaaaaaaggtttgcattatagattcgttttgtgtttgggtgaaagttagggtgcctt

SEQ ID NO: 118114 - DNA, 120 bp, synthetic construct; identical to SEQ ID NO: 31460
  source 1..120: mol_type = other DNA

SEQ ID NO: 118115 - DNA, 120 bp, synthetic construct; identical to SEQ ID NO: 31461
  source 1..120: mol_type = other DNA

SEQ ID NO: 118116 - DNA, 120 bp, synthetic construct; identical to SEQ ID NO: 31462
  source 1..120: mol_type = other DNA

SEQ ID NO: 118117 - DNA, 120 bp, synthetic construct
  source 1..120: mol_type = other DNA
agggccagagggagtatcagaatcacaggaatagcacgagttattcatttcctgtgcaccaatcaaagaaaataggtttactattgtagcaaagtagtagagataagggcaagaggtcag

SEQ ID NO: 118118 - DNA, 120 bp, synthetic construct
  source 1..120: mol_type = other DNA
acttcgacctcccaaagtgctaggattacaggcatgagccaccatgcctggcctgttgtattagttaatctgcaacattaattcacaattttaaaaagcaactatgcaaagataccctgg

SEQ ID NO: 118119 - DNA, 120 bp, synthetic construct; identical to SEQ ID NO: 31463
  source 1..120: mol_type = other DNA

SEQ ID NO: 118120 - DNA, 120 bp, synthetic construct; identical to SEQ ID NO: 31464
  source 1..120: mol_type = other DNA

SEQ ID NO: 118121 - DNA, 120 bp, synthetic construct
  source 1..120: mol_type = other DNA
gactcactgcaacctctgcttcctgggttcaagcgattctcctgtctcagccttctcagtatctaggactacaggcatatactaccacaaccaactaatttttatatttttagtagagat

SEQ ID NO: 118122 - DNA, 120 bp, synthetic construct
  source 1..120: mol_type = other DNA
agtaatgggatggctgggtcaaatggtatttctagttctagatccctgaggaatcgccacactgacttccacaatggttgaactagtttacagtcccaccaacagtgtaaaagtgttctt

SEQ ID NO: 118123 - DNA, 120 bp, synthetic construct
  source 1..120: mol_type = other DNA
ctgtaaattaccttgggcagtatggccattttcatgatattgattcttcctacccatgagcatggaatgttcttccatttgtttgtatcctcttttatttccttgagcagtggtttgtag

SEQ ID NO: 118124 - DNA, 120 bp, synthetic construct
  source 1..120: mol_type = other DNA
ctttttggttggtaaactattgattattgccacaatttcagctcctgttattggtctattcagagattcaacttcttcctggtttagtcttgggagagtgtatgtgtcaaggaatttatc

SEQ ID NO: 118125 - DNA, 120 bp, synthetic construct
  source 1..120: mol_type = other DNA
ccacttggtgcagagctgagttcaattcctgggtatccttgttgactttctgtctcgttgatctgtctaatgttgacagtggggtgttaaagtctcccattattaatgtgtgggagtcta

SEQ ID NO: 118126 - DNA, 120 bp, synthetic construct
  source 1..120: mol_type = other DNA
tgcagagtgttttccaacttggttccattctccccatcactttcaggtacaccaatcagacatagatttggtcttttcacatagtcccatatttcttggaggctttgctcatttcttttt

SEQ ID NO: 118127 - DNA, 120 bp, synthetic construct
  source 1..120: mol_type = other DNA
aggaccctccgagccaggtgtgggatataatctcgtggttcgccgtttttttagccggtctgaaaagcacaatattcgggtgggagtaacccgattttccaagtgcgtccatcacccctt

SEQ ID NO: 118128 - DNA, 120 bp, synthetic construct
  source 1..120: mol_type = other DNA
tctatttgattcttctcttttttcttctttattagtcttgctagcagtctatctatttttttgtaattgtactttaagttttagggtacatgtgcacaatgtgcaggttagttacatatg

SEQ ID NO: 118129 - DNA, 120 bp, synthetic construct
  source 1..120: mol_type = other DNA
gcactgttatctgagagacagtttgctataatttctgttcttttacatttgctgaggagtgctttacttccaactatgtggtcaattttggaataggtgtggtgtggtgctgaaaagaat

SEQ ID NO: 118130 - DNA, 120 bp, synthetic construct
  source 1..120: mol_type = other DNA
tatgaaattctgggttgaaaattcttttctttaagaatgtggaatattggcccccaccctcttctggcttgtagagtttctgcggagagatcagctgttagtctgatgggcttccctttg

SEQ ID NO: 118131 - DNA, 120 bp, synthetic construct; identical to SEQ ID NO: 14621
  source 1..120: mol_type = other DNA

SEQ ID NO: 118132 - DNA, 120 bp, synthetic construct; identical to SEQ ID NO: 14622
  source 1..120: mol_type = other DNA

SEQ ID NO: 118133 - DNA, 120 bp, synthetic construct
  source 1..120: mol_type = other DNA
cccagcactttgggaggctaaggcgggcagatcatgaggtcaggagttcgaggccagcctgaccaacatggtgaaaccctgtctctactaaaaatacaaaaaaattagtcgggtgtggtg

SEQ ID NO: 118134 - DNA, 120 bp, synthetic construct
  source 1..120: mol_type = other DNA
tttcatataaattttactatcagtttgtaatttctacaaaacaatctgcttggatattttttttgggggggggggtgggggatggagtcttactctgttgcccaggctggagtgcagtgg

SEQ ID NO: 118135 - DNA, 120 bp, synthetic construct
  source 1..120: mol_type = other DNA
ccatggatatggagagctgacttatgtgtgtgtgtgtatatacaatatatatattatattatatgtgtgtgtgtgtgtgtgtgtgtgtgtgtgtggacagtgtggactccctgcaggaaa

SEQ ID NO: 118136 - DNA, 120 bp, synthetic construct; identical to SEQ ID NO: 21950
  source 1..120: mol_type = other DNA

SEQ ID NO: 118137 - DNA, 120 bp, synthetic construct
  source 1..120: mol_type = other DNA
cacccacctcggcctcctaaagtgctgggattacaggtgtaagccaccatactcagcctatttctcctcatattacgtaatgttaaagctttcctcatttctatacctttttataaggat

SEQ ID NO: 118138 - DNA, 120 bp, synthetic construct; identical to SEQ ID NO: 28559
  source 1..120: mol_type = other DNA

SEQ ID NO: 118139 - DNA, 120 bp, synthetic construct; identical to SEQ ID NO: 28560
  source 1..120: mol_type = other DNA

SEQ ID NO: 118140 - DNA, 120 bp, synthetic construct; identical to SEQ ID NO: 28561
  source 1..120: mol_type = other DNA

SEQ ID NO: 118141 - DNA, 120 bp, synthetic construct; identical to SEQ ID NO: 28562
  source 1..120: mol_type = other DNA

SEQ ID NO: 118142 - DNA, 120 bp, synthetic construct; identical to SEQ ID NO: 28563
  source 1..120: mol_type = other DNA

SEQ ID NO: 118143 - DNA, 120 bp, synthetic construct; identical to SEQ ID NO: 28564
  source 1..120: mol_type = other DNA

SEQ ID NO: 118144 - DNA, 120 bp, synthetic construct; identical to SEQ ID NO: 28565
  source 1..120: mol_type = other DNA

SEQ ID NO: 118145 - DNA, 120 bp, synthetic construct
  source 1..120: mol_type = other DNA
ctcgccccgcaccttccccgcctatgcccctcgctgagataggcccttccctcctccgggagcctcccgggccacgcggccctcaacttctccagcccctccacccatgcttcctggacc

SEQ ID NO: 118146 - DNA, 120 bp, synthetic construct
  source 1..120: mol_type = other DNA
tcatttgccacataatgatgtttcagtcataaactgtatatatgacgatggtcccataagattataatattctggccgggtgtggtggctcatacctgttatcccagcactttgggtggc

SEQ ID NO: 118147 - DNA, 120 bp, synthetic construct
  source 1..120: mol_type = other DNA
cctgtgttgctgggattacggggatgagccactgcatgcagctaggaatatttccttacagcagaatttcttcacaagaattaaaactacatttttgtagtttcagttgcaggctacaac

SEQ ID NO: 118148 - DNA, 120 bp, synthetic construct; identical to SEQ ID NO: 15808
  source 1..120: mol_type = other DNA

SEQ ID NO: 118149 - DNA, 120 bp, synthetic construct; identical to SEQ ID NO: 15809
  source 1..120: mol_type = other DNA

SEQ ID NO: 118150 - DNA, 120 bp, synthetic construct; identical to SEQ ID NO: 15810
  source 1..120: mol_type = other DNA

SEQ ID NO: 118151 - DNA, 120 bp, synthetic construct
  source 1..120: mol_type = other DNA
caaagtgctgggattacaggcgtgagctactgcacccagacctgaatatgtatgtttttaattgacattttctctctgcttttttcccacatgactctttcttctgttacaggccaagtg

SEQ ID NO: 118152 - DNA, 120 bp, synthetic construct; identical to SEQ ID NO: 15811
  source 1..120: mol_type = other DNA

SEQ ID NO: 118153 - DNA, 120 bp, synthetic construct
  source 1..120: mol_type = other DNA
gagaagctgtcggccctagaagtgcagttccaccgcgactcgcagcagcaggaggctgagacgccgccaacttcgtcctccggttgcgggggcggtgcgggcaaacctcgcgaggagaag

SEQ ID NO: 118154 - DNA, 120 bp, synthetic construct; identical to SEQ ID NO: 14171
  source 1..120: mol_type = other DNA

SEQ ID NO: 118155 - DNA, 120 bp, synthetic construct; identical to SEQ ID NO: 14172
  source 1..120: mol_type = other DNA

SEQ ID NO: 118156 - DNA, 120 bp, synthetic construct; identical to SEQ ID NO: 19708
  source 1..120: mol_type = other DNA

SEQ ID NO: 118157 - DNA, 120 bp, synthetic construct
  source 1..120: mol_type = other DNA
tgtgattgtgggggctgacaagtccgaaatctatacagcaggtgggcaacctgaaaatttggggaagagttgatgttgcagtcttttttttttttttttttttgagacggagtctcgctc

SEQ ID NO: 118158 - DNA, 120 bp, synthetic construct; identical to SEQ ID NO: 29577
  source 1..120: mol_type = other DNA

SEQ ID NO: 118159 - DNA, 120 bp, synthetic construct; identical to SEQ ID NO: 29578
  source 1..120: mol_type = other DNA

SEQ ID NO: 118160 - DNA, 120 bp, synthetic construct; identical to SEQ ID NO: 29579
  source 1..120: mol_type = other DNA

SEQ ID NO: 118161 - DNA, 120 bp, synthetic construct; identical to SEQ ID NO: 29580
  source 1..120: mol_type = other DNA

SEQ ID NO: 118162 - DNA, 120 bp, synthetic construct; identical to SEQ ID NO: 29581
  source 1..120: mol_type = other DNA

SEQ ID NO: 118163 - DNA, 120 bp, synthetic construct; identical to SEQ ID NO: 21711
  source 1..120: mol_type = other DNA

SEQ ID NO: 118164 - DNA, 120 bp, synthetic construct; identical to SEQ ID NO: 21712
  source 1..120: mol_type = other DNA

SEQ ID NO: 118165 - DNA, 120 bp, synthetic construct; identical to SEQ ID NO: 22468
  source 1..120: mol_type = other DNA

SEQ ID NO: 118166 - DNA, 120 bp, synthetic construct
  source 1..120: mol_type = other DNA
agtgagcccgagatggcaccactgcactccagcttcggcgacagagcaagactctgcctcaaaaaaaaaaaaaaaaaaaacaaaaccctaaagggtggcaggggaaggattaaaaaaaaa

SEQ ID NO: 118167 - DNA, 120 bp, synthetic construct; identical to SEQ ID NO: 23057
  source 1..120: mol_type = other DNA

SEQ ID NO: 118168 - DNA, 120 bp, synthetic construct; identical to SEQ ID NO: 23058
  source 1..120: mol_type = other DNA

SEQ ID NO: 118169 - DNA, 120 bp, synthetic construct
  source 1..120: mol_type = other DNA
acaccggggcctgttgtcgggtcggggggaggggggagggacagcattaggagatatacctaaggttaaatgacgagttaatgggtgcaggacaccaacatggcacatgtatacatatgt

SEQ ID NO: 118170 - DNA, 120 bp, synthetic construct
  source 1..120: mol_type = other DNA
cccagacggggtcgtggccgggcagaggcgctccccacatcccagacggggcggcggggcggaggtgctccccacatctcagacgatgggcggctgggcagagacgctcctcacttccta

SEQ ID NO: 118171 - DNA, 120 bp, synthetic construct; identical to SEQ ID NO: 24651
  source 1..120: mol_type = other DNA

SEQ ID NO: 118172 - DNA, 120 bp, synthetic construct; identical to SEQ ID NO: 24652
  source 1..120: mol_type = other DNA

SEQ ID NO: 118173 - DNA, 120 bp, synthetic construct
  source 1..120: mol_type = other DNA
cccccaccgacctactttactgtctccaaactcgggcagcccacctggcccccgacgaccccagcccctgcaccgggtaccccgacgttccatccagacccgcgtttcaccagggcggcg

SEQ ID NO: 118174 - DNA, 120 bp, synthetic construct
  source 1..120: mol_type = other DNA
ctgaccctgctccctcctgtgcccctggcagccacgacaagggacccgaggcggaggagggcgtcgagctgcaggaaggtgagtgcttgccgggccggccgcgcccggggagggctgggg

SEQ ID NO: 118175 - DNA, 120 bp, synthetic construct; identical to SEQ ID NO: 9356
  source 1..120: mol_type = other DNA

SEQ ID NO: 118176 - DNA, 120 bp, synthetic construct; identical to SEQ ID NO: 9357
  source 1..120: mol_type = other DNA

SEQ ID NO: 118177 - DNA, 120 bp, synthetic construct; identical to SEQ ID NO: 9352
  source 1..120: mol_type = other DNA

SEQ ID NO: 118178 - DNA, 120 bp, synthetic construct; identical to SEQ ID NO: 2954
  source 1..120: mol_type = other DNA

SEQ ID NO: 118179 - DNA, 120 bp, synthetic construct
  source 1..120: mol_type = other DNA
ttcaggggctcaccacttccacaaataattcttctggttttgatgcccccagtaaaatattattctcccattgcttttggtgttttagacatgaagtccttgcccatacctatgtcctga

SEQ ID NO: 118180 - DNA, 120 bp, synthetic construct
  source 1..120: mol_type = other DNA
ccatggaatactatgcagccataaaaaatgatgagttcatgtcctttgtggggacacagatgaaggtggaaaccatcattctcggcaaactatcacaaggacaaaaaaccaaacaccaca

SEQ ID NO: 118181 - DNA, 120 bp, synthetic construct
  source 1..120: mol_type = other DNA
caatcctaagccaaaagaacaaagctggaggcatcacgctacctgacttcaaactagactacaaggctacagtaaccaaaacagcatggtactggtaccaaaacagacatagaccaatag

SEQ ID NO: 118182 - DNA, 120 bp, synthetic construct
  source 1..120: mol_type = other DNA
agtgtggcgattcctcagggatcttgaactagaaataccatttgacccagccatcccattactgggtacatactcaaaggattgtaaatcatgctgctataaagacacatgcacacgtat

SEQ ID NO: 118183 - DNA, 120 bp, synthetic construct
  source 1..120: mol_type = other DNA
gtggggggaggggggagggatagctttaggagatctacctaatgctaaatgacgagttaatgggtatagcacaccagcatggcacatgtatacatgtgtaacaaacctgcacattgtgca

SEQ ID NO: 118184 - DNA, 120 bp, synthetic construct
  source 1..120: mol_type = other DNA
tgtggtgtggtgctgaagaggatgtatattctgttgatttggagtggagagttctgtagatgtctattaggtctgcttggtgcagagctgagttcaattcctggatatccttgttaactt

SEQ ID NO: 118185 - DNA, 120 bp, synthetic construct
  source 1..120: mol_type = other DNA
aaactagactacaaggctacagtaaccaaaacagcatggtactggtaccaaaacagacatagaccaatagaatggaacagagccctcagaaataatgctgcatatctacaactatctgat

SEQ ID NO: 118186 - DNA, 120 bp, synthetic construct
  source 1..120: mol_type = other DNA
ttgacccagccatcccattactgggtatatacccaagggattataaatcatgctgctataaagacacatgcacacgtatgtttattgtggcactattcacaatagcaaagacttggaacc

SEQ ID NO: 118187 - DNA, 120 bp, synthetic construct
  source 1..120: mol_type = other DNA
gcaggtattgacggccaggcttctaaacctcttaaaactctccaactctggtgccaacatagacaatactcttttaagcactcctttttagttatccccacctgcccagttcccttatta

SEQ ID NO: 118188 - DNA, 120 bp, synthetic construct
  source 1..120: mol_type = other DNA
cctttgcacccgtcatcccagcctctctttgctttcacttggactgaccctgacacccattaggctcagcaaattacctgggctgtacttcaaagcttcacagatagcccccattacttc

SEQ ID NO: 118189 - DNA, 120 bp, synthetic construct
  source 1..120: mol_type = other DNA
aggcaggctatgctacagtacaagccactagcccacctcttagaacctctcattttctttacatcatggaaatctatcctcaaggaaataacttctcagtgttccatctgctattctact

SEQ ID NO: 118190 - DNA, 120 bp, synthetic construct
  source 1..120: mol_type = other DNA
taggttcccacgccgcccctaatcccgctcgaagcagccctgagaaacatcgcccattatctctccataccatcccccaaaattttcgctgtcccaacactttaccactatttcatttta

SEQ ID NO: 118191 - DNA, 120 bp, synthetic construct
  source 1..120: mol_type = other DNA
cctcaaccgctttctcctttcaatcttggtgccacacttcaatctctcccttctcttaatttcaattcctttcattttctggtagagacaaaagagacatgttttatccgtgaactcaaa

SEQ ID NO: 118192 - DNA, 120 bp, synthetic construct
  source 1..120: mol_type = other DNA
tctaatcttccttttctacagacccatctgacctctcccttcctccccaggttgttcctcgccaggccgagctaggtcccaattcttcctcagcctctgctcctccaccctataatcttt

SEQ ID NO: 118193 - DNA, 120 bp, synthetic construct
  source 1..120: mol_type = other DNA
actacagctatatctcattgccgcccttcttcccaatccaaagcctcctttgcatcctcctcttctatccccccaccttaactcacaagtataagatacctctactccctccttggtgac

SEQ ID NO: 118194 - DNA, 120 bp, synthetic construct
  source 1..120: mol_type = other DNA
ctgctttaatactgttagaggccctcaaaataagtagaggcctttcctaccgggtctgagaaggccaccacggtcatttcttcccttctgtcagacataattccccggtttggccttccc

SEQ ID NO: 118195 - DNA, 120 bp, synthetic construct
  source 1..120: mol_type = other DNA
ctgtccccgtcttacagacagactgggcaacatctcccgtctccctacacctccgaacttcctttaacagccctcacctttaccctcctgaagaactcatttactttctagacaggttca

SEQ ID NO: 118196 - DNA, 120 bp, synthetic construct
  source 1..120: mol_type = other DNA
acatcgtccattctctctccataccaccccccaaaaattttcgccgccccaacacttcaatactattttgttttatttttcttattaagaaggcaggaatgtcaggcctctgagcccaag

SEQ ID NO: 118197 - DNA, 120 bp, synthetic construct
  source 1..120: mol_type = other DNA
aggttggagtgagctaggatggtgccactgcattccagcctgggcggcagagtgagactgtctcaaaaaaaaaaaaaaaaatcagtcacttgctggtcttttaatatacatatacgattt

SEQ ID NO: 118198 - DNA, 120 bp, synthetic construct
  source 1..120: mol_type = other DNA
ttcccccagcgcggggtcggggactcggcccagccagcggcgcgaggaaatctgcacttgacttccgtcctctcccaggcgggaatgagcgctgcccgccccggccgagacccttccttc

SEQ ID NO: 118199 - DNA, 120 bp, synthetic construct; identical to SEQ ID NO: 24914
  source 1..120: mol_type = other DNA

SEQ ID NO: 118200 - DNA, 120 bp, synthetic construct
  source 1..120: mol_type = other DNA
caggcagaggggctcctcacatcccagacgatgggcggccaggcagagacactcctcacttcccagacggggtggcggccgggcagaggctgcaatctcagcactttgggaggccaaggc

SEQ ID NO: 118201 - DNA, 120 bp, synthetic construct; identical to SEQ ID NO: 18732
  source 1..120: mol_type = other DNA

SEQ ID NO: 118202 - DNA, 120 bp, synthetic construct
  source 1..120: mol_type = other DNA
tggtctctcttgagctctccttgcgttgctcgcctgtctgtgtcttcagcgccgagggctcttggttccctgcctcttgacacactctcactgtgtctttcccattcactcttctggatg

SEQ ID NO: 118203 - DNA, 120 bp, synthetic construct
  source 1..120: mol_type = other DNA
catattctggagcccagcccccaccgcagcaggtctcctgctactcagaggaagcttcttcctgggagcaagctgtcttgccacaggagccaaatcatcacagaggtcgacacgggcctc

SEQ ID NO: 118204 - DNA, 120 bp, synthetic construct
  source 1..120: mol_type = other DNA
tgaaatgctcttgtggaagctaggctgccaaataataaagcatcaaatggtagaaacatgcactgaagtttgaagagttactcagtgcacaaagtaggctgtgaaagactttggggaaat

SEQ ID NO: 118205 - DNA, 120 bp, synthetic construct
  source 1..120: mol_type = other DNA
cccattcactcttctggatgtaaaagaggacataggcctgttgactcaggacagaggtgatgccagaggcagtgacctcggcatcatccattttataccactggccttcttgagctttga

SEQ ID NO: 118206 - DNA, 120 bp, synthetic construct
  source 1..120: mol_type = other DNA
accacacctggctaatttttgtatgtttagtagatatgagttttcaccatgttggccaggctggtctcaatttcctgacctcaggtgatttgcccacctcagcttcccaaagttctggga

SEQ ID NO: 118207 - DNA, 120 bp, synthetic construct
  source 1..120: mol_type = other DNA
aattctggtttaatttgtatgggagtggcctggatatgaagatttaaaatttctcccaggtgattccagtgtgcacctagctttgagaactacatgtaaggaggtttctggctgttcttg

SEQ ID NO: 118208 - DNA, 120 bp, synthetic construct
  source 1..120: mol_type = other DNA
ttgtatttccttccctgggttgggaagttttcagtcattataggtatgcgttgcttaccaacagggatacgttctgaaaatgcatcagaaggtgaatttgtcattgtgtggacatcatgg

SEQ ID NO: 118209 - DNA, 120 bp, synthetic construct; identical to SEQ ID NO: 23439
  source 1..120: mol_type = other DNA

SEQ ID NO: 118210 - DNA, 120 bp, synthetic construct; identical to SEQ ID NO: 23440
  source 1..120: mol_type = other DNA

SEQ ID NO: 118211 - DNA, 120 bp, synthetic construct; identical to SEQ ID NO: 23441
  source 1..120: mol_type = other DNA

SEQ ID NO: 118212 - DNA, 120 bp, synthetic construct; identical to SEQ ID NO: 23442
  source 1..120: mol_type = other DNA

SEQ ID NO: 118213 - DNA, 120 bp, synthetic construct; identical to SEQ ID NO: 23443
  source 1..120: mol_type = other DNA

SEQ ID NO: 118214 - DNA, 120 bp, synthetic construct
  source 1..120: mol_type = other DNA
ccagcctggccaacatggtaaaaccctgtctctactaaaaacataaaaaaattagctgggcgtggtggcgcagcctgtagtcccagctacttaggaggctgaggcaggagaatcgcttga

SEQ ID NO: 118215 - DNA, 120 bp, synthetic construct
  source 1..120: mol_type = other DNA
ggtggctccctgggtcctggtacctgtgcagagccctgtgcccttgtgcctcttgtggggggccacatggtggtagaatagccaagttttgcattattctcagaggagctcagcagattc

SEQ ID NO: 118216 - DNA, 120 bp, synthetic construct
  source 1..120: mol_type = other DNA
aatgcataggcaaacatgtcattgtgggttcatagtaccaaccaaactttcttcctcagatggcctgtgcccactttgaggataatcataaagtagccagttgactggaccacatttaat

SEQ ID NO: 118217 - DNA, 120 bp, synthetic construct; identical to SEQ ID NO: 23447
  source 1..120: mol_type = other DNA

SEQ ID NO: 118218 - DNA, 120 bp, synthetic construct; identical to SEQ ID NO: 23448
  source 1..120: mol_type = other DNA

SEQ ID NO: 118219 - DNA, 120 bp, synthetic construct
  source 1..120: mol_type = other DNA
ttttcttttcttttcttttctttttttttttttgacggagtctcgctctgttgccgggctggagtgtagtggcacaatcttggctactacacttggctcctcctcccaggttcaagcgat

SEQ ID NO: 118220 - DNA, 120 bp, synthetic construct
  source 1..120: mol_type = other DNA
gcccacctcggcctctcaaagtgctgggattacaggcatgagccaataaatatttttataatcattaactaccgaggagaagctggagagaaaaaaggtggatgaagttaaggcagagag

SEQ ID NO: 118221 - DNA, 120 bp, synthetic construct
  source 1..120: mol_type = other DNA
ctcacgcctgtaatccctgcactttgggagactgaggtgggcagatcatgaggtcaggagattgagaccatcctggctaacacggtgaaaccctgtctctactaaaaatacaaaaagtta

SEQ ID NO: 118222 - DNA, 120 bp, synthetic construct
  source 1..120: mol_type = other DNA
caaactatataactgagccttatttataattagggatattatcaaaatatgtaaccatgaggcccctcaggtcctgatcagtcagaatggatgctttcaccagcagacccggccatgtgg

SEQ ID NO: 118223 - DNA, 120 bp, synthetic construct
  source 1..120: mol_type = other DNA
cagtgggtgtgagcacccccactttagagatgaagtgatggagacattcagatgtttaaccccttgttcaagattccatacttgataaatggcagatcaaactcccaacataaaatgtgg

SEQ ID NO: 118224 - DNA, 120 bp, synthetic construct
  source 1..120: mol_type = other DNA
aaaaaggtcctcttggttgttgacaagatactgttttaaagttccattttgccatacttcgaacagcttgtcattagctcaatttagccacatgtgaaatcactaaggcggacggacttc

SEQ ID NO: 118225 - DNA, 120 bp, synthetic construct
  source 1..120: mol_type = other DNA
attttaaaagactttagggcaggcgtggtggctcacacctgtaatcccagcactttaagaggccgaggagggcagatcacctgaggtcaggagttcgaaaccagcctgaccaacatggtg

SEQ ID NO: 118226 - DNA, 120 bp, synthetic construct
  source 1..120: mol_type = other DNA
ccttccttccactcagtgcagcgcacactgattgatcctccatcttccccaaaagacaggaacagcatgagcagtggagagtagattccaatgatagaaaaaatagtcagtgatttctca

SEQ ID NO: 118227 - DNA, 120 bp, synthetic construct
  source 1..120: mol_type = other DNA
atagatgcagaaaaagcctttgacaaaatccagcatttctttatgattaaaaccgttcgtcaaaatcagcatagaacggacataccttaaggtaataaaagctatctatgacaaacccac

SEQ ID NO: 118228 - DNA, 120 bp, synthetic construct
  source 1..120: mol_type = other DNA
tcctggatggcagagctgcctgctagaggagaagccaggacatgtgtgcagcatctgcatggctctctcctccatttattttattttattttattttattttaattttttgagaccgagt

SEQ ID NO: 118229 - DNA, 120 bp, synthetic construct; identical to SEQ ID NO: 17797
  source 1..120: mol_type = other DNA

SEQ ID NO: 118230 - DNA, 120 bp, synthetic construct
  source 1..120: mol_type = other DNA
gaaggataggaagatgaggagataagggaagggagagagttgaggggggaaggaaaggagggggaaggggtaaagagaagagagggcagaaggagagaggaagaggaaggacagggaaag

SEQ ID NO: 118231 - DNA, 120 bp, synthetic construct
  source 1..120: mol_type = other DNA
tggccaggctggccaaggcccgggcgccgagaacaaagcgcggaggccggacaaagatggggctgcgcgatcgccgaggggaggctgcaaggcaggcaccgcccccgagctgcggctgct

SEQ ID NO: 118232 - DNA, 120 bp, synthetic construct; identical to SEQ ID NO: 23015
  source 1..120: mol_type = other DNA

SEQ ID NO: 118233 - DNA, 120 bp, synthetic construct; identical to SEQ ID NO: 23016
  source 1..120: mol_type = other DNA

SEQ ID NO: 118234 - DNA, 120 bp, synthetic construct; identical to SEQ ID NO: 23017
  source 1..120: mol_type = other DNA

SEQ ID NO: 118235 - DNA, 120 bp, synthetic construct
  source 1..120: mol_type = other DNA
tgtggaactgtaagtccaattaaacctctttttcttcccagccttgcctatgtctttattagcagcttgagaatggactaatacagtaaattgggtccggtagagtaggacgttggtgaa

SEQ ID NO: 118236 - DNA, 120 bp, synthetic construct; identical to SEQ ID NO: 23018
  source 1..120: mol_type = other DNA

SEQ ID NO: 118237 - DNA, 120 bp, synthetic construct; identical to SEQ ID NO: 23019
  source 1..120: mol_type = other DNA

SEQ ID NO: 118238 - DNA, 120 bp, synthetic construct
  source 1..120: mol_type = other DNA
tgccgtcatcactaaggccagtattaaggacgtactggacagtgaagggtatttactgttctatcacaaacaggtgctagaacatgagtcagaaaaagtgaaagaaatgaacacacaagc

SEQ ID NO: 118239 - DNA, 120 bp, synthetic construct
  source 1..120: mol_type = other DNA
gacataacaaaggacttgatttctttggatattaagctgcaagaaacgggacgggggtgggggggcggggtggagatttataaataaagagagtcttaaaagacacttcaaacatactta

SEQ ID NO: 118240 - DNA, 120 bp, synthetic construct
  source 1..120: mol_type = other DNA
aaatttatagcaccaaatgcccacaggaaaaagcaggaaagatttaaaatcaacaccttaacatcacaattaaaagaactagagaagcaagagcaaacacattcaaaagctagcagaagg

SEQ ID NO: 118241 - DNA, 120 bp, synthetic construct
  source 1..120: mol_type = other DNA
acagccaagatcatactgaatgcgaaaaaactggaagcattccctttgcaaactggcacaagacaaggatgccctctctcaccactcctattcaacatagtgttggaagttctggccagg

SEQ ID NO: 118242 - DNA, 120 bp, synthetic construct; identical to SEQ ID NO: 16349
  source 1..120: mol_type = other DNA

SEQ ID NO: 118243 - DNA, 120 bp, synthetic construct; identical to SEQ ID NO: 16350
  source 1..120: mol_type = other DNA

SEQ ID NO: 118244 - DNA, 120 bp, synthetic construct
  source 1..120: mol_type = other DNA
gagtgcactgatatcataatattgttttaatttacatttcactgattactagtgtcgttgatcattttttttttttttttgagacggagtctcgctctgttgcccaggctggaatgcaat

SEQ ID NO: 118245 - DNA, 120 bp, synthetic construct
  source 1..120: mol_type = other DNA
ccacatatgagaatcagcttatcaaatcacacacacacacacacacacacacacacacacacgcagactttgcatttgtattgggattgtgcattaagtcatccgtagattagtttgtag

SEQ ID NO: 118246 - DNA, 120 bp, synthetic construct
  source 1..120: mol_type = other DNA
ctaaaaatacaaaaattagccaggcatggtggcgtgcacctgtagtatcagctacttgggaggctgaggcaggagaattgcttgaacccaggaggcggaggctgcagtgagtggagatca

SEQ ID NO: 118247 - DNA, 120 bp, synthetic construct
  source 1..120: mol_type = other DNA
tcccaaagtgctgggagtatagatgtgagccaccgcacctggccattttctttctttctttcttttctttttcagacagggtcttgcccagcctggaatgtgtggggcaagcaagcatgg

SEQ ID NO: 118248 - DNA, 120 bp, synthetic construct; identical to SEQ ID NO: 18347
  source 1..120: mol_type = other DNA

SEQ ID NO: 118249 - DNA, 120 bp, synthetic construct; identical to SEQ ID NO: 18348
  source 1..120: mol_type = other DNA

SEQ ID NO: 118250 - DNA, 120 bp, synthetic construct; identical to SEQ ID NO: 18349
  source 1..120: mol_type = other DNA

SEQ ID NO: 118251 - DNA, 120 bp, synthetic construct; identical to SEQ ID NO: 18350
  source 1..120: mol_type = other DNA

SEQ ID NO: 118252 - DNA, 120 bp, synthetic construct; identical to SEQ ID NO: 18351
  source 1..120: mol_type = other DNA

SEQ ID NO: 118253 - DNA, 120 bp, synthetic construct; identical to SEQ ID NO: 18352
  source 1..120: mol_type = other DNA

SEQ ID NO: 118254 - DNA, 120 bp, synthetic construct; identical to SEQ ID NO: 18353
  source 1..120: mol_type = other DNA

SEQ ID NO: 118255 - DNA, 120 bp, synthetic construct; identical to SEQ ID NO: 18354
  source 1..120: mol_type = other DNA

SEQ ID NO: 118256 - DNA, 120 bp, synthetic construct; identical to SEQ ID NO: 18355
  source 1..120: mol_type = other DNA

SEQ ID NO: 118257 - DNA, 120 bp, synthetic construct; identical to SEQ ID NO: 18356
  source 1..120: mol_type = other DNA

SEQ ID NO: 118258 - DNA, 120 bp, synthetic construct; identical to SEQ ID NO: 18357
  source 1..120: mol_type = other DNA

SEQ ID NO: 118259 - DNA, 120 bp, synthetic construct; identical to SEQ ID NO: 18358
  source 1..120: mol_type = other DNA

SEQ ID NO: 118260 - DNA, 120 bp, synthetic construct; identical to SEQ ID NO: 18359
  source 1..120: mol_type = other DNA

SEQ ID NO: 118261 - DNA, 120 bp, synthetic construct; identical to SEQ ID NO: 18360
  source 1..120: mol_type = other DNA

SEQ ID NO: 118262 - DNA, 120 bp, synthetic construct; identical to SEQ ID NO: 18361
  source 1..120: mol_type = other DNA

SEQ ID NO: 118263 - DNA, 120 bp, synthetic construct; identical to SEQ ID NO: 18362
  source 1..120: mol_type = other DNA

SEQ ID NO: 118264 - DNA, 120 bp, synthetic construct
  source 1..120: mol_type = other DNA
tttaacattttaccaacttttgtgaaacaactgaagtacaataaaactgcatatacttagactgggtgtggtgactcacacctgtaatcccagcactttgggaggccaaggcaggcggac

SEQ ID NO: 118265 - DNA, 120 bp, synthetic construct
  source 1..120: mol_type = other DNA
cagagatcacgccactccagcctgggtgacagagcgagatgctgtctcaagaaagaaaaaagtgtacagtcaatcggttttgtcatgcatatataccaatcactaaacacaatgaagaaa

SEQ ID NO: 118266 - DNA, 120 bp, synthetic construct
  source 1..120: mol_type = other DNA
gtttaccagaagagagtgatatactctgttgtactgtcatcttacagaagccttgaaatcttttttgtcctgtcttacaaaaagaaatgaattggccgggcgcggtggctcacgcctgta

SEQ ID NO: 118267 - DNA, 120 bp, synthetic construct
  source 1..120: mol_type = other DNA
agattatttgaagaactacttggtaatatgttttttaaaaatataatctggtggctgggcacgatagttcacacctgtaatgccaggactttgggagactgaggcaggtggatcccttga

SEQ ID NO: 118268 - DNA, 120 bp, synthetic construct
  source 1..120: mol_type = other DNA
tcactcaatcttttgccaattataatctaattttttttagtttttgtttttagagacggggtctcactcctgtcgcccaggctggaatgcagtggcacaatcatggctcactacagcctc

SEQ ID NO: 118269 - DNA, 120 bp, synthetic construct; identical to SEQ ID NO: 18364
  source 1..120: mol_type = other DNA

SEQ ID NO: 118270 - DNA, 120 bp, synthetic construct; identical to SEQ ID NO: 18365
  source 1..120: mol_type = other DNA

SEQ ID NO: 118271 - DNA, 120 bp, synthetic construct; identical to SEQ ID NO: 18366
  source 1..120: mol_type = other DNA

SEQ ID NO: 118272 - DNA, 120 bp, synthetic construct
  source 1..120: mol_type = other DNA
gaccgctagcaagactaataaagaagaaaagagagaagaatcaaacagatgcaataaaaaatgataaaggggatatcaccaccaatcccacagaaatacagactacgatcagagaatact

SEQ ID NO: 118273 - DNA, 120 bp, synthetic construct
  source 1..120: mol_type = other DNA
ctctcaataaactaggtattgatgggacatatctcaaaataataagagctatgttataatatttcactagtactttaatttacgttatcctgacaaccagtaagtttgaatgtcttttca

SEQ ID NO: 118274 - DNA, 120 bp, synthetic construct
  source 1..120: mol_type = other DNA
gggggagggatagcattaggagatatacctaatgtaaatgacaagttaatgggtgcaggacaccaacgtggtacgtgtatacatttgtaacaaacctgcgcgttgtgcacatgtacccta

SEQ ID NO: 118275 - DNA, 120 bp, synthetic construct
  source 1..120: mol_type = other DNA
aaaaaaaaaaaaaattaagaattagctaggagtggcaacacacaccttaagtctcaagtgctcagaaagctgaggcaggaggattgcttgagcccaagagtttgagactacggtgagcta

SEQ ID NO: 118276 - DNA, 120 bp, synthetic construct
  source 1..120: mol_type = other DNA
tacatactacacactattttgccttattaaacattaagtaatcttgccttaaaaaaatcaatgtttaaaatcccggccggacgcggtggctcacgcctgtaatcccagcactttgggagg

SEQ ID NO: 118277 - DNA, 120 bp, synthetic construct
  source 1..120: mol_type = other DNA
aatctctattaaaaatttttaaaaattagccaggcatggtggtgcgtgtctgttgtcccagatactcaggaggctgaggcgggaggattgcatgaacttgggaggtctaggctgcaatga

SEQ ID NO: 118278 - DNA, 120 bp, synthetic construct
  source 1..120: mol_type = other DNA
atacagaatcatggaccaggtgaaccatgctagaatcttagagccacgatttctagtgcctaacatgggcacagctaaaaaatctcctaacggccggtgcagtggctcatgcctgtaatc

SEQ ID NO: 118279 - DNA, 120 bp, synthetic construct
  source 1..120: mol_type = other DNA
actcaggaggctgaggcaggagaattgcctgaacctggaaggcagaggctgcagtgagccacgatcacgccattgcactccatcctggcaatacagtgagactcagtctcaaaaaaatta

SEQ ID NO: 118280 - DNA, 120 bp, synthetic construct; identical to SEQ ID NO: 12142
  source 1..120: mol_type = other DNA

SEQ ID NO: 118281 - DNA, 120 bp, synthetic construct
  source 1..120: mol_type = other DNA
tttcaatagaatattttagaacggatattacacttttgcataatctaatttaaaaatataatatcttggctgggcgcggtggctcacggctgtaatcccagcactttgggaggccgaggc

SEQ ID NO: 118282 - DNA, 120 bp, synthetic construct
  source 1..120: mol_type = other DNA
ttctcctgcctcagcatcctgagtagctggaattacaggtgcgcaccaccacgcctggctaatttttgtatttttggtagagacggggtttcactatgttggtcaggctgatctcgaact

SEQ ID NO: 118283 - DNA, 120 bp, synthetic construct; identical to SEQ ID NO: 5093
  source 1..120: mol_type = other DNA

SEQ ID NO: 118284 - DNA, 120 bp, synthetic construct; identical to SEQ ID NO: 22103
  source 1..120: mol_type = other DNA

SEQ ID NO: 118285 - DNA, 120 bp, synthetic construct
  source 1..120: mol_type = other DNA
caacctacaaaatgggagaaaattttcgcaacctactcatctgacaaaagggctaatatccagaatctacaatgaactcaaacaaatttacaagaaaaaaacaaacaaccccatcaaaaa

SEQ ID NO: 118286 - DNA, 120 bp, synthetic construct; identical to SEQ ID NO: 22104
  source 1..120: mol_type = other DNA

SEQ ID NO: 118287 - DNA, 120 bp, synthetic construct; identical to SEQ ID NO: 25438
  source 1..120: mol_type = other DNA

SEQ ID NO: 118288 - DNA, 120 bp, synthetic construct
  source 1..120: mol_type = other DNA
ttatgctaagtgaaataagccaggcacagaaagacaaatactgcacgatttcacttatatgtggaatctattgaactcactgaagtagagagtagaatggtggttaccacaggctgggga

SEQ ID NO: 118289 - DNA, 120 bp, synthetic construct
  source 1..120: mol_type = other DNA
actaaaaaaaaaaaaagacacatctggtaaagaactgctattgaaaatatacaagaaacttggccaggcacagtggctcatgcctataatccaagcactttgggagaccgaggtgggcag

SEQ ID NO: 118290 - DNA, 120 bp, synthetic construct
  source 1..120: mol_type = other DNA
tgaatatgtttctcagtgaagcagccaaaaaagacacaggagagacaagagtggagtctgttcatatgggtactacatacgtgacagatgcatgactttgctttacgtttcctagtctct

SEQ ID NO: 118291 - DNA, 120 bp, synthetic construct
  source 1..120: mol_type = other DNA
atttttttattattattttttatttatttatttatttttttattatactttaagttttagggtacatgtgcacattgtgcaggttagttacatatgtatacatgtgccatgctggtgcgc

SEQ ID NO: 118292 - DNA, 120 bp, synthetic construct
  source 1..120: mol_type = other DNA
gtgcagaagctctttagtttaattagatcccatttgtcaattttggcttttgttgccattgcttttggtgttttggacatgaagtccttgcccatgcctatgtcctgaatggtaatgcct

SEQ ID NO: 118293 - DNA, 120 bp, synthetic construct
  source 1..120: mol_type = other DNA
tgagacaatggggttttctagatatacaatcatgtcgtctgcaaacagggacaatttgacttcctcgtttcctaattgaataccctttatttccttctcctgcctaattgtcctggccag

SEQ ID NO: 118294 - DNA, 120 bp, synthetic construct
  source 1..120: mol_type = other DNA
tctatttgattcttctctctttttttctttattagtcttgctagtggtctatcaattttgttgatcctttcaaaaaaccagctcctggattcattgattttttgaaggtttttttgtgtc

SEQ ID NO: 118295 - DNA, 120 bp, synthetic construct
  source 1..120: mol_type = other DNA
ctgatgggtcttgactctttatccaatttgccagtctgtgtcttttaattggagaatttagtccatttacatttaaagttactattgttatgtgtgaatttgatcctgtcattatgatgt

SEQ ID NO: 118296 - DNA, 120 bp, synthetic construct
  source 1..120: mol_type = other DNA
ttctaaacttttttcaaagttttcaacttctttgcctttggtttgaatgtcctcccgtagctcagagtaatttgatcgtctgaagccttcttctctcagctcgtcaaagtcattctccat

SEQ ID NO: 118297 - DNA, 120 bp, synthetic construct
  source 1..120: mol_type = other DNA
cgcacacggtgcgcacacccactggcctgcgcccactgtctggtactccctagtgagatgaacccggtacctcagatggaaatgcagaaatcacccgtcttctgcgtcgctcacgctggg

SEQ ID NO: 118298 - DNA, 120 bp, synthetic construct
  source 1..120: mol_type = other DNA
atacattttcaacataactaagatagttatatctgtagaatacaaagaagtaggctgggcgcaggggctcatgcctgtaatctcagcactttgggaggccgaggtgggtggatcacttga

SEQ ID NO: 118299 - DNA, 120 bp, synthetic construct
  source 1..120: mol_type = other DNA
ccaagaatgatcaataaaaaaaaaaaaaaaaaatttggtaggcatagtggttagtggtgcatgcttgtaatcccagctacttgggaggctgaggcacgagaaatgcttgaacccgggatg

SEQ ID NO: 118300 - DNA, 120 bp, synthetic construct; identical to SEQ ID NO: 17389
  source 1..120: mol_type = other DNA

SEQ ID NO: 118301 - DNA, 120 bp, synthetic construct
  source 1..120: mol_type = other DNA
tcattcttgagggaacattaagctaatgtctcttaataaaaactgtacttctgttctctattttgatcccttaacaatccagaaagaaagtggggggggaggggagggagagagggagag

SEQ ID NO: 118302 - DNA, 120 bp, synthetic construct; identical to SEQ ID NO: 15978
  source 1..120: mol_type = other DNA

SEQ ID NO: 118303 - DNA, 120 bp, synthetic construct; identical to SEQ ID NO: 15979
  source 1..120: mol_type = other DNA

SEQ ID NO: 118304 - DNA, 120 bp, synthetic construct; identical to SEQ ID NO: 15976
  source 1..120: mol_type = other DNA

SEQ ID NO: 118305 - DNA, 120 bp, synthetic construct; identical to SEQ ID NO: 15977
  source 1..120: mol_type = other DNA

SEQ ID NO: 118306 - DNA, 120 bp, synthetic construct; identical to SEQ ID NO: 15980
  source 1..120: mol_type = other DNA

SEQ ID NO: 118307 - DNA, 120 bp, synthetic construct; identical to SEQ ID NO: 15301
  source 1..120: mol_type = other DNA

SEQ ID NO: 118308 - DNA, 120 bp, synthetic construct
  source 1..120: mol_type = other DNA
ttttttgagacagagttttactctgtcgctcaggctggagtgcagtggtgcgatttcagctcgctgcaacctctgcttcccgggttcaactaattctcctaggcttcagccttttgagta

SEQ ID NO: 118309 - DNA, 120 bp, synthetic construct
  source 1..120: mol_type = other DNA
cccaaagtgctgggattacaggtgtgagccaccgtgcccagccaacttcgtctttttcattactgtatagtattgtattaaatccatgatttatttatccattctgttggattgaggtgg

SEQ ID NO: 118310 - DNA, 120 bp, synthetic construct; identical to SEQ ID NO: 33760
  source 1..120: mol_type = other DNA

SEQ ID NO: 118311 - DNA, 120 bp, synthetic construct; identical to SEQ ID NO: 33761
  source 1..120: mol_type = other DNA

SEQ ID NO: 118312 - DNA, 120 bp, synthetic construct; identical to SEQ ID NO: 33762
  source 1..120: mol_type = other DNA

SEQ ID NO: 118313 - DNA, 120 bp, synthetic construct; identical to SEQ ID NO: 33763
  source 1..120: mol_type = other DNA

SEQ ID NO: 118314 - DNA, 120 bp, synthetic construct; identical to SEQ ID NO: 33764
  source 1..120: mol_type = other DNA

SEQ ID NO: 118315 - DNA, 120 bp, synthetic construct
  source 1..120: mol_type = other DNA
gattgcagtgagcggagatcgtgccagtgggctccagcttgggtgacaagagtgaaactccatctcaaaaaaagaaaagaaaagaatgtttattctatgtcattttaagctaatgaaggg

SEQ ID NO: 118316 - DNA, 120 bp, synthetic construct
  source 1..120: mol_type = other DNA
cacatgttgtgggaggaaccctgtgggaggtaattgaatcatgggggcggttaacccccatgctgttcttgtgatagtgagttctcatgagatctgatggtttcttttttttttcttttt

SEQ ID NO: 118317 - DNA, 120 bp, synthetic construct; identical to SEQ ID NO: 28388
  source 1..120: mol_type = other DNA

SEQ ID NO: 118318 - DNA, 120 bp, synthetic construct; identical to SEQ ID NO: 28389
  source 1..120: mol_type = other DNA

SEQ ID NO: 118319 - DNA, 120 bp, synthetic construct; identical to SEQ ID NO: 28390
  source 1..120: mol_type = other DNA

SEQ ID NO: 118320 - DNA, 120 bp, synthetic construct; identical to SEQ ID NO: 28391
  source 1..120: mol_type = other DNA

SEQ ID NO: 118321 - DNA, 120 bp, synthetic construct; identical to SEQ ID NO: 28392
  source 1..120: mol_type = other DNA

SEQ ID NO: 118322 - DNA, 120 bp, synthetic construct; identical to SEQ ID NO: 28393
  source 1..120: mol_type = other DNA

SEQ ID NO: 118323 - DNA, 120 bp, synthetic construct; identical to SEQ ID NO: 28394
  source 1..120: mol_type = other DNA

SEQ ID NO: 118324 - DNA, 120 bp, synthetic construct; identical to SEQ ID NO: 28395
  source 1..120: mol_type = other DNA

SEQ ID NO: 118325 - DNA, 120 bp, synthetic construct
  source 1..120: mol_type = other DNA
catcaataaacatacatgtgcatgtgtctttatagcagcatgatttataatcctttgggtatatacccagtaatgggatggctgggtcaaatggtatttctagttctagatccctgagga

SEQ ID NO: 118326 - DNA, 120 bp, synthetic construct
  source 1..120: mol_type = other DNA
agtgatatatgtcctgtaacagaaatgattgcctctggtttcagtacccttttatttctcttttcttttcttttttcccttcccttcccttcccttcccttcccttcccttcccttccct

SEQ ID NO: 118327 - DNA, 120 bp, synthetic construct
  source 1..120: mol_type = other DNA
tctcaaactcctgacctcaagtgatccatccaccttagcctctcaaggtgctgggattacaggcttgagccactgcaccagacctggtttaagtacccttttggagataaccccaatcct

SEQ ID NO: 118328 - DNA, 120 bp, synthetic construct; identical to SEQ ID NO: 28373
  source 1..120: mol_type = other DNA

SEQ ID NO: 118329 - DNA, 120 bp, synthetic construct
  source 1..120: mol_type = other DNA
ttgtcatcatggcccgttctcaatgagctgttgggtacacctcccagacggggtggtggccgggcagaggggctcctcacttcccagtaggggcggccaggcagaggcgcccctcacctc

SEQ ID NO: 118330 - DNA, 120 bp, synthetic construct
  source 1..120: mol_type = other DNA
ggtggcgcgcacctgcaattgcaggcactcggcaggctgaggcaggagaatcaggcagggaggttgcagtgagccgagatggcagcagtacagtccagcttcggctcggcatcagaggga

SEQ ID NO: 118331 - DNA, 120 bp, synthetic construct; identical to SEQ ID NO: 28374
  source 1..120: mol_type = other DNA

SEQ ID NO: 118332 - DNA, 120 bp, synthetic construct
  source 1..120: mol_type = other DNA
acctgcaaacagatatagtttgacttctcctctttctatttggtagccctttatttctttctctttcctgattgccctgggcaggacttccaatattgtgttgaaggagtggtgagagag

SEQ ID NO: 118333 - DNA, 120 bp, synthetic construct; identical to SEQ ID NO: 5245
  source 1..120: mol_type = other DNA

SEQ ID NO: 118334 - DNA, 120 bp, synthetic construct; identical to SEQ ID NO: 18659
  source 1..120: mol_type = other DNA

SEQ ID NO: 118335 - DNA, 120 bp, synthetic construct; identical to SEQ ID NO: 18660
  source 1..120: mol_type = other DNA

SEQ ID NO: 118336 - DNA, 120 bp, synthetic construct; identical to SEQ ID NO: 12115
  source 1..120: mol_type = other DNA

SEQ ID NO: 118337 - DNA, 120 bp, synthetic construct
  source 1..120: mol_type = other DNA
gcagagacgctcctcacctcccagacggggtcacggccgggcagaggcgctccttacatcccagacggggcggcggggcaaaggtgctccccacatctcagacgatgggcggccgggcag

SEQ ID NO: 118338 - DNA, 120 bp, synthetic construct; identical to SEQ ID NO: 12116
  source 1..120: mol_type = other DNA

SEQ ID NO: 118339 - DNA, 120 bp, synthetic construct; identical to SEQ ID NO: 12117
  source 1..120: mol_type = other DNA

SEQ ID NO: 118340 - DNA, 120 bp, synthetic construct; identical to SEQ ID NO: 25164
  source 1..120: mol_type = other DNA

SEQ ID NO: 118341 - DNA, 120 bp, synthetic construct; identical to SEQ ID NO: 25162
  source 1..120: mol_type = other DNA

SEQ ID NO: 118342 - DNA, 120 bp, synthetic construct; identical to SEQ ID NO: 25163
  source 1..120: mol_type = other DNA

SEQ ID NO: 118343 - DNA, 120 bp, synthetic construct; identical to SEQ ID NO: 25165
  source 1..120: mol_type = other DNA

SEQ ID NO: 118344 - DNA, 120 bp, synthetic construct; identical to SEQ ID NO: 21043
  source 1..120: mol_type = other DNA

SEQ ID NO: 118345 - DNA, 120 bp, synthetic construct
  source 1..120: mol_type = other DNA
aaactggaaactctaaaacgcagagcgcctctcctcctccaaaggaacgcagttcctcaccagcaacggaacaaagctggatggagaatgattttgacgagctgagagaagaaggcttca

SEQ ID NO: 118346 - DNA, 120 bp, synthetic construct
  source 1..120: mol_type = other DNA
acgagcaaaatcaccagctaacatcataatgacaggatcaaattcacacataacaatattaactttaaatataaatggactaaatgctccaattaaaagacacagactggcaagttggat

SEQ ID NO: 118347 - DNA, 120 bp, synthetic construct
  source 1..120: mol_type = other DNA
tggtttttttgaaaggatcaacaaaattgatagaccgctagcaagactaataaagaaaaaaagagagaagaatcaaatagacacaataaaaaatgataaaggggatatcaccaccgatcc

SEQ ID NO: 118348 - DNA, 120 bp, synthetic construct
  source 1..120: mol_type = other DNA
tctggccagggcaatcaggcaggagaaggaaataaagggtattcaattaggaaaagaggaagtcaaattgtccctgtttgcagacgacatgattgtttatctagaaaaccccatcgtctc

SEQ ID NO: 118349 - DNA, 120 bp, synthetic construct
  source 1..120: mol_type = other DNA
caatggcaacaaaagccaaaattgacaaatgggatctaattaaactaaagagcttctgcacagcaaaagaaactaccatcagagtgaacaggcaacttacaacatgggagaaaattttcg

SEQ ID NO: 118350 - DNA, 120 bp, synthetic construct
  source 1..120: mol_type = other DNA
tagatgacacgttagtgggtgcagcgcaccagcatggcacatgtatacatatgtaactaacctgcacaatgtgcacatgtaccctaaaacttaaagtataataataataataaaaaaaga

SEQ ID NO: 118351 - DNA, 120 bp, synthetic construct; identical to SEQ ID NO: 9007
  source 1..120: mol_type = other DNA

SEQ ID NO: 118352 - DNA, 120 bp, synthetic construct
  source 1..120: mol_type = other DNA
caaggatttcatgaataaaacaccaaaagcaatgtcaacaaaagccaaaattgacaaatgggatctcattaaactaaagagcttctgcacagcaaaagaaactaccatcagagtgaacag

SEQ ID NO: 118353 - DNA, 120 bp, synthetic construct
  source 1..120: mol_type = other DNA
cttcacaatttatgctcttctgccatggcttcagccagtccctccattcggggtcgctgacttcccacaacggattataaatcatgctgctataaagacacatgcacacatatgtttatt

SEQ ID NO: 118354 - DNA, 120 bp, synthetic construct
  source 1..120: mol_type = other DNA
ttttggcataggatggacttggtgatgcgggctcttttttggttccatatgaactttaaagtagtttcttccaattctgtgaagaaagtcattggtagcttgatggggatggcattgaat

SEQ ID NO: 118355 - DNA, 120 bp, synthetic construct
  source 1..120: mol_type = other DNA
ttacatttattgatttgcgtatactgaaccagccttgcatcccagggatgaagcccacttgatcatggtggataagctttttgatgtgctgctggattcggtttgccagtattttattga

SEQ ID NO: 118356 - DNA, 120 bp, synthetic construct
  source 1..120: mol_type = other DNA
agaatggcagtcattaaaaagtcaggaaacaacagttactggagaggatgtggagaaataggaacacttttacacagttggtcggactgtaaactagttcaacccttgtggaagtcagtg

SEQ ID NO: 118357 - DNA, 120 bp, synthetic construct; identical to SEQ ID NO: 35696
  source 1..120: mol_type = other DNA

SEQ ID NO: 118358 - DNA, 120 bp, synthetic construct; identical to SEQ ID NO: 35697
  source 1..120: mol_type = other DNA

SEQ ID NO: 118359 - DNA, 120 bp, synthetic construct
  source 1..120: mol_type = other DNA
cttcatccatgtccctgcaaaggacatgaactcatccttttttacggctgcgtagtatttcatagtgtatacgtgccacattttctgaatccagtctatcattgttggacatttgggttg

SEQ ID NO: 118360 - DNA, 120 bp, synthetic construct
  source 1..120: mol_type = other DNA
ggtagtgcttcctctgactccactcttctccccatgcgttgcgcccctcctggccctgccgtgcgatctccgccgcaccccactccttggggtcccggggttccctgctcacacctcgga

SEQ ID NO: 118361 - DNA, 120 bp, synthetic construct
  source 1..120: mol_type = other DNA
gtgggttgagtacacagctcccaggctctgcaagtgagatggcagaaattgtctgaatacagggagaggtaattagccattttctgtaaccactaattatagagtttttagggttgaatt

SEQ ID NO: 118362 - DNA, 120 bp, synthetic construct
  source 1..120: mol_type = other DNA
gctaagaacacaggttctggagttagactctcaacgtttaagccctggctcctgtggcagtctggtttccctaactaacatgatattaatgtcttatttttcttaaacacttgttatgcg

SEQ ID NO: 118363 - DNA, 120 bp, synthetic construct
  source 1..120: mol_type = other DNA
cacggtttcctctggtctctctgacatttgcttccaacctggggatggtaaatagaggcctgtaagaaacagaatagaaatcacttgttactcagctatagctaatagtagcagttaaag

SEQ ID NO: 118364 - DNA, 120 bp, synthetic construct
  source 1..120: mol_type = other DNA
gtttgaggctgattatcttcattttgcttttgataaagggtggtgaaggaggttctttctgacatttttgcctaggaagtccagaatttaggacactgccacttagaagcactctgtgca

SEQ ID NO: 118365 - DNA, 120 bp, synthetic construct
  source 1..120: mol_type = other DNA
aacacaatatgagtcatgtcaggggtcagtatgatagacagttccaggttctaggagccatattcccacctttatatgactgtcctattcatgctgctgtgacagcctatcagtgtatta

SEQ ID NO: 118366 - DNA, 120 bp, synthetic construct
  source 1..120: mol_type = other DNA
tgctatgttcaaaatatcctgggtggaggtaagacgtagttgctgtgttcaaggagcttctgccataggaaatctgtggatggagaagactgagaagagttttgaatgtcaagggataac

SEQ ID NO: 118367 - DNA, 120 bp, synthetic construct
  source 1..120: mol_type = other DNA
atgaagcaggtgagaaaacagcaaagcccagggcagaaaggaagtgagactgaggtgttgaaagctgattgaaattgctagtgaaaatggtggagacagtaggcagaaaaaaagatgact

SEQ ID NO: 118368 - DNA, 120 bp, synthetic construct
  source 1..120: mol_type = other DNA
ccaggaagaatgaatggtaagggtaaatacaccctaactgggattagaggctgtgggggctgtattggtggtgtatggcaatttgtgctgacctgattccctccagacttatgtgttgtt

SEQ ID NO: 118369 - DNA, 120 bp, synthetic construct
  source 1..120: mol_type = other DNA
ttttaattgacttttggaaattatgaccaaatcccttaaaagcaacttcgctgggtattgtttttttaaccagcaaactggcagtggggggctgggcattgtgtggagggtcgcagatgt

SEQ ID NO: 118370 - DNA, 120 bp, synthetic construct
  source 1..120: mol_type = other DNA
atggtctcgatctgaccttgtgatccgcccgcctcggtttctaggtatttcttataggtatcggctctcctgaaagctttatgaagaatgtaaatggaagatttaaaaagtgttcattgc

SEQ ID NO: 118371 - DNA, 120 bp, synthetic construct
  source 1..120: mol_type = other DNA
agggtgacctcccaagctgccaggagtggtcatccatagggggaggctcggcagaagctggagaatgatggaaattttcatttatctttttgtacttgttcaattttttttacaagtgta

SEQ ID NO: 118372 - DNA, 120 bp, synthetic construct
  source 1..120: mol_type = other DNA
aaaatgttcctggatatctactctgagaaaagctctgagagaggagatgaaccttagagatttgtaggtgcactccatgggttctttaaaaaacaccactaccacctacgggtggtggat

SEQ ID NO: 118373 - DNA, 120 bp, synthetic construct
  source 1..120: mol_type = other DNA
atagccattgtctcctattctcacagcagtcctagaatggcgggaggtcatagccccattttacgggtgatgaaatcgaggcacagagggcagtgttatttgcctaaaattacaaagtta

SEQ ID NO: 118374 - DNA, 120 bp, synthetic construct
  source 1..120: mol_type = other DNA
acacacatgtatacatgtgtttgtaacacctctccctgtggcttggcagtctgtttactctcctggtctcccatttccatactcttagatgccgtgaacagattgtcttcatcattgggg

SEQ ID NO: 118375 - DNA, 120 bp, synthetic construct
  source 1..120: mol_type = other DNA
agtttaagacacactggttagggttttgggctctggaggatgagaaaccttgcttgggttatcagataacagattcttctctggtttccctccgatgttatcaggggaattgttggttgt

SEQ ID NO: 118376 - DNA, 120 bp, synthetic construct
  source 1..120: mol_type = other DNA
ggatgtgaggtaattggcattgttagatgcgtctctgggtaaacaaccaaattttctgcttatttggctgtttccctagctgccttgttaaaacaaaacacctgagttgaccagaacacc

SEQ ID NO: 118377 - DNA, 120 bp, synthetic construct
  source 1..120: mol_type = other DNA
accatttcatacataaagaaaccaaggttttcagagattgaataacttgtgcaagatcacacatctggtagggcagatccaagatctgtttgtctccaaaatctgcttctgtcctgcctg

SEQ ID NO: 118378 - DNA, 120 bp, synthetic construct
  source 1..120: mol_type = other DNA
ttgataaacccagagagttaattaacatggcataaatgtgctagctcattgttgtttttcagggaaagaactagagagagacacaagtcaccccggaataaagacggcagagggtcagaa

SEQ ID NO: 118379 - DNA, 120 bp, synthetic construct
  source 1..120: mol_type = other DNA
aaacagcagctccgcagctccagacacctactgttgctcaggaatgcagggattcattgtttgagaaaagctgcaaatcaggattttatgtggaatcctaactttacagtatttttgaaa

SEQ ID NO: 118380 - DNA, 120 bp, synthetic construct
  source 1..120: mol_type = other DNA
aggcaaccactgtgttgatttctatcactgtagatcaattttgcctgtttttgaatttagtataattagaatcatatggtccatctcctgcccccacccacccgccctgcttagcataat

SEQ ID NO: 118381 - DNA, 120 bp, synthetic construct
  source 1..120: mol_type = other DNA
atctgactgttttctttccgagtgaaaggatacatacaaatttcagaggcagaaacctctttggcctcctgtgtcttttcagcgccttgctcttattgcttcattattgttgccagttgt

SEQ ID NO: 118382 - DNA, 120 bp, synthetic construct
  source 1..120: mol_type = other DNA
ctccaaaagttggacttcgtaagcctttataacccagcgtgaattggaaagaagatgcaggaggtttatctctatagatgagctctcacaagattagtctaatacctgggttgcgcattg

SEQ ID NO: 118383 - DNA, 120 bp, synthetic construct
  source 1..120: mol_type = other DNA
tttcgtgcccttttgttggtcctcatctttctctttgtggtttcctattggcttttttacggggtccgcattttggactctcgggaccggaattaccagggcattgtgcaatatgcagtc

SEQ ID NO: 118384 - DNA, 120 bp, synthetic construct
  source 1..120: mol_type = other DNA
attaatccctgtgtcacagatgaagaaactagggcttaggggatttaagtaatttgcacaaaaacatatggctagcctcatttaggattcactcagatgtcatgaggccagggctgagtg

SEQ ID NO: 118385 - DNA, 120 bp, synthetic construct
  source 1..120: mol_type = other DNA
ataggtgataggaacacaggaggacagagaatttcagattgtggcagcaataaagccgagcaggagacagtctgtctcagaacaggttttgctgcagttaaagtggtagagaaaaatccg

SEQ ID NO: 118386 - DNA, 120 bp, synthetic construct
  source 1..120: mol_type = other DNA
gttactaggccagaaatacaacttctaaggccttttgtaaagtgtagaaacagacaggagggaagagggagcgggaatagacaaagcaagcctcggaaatcagaatagcaggtctccatt

SEQ ID NO: 118387 - DNA, 120 bp, synthetic construct
  source 1..120: mol_type = other DNA
taaacaattacatagtcttactgggagccaggtaccttctgatcttttaatgtgcaactcagttttcacaacaatcatgtgaggtaggttctggtagcctccttttcagatgagcaaacc

SEQ ID NO: 118388 - DNA, 120 bp, synthetic construct
  source 1..120: mol_type = other DNA
acacaagacagaggctactaggatgttaagttcaatgtcacagacccccacaaccacctcgggctgtctttctcagagtctgtttattctcattttgcatatagttctaacaaatttaat

SEQ ID NO: 118389 - DNA, 120 bp, synthetic construct
  source 1..120: mol_type = other DNA
attatattcaaggaagtgttatggactgaatgtttgtggtccccccaaattcatatgtggaagccctaacctccagtgtggcatatttggagatggagcccctaaggaagtaattgaggt

SEQ ID NO: 118390 - DNA, 120 bp, synthetic construct
  source 1..120: mol_type = other DNA
tttgccagtccttagctccactccatagcaaagcaaaggacaagaacaagtaagggctgaaacatagagcgtggagggttttgctcaggccatgctttgctgtgggagaattttgaaggc

SEQ ID NO: 118391 - DNA, 120 bp, synthetic construct
  source 1..120: mol_type = other DNA
gtgtgattcatcactgtaatttaagacgtggagagagcaaagttcccatcccaggcaggggaggcgcagtgcaggttggactgtgtaaggaaatggcagcatggcgaggtttgtgccgcg

SEQ ID NO: 118392 - DNA, 120 bp, synthetic construct
  source 1..120: mol_type = other DNA
agtaaacatgagctaattccagtttttgtccctctttgtccttctcaagttccaaggtgatcattgcctgttatctatgggacttgtgtaagctaacttcccaaatgcagctgtgagaca

SEQ ID NO: 118393 - DNA, 120 bp, synthetic construct
  source 1..120: mol_type = other DNA
ccttcgtgttcctttatggctgtgtcactccagtttctgcccccatcattacatgacctcctctctgtgggtctctgtatgtcctctttttttttttttttttttttttgagacagagtc

SEQ ID NO: 118394 - DNA, 120 bp, synthetic construct
  source 1..120: mol_type = other DNA
agccccttgaaggtttcatttacatccgggtctcagtactagggacttagcaggtgctcataattcgtaactgcttttgatggagttggagaggctagttattaagatttttctgaatgt

SEQ ID NO: 118395 - DNA, 120 bp, synthetic construct
  source 1..120: mol_type = other DNA
ggatgtcatttgggagcttgtaaaaagaattgttatatggctgccaggcgcaatggctcacacctgtaatcctagcactttggtaggctgaaatggatggatcccttaaggccagaagtt

SEQ ID NO: 118396 - DNA, 120 bp, synthetic construct
  source 1..120: mol_type = other DNA
atctagaccttctggaatctagtactcctacaatggatgcctccctataggtaggtttgattttcaggaggctgagagttggcaggaagtactgcataaaaacaaagagtagcataactt

SEQ ID NO: 118397 - DNA, 120 bp, synthetic construct
  source 1..120: mol_type = other DNA
gtctttcagatttttgtgcattaacatttgaactacgttttgaggtgcttctttccaggtctgtttaagaaatgtagcccaagggcaagcccctcttctctgttgccatggcagtcatgt

SEQ ID NO: 118398 - DNA, 120 bp, synthetic construct
  source 1..120: mol_type = other DNA
tgaaatacatattcaagactgatcttaggcctgtgggaattctaagattgcatgaacagagaagttaagcctgcaagtattatatacccatggaggaaccaaaggacgtgtcccctgtgt

SEQ ID NO: 118399 - DNA, 120 bp, synthetic construct
  source 1..120: mol_type = other DNA
tgagttttgtgtttatttagttacttggaaattctcattccctaatactgccaggtatgctgggcatcaaacagaccatcctctgtaggtgagagcatgcacactcttggaggcgtttat

SEQ ID NO: 118400 - DNA, 120 bp, synthetic construct
  source 1..120: mol_type = other DNA
gtgtgtgtgtgtgtatgtgagagagagagagagagagatcagggagagggttgcaatgaatctctggatggggtaggaataaagaaacacttgcccctctctggagaatgccatggacag

SEQ ID NO: 118401 - DNA, 120 bp, synthetic construct
  source 1..120: mol_type = other DNA
gcatgttaccgggaagcccaacttggaggtttgtaaatcatatcagagttccagctctcctgtttattaaatgcatactgttgtgcaggtcatagatttttgagcctcagttttcttacc

SEQ ID NO: 118402 - DNA, 120 bp, synthetic construct
  source 1..120: mol_type = other DNA
attccttatacccagggataccaaggcctaggggacaaaaccctgaatgaggacctgagaaacctgaatctatactttgttctttcactcattagctctgcaaccattagtaagtctctt

SEQ ID NO: 118403 - DNA, 120 bp, synthetic construct
  source 1..120: mol_type = other DNA
aagggttgcttttcaaaattggtgcacattacccacaaactcagaaagctacctaaatcattaagactagaaatctcagtagtccaggcatctggtgagatacctgcgggcacttcttac

SEQ ID NO: 118404 - DNA, 120 bp, synthetic construct
  source 1..120: mol_type = other DNA
cagatggtaacatcttcagcacactctatgtgttgtttttggccaacattttaattgccaccgttcttcatgcccttctgagttctttttccatttccactgaccagattggggtttagg

SEQ ID NO: 118405 - DNA, 120 bp, synthetic construct
  source 1..120: mol_type = other DNA
ctcttgtagactttcaatctttcctttcttaccactagaatgaggtttctgtttaaaaacatgacctgctgggacacctttggagtgcaccttgctccagtgtttctcaaactgaagcct

SEQ ID NO: 118406 - DNA, 120 bp, synthetic construct
  source 1..120: mol_type = other DNA
acccccaaggtgcgctgctccgggcgggctctgccaccgtcatcctggcttgtcactgagcttggccagttgaattatagcgtgttactagaagtgataaaatcgaaaggcatctctaaa

SEQ ID NO: 118407 - DNA, 120 bp, synthetic construct
  source 1..120: mol_type = other DNA
catgtatctaatagagagttgtggccaaggaggcaaactagagtaaagatacagcaaatgacttctctacagagaagtgggttcaaatcctggctccaccacttaattgttttgtgactg

SEQ ID NO: 118408 - DNA, 120 bp, synthetic construct
  source 1..120: mol_type = other DNA
atgtagatgttttttaagctgaaatgggaaaacaaaacagaaattgggtcattgctctctctttctctgtgtgtgtgtgtgtgtgtgtgtgtgtgtgtgtgtgtgtgtgtgtaaaccaca

SEQ ID NO: 118409 - DNA, 120 bp, synthetic construct
  source 1..120: mol_type = other DNA
gtatttctgaagcctaagtttcaagtagaggaaaagccaggtcagagttgtagatcctaccaaattgccctcctagggggtgtacttttgcatgctttgcctctaacatctgagattttt

SEQ ID NO: 118410 - DNA, 120 bp, synthetic construct
  source 1..120: mol_type = other DNA
gcactccagcctgggtaacaagagtgaaactctgcctcaaaaaaaaaaaagaggatactagttaaaaactgttcttcgccaggtgcagtggctcacgcctgtaatctcaacactttggga

SEQ ID NO: 118411 - DNA, 120 bp, synthetic construct
  source 1..120: mol_type = other DNA
taggtagtgtcattgcgtccactaatagagagtgtaaatgacttgtgcagaatcactgccagtaaatggtagcgcatgcgttcttattcatgcaagtatatgcagcttgtatttcctgac

SEQ ID NO: 118412 - DNA, 120 bp, synthetic construct
  source 1..120: mol_type = other DNA
ttttaaaaattcttcttcattgctgactgaaactggcagatgattgaccagtatcctttgaccatctgcactttatttggaaggaagcaggggctgtccaccctgaaaaagagtgactga

SEQ ID NO: 118413 - DNA, 120 bp, synthetic construct
  source 1..120: mol_type = other DNA
actaacactgtgactctgggattggcaggtgcaacttggagccacttaatttcctggggacgtaagttcttcccaagcttagagcaagctgccctgccaaaggagaccaaaccatgccaa

SEQ ID NO: 118414 - DNA, 120 bp, synthetic construct
  source 1..120: mol_type = other DNA
accattctaaaatactgttcttccaaccctatcttcaatgaccagtccagaaggggttaagctggattcatttgctctggcatgtgcattcccagcagggtgaagaaaggtttaaattaa

SEQ ID NO: 118415 - DNA, 120 bp, synthetic construct
  source 1..120: mol_type = other DNA
aaaattcataaagtaagccctagagaaaatacttgaccaccaaatttttgcccaactatcatcacctcccttcccccgcctctgttcttgccttttgacatctacatggaagacaagttc

SEQ ID NO: 118416 - DNA, 120 bp, synthetic construct
  source 1..120: mol_type = other DNA
actgtcttctggggagcctgctgtcctgcaggcaagtccattaaactctttcttgctttaggactctgaaaacagcaagaaacaaacaaacaaaggtcaagctctaagaaaattactgct

SEQ ID NO: 118417 - DNA, 120 bp, synthetic construct
  source 1..120: mol_type = other DNA
tggaaagaacttgagaatcccttctggaaaacccagcctttcagtgttaacacctgctgcaagacagggatgctgttgttctggcagcccccctttgcttttgcctggccccaccttctg

SEQ ID NO: 118418 - DNA, 120 bp, synthetic construct
  source 1..120: mol_type = other DNA
gacatggccttttgttgtgaagttgctcatcatttaggagtgtttaattctaaaaagccttcagcctaagaaagcttcatctgtggggaccagagacttgttgctcagggagttagtgat

SEQ ID NO: 118419 - DNA, 120 bp, synthetic construct
  source 1..120: mol_type = other DNA
atgacaaggcctgagtgagttcctgcataaactgggtagtgggctcttttgacacatttgcaagcatgtaaatgaatgaatgacactaccagcaaccatctgtacaggtccatttactta

SEQ ID NO: 118420 - DNA, 120 bp, synthetic construct; identical to SEQ ID NO: 22588
  source 1..120: mol_type = other DNA

SEQ ID NO: 118421 - DNA, 120 bp, synthetic construct
  source 1..120: mol_type = other DNA
ctgacctccccacctccctcccggacggggcagctggccgggcggggggctgaccccgccacctccctcccagatagggcggctggcctggcagaggggctcctcacttcccagtagggg

SEQ ID NO: 118422 - DNA, 120 bp, synthetic construct; identical to SEQ ID NO: 22589
  source 1..120: mol_type = other DNA

SEQ ID NO: 118423 - DNA, 120 bp, synthetic construct; identical to SEQ ID NO: 22590
  source 1..120: mol_type = other DNA

SEQ ID NO: 118424 - DNA, 120 bp, synthetic construct; identical to SEQ ID NO: 22591
  source 1..120: mol_type = other DNA

SEQ ID NO: 118425 - DNA, 120 bp, synthetic construct; identical to SEQ ID NO: 22592
  source 1..120: mol_type = other DNA

SEQ ID NO: 118426 - DNA, 120 bp, synthetic construct
  source 1..120: mol_type = other DNA
ttgaggtcaggagttcgagaccagcctgcccaaaatggtgaaaccttgtctctactaaaaaatacgaaaattagccaggtgttggccgggtatggtggctcacgcctataatcccagcac

SEQ ID NO: 118427 - DNA, 120 bp, synthetic construct; identical to SEQ ID NO: 19477
  source 1..120: mol_type = other DNA

SEQ ID NO: 118428 - DNA, 120 bp, synthetic construct
  source 1..120: mol_type = other DNA
tctatccatggatccatccatccactaatctgtcttttttatttatttgtttatttatttacggcgtctcactctgtcacccaggctggagtgcaggggcatgatctcggctcactgcaa

SEQ ID NO: 118429 - DNA, 120 bp, synthetic construct; identical to SEQ ID NO: 33092
  source 1..120: mol_type = other DNA

SEQ ID NO: 118430 - DNA, 120 bp, synthetic construct; identical to SEQ ID NO: 33093
  source 1..120: mol_type = other DNA

SEQ ID NO: 118431 - DNA, 120 bp, synthetic construct; identical to SEQ ID NO: 33094
  source 1..120: mol_type = other DNA

SEQ ID NO: 118432 - DNA, 120 bp, synthetic construct; identical to SEQ ID NO: 33095
  source 1..120: mol_type = other DNA

SEQ ID NO: 118433 - DNA, 120 bp, synthetic construct
  source 1..120: mol_type = other DNA
gaatccaagccctactgcatgtgggaagacttgatcagtctctcagcttgggtctgcctctgcctagcacagtgcctggcgctagaaaggcatggatgagtacatggatggatgagtagg

SEQ ID NO: 118434 - DNA, 120 bp, synthetic construct
  source 1..120: mol_type = other DNA
gcctgtaatcctagcactctgggaggcagaggcaggcagatcacttgaagctagaagttctagaccagcctgggcaacgtggtgaaaccccatctctactaaaaatacaaaaattagcca

SEQ ID NO: 118435 - DNA, 120 bp, synthetic construct
  source 1..120: mol_type = other DNA
tttgggcattttctggtctgaagtggggaagttaaatgaaataaggtagaggagtgaaaaatgtaaaaaaggcaaagaagattttctctccaaggctcttgcaagggagcaccagagccc

SEQ ID NO: 118436 - DNA, 120 bp, synthetic construct
  source 1..120: mol_type = other DNA
tggagttgggagaggtggggatagagggcgtggagtgagaatggaggagaggggtaaaagtagtggatgagtggaccaaggcattcgggggagaggtggagagagagggagagaggaaaa

SEQ ID NO: 118437 - DNA, 120 bp, synthetic construct; identical to SEQ ID NO: 33096
  source 1..120: mol_type = other DNA

SEQ ID NO: 118438 - DNA, 120 bp, synthetic construct; identical to SEQ ID NO: 33097
  source 1..120: mol_type = other DNA

SEQ ID NO: 118439 - DNA, 120 bp, synthetic construct
  source 1..120: mol_type = other DNA
gcttaacagaatgatagatggatgaatgaactaatgaatgggtggatgaatggtggatggatggatgaatggatgggtggatggatgaatggatgagtggatggatggatggatggatgg

SEQ ID NO: 118440 - DNA, 120 bp, synthetic construct; identical to SEQ ID NO: 33098
  source 1..120: mol_type = other DNA

SEQ ID NO: 118441 - DNA, 120 bp, synthetic construct; identical to SEQ ID NO: 33099
  source 1..120: mol_type = other DNA

SEQ ID NO: 118442 - DNA, 120 bp, synthetic construct
  source 1..120: mol_type = other DNA
ccggattgtacgttccatctactgagatagggaaaaaccgccttagggctggaggtgggacctgcgggcagcaatactgctttgtaaagcattgagatgtttatgtgtatgcatatctaa

SEQ ID NO: 118443 - DNA, 120 bp, synthetic construct; identical to SEQ ID NO: 7889
  source 1..120: mol_type = other DNA

SEQ ID NO: 118444 - DNA, 120 bp, synthetic construct
  source 1..120: mol_type = other DNA
tcttttgagaagtgtctgttcatgtcctttgcccactttttgatggggttgtttgagtaagagctatctgtgacaaacccacagccaagatcatactgaatgcgaaaaaactggaagcat

SEQ ID NO: 118445 - DNA, 120 bp, synthetic construct
  source 1..120: mol_type = other DNA
aatcaattcaagatggattaaagacttaaacattagacctaaaaccataaaagccctagaagaaaacctaggcattaccattcaggacataggcatgggcaaggacttcatgtctaaaac

SEQ ID NO: 118446 - DNA, 120 bp, synthetic construct; identical to SEQ ID NO: 7890
  source 1..120: mol_type = other DNA

SEQ ID NO: 118447 - DNA, 120 bp, synthetic construct; identical to SEQ ID NO: 7891
  source 1..120: mol_type = other DNA

SEQ ID NO: 118448 - DNA, 120 bp, synthetic construct; identical to SEQ ID NO: 7892
  source 1..120: mol_type = other DNA

SEQ ID NO: 118449 - DNA, 120 bp, synthetic construct; identical to SEQ ID NO: 7893
  source 1..120: mol_type = other DNA

SEQ ID NO: 118450 - DNA, 120 bp, synthetic construct
  source 1..120: mol_type = other DNA
tcacaaaactgggtaggaagaatcaatattgtgaaaatggccatactgcccatggtaatttatagattcaatgccatccccatcaagctaccaatgactttcttcacagaattggaaaaa

SEQ ID NO: 118451 - DNA, 120 bp, synthetic construct
  source 1..120: mol_type = other DNA
actattcacaatagcaaagacttggaaccaacccaaatgtccaacaatgatagactggattaagaaaatgtagcagatatacaccaaggaatactatgcagccataaaaaatgatgagtt

SEQ ID NO: 118452 - DNA, 120 bp, synthetic construct
  source 1..120: mol_type = other DNA
gtgaaacacacaataatacaatatatagctaaagaataacaggcctatgagtgagaacatgcggtgtttggttttttgttcttgcgataatttgctgagaatgatggtctccagcttcat

SEQ ID NO: 118453 - DNA, 120 bp, synthetic construct
  source 1..120: mol_type = other DNA
gtaacgcctaggttttcttctagggtttttatggttttaggtctaacatgtaagtctttaatccatcttgaattaatttttgtataaggtgtaaggaagggatccagtttcagctttcta

SEQ ID NO: 118454 - DNA, 120 bp, synthetic construct; identical to SEQ ID NO: 7896
  source 1..120: mol_type = other DNA

SEQ ID NO: 118455 - DNA, 120 bp, synthetic construct; identical to SEQ ID NO: 7897
  source 1..120: mol_type = other DNA

SEQ ID NO: 118456 - DNA, 120 bp, synthetic construct; identical to SEQ ID NO: 7898
  source 1..120: mol_type = other DNA

SEQ ID NO: 118457 - DNA, 120 bp, synthetic construct; identical to SEQ ID NO: 14333
  source 1..120: mol_type = other DNA

SEQ ID NO: 118458 - DNA, 120 bp, synthetic construct; identical to SEQ ID NO: 14334
  source 1..120: mol_type = other DNA

SEQ ID NO: 118459 - DNA, 120 bp, synthetic construct; identical to SEQ ID NO: 33414
  source 1..120: mol_type = other DNA

SEQ ID NO: 118460 - DNA, 120 bp, synthetic construct; identical to SEQ ID NO: 33415
  source 1..120: mol_type = other DNA

SEQ ID NO: 118461 - DNA, 120 bp, synthetic construct
  source 1..120: mol_type = other DNA
ccacctcttcctccctccctccctccccacacaccacctcttcccccctccctccctccctccccaccatcagagaacacagagtcactcagatcaatttgcaacacattcattttatta

SEQ ID NO: 118462 - DNA, 120 bp, synthetic construct; identical to SEQ ID NO: 33416
  source 1..120: mol_type = other DNA

SEQ ID NO: 118463 - DNA, 120 bp, synthetic construct
  source 1..120: mol_type = other DNA
gtaaattctatatatagaaaggacctgtgtatttctaacgcatggaaatatgaaatgtactttttgtctcctcagttgcgaatataaaaaggcttttttcaagtagatagatttttctct

SEQ ID NO: 118464 - DNA, 120 bp, synthetic construct
  source 1..120: mol_type = other DNA
tcctccctccctccctccccacacaccacctcttcctccctccctccctccctccccacacaccacctcttcctccctccctccctcaccacacaccacctcttcccccctccctccctc

SEQ ID NO: 118465 - DNA, 120 bp, synthetic construct
  source 1..120: mol_type = other DNA
ttggggggttctgccaagtgacgacaggagaggcttcttgtgaggaaggaggcgaggggaagacgaggaggagcttgggagggtcactcaccttcttcttcgggtcactggggctcggct

SEQ ID NO: 118466 - DNA, 120 bp, synthetic construct
  source 1..120: mol_type = other DNA
ggtatcggtatcaggctgggtttcggtatcaggctgggttcctcagagaaggagaaactaaaccaacaggatattgtgtgtgtgtgtgtgtgtgtgtaatattatatatcataaatatat

SEQ ID NO: 118467 - DNA, 120 bp, synthetic construct
  source 1..120: mol_type = other DNA
caagtagatagattttgctctattttgaatttttcttcttaattatattagattgtagggaggggacgctgaaaggaaagagatggaaacgattcttccatcagtttctataaccggaaa

SEQ ID NO: 118468 - DNA, 120 bp, synthetic construct
  source 1..120: mol_type = other DNA
aggtgtgtggggagggagggaggaagaggaggtgtgtggggagggagggaggaagaggtggtgtgtggggagggagggagggaggaagaggaggtgtgtggggagggagggagggaggaa

SEQ ID NO: 118469 - DNA, 120 bp, synthetic construct; identical to SEQ ID NO: 118465
  source 1..120: mol_type = other DNA

SEQ ID NO: 118470 - DNA, 120 bp, synthetic construct
  source 1..120: mol_type = other DNA
gtagtattgatttatgaataatattatatatatgatacagtttattctaagcaattggctcacacattcacacaatgtgggggggtctaggaagctgaaatatgtagggcaagtgggcag

SEQ ID NO: 118471 - DNA, 120 bp, synthetic construct
  source 1..120: mol_type = other DNA
atgtttatgatatataatattacagacactctctctctgtctcacacacacacacaaatatcctgttggtttagtttctccttctctgaggaacccagcctgatacggatacccagctga

SEQ ID NO: 118472 - DNA, 120 bp, synthetic construct
  source 1..120: mol_type = other DNA
ccctaaaccggagcccttctgtgatctccctgttgtccttccagactaccaaggtggccaagaagggaaaagcagttcgtagagggagacgcgggaagaaaggggctgcgacaaagatgg

SEQ ID NO: 118473 - DNA, 120 bp, synthetic construct; identical to SEQ ID NO: 118468
  source 1..120: mol_type = other DNA

SEQ ID NO: 118474 - DNA, 120 bp, synthetic construct
  source 1..120: mol_type = other DNA
ccctacactctaatataattaagaagaaaaattcaaagtagagcaaaatctgtctacttgaaaagagtctttttatttttgcgactgaggagacaaaaagtatatttcatatttccattc

SEQ ID NO: 118475 - DNA, 120 bp, synthetic construct
  source 1..120: mol_type = other DNA
atcggtttgcaacacattcattttattgtcatcaacatgggaagcaccctgctggtgagatctctgaggtctggcagctgggcctaaacttagttgctgctcagggagataggggagtag

SEQ ID NO: 118476 - DNA, 120 bp, synthetic construct
  source 1..120: mol_type = other DNA
actatctttaggggtgctaacccaaatctccctttctccaattagagcaccctgccttcctcattagatgtcacccccccccgcccccgacttcatccgccatgtcctgatggtgctttg

SEQ ID NO: 118477 - DNA, 120 bp, synthetic construct
  source 1..120: mol_type = other DNA
ttggattctcctacatgcttccagttagccagccagaggattttcctgtctctgggaatcttgtggaaaatcttgcattttggggcaccttctccttcagttataatgatataccttaaa

SEQ ID NO: 118478 - DNA, 120 bp, synthetic construct
  source 1..120: mol_type = other DNA
ttctgcctcagcctcctgagtagctgggattacaggcttgcgccaccatgcccggctattttttttttttttttttttgtatttttaatagagacagggtttctccatgttggtcaggtt

SEQ ID NO: 118479 - DNA, 120 bp, synthetic construct
  source 1..120: mol_type = other DNA
agagagcatgcacttgaagttgtatcactccgcccctgcctcacaggcaccttttgacttttgggtggtggagtgagaataagaaggcaccttaccctacatcacggaacccccaaacac

SEQ ID NO: 118480 - DNA, 120 bp, synthetic construct
  source 1..120: mol_type = other DNA
cacttgggtttctttgtcaaacaaacagcaactcctcatggctgaggtctcaagggaccggggaaaagcccgcaggaaaggggttaggttggacaggagagagaatgggctgggtggata

SEQ ID NO: 118481 - DNA, 120 bp, synthetic construct
  source 1..120: mol_type = other DNA
tgccttgttaggaattaataattaaataacatttgtttaatgtttcctcctaagcttcatgggagaggagcctgtgtcccatttgctgctgaaccccagtacctagcatagtgcctggta

SEQ ID NO: 118482 - DNA, 120 bp, synthetic construct
  source 1..120: mol_type = other DNA
atgcagatggccatgagcaggacatgctcctcctcatgcaagttcagcttcttcagtcccacctggaacttgatgaggggctcaatcagctccaggctgtgtccggctgtgagagacaat

SEQ ID NO: 118483 - DNA, 120 bp, synthetic construct
  source 1..120: mol_type = other DNA
tcccatggtaaactccaccaaccttccattctagcagcatcatgccactccacattcagatgctgtgtgttctcactgtgccttttttttttcttgtgacaggatctcactctgttgctg

SEQ ID NO: 118484 - DNA, 120 bp, synthetic construct
  source 1..120: mol_type = other DNA
actctttagcacagttagggccatgtcattgtgatgccttgaacattgctggtgctcttattttgcccgtctcctccagttctgctctttacatgcttgttttctactcctttttttttt

SEQ ID NO: 118485 - DNA, 120 bp, synthetic construct
  source 1..120: mol_type = other DNA
atggggttgttagcgccgagattaatgacctcttctattgagctacaatccacgtgatagtacactcatttgtggtttacagttttgtgctcaataaacccagaaccagacttctccact

SEQ ID NO: 118486 - DNA, 120 bp, synthetic construct
  source 1..120: mol_type = other DNA
gaataactttatacatagccttttgttcagtgccccactcaaacagatggccagcagtgaacacatcttccatggatgcaggccagagaggttttagtgggatcactgcttttgtgatcc

SEQ ID NO: 118487 - DNA, 120 bp, synthetic construct
  source 1..120: mol_type = other DNA
ccctccgcccctgcctgcaggcagcaagatcaaagccaccagggatgcagccactgttcttctatgtcttggaacaatagaacccctaagtgtggaaagcagcagaaccagagagctact

SEQ ID NO: 118488 - DNA, 120 bp, synthetic construct
  source 1..120: mol_type = other DNA
aatttctgttatttgggttggtgagaggcataaaataacacagagccagttttctcagggcagaaacaaactggaaagttctgggtttagctctgtgaatgaccatcatctcactggcaa

SEQ ID NO: 118489 - DNA, 120 bp, synthetic construct
  source 1..120: mol_type = other DNA
aattgcttgaacccaggaggcagaggttgcagtaagttgagatcgcgtcattgtactccggcctgggcaacaagagggaaactctgtctcaaaaaaaatacaaaaaattagccaggcatg

SEQ ID NO: 118490 - DNA, 120 bp, synthetic construct
  source 1..120: mol_type = other DNA
tagactgtttcacaagtctacatggccaagcccttctctctatcacttcattctgctctcagagttggggtgtggaggaatcatatcgttgaatttaaagagataatatgaggattccag

SEQ ID NO: 118491 - DNA, 120 bp, synthetic construct
  source 1..120: mol_type = other DNA
ctccagcctgcgtgacagagcaagatgccgtttaaaaaaataaaaaataaaaaaaagaagtggtggatgagtgatctccaacccttcttgtagctcagtctaggactctgactctgttcc

SEQ ID NO: 118492 - DNA, 120 bp, synthetic construct
  source 1..120: mol_type = other DNA
ttctaaatatacatatgtgttttttttaaaaaaaaaaaaaaaaagaaaggaaggaaagcatgatgcctcccagactctcagctgagctggaggggacaggtcctccagggccagagtggt

SEQ ID NO: 118493 - DNA, 120 bp, synthetic construct
  source 1..120: mol_type = other DNA
tggcaatgatgcgctgctgctcctcagacagcttgggccgcagactgtccttcaaggcctcctcctccttccgcttcaggatcatctcccgcttcctctgcacttcctcatctgtcagaa

SEQ ID NO: 118494 - DNA, 120 bp, synthetic construct
  source 1..120: mol_type = other DNA
ccagcatgtacagccttgacatttctgtccatggaagttttcaagtcctcttgaaggccccaaagggtgaggccttgcagctctaatcttagaagttctctccagccactaatcagggtg

SEQ ID NO: 118495 - DNA, 120 bp, synthetic construct
  source 1..120: mol_type = other DNA
tgctaactttccagtgattctgtgatgccattctcctgcccagatacttttctcggcccctactgatgaccacgtccaaactaaagttggcctcttcctaactttcagacttcatgtctt

SEQ ID NO: 118496 - DNA, 120 bp, synthetic construct
  source 1..120: mol_type = other DNA
tcaatagtctgacaccaaatatcaaatgcatccacacagattacaccaactgtgtgcaaatcattttcctggttcaggaaaggctagtgagtactctagtgctgcttgtctcctgcaatg

SEQ ID NO: 118497 - DNA, 120 bp, synthetic construct
  source 1..120: mol_type = other DNA
agaaagttcaagtttaaccctataacatgattcctcccagtcacttgcatcaaatagcaacctccatcttctatggaggtaacagaggaagaaatgctgagatctaccagtttcacacag

SEQ ID NO: 118498 - DNA, 120 bp, synthetic construct
  source 1..120: mol_type = other DNA
gttcccagggtataaagtcaactaagaatggaaaagagagaaaatgagtctttggtgggaccaagctctcttcaatccatctcttagagcatgtgaaagtgcctggaaatgcacaatgga

SEQ ID NO: 118499 - DNA, 120 bp, synthetic construct
  source 1..120: mol_type = other DNA
ggggacatgaagtctgattctagtcccagcttggccaccaacttgctttctgaccccagacctgaggtctttacctctctgagtctcagatgttctttctattttaagtcagtaagacat

SEQ ID NO: 118500 - DNA, 120 bp, synthetic construct
  source 1..120: mol_type = other DNA
gcctactctagttaccaaataactgtcctagagctctgatgcaaagttcaagtgttgttttcagtgatgggtcaaaatatccatgtaaatatgccatgttggtcttctccaaccccagag

SEQ ID NO: 118501 - DNA, 120 bp, synthetic construct
  source 1..120: mol_type = other DNA
acctgtcttctgggccccctggtctccatttctccaacagaagacatgaggcccaccccagctgccagtcactctcacctctaggctgggcaccaaacgattcctacttctcctttcatt

SEQ ID NO: 118502 - DNA, 120 bp, synthetic construct
  source 1..120: mol_type = other DNA
taaaaaattaaacaggaaataacaaaagtgcatttccctagaaaaaacccttttttttttgagatggagtctcgctctgtcgcccaggctggagtgcagtgttgcgatctcagctcactg

SEQ ID NO: 118503 - DNA, 120 bp, synthetic construct
  source 1..120: mol_type = other DNA
aaaaaacaaaacaaaacaaaacaaaaaaaacccagaaaactactgaagtgttcttagctagaaaggtggcacccttgaggctgggtgtggtggctcaggcctgtaatcccagcactttga

SEQ ID NO: 118504 - DNA, 120 bp, synthetic construct
  source 1..120: mol_type = other DNA
attagttaggattcttggtaaaacatgactcactgttcacattcactagaacatacatggggttgaggggaatcgcactcatcaattgtcaagcttgctctagcaaatggacagctgggg

SEQ ID NO: 118505 - DNA, 120 bp, synthetic construct
  source 1..120: mol_type = other DNA
ttttgtttttcaacaaccgggcatttcgctctggtcactgaggggctgctctgtcctcccactggctgtcttgtctggctcagagctcttcctgttaagcctgcaaggccatgggcacca

SEQ ID NO: 118506 - DNA, 120 bp, synthetic construct
  source 1..120: mol_type = other DNA
tgtaagcccagcactttgggaggctgaggtgggcagatagcttaggctcaggagtttgagaccaacctggccaacatggtgaaaccctgtatctacaaaagattaaaaaaaattagccag

SEQ ID NO: 118507 - DNA, 120 bp, synthetic construct
  source 1..120: mol_type = other DNA
attgaccgattctcatgccagagaccagtttatcaaaacagaaagagacaaaaacctcacaaaagcatcaagagcctggggccagggcctcaggcctgggacagttgggcctttctccag

SEQ ID NO: 118508 - DNA, 120 bp, synthetic construct
  source 1..120: mol_type = other DNA
tctgtctatctgtctttccttccttccttccttcttttctctctttctttcttttttttttttttctggatggaatttcactctgtcacccacgctggagtgcagcagcacgatctgggc

SEQ ID NO: 118509 - DNA, 120 bp, synthetic construct
  source 1..120: mol_type = other DNA
agaaactagcagaaagaggcagtgggagggagtgctgagagtgggtgaaagtagattttaaagtagattttaaacatctcattaagaatttgagacccctgaagcagacaccatgtctta

SEQ ID NO: 118510 - DNA, 120 bp, synthetic construct
  source 1..120: mol_type = other DNA
ctgccatgtaagacaggccttgcttcccctttaccttccgccatgattgtaagtttctgaggcctccccatccatgcagaaccatgagtcaattaaacctgttttctttttttttttttt

SEQ ID NO: 118511 - DNA, 120 bp, synthetic construct
  source 1..120: mol_type = other DNA
tctccaaatattttggcctcctctacccaagcttctgaacattactcttggaacatccatagataaccccactcattctctttcattcacatccttgaatatctgtgaatggaggtcagc

SEQ ID NO: 118512 - DNA, 120 bp, synthetic construct
  source 1..120: mol_type = other DNA
aagccaaaccaaatactaaatggtcaaatgggattggattactggtctccagggcttggaaaagagctagtgacccaatattcaagcaatgctgtctgtcaataactatcaggaaatggt

SEQ ID NO: 118513 - DNA, 120 bp, synthetic construct
  source 1..120: mol_type = other DNA
tgtgaagaccctggctgggaagataggtgccaagtcatgtgaatttttcactgctctgcacatgttcacaaatgaccacaaaggggctgcaagtattgattttggtaaattttagcaagt

SEQ ID NO: 118514 - DNA, 120 bp, synthetic construct
  source 1..120: mol_type = other DNA
ttgcagactgacaagatatgaccttcggtgagaatctccatattgacaactcctagcccaatgccagattataaatgcagattgaagtctggtgacggaatgagtgaaagaaacacaagg

SEQ ID NO: 118515 - DNA, 120 bp, synthetic construct
  source 1..120: mol_type = other DNA
tgaattcactgtgcccccaaggcgaggagagcactccggtttagacaacaaccaagccgacctcagcatcctcctctggacttgatttgtgctttcctcatttgatggttagagccctgc

SEQ ID NO: 118516 - DNA, 120 bp, synthetic construct
  source 1..120: mol_type = other DNA
aaatgcaagggctcccttcatggaaacaccttgcttcttctccctccctttccactggggagagcctgggaggagggctcacctgaagaagcctttgcagccttcacaggtcatagcatt

SEQ ID NO: 118517 - DNA, 120 bp, synthetic construct
  source 1..120: mol_type = other DNA
ttttcagagatggtttttctaaacaggcattatcatctagagatggatttcatacttgaggaaaaggagaagagacagacggaacgaaagcccacagctttgggaaggccttctcaggaa

SEQ ID NO: 118518 - DNA, 120 bp, synthetic construct
  source 1..120: mol_type = other DNA
atatacattaaagtttagcaagtataaatatatacctatatataaagagagaagcactttcagaaagagaacaaagatcattgcagcgatagcaaagacacagaatcaacccaggtgccc

SEQ ID NO: 118519 - DNA, 120 bp, synthetic construct
  source 1..120: mol_type = other DNA
ctacagagtctgggtcatccaggctcccaagtatccggtggatttcgtggaaaacagagaaatcaaatggggggtaggaaggaatatctgttaaatcagtcaacacatgttcagcatcac

SEQ ID NO: 118520 - DNA, 120 bp, synthetic construct
  source 1..120: mol_type = other DNA
ttctgtgaggtctcacagacacttcagacccaaaggcttctgaaatgaagaaggggaaaccttttatctaaggcggagcgctgaccgcctccccagtctctaaggaagtgggcacgagag

SEQ ID NO: 118521 - DNA, 120 bp, synthetic construct
  source 1..120: mol_type = other DNA
tcctagaactgtgagccgactgaggccacttgccaccccctccagtactgccagctcccagggagcatctgaggaaaacactagtggacaatgagccaagataacctaagctgggctggc

SEQ ID NO: 118522 - DNA, 120 bp, synthetic construct
  source 1..120: mol_type = other DNA
tgattgtctttggagctggatttgaatctaggtagcttagctctgagtcatttctgcaaccctaagccgtggacacctttcacttccactaagtcaggagcaatgcagagaacaatcccc

SEQ ID NO: 118523 - DNA, 120 bp, synthetic construct
  source 1..120: mol_type = other DNA
tgaccgctaatgtcttttctagctctgagagcatgcaactccaagactggaattcccatcatgagaagcactatttttttttctttttaagagacaaggtctcctctgttacccaggcta

SEQ ID NO: 118524 - DNA, 120 bp, synthetic construct
  source 1..120: mol_type = other DNA
gggagtggagagggtttactgtataaatagaacatatccaaactacttcctgccccgactgtctccccagctccttcatacacacatcttttaaatatgtgtaagaacgattggaaatta

SEQ ID NO: 118525 - DNA, 120 bp, synthetic construct
  source 1..120: mol_type = other DNA
tgtgagtgaagttgcaggggagaagcagcagaagatagcctgggttacacttaattttgatttagactccatcaaattcccaggtttgatcatgatccccacaagaagagtgagtaaggt

SEQ ID NO: 118526 - DNA, 120 bp, synthetic construct
  source 1..120: mol_type = other DNA
atgaggcctcaggcagtggagcaggagatatatggcttacttagatagatttccacttcttatcaacaatttttcctgcaagctgcttttttccaatggaaactctgcccttagctttgt

SEQ ID NO: 118527 - DNA, 120 bp, synthetic construct
  source 1..120: mol_type = other DNA
tcttcctgggacactagcatgggggtacttcccaaggatatctgctacagggaaaagttgatgagacaaggaggctatttgttcagtgacttggagaccaagaaatagaaactggggcat

SEQ ID NO: 118528 - DNA, 120 bp, synthetic construct
  source 1..120: mol_type = other DNA
tgcagaagagcagaggactggctcctgggggcagacaggctgtcttgcttctcctcattggttatggcttagcacggttcctccccacaagtccttactaaacaaaacactcgcaaaaac

SEQ ID NO: 118529 - DNA, 120 bp, synthetic construct
  source 1..120: mol_type = other DNA
gtctgtggcttctaaaactctttcaaaacttcttggggtgaggagaaatgagttgttctaatctctctcctaacagtcagagaagctgagctacaaatctggacttttcctccacgtaaa

SEQ ID NO: 118530 - DNA, 120 bp, synthetic construct
  source 1..120: mol_type = other DNA
tatctctgatagggtccctgcctatgtttaagtgccagccacatggaaaggcctgtactggaagtgagagacacagtggtgagcaagacatagaccctgtcctctaggagcttacagtct

SEQ ID NO: 118531 - DNA, 120 bp, synthetic construct
  source 1..120: mol_type = other DNA
agaaaatcaaaagaaagaacaaatgattcaataagggcagatggaagggaggttagtgaacaactcagctgccatatcaccagtgcaatccttacttaattcctcagtctgtccagggtg

SEQ ID NO: 118532 - DNA, 120 bp, synthetic construct
  source 1..120: mol_type = other DNA
aagttccactctctgcactcaatactctttctggcagaggcaaacatccctcaagaaggaatctgatggactagctcagaacctagattcaattaaaagacttgtgggtgaaaccccatt

SEQ ID NO: 118533 - DNA, 120 bp, synthetic construct
  source 1..120: mol_type = other DNA
tgaaaaaacaccttgaacgattgcatggagcatgatccattcattcgttgtctaccaagcccatccccaaactttctccttttttttgtgccttaagaccctatcctctgttagtttcct

SEQ ID NO: 118534 - DNA, 120 bp, synthetic construct
  source 1..120: mol_type = other DNA
tccatgagataatcacgtcaagtgctcagcatagtgcctggcacgtagtacctgctcagtaaacgttagtgcttattattgcgcacaattactgcaatgactaaggagaattcatctgag

SEQ ID NO: 118535 - DNA, 120 bp, synthetic construct
  source 1..120: mol_type = other DNA
gaggaagagaacatgcactctggacttaagcctgaatttaaattctggttctgatttagtagctcaatgtctttgggcaaggaatttagcctcttaatctctatgaaccttggtttcctc

SEQ ID NO: 118536 - DNA, 120 bp, synthetic construct
  source 1..120: mol_type = other DNA
ccaaggaaaatatatattcctccccaggtattaattgagcacatagtatgggctcactgctgacaccaggctcttggttgaactgaggagaccaccaagtgtttgggaggatgtagaacc

SEQ ID NO: 118537 - DNA, 120 bp, synthetic construct
  source 1..120: mol_type = other DNA
tgcaaatggggagaggcagagggggcttttaaggtgctgtgaatgctccactcttaacttaggtggtaggtacagggtataggattctttaatctatacataaacatataatcttgtgta

SEQ ID NO: 118538 - DNA, 120 bp, synthetic construct
  source 1..120: mol_type = other DNA
agagggaaaaggtaggcaaagtgagaatagctccccattggccaatgggacaatcagcacatagtaggttttcaataaagatgcctgtttgaaagattgtttcctatttgccttccagac

SEQ ID NO: 118539 - DNA, 120 bp, synthetic construct
  source 1..120: mol_type = other DNA
tgtgcagaatgaggactttgtatggcatctggttctgggaacaccacttagtctattccctggcacaggacctgcagggcaggtttgcaaaagcatgacacacattccaactcacagagt

SEQ ID NO: 118540 - DNA, 120 bp, synthetic construct
  source 1..120: mol_type = other DNA
caaccttatcatcccctcatcactgctgtgacctctgctgagtttggagtgatgatcactagggtgattaatattccatttttccctggaaagtttgggtttatgtccattgtcctggta

SEQ ID NO: 118541 - DNA, 120 bp, synthetic construct
  source 1..120: mol_type = other DNA
tggggcttagttacaaaagagatcagttttgaggtcaaataggggaagaatactgagaaaccataaacacaaactatcagggcaccccaaacagcacccgaccttccataatgtttatac

SEQ ID NO: 118542 - DNA, 120 bp, synthetic construct
  source 1..120: mol_type = other DNA
aatgctcagaaaatgcctgcccaactgcttgcctgggctctggcccctttggctgcaactgagcccagacaggaggctgactcactcaccgcacgcatagaggaggaggaggaacaagag

SEQ ID NO: 118543 - DNA, 120 bp, synthetic construct
  source 1..120: mol_type = other DNA
agccgggcgctcaggccccggtatcccagacgccccgaccccgagtccctatcctgagaccccctttcccgctgctcccgggttcgcacctggtccggccggcgggtggacaagctgttc

SEQ ID NO: 118544 - DNA, 120 bp, synthetic construct
  source 1..120: mol_type = other DNA
gataaatgtattccaaatacgttctgttacattatattctaaacgttgggtaataattaccagctcttggggaggagccaagatggccaaataggaacagctccggtctacagctcccag

SEQ ID NO: 118545 - DNA, 120 bp, synthetic construct
  source 1..120: mol_type = other DNA
ccagcacgcagctggagatctgagaacgggcagactgcttcctcaagtgggtccctgacccctgacccccgagcagcctaactgggaggcaccccccagcaggggcacactgacacctca

SEQ ID NO: 118546 - DNA, 120 bp, synthetic construct
  source 1..120: mol_type = other DNA
tcggcagaaaccctacaagccagaagagagtgggggccaatattcaacattcttaaagaaaagaattttcaacccagaatttcatatccagccaaaataagcttcatataagtgaaggag

SEQ ID NO: 118547 - DNA, 120 bp, synthetic construct
  source 1..120: mol_type = other DNA
aaatcaatggaatatatatttttttcagcaccacaccacacctattccaaaattgaccacatacttggaagtaaagctctcctcagcaaatgtaaaagaacagaaattataacaaactat

SEQ ID NO: 118548 - DNA, 120 bp, synthetic construct
  source 1..120: mol_type = other DNA
tccaggaccagacggattcacagcccaattctaccagaggtacaaggaggaactggtaccattccttctgaaactattccaatcaatagaaaaagagggaatcctccctaactcatttta

SEQ ID NO: 118549 - DNA, 120 bp, synthetic construct
  source 1..120: mol_type = other DNA
aagttcatatggaaccaaaaaagagcctgcatcaccaagtcaaccctaagccaaaagaacaaagctggaggcatcaccctacctgacttcaaactataccacaaggctacagtaaccaaa

SEQ ID NO: 118550 - DNA, 120 bp, synthetic construct
  source 1..120: mol_type = other DNA
ttgtggaagtcagtgtggcgattcctcagggatctagaactggaaataccatttgacccagccatcccattactgggtatatacccaaagaactataaatcatgctgctataaagacaca

SEQ ID NO: 118551 - DNA, 120 bp, synthetic construct; identical to SEQ ID NO: 24827
  source 1..120: mol_type = other DNA

SEQ ID NO: 118552 - DNA, 120 bp, synthetic construct
  source 1..120: mol_type = other DNA
gatcaaatcaatggaacgaagtgacaagagaagtttagagaaaaaagggtaaaaagaaacaaacaaagcctccaagaaatatgggactatgtgaaacgaccaaatctatgtctgattggt

SEQ ID NO: 118553 - DNA, 120 bp, synthetic construct
  source 1..120: mol_type = other DNA
catgagcactcaggttcataaagcaagtcctgagtgacctacaaatagacttagactcccacacaataataatgggacactttaacactccactgtcaacattagacagataaacgagac

SEQ ID NO: 118554 - DNA, 120 bp, synthetic construct
  source 1..120: mol_type = other DNA
gcccgcctcagcctccgaaagtgctgggattacagacatgagccaccgcgccaggcttccattttcagtgagttgtttttaaaacacattaagctagttttgaaagtagttttgtttttt

SEQ ID NO: 118555 - DNA, 120 bp, synthetic construct
  source 1..120: mol_type = other DNA
gcggggggctgacccccacctccctcccggacggggtggttgccggccggagacgctcctcacttcccagacggggtggctgccgggcagaggggctcctcacttctcagacggggcggc

SEQ ID NO: 118556 - DNA, 120 bp, synthetic construct
  source 1..120: mol_type = other DNA
atctttgcagccagtttctaaccttgtgtaacgtgaggcaaatgctcttactgaattctttttttttttttttctgagagggagtctctgttgcgcaggctggagtgcagtgtcatgatt

SEQ ID NO: 118557 - DNA, 120 bp, synthetic construct; identical to SEQ ID NO: 24098
  source 1..120: mol_type = other DNA

SEQ ID NO: 118558 - DNA, 120 bp, synthetic construct
  source 1..120: mol_type = other DNA
agcctgggcaacaagagtgaaactccatctcaaacaaacaaacaaacaaacaaaataagaaaacaccaaggctgaagtgagtacacacagtaggctatcgcacatgtaagaaagaagggg

SEQ ID NO: 118559 - DNA, 120 bp, synthetic construct; identical to SEQ ID NO: 24099
  source 1..120: mol_type = other DNA

SEQ ID NO: 118560 - DNA, 120 bp, synthetic construct; identical to SEQ ID NO: 24100
  source 1..120: mol_type = other DNA

SEQ ID NO: 118561 - DNA, 120 bp, synthetic construct; identical to SEQ ID NO: 24101
  source 1..120: mol_type = other DNA

SEQ ID NO: 118562 - DNA, 120 bp, synthetic construct; identical to SEQ ID NO: 24102
  source 1..120: mol_type = other DNA

SEQ ID NO: 118563 - DNA, 120 bp, synthetic construct
  source 1..120: mol_type = other DNA
ggggtccattttgcagacggggaactgaggccccttgaggcaggacacatccagggtgacgctgctcgtaagcgtcagagcattcttttttttttttttttttttctgagacggagtctc

SEQ ID NO: 118564 - DNA, 120 bp, synthetic construct
  source 1..120: mol_type = other DNA
agaggatgcttaaaaggtgattttacccctaggaatatgggggcactgaaatttttttttttttttgagacgggagtcttgctctgcaagctggagtgcagtggcccacgctagaatgca

SEQ ID NO: 118565 - DNA, 120 bp, synthetic construct
  source 1..120: mol_type = other DNA
aattttgtattttactccaaaatttttctgtgcccgatttaatataaaaatttactgagcctgggtgcagtggctcatgcctgtgatctcagcactttgggaggctgaggcaggaggatt

SEQ ID NO: 118566 - DNA, 120 bp, synthetic construct
  source 1..120: mol_type = other DNA
tgagccaagatcacaccactacactccagcctgggcaacagagcaagactccatctctaaataataaataaaatggtaacttttatgtatattttaccaaaatttaaaaaattacaagtt

SEQ ID NO: 118567 - DNA, 120 bp, synthetic construct
  source 1..120: mol_type = other DNA
atatttaagcagagtgagaggtaagctttttgtgtaggtcaggggaaatggagaaaataggtgccctgactcagaccagtctggctctttttttttttttttttggagacggagtcttgc

SEQ ID NO: 118568 - DNA, 120 bp, synthetic construct
  source 1..120: mol_type = other DNA
catgagatattttggcttatttgttgctgacttctaattttttttatttttttgagacagaatctcgctgtgttagctaggctggagtgcagtggcgcaatctcggctcactgcaacctc

SEQ ID NO: 118569 - DNA, 120 bp, synthetic construct
  source 1..120: mol_type = other DNA
agaccaggagttcttgaccagcctggacaacaaagtgagaccccagctccacaaaaaaatttttttttaattacctgggcatcttagcatatgcctgtggtcacagctatttgggaggct

SEQ ID NO: 118570 - DNA, 120 bp, synthetic construct
  source 1..120: mol_type = other DNA
aattttttgcattttagtggagacgggggtttcaccatgttgaccaggctgatcttgaactcttgagctcaggcagtctgcctgcctcagcctcctaaagtgctaggattacaggcgtga

SEQ ID NO: 118571 - DNA, 120 bp, synthetic construct
  source 1..120: mol_type = other DNA
acacaggagcgcattgcacatcaacggatgggagattgaagatttctgttgaaacttacactgtttcatctcagcttttgatggtactgatgagtcttgatctagatacaggactggttc

SEQ ID NO: 118572 - DNA, 120 bp, synthetic construct
  source 1..120: mol_type = other DNA
gggttcacgtaatcctcctgagtagctgggattacaggcgcctgccaccacgctggccaatttttgtacttttagtagagacagtgtttcgtcatgttggccaggctggtttcaaactcc

SEQ ID NO: 118573 - DNA, 120 bp, synthetic construct
  source 1..120: mol_type = other DNA
tgagcctgggctcatagtgagaacccatctatacaaaaaatttttaaaaattagcatggcggcacacatctgtaatcctagctacttggcaggctgaggtgagaagatcattggagttta

SEQ ID NO: 118574 - DNA, 120 bp, synthetic construct
  source 1..120: mol_type = other DNA
gccagctttattattttttttaagctgtctttgtgtcaaaatgatagttcatgctcctcttgttaaaacctgcaggccgagcacagtggctcatgcctgtaatcccagcattttgggaga

SEQ ID NO: 118575 - DNA, 120 bp, synthetic construct; identical to SEQ ID NO: 30787
  source 1..120: mol_type = other DNA

SEQ ID NO: 118576 - DNA, 120 bp, synthetic construct; identical to SEQ ID NO: 30788
  source 1..120: mol_type = other DNA

SEQ ID NO: 118577 - DNA, 120 bp, synthetic construct; identical to SEQ ID NO: 30789
  source 1..120: mol_type = other DNA

SEQ ID NO: 118578 - DNA, 120 bp, synthetic construct; identical to SEQ ID NO: 30790
  source 1..120: mol_type = other DNA

SEQ ID NO: 118579 - DNA, 120 bp, synthetic construct; identical to SEQ ID NO: 30791
  source 1..120: mol_type = other DNA

SEQ ID NO: 118580 - DNA, 120 bp, synthetic construct
  source 1..120: mol_type = other DNA
taaacacagaaatgcaggtagggactgaccttcgccccaaccacggctccacccgctcagtgagattccaaaattgaccacatagttggaagtaaagcactcctcagcaaatgtaaaaga

SEQ ID NO: 118581 - DNA, 120 bp, synthetic construct
  source 1..120: mol_type = other DNA
actattccaatcagcggaaaaaaagggaatcctccctagctcattttatgaggccagcatcatcctgataccaaagcctggcagagacacaacaaaaaaagagaattttagaccaatatc

SEQ ID NO: 118582 - DNA, 120 bp, synthetic construct
  source 1..120: mol_type = other DNA
atggccatactgctcaaggtaatttattgattcaatgccatccccatcaagctaccaatgactttcttcacagaattggaaaaaactactttaaagttcatatggaaccaaaaaagagcc

SEQ ID NO: 118583 - DNA, 120 bp, synthetic construct
  source 1..120: mol_type = other DNA
catcatcactggccatcagagaaatgcaaatcaaaaccgcaatgagataccatatcacaccaattagaatggcgatcattaaaaagtcaggaaacaacaggtgctggagaggatgtggag

SEQ ID NO: 118584 - DNA, 120 bp, synthetic construct
  source 1..120: mol_type = other DNA
acagtgggttcacagtaacacctgccaatgccagccagcaccaccttatccactagccacgtgatatggttttcctgtgtccccgcccaaatctcatattgaattgtagctcccataatt

SEQ ID NO: 118585 - DNA, 120 bp, synthetic construct; identical to SEQ ID NO: 30792
  source 1..120: mol_type = other DNA

SEQ ID NO: 118586 - DNA, 120 bp, synthetic construct; identical to SEQ ID NO: 30793
  source 1..120: mol_type = other DNA

SEQ ID NO: 118587 - DNA, 120 bp, synthetic construct; identical to SEQ ID NO: 30794
  source 1..120: mol_type = other DNA

SEQ ID NO: 118588 - DNA, 120 bp, synthetic construct; identical to SEQ ID NO: 30795
  source 1..120: mol_type = other DNA

SEQ ID NO: 118589 - DNA, 120 bp, synthetic construct; identical to SEQ ID NO: 30796
  source 1..120: mol_type = other DNA

SEQ ID NO: 118590 - DNA, 120 bp, synthetic construct; identical to SEQ ID NO: 30797
  source 1..120: mol_type = other DNA

SEQ ID NO: 118591 - DNA, 120 bp, synthetic construct; identical to SEQ ID NO: 30798
  source 1..120: mol_type = other DNA

SEQ ID NO: 118592 - DNA, 120 bp, synthetic construct; identical to SEQ ID NO: 20460
  source 1..120: mol_type = other DNA

SEQ ID NO: 118593 - DNA, 120 bp, synthetic construct; identical to SEQ ID NO: 20461
  source 1..120: mol_type = other DNA

SEQ ID NO: 118594 - DNA, 120 bp, synthetic construct
  source 1..120: mol_type = other DNA
cccacccctgcctcccaaagtgctgggattacaggcgtgagccaccacgtccagcctgtattttctatcctatatttttatcattattttagagtatactccttcacttacttaaaaaaa

SEQ ID NO: 118595 - DNA, 120 bp, synthetic construct; identical to SEQ ID NO: 4554
  source 1..120: mol_type = other DNA

SEQ ID NO: 118596 - DNA, 120 bp, synthetic construct
  source 1..120: mol_type = other DNA
cttggaccttccggaaactgagccacatcaggctcacgttgatagcataggtggtgatacaaacaatgcagaaatcatagagcacgaagaacaggatccaggccaggtagacagaaccag

SEQ ID NO: 118597 - DNA, 120 bp, synthetic construct
  source 1..120: mol_type = other DNA
actccagcctggtgacagagcgagactatgtcgcaaaaaaaaaaaaaaaaaaaaaaaaaaaattagctgggtgcagtgacatgcctatagtcctagctactcaggaggatcgcttgagcc

SEQ ID NO: 118598 - DNA, 120 bp, synthetic construct
  source 1..120: mol_type = other DNA
tgtctcaaaacaacaacaaacaaaaaacctggggacctaggatgtctttaagggcccttcagcctctaacagtacttaaaccaattaaaagactcctgttagttacctccccacatcccc

SEQ ID NO: 118599 - DNA, 120 bp, synthetic construct
  source 1..120: mol_type = other DNA
gtataacggttcactcggttttgcatcagagactgggagtcgggggcagattatctttgccctggaccccagaatctccagctccctggccactcactcgcctcctctgtattccgtcat

SEQ ID NO: 118600 - DNA, 120 bp, synthetic construct; identical to SEQ ID NO: 29183
  source 1..120: mol_type = other DNA

SEQ ID NO: 118601 - DNA, 120 bp, synthetic construct; identical to SEQ ID NO: 29184
  source 1..120: mol_type = other DNA

SEQ ID NO: 118602 - DNA, 120 bp, synthetic construct; identical to SEQ ID NO: 29185
  source 1..120: mol_type = other DNA

SEQ ID NO: 118603 - DNA, 120 bp, synthetic construct
  source 1..120: mol_type = other DNA
ggcataaaataactgtgcatcttaaattgaaaatgtattaaatttagtgaaataggccaggcacagtggctcatgcctataatccagcactttgggaggctgaggatcacttgaggccag

SEQ ID NO: 118604 - DNA, 120 bp, synthetic construct; identical to SEQ ID NO: 5968
  source 1..120: mol_type = other DNA

SEQ ID NO: 118605 - DNA, 120 bp, synthetic construct
  source 1..120: mol_type = other DNA
atcacttgaatccaagtggtgaaggttgcattgagctgagattgcgctgctacactccagcctgggcgacagagccagactgtctcaaaaagaaaaaaaaaaatagcaatgtaaacatat

SEQ ID NO: 118606 - DNA, 120 bp, synthetic construct
  source 1..120: mol_type = other DNA
gaaagctactaaacgtctttcatagcaattagaataaaattcaaactcttcggcatggcctacacacaaggccctaaataatgtaaatgattggactcgctcccagttctcctgtcactc

SEQ ID NO: 118607 - DNA, 120 bp, synthetic construct
  source 1..120: mol_type = other DNA
tctgcttccagggttcaagtgattctcctgccttagtctcccaactagctgggattacaggtgcacaccaccatgtccggctaattttttgtattttgagtagagacgggtttcaccatg

SEQ ID NO: 118608 - DNA, 120 bp, synthetic construct; identical to SEQ ID NO: 29189
  source 1..120: mol_type = other DNA

SEQ ID NO: 118609 - DNA, 120 bp, synthetic construct; identical to SEQ ID NO: 18341
  source 1..120: mol_type = other DNA

SEQ ID NO: 118610 - DNA, 120 bp, synthetic construct
  source 1..120: mol_type = other DNA
gcctcccaaagtgctgggattacaggcatgagccactacacctggcccattcaacttttttttttttttttttttttttttttgagacaagagtttcacttttgtggcccaggctggagt

SEQ ID NO: 118611 - DNA, 120 bp, synthetic construct; identical to SEQ ID NO: 19960
  source 1..120: mol_type = other DNA

SEQ ID NO: 118612 - DNA, 120 bp, synthetic construct; identical to SEQ ID NO: 19961
  source 1..120: mol_type = other DNA

SEQ ID NO: 118613 - DNA, 120 bp, synthetic construct; identical to SEQ ID NO: 29163
  source 1..120: mol_type = other DNA

SEQ ID NO: 118614 - DNA, 120 bp, synthetic construct; identical to SEQ ID NO: 29164
  source 1..120: mol_type = other DNA

SEQ ID NO: 118615 - DNA, 120 bp, synthetic construct; identical to SEQ ID NO: 29165
  source 1..120: mol_type = other DNA

SEQ ID NO: 118616 - DNA, 120 bp, synthetic construct; identical to SEQ ID NO: 29166
  source 1..120: mol_type = other DNA

SEQ ID NO: 118617 - DNA, 120 bp, synthetic construct
  source 1..120: mol_type = other DNA
agtttttctggaaagtaataaaatgtttctgaatgtttgaaataagttacttcccaaaaagttatccctccctcccttcctccccccacctccctctctctctctctctctctctctttc

SEQ ID NO: 118618 - DNA, 120 bp, synthetic construct
  source 1..120: mol_type = other DNA
tggctggggataaagtttccaacacatgctcttggagggacacattcaaaccatagcagttaccagcactacaatatggcaggttgcatatggtcttcctaattcattttgatttttttt

SEQ ID NO: 118619 - DNA, 120 bp, synthetic construct
  source 1..120: mol_type = other DNA
ggaaataaagggtattcagttaggaaaagaggaagtcaaattgtccctgtttgcagacgacatgattgtatatctagaaaaccccactgtctcagcccaaaatctccttaagctaagaag

SEQ ID NO: 118620 - DNA, 120 bp, synthetic construct
  source 1..120: mol_type = other DNA
gaaggacatgaacagacacttctcaaaagaagacatttatgcagccaaaaaactcattttgatattttttaagttgctgccattgcattgtttcaactttatgaagttcccctttatttt

SEQ ID NO: 118621 - DNA, 120 bp, synthetic construct; identical to SEQ ID NO: 32654
  source 1..120: mol_type = other DNA

SEQ ID NO: 118622 - DNA, 120 bp, synthetic construct; identical to SEQ ID NO: 32655
  source 1..120: mol_type = other DNA

SEQ ID NO: 118623 - DNA, 120 bp, synthetic construct; identical to SEQ ID NO: 32656
  source 1..120: mol_type = other DNA

SEQ ID NO: 118624 - DNA, 120 bp, synthetic construct
  source 1..120: mol_type = other DNA
ctcaagaagagcaactccaagacacttaattgtcagattcaccaaagttggaatgaaggaaaaaatgttaagggcagccagagagaaaggtcaggttacccacaaagggaagcccatcag

SEQ ID NO: 118625 - DNA, 120 bp, synthetic construct
  source 1..120: mol_type = other DNA
aaactctctctcagaccatagtgcaatcaaactagaactcaggattaagaaactcacttaaaaccactcaactacatggaaactgaacaacctgctcctgaatgactactgggtacataa

SEQ ID NO: 118626 - DNA, 120 bp, synthetic construct
  source 1..120: mol_type = other DNA
aaggaggagctggtaccattccttctgaaactattccaatcaatagaaaaagagggaatcctccctaactcattttatgaagccagcatcatcctgataccaaagcctggcagagacaca

SEQ ID NO: 118627 - DNA, 120 bp, synthetic construct
  source 1..120: mol_type = other DNA
agaacaaaatacataggaatccaacttacaagggatgtgaaggacctcttcaaggagaactacaaaccactgctcagtgaaataaaagaggatacaaacaaatggaagaacattccatgc

SEQ ID NO: 118628 - DNA, 120 bp, synthetic construct
  source 1..120: mol_type = other DNA
tcagcaaagtctcaggatacaaaataaatgtgcaaaaatcacaagcattctgttttttgttttttgtttttaattttttattatactttaagttttagggtacttgtgcacattgtgcag

SEQ ID NO: 118629 - DNA, 120 bp, synthetic construct
  source 1..120: mol_type = other DNA
attttggcttttgttgccattgcttttggtgttttggacatgaagtccttgcccatgcctatgtcctgaatggtcatgcctaggttttcttctagggtttttatggttttaggtctaacg

SEQ ID NO: 118630 - DNA, 120 bp, synthetic construct; identical to SEQ ID NO: 31686
  source 1..120: mol_type = other DNA

SEQ ID NO: 118631 - DNA, 120 bp, synthetic construct
  source 1..120: mol_type = other DNA
cacttctctgatggccagtgatgatgagcatgttttcatgtgtcttttggctgcataaatgtcttcttttgagaagtgtctgttcatatccttcgcccactttttgatggggttgtttgt

SEQ ID NO: 118632 - DNA, 120 bp, synthetic construct
  source 1..120: mol_type = other DNA
gaggatcacttgagcccaggagttcaagattgcaatgagctatgatcatgccactgcactccaatctgggcaacagacctcatttcttgagaaaaagaattaatttgatataatgaatag

SEQ ID NO: 118633 - DNA, 120 bp, synthetic construct
  source 1..120: mol_type = other DNA
ccatcccaatcaagctaccaatgactttcttcacagaattggaaaaaactactttaaatttcatttggaaccaaaaaagagcccgcattgccaagtcaatcctgagccaaaagaacaaag

SEQ ID NO: 118634 - DNA, 120 bp, synthetic construct
  source 1..120: mol_type = other DNA
atactatgcagccataaaaaatgatgagttcacgtcctttgtagggacatggatgaagctggaaaccatcattctcagtagactatcgcaagaacaaaaaaccaaacaccgcatgttctc

SEQ ID NO: 118635 - DNA, 120 bp, synthetic construct
  source 1..120: mol_type = other DNA
aaggagtttttaaaataataagcagctttgggaggctgaggcaggaggattgcttgaggccaggagtttgagaccaggttgggctacactatgagacctcatttctacaaaaaatgtaaa

SEQ ID NO: 118636 - DNA, 120 bp, synthetic construct
  source 1..120: mol_type = other DNA
accttggcctcccaaagtgctgggattacaggcatgagccaccgtgcccagccagaaatgtacttttttttttttttaatcatactttaagttttagggtacatttgcacaacatgcagg

SEQ ID NO: 118637 - DNA, 120 bp, synthetic construct
  source 1..120: mol_type = other DNA
gtttgatggggttgtttgtttttttcttataaatttgtttgagttcattgtagattctggatattagccctttgtcagatgagtaggttgcaaaaattttctcccattctgtaggttgcc

SEQ ID NO: 118638 - DNA, 120 bp, synthetic construct
  source 1..120: mol_type = other DNA
accctttccaatgcacaactagctgtaaacaagactcagagttttgttaggcctgataagaaaatacagtgtcagccgctgcaaaatcatgccaaaatgtaaagaccatcgagactagga

SEQ ID NO: 118639 - DNA, 120 bp, synthetic construct
  source 1..120: mol_type = other DNA
agaaagtcaacaaggatacccaggaattgaactcagctgtgcaccaagcggacctaatagacatctacagaactctccaccccaaatcaacagaatatacatttttttcagcaccacacc

SEQ ID NO: 118640 - DNA, 120 bp, synthetic construct
  source 1..120: mol_type = other DNA
aaccgaatccagcagcacatcaaaaagcttatccaccatgatcaagtgggcatcatccctgggatgcaaggctggttcaatatatgcaaatcaataaatgtaatccagcatataaacaga

SEQ ID NO: 118641 - DNA, 120 bp, synthetic construct
  source 1..120: mol_type = other DNA
tacaaggctacagtaaccaaaacagcatggtactggtaccaaaacagagatatagatcaatggaacagaacagagccctcagaaataacgccgcatacctacaactatctgatctttgac

SEQ ID NO: 118642 - DNA, 120 bp, synthetic construct
  source 1..120: mol_type = other DNA
tggattaagaaaatgtggcacatatacaccatggaatactatgcagccataaaaaatgatgagttcatgtcctttgtagggacatggatgaaactggaaaacatcattctcagtaaacta

SEQ ID NO: 118643 - DNA, 120 bp, synthetic construct
  source 1..120: mol_type = other DNA
gtcagattcaccaaagttgaaacaatggaaaaaatgttaagggcagccagagagaaaggtcagattactcacaaagggaaacccatcatgctaacagctgatctctcagcagaaactcta

SEQ ID NO: 118644 - DNA, 120 bp, synthetic construct
  source 1..120: mol_type = other DNA
atcaaccagacagaaagttaacaaggatatccaggaattgaactcagctgtgcaccaagcggacctaatagacatctacagaactctccaccccaaatcaacagaatatacattcttttc

SEQ ID NO: 118645 - DNA, 120 bp, synthetic construct
  source 1..120: mol_type = other DNA
gaccagatggattcacagccgaattctaccagaggtacaaggaggagctggtaccattccttctgaaactattccaatcaatagaaaaacagaggatcctccctaactcattttatgagg

SEQ ID NO: 118646 - DNA, 120 bp, synthetic construct; identical to SEQ ID NO: 31689
  source 1..120: mol_type = other DNA

SEQ ID NO: 118647 - DNA, 120 bp, synthetic construct
  source 1..120: mol_type = other DNA
taatattaaaatataaataccaccaactttcatacgtttgtttaaatctttcttttaaaaagctcattgcagccaggtgtggtggctcacacctgtaatcccagcactttgggaggccga

SEQ ID NO: 118648 - DNA, 120 bp, synthetic construct; identical to SEQ ID NO: 31682
  source 1..120: mol_type = other DNA

SEQ ID NO: 118649 - DNA, 120 bp, synthetic construct
  source 1..120: mol_type = other DNA
cagggttgcggccgggcagaggcgctcctcacatcccagacagggcggcggggcagaggtgctccccacatctcagacgatgggcggccgggcagaaacgctcctcacttcctagatggg

SEQ ID NO: 118650 - DNA, 120 bp, synthetic construct
  source 1..120: mol_type = other DNA
ttaaggagattttgggatgagatgatggggttttctcgatatacaatcatgtcatccacaaacagggacaatttgacttcctcttttcctaattgaataccctttatttccttctcctgc

SEQ ID NO: 118651 - DNA, 120 bp, synthetic construct
  source 1..120: mol_type = other DNA
tttctgtgggattggtggtgatatcccctttatcatattttattgcgtctatttgattcttctctcttttcttctttattactcttgctagcggtctatcaattttgttgatcttttcaa

SEQ ID NO: 118652 - DNA, 120 bp, synthetic construct
  source 1..120: mol_type = other DNA
caggtagcctgatgcctccagctttgttctttttgcttaggattgacttggcaatgcgggctcttttttggttccatatgaactttaaagtagttttttccaattctgtgaagaaagtca

SEQ ID NO: 118653 - DNA, 120 bp, synthetic construct
  source 1..120: mol_type = other DNA
tgttgaattttgtcaaaggccttttctgcatctattgagataatcatatggtttttgtcgttggttctgtttacgtgatggattacgtttattgatttgcgtatgttgaaccagccttgc

SEQ ID NO: 118654 - DNA, 120 bp, synthetic construct
  source 1..120: mol_type = other DNA
tatttcttgccttctgctagcttttgaatgtgtttgctcttgcttctctagttcttttaattgtgatgttagggtgtcaattttagatctttcctgctttctcttgtgggcatttagcgc

SEQ ID NO: 118655 - DNA, 120 bp, synthetic construct; identical to SEQ ID NO: 31683
  source 1..120: mol_type = other DNA

SEQ ID NO: 118656 - DNA, 120 bp, synthetic construct; identical to SEQ ID NO: 31684
  source 1..120: mol_type = other DNA

SEQ ID NO: 118657 - DNA, 120 bp, synthetic construct
  source 1..120: mol_type = other DNA
ctttcagggatcatttctatagtttgttactagagaagtttctctgaacgtgtaaagcaccatttaaagttcatatggagccaaaaaagagcccgcatcgccaagtcaatcctaagccaa

SEQ ID NO: 118658 - DNA, 120 bp, synthetic construct
  source 1..120: mol_type = other DNA
aaaagaagacatttatgcagccaaaaaatacatgaaaaaatgctcaccatcactggccatcagagaaatgcaaatcaaaaccacaatgagataccatctcacaccagttagaatggcaat

SEQ ID NO: 118659 - DNA, 120 bp, synthetic construct
  source 1..120: mol_type = other DNA
aactcccactcacaattgcttcaaagagaataaaatacctaggaatccaacttacaagggtcgtgaaggacctcttcaaggagaactacaaaccactgctcaatgaaataaaagaggata

SEQ ID NO: 118660 - DNA, 120 bp, synthetic construct
  source 1..120: mol_type = other DNA
ccatgaaaaccctagaagaaaacctaggcattaccattcaggacataggcatgggcaaggacttcatgtctaaaacaccaaaagcaatggcaacaaaagccaaaattgacaaatgggatc

SEQ ID NO: 118661 - DNA, 120 bp, synthetic construct
  source 1..120: mol_type = other DNA
aacctcaagtgatctgcccacctcggcctcccaaatgctgagattacaggcatgagtcactgtgcccaacctgttttttttttttccttatctttctttctttctttctttctttctttc

SEQ ID NO: 118662 - DNA, 120 bp, synthetic construct; identical to SEQ ID NO: 31685
  source 1..120: mol_type = other DNA

SEQ ID NO: 118663 - DNA, 120 bp, synthetic construct
  source 1..120: mol_type = other DNA
gttttttccaattctgcaaagaaagtcagtggtagcgtaatgggaatagcactgagtctgtaaattactttgggcagtatggccattttcgatattgattcttcctgtccatgagcatga

SEQ ID NO: 118664 - DNA, 120 bp, synthetic construct
  source 1..120: mol_type = other DNA
atctcacaccagttagaatggcgatctttaaaaagtcaggaaacaacagatgctggcgaggctgtggagaaataggaacacttttacacagttggcaggagtgtaaattagttcaaccat

SEQ ID NO: 118665 - DNA, 120 bp, synthetic construct
  source 1..120: mol_type = other DNA
ctcgtcatttagcattagatatatctcctaatgctatccctccccccaccccccccaacaggcccctgtgtgtgatgatgttccccttcctgtgtccatgtgttctcattgttcagttcc

SEQ ID NO: 118666 - DNA, 120 bp, synthetic construct
  source 1..120: mol_type = other DNA
ttttcttctagggtttttatggttttaggtctaacatgtaagtctttagtccatcttgaattaatttttgtataaggtgtaaggaagggatccagtttcagctttctacatatggctagc

SEQ ID NO: 118667 - DNA, 120 bp, synthetic construct
  source 1..120: mol_type = other DNA
taaaaagtcttccctcaaagaaaagccaaggacctgatggcttcactgctgaattctaccaaacacttaaaaaataaactaataagggggaggagccaagatggccgaataggaacagct

SEQ ID NO: 118668 - DNA, 120 bp, synthetic construct
  source 1..120: mol_type = other DNA
aaggacatccacaccaaaaacccatctgtacatcaccatcatcaaagaccaaaagtagataaaaccacaaagatggggaaaaaacagaacagaaaaactggaaactctaaagagcggagc

SEQ ID NO: 118669 - DNA, 120 bp, synthetic construct
  source 1..120: mol_type = other DNA
gagattttgtcaccaccagacatgccctataagagctcctgaaggaagcgctaaacatggaaaggaagaaccggtaccagccgctgcaaaatcatgccaaaatgtaaagaccatcgagac

SEQ ID NO: 118670 - DNA, 120 bp, synthetic construct
  source 1..120: mol_type = other DNA
ccatgtagttgagcggttttgagtgagattcttaatactgagttctagtttgattgccctgtgatctgagagatagtttgctataatttctgttcttttacatttgctgaggagagcttt

SEQ ID NO: 118671 - DNA, 120 bp, synthetic construct
  source 1..120: mol_type = other DNA
gaccagcatcattctgataccaaagctgggcagagacacaaccaaaaaagaggattttagaccaatatccttgatgaacatcgatgcaaaaatcctgaataaaatactggcaaaacgaat

SEQ ID NO: 118672 - DNA, 120 bp, synthetic construct
  source 1..120: mol_type = other DNA
ttgccaagtcaatcctaagccaaaagaacaaagctggaggcatcacactgcctgacttcaaactatactacaaggctacagtaaccaaaacagcatggtactggtaccaaaacagagata

SEQ ID NO: 118673 - DNA, 120 bp, synthetic construct
  source 1..120: mol_type = other DNA
catttgacccagccatcccattactgggtatatacccaaaggactataaatcatgctgctataaagacacatgcacacatatgtttattgcggaattattcacaatagcaaagactcgga

SEQ ID NO: 118674 - DNA, 120 bp, synthetic construct
  source 1..120: mol_type = other DNA
ccagtctatcattgttgcacatttgagttggttccaagtctttgctattgtgaatagcgccgctggaaaccatcattctcagcaaactatggcaaggacaaaaaaccaaacactgcatgt

SEQ ID NO: 118675 - DNA, 120 bp, synthetic construct; identical to SEQ ID NO: 15367
  source 1..120: mol_type = other DNA

SEQ ID NO: 118676 - DNA, 120 bp, synthetic construct; identical to SEQ ID NO: 15368
  source 1..120: mol_type = other DNA

SEQ ID NO: 118677 - DNA, 120 bp, synthetic construct
  source 1..120: mol_type = other DNA
ttttgatggggttgtttgtttttttcttgtaaatttgtttgagttcattatagattctggatattagtcctttgttagatgagtaggttgcgaaaattttctcccattttgtaggttgcc

SEQ ID NO: 118678 - DNA, 120 bp, synthetic construct
  source 1..120: mol_type = other DNA
ctccgtttgtctattattggtgtataagaatgcttgtgatttttgcacattgattttgtatcctgagactttgctgaagttgcttatcagcttaaggagattttgggctgagacgatggg

SEQ ID NO: 118679 - DNA, 120 bp, synthetic construct
  source 1..120: mol_type = other DNA
cgaggaatttatccatttcttctagattttctagtttatttgcatagaggtgtttgtagtattctctgatggtagtttgtatttctgtgggatcggtggtgatatcccctttatcaatat

SEQ ID NO: 118680 - DNA, 120 bp, synthetic construct
  source 1..120: mol_type = other DNA
agttagctcttcttgttgaattgatccctttaccattaagtaatggccttgtctcttttgatctttgttggtttaaagtctgttttatcagagactaggattgcaacccctgcctttttt

SEQ ID NO: 118681 - DNA, 120 bp, synthetic construct
  source 1..120: mol_type = other DNA
cttgtttttgtcgaaagctacctcaaattcattttggaaacaggcaaaggataaactagtttcctcccatgttgtaggttgcctgttcactctgatggtagtttcttttgctgtgcagaa

SEQ ID NO: 118682 - DNA, 120 bp, synthetic construct; identical to SEQ ID NO: 15369
  source 1..120: mol_type = other DNA

SEQ ID NO: 118683 - DNA, 120 bp, synthetic construct
  source 1..120: mol_type = other DNA
ttcttttggcttaggattgacttggcaatgtgggctcttttttggttccatacgaactttaaagtagttttttccaattctgtgaagaaagtcattggtagcttgatggggatggcactg

SEQ ID NO: 118684 - DNA, 120 bp, synthetic construct
  source 1..120: mol_type = other DNA
ctgcatctattgagataatcatgtggtttttgtctttggttctgtttatatgctggattacatttattgatttgcgtatgttgaaccagccttgcatcccagggatgaagccttcttgtc

SEQ ID NO: 118685 - DNA, 120 bp, synthetic construct; identical to SEQ ID NO: 15370
  source 1..120: mol_type = other DNA

SEQ ID NO: 118686 - DNA, 120 bp, synthetic construct; identical to SEQ ID NO: 15371
  source 1..120: mol_type = other DNA

SEQ ID NO: 118687 - DNA, 120 bp, synthetic construct; identical to SEQ ID NO: 7074
  source 1..120: mol_type = other DNA

SEQ ID NO: 118688 - DNA, 120 bp, synthetic construct; identical to SEQ ID NO: 7075
  source 1..120: mol_type = other DNA

SEQ ID NO: 118689 - DNA, 120 bp, synthetic construct
  source 1..120: mol_type = other DNA
tgggaggcggaggttgcagtgagccaagatagcgtcattgcattctagtccaggcaacagagtgagactccgtctatatatagatatatctatctatatctatctatagatagatagata

SEQ ID NO: 118690 - DNA, 120 bp, synthetic construct; identical to SEQ ID NO: 10809
  source 1..120: mol_type = other DNA

SEQ ID NO: 118691 - DNA, 120 bp, synthetic construct; identical to SEQ ID NO: 13301
  source 1..120: mol_type = other DNA

SEQ ID NO: 118692 - DNA, 120 bp, synthetic construct; identical to SEQ ID NO: 16268
  source 1..120: mol_type = other DNA

SEQ ID NO: 118693 - DNA, 120 bp, synthetic construct
  source 1..120: mol_type = other DNA
cttttacactgttggtgggactgtaaactagttcaaccattgtggaagacagtgtggcaattcctcaaggatctagaactagaaataccagttgacccagccatcccattactgagtata

SEQ ID NO: 118694 - DNA, 120 bp, synthetic construct; identical to SEQ ID NO: 15155
  source 1..120: mol_type = other DNA

SEQ ID NO: 118695 - DNA, 120 bp, synthetic construct
  source 1..120: mol_type = other DNA
ttttttttatattttttaatcatttttgagatggagtctcctctgttgcccaggctagagtgcagtgatgtgatctcagctcactgtaacctccaccacccaggttcaaggaattctctg

SEQ ID NO: 118696 - DNA, 120 bp, synthetic construct
  source 1..120: mol_type = other DNA
gccttgcaaaatcacaagcattcttatacaccaataacagtcaaacagagagccaaatcatgagtgaactcccattcacaattgcttcaaagagaataaaatacctaggaatccaactta

SEQ ID NO: 118697 - DNA, 120 bp, synthetic construct
  source 1..120: mol_type = other DNA
atgtagaaagctgaaactggatcccttccttacaccttgtatatacaaaaattaattcaagatggattaaagacttaaatgttagacctaaaaccataaaaaccctagaagaaaacctag

SEQ ID NO: 118698 - DNA, 120 bp, synthetic construct
  source 1..120: mol_type = other DNA
tggaaatcatcattctcagtaaactatcacaaggacaaaaaaccaaacactgcatattctcactcataggtgggaattgaacaatgagaacacatggacacaggaaggggaacatcacac

SEQ ID NO: 118699 - DNA, 120 bp, synthetic construct
  source 1..120: mol_type = other DNA
tgggtactccaacagacctgcagctgagggtcttgtctgttagaaggaaaactaacaaacagaaaggacatccacaccaaaaacccatctgtacatcaccatcatcaaagaccaaaagta

SEQ ID NO: 118700 - DNA, 120 bp, synthetic construct
  source 1..120: mol_type = other DNA
gcccatcagactaacagcagatctctcggcagaaactctacaagccagaagagagtaggggccaatattcaacattcttaaaagaatttccaacccagaatttcatatccagccaaacta

SEQ ID NO: 118701 - DNA, 120 bp, synthetic construct
  source 1..120: mol_type = other DNA
acagaaattataacaaactatctctcagaccacagtgcaatcaaactagaactcaggattaagaatctcactcaaaaccgctcaactacatggaaactgaacctgctcctgaataactac

SEQ ID NO: 118702 - DNA, 120 bp, synthetic construct
  source 1..120: mol_type = other DNA
atcaaaaagcttatccaccatgatcaagtgggcttcatccctgggatgcaaggctggttcaatatacacaaatcaataaatgtaatccagcatataaacagaagcaaagacgaaaaccac

SEQ ID NO: 118703 - DNA, 120 bp, synthetic construct
  source 1..120: mol_type = other DNA
tcacactacctgacttcaaactatactacaaggctacagtaaccaaaacagcatggtactggtaccaaaacagagatatagatcaatggaacagaacagagcccacagaaaaaacgccgc

SEQ ID NO: 118704 - DNA, 120 bp, synthetic construct
  source 1..120: mol_type = other DNA
ctgggtatatacccaaaggactataaatcatgctgctataaagacacatgcacacgtatgtttattgtggcactattcacaatggcaaagacttggaaccaagccaaatgtccaacaatg

SEQ ID NO: 118705 - DNA, 120 bp, synthetic construct
  source 1..120: mol_type = other DNA
tattcatagcagtattcaaatagtgaattcacacagtgaaaacctgtacaaatattcacagtgagttcacacagtgaaaacctgtacagatactcacagcagtattcacacagtgaaaaa

SEQ ID NO: 118706 - DNA, 120 bp, synthetic construct
  source 1..120: mol_type = other DNA
aaaacctgtactgatattcacagcagtattcacatagtgagttcacacagtgaaaacctgtacagatattcacatagttcacacagtgaaaacctgtacagatattcacagcagtattca

SEQ ID NO: 118707 - DNA, 120 bp, synthetic construct; identical to SEQ ID NO: 17255
  source 1..120: mol_type = other DNA

SEQ ID NO: 118708 - DNA, 120 bp, synthetic construct; identical to SEQ ID NO: 17257
  source 1..120: mol_type = other DNA

SEQ ID NO: 118709 - DNA, 120 bp, synthetic construct
  source 1..120: mol_type = other DNA
cttattattttgagataagtcccatcaatgcctaatttattgagagtttttagcatgaagggctgttgaattttgtcaaaggccttttctgcatctattgagataatcatgtggtttttg

SEQ ID NO: 118710 - DNA, 120 bp, synthetic construct; identical to SEQ ID NO: 17258
  source 1..120: mol_type = other DNA

SEQ ID NO: 118711 - DNA, 120 bp, synthetic construct; identical to SEQ ID NO: 17259
  source 1..120: mol_type = other DNA

SEQ ID NO: 118712 - DNA, 120 bp, synthetic construct; identical to SEQ ID NO: 17260
  source 1..120: mol_type = other DNA

SEQ ID NO: 118713 - DNA, 120 bp, synthetic construct; identical to SEQ ID NO: 17261
  source 1..120: mol_type = other DNA

SEQ ID NO: 118714 - DNA, 120 bp, synthetic construct; identical to SEQ ID NO: 17262
  source 1..120: mol_type = other DNA

SEQ ID NO: 118715 - DNA, 120 bp, synthetic construct; identical to SEQ ID NO: 17263
  source 1..120: mol_type = other DNA

SEQ ID NO: 118716 - DNA, 120 bp, synthetic construct; identical to SEQ ID NO: 17264
  source 1..120: mol_type = other DNA

SEQ ID NO: 118717 - DNA, 120 bp, synthetic construct; identical to SEQ ID NO: 17265
  source 1..120: mol_type = other DNA

SEQ ID NO: 118718 - DNA, 120 bp, synthetic construct; identical to SEQ ID NO: 17266
  source 1..120: mol_type = other DNA

SEQ ID NO: 118719 - DNA, 120 bp, synthetic construct
  source 1..120: mol_type = other DNA
attgcgccactgcactccagcctgggtgacagagcgagactccaaaaggaaagaaaagaaaagaaagagaaagaatgaaagaagaagggagagaaagagagacaaagaaagagaaagaaa

SEQ ID NO: 118720 - DNA, 120 bp, synthetic construct; identical to SEQ ID NO: 17268
  source 1..120: mol_type = other DNA

SEQ ID NO: 118721 - DNA, 120 bp, synthetic construct; identical to SEQ ID NO: 17269
  source 1..120: mol_type = other DNA

SEQ ID NO: 118722 - DNA, 120 bp, synthetic construct
  source 1..120: mol_type = other DNA
aaagccaacctcatacttctcaggagaaactcaggattccttcagtgggatctctgttcctatttcctttccttttctgtttttttgagacagtctcactttgtcacccagactggagtg

SEQ ID NO: 118723 - DNA, 120 bp, synthetic construct
  source 1..120: mol_type = other DNA
ctgggtagctgggactacacgtgtgcaccaccacgcctgctaatatttcccgggtagctgggactacaggcgcacaccaccacgccccgctaatatttcccgggtagctgggactacagg

SEQ ID NO: 118724 - DNA, 120 bp, synthetic construct
  source 1..120: mol_type = other DNA
tttcccgggtagctgggactacaggtgcccacgacgcctgctaatatttcctgggtagctaggactacacgtgtgcaccaccacacctgctaatattttccgggtagctgggactacagg

SEQ ID NO: 118725 - DNA, 120 bp, synthetic construct; identical to SEQ ID NO: 17256
  source 1..120: mol_type = other DNA

SEQ ID NO: 118726 - DNA, 120 bp, synthetic construct; identical to SEQ ID NO: 17238
  source 1..120: mol_type = other DNA

SEQ ID NO: 118727 - DNA, 120 bp, synthetic construct; identical to SEQ ID NO: 17239
  source 1..120: mol_type = other DNA

SEQ ID NO: 118728 - DNA, 120 bp, synthetic construct; identical to SEQ ID NO: 17240
  source 1..120: mol_type = other DNA

SEQ ID NO: 118729 - DNA, 120 bp, synthetic construct; identical to SEQ ID NO: 17241
  source 1..120: mol_type = other DNA

SEQ ID NO: 118730 - DNA, 120 bp, synthetic construct; identical to SEQ ID NO: 17242
  source 1..120: mol_type = other DNA

SEQ ID NO: 118731 - DNA, 120 bp, synthetic construct; identical to SEQ ID NO: 17243
  source 1..120: mol_type = other DNA

SEQ ID NO: 118732 - DNA, 120 bp, synthetic construct; identical to SEQ ID NO: 17244
  source 1..120: mol_type = other DNA

SEQ ID NO: 118733 - DNA, 120 bp, synthetic construct; identical to SEQ ID NO: 17245
  source 1..120: mol_type = other DNA

SEQ ID NO: 118734 - DNA, 120 bp, synthetic construct
  source 1..120: mol_type = other DNA
taacatttactgcgtttgatgattcaggcataattccatacactttttttttttttttttttgagactcgctcttgttgcctaggctggagtgcagtggtgcgacctcggctcactgcat

SEQ ID NO: 118735 - DNA, 120 bp, synthetic construct
  source 1..120: mol_type = other DNA
ctctttgtataattcttataattcttctgtaagcttgaaattaattcaaaataaacaacaatgggctctccctctccctctccttctccctctccctctccctacagtctccctctccct

SEQ ID NO: 118736 - DNA, 120 bp, synthetic construct
  source 1..120: mol_type = other DNA
gagaacgggccatgatgacaatggcggttttgtggaatagaaaggcgggaaaggtggggaaaagattgagaaatcggatggttgccgtgtctgtgtggaaagaagtagacatgggaaact

SEQ ID NO: 118737 - DNA, 120 bp, synthetic construct; identical to SEQ ID NO: 17247
  source 1..120: mol_type = other DNA

SEQ ID NO: 118738 - DNA, 120 bp, synthetic construct; identical to SEQ ID NO: 17248
  source 1..120: mol_type = other DNA

SEQ ID NO: 118739 - DNA, 120 bp, synthetic construct; identical to SEQ ID NO: 17249
  source 1..120: mol_type = other DNA

SEQ ID NO: 118740 - DNA, 120 bp, synthetic construct; identical to SEQ ID NO: 17250
  source 1..120: mol_type = other DNA

SEQ ID NO: 118741 - DNA, 120 bp, synthetic construct
  source 1..120: mol_type = other DNA
catgaagagttgttgaattttgtcaaaggccttttctgcatctattgagataatcatgtggtttttgtctttggttctgtttatgtgctggattacatttattgatttgcgtatattgaa

SEQ ID NO: 118742 - DNA, 120 bp, synthetic construct
  source 1..120: mol_type = other DNA
catgtagttgagcggttttgagtgagattcttaatccagagttctagtttgattgcactgtggtctgagagatagtttgttataatttcttttacatttgctgaggagagctttacttcc

SEQ ID NO: 118743 - DNA, 120 bp, synthetic construct
  source 1..120: mol_type = other DNA
ctggatatcaaattctgggttgaaaattcttttaagaatgttgaatattggccaccactctcttctggcttgtagagtttctgccgagagatctgctgttagtctgatgggcttcccttt

SEQ ID NO: 118744 - DNA, 120 bp, synthetic construct
  source 1..120: mol_type = other DNA
tggccatcagagaaatgcaaatcaaaaccacgatgagataccatttcacaccagttagaatggcgatcattaaaaagtcaggaaacaaccggtgctggagaggatgtggagaaacaggaa

SEQ ID NO: 118745 - DNA, 120 bp, synthetic construct; identical to SEQ ID NO: 17251
  source 1..120: mol_type = other DNA

SEQ ID NO: 118746 - DNA, 120 bp, synthetic construct; identical to SEQ ID NO: 17252
  source 1..120: mol_type = other DNA

SEQ ID NO: 118747 - DNA, 120 bp, synthetic construct; identical to SEQ ID NO: 17253
  source 1..120: mol_type = other DNA

SEQ ID NO: 118748 - DNA, 120 bp, synthetic construct
  source 1..120: mol_type = other DNA
gtaagtgttattactaatcagtaatagcccatgaaatggtgggtggatcagctagattagggggtttagttgtttcttttgagatggagtctcactctgtcacccaggctatagtgcaat

SEQ ID NO: 118749 - DNA, 120 bp, synthetic construct
  source 1..120: mol_type = other DNA
cctgccttggcctcccaaagtgccgagattgcagcctctgcccggccaccaccccgtctgggaagtgagaagcgtctctgcctggccgcccatcatctgggatgtgaggagcccctctgc

SEQ ID NO: 118750 - DNA, 120 bp, synthetic construct; identical to SEQ ID NO: 17254
  source 1..120: mol_type = other DNA

SEQ ID NO: 118751 - DNA, 120 bp, synthetic construct
  source 1..120: mol_type = other DNA
tatcttaattgagtttcttgaaataagtttcttaattgaggtgcagtatttattctggcctaagacatttcacaatttattttttcctcctcctgctcctcctcctccccccctcctcct

SEQ ID NO: 118752 - DNA, 120 bp, synthetic construct; identical to SEQ ID NO: 24933
  source 1..120: mol_type = other DNA

SEQ ID NO: 118753 - DNA, 120 bp, synthetic construct; identical to SEQ ID NO: 24934
  source 1..120: mol_type = other DNA

SEQ ID NO: 118754 - DNA, 120 bp, synthetic construct; identical to SEQ ID NO: 24935
  source 1..120: mol_type = other DNA

SEQ ID NO: 118755 - DNA, 120 bp, synthetic construct
  source 1..120: mol_type = other DNA
tctcagacggggcggccgggcagagacgctcctcacctcccagatggggtcgcggccaggcagaggcgctcctcacctcccagacggggtggcggggcagaggcgctccccacatctcag

SEQ ID NO: 118756 - DNA, 120 bp, synthetic construct; identical to SEQ ID NO: 24936
  source 1..120: mol_type = other DNA

SEQ ID NO: 118757 - DNA, 120 bp, synthetic construct
  source 1..120: mol_type = other DNA
gagttctttgtagattctggatattagtcctttgtcagatgagtaggttgcggaaatgttctcccattttgtaggttgcctgttcactctgatggtagtttcttttgctgtgcagaagct

SEQ ID NO: 118758 - DNA, 120 bp, synthetic construct
  source 1..120: mol_type = other DNA
tagttgagaatggtgaataggagtatgactagacaaaagatagtagggatgacaagtttttttggggcacagtctaagttggtctggtgtccaatgagactggggcctaataaaaaggag

SEQ ID NO: 118759 - DNA, 120 bp, synthetic construct
  source 1..120: mol_type = other DNA
tgggaggccagattgaagtccgggccagaaacaatggtagttgtgggacttaaagagtgagttcagctgaaggagctggggagcagaaagtatatgcgtcaggtatgaggaagaaaatag

SEQ ID NO: 118760 - DNA, 120 bp, synthetic construct; identical to SEQ ID NO: 4577
  source 1..120: mol_type = other DNA

SEQ ID NO: 118761 - DNA, 120 bp, synthetic construct
  source 1..120: mol_type = other DNA
tgggggatattttgctgtggtacattaggaggataataatccttctataagcaaaatgtttgccaccttgtaggcattaaatgaatgaacaatcaccaccaaaatacaagacattctctc

SEQ ID NO: 118762 - DNA, 120 bp, synthetic construct
  source 1..120: mol_type = other DNA
gcaggagggtaatgaaggactgtatgatgtagtaggaataacactgatctaagcgcaaggtctgccttaccacatatctctctgtgtgaccttgggtaaattactaaacctatctgaact

SEQ ID NO: 118763 - DNA, 120 bp, synthetic construct; identical to SEQ ID NO: 29153
  source 1..120: mol_type = other DNA

SEQ ID NO: 118764 - DNA, 120 bp, synthetic construct; identical to SEQ ID NO: 29154
  source 1..120: mol_type = other DNA

SEQ ID NO: 118765 - DNA, 120 bp, synthetic construct; identical to SEQ ID NO: 22489
  source 1..120: mol_type = other DNA

SEQ ID NO: 118766 - DNA, 120 bp, synthetic construct; identical to SEQ ID NO: 22490
  source 1..120: mol_type = other DNA

SEQ ID NO: 118767 - DNA, 120 bp, synthetic construct; identical to SEQ ID NO: 10560
  source 1..120: mol_type = other DNA

SEQ ID NO: 118768 - DNA, 120 bp, synthetic construct; identical to SEQ ID NO: 12267
  source 1..120: mol_type = other DNA

SEQ ID NO: 118769 - DNA, 120 bp, synthetic construct; identical to SEQ ID NO: 12268
  source 1..120: mol_type = other DNA

SEQ ID NO: 118770 - DNA, 120 bp, synthetic construct; identical to SEQ ID NO: 28365
  source 1..120: mol_type = other DNA

SEQ ID NO: 118771 - DNA, 120 bp, synthetic construct; identical to SEQ ID NO: 28366
  source 1..120: mol_type = other DNA

SEQ ID NO: 118772 - DNA, 120 bp, synthetic construct
  source 1..120: mol_type = other DNA
gtttgaaaggggatgtcatttggggtgggcagaatgaatctcttttgggaattacatgtaaatgttgccaggttaccaaaacttcgtgttggtaggtatttccaaggtcatctagttcag

SEQ ID NO: 118773 - DNA, 120 bp, synthetic construct; identical to SEQ ID NO: 11157
  source 1..120: mol_type = other DNA

SEQ ID NO: 118774 - DNA, 120 bp, synthetic construct
  source 1..120: mol_type = other DNA
aagaaaacctaggcattaccattcaggacataggcatgggcaaggacttcatgtctaaaacaccaaaagcaatggcaacaaaagccaaaattgacaaatgggatctaattaaattaaaga

SEQ ID NO: 118775 - DNA, 120 bp, synthetic construct
  source 1..120: mol_type = other DNA
ctcagtaaactatcgcaaggacaaaaaaccaaacactgcattttctcactcataggtgggaattgaacaatgagaacacatggacacaggaaggggaacatcacactctggggactgttg

SEQ ID NO: 118776 - DNA, 120 bp, synthetic construct
  source 1..120: mol_type = other DNA
agagtttgaggctgcagtgagctatgattgcacctgtgaatagccattgcactccagcctgggcaacatagtgagaccttgtctcttttttttttttttttttttttgagacggagtctc

SEQ ID NO: 118777 - DNA, 120 bp, synthetic construct
  source 1..120: mol_type = other DNA
gttgaggcccctgggttcttcccccgggttcttgcctggccccttccatggatcctaagcagctcccttatcggccaccatctgggaagccaggaggggggcatgaaatgagggggaggt

SEQ ID NO: 118778 - DNA, 120 bp, synthetic construct
  source 1..120: mol_type = other DNA
atgtggtcctcctctccctttcagggaaggatgtcccagcagagaggcaaagtgaggggacccacacaaggaaggggccctgctattaggaaaccctgggtcattcaggcctgctgctct

SEQ ID NO: 118779 - DNA, 120 bp, synthetic construct
  source 1..120: mol_type = other DNA
gtggggtcagaggcctcaggagttgcccttttacccagggtcaaacatgaccacagccagctggggacaaaaggcccttcatcttctgcagaagcctggattgtgcggaggagggagcat

SEQ ID NO: 118780 - DNA, 120 bp, synthetic construct
  source 1..120: mol_type = other DNA
gcttccttgagggcctgagtcacagccaagaagacccgctcactttttccagaagtgagggaaacttccccgtcagccctgcaaggctggctgaggtgtgactgtggcccgcctgctggg

SEQ ID NO: 118781 - DNA, 120 bp, synthetic construct
  source 1..120: mol_type = other DNA
aaccatctcccactcccatgcctcttcctccaagaagcccaggtggcgtgggtgcttcgagtctctctcgaattcctgtcttctgtcccctttcaagccactgtgtccttgtaagttcca

SEQ ID NO: 118782 - DNA, 120 bp, synthetic construct
  source 1..120: mol_type = other DNA
gcccgcatctctgcgggatcgcgggcctggacaggaagagggagatgtctgtcaagggggcacccctgcctcagtttccctacccttgcgagggcccttagtggagggatggtagggaag

SEQ ID NO: 118783 - DNA, 120 bp, synthetic construct
  source 1..120: mol_type = other DNA
cccagcgcatgggtgacacccacactggcctggcgctggtctatgccaaggaacagctgtttgctgaagcatcaggtgcccggccaggggtgcccaaagtgctggtgtgggtgacagatg

SEQ ID NO: 118784 - DNA, 120 bp, synthetic construct
  source 1..120: mol_type = other DNA
tggagatgaggaaccggccactggctcagcctgctgcagccactgaaaaatgccaaccctggggatctcaccaagtctccgtctgtgggttaatcatccacccagagccggaaggggttg

SEQ ID NO: 118785 - DNA, 120 bp, synthetic construct
  source 1..120: mol_type = other DNA
gccaaggcacgttctgagaatccccagcatctgcggggcatggctccagcagctccttggccgcggggccccgtctttcctagtggggcctccaatctccagatcttccccatcagccag

SEQ ID NO: 118786 - DNA, 120 bp, synthetic construct
  source 1..120: mol_type = other DNA
agagccgggcgtcgtgtgggtccgtgggtgataattgagagcgtcagacccaggactgttcagggaggagccccggtcagactcccacgtgtgaagaccgggccccaagtggcaagggct

SEQ ID NO: 118787 - DNA, 120 bp, synthetic construct; identical to SEQ ID NO: 6810
  source 1..120: mol_type = other DNA

SEQ ID NO: 118788 - DNA, 120 bp, synthetic construct
  source 1..120: mol_type = other DNA
tttgtttcctctgtgctgtcactgcacattgacatttacaaagcatctgagtgtacctctcttctgctgctagacacctaccaggtgcagttgcagagaggatgttggcttttccaaatg

SEQ ID NO: 118789 - DNA, 120 bp, synthetic construct; identical to SEQ ID NO: 11168
  source 1..120: mol_type = other DNA

SEQ ID NO: 118790 - DNA, 120 bp, synthetic construct; identical to SEQ ID NO: 11169
  source 1..120: mol_type = other DNA

SEQ ID NO: 118791 - DNA, 120 bp, synthetic construct; identical to SEQ ID NO: 4025
  source 1..120: mol_type = other DNA

SEQ ID NO: 118792 - DNA, 120 bp, synthetic construct
  source 1..120: mol_type = other DNA
gctggtctcaaactcctgacttcaagtgatccacccgcctcagccacccaaagcgctgggattggtaagatgtatttttaaggataggtggcgaaattttattagttaacatttttttta

SEQ ID NO: 118793 - DNA, 120 bp, synthetic construct; identical to SEQ ID NO: 20965
  source 1..120: mol_type = other DNA

SEQ ID NO: 118794 - DNA, 120 bp, synthetic construct; identical to SEQ ID NO: 20966
  source 1..120: mol_type = other DNA

SEQ ID NO: 118795 - DNA, 120 bp, synthetic construct; identical to SEQ ID NO: 20967
  source 1..120: mol_type = other DNA

SEQ ID NO: 118796 - DNA, 120 bp, synthetic construct
  source 1..120: mol_type = other DNA
tgcgtgtgtctttatagcagcatgatttatagacctttgggtatatacccagtaatgggatggctgggtcaaatggtatttccagttctagatccctgaggaatcgccacactgacttcc

SEQ ID NO: 118797 - DNA, 120 bp, synthetic construct
  source 1..120: mol_type = other DNA
tatgtggcgttatttctgagggctctgttctgttccattgatctatatctctgttttggtacgagtaccatgctgttttggttactgtagccttgcagtatagtttgaagtcaggtagtg

SEQ ID NO: 118798 - DNA, 120 bp, synthetic construct
  source 1..120: mol_type = other DNA
tctttggctctgtttatatgctggattacatttattgatttgcatatattgaaccagccttgcatctcactcaaaaccgctcaactacatggaaactgaacaacctgctcccgaatgact

SEQ ID NO: 118799 - DNA, 120 bp, synthetic construct
  source 1..120: mol_type = other DNA
caggcagagacacaacaaaaaaagagaattttagaccaatatccttgatgaacattgatgcaaaaatcctcaataaaatactggcaaaatgaatccagcagcacatcaaaaagcttatcc

SEQ ID NO: 118800 - DNA, 120 bp, synthetic construct
  source 1..120: mol_type = other DNA
gtgggaagaatagctaagatgtttttatgcatgcaaactaaagtagtagttaagattatgtgttccaggcaacctacaaaatgggagaaaattttcgcaacctactcatctgacaaaggg

SEQ ID NO: 118801 - DNA, 120 bp, synthetic construct; identical to SEQ ID NO: 13666
  source 1..120: mol_type = other DNA

SEQ ID NO: 118802 - DNA, 120 bp, synthetic construct
  source 1..120: mol_type = other DNA
caaacactgctgaaagatgacacaaacacacacaaatcaaacactcataaattaaagtaatggcaacaaaagccaaaattgacatatgggatctaactaaactaaagagcttctgcacag

SEQ ID NO: 118803 - DNA, 120 bp, synthetic construct
  source 1..120: mol_type = other DNA
ccatcattctcagcaaactatcgcaaggacaaaaaaccaaacaccgcatgttctcactcataggtgggaattgaacaatgagaacacatggacacaggaaggggaacatcacactctggg

SEQ ID NO: 118804 - DNA, 120 bp, synthetic construct
  source 1..120: mol_type = other DNA
cacaaatcaaacactcataaattaaagtaatggcaacaaaagccaaaattgacatatgggatctaactaaactaaagagcttctgcacagcaagagaaactaccatcagagtgaacaggc

SEQ ID NO: 118805 - DNA, 120 bp, synthetic construct; identical to SEQ ID NO: 13667
  source 1..120: mol_type = other DNA

SEQ ID NO: 118806 - DNA, 120 bp, synthetic construct; identical to SEQ ID NO: 13668
  source 1..120: mol_type = other DNA

SEQ ID NO: 118807 - DNA, 120 bp, synthetic construct
  source 1..120: mol_type = other DNA
atgaataggttgtgaagattttctcccattttgtgggttgcctgttcactctgatggtagtttcttttgctgtgcagaagctctttagtttaattagatcccatttgtcaattttggctt

SEQ ID NO: 118808 - DNA, 120 bp, synthetic construct
  source 1..120: mol_type = other DNA
ttataaggtggattcctaggtattttattctctttgaagcaattgtgaatgactactgggtacataacgaaatgaaggcagaaataaagatgttctttgaaaccaacgagaacaaagaca

SEQ ID NO: 118809 - DNA, 120 bp, synthetic construct
  source 1..120: mol_type = other DNA
cagcagcatatcaaaaagcttattcaccatgatcaagtgggcttcatccctgggatgcaaggctggttcaatatatgcaaatcaataaatgtaatccagcatataaacagagccaaagac

SEQ ID NO: 118810 - DNA, 120 bp, synthetic construct; identical to SEQ ID NO: 13669
  source 1..120: mol_type = other DNA

SEQ ID NO: 118811 - DNA, 120 bp, synthetic construct
  source 1..120: mol_type = other DNA
gctggccgggctgggggctgacccccccacctccctcctggacggggcgactggctgggcagaggagctcctcacttcccagtaggggcggccgggcagaggtgcccctcacctcccgga

SEQ ID NO: 118812 - DNA, 120 bp, synthetic construct; identical to SEQ ID NO: 13670
  source 1..120: mol_type = other DNA

SEQ ID NO: 118813 - DNA, 120 bp, synthetic construct; identical to SEQ ID NO: 13671
  source 1..120: mol_type = other DNA

SEQ ID NO: 118814 - DNA, 120 bp, synthetic construct
  source 1..120: mol_type = other DNA
tcctatttctccacatcctctccagcacctgttgcttcctggctttttaatgattgccattctaactggtttactgggtatatacccaaaggattataaaacatgctgctataatgacac

SEQ ID NO: 118815 - DNA, 120 bp, synthetic construct; identical to SEQ ID NO: 29141
  source 1..120: mol_type = other DNA

SEQ ID NO: 118816 - DNA, 120 bp, synthetic construct; identical to SEQ ID NO: 21985
  source 1..120: mol_type = other DNA

SEQ ID NO: 118817 - DNA, 120 bp, synthetic construct; identical to SEQ ID NO: 21986
  source 1..120: mol_type = other DNA

SEQ ID NO: 118818 - DNA, 120 bp, synthetic construct; identical to SEQ ID NO: 21987
  source 1..120: mol_type = other DNA

SEQ ID NO: 118819 - DNA, 120 bp, synthetic construct; identical to SEQ ID NO: 28909
  source 1..120: mol_type = other DNA

SEQ ID NO: 118820 - DNA, 120 bp, synthetic construct
  source 1..120: mol_type = other DNA
ccataaaaaccctagaagaaaacctaggcaataccattcaggacacaggcatgggcaaggacttcatgtctaaaacaccaaaagcaatggcaacacaaagccaaaattgacaaatgggat

SEQ ID NO: 118821 - DNA, 120 bp, synthetic construct
  source 1..120: mol_type = other DNA
gacgagttagtgggtgcagcgcaccagcatggcacatgtatacatatgtaactaacctacacattgtgcacatgtaccctaaaacttaaagtataataatcataataataaataaataaa

SEQ ID NO: 118822 - DNA, 120 bp, synthetic construct
  source 1..120: mol_type = other DNA
aatggaagatgaagagatggcacacctggaaactggactagaacttgaggtgtgtgtttggatcccacccttacccctcacacagtctctacagtcaaccagcagagtggctctggtacc

SEQ ID NO: 118823 - DNA, 120 bp, synthetic construct
  source 1..120: mol_type = other DNA
atcacagaggtggggattggtaaccaatcacagagaagcggccgcccaaacctctgttgtcctaccttccctctccttgagttaaaaaaaaaacaaaacaaaacaaaaaacaaaaaacgt

SEQ ID NO: 118824 - DNA, 120 bp, synthetic construct
  source 1..120: mol_type = other DNA
tccaaagggcccttctgcacgatggaatctgcaactccaagatgcacagaagtaaaacaagttcattaataccatggacccccaaaatgaagaagtactatgttaaggtcaagtatgcca

SEQ ID NO: 118825 - DNA, 120 bp, synthetic construct
  source 1..120: mol_type = other DNA
taaaatgacatatcagtaaacatgagaagttcaagctagcaagacacaggcagttggaaaatcaaccacctatgctgcagtggtagcctagccttcctgctgaatttctccagagctgat

SEQ ID NO: 118826 - DNA, 120 bp, synthetic construct
  source 1..120: mol_type = other DNA
tctcgccacttcttacatgattacagagcaatttacagttacctaaggacttgcaggccctattttaggctgaggttgtttatccttaccaccttatgagtgagaacaacactcctgttt

SEQ ID NO: 118827 - DNA, 120 bp, synthetic construct
  source 1..120: mol_type = other DNA
actggtcctgcacatcgttgatgtcaatggagtacatggctttgctggcacatttgccctgcaagaaagcagaggaagatgggagcttcacaatggtgggaagtcctggcttaggcaggg

SEQ ID NO: 118828 - DNA, 120 bp, synthetic construct
  source 1..120: mol_type = other DNA
accacatggctaaagcaaccctcttgtgcttgtaactacattcagaagctaatgggcaatgaagtagtcaataagtataattactatctcttcattcctgccttggggtaagaggaaagg

SEQ ID NO: 118829 - DNA, 120 bp, synthetic construct
  source 1..120: mol_type = other DNA
tcagaaattatggcattagcattgggatcctgaaagttatttgtgctcacaaacacaagcatgtatgggaagaacactgtctgatgtgcagatttgtgtctcgtctccaaagctgctgct

SEQ ID NO: 118830 - DNA, 120 bp, synthetic construct
  source 1..120: mol_type = other DNA
aggctttgatttcgtaatctcactgattcttcaactaggccagagatgtgcctcagacactgagaaattatgccggagctgggatgcacactattcagaagaatcttgttcttagagatt

SEQ ID NO: 118831 - DNA, 120 bp, synthetic construct
  source 1..120: mol_type = other DNA
cattgcactccagcctggcaacagagcaagactccatctcaagaaagaaaaaaaaaagatcaatcaactccaaattgtgaggccctacaccaagtacactcttgtcaagaagagcaacaa

SEQ ID NO: 118832 - DNA, 120 bp, synthetic construct
  source 1..120: mol_type = other DNA
atccattgcttgtcatgaccagtctcctctttcatcattgagtctaaataaccatcatctaccagggactctggtaatagtcttattttgtcttcctaccttcattcttgctcccctgct

SEQ ID NO: 118833 - DNA, 120 bp, synthetic construct
  source 1..120: mol_type = other DNA
agacttctatagttcaaaatgaaccaccaataatctaaccacattctagaaccaaacttaacctttattataaagaaacaacagaattaagagtctcttcaacatatcttccaccaatgt

SEQ ID NO: 118834 - DNA, 120 bp, synthetic construct
  source 1..120: mol_type = other DNA
aacagaaaaattcctatcacctggtgacttcatagcacaacacattactcccatgtttgtggtgatgcaggtgtaaacaaacctactgtgctgccagtcatgtaaaagtatagcacatgc

SEQ ID NO: 118835 - DNA, 120 bp, synthetic construct
  source 1..120: mol_type = other DNA
ttttgtagtaaatttagggtagcctaagtgtacaatgtttatagactatagcaatgtcctaggtcttcgcattgacccaccactcactctctgactcaccaagagcaacttccagtccta

SEQ ID NO: 118836 - DNA, 120 bp, synthetic construct
  source 1..120: mol_type = other DNA
ctctcttcttatgtagaagtaaactgtatgacaacaaatgtacaaattatggaaaaagtacgttgtacatgaaatgttatattattcaatcaaagtgtactgtgataagtctagagcaac

SEQ ID NO: 118837 - DNA, 120 bp, synthetic construct
  source 1..120: mol_type = other DNA
gaataactgactgtaattcttagtttgttatcttggtccattgttgccaagcttagataggactagagacagcctaagatgaggaatgttaccaaaaataaaggaggtggctgggtgcgg

SEQ ID NO: 118838 - DNA, 120 bp, synthetic construct
  source 1..120: mol_type = other DNA
agtacagcaaaaacagttcttgaaggaaaatttatattttaaattttgtattagaaaatcatgagctaagcttccatattaagatgctagtaaaagaagagcaaattagacccagtcatt

SEQ ID NO: 118839 - DNA, 120 bp, synthetic construct
  source 1..120: mol_type = other DNA
ttcattgtagaaactctcagcactaaaaaaatagatgagaacttcttcaatatgctataggacagggggccccagtaccagtccggtcagtggcctgttaggaactgggctgcacagcag

SEQ ID NO: 118840 - DNA, 120 bp, synthetic construct
  source 1..120: mol_type = other DNA
aggagactgctaagatgtgaatgtgtgtgtccctacaaaattcctatgttgggatttaaactcccaactgatgatattaagagatggggcctaagtgatttaagtcatgagggctccact

SEQ ID NO: 118841 - DNA, 120 bp, synthetic construct
  source 1..120: mol_type = other DNA
gccagcaattcattttttacaaaggcaccgacataatttaatgaggaaaggatcatctttcaacaaatggtgctggacccactggatagccacatgggagacccctactttataccacat

SEQ ID NO: 118842 - DNA, 120 bp, synthetic construct
  source 1..120: mol_type = other DNA
ggctggcaactttttattttgcaaagtaagagtgttttaaacaattttaataaaataaaaaccaaaaagcagccaggcgcagtggctcacgcctgtaatcccagcactttgggaggccaa

SEQ ID NO: 118843 - DNA, 120 bp, synthetic construct
  source 1..120: mol_type = other DNA
gcaaagttaggccaagaaaaggaaaggtggagggcagttatgcgagaagaaagatttggaagaaaagggaaaggaggcagaaaataagccgaagggggcaacagtgttaagggtgtggca

SEQ ID NO: 118844 - DNA, 120 bp, synthetic construct
  source 1..120: mol_type = other DNA
tcgtggcagaagacgtagtaagactagcggaggacgctgagctagaacgggatcagcagaggccggattcagcaaggcttgagagatgcatagagggagggcgaatctaagggatctcaa

SEQ ID NO: 118845 - DNA, 120 bp, synthetic construct
  source 1..120: mol_type = other DNA
ctcaccgagctgagggagacaagcacttccctgtaccctctgagaaagccatcgccatagttcatgcatctagctcacaagagactcctctgaccaatggcattttctaaaacagcagaa

SEQ ID NO: 118846 - DNA, 120 bp, synthetic construct
  source 1..120: mol_type = other DNA
cctctcttaccagggggcaggggttgcaggtggtcttcctgcactccagcttgaatccagagatgacccccacctgcaccatgcagcggcaggtcgtgcacacatcgatcatcacagtct

SEQ ID NO: 118847 - DNA, 120 bp, synthetic construct
  source 1..120: mol_type = other DNA
atttaagagatgggatgaatgggaggatgtttgggtttatgaaacaatgaaacgctactcttgaaaatttcagtttcaagaattcagtggccaggcacagtggctcatgcctgtaatccc

SEQ ID NO: 118848 - DNA, 120 bp, synthetic construct
  source 1..120: mol_type = other DNA
agggcaccagagttagtccaacaagctggggcagggctggagcccagggtcccattgggaatgtgctcttctctcaggaaggtggtttctagacgtgaagcctggcttaacatgtaagtc

SEQ ID NO: 118849 - DNA, 120 bp, synthetic construct
  source 1..120: mol_type = other DNA
ggagcagaagcactaaaaggtggggaggggagaacacagggaagagaacccataggcaactcggactagagggggaggtggaaactcacctgaaaaagcccagtgagtcattctgttatc

SEQ ID NO: 118850 - DNA, 120 bp, synthetic construct
  source 1..120: mol_type = other DNA
agatggcaggcaccttccacagcactcgccttcatgcagaacgtaagtgaagccctggaaaagcagaaaaaacagagtaaggacaggccagcagcaaagacacaggggctcttacctacg

SEQ ID NO: 118851 - DNA, 120 bp, synthetic construct
  source 1..120: mol_type = other DNA
ttttatcagccaagattctagtcatttactgtgcacctatgatgtactaggtactacggaggagacaacaaattaggatgcctcaatctgtgtacacaccctccaagatacagcagaaca

SEQ ID NO: 118852 - DNA, 120 bp, synthetic construct
  source 1..120: mol_type = other DNA
tgtttcctgtctgatactgagaagaacagccctccctcttcttcttcctgaggagtatcacagagtaaataatatctaatggacttcctttggcttctcagaatacagttcctacacctt

SEQ ID NO: 118853 - DNA, 120 bp, synthetic construct
  source 1..120: mol_type = other DNA
ccatgaaacacaaagaccaactaagtcagactggacagggatgaaccacggatctgaaaagctgtgtggagttgaagtgagatttaacaaagctgtgtgtaaacaaaatgtgtgagaaag

SEQ ID NO: 118854 - DNA, 120 bp, synthetic construct
  source 1..120: mol_type = other DNA
aatcaacagtctatgtggaaacaccagagtaaactgaaacaaggacgatcctagaaaattcagagcatacatttgttctagggacaggcgaaggtgatacatgagggtggaagaaaaagg

SEQ ID NO: 118855 - DNA, 120 bp, synthetic construct
  source 1..120: mol_type = other DNA
aatgtggcaataaataaaaccaaatgtggtctccgcccatatgcagggctgcttataaagcagatttcgtcctcctcctttccctgcccaccagccttagaaaagctatgaccagtctct

SEQ ID NO: 118856 - DNA, 120 bp, synthetic construct
  source 1..120: mol_type = other DNA
ctgaagcaactcaaatgtccaccaataagggacttgttgaaacaaaactatggtgctgccatgcaatggagtactatgcagctataagaaagaataaggcagatctctacacactgatac

SEQ ID NO: 118857 - DNA, 120 bp, synthetic construct
  source 1..120: mol_type = other DNA
actgaaaggaaattttatgtatttatttattttttgagacaaagtctcactctgtagcccaggccagagtgcaatggcacaatctcggctcactgcaacctccacctcccggattcaagt

SEQ ID NO: 118858 - DNA, 120 bp, synthetic construct; identical to SEQ ID NO: 12630
  source 1..120: mol_type = other DNA

SEQ ID NO: 118859 - DNA, 120 bp, synthetic construct
  source 1..120: mol_type = other DNA
gaaagaaaggaaggaaggaaggaaggaaggaaggaaggaaggaaggaaggaagaaaggagtgagggagggagtgagggagggagggagggagggagggagggaaggaaggaagtgacgta

SEQ ID NO: 118860 - DNA, 120 bp, synthetic construct; identical to SEQ ID NO: 12631
  source 1..120: mol_type = other DNA

SEQ ID NO: 118861 - DNA, 120 bp, synthetic construct
  source 1..120: mol_type = other DNA
ggtggatagaaggataaactgacagcaataaataaatgagtaaactattaactgatagttaatagccaagcagtccttaccttgtcgggaaggcaggtggttgtggtacagccacagtca

SEQ ID NO: 118862 - DNA, 120 bp, synthetic construct
  source 1..120: mol_type = other DNA
tccacatcagcaggacaagaacgccaacggagttagagtggggattctcgggaggtaaatacagaatttggtttcttgtcgtgtcttattttagtccatcgctatgtttaagttacagta

SEQ ID NO: 118863 - DNA, 120 bp, synthetic construct
  source 1..120: mol_type = other DNA
catacaggatagataactaggtacattagatagatagatagatagatggatgatagatagaggatagatgatagatacacagcttagagagagataggatagatgataaaacatagggta

SEQ ID NO: 118864 - DNA, 120 bp, synthetic construct
  source 1..120: mol_type = other DNA
tcttcatctgtacaagcaataaacacactggacaggactgggacaaaggcactaatgatttcctgccatgctaaccgtaattccatcagctctgaattcacggacttataccattattca

SEQ ID NO: 118865 - DNA, 120 bp, synthetic construct
  source 1..120: mol_type = other DNA
catgtgcagatctgacagggctggtggtccgggacccaggcttccaggaactgagggcaaagcgaggttcagaaagggcacaggacattctaggtacgaagcccagaattcacagaggtc

SEQ ID NO: 118866 - DNA, 120 bp, synthetic construct
  source 1..120: mol_type = other DNA
aacacattcttatccagtagctcaaaggcctctaagaagttcccaggtcaagaaggtcttacttattacttccacagtcagcaatcagtcagctaagaaggaagatcaaatacccacaag

SEQ ID NO: 118867 - DNA, 120 bp, synthetic construct
  source 1..120: mol_type = other DNA
ataagtagtagtatctatatttacaaataatgaaactgagacaccaagaagttaagaaatttgaccaagtggcacatccaggcttcgaacttagcattctggccccagacaccacaggcc

SEQ ID NO: 118868 - DNA, 120 bp, synthetic construct
  source 1..120: mol_type = other DNA
tcggagggctggggcagggggtcgaattggcagacatgaggggatgcggaaggagagagtcatgttctgtatatgtttcagtgttcttttttctctccttttaaacgcagacctcagata

SEQ ID NO: 118869 - DNA, 120 bp, synthetic construct
  source 1..120: mol_type = other DNA
ccagggacagcctgtgcaggctcttggtcccttctgatcctactccaaagactcacctctttagactctgttttgtaaaataaacaagagctatgaaaactagtgaatattttgctcttc

SEQ ID NO: 118870 - DNA, 120 bp, synthetic construct
  source 1..120: mol_type = other DNA
tacttaacttggcaagttgaaatatggcagtagagtaggactttagctcatctattccacggtgaggacaaattggatccactaggacaaagcccaacaactaaactagagcagatgaga

SEQ ID NO: 118871 - DNA, 120 bp, synthetic construct
  source 1..120: mol_type = other DNA
aaattttgatgactcagtgactcccaagcaaatcagcccaaaaaagatgcagcaaaagggccatttcatatagtggaaagagccagatctttggagtcacatagagcttcaaattctgag

SEQ ID NO: 118872 - DNA, 120 bp, synthetic construct
  source 1..120: mol_type = other DNA
aagtgaaaggcccaggctcctacctggtgctggactccatcctcaccaatgcactgagtgcaggcctcttcagggacacagctgccttccaacatgactttatctggagggcagaaacag

SEQ ID NO: 118873 - DNA, 120 bp, synthetic construct
  source 1..120: mol_type = other DNA
aggatttggagcaccaaagatttccctctgtgtgcacagtaaataaccaggaggtacacaaagaaatcagtatgcagagaaagtgcttccagtaacttagaaactaacatttgccccttg

SEQ ID NO: 118874 - DNA, 120 bp, synthetic construct
  source 1..120: mol_type = other DNA
acgaaatacagggattttcatccttattagccagataaagaatctggggcacagagaggctgagcaagcccagttagctggtctccaggattttcagaggtaacttggagactcaccaca

SEQ ID NO: 118875 - DNA, 120 bp, synthetic construct
  source 1..120: mol_type = other DNA
atcacactcaactgcaacatcagccacaaaccttgatatttgtcggcagctcttctaagataaagaagagcttgactagaaaacagagcttgactttacagagcttgaccagaaaacagg

SEQ ID NO: 118876 - DNA, 120 bp, synthetic construct
  source 1..120: mol_type = other DNA
attcacaattttatgctatctaaaagtgattccatcttgcaaatctgagcccggaacaacatgaaatcacgccaagacaaggggatggcaataaacccctctaagaaagtggtactcctc

SEQ ID NO: 118877 - DNA, 120 bp, synthetic construct
  source 1..120: mol_type = other DNA
gcacctacataagatgatttggtaaaaatcctcacattgaaggcaccaccaccataaatgatttgaaagctaatcttggacctaagtaaagttggagataagctttccagacaaaccacg

SEQ ID NO: 118878 - DNA, 120 bp, synthetic construct
  source 1..120: mol_type = other DNA
tatcacagagtaaagtatatcactcataaatatctcctgaaatcattttatctcatctctctccttttcttcaacatcttcttactcattatctttccaagtgacaatacaaatatttgt

SEQ ID NO: 118879 - DNA, 120 bp, synthetic construct
  source 1..120: mol_type = other DNA
acctcccaaagtgctgggattacaggcgtgagccactgcacccagccaaaaacatccaaactttaaaatagccgtaaataaagtaaaagagaaaaaacaccaaatcccacccagcaaaaa

SEQ ID NO: 118880 - DNA, 120 bp, synthetic construct
  source 1..120: mol_type = other DNA
agaactcagtgaacttggtgggggtgggtaataaaagtgcaaagtcaactctgaaataaagactaaattataagtacccaaggaagatgacatcaaaataagaatttaataaagagcatc

SEQ ID NO: 118881 - DNA, 120 bp, synthetic construct
  source 1..120: mol_type = other DNA
actaatgtgcaaatgttatatgctgtgacagtagaaataatagaactcgacaatgggaggagaggggagggaacaagaaaagttagaataacctcattgattgttggatagccacaggta

SEQ ID NO: 118882 - DNA, 120 bp, synthetic construct
  source 1..120: mol_type = other DNA
tgaaagggacaataaaaacagatagtacagaatttctttagaaaataatgataataaatacactacatatcagactcattgggatacatataaagtgatcctaggaaaattcataacagt

SEQ ID NO: 118883 - DNA, 120 bp, synthetic construct
  source 1..120: mol_type = other DNA
gaaccgaatggaaatttcaataaagaaattgaaatcataaaaaggaaccaaaaaagttctggatattattgtaatcttagtttgtgacttcactttttgttttctacatgatttaagagg

SEQ ID NO: 118884 - DNA, 120 bp, synthetic construct
  source 1..120: mol_type = other DNA
ctgaccaaaaatacttatgaatgtcaaaaccaacgtactaaataaaatattaccaaacagaatccaacaccacattatgaaaataacaaagcatagccaagtgggatcaacattaggaaa

SEQ ID NO: 118885 - DNA, 120 bp, synthetic construct
  source 1..120: mol_type = other DNA
acaaactttttatggaggtaaacaagttgacactaaagtctatacagaaaaaacaaacataaaagaatagccaggaaaacactttagaataaagctatgtggaggtactagtgctaccag

SEQ ID NO: 118886 - DNA, 120 bp, synthetic construct
  source 1..120: mol_type = other DNA
atgtaaagtgggggagaggcagtaaaagagtagagttttcgtgagcaattgaaattaagttgttataagcttagaatagactgttataagtataggctgttttatgtaagcttcatggta

SEQ ID NO: 118887 - DNA, 120 bp, synthetic construct
  source 1..120: mol_type = other DNA
aggtagccatacttagagaaattaaacttcaagtcaaagatggtcacaagagacaaaaaaacggacattatatagtgataaatgcatcaattcaccaggaagatataagtacattgcacc

SEQ ID NO: 118888 - DNA, 120 bp, synthetic construct
  source 1..120: mol_type = other DNA
actggataattctaccaaagatttaaagaagaattaatgccaatctttctcacactcttccaaaacactgaagtgggaaacctactttatgaagccagaattaccctgataccaaagtca

SEQ ID NO: 118889 - DNA, 120 bp, synthetic construct
  source 1..120: mol_type = other DNA
tagacaagtgggactacagcaaaccaaaaagcttctgtgcagccaaagaaacaatcaacagaataaaaaggcagcctacagaatggaagaaaatatttgcaaaccgtacatttgataaag

SEQ ID NO: 118890 - DNA, 120 bp, synthetic construct
  source 1..120: mol_type = other DNA
gttgtgggggctaggggaaggggaaaatgggaagttgctgttcagtgggcatagtttcagtcacacaaaacaaaaacttctaaaggtctgctgtacaacaacttgcaaatagctaacaat

SEQ ID NO: 118891 - DNA, 120 bp, synthetic construct
  source 1..120: mol_type = other DNA
ctggtggagttttcacctagaccaagagggaaatttatctcactaaataaattctaaagggggaatgagctataaatacagttttgattgcatcccaccagttatgcctgttcagcataa

SEQ ID NO: 118892 - DNA, 120 bp, synthetic construct
  source 1..120: mol_type = other DNA
tgcagaagaaaacagcagattcaggcagggaataagatgaggtactccaactctaagcccatctgccagacaactgacccctagaattgaacacaggcctacacagcaaggaggccccct

SEQ ID NO: 118893 - DNA, 120 bp, synthetic construct
  source 1..120: mol_type = other DNA
catgatccgcccgcctcggcctcccaaagtgctgggattacagacgtgagccactgcacctggccaaaagcatattttttaagtttctaacctaaaatcaacttaaactatggtactttg

SEQ ID NO: 118894 - DNA, 120 bp, synthetic construct
  source 1..120: mol_type = other DNA
ataggggtacagcagtgaaccaagcacataaagtccctccctgtcccccgtcctcatggagagatagacaacaaacacacaaagtaaatatatagaatttcagatgtggataaatgctta

SEQ ID NO: 118895 - DNA, 120 bp, synthetic construct
  source 1..120: mol_type = other DNA
aaggagaaaaaatctccatcctgaaattcctcaattcagctctccagaaagttctaggaatttgcaatgtgcttcaggttggaatggattttctactagcagcttttcagcccttgtaag

SEQ ID NO: 118896 - DNA, 120 bp, synthetic construct
  source 1..120: mol_type = other DNA
agcccacttttaatcctctatcatttctgaagtctcgctctcctgaattgaggactgtacaccagattcttactgttggacctggcggcatcagctgctgcatccactgaatccacagag

SEQ ID NO: 118897 - DNA, 120 bp, synthetic construct
  source 1..120: mol_type = other DNA
aagggcaatgtgggccagggaggaggggatggggagatggagttcctgggtccggactacctcagatttagagacactgagaagactccaattctacccaaaggaagtttaaatgtctac

SEQ ID NO: 118898 - DNA, 120 bp, synthetic construct
  source 1..120: mol_type = other DNA
tgaatttatagaagcacacacaataagaaaagatcttcccccgaaaaaggatcacagtttgtctccctgccagggaggtgaggaaacacaggccctttgaaggcaagtttcaaccaaggc

SEQ ID NO: 118899 - DNA, 120 bp, synthetic construct
  source 1..120: mol_type = other DNA
acaatgaccttcttcttcttcaggccctggacgtagcggacaaagttccgggacatccgttggggctcctggctggccatcaggagcagggtgatgcgggaggcttcagggcggtcgatc

SEQ ID NO: 118900 - DNA, 120 bp, synthetic construct
  source 1..120: mol_type = other DNA
tgtagacgctaacctgtgcttgtacatgttctgttgaagataaatgctttacagtacatattctaacagaatgtaaattgcatgagttttaaaacatgtttaatacgttgggccctaacg

SEQ ID NO: 118901 - DNA, 120 bp, synthetic construct
  source 1..120: mol_type = other DNA
ctccttcccgtgatccacaagatttattgcttcaatccttggttaacagtgcatgagtgacatactttctagtttcctgtgtttgctagaaaactcaccccaggcagtgttcattcttgt

SEQ ID NO: 118902 - DNA, 120 bp, synthetic construct
  source 1..120: mol_type = other DNA
ctctcattaggaaccaaaacgctcccctttcccacaaggaagtctcatttttaactaaaagggaggagccaactcctcctcctgccctagaagccaactcctcctgcctgcacccctagg

SEQ ID NO: 118903 - DNA, 120 bp, synthetic construct; identical to SEQ ID NO: 12636
  source 1..120: mol_type = other DNA

SEQ ID NO: 118904 - DNA, 120 bp, synthetic construct; identical to SEQ ID NO: 12637
  source 1..120: mol_type = other DNA

SEQ ID NO: 118905 - DNA, 120 bp, synthetic construct
  source 1..120: mol_type = other DNA
tacaaaaattagctgggcgtggtggcaggtgcctgtaatcccaggtactcgggaggttgaggcaggagaatcgcttgagcccaggaggcagaggctgcactaagccaagatcatgccatt

SEQ ID NO: 118906 - DNA, 120 bp, synthetic construct
  source 1..120: mol_type = other DNA
ttttctggtgtcagcacactgcgagctcactttccaggagttcccaaagtccacagggtcttcctccacttggaggttgctgctggtgaggtcattgttctggatgccatcaaaattccc

SEQ ID NO: 118907 - DNA, 120 bp, synthetic construct
  source 1..120: mol_type = other DNA
gagaaaaaatgtattctatcttgcttcaataagctgcattcagcttggtacaaggggtgtaagtcaccaggaaacatagaggaagaatgttctcactgttgggcaaaaggccaacgatct

SEQ ID NO: 118908 - DNA, 120 bp, synthetic construct
  source 1..120: mol_type = other DNA
acacacacacacacacacacacacacacccctaaacaaaaaaacttttttcccctgctgtatccacagcgcctaggaccacgtttgacacatacaggaactcagtatttgttgaataaat

SEQ ID NO: 118909 - DNA, 120 bp, synthetic construct
  source 1..120: mol_type = other DNA
agctcctgaaggaagcactaaacatggaaagaaacaaccagtaccagccactgcaaaaacatgccaaattgtaaagaccatcgatgctacgaagaaacggtatcaattaatgggcaaaat

SEQ ID NO: 118910 - DNA, 120 bp, synthetic construct
  source 1..120: mol_type = other DNA
gtctgtgaccatctcaccaccaccactctccaggcatccatgaccaagagacggtaacagaggtagcagcaaaatcatgattatgaaattaaagtactatgaaaccaatgagcaggtatt

SEQ ID NO: 118911 - DNA, 120 bp, synthetic construct
  source 1..120: mol_type = other DNA
gtacacttatgagaactactttttaagttcttagtacacaggggactgaattagtttactcctcttttgagctcctttctggccaggcatggtggctcatgcctgtaatctcagcacttt

SEQ ID NO: 118912 - DNA, 120 bp, synthetic construct
  source 1..120: mol_type = other DNA
tcaccagaccagaagattggcatctcttcatcacaggcctttgagtacgtgtcacaggatcttgccacgtccatggctgcgcatatgtgcctctgtgtgtgtctgggggacgggggatat

SEQ ID NO: 118913 - DNA, 120 bp, synthetic construct
  source 1..120: mol_type = other DNA
taaaaacaaggtgtgaatcttgattctgccacttattggtaacactgagcaaaccacttacctttctgacacacacacccacacacacacatacacccaaatacacacaggcacatgcat

SEQ ID NO: 118914 - DNA, 120 bp, synthetic construct
  source 1..120: mol_type = other DNA
agctggtgtcgccctctcttttgctgctgaggctgggaaacttccatatagaatctctgggaaagctctaaaggggcgcatatccccccggatcataggttccctgcctggtctgcatgc

SEQ ID NO: 118915 - DNA, 120 bp, synthetic construct
  source 1..120: mol_type = other DNA
aatggacaaccactttgagcttcaaatcccctaccgcttcaggcacttctgtgaaggactgggaagtactccagtagaaaccagaccccagagttgtttctgcagacagatccacagaac

SEQ ID NO: 118916 - DNA, 120 bp, synthetic construct
  source 1..120: mol_type = other DNA
acttgtgcgtcagaggtggtaagctcagacctcaagcccaagagacagccctctctacctctgtccagtaggcctctttccaaggctgtgcacagccaccaagtcaaaggcagggtgaat

SEQ ID NO: 118917 - DNA, 120 bp, synthetic construct
  source 1..120: mol_type = other DNA
accaagtgttgcagccaatcttcactgtttctccaggggcatactccttgccctgatggaagcagggacacctttccagggccacacatctgttctcatgccggacctaagagaaaagaa

SEQ ID NO: 118918 - DNA, 120 bp, synthetic construct
  source 1..120: mol_type = other DNA
gaaaatgaacactatattgaataaaattaatatgtacttaacactctggaggtgagggccaaatattgggcataagtagaaatcgatcagaactagagtctgggggctggtccaagccac

SEQ ID NO: 118919 - DNA, 120 bp, synthetic construct
  source 1..120: mol_type = other DNA
tgctataagaatgactgaggtatcccacggatgccttacagtcaacggaaaccagataatacgcctccttgtggcaaataccatgtgggacagaagtgcagggacggactccaggaaaca

SEQ ID NO: 118920 - DNA, 120 bp, synthetic construct
  source 1..120: mol_type = other DNA
ttaaacctcacagttaaaatgaagagaaccacctccgtctagtgtttgtcccttcgggacatcaaaaggctactaagataaagtctatgaatgtcccctgaagacttcagaagaaagcct

SEQ ID NO: 118921 - DNA, 120 bp, synthetic construct
  source 1..120: mol_type = other DNA
tagctgctaggtttcaaacgggaagtcagcatctcccagacagaggcctaagtgtttcagattacaggagccctggtctcagagtcaggagaccagaatttccactatacaactatgaag

SEQ ID NO: 118922 - DNA, 120 bp, synthetic construct
  source 1..120: mol_type = other DNA
ctgagaacagggctgctcaaagtgcattccctgggccagggccagcctgtgaggacgcaagcacagaaactaagagaaagtgtttagaaaatcttagggaaatttggcagagtcatgtta

SEQ ID NO: 118923 - DNA, 120 bp, synthetic construct
  source 1..120: mol_type = other DNA
tatggacagcaggaagaactgatgggtgcagcctctgagacagccttggatagttacagaaacaacaatgaaagctattcctacacttctgtagaactctctggctttaaagtgctttca

SEQ ID NO: 118924 - DNA, 120 bp, synthetic construct
  source 1..120: mol_type = other DNA
gttccttttcctgctgagtatgatgaagagacaatgatctatgctttccccacaccaaagctctgagacactctacctaagaggccccagggataaagaagagcaataaggaagattccc

SEQ ID NO: 118925 - DNA, 120 bp, synthetic construct
  source 1..120: mol_type = other DNA
tattttctggaaattctttgcttcctatggcactcctgtaagctaagttcttatatttttgtcagatcctgtgaggatcaaccccaggcattttcctaacaactccctccctgactttgg

SEQ ID NO: 118926 - DNA, 120 bp, synthetic construct
  source 1..120: mol_type = other DNA
atatatgttcttctcaccatctgatatactacacatctcacttacttgtttactgtcctccccaagccactgggcccactagaacgcatgttccatgaagccagggatttctatctactt

SEQ ID NO: 118927 - DNA, 120 bp, synthetic construct
  source 1..120: mol_type = other DNA
tctaagcaaggataagccttctggaagcaaataagggtgctgcaatccataaatgtaaatgtgaaacccccagtaccaggtcagccccttctcccttccatgcctggtccttaaacagta

SEQ ID NO: 118928 - DNA, 120 bp, synthetic construct
  source 1..120: mol_type = other DNA
actccactcatggtacagtgcatgaagccatcctcacagtagctgcagagaagaaaatcatagccgagcttcacgagactcgtctatactcgctgcctccacatcttcacctcccactca

SEQ ID NO: 118929 - DNA, 120 bp, synthetic construct
  source 1..120: mol_type = other DNA
gtttgtataaatgatatcacatagcatgctgtgttttgcttttcccatcgagcaccgtgtttgtaagattcatccctgtgaagacacggaccacttgtctgtgacttctgttgcacaata

SEQ ID NO: 118930 - DNA, 120 bp, synthetic construct
  source 1..120: mol_type = other DNA
gcctcccaaagtgctgggattacaggcgtgagccaccttgcccagctgactgtaatgattttgaacatttttaatgcagctgctgttcaataaatatctgttgaataaacaagagaatca

SEQ ID NO: 118931 - DNA, 120 bp, synthetic construct
  source 1..120: mol_type = other DNA
ggctgatttaggaaagtgatagtctctctaagcctcaaattctttactaaaaaagcaagtcatgcctgcccaacagtgttgttttaaggtcccagagagaaactcctggcaaactatagc

SEQ ID NO: 118932 - DNA, 120 bp, synthetic construct
  source 1..120: mol_type = other DNA
tccagtcttagtcttccttcatatagcatgcgttcatgccagaggacttaccttggggattgtggagtacaccttgtgcgtttagtccctagacttctgctccacctcaaaacaatcctc

SEQ ID NO: 118933 - DNA, 120 bp, synthetic construct
  source 1..120: mol_type = other DNA
cacagttcactgcagccttggcttcctgggctcaagcaatcttcccacctcagtatttcaagtggctgggtctacaggtatgcaccaccatggccaactatttttttttctttgtattta

SEQ ID NO: 118934 - DNA, 120 bp, synthetic construct
  source 1..120: mol_type = other DNA
ggagaagtaaggcctcagcgggaatgttggacagcaaggactgtggttctaggacttgccaccccttgtagctgtgacccccaattatttaattaaaatttttattgagataattgtaga

SEQ ID NO: 118935 - DNA, 120 bp, synthetic construct
  source 1..120: mol_type = other DNA
agaatgtctggcatgtggagaatgttcactgctaataatgttcactgataataattattattcttattgctaaggaaacagccccagctcagcggtcccaagaaggaaggagtgttccag

SEQ ID NO: 118936 - DNA, 120 bp, synthetic construct
  source 1..120: mol_type = other DNA
aagtagctacatggtaagtctgtgctccctgagtgtctccaattgatgtgacctcttcttacgaatagattcactggtttagggagctctgttcatttctctggaagagaaagtggaagt

SEQ ID NO: 118937 - DNA, 120 bp, synthetic construct
  source 1..120: mol_type = other DNA
attggacccaaaatagtagcacttctagggtccccatgcctacactgctcctgaaatatagatgctaattcctttcactgtttctcataactcctcttccaacaggaccatctactttat

SEQ ID NO: 118938 - DNA, 120 bp, synthetic construct
  source 1..120: mol_type = other DNA
tatacaacgccagaggttttgtccatcggtggtttgcctggagttacaagcaaagggtttgtatgtgaatttcccttgccttcatcggactcttaagggaggcggagacccagtgggatc

SEQ ID NO: 118939 - DNA, 120 bp, synthetic construct
  source 1..120: mol_type = other DNA
ccttgccttcctgggttcatgcaaccgtcccacgtagctcccaagtagttgggattacaggcgcgccccaccacgcccggcaaatttattattattattattattattattattattatt

SEQ ID NO: 118940 - DNA, 120 bp, synthetic construct
  source 1..120: mol_type = other DNA
aatgacaagaaacacctccccacaacctgctgcctgccactcaggccctgggcatcactgaagagaaagggccacgagccacagaagactctgagggtgatgatggataggagtaggagt

SEQ ID NO: 118941 - DNA, 120 bp, synthetic construct
  source 1..120: mol_type = other DNA
ggtcttttaaaagggcacaaatctcattcttcatcatctcccaaaggccccacctcgtaacaccatcaccttgggggttaggatttcaacatataaatttggggaggacacagacattca

SEQ ID NO: 118942 - DNA, 120 bp, synthetic construct
  source 1..120: mol_type = other DNA
gaaaaaagaaaaatatatataaaaagacagttctataggccatggggtcatctgaccctgtcctgaaccttggccaaggaaacgtcttcttgttagctaaactgacacaaacccacccca

SEQ ID NO: 118943 - DNA, 120 bp, synthetic construct
  source 1..120: mol_type = other DNA
aaaaggaaaaaaaaaaaaaaaaaggagttagtttgaaattccctcaggagctctaagacaggagaaagaacatagccacacgaggatggaggacgccaggatctcctgggtgaaacctgc

SEQ ID NO: 118944 - DNA, 120 bp, synthetic construct
  source 1..120: mol_type = other DNA
ttgcctcatttataaaatggcagtaatatttgcactgtccacctgccagggtcatttccagagaaacagtgaaaagtatggattgctatccagtgtgattccaggaccaccaagaacaag

SEQ ID NO: 118945 - DNA, 120 bp, synthetic construct
  source 1..120: mol_type = other DNA
gcagagggggatctctttagcattgacaccacgacatctgaatgtgcctgggacactctgccactgcacaccacctcatgtctgagcgatgctgtgtacgacactgaatacagcaattgt

SEQ ID NO: 118946 - DNA, 120 bp, synthetic construct
  source 1..120: mol_type = other DNA
taatcagagaaaggcctcaacccgagagcctctggccttctcataacctacaactccattctcccagaatactccatgtgaatggggccccctagagttgtgcagcaagaaggcttgcta

SEQ ID NO: 118947 - DNA, 120 bp, synthetic construct
  source 1..120: mol_type = other DNA
caaaccagtctaaaaacaagttctacgagaaaattcggttcctgctcctaaaactgcaagatgtcagagctgggtcattcaggtcaaggcctcattttacagatggggcaactaaggaag

SEQ ID NO: 118948 - DNA, 120 bp, synthetic construct
  source 1..120: mol_type = other DNA
tctactctacagaaaaagaaatatatatagagagagacaccattgccatttggtgaaggaggaagacttttcccacccagtcactctacggtgcatgtgtgagttcctttctctaaggat

SEQ ID NO: 118949 - DNA, 120 bp, synthetic construct
  source 1..120: mol_type = other DNA
acgagaaatgtgcaaatattcgaaaggaaaactttcagggccagcatctaatcgtctcatctgatttccttctctgaccttcactgacttgtgttcccaagtttctcgcaaatcagaagt

SEQ ID NO: 118950 - DNA, 120 bp, synthetic construct
  source 1..120: mol_type = other DNA
cctttagcaaagcaactcagacttccaccagatgcaaattgtcaccaaagcctgcaacataatctctaccaaatgtgcaagatgcatttctttttttttttcctgagacagtctcgctct

SEQ ID NO: 118951 - DNA, 120 bp, synthetic construct
  source 1..120: mol_type = other DNA
gattgctcctatgaagtgctcattattatccccagtttacagatgaggaaactgaagcatagagaagttcaactcatccaagttcccaaagaaactgaacagggatctgaatacgggcag

SEQ ID NO: 118952 - DNA, 120 bp, synthetic construct
  source 1..120: mol_type = other DNA
ttcacaggttaattgcagcaactcatatgtcttccaaagagctcctttagtcttggacatggtgtaattacgttcagtggagcacagatatccctttcaagagcaatcttttctccttcg

SEQ ID NO: 118953 - DNA, 120 bp, synthetic construct
  source 1..120: mol_type = other DNA
cctctttgtttagtcaatcatgaccatacaggccttacagctcatcaaccttaatcctttcagcaaacaggtaataaggacagacaataacatctgaacgcaggtgcattctccgctttc

SEQ ID NO: 118954 - DNA, 120 bp, synthetic construct
  source 1..120: mol_type = other DNA
gatcatttatgaaagcatagtttggagggacagctagagatgatgtctgcacgtgaaggatcctgcccttcctgacctccccatcttcaaggcttatttatctgtaatatactctttgct

SEQ ID NO: 118955 - DNA, 120 bp, synthetic construct
  source 1..120: mol_type = other DNA
tttcccaagtagctgggattataggtgtgcaccaccacccccagctaatttttgtatttttagtggagacgggatttcaccaggttggccaggctggtctcaaactcctgaactcaagtg

SEQ ID NO: 118956 - DNA, 120 bp, synthetic construct
  source 1..120: mol_type = other DNA
gacccccacccttccccttggtcgcctgctctccatgtataacttggcattctttcctccccttcacctaaaaccctttcagagtgacaccaaactcctctaggctcaaaacaagtggag

SEQ ID NO: 118957 - DNA, 120 bp, synthetic construct
  source 1..120: mol_type = other DNA
cattgagactggaagatgaaacacacagcacgagtaaggcaggagggatagcggtcattagcctggaggagagagatttaataaaagagaagaacttaatgaatgctttctgctctctca

SEQ ID NO: 118958 - DNA, 120 bp, synthetic construct
  source 1..120: mol_type = other DNA
accttgatcttcttcactatgaatgagggggatgggacaaggggctttatagagatttctgggtctcaccctaggagatctgaatgcagtagtttgggatggggatcagcaagatttttt

SEQ ID NO: 118959 - DNA, 120 bp, synthetic construct
  source 1..120: mol_type = other DNA
ctgttttgcggcgccacagaaagcccacaggaatagaaacctgaccccatctgctcaccgttctcgaaatccagtccggcagcacagggacgttggtcctaaggaaatcagtgttctagc

SEQ ID NO: 118960 - DNA, 120 bp, synthetic construct
  source 1..120: mol_type = other DNA
cttggcctcatcatgacttccacagccccagattcagcccagcgtcttccccatgctagcgtgtgagctaagctgtttactcaacccctcctctgcaaaacaggggagaatagtaacagt

SEQ ID NO: 118961 - DNA, 120 bp, synthetic construct
  source 1..120: mol_type = other DNA
ccgtgaccagacagagcccagcatggcccatctccagcatttccaaatcactcttttcccactcagagggataatgggaacagtactccagcacatttcctgggaggtccctggaggcat

SEQ ID NO: 118962 - DNA, 120 bp, synthetic construct
  source 1..120: mol_type = other DNA
tctcgaaaaaaaaaaaaaaataggtccaaagaggagttggcgtcttgtactctcaggctcgtggcagagacactgggatgcaggtagtgaccaaaacattcactcaacaagcattagcag

SEQ ID NO: 118963 - DNA, 120 bp, synthetic construct
  source 1..120: mol_type = other DNA
aaaggcacagctgcccgctgagaggctgttccaagtctgtggcctcagcttctcttagcaggtagttacggccccatcataatccaaacccaaccaagctctccttgagtaggtgtctac

SEQ ID NO: 118964 - DNA, 120 bp, synthetic construct
  source 1..120: mol_type = other DNA
cctaagtcagtggttcttaaggtgaggtccagggatcgcctaggactcccaagatcctttcagcagtgcacgaggtcaaaactgtttttataataatactaagatgctatttgcaatttt

SEQ ID NO: 118965 - DNA, 120 bp, synthetic construct
  source 1..120: mol_type = other DNA
gctgcctggttcatgcatcattctttgctcaagtaaaccctgttaaatttaatttgtctcaggtttttcttttaacactagtgatggggtgcaaaccctgagtgcctgagtccattccaa

SEQ ID NO: 118966 - DNA, 120 bp, synthetic construct
  source 1..120: mol_type = other DNA
ctccgtcgcaaaaaacaaaaaagaaaaggaaaattatcttgcctctctgcatcctcatttccctacctgtgaaagaggggaaaagtggaagaggttgaaagttgtccaggagctattctc

SEQ ID NO: 118967 - DNA, 120 bp, synthetic construct
  source 1..120: mol_type = other DNA
agatctgaagcttagctattgtgtttgctcccaagcagctgacaaaggagaagggagggggacattcctaggactgagtgaacaaagaaaggaaagtctaatacatagagtgcaatattg

SEQ ID NO: 118968 - DNA, 120 bp, synthetic construct
  source 1..120: mol_type = other DNA
gcattaggacaaacacctaatgcatgtggggcttaaaacctaaatgatgggttgataggtgcagcaaactaccatggcacatgtatgcctatgtaacaaacctgcacgttcagcacatgt

SEQ ID NO: 118969 - DNA, 120 bp, synthetic construct
  source 1..120: mol_type = other DNA
agaaagggctggtaggtcctttgcaaataaaaggcttgagcaatatttaatgagaacatgaagagtgaactgctttgtctctaacggaatgggtattttctgtgcctctttgggctactg

SEQ ID NO: 118970 - DNA, 120 bp, synthetic construct
  source 1..120: mol_type = other DNA
gtagatatctgctagattctcaaccaactctgagttcttatgagcctaagattcctaacattgatgaaaagaaatttcttccacttcagacagctgtcggaggttgctgctgctgctgaa

SEQ ID NO: 118971 - DNA, 120 bp, synthetic construct
  source 1..120: mol_type = other DNA
caatcaaacaaggccattatcagtcccagtggagacaggcattgggttttgttggcataacaaggaaacattcattccctaggtataactaacaagtaatatgacctggctctcagaatg

SEQ ID NO: 118972 - DNA, 120 bp, synthetic construct
  source 1..120: mol_type = other DNA
aagtacttactctgcactgggctatgtttgcaaaataaaatgagaccaaaaataataaatctttgaagccatgtttcagtattagaggtacctccacagccaccctgaccccacctcacc

SEQ ID NO: 118973 - DNA, 120 bp, synthetic construct
  source 1..120: mol_type = other DNA
tcctcatcatcatcatggctcttaacagttgagccccactgggctaaactctatacatattatccctctcttaccttttcagtgacccagcaggtactatttctgctttacaaatgtgga

SEQ ID NO: 118974 - DNA, 120 bp, synthetic construct
  source 1..120: mol_type = other DNA
acctattatatactgtctctatagcccaatccacagaaacacataatgaaagagttttggttttggttttgttttatagacagggtctcactctgttgcccaggctggagtgcagtggtg

SEQ ID NO: 118975 - DNA, 120 bp, synthetic construct
  source 1..120: mol_type = other DNA
agagtgtgtgtgtgtgtgtgtgtgtgtgtgtgtgtgtgtgtgtgtgtgtgtgtgtgtgctgaccagcattccttcctggtaagagaccaccaaccacggaatggttctggctgatttaca

SEQ ID NO: 118976 - DNA, 120 bp, synthetic construct
  source 1..120: mol_type = other DNA
gtaaacctcctgcatacaaacgtcccgcccagggaggctgactcacagcaccaccaaggaaccttgctcctcagatgatgagtctctgagcacaatcccaaaagggcaacaacccctgtt

SEQ ID NO: 118977 - DNA, 120 bp, synthetic construct
  source 1..120: mol_type = other DNA
cagaaaagcatagttacttattgctatggttcaactgtctacgtcctccaaaatccatgtgttggaacctaaaccccaaagtgacgctattaaaaggtggcgccttttaggaagtgatga

SEQ ID NO: 118978 - DNA, 120 bp, synthetic construct
  source 1..120: mol_type = other DNA
gaaaattctaggtctgctggtggttttgtgtgttttgttttaattttttataaagagacagggtctggctatgtttcccaggctggagtgcagcggctattcacaagtgcaatcccacta

SEQ ID NO: 118979 - DNA, 120 bp, synthetic construct
  source 1..120: mol_type = other DNA
attcttatacagtggattacgaatgctcaaaatatttttgcagaatgaaggtaagaatatgacatggaacctaagcccagtccccaagtcactgcatactccaggctctcacagcatctg

SEQ ID NO: 118980 - DNA, 120 bp, synthetic construct
  source 1..120: mol_type = other DNA
acagagcatgactccatcccaaaacaaaagacaaaacaaaacaaaacaaaacaaaaaaagacatgggcagagggagacgggcaaagacacacacacaggagaaagcaatgtgaagacaga

SEQ ID NO: 118981 - DNA, 120 bp, synthetic construct
  source 1..120: mol_type = other DNA
ctacaatgaacaaatgccctattgaattcatgactaatctcacaaaaaagtataagaaatttcaaaagacaagcctggcgcagtggttcatgcttgtaatcccagcactttgggaggccg

SEQ ID NO: 118982 - DNA, 120 bp, synthetic construct; identical to SEQ ID NO: 12638
  source 1..120: mol_type = other DNA

SEQ ID NO: 118983 - DNA, 120 bp, synthetic construct
  source 1..120: mol_type = other DNA
tggccatcagagaaatgcaaatcaaaaccacatgagataccatctcacaccagttagaatggcaatcattaaaaagtcaggaaacaacaggtgctggagaggatgtggagaaataggaac

SEQ ID NO: 118984 - DNA, 120 bp, synthetic construct; identical to SEQ ID NO: 12639
  source 1..120: mol_type = other DNA

SEQ ID NO: 118985 - DNA, 120 bp, synthetic construct
  source 1..120: mol_type = other DNA
attgaacagcagctgcattaaaaatgttcaaaaccattacagtcagctgggcaaggtggctcacacctgtaatcccagcacttcgggaggccgaggtgggcggaccacttgaggtcagga

SEQ ID NO: 118986 - DNA, 120 bp, synthetic construct
  source 1..120: mol_type = other DNA
ccagcactttgggaggccaaggtgggtggatcacaaggtcaggagattgagaccatccctggctaacacggtgaaaccccatctctactaaaaatacaaaaaattagccgggtgtggtgg

SEQ ID NO: 118987 - DNA, 120 bp, synthetic construct
  source 1..120: mol_type = other DNA
cacaatgagatatcatcttaccctagtcacaacggttattattaaaaagacagaaaataacagatgttggcaaggatgaggaaaaaggggaactcttacacactgttggtgggaatgtaa

SEQ ID NO: 118988 - DNA, 120 bp, synthetic construct
  source 1..120: mol_type = other DNA
ctcagaaaggtgagagagagtgggagtggggcagatgatgagaaattacttaatgggtacaaagtatattgtaccctaaaagtcctgacttgaccactacacaatctgtgcatgtaacaa

SEQ ID NO: 118989 - DNA, 120 bp, synthetic construct
  source 1..120: mol_type = other DNA
taagccgagatcaggccactgcacttcagcctggcgacagagggaaactccatctcaaaaaaaataaagaagaattgaaagcagggttttaaagagttatttgtacacctatactcatag

SEQ ID NO: 118990 - DNA, 120 bp, synthetic construct
  source 1..120: mol_type = other DNA
acaaagcatccttcaactggtgaatgggtaaacaaattgtggtaactactccttagcaataaataggaacaaactactgatacatgcaccaatatggattaacctctcacggaccatgtt

SEQ ID NO: 118991 - DNA, 120 bp, synthetic construct
  source 1..120: mol_type = other DNA
aggtagaagaatcgcttgaatctgggaggtggaggctgtagtgagctgagatctcaccactgcaatccggcctgggtgacagagcaagactctgtctttaaaaaaaaaaaaaaagaaaga

SEQ ID NO: 118992 - DNA, 120 bp, synthetic construct
  source 1..120: mol_type = other DNA
taaaacatgaaatatgttacatatcaaaattggtacagctgggcacagtaacacacacctataattccactaggaaggctgaggcaagaggattccttgagcccaagagttcaagatcag

SEQ ID NO: 118993 - DNA, 120 bp, synthetic construct
  source 1..120: mol_type = other DNA
agagaattcaaagttgaacgaagtcagctttgaggagctctaagacctggtttcactagaggtctaggcattggaatggaatgcaaagagataaggttggcaacataaattgaggtgagg

SEQ ID NO: 118994 - DNA, 120 bp, synthetic construct
  source 1..120: mol_type = other DNA
gacttctggatacattgccctcaggtaggctctcaaacatcacaaaagaaaaatctaaaagcatgatcttttgcttctgggagtttacaacctgcgtataaatagaagacaaacatgcga

SEQ ID NO: 118995 - DNA, 120 bp, synthetic construct
  source 1..120: mol_type = other DNA
cagcatgaaagaggaaacacaggcaagacatttttcacagcgtgaccaaagcttagcaaacctcacctagtttctaagaactgctactcgtggtgggtctttgatattcaaagataacta

SEQ ID NO: 118996 - DNA, 120 bp, synthetic construct
  source 1..120: mol_type = other DNA
tagctgggactacaggtgcccgccaccatgcccagctaatttgttgtatttttagtacagatggggtttcaccatagccaggatggtctcgatctcctgacctcatgatctgcctgcctg

SEQ ID NO: 118997 - DNA, 120 bp, synthetic construct
  source 1..120: mol_type = other DNA
aggtcgctatggctataagtttgtaaagtaaggcctgcaaggctgaataaaccaagaattcagcagaagcagaaaaatcaaacaggagagaaccaggagaagtgtatgggagagaaggag

SEQ ID NO: 118998 - DNA, 120 bp, synthetic construct
  source 1..120: mol_type = other DNA
taagcggctcttaaactcttttgctcagaaagcacagtaaaaacacaactttatgactcaggacacacacacacacgtttcatatcatatttacccttgccgtgtgccatgcactctgat

SEQ ID NO: 118999 - DNA, 120 bp, synthetic construct
  source 1..120: mol_type = other DNA
aactaccgtcagacctgggcgctctcttaggctttagtgtggaactcactcatctgcatttccactaaacactctaccttctatgcccgtgattctggtgcaggtgaccctccctccaaa

SEQ ID NO: 119000 - DNA, 120 bp, synthetic construct
  source 1..120: mol_type = other DNA
acttcacaagggcaaacagcttataagaaaagaataatgacctggtggggaatcccaccaaggggttttgaggtagacaggccttccatggcccttcaaattcctctgtgaccactgaaa

SEQ ID NO: 119001 - DNA, 120 bp, synthetic construct
  source 1..120: mol_type = other DNA
gaactaacagagattatggagtccagacagcaatccacccgcccccaccccgggcactgcagtgtctccatcaaaatcttcctctggtcacttttttttttttttttttttttttttttt

SEQ ID NO: 119002 - DNA, 120 bp, synthetic construct
  source 1..120: mol_type = other DNA
aaagtctggttacccaccctaagagcagcagcagcagttgggaaattttcaggcccccttccatttctactgagtcagaactccaggggcagggcccagtgatctgtttgtcacagctct

SEQ ID NO: 119003 - DNA, 120 bp, synthetic construct
  source 1..120: mol_type = other DNA
caaacttgagtggggcacttctgagccctcttctagattaagccttggccttgggctctgtccttggcctgcttagtccagtttttttgttttttgtgggttgtttttttttttgagatg

SEQ ID NO: 119004 - DNA, 120 bp, synthetic construct
  source 1..120: mol_type = other DNA
ggtgatctcagggcacaactgggaccatcagctcaaacctctctggcctcgtagaaattagactgcctctgatagaaactgggctgtggggaggtattttccatcctaaatgagactaaa

SEQ ID NO: 119005 - DNA, 120 bp, synthetic construct
  source 1..120: mol_type = other DNA
tagattgcagtgagcatctttgtacataaatctactagcatgtcttgggcatgttaaattttaaacagatcagactgtgtgcctgacacatagactctctgaagtgtgaactcctccggc

SEQ ID NO: 119006 - DNA, 120 bp, synthetic construct
  source 1..120: mol_type = other DNA
tggcgactatcagggcatgcagtagcaaaaacatttctttaaagcaggagaaaagattgatcctcgtgacccccttttcccctttgaacatggacttctggcccccgaaaaaacccctgg

SEQ ID NO: 119007 - DNA, 120 bp, synthetic construct
  source 1..120: mol_type = other DNA
cctaacacgcaggtacattcagctgctcccaggttctcagaggtgagggcaaacttcattccaactcatttgagtgaagtactatcaaacagtaaaacccactgcatgaagaaaagcagc

SEQ ID NO: 119008 - DNA, 120 bp, synthetic construct
  source 1..120: mol_type = other DNA
gttgctacattctaataattctaattctcaaggacatttccacccacttctggtaccctgatcttacacacacacacacacacacacacacacacacacacacacaattcttcttcccag

SEQ ID NO: 119009 - DNA, 120 bp, synthetic construct
  source 1..120: mol_type = other DNA
atgctgtgctaaatacaacaaatgttctttaaatccacagttgatctgggaggaaagtaaggaatatcttaaagggtcaatgaggaagaggagcctaaatgagcatgaggcagggtaggc

SEQ ID NO: 119010 - DNA, 120 bp, synthetic construct
  source 1..120: mol_type = other DNA
tctataatcctggcactttgggaggctgagatgggataatcgcttgagaccaggagttcaagaccagcctgggcaacacagcaagaccctgtctttacaaagaataaacttttttcaagg

SEQ ID NO: 119011 - DNA, 120 bp, synthetic construct
  source 1..120: mol_type = other DNA
ttgtggtcaggagttcgagaccagcctggccaacgtgttgaaatcccatctctactaaaaatacaactattagccttgcatggtggtgcatgcctgtaattccagctattcaagaggctg

SEQ ID NO: 119012 - DNA, 120 bp, synthetic construct
  source 1..120: mol_type = other DNA
taacagtcctttctgaagaaactactaaagaaggaatttcagggagaaaaaacattttttgttattgtttctgagacagggtctctgtcacccagggtggagcgcagtgacacagtcaca

SEQ ID NO: 119013 - DNA, 120 bp, synthetic construct
  source 1..120: mol_type = other DNA
aggagaatcacttgaacccgggaggcatagattgcagtgagccgagatcgagccattgcactccagcctgggcaacagagccagactccatctaaataaattaaataaataaataaataa

SEQ ID NO: 119014 - DNA, 120 bp, synthetic construct
  source 1..120: mol_type = other DNA
ttagctagattaaccaagacaaaaaaagactcaaataaataaaatcagaaatagaagaggttatattacaattgatagcacagaaataaaaaggctagtaagagactactatgaacaact

SEQ ID NO: 119015 - DNA, 120 bp, synthetic construct
  source 1..120: mol_type = other DNA
caaattcagcaaagttgaaacaaattcagttgcagaatacaaaatcaacatagaaaaccatttgtttttatacactaacaatgacctgtccacatgaaaaagaatgaagttggaccctta

SEQ ID NO: 119016 - DNA, 120 bp, synthetic construct
  source 1..120: mol_type = other DNA
atgcacatcagtggacaaatggataaagaaaatgtggtatatacatgcaatggaatactattcagtctttagaaagaaggaaatcctttcatatgccacaacatagatgaacttggagga

SEQ ID NO: 119017 - DNA, 120 bp, synthetic construct
  source 1..120: mol_type = other DNA
tctaattatcaactgagactttgtcttctgacaaagtaactatagaattctttatgaataaacagaagaaacctaaagtctggtggagttttcacctagaccaagagggaaatttatctc

SEQ ID NO: 119018 - DNA, 120 bp, synthetic construct; identical to SEQ ID NO: 118892
  source 1..120: mol_type = other DNA

SEQ ID NO: 119019 - DNA, 120 bp, synthetic construct
  source 1..120: mol_type = other DNA
gctggtactacaggtgcccgccaccatgcccggctaattttttgtatctttagtagaggcggggattcactgtgttagccaagacggtctcgatctcctgacctcgtgatccacccgcct

SEQ ID NO: 119020 - DNA, 120 bp, synthetic construct
  source 1..120: mol_type = other DNA
attgtcagcaataggggtacagcagtgaaccaagcacataaagtccctccctgtcccccgtcctcatggagagatagacaacaaacacacaaagtaaatatatagaatttcagatgtgga

SEQ ID NO: 119021 - DNA, 120 bp, synthetic construct
  source 1..120: mol_type = other DNA
actagaccaccaacagggtatatgtaagaagagaagagaaaatatcacagggctgagcccagagaatgtgcatgctcatttacacatgagaaaccgaggctttagatggttaaatgacgt

SEQ ID NO: 119022 - DNA, 120 bp, synthetic construct
  source 1..120: mol_type = other DNA
caatgaatcactctggcctcagacatgacattttagtaagagaccacgaatcctactttagaaagaaagggcatagaggtatgatcactcctggacacaaagggaaaatgtggagaaatt

SEQ ID NO: 119023 - DNA, 120 bp, synthetic construct
  source 1..120: mol_type = other DNA
tttgaaatgaaagccttagcaaaactcttcatttcatcaaaagaagaagctgggaaactggaggagccatccaggagaaggatcacgtccaggggctggctgcagtctgcaaagataacc

SEQ ID NO: 119024 - DNA, 120 bp, synthetic construct
  source 1..120: mol_type = other DNA
ggcagacactgactccagtgtctgaagactgcacctgctacctggcacctgacatcctggtctcgccctgaagaatgtcagctactcagaataatttcacccacccagtgtggtcaaaac

SEQ ID NO: 119025 - DNA, 120 bp, synthetic construct
  source 1..120: mol_type = other DNA
cagtcaccatgtaggagtactgcagcaccgtgacgtggatgctgtcctggcccacatccatccgctgaatcacctcctccatgaactccttgctcctgttgaagtcggcttcaccaattt

SEQ ID NO: 119026 - DNA, 120 bp, synthetic construct
  source 1..120: mol_type = other DNA
agatcaggtccagtagcctgctgcagtagaaatcgtgcaacagcggttctgagatgtcctccacatacagagtggtggggctcaccggggcatctgtgggaggtaccaccaggcctcccg

SEQ ID NO: 119027 - DNA, 120 bp, synthetic construct
  source 1..120: mol_type = other DNA
aaatcaagtgaccgtgtggtggagaccaatatgggccaggaccatctcctctttggactctcagccttggaggcacctggccttcagcactcccagtaaagctgacaaggcggcagcgcc

SEQ ID NO: 119028 - DNA, 120 bp, synthetic construct
  source 1..120: mol_type = other DNA
aacctgttaggacttaaaaacctattaagagcaaaaacattgtagaggaatatatgtggaggaagcagtctagtccatccctaaagaaaaagaagcaaaccctaggaacaaacaaaacaa

SEQ ID NO: 119029 - DNA, 120 bp, synthetic construct
  source 1..120: mol_type = other DNA
acagttacattcaatacaacattcccccactgcagaaagttctatcggcaggggctgctttaggtgagaatcccataaataggcacagaaaagcattttggaggagctcgacttgagaaa

SEQ ID NO: 119030 - DNA, 120 bp, synthetic construct
  source 1..120: mol_type = other DNA
catgccttgaatccatgtcccgcctcaaagtccataatataaacttcttactcagccaacgtcttaaccctcgttagcccttggccatccagtcccatactagcactgtcttctctcgcc

SEQ ID NO: 119031 - DNA, 120 bp, synthetic construct
  source 1..120: mol_type = other DNA
ccacccttcctcatcccaaaacacgcctctaaacacactggactttttcagggcagttatgacagaaaatgaattcagacactgagtgggtcattgtttccaagacgttccaacagtccc

SEQ ID NO: 119032 - DNA, 120 bp, synthetic construct
  source 1..120: mol_type = other DNA
gaaacgttggcacatgccaaggggagttacttctcatgcagaaggaaatgttttgccaggcattgcttcccctagaaactgttgattttactttttgtttcccagattgaaagccaagaa

SEQ ID NO: 119033 - DNA, 120 bp, synthetic construct
  source 1..120: mol_type = other DNA
aagaggaggaggagcgggacagagactcagaggaggcccgaggtgagcagcaaagccttgccattgccaagacccattcctgagcttccttgctggccccattttatttaaagctatgga

SEQ ID NO: 119034 - DNA, 120 bp, synthetic construct
  source 1..120: mol_type = other DNA
cctgtttgaaggttctttgtgactacagtgggcccacctagataattcaggataatctctccattttaaggtcaggtgattagcaatcttaattccacctgcaaccataatgctcccatg

SEQ ID NO: 119035 - DNA, 120 bp, synthetic construct
  source 1..120: mol_type = other DNA
tacagaagccagatgcatttcatgcccatgcatgcttggggaagcaagttcatctcatctatcacaataagcatctgttccactaaattccactgcaggatacttttcacacttagacaa

SEQ ID NO: 119036 - DNA, 120 bp, synthetic construct
  source 1..120: mol_type = other DNA
ttaattttaactgtcacgttgcaaatgatatttgtctatggtattttttctttatattttgaaaaaagtgtatttgacatccactctggaattagtattatgaatgacatattatacctt

SEQ ID NO: 119037 - DNA, 120 bp, synthetic construct
  source 1..120: mol_type = other DNA
gcatgtacaaacattatcgtatatttgttgattctgacccgattctgattctatagtatactttttcattctgatcacaataacaataaaaatagaaaactgtaagtgtgaagctggaag

SEQ ID NO: 119038 - DNA, 120 bp, synthetic construct
  source 1..120: mol_type = other DNA
gaaattaacaaggatattcagacttgaactcggctctggtccaagcagacctaatagatatctacagaactctccaccgtaaatcaacagaatatacattcttctcagcaccacatagca

SEQ ID NO: 119039 - DNA, 120 bp, synthetic construct; identical to SEQ ID NO: 10177
  source 1..120: mol_type = other DNA

SEQ ID NO: 119040 - DNA, 120 bp, synthetic construct; identical to SEQ ID NO: 10178
  source 1..120: mol_type = other DNA

SEQ ID NO: 119041 - DNA, 120 bp, synthetic construct
  source 1..120: mol_type = other DNA
agagtattccttatctagttggttatggatttgaacatgtaccttggtttagatactttgaaaatagaagtactgaatagcctctagggaacttgagtggcctttccctccccctgcccc

SEQ ID NO: 119042 - DNA, 120 bp, synthetic construct
  source 1..120: mol_type = other DNA
cctgcctagtgcctgggactgcaggcgggcgccgccacacctgactggtttttgctggagtgcagtggcgtgatcttggctcgctacaacctccacctcccagccgcctgccttggcctc

SEQ ID NO: 119043 - DNA, 120 bp, synthetic construct
  source 1..120: mol_type = other DNA
tctgccttgggatgctgttaatctgcaaacttacccccaaccccgtgctctctgaaacatgtgctgtgtccactcagggttaaatggattaagggcagtgcaagatgtgctttgttaaac

SEQ ID NO: 119044 - DNA, 120 bp, synthetic construct
  source 1..120: mol_type = other DNA
cctgggcgacagagcaagactctctcaaaataaataaaataaaataaaataaaatacaaaaattagcctggcgtagtggcaggagcctgtagtcccagttacttgggagggtgagttgtg

SEQ ID NO: 119045 - DNA, 120 bp, synthetic construct
  source 1..120: mol_type = other DNA
tgcagtgagccaagatcacaccactgcaccacggcctgggtgacagagcaagactccatctcaaaaaaaaaaaagaatacacacatgaaaaatgcttatcattagttgctagggaaacac

SEQ ID NO: 119046 - DNA, 120 bp, synthetic construct; identical to SEQ ID NO: 10937
  source 1..120: mol_type = other DNA

SEQ ID NO: 119047 - DNA, 120 bp, synthetic construct; identical to SEQ ID NO: 14646
  source 1..120: mol_type = other DNA

SEQ ID NO: 119048 - DNA, 120 bp, synthetic construct
  source 1..120: mol_type = other DNA
gcctgagaagtgaggagcccctccacccggcagccaccccgtctgggaagtgaggagcgtctccgcccagcagccaccccgtcctggagggaggtggggggtcagccccccgcccggcca

SEQ ID NO: 119049 - DNA, 120 bp, synthetic construct; identical to SEQ ID NO: 14647
  source 1..120: mol_type = other DNA

SEQ ID NO: 119050 - DNA, 120 bp, synthetic construct; identical to SEQ ID NO: 7986
  source 1..120: mol_type = other DNA

SEQ ID NO: 119051 - DNA, 120 bp, synthetic construct
  source 1..120: mol_type = other DNA
tcattgtagattctagatattagccctttgtcagatgagtaggttgtgaaaattttctcccattttgtaggttgcctgttcactctgatggtagtttcttttgctgtgcagaagctcttt

SEQ ID NO: 119052 - DNA, 120 bp, synthetic construct
  source 1..120: mol_type = other DNA
cttcacagtggaagacttccagctagggcattcaaaagtaatgaaccacgtgctcctaataccctgaaataatcagactctttacatattttcagctttgtctatagagtaaatcaatat

SEQ ID NO: 119053 - DNA, 120 bp, synthetic construct
  source 1..120: mol_type = other DNA
tccaagtctttgctattgtgaatagtgccgcaataaacatacgtgtgcatgtgtctttatagcagcatgatttatactcatttgggtatatacccagtaatgggatggctgggtcaaatg

SEQ ID NO: 119054 - DNA, 120 bp, synthetic construct; identical to SEQ ID NO: 66500
  source 1..120: mol_type = other DNA

SEQ ID NO: 119055 - DNA, 120 bp, synthetic construct
  source 1..120: mol_type = other DNA
aggaatggtaccagttcctccatgtacctctggtagaattcagctgtgaatccatctggtcctggactctttttggttggtaaactattgattattgccacaatttcagagcctgttatt

SEQ ID NO: 119056 - DNA, 120 bp, synthetic construct
  source 1..120: mol_type = other DNA
aatttttgtataaggtgtaaggaagggatccagtttcagctttctacatatggctagccagttttcccagcaccatttattaaatagggaatcctttccccatttctttatcaggtttgt

SEQ ID NO: 119057 - DNA, 120 bp, synthetic construct
  source 1..120: mol_type = other DNA
ataggtagctcttatgattctgagatacatcccatcaatacctaatttattgagagtttttagcatgaagggttgctgaattttgtcaaaggccttttctgcatctattgagataatcat

SEQ ID NO: 119058 - DNA, 120 bp, synthetic construct
  source 1..120: mol_type = other DNA
gcctgggcaacagaccaagactctgtctcaaaaaaacaaaaaagaatattactattagccttaaagccccctgcatactctcccaaagccatctcctttccttatcctgaaataactatc

SEQ ID NO: 119059 - DNA, 120 bp, synthetic construct
  source 1..120: mol_type = other DNA
aacatatatataaaatatagattatatatataatataatctatatagagagatttttttttgagacggagtctcgctctgtcgcccatgctggagtgcagtggtgcgatctcggttcact

SEQ ID NO: 119060 - DNA, 120 bp, synthetic construct
  source 1..120: mol_type = other DNA
tctccacatcctctccagcacctgttgtttcctgtctttctaatgatcgccattctaaccggtatgagatggtatctcattgtggttttgatttgcatttctctgatggccagtgatgat

SEQ ID NO: 119061 - DNA, 120 bp, synthetic construct
  source 1..120: mol_type = other DNA
ctaaccctaacccaaccccaccccaaccccaaccccaacccaaccctaaccctaaccctaacccaaccctaaccctaaccctaacccaaccctcaccctcaccctcaccctcaccctcac

SEQ ID NO: 119062 - DNA, 120 bp, synthetic construct
  source 1..120: mol_type = other DNA
agtaccaccgaaatctgtgcagaggacaacgcagctccgccctcgcggtgctctgcggctctgtgctgacgagaacgcaactcccccggcgcaggcgcagagaggcgcgccgcgccggcg

SEQ ID NO: 119063 - DNA, 120 bp, synthetic construct
  source 1..120: mol_type = other DNA
tggccggtgttgagaatgactgcgcaaatttgccggatttcctttgctgttcctgcatgtagtttaaacgagattgccagcaccgggtatcattcaccatttttctttttgttaacttgc

SEQ ID NO: 119064 - DNA, 120 bp, synthetic construct
  source 1..120: mol_type = other DNA
agtggcgtcgcccctagggctctactgggccggcgtctcctgtctcctggagaggcttcgatgcccctccactccctcttgatattccctgtgatgtcatctggagccctgctgcttgca

SEQ ID NO: 119065 - DNA, 120 bp, synthetic construct
  source 1..120: mol_type = other DNA
gtgtggccgagggccaggcttctcactgggcctctgcaggaggctgccatttgtcctgcccaccttcttagaagggagacggagcagacccatctgctactgccctttctataataacta

SEQ ID NO: 119066 - DNA, 120 bp, synthetic construct
  source 1..120: mol_type = other DNA
gtgtcatggagccccctacgattcccagtcgtcctcgtcctcctctgcctgtggctgctgcggtggcggcaaaggagggatggagtctgacacgcggacaaaggctcctccgggcccctc

SEQ ID NO: 119067 - DNA, 120 bp, synthetic construct
  source 1..120: mol_type = other DNA
gtggctgaccattgccttggaccgctcttggcagtcgaagaagattctcctgtcacagtttgagctgggtgagcttagagaggaaagctccactatggctcccaaaccaggaaggagcca

SEQ ID NO: 119068 - DNA, 120 bp, synthetic construct
  source 1..120: mol_type = other DNA
tggcctacaggggccgcggttgagggtgggagtgggggtgcactggccagcacctcaggagctgggggtggtggtgggggcggtgggggtggtgttagtaccccatcttgtaggtctgaa

SEQ ID NO: 119069 - DNA, 120 bp, synthetic construct
  source 1..120: mol_type = other DNA
ctgccatcccatcccagtcagcctcctctgggggacagaaccctatggtggccccggctcctccccagtatccagtcctcctggtgtgtgacaggctatatgcgcggccagcagacctgc

SEQ ID NO: 119070 - DNA, 120 bp, synthetic construct
  source 1..120: mol_type = other DNA
atggctactgatggggcaagcacttcacaacccctcatgatcacgtgcagcagacaatgtggcctctgcagagggggaacggagaccggaggctgagactggcaaggctggacctgagtg

SEQ ID NO: 119071 - DNA, 120 bp, synthetic construct
  source 1..120: mol_type = other DNA
tcttttctggctggggagaggccttcatctgctgtaaagggtcctccagcacaagctgtcttaattgaccctagttcccagggcagcctcgttctgccttgggtgctgacacgaccttcg

SEQ ID NO: 119072 - DNA, 120 bp, synthetic construct
  source 1..120: mol_type = other DNA
agccaccacagaaaacagaggtgcatccagcaccacagaaaacagagccaccacagaaaacagagggtgactgtcatcccctccagtctctgcacactcccagctgcagcagagcaggag

SEQ ID NO: 119073 - DNA, 120 bp, synthetic construct
  source 1..120: mol_type = other DNA
tcccatgcagaagcacccccctcccacccctgtgcaggccggccttcgcggcagaccaccatacaccacgttccaagccacactgaggcctccctccaagcctgcagcccccatttccag

SEQ ID NO: 119074 - DNA, 120 bp, synthetic construct
  source 1..120: mol_type = other DNA
gaacgcagcactccactacccaggaaatgccttcctgccctctcctcatcccatccctgggcaggggacatgcaactgtctacaaggtgccaagtaccaggacaggaaaggaaagacgcc

SEQ ID NO: 119075 - DNA, 120 bp, synthetic construct
  source 1..120: mol_type = other DNA
taccaaaaaaacagcaaacaccattcactcactcatgttagataaacactgagtgaagtcactggagcccaaggactgtgcgaggtcagcactgccaatacaagaagctgcagccctcca

SEQ ID NO: 119076 - DNA, 120 bp, synthetic construct
  source 1..120: mol_type = other DNA
cagatgggttccccaggaccgggattccccaagggggctgctcccagagggtgtgttgctgggattgcccaggacagggatggccctctcatcaggtgggggtgagtggcagcacccacc

SEQ ID NO: 119077 - DNA, 120 bp, synthetic construct
  source 1..120: mol_type = other DNA
tgccactaaagcagcaatcacactgcagacagcactgatttgattggcaagagatgcaccaggcagaatattaagggaccaggcccctataaataggcctaatcacagcccctcactgga

SEQ ID NO: 119078 - DNA, 120 bp, synthetic construct
  source 1..120: mol_type = other DNA
tgcaggccatgatcacaacaaagacgaataagacactacactagccagggagagtctcaaaaacaactaaactcaaattaaattcattctactccagtcatgggtacaaagctaaggagt

SEQ ID NO: 119079 - DNA, 120 bp, synthetic construct
  source 1..120: mol_type = other DNA
tattgtccctctttcagcagacggtattttcttatgctacagtatgactgctaataatacctacacatgttagaaccattctgactcctcaagaatctcatttaactcttattatcagtg

SEQ ID NO: 119080 - DNA, 120 bp, synthetic construct
  source 1..120: mol_type = other DNA
gtattctttaataatggtgggtttttttttttttttgcatctatgaagttttttcaaattctttttaagtgacaaaacttgtacatgtgtatcgctcaatatttctagtcgacagcactg

SEQ ID NO: 119081 - DNA, 120 bp, synthetic construct
  source 1..120: mol_type = other DNA
ccacgcccagggcccgcccctgccctccagccctacgccttgacccgctttcctgcgtctctcagcctacctgaccttgtctttacctctgtgggcagctcccttgtgatctgcttagtt

SEQ ID NO: 119082 - DNA, 120 bp, synthetic construct
  source 1..120: mol_type = other DNA
ggtcatggggtggggccctcattatagatctggtaagaaaagagagcattgtctctgtgtctccctctctctctctctctctctctctctctcatttctctctatctcatttctctctct

SEQ ID NO: 119083 - DNA, 120 bp, synthetic construct
  source 1..120: mol_type = other DNA
cctgtctcagaaaaaaaaaaaaaagtactttgtaatctgtaaggtttatttcaacacacacaaaaaaagtgtatatgctccacgatgcctgtgaatatacacacacaccacatcatatac

SEQ ID NO: 119084 - DNA, 120 bp, synthetic construct
  source 1..120: mol_type = other DNA
cttatcggaaatgaacagcatttgaagcttcacccgacagaccagacagcttagccctcgtgttgtgccatgtgggttgttctctgagaggcaggagagcatagtggttactaggaaggg

SEQ ID NO: 119085 - DNA, 120 bp, synthetic construct
  source 1..120: mol_type = other DNA
cttttttttttttatatacttaagttctagggtacatgtgcataatgtgcaggttggatacatagatatgcgtgtgccatgttggtttgctgcacccatcaacttgtcatttacattagg

SEQ ID NO: 119086 - DNA, 120 bp, synthetic construct
  source 1..120: mol_type = other DNA
gaaggcagttgctgtaaccaactataaacaaataaaggcttaaacacaatggaagtttatttctcactaagggaacatccaaatccatgatactttaagtcagggacccaggttcctccc

SEQ ID NO: 119087 - DNA, 120 bp, synthetic construct
  source 1..120: mol_type = other DNA
atttcagtgacttacgagatgttctggttatttgttgctatgaaacaagtaactcaaaaacctagtggttcataacacccatagttttgttgtctcacagttcgagaggttgactgggct

SEQ ID NO: 119088 - DNA, 120 bp, synthetic construct; identical to SEQ ID NO: 430
  source 1..120: mol_type = other DNA

SEQ ID NO: 119089 - DNA, 120 bp, synthetic construct
  source 1..120: mol_type = other DNA
gattgcaccactgcactgcagcctgggcaacagagcgagactccgcctcaaaaaaaagaaaaagaagtaagtcataatcttaggggaggagggtgttactaaataaaatagttgtagctc

SEQ ID NO: 119090 - DNA, 120 bp, synthetic construct
  source 1..120: mol_type = other DNA
cagtgatgcgatcttggctcactgcaaccgggttcaggtgattctcctgcctcgacctcccaagtagctgggactacaggcgtgcaccaccactcccggctaatttttgtattgttaata

SEQ ID NO: 119091 - DNA, 120 bp, synthetic construct
  source 1..120: mol_type = other DNA
cttaaccttccttaagcttatgtggcttaacagtgagtagggtcactgtggcagctgtaactactagtgtgaagctcttgcagagtgctggcacataataagtgcatagtgaatgtgagc

SEQ ID NO: 119092 - DNA, 120 bp, synthetic construct; identical to SEQ ID NO: 10271
  source 1..120: mol_type = other DNA

SEQ ID NO: 119093 - DNA, 120 bp, synthetic construct
  source 1..120: mol_type = other DNA
agtaaacatcttcctgtgttataataattcctctttttttttaacattgtaggcaagttaatagggggtgaagtggatatataagtcatagatatgttcatgttcttactgaaagcaatt

SEQ ID NO: 119094 - DNA, 120 bp, synthetic construct
  source 1..120: mol_type = other DNA
aggttggacaagcttgtcctagaacaaaggctgtcaacttcggctgctcattgggatccatggggaacttaaaagagtgctgacaggccgggcacagtggctcacgcctgtaatcccagc

SEQ ID NO: 119095 - DNA, 120 bp, synthetic construct; identical to SEQ ID NO: 10273
  source 1..120: mol_type = other DNA

SEQ ID NO: 119096 - DNA, 120 bp, synthetic construct; identical to SEQ ID NO: 10274
  source 1..120: mol_type = other DNA

SEQ ID NO: 119097 - DNA, 120 bp, synthetic construct; identical to SEQ ID NO: 10275
  source 1..120: mol_type = other DNA

SEQ ID NO: 119098 - DNA, 120 bp, synthetic construct; identical to SEQ ID NO: 431
  source 1..120: mol_type = other DNA

SEQ ID NO: 119099 - DNA, 120 bp, synthetic construct; identical to SEQ ID NO: 366
  source 1..120: mol_type = other DNA

SEQ ID NO: 119100 - DNA, 120 bp, synthetic construct
  source 1..120: mol_type = other DNA
gcattactgtggaattagaaataaactccaaacaaaaaatatctaggagatatggaagaagacccttcctgttaaatggagttgctcagcttataccagaagctctcagccctgggccag

SEQ ID NO: 119101 - DNA, 120 bp, synthetic construct; identical to SEQ ID NO: 367
  source 1..120: mol_type = other DNA

SEQ ID NO: 119102 - DNA, 120 bp, synthetic construct
  source 1..120: mol_type = other DNA
tctcaaagtgcttggattacaggtgtgagccaccgtgcccggcctgcactgaatttttatgtagttttcagtgagtccaggatgttccacaaaagccttttcctttgatcacttcagtgt

SEQ ID NO: 119103 - DNA, 120 bp, synthetic construct
  source 1..120: mol_type = other DNA
gctgagtgtcatttgcttcatgcaaggagtgctggtttgggttgggagaggacctgatccagcaggtgttttgttttagcaagacaacgctggataatgtcttctagttgaaatataaga

SEQ ID NO: 119104 - DNA, 120 bp, synthetic construct
  source 1..120: mol_type = other DNA
atccttttacttttagatgatattggcaaggattacagagtagagtgaaatttctactctttctaaaacactagctttcaagtcctggacggtctgccgtctcttgcaggaggcctgtgg

SEQ ID NO: 119105 - DNA, 120 bp, synthetic construct
  source 1..120: mol_type = other DNA
ttaatgcttggaaaagttatctttggctacggatgattgtacaagactgtctcttggagcagccaatcaagaattgacctcagtgttttgttacttgggcacagatgtgattcactgtgc

SEQ ID NO: 119106 - DNA, 120 bp, synthetic construct
  source 1..120: mol_type = other DNA
gtggctcacacctgtaatcccagcactttaggaggccaaggtgggtggatcacaaggtcaagagatcgagaccatcctggccaacataatgaaaccctgtttctactaaaaatacaaaaa

SEQ ID NO: 119107 - DNA, 120 bp, synthetic construct
  source 1..120: mol_type = other DNA
ttactaacttacaaaagttactactagtaactttctttttttttttttttgcaatggagtttcactcttgtcccccaggctggattgaaatggcacaatcttggctcactgcaacctttg

SEQ ID NO: 119108 - DNA, 120 bp, synthetic construct; identical to SEQ ID NO: 368
  source 1..120: mol_type = other DNA

SEQ ID NO: 119109 - DNA, 120 bp, synthetic construct; identical to SEQ ID NO: 369
  source 1..120: mol_type = other DNA

SEQ ID NO: 119110 - DNA, 120 bp, synthetic construct
  source 1..120: mol_type = other DNA
ctgcctcccaggttcaaggattctcccacctcagcctcccaagtagctggaaccacaggcacacgccaccacacccggctgatctttgtatttttagtagaggtggggtttcaccacatt

SEQ ID NO: 119111 - DNA, 120 bp, synthetic construct
  source 1..120: mol_type = other DNA
ttttcagccacaagctccaaaaggacaatgacccagatgttgacctttttgctggcaccaaaaaaaccaaggtcagttccaaatggttccccacagtatgacttgttattgtattgggtg

SEQ ID NO: 119112 - DNA, 120 bp, synthetic construct
  source 1..120: mol_type = other DNA
gccggaaacacctcaggttagaaatcctctttaaggattttcagctcttgtttgcatcccagtacagagaaattccattatgcagacccacagttatttagacttgtctgcattaaggag

SEQ ID NO: 119113 - DNA, 120 bp, synthetic construct
  source 1..120: mol_type = other DNA
catcaggtctcgctccatttaaaaccaaagaaccatccactcggatcgggaagatacaagtaattaaaacactggaatcttcattgcctgccctgtggcatctataaacttttttgggtt

SEQ ID NO: 119114 - DNA, 120 bp, synthetic construct; identical to SEQ ID NO: 10289
  source 1..120: mol_type = other DNA

SEQ ID NO: 119115 - DNA, 120 bp, synthetic construct; identical to SEQ ID NO: 10290
  source 1..120: mol_type = other DNA

SEQ ID NO: 119116 - DNA, 120 bp, synthetic construct
  source 1..120: mol_type = other DNA
tctagtttttacagtttttttatttttatagaatattgtaatcagcttcctgggcatgccactcggtgacatggcatacagctccactggtccagcttgggagtttaacctctggttctg

SEQ ID NO: 119117 - DNA, 120 bp, synthetic construct
  source 1..120: mol_type = other DNA
cttttctggaaaatgcaccccagcgggttcacttcagtgtaatcctgagttaggctgaagataggtaagagatggactaattattttagtgaagtaactctttcctatgatagtcatcaa

SEQ ID NO: 119118 - DNA, 120 bp, synthetic construct; identical to SEQ ID NO: 10673
  source 1..120: mol_type = other DNA

SEQ ID NO: 119119 - DNA, 120 bp, synthetic construct; identical to SEQ ID NO: 10253
  source 1..120: mol_type = other DNA

SEQ ID NO: 119120 - DNA, 120 bp, synthetic construct
  source 1..120: mol_type = other DNA
gcctggccaacatggtgaaaccccgtctctactaaaaatacacaaaattagttgggcgttgtggcgggcacctgtaattccagctactcgggaggctgaggcaggagaatcgcttgaacg

SEQ ID NO: 119121 - DNA, 120 bp, synthetic construct; identical to SEQ ID NO: 10254
  source 1..120: mol_type = other DNA

SEQ ID NO: 119122 - DNA, 120 bp, synthetic construct; identical to SEQ ID NO: 10255
  source 1..120: mol_type = other DNA

SEQ ID NO: 119123 - DNA, 120 bp, synthetic construct
  source 1..120: mol_type = other DNA
aattttttttctatttttagtagagatggggtttcaccatgttggtgagtctgcttttgaacttctgacctcaagcgatctgcccattgcaacctccgcctcccgggttcaagcagttat

SEQ ID NO: 119124 - DNA, 120 bp, synthetic construct; identical to SEQ ID NO: 10674
  source 1..120: mol_type = other DNA

SEQ ID NO: 119125 - DNA, 120 bp, synthetic construct; identical to SEQ ID NO: 10256
  source 1..120: mol_type = other DNA

SEQ ID NO: 119126 - DNA, 120 bp, synthetic construct; identical to SEQ ID NO: 10257
  source 1..120: mol_type = other DNA

SEQ ID NO: 119127 - DNA, 120 bp, synthetic construct
  source 1..120: mol_type = other DNA
tttaagcgattctcctgcctcagcctcctgagtagctgggattacaggcaccggccaccacatcaagctaatttttatatttttagtaaagatggggttttgccatggtttcaccatgtt

SEQ ID NO: 119128 - DNA, 120 bp, synthetic construct
  source 1..120: mol_type = other DNA
gcgtgaacccaggaggcagagcttgcagtgagccgagatcgcaccactgcactccagccttggcaacagagtgagactccatctcaaaaaaaaaaaaaaagggcaaaaacaaattagccg

SEQ ID NO: 119129 - DNA, 120 bp, synthetic construct
  source 1..120: mol_type = other DNA
gcctcggtctcagagagtgctggccttacaggcgtgagccaccgcacctggcctatattgactttttataacaagcatgttgtacttcggtagtttttaaaacataaaaatgattttaaa

SEQ ID NO: 119130 - DNA, 120 bp, synthetic construct; identical to SEQ ID NO: 10258
  source 1..120: mol_type = other DNA

SEQ ID NO: 119131 - DNA, 120 bp, synthetic construct; identical to SEQ ID NO: 10675
  source 1..120: mol_type = other DNA

SEQ ID NO: 119132 - DNA, 120 bp, synthetic construct; identical to SEQ ID NO: 10259
  source 1..120: mol_type = other DNA

SEQ ID NO: 119133 - DNA, 120 bp, synthetic construct; identical to SEQ ID NO: 10676
  source 1..120: mol_type = other DNA

SEQ ID NO: 119134 - DNA, 120 bp, synthetic construct
  source 1..120: mol_type = other DNA
ctgggttcaagagattctcctgtcttagtctcctgagtaaatgggattataggtgtgcgccaccacacccagctaatttttagtattttcggtagatattgggtttcaccacgttggcca

SEQ ID NO: 119135 - DNA, 120 bp, synthetic construct; identical to SEQ ID NO: 10260
  source 1..120: mol_type = other DNA

SEQ ID NO: 119136 - DNA, 120 bp, synthetic construct; identical to SEQ ID NO: 10261
  source 1..120: mol_type = other DNA

SEQ ID NO: 119137 - DNA, 120 bp, synthetic construct; identical to SEQ ID NO: 10262
  source 1..120: mol_type = other DNA

SEQ ID NO: 119138 - DNA, 120 bp, synthetic construct; identical to SEQ ID NO: 10263
  source 1..120: mol_type = other DNA

SEQ ID NO: 119139 - DNA, 120 bp, synthetic construct
  source 1..120: mol_type = other DNA
actttttttgtatttttagtagagatggggtttcaccatgttggccaggctggtctcgagctcctgacctcaggtaatccacccaccttggcctcccaaaatgctgggattacaggcgtg

SEQ ID NO: 119140 - DNA, 120 bp, synthetic construct
  source 1..120: mol_type = other DNA
ttcaagtgattctcatgcctcagcctcccaagtagctgggattataggcatgtgccaccatgcccagctagtttttgtatttttagtggagatggggtatcgccatgttggcgcggctgg

SEQ ID NO: 119141 - DNA, 120 bp, synthetic construct
  source 1..120: mol_type = other DNA
aatggcttgaacctaggaggcggaggttgcagtgagccgagatcaccccattgcacttcagcctgggcaaaaagagcgaaactccttctcaaaaataaataaataaaaatatttctctag

SEQ ID NO: 119142 - DNA, 120 bp, synthetic construct; identical to SEQ ID NO: 10264
  source 1..120: mol_type = other DNA

SEQ ID NO: 119143 - DNA, 120 bp, synthetic construct; identical to SEQ ID NO: 10677
  source 1..120: mol_type = other DNA

SEQ ID NO: 119144 - DNA, 120 bp, synthetic construct; identical to SEQ ID NO: 10678
  source 1..120: mol_type = other DNA

SEQ ID NO: 119145 - DNA, 120 bp, synthetic construct; identical to SEQ ID NO: 10679
  source 1..120: mol_type = other DNA

SEQ ID NO: 119146 - DNA, 120 bp, synthetic construct; identical to SEQ ID NO: 10265
  source 1..120: mol_type = other DNA

SEQ ID NO: 119147 - DNA, 120 bp, synthetic construct
  source 1..120: mol_type = other DNA
aaagaatgttgcctaaaaagaacataagctcacctagttctgtatctcttacagtgccagaatcccttctccagcattcctgtcattgagttgttgtgtctgtacttacataggtgtggt

SEQ ID NO: 119148 - DNA, 120 bp, synthetic construct; identical to SEQ ID NO: 10267
  source 1..120: mol_type = other DNA

SEQ ID NO: 119149 - DNA, 120 bp, synthetic construct; identical to SEQ ID NO: 10680
  source 1..120: mol_type = other DNA

SEQ ID NO: 119150 - DNA, 120 bp, synthetic construct; identical to SEQ ID NO: 10681
  source 1..120: mol_type = other DNA

SEQ ID NO: 119151 - DNA, 120 bp, synthetic construct; identical to SEQ ID NO: 10268
  source 1..120: mol_type = other DNA

SEQ ID NO: 119152 - DNA, 120 bp, synthetic construct; identical to SEQ ID NO: 10682
  source 1..120: mol_type = other DNA

SEQ ID NO: 119153 - DNA, 120 bp, synthetic construct; identical to SEQ ID NO: 10292
  source 1..120: mol_type = other DNA

SEQ ID NO: 119154 - DNA, 120 bp, synthetic construct
  source 1..120: mol_type = other DNA
gagactccgtctcaaaaacaaacaaacaaacaaacaaacgacaacaaaaaaaaccaactatgaccgacagaagacacccaaacttttgtcgtggtaacacagtaaatgcttttactaaaa

SEQ ID NO: 119155 - DNA, 120 bp, synthetic construct; identical to SEQ ID NO: 10252
  source 1..120: mol_type = other DNA

SEQ ID NO: 119156 - DNA, 120 bp, synthetic construct; identical to SEQ ID NO: 10253
  source 1..120: mol_type = other DNA

SEQ ID NO: 119157 - DNA, 120 bp, synthetic construct; identical to SEQ ID NO: 119120
  source 1..120: mol_type = other DNA

SEQ ID NO: 119158 - DNA, 120 bp, synthetic construct; identical to SEQ ID NO: 10254
  source 1..120: mol_type = other DNA

SEQ ID NO: 119159 - DNA, 120 bp, synthetic construct; identical to SEQ ID NO: 10255
  source 1..120: mol_type = other DNA

SEQ ID NO: 119160 - DNA, 120 bp, synthetic construct; identical to SEQ ID NO: 119123
  source 1..120: mol_type = other DNA

SEQ ID NO: 119161 - DNA, 120 bp, synthetic construct; identical to SEQ ID NO: 10674
  source 1..120: mol_type = other DNA

SEQ ID NO: 119162 - DNA, 120 bp, synthetic construct; identical to SEQ ID NO: 10256
  source 1..120: mol_type = other DNA

SEQ ID NO: 119163 - DNA, 120 bp, synthetic construct; identical to SEQ ID NO: 10257
  source 1..120: mol_type = other DNA

SEQ ID NO: 119164 - DNA, 120 bp, synthetic construct; identical to SEQ ID NO: 119127
  source 1..120: mol_type = other DNA

SEQ ID NO: 119165 - DNA, 120 bp, synthetic construct; identical to SEQ ID NO: 119128
  source 1..120: mol_type = other DNA

SEQ ID NO: 119166 - DNA, 120 bp, synthetic construct; identical to SEQ ID NO: 119129
  source 1..120: mol_type = other DNA

SEQ ID NO: 119167 - DNA, 120 bp, synthetic construct; identical to SEQ ID NO: 10258
  source 1..120: mol_type = other DNA

SEQ ID NO: 119168 - DNA, 120 bp, synthetic construct; identical to SEQ ID NO: 10675
  source 1..120: mol_type = other DNA

SEQ ID NO: 119169 - DNA, 120 bp, synthetic construct; identical to SEQ ID NO: 10259
  source 1..120: mol_type = other DNA

SEQ ID NO: 119170 - DNA, 120 bp, synthetic construct; identical to SEQ ID NO: 10676
  source 1..120: mol_type = other DNA

SEQ ID NO: 119171 - DNA, 120 bp, synthetic construct; identical to SEQ ID NO: 119134
  source 1..120: mol_type = other DNA

SEQ ID NO: 119172 - DNA, 120 bp, synthetic construct; identical to SEQ ID NO: 10260
  source 1..120: mol_type = other DNA

SEQ ID NO: 119173 - DNA, 120 bp, synthetic construct; identical to SEQ ID NO: 10261
  source 1..120: mol_type = other DNA

SEQ ID NO: 119174 - DNA, 120 bp, synthetic construct; identical to SEQ ID NO: 10262
  source 1..120: mol_type = other DNA

SEQ ID NO: 119175 - DNA, 120 bp, synthetic construct; identical to SEQ ID NO: 10263
  source 1..120: mol_type = other DNA

SEQ ID NO: 119176 - DNA, 120 bp, synthetic construct; identical to SEQ ID NO: 119139
  source 1..120: mol_type = other DNA

SEQ ID NO: 119177 - DNA, 120 bp, synthetic construct
  source 1..120: mol_type = other DNA
gtctctctctgttacccaggctggagtgcagtggcacgatattggttcactccaacctccacctcctcggttcaagtgattctcatgcctcagcctcccaagtagctgggattataggca

SEQ ID NO: 119178 - DNA, 120 bp, synthetic construct; identical to SEQ ID NO: 119141
  source 1..120: mol_type = other DNA

SEQ ID NO: 119179 - DNA, 120 bp, synthetic construct; identical to SEQ ID NO: 10264
  source 1..120: mol_type = other DNA

SEQ ID NO: 119180 - DNA, 120 bp, synthetic construct; identical to SEQ ID NO: 10677
  source 1..120: mol_type = other DNA

SEQ ID NO: 119181 - DNA, 120 bp, synthetic construct; identical to SEQ ID NO: 10678
  source 1..120: mol_type = other DNA

SEQ ID NO: 119182 - DNA, 120 bp, synthetic construct; identical to SEQ ID NO: 10679
  source 1..120: mol_type = other DNA

SEQ ID NO: 119183 - DNA, 120 bp, synthetic construct; identical to SEQ ID NO: 10265
  source 1..120: mol_type = other DNA

SEQ ID NO: 119184 - DNA, 120 bp, synthetic construct; identical to SEQ ID NO: 10266
  source 1..120: mol_type = other DNA

SEQ ID NO: 119185 - DNA, 120 bp, synthetic construct; identical to SEQ ID NO: 10267
  source 1..120: mol_type = other DNA

SEQ ID NO: 119186 - DNA, 120 bp, synthetic construct; identical to SEQ ID NO: 10680
  source 1..120: mol_type = other DNA

SEQ ID NO: 119187 - DNA, 120 bp, synthetic construct; identical to SEQ ID NO: 10681
  source 1..120: mol_type = other DNA

SEQ ID NO: 119188 - DNA, 120 bp, synthetic construct; identical to SEQ ID NO: 10268
  source 1..120: mol_type = other DNA

SEQ ID NO: 119189 - DNA, 120 bp, synthetic construct; identical to SEQ ID NO: 10682
  source 1..120: mol_type = other DNA

SEQ ID NO: 119190 - DNA, 120 bp, synthetic construct; identical to SEQ ID NO: 10269
  source 1..120: mol_type = other DNA

SEQ ID NO: 119191 - DNA, 120 bp, synthetic construct; identical to SEQ ID NO: 10270
  source 1..120: mol_type = other DNA

SEQ ID NO: 119192 - DNA, 120 bp, synthetic construct
  source 1..120: mol_type = other DNA
agattgcaccactgcactgcagcctgggcaacagagcgagactctgcctcaaaaaaaagaaaaagaagtaagtcataatcttaggagaggagggtgttactaaataaaatagttgtagct

SEQ ID NO: 119193 - DNA, 120 bp, synthetic construct
  source 1..120: mol_type = other DNA
cactcccggctaatttttgtattgttaatagagacagggtttcaccatgttggccaggctagtttcgaactcctgatctcaggtgatccgcctgcctcggcctccctaagtgctaggatt

SEQ ID NO: 119194 - DNA, 120 bp, synthetic construct; identical to SEQ ID NO: 119091
  source 1..120: mol_type = other DNA

SEQ ID NO: 119195 - DNA, 120 bp, synthetic construct; identical to SEQ ID NO: 10271
  source 1..120: mol_type = other DNA

SEQ ID NO: 119196 - DNA, 120 bp, synthetic construct; identical to SEQ ID NO: 10272
  source 1..120: mol_type = other DNA

SEQ ID NO: 119197 - DNA, 120 bp, synthetic construct; identical to SEQ ID NO: 119094
  source 1..120: mol_type = other DNA

SEQ ID NO: 119198 - DNA, 120 bp, synthetic construct; identical to SEQ ID NO: 10273
  source 1..120: mol_type = other DNA

SEQ ID NO: 119199 - DNA, 120 bp, synthetic construct; identical to SEQ ID NO: 10274
  source 1..120: mol_type = other DNA

SEQ ID NO: 119200 - DNA, 120 bp, synthetic construct; identical to SEQ ID NO: 10275
  source 1..120: mol_type = other DNA

SEQ ID NO: 119201 - DNA, 120 bp, synthetic construct; identical to SEQ ID NO: 10276
  source 1..120: mol_type = other DNA

SEQ ID NO: 119202 - DNA, 120 bp, synthetic construct
  source 1..120: mol_type = other DNA
agttcaggaatttgaggctgcagtgggatatgattgtgccattgctctccagcctgggcagtagagtgagaccctgtcttaaaaagtaaaataaatattaaaaatagagtaaatacaagg

SEQ ID NO: 119203 - DNA, 120 bp, synthetic construct; identical to SEQ ID NO: 10277
  source 1..120: mol_type = other DNA

SEQ ID NO: 119204 - DNA, 120 bp, synthetic construct; identical to SEQ ID NO: 10278
  source 1..120: mol_type = other DNA

SEQ ID NO: 119205 - DNA, 120 bp, synthetic construct
  source 1..120: mol_type = other DNA
cagcctgggcaacagagtgagactccatctcaaaaaaaaaaaaaagaaagaaaaaaacaggaagtaaacttcatgacaaggatgagcttgtcttcaagaagattaaaactggtactttgg

SEQ ID NO: 119206 - DNA, 120 bp, synthetic construct; identical to SEQ ID NO: 10279
  source 1..120: mol_type = other DNA

SEQ ID NO: 119207 - DNA, 120 bp, synthetic construct; identical to SEQ ID NO: 10280
  source 1..120: mol_type = other DNA

SEQ ID NO: 119208 - DNA, 120 bp, synthetic construct; identical to SEQ ID NO: 10281
  source 1..120: mol_type = other DNA

SEQ ID NO: 119209 - DNA, 120 bp, synthetic construct; identical to SEQ ID NO: 10282
  source 1..120: mol_type = other DNA

SEQ ID NO: 119210 - DNA, 120 bp, synthetic construct; identical to SEQ ID NO: 10283
  source 1..120: mol_type = other DNA

SEQ ID NO: 119211 - DNA, 120 bp, synthetic construct; identical to SEQ ID NO: 10284
  source 1..120: mol_type = other DNA

SEQ ID NO: 119212 - DNA, 120 bp, synthetic construct
  source 1..120: mol_type = other DNA
aacatagcaagatcctgtctctacaaaaaattttaaaaattagccaggcctggttgcgtgctcctatagttctatctccttgggaagttgaggcagaagagtcctttgagcccaggagtt

SEQ ID NO: 119213 - DNA, 120 bp, synthetic construct; identical to SEQ ID NO: 10285
  source 1..120: mol_type = other DNA

SEQ ID NO: 119214 - DNA, 120 bp, synthetic construct; identical to SEQ ID NO: 10286
  source 1..120: mol_type = other DNA

SEQ ID NO: 119215 - DNA, 120 bp, synthetic construct; identical to SEQ ID NO: 10287
  source 1..120: mol_type = other DNA

SEQ ID NO: 119216 - DNA, 120 bp, synthetic construct; identical to SEQ ID NO: 10288
  source 1..120: mol_type = other DNA

SEQ ID NO: 119217 - DNA, 120 bp, synthetic construct
  source 1..120: mol_type = other DNA
acttttttgggtttcctacttttgtcagctgctgccaagcatcttctcatctcttcccccgcctcccctcccctgcacctagttgttgtctcctgtgtgctgcgtctttaacatctattt

SEQ ID NO: 119218 - DNA, 120 bp, synthetic construct; identical to SEQ ID NO: 10289
  source 1..120: mol_type = other DNA

SEQ ID NO: 119219 - DNA, 120 bp, synthetic construct; identical to SEQ ID NO: 10290
  source 1..120: mol_type = other DNA

SEQ ID NO: 119220 - DNA, 120 bp, synthetic construct; identical to SEQ ID NO: 119116
  source 1..120: mol_type = other DNA

SEQ ID NO: 119221 - DNA, 120 bp, synthetic construct; identical to SEQ ID NO: 10291
  source 1..120: mol_type = other DNA

SEQ ID NO: 119222 - DNA, 120 bp, synthetic construct; identical to SEQ ID NO: 10292
  source 1..120: mol_type = other DNA

SEQ ID NO: 119223 - DNA, 120 bp, synthetic construct; identical to SEQ ID NO: 13196
  source 1..120: mol_type = other DNA

SEQ ID NO: 119224 - DNA, 120 bp, synthetic construct; identical to SEQ ID NO: 13197
  source 1..120: mol_type = other DNA

SEQ ID NO: 119225 - DNA, 120 bp, synthetic construct
  source 1..120: mol_type = other DNA
tctgagtgagctgagattgtgccactgcactcaaacctggggaacttgagatcctgtcttaaaaaaaaaaaaaaagtggggggggggggcgggctcttattttattattcttttttgaga

SEQ ID NO: 119226 - DNA, 120 bp, synthetic construct; identical to SEQ ID NO: 11118
  source 1..120: mol_type = other DNA

SEQ ID NO: 119227 - DNA, 120 bp, synthetic construct
  source 1..120: mol_type = other DNA
agctcactacaacctcaacttcttgggctcaagtgatcctcctgcctcagcctactgagtagctgaacctacaaggtgtacgccgccatgcctggctaatttcttaatttttgtagaaac

SEQ ID NO: 119228 - DNA, 120 bp, synthetic construct; identical to SEQ ID NO: 11119
  source 1..120: mol_type = other DNA

SEQ ID NO: 119229 - DNA, 120 bp, synthetic construct
  source 1..120: mol_type = other DNA
ttagcaggcatcagaatttcctgaagggctaccgaaaacacacacttctgggccctactcccagagcttttgattcaaaactgagaatttaaaaacctgagaatgtgcaattgtaacaag

SEQ ID NO: 119230 - DNA, 120 bp, synthetic construct
  source 1..120: mol_type = other DNA
cctgcctcagccacttaagtagctgggactatgagtatgtgccaccatgcccatctaatttttgtatttttttgtagagataaggtttcgccatgttgcccaagcttcgttttttacctg

SEQ ID NO: 119231 - DNA, 120 bp, synthetic construct
  source 1..120: mol_type = other DNA
agcttcccgagtagctgggactacaggcgcctgccaccacacctggctaatttttgaatttttagtagagactgggtttcgccgtgttagccaggatggtctcgacctcctgaccttgtt

SEQ ID NO: 119232 - DNA, 120 bp, synthetic construct
  source 1..120: mol_type = other DNA
tatgagagcatagcaaagaaaagtggttataatctaatgatgcatgattgaattcctcttttctctgaagaggtctgcatgcattcctatagaatattttgtcgggccgggcgcggtggc

SEQ ID NO: 119233 - DNA, 120 bp, synthetic construct; identical to SEQ ID NO: 13728
  source 1..120: mol_type = other DNA

SEQ ID NO: 119234 - DNA, 120 bp, synthetic construct
  source 1..120: mol_type = other DNA
gtagcttgatggggatggcattgaatctataaattaccttgggcagtgtggccattatcacgatattgattcttcctacccatgagcatggaatgttcttccatttgtttgtgtcctctt

SEQ ID NO: 119235 - DNA, 120 bp, synthetic construct; identical to SEQ ID NO: 13729
  source 1..120: mol_type = other DNA

SEQ ID NO: 119236 - DNA, 120 bp, synthetic construct
  source 1..120: mol_type = other DNA
ccctgaggaatcgccacactgacttccacaacggttgaactagtttacagtcccaccaacagtgtaaaagtgttcctattactccacaccctctccagcacctgttgtttcctgactttt

SEQ ID NO: 119237 - DNA, 120 bp, synthetic construct
  source 1..120: mol_type = other DNA
ccatgtgaactttaaagtagttttttccaattctgtgaagaaagtcattggtagcttgatggggatggcattgaatctataaattaccttgggcagtgtggccattatcacgatattgat

SEQ ID NO: 119238 - DNA, 120 bp, synthetic construct
  source 1..120: mol_type = other DNA
tctaaaattctcttttttggttgtatctctgcctggctttggtatcaggatgatgctggcctcataaaatgagttagggaggattccctctttttctattgattggaatagtttcagaag

SEQ ID NO: 119239 - DNA, 120 bp, synthetic construct
  source 1..120: mol_type = other DNA
gagacagtttgttataatttctgttcttttacatttgctgaggagagctttacttccacctatgtggtcaattttggaataggtgtggtgtggtgctgaaaaaaatgtatattctgttga

SEQ ID NO: 119240 - DNA, 120 bp, synthetic construct
  source 1..120: mol_type = other DNA
aaattctgggttgaaaattcttttctttaagaatgttgaatattggcccccagcctcttctggcttatagtttctgcccagagatccgctgttagtctgatgggcttccctttgtgggta

SEQ ID NO: 119241 - DNA, 120 bp, synthetic construct
  source 1..120: mol_type = other DNA
gcagcgatggctggagaacagcggattttcatgaaccgggaatgctgctgtctgatcattcctctggatgttttgtctcagaggagtacccagctgtgtgaggtgtcagtctgcccctac

SEQ ID NO: 119242 - DNA, 120 bp, synthetic construct
  source 1..120: mol_type = other DNA
ccacatgattatctcaatagatgcagaaaaggcctttgacaaaattcagtagcccttcatgctaaaaactctcaataaactaggtattgatgggacgtatctcaaaataataagagctat

SEQ ID NO: 119243 - DNA, 120 bp, synthetic construct
  source 1..120: mol_type = other DNA
aaaacattccatgctcatgggtaggaagaatcaatatcatgaaaatggccatactgcccagggtaatttatatattcaatgccatctccatcaagctaccaatgactttcttcacagaat

SEQ ID NO: 119244 - DNA, 120 bp, synthetic construct; identical to SEQ ID NO: 13730
  source 1..120: mol_type = other DNA

SEQ ID NO: 119245 - DNA, 120 bp, synthetic construct; identical to SEQ ID NO: 13731
  source 1..120: mol_type = other DNA

SEQ ID NO: 119246 - DNA, 120 bp, synthetic construct
  source 1..120: mol_type = other DNA
tccagtttcagctttctacatatggctaggcagttttcccagcaccatttattgaacagggaatcctttccccattgcttgtttttctcaggtttgtcaaagatcagatagttgtagata

SEQ ID NO: 119247 - DNA, 120 bp, synthetic construct
  source 1..120: mol_type = other DNA
atagctcttattattttgagatacgtcccatcaacacctaatttattgagagtttttagcctgaagggttgttgaattttgtcaaaggctttttctgcatctattgagataatcatgtgg

SEQ ID NO: 119248 - DNA, 120 bp, synthetic construct
  source 1..120: mol_type = other DNA
tcttgtgggcatttagtgctataaatttccctctacacactgctttgaatgtgtcccagagattctggtatgttgtgtctttgttctcgttggtttcaaagaacatgtttatttctgcct

SEQ ID NO: 119249 - DNA, 120 bp, synthetic construct
  source 1..120: mol_type = other DNA
gtggaagtcagtgtggtgattcctcagggatctagaactagaaataccatttgacccggccatcccattactgggtatatacccaaaggaatataaatcatgctgctataaagacacatg

SEQ ID NO: 119250 - DNA, 120 bp, synthetic construct; identical to SEQ ID NO: 10556
  source 1..120: mol_type = other DNA

SEQ ID NO: 119251 - DNA, 120 bp, synthetic construct; identical to SEQ ID NO: 10557
  source 1..120: mol_type = other DNA

SEQ ID NO: 119252 - DNA, 120 bp, synthetic construct
  source 1..120: mol_type = other DNA
catctatttcatggtaagacaaatcttgggagagttcgccacagttttctttttttcttcctcttcctcctcctcctcctcctcctcttcttcttcttcttcttcttcttcttcttcttc

SEQ ID NO: 119253 - DNA, 120 bp, synthetic construct; identical to SEQ ID NO: 10559
  source 1..120: mol_type = other DNA

SEQ ID NO: 119254 - DNA, 120 bp, synthetic construct
  source 1..120: mol_type = other DNA
aaatacagagaatgccacaaagatactcctcgagaagagcaactccaagacacataattgtcagattcaccaaagttgaaatgaaagaaaaaatgttcagagagaaaggttaggttaccc

SEQ ID NO: 119255 - DNA, 120 bp, synthetic construct
  source 1..120: mol_type = other DNA
ctgagatcagagcagaactgaaggagatagagacacaaaaaagccttcaaaaaatcaatgaatccaggagctggttttttgaaaagatcaataaaactgatagaccgctagcaagactaa

SEQ ID NO: 119256 - DNA, 120 bp, synthetic construct
  source 1..120: mol_type = other DNA
gaatgggcaaaaactggaagcattccctttgaaaactggcacaagacagggatgccctctctcaccacttctgttcaacatagtgttggaagttctggccagggcaatcaggcaggagaa

SEQ ID NO: 119257 - DNA, 120 bp, synthetic construct; identical to SEQ ID NO: 14348
  source 1..120: mol_type = other DNA

SEQ ID NO: 119258 - DNA, 120 bp, synthetic construct; identical to SEQ ID NO: 14349
  source 1..120: mol_type = other DNA

SEQ ID NO: 119259 - DNA, 120 bp, synthetic construct; identical to SEQ ID NO: 14350
  source 1..120: mol_type = other DNA

SEQ ID NO: 119260 - DNA, 120 bp, synthetic construct
  source 1..120: mol_type = other DNA
cttagctattgtgaatagtgctgcaataaacatacgtgtgcatgtgtctttatagcagcatgatttataatcctttgggtatatacccagtaatgggatggctgggtcaaatggtatttc

SEQ ID NO: 119261 - DNA, 120 bp, synthetic construct
  source 1..120: mol_type = other DNA
atcttgaattaatttttgtataaggtgtaaggaagggatccagtttcagctttctacatatggctagccagttttcccagcaccatttattaaatagggaatcctttccccatttcttta

SEQ ID NO: 119262 - DNA, 120 bp, synthetic construct; identical to SEQ ID NO: 20562
  source 1..120: mol_type = other DNA

SEQ ID NO: 119263 - DNA, 120 bp, synthetic construct; identical to SEQ ID NO: 20563
  source 1..120: mol_type = other DNA

SEQ ID NO: 119264 - DNA, 120 bp, synthetic construct
  source 1..120: mol_type = other DNA
ttgacctcaagtgatccacctgcctcaacctcccaaagtgctgggattacaggtgcgagccaccacacttggatatgacattagcattaacaccaaaaatacttttttttttttttgaga

SEQ ID NO: 119265 - DNA, 120 bp, synthetic construct; identical to SEQ ID NO: 20564
  source 1..120: mol_type = other DNA

SEQ ID NO: 119266 - DNA, 120 bp, synthetic construct
  source 1..120: mol_type = other DNA
aaatttgagttctttgtagattctggatattagccctttgtcagatgagtagattggaaaaattttctcccattctgtaggttgcctcttcaccctgatggtagtttcttttcctgtgca

SEQ ID NO: 119267 - DNA, 120 bp, synthetic construct
  source 1..120: mol_type = other DNA
acaagaaaaagtcaaacaatcccatcaaaaactgggcgaaggatattaacagacacttctcaaaagaagacatctatgcagccaatagacacatgaaaatatgcttatcatcactggcca

SEQ ID NO: 119268 - DNA, 120 bp, synthetic construct
  source 1..120: mol_type = other DNA
tctcaactcctgggctcaagtgatcttcctacctcagcttcctaaggttctggattttcaggtgtgagccaccacacttggccctgctttctttaaaacaatattttatattctatattc

SEQ ID NO: 119269 - DNA, 120 bp, synthetic construct; identical to SEQ ID NO: 20566
  source 1..120: mol_type = other DNA

SEQ ID NO: 119270 - DNA, 120 bp, synthetic construct; identical to SEQ ID NO: 20567
  source 1..120: mol_type = other DNA

SEQ ID NO: 119271 - DNA, 120 bp, synthetic construct; identical to SEQ ID NO: 25312
  source 1..120: mol_type = other DNA

SEQ ID NO: 119272 - DNA, 120 bp, synthetic construct; identical to SEQ ID NO: 5296
  source 1..120: mol_type = other DNA

SEQ ID NO: 119273 - DNA, 120 bp, synthetic construct; identical to SEQ ID NO: 11233
  source 1..120: mol_type = other DNA

SEQ ID NO: 119274 - DNA, 120 bp, synthetic construct
  source 1..120: mol_type = other DNA
tgtgctgcacccattaacttgtcatttagcattaggtatatctcctaatgctttccctcccctcttctcccaccctacaacagtccccagagtgtgatgttccccttactatgtccatgt

SEQ ID NO: 119275 - DNA, 120 bp, synthetic construct
  source 1..120: mol_type = other DNA
agatgagtaggttgcaaaaatgttctcccattttgtaggttgcctgttcactctgatggtagtttcttttgctgtgcagaagctcttgagtttaattagatcccatttgtaaattttggc

SEQ ID NO: 119276 - DNA, 120 bp, synthetic construct; identical to SEQ ID NO: 25986
  source 1..120: mol_type = other DNA

SEQ ID NO: 119277 - DNA, 120 bp, synthetic construct; identical to SEQ ID NO: 19338
  source 1..120: mol_type = other DNA

SEQ ID NO: 119278 - DNA, 120 bp, synthetic construct; identical to SEQ ID NO: 19339
  source 1..120: mol_type = other DNA

SEQ ID NO: 119279 - DNA, 120 bp, synthetic construct
  source 1..120: mol_type = other DNA
ctcacgtgcagagacacacataggctcaaaataaagggatggaggaagatctaccaagaaaatggaaaacaaaaaaaaggcaggggttgcaatcctagtctcggataaaacagacttcaa

SEQ ID NO: 119280 - DNA, 120 bp, synthetic construct
  source 1..120: mol_type = other DNA
cacaaaaaacccttcaaaaaatcaatgaatccaggagctcgttttttgaaaagatcaacaaaattgatagaccactagcaaggctaataaagaacaaaagagagaagaatcaaatagacg

SEQ ID NO: 119281 - DNA, 120 bp, synthetic construct
  source 1..120: mol_type = other DNA
ccttaagctgataagcaacttgagcaaagtctcaggatacaaaatcaatgtgccaaaatcacaagcattcttatacaccaataacagacaaacagagagccaaatcatgagtgaactccc

SEQ ID NO: 119282 - DNA, 120 bp, synthetic construct
  source 1..120: mol_type = other DNA
aaacaaccccatcaaaaagtgggtgaaggatataaacagacacttctcaaaagaagacatttatgcagccaaaaaacacatgaaaaaatgctcatcatcactggccatcagagaaatgca

SEQ ID NO: 119283 - DNA, 120 bp, synthetic construct; identical to SEQ ID NO: 25383
  source 1..120: mol_type = other DNA

SEQ ID NO: 119284 - DNA, 120 bp, synthetic construct
  source 1..120: mol_type = other DNA
atatattttttttttttttttttttttttttgaggcagagtctcactcagtcgcccaggctagagtgccgtggcacaatcttggctcactgcaacctccgcctcccgggttcaagcagtc

SEQ ID NO: 119285 - DNA, 120 bp, synthetic construct; identical to SEQ ID NO: 14656
  source 1..120: mol_type = other DNA

SEQ ID NO: 119286 - DNA, 120 bp, synthetic construct
  source 1..120: mol_type = other DNA
ccgttctcaatgagctgttgggcacacctcccagacggggtggtggccgggcagaggggctcctcacttcccagtaggggcggccgggcagaggcgcccctcacctcccggacggggcgg

SEQ ID NO: 119287 - DNA, 120 bp, synthetic construct
  source 1..120: mol_type = other DNA
ctcaaactcctgagctcagacaatccacccaccttggcctcccaaagtgctgggattacaggtgtgtgccaccgcgcccggcctgtttttttctttttttaaaattattattattattat

SEQ ID NO: 119288 - DNA, 120 bp, synthetic construct
  source 1..120: mol_type = other DNA
caaagtgctgggattacaggcatgagccactatgccctgcccagaaagattttttttaacaagtagaaattcattgcagtgtgaatctgtgtgttgggagtgaaatgggtggatttggat

SEQ ID NO: 119289 - DNA, 120 bp, synthetic construct; identical to SEQ ID NO: 14648
  source 1..120: mol_type = other DNA

SEQ ID NO: 119290 - DNA, 120 bp, synthetic construct; identical to SEQ ID NO: 14649
  source 1..120: mol_type = other DNA

SEQ ID NO: 119291 - DNA, 120 bp, synthetic construct; identical to SEQ ID NO: 14650
  source 1..120: mol_type = other DNA

SEQ ID NO: 119292 - DNA, 120 bp, synthetic construct
  source 1..120: mol_type = other DNA
agatcaacacaaagatttgcttttaaactgaagacaaactcctttagaaatatttaactcagccaggtgtggtggctcatgcctgtaatcccagcactttgggaggttgaagcaggcgaa

SEQ ID NO: 119293 - DNA, 120 bp, synthetic construct
  source 1..120: mol_type = other DNA
aacattccatgctcacgggtaggaagaaccaatatcgtgaaaatggccacactgcccaacgtaatttatagattcaatgccatccccatcaagctaccaatgactttcttcacagaattg

SEQ ID NO: 119294 - DNA, 120 bp, synthetic construct
  source 1..120: mol_type = other DNA
caacaggtgctggagaggatgtggagaaataggaacacttttacactgttggtgggactgtaaactagttcaaccattgtggaagttggcgtggcaattcctcagggatctagaactaga

SEQ ID NO: 119295 - DNA, 120 bp, synthetic construct
  source 1..120: mol_type = other DNA
ccacaacaggccctggtgtgtgatgttccccttcctgtgtccatgtgttctcaaaaacaataaagcttttcaaaagagcacagaggacaataccatcatgatttggaagtgaacaaagat

SEQ ID NO: 119296 - DNA, 120 bp, synthetic construct; identical to SEQ ID NO: 28618
  source 1..120: mol_type = other DNA

SEQ ID NO: 119297 - DNA, 120 bp, synthetic construct
  source 1..120: mol_type = other DNA
gtggaaaagcctagttcatatgagtcacactgtagaaaatcctagttcatacgagtcacactgtagaaaatcctaggccgggcgcggtggctcacgcctgtaatcccagcactttgggag

SEQ ID NO: 119298 - DNA, 120 bp, synthetic construct; identical to SEQ ID NO: 28619
  source 1..120: mol_type = other DNA

SEQ ID NO: 119299 - DNA, 120 bp, synthetic construct; identical to SEQ ID NO: 28620
  source 1..120: mol_type = other DNA

SEQ ID NO: 119300 - DNA, 120 bp, synthetic construct; identical to SEQ ID NO: 28621
  source 1..120: mol_type = other DNA

SEQ ID NO: 119301 - DNA, 120 bp, synthetic construct; identical to SEQ ID NO: 28622
  source 1..120: mol_type = other DNA

SEQ ID NO: 119302 - DNA, 120 bp, synthetic construct; identical to SEQ ID NO: 28623
  source 1..120: mol_type = other DNA

SEQ ID NO: 119303 - DNA, 120 bp, synthetic construct
  source 1..120: mol_type = other DNA
tgaaatgaacttaaaaggctcacctaaaaaatgttttgaaaaaggccaacatcttcaggtttttcaacagtgtgtaaagatgacaggaaaggggagcacaagaagcacgggggatgccac

SEQ ID NO: 119304 - DNA, 120 bp, synthetic construct
  source 1..120: mol_type = other DNA
agcatgagaattgcttgaacctgggaagttggagatttcagtgagccaagattgcgtcactgcactccagcctgggcaaaacagcaagactctgtctcaaaatatatatatgtatttttt

SEQ ID NO: 119305 - DNA, 120 bp, synthetic construct; identical to SEQ ID NO: 115032
  source 1..120: mol_type = other DNA

SEQ ID NO: 119306 - DNA, 120 bp, synthetic construct
  source 1..120: mol_type = other DNA
atactcctgcctcagcctcccaaagtgatgggattacaggcatgagccaccacgcttggcctgtaaaaattatcatgaaagtatactggagtttgtcaaatacttattctccatctaaag

SEQ ID NO: 119307 - DNA, 120 bp, synthetic construct
  source 1..120: mol_type = other DNA
ggaaaaagtaaatagtacaattatgtaagtgctttctctcaagaaaattgccctacttctataaatagcaaaagtactttatccaaactctttccccaccccacccccccccccagcaac

SEQ ID NO: 119308 - DNA, 120 bp, synthetic construct; identical to SEQ ID NO: 20378
  source 1..120: mol_type = other DNA

SEQ ID NO: 119309 - DNA, 120 bp, synthetic construct
  source 1..120: mol_type = other DNA
ctgggcaacagagtgagaccccatctcgggaaaaaaaaaaaaaaaaaaaaaaaaaagcctgacactggctagagtgtcaagaacgactaagaggaagccagagacaatggaaggagggaa

SEQ ID NO: 119310 - DNA, 120 bp, synthetic construct; identical to SEQ ID NO: 9945
  source 1..120: mol_type = other DNA

SEQ ID NO: 119311 - DNA, 120 bp, synthetic construct; identical to SEQ ID NO: 9946
  source 1..120: mol_type = other DNA

SEQ ID NO: 119312 - DNA, 120 bp, synthetic construct
  source 1..120: mol_type = other DNA
gaagggaagcccatcagactaacagcagatctcttggcagaaactctacaagccagaagataatgggggccaatattcaacattcttaaagaaaagaattttcaacccagaatttcatat

SEQ ID NO: 119313 - DNA, 120 bp, synthetic construct
  source 1..120: mol_type = other DNA
ctgtcaacattagacagatcaacaagacaaagttaacaaggatatccaggaattgaacttagctctgcaccaagcagacctaatagacatctacagaactctccaccccaaatcaacaga

SEQ ID NO: 119314 - DNA, 120 bp, synthetic construct
  source 1..120: mol_type = other DNA
gactatgtgaaaagaccaaatctacgtctgactggtgtaactgaaagtgacaggaagaatggaaccaaactggaaaacactctgcaggatattatacaggagaacttccccaatctagca

SEQ ID NO: 119315 - DNA, 120 bp, synthetic construct
  source 1..120: mol_type = other DNA
ttaaaccaacaaagatcaaaagagataaagaaggccattacatcatggtaaagggatcaattcaacaagaagagctaactatcctaaatatatatgcacccaatacaggagcacccagat

SEQ ID NO: 119316 - DNA, 120 bp, synthetic construct
  source 1..120: mol_type = other DNA
aaagagagaagaatcaaatagatgcaataaaaaatgataaaggggatatcaccactgatcccacagaaatacaaactaccatcagagaatattacagacacctctacgcaaataaactag

SEQ ID NO: 119317 - DNA, 120 bp, synthetic construct
  source 1..120: mol_type = other DNA
agtctcaggatacaaaatcaatgtgcaaaaatcacaagcattcttatacaccaacaacaaacagagagccaaatcatgagtgaactcccattcacaattgcttcaaagagaataaaatac

SEQ ID NO: 119318 - DNA, 120 bp, synthetic construct
  source 1..120: mol_type = other DNA
atcaattcaagatggattaaagacataaacgttagacctaaaaccataaaaaccctagaagaaaacctaaccattaccattcaggacataggcatgggcaaggacttcatgtctaaaaca

SEQ ID NO: 119319 - DNA, 120 bp, synthetic construct
  source 1..120: mol_type = other DNA
ttgcaagaacaaaaaaccaaacaccacatattctcactcataggtgggaactgaacaatgagaacacatggacacaggaaggggaacatcacactctggggactgttgtagggtgcgggg

SEQ ID NO: 119320 - DNA, 120 bp, synthetic construct; identical to SEQ ID NO: 20417
  source 1..120: mol_type = other DNA

SEQ ID NO: 119321 - DNA, 120 bp, synthetic construct
  source 1..120: mol_type = other DNA
cagcctgggcaacagagcaagactccgtctcaaaaataaataaataaacaatttatatttagtgacatctgactgtcagttggtaactcatgggggtaggatagtccatagtggcatggc

SEQ ID NO: 119322 - DNA, 120 bp, synthetic construct; identical to SEQ ID NO: 35202
  source 1..120: mol_type = other DNA

SEQ ID NO: 119323 - DNA, 120 bp, synthetic construct; identical to SEQ ID NO: 35203
  source 1..120: mol_type = other DNA

SEQ ID NO: 119324 - DNA, 120 bp, synthetic construct; identical to SEQ ID NO: 35204
  source 1..120: mol_type = other DNA

SEQ ID NO: 119325 - DNA, 120 bp, synthetic construct; identical to SEQ ID NO: 35205
  source 1..120: mol_type = other DNA

SEQ ID NO: 119326 - DNA, 120 bp, synthetic construct
  source 1..120: mol_type = other DNA
attgtgaataatgccgcaataaacatacgtgtgcatgtgtctttatagcagcatgatttatagtcctttgggtatatacccagtaatgggatggctgggtcaaatggtatttctagttct

SEQ ID NO: 119327 - DNA, 120 bp, synthetic construct
  source 1..120: mol_type = other DNA
ataatatatatattgtagtctttctgagagccagatatgagagttaagtgcttgggatataacagttaagacattaagaggccaggcgtggtggctcatgcctgtaatccagcactttgg

SEQ ID NO: 119328 - DNA, 120 bp, synthetic construct
  source 1..120: mol_type = other DNA
atgctgggactacagacatgagccactgtgcccggcctacaggactcatttttaatcagcaatttatatctaactatcgtcagaaatgagaaaggtgactggctaaaaaaatagtgagtg

SEQ ID NO: 119329 - DNA, 120 bp, synthetic construct
  source 1..120: mol_type = other DNA
agctgaggcaggagaatcacttgaaccccggaggctgaggctgcagtgagccgagatcacaccactgcactccagcctggtgacagagcgagactctatctcaagataaataaataaaaa

SEQ ID NO: 119330 - DNA, 120 bp, synthetic construct; identical to SEQ ID NO: 7932
  source 1..120: mol_type = other DNA

SEQ ID NO: 119331 - DNA, 120 bp, synthetic construct
  source 1..120: mol_type = other DNA
aaggatatcccagaagaaactgaagaaacaaaaacttatggcacgggagtaaattcagcattaaaataaatgtaattaaaaggaaaaaaaaaagtaaatccatagaaaatagaggtgagg

SEQ ID NO: 119332 - DNA, 120 bp, synthetic construct
  source 1..120: mol_type = other DNA
actcagcccaaaagcttcttaagctgataacttcagcaaagactcaggatacaaaaacaatgtgcaaaaatcacaagcactcctatacacaaataacagctaagcagagggccaaatcat

SEQ ID NO: 119333 - DNA, 120 bp, synthetic construct
  source 1..120: mol_type = other DNA
atgtgtcttttggctgcataaatgtcttcttttgagaagtgtctgttcatatcctttgcccactttttgatggggttgtttgtttttttcttgtaaatttgtttgagttcattgtagatt

SEQ ID NO: 119334 - DNA, 120 bp, synthetic construct
  source 1..120: mol_type = other DNA
tgtccttgcaatagtttgctgagaatgatgatttccagtttcatccatgtccctgaaaaggacatgaactcatcattttttatggctgcatagtattccatggtgtatatgtgccacatt

SEQ ID NO: 119335 - DNA, 120 bp, synthetic construct
  source 1..120: mol_type = other DNA
acctgtagaaatttgaacttgagagagatgatttagggtatctggcagaagacatttcaaagcagtaaagcattcaagatgtgacctggctttttctgaaagcatacagtcatattcatt

SEQ ID NO: 119336 - DNA, 120 bp, synthetic construct
  source 1..120: mol_type = other DNA
cacgctcatgggtaggaagaatcaatatcgtgaaaatggccatactgcccaagataatttacagattcaatgccatccccatcaagctaccaatgactttcctcacagaattggaaaaaa

SEQ ID NO: 119337 - DNA, 120 bp, synthetic construct
  source 1..120: mol_type = other DNA
actataaatcatgctgctataaagacacatgcacacgtatgtttactgtggcattattcacaatagcaaagacttggaaccaacccaaatgtccaacaatgatagactggattaagaaaa

SEQ ID NO: 119338 - DNA, 120 bp, synthetic construct
  source 1..120: mol_type = other DNA
actctgtctcaaaaaaaaaacaaaaaaaacacacacacacaaaattgtggggcttggtggtgtgcacctgtattcacagctactcaggagactgaggtgggaagatcacttgataccata

SEQ ID NO: 119339 - DNA, 120 bp, synthetic construct
  source 1..120: mol_type = other DNA
cttccaaagtgacttttatatagctacaattctgtgtgtgtgtgttttttgtttgtttgtttgtttgtttttgagacagtcttcctctgtcacccaggctggagtgcagtggcacggtct

SEQ ID NO: 119340 - DNA, 120 bp, synthetic construct; identical to SEQ ID NO: 24294
  source 1..120: mol_type = other DNA

SEQ ID NO: 119341 - DNA, 120 bp, synthetic construct; identical to SEQ ID NO: 19711
  source 1..120: mol_type = other DNA

SEQ ID NO: 119342 - DNA, 120 bp, synthetic construct
  source 1..120: mol_type = other DNA
ggctgctgggcggagacgctcctcacttcccagacggggcagctgccgggcggaggggctcctcacttctcagacggggcggctgccgggcggaggggctcctcacttctcagatgggac

SEQ ID NO: 119343 - DNA, 120 bp, synthetic construct
  source 1..120: mol_type = other DNA
ttttttttgagatggcgtctcacttgttgccaaggctggagtgcagtggcgcaatctcagctcactacaagttccacctcccaggttcaagcaattctcctgcctcagcctcccaagtag

SEQ ID NO: 119344 - DNA, 120 bp, synthetic construct
  source 1..120: mol_type = other DNA
ggacttgagcaatccaccttccttagcctctcaaaattctgggattacaggagtgagccacttgtgccctggccatatcattttttaaaaaaacaaatctaacaaatgagtttcagcacc

SEQ ID NO: 119345 - DNA, 120 bp, synthetic construct; identical to SEQ ID NO: 9547
  source 1..120: mol_type = other DNA

SEQ ID NO: 119346 - DNA, 120 bp, synthetic construct; identical to SEQ ID NO: 9548
  source 1..120: mol_type = other DNA

SEQ ID NO: 119347 - DNA, 120 bp, synthetic construct
  source 1..120: mol_type = other DNA
tttttcatgtgtctgttggctgtataaatgtcttcttttgagaagtgtctgttcatatactttgcccactttttgatggggttgtttgtttttttcttgtaaatttgttggagttcattg

SEQ ID NO: 119348 - DNA, 120 bp, synthetic construct
  source 1..120: mol_type = other DNA
atttgctgaagttgcttatcagcttaaggagattttgggctgagacaatggggttttctagatatacaatcatgtcatctgcaaacagggacaatttgacttcctcttttcctaattgaa

SEQ ID NO: 119349 - DNA, 120 bp, synthetic construct; identical to SEQ ID NO: 19056
  source 1..120: mol_type = other DNA

SEQ ID NO: 119350 - DNA, 120 bp, synthetic construct; identical to SEQ ID NO: 19057
  source 1..120: mol_type = other DNA

SEQ ID NO: 119351 - DNA, 120 bp, synthetic construct; identical to SEQ ID NO: 19058
  source 1..120: mol_type = other DNA

SEQ ID NO: 119352 - DNA, 120 bp, synthetic construct; identical to SEQ ID NO: 26519
  source 1..120: mol_type = other DNA

SEQ ID NO: 119353 - DNA, 120 bp, synthetic construct
  source 1..120: mol_type = other DNA
aatgtgtgtcaactggaaacaaatcaagttgaaaagaaaaacttgccagcaggaaacacagcttgatttgaaaacagatttttaaaaaattccttgctcccccctcccctcccctcccct

SEQ ID NO: 119354 - DNA, 120 bp, synthetic construct; identical to SEQ ID NO: 26520
  source 1..120: mol_type = other DNA

SEQ ID NO: 119355 - DNA, 120 bp, synthetic construct
  source 1..120: mol_type = other DNA
cagtggttgaactaatttacactcccaccaacagtgtataagcattcctttttctctgcaacttcatgagcgcctgctattttttgacttttcttaccccccccccaccctttttttttc

SEQ ID NO: 119356 - DNA, 120 bp, synthetic construct
  source 1..120: mol_type = other DNA
tatctcctaatgctattcccccgccttccccaaccccacaacagtccccagagtgtgatgttccccttcctgtgtccatgtgttctcattgttcaattcccacctatgagtgagaacatg

SEQ ID NO: 119357 - DNA, 120 bp, synthetic construct
  source 1..120: mol_type = other DNA
tctaacgtttaagtctttaatccatcttgaattaatttttgtataaggtgtaaggaagggatccagtttcagctttctacatatggctagccagttttcccagcaccatttcttaagtag

SEQ ID NO: 119358 - DNA, 120 bp, synthetic construct
  source 1..120: mol_type = other DNA
taatttcttgagagtttttagcatgaagggtgttgaattttgtcaaaggccttttctgcatctattgagataatcatgtggtttttgtctttggttctgtttatatgctggattacattt

SEQ ID NO: 119359 - DNA, 120 bp, synthetic construct
  source 1..120: mol_type = other DNA
tcttgtgggcatttagtgctataaatttccctctccatactgctttgaatgtgtcccagagattccggtatgttgtctctttgttctcattggtttcaaagaacatctttatttctgcct

SEQ ID NO: 119360 - DNA, 120 bp, synthetic construct
  source 1..120: mol_type = other DNA
tcctggtcttgatggtctttacaatttggcatgattttacagtggctggtaccagttgttcttttccatgtttagtgcttccttcaggagctcttttagggcaggcctggtggtgacaaa

SEQ ID NO: 119361 - DNA, 120 bp, synthetic construct
  source 1..120: mol_type = other DNA
agtttttaacttctttgcctttggtttgaatttcctcctgtagctcgtagtagtttgatcgtctgaagccttcttctctcaactcgtcagtgtcattctccgtccagctttgttccattg

SEQ ID NO: 119362 - DNA, 120 bp, synthetic construct; identical to SEQ ID NO: 26521
  source 1..120: mol_type = other DNA

SEQ ID NO: 119363 - DNA, 120 bp, synthetic construct
  source 1..120: mol_type = other DNA
tccatggcttgtttttgtatgacacttgaactaagaatgatttttacagttttaaagggttgtgaacttccaacactatgttgaataggagcggtgagagagggcatccctgtcttgtgc

SEQ ID NO: 119364 - DNA, 120 bp, synthetic construct
  source 1..120: mol_type = other DNA
ggattcattgattttttgaagggttttttgtgtctctatttccttcagttctactctgattttagttatttcttgccttctgctagcttttgaatgtgtttgctcttgcttttctagttc

SEQ ID NO: 119365 - DNA, 120 bp, synthetic construct
  source 1..120: mol_type = other DNA
ttttcgcaacctactcatctgacaaagggctaatatccagaatctacaatgaactcaaacaaatttacaagaaaaaaacaaacaaccccatcaaaaagtgggccaaggacatgaacagac

SEQ ID NO: 119366 - DNA, 120 bp, synthetic construct; identical to SEQ ID NO: 26512
  source 1..120: mol_type = other DNA

SEQ ID NO: 119367 - DNA, 120 bp, synthetic construct
  source 1..120: mol_type = other DNA
aatttttttttctttttcttgagacagagtctctctctgtcgcccaggctagagtgcaatgggacgatctcggctcactgcaacctcctcctcccaggttcaaggaattcttcctcagcc

SEQ ID NO: 119368 - DNA, 120 bp, synthetic construct; identical to SEQ ID NO: 26511
  source 1..120: mol_type = other DNA

SEQ ID NO: 119369 - DNA, 120 bp, synthetic construct
  source 1..120: mol_type = other DNA
gggcggctgccgggcggagggtctcctcacttctcagacggggcggccgggcagagacgctcctcacctcccagacggggtcgcggccgggcagaggcgctcctcacatcccagacgggg

SEQ ID NO: 119370 - DNA, 120 bp, synthetic construct
  source 1..120: mol_type = other DNA
agggcttcttttttttttttttttgagatagtttccctgtgtcacccaggctggagtgcaatggggtgatatcggctcactgcaagccccacctcccaggctcaagcgattttcgtgcct

SEQ ID NO: 119371 - DNA, 120 bp, synthetic construct
  source 1..120: mol_type = other DNA
ttttacatttttgggtgacatttgcaagtccttaattaattaattaattaattttttgagacagagtctcgctcattcgcccaggctgtagtgcggtggcgtgatcctggctcactgcaa

SEQ ID NO: 119372 - DNA, 120 bp, synthetic construct; identical to SEQ ID NO: 26514
  source 1..120: mol_type = other DNA

SEQ ID NO: 119373 - DNA, 120 bp, synthetic construct
  source 1..120: mol_type = other DNA
agcactttgggaggccgaggcgggcagatcatgaggtcaggagatcgagaccatccttactaagatggtgaaaccccatctctattaaaaatacaaaaaattagccgggcatggtggcgg

SEQ ID NO: 119374 - DNA, 120 bp, synthetic construct; identical to SEQ ID NO: 26515
  source 1..120: mol_type = other DNA

SEQ ID NO: 119375 - DNA, 120 bp, synthetic construct
  source 1..120: mol_type = other DNA
ataaaaccatcagatctcatgagacttattcagtaccatgagaacagtatggggggaaccgtccccatgattcagttatctgcacctggccccacccttgacatgtgggaattattacaa

SEQ ID NO: 119376 - DNA, 120 bp, synthetic construct
  source 1..120: mol_type = other DNA
cttttctattccacaaaaccgccatcgtcatcatagcccgttctcaatgagctgttgggtacacctcccagacagggtggtggccgggcagaggggctcctcacttcccagaaggggcgg

SEQ ID NO: 119377 - DNA, 120 bp, synthetic construct
  source 1..120: mol_type = other DNA
catcagagggagaccgtggaaagagagggagagggagaccgtggggagagggagagggagagggagaggtctcagtttttaatgtaaatatttttaatgggataatgatattttaagatt

SEQ ID NO: 119378 - DNA, 120 bp, synthetic construct
  source 1..120: mol_type = other DNA
ttggggtgacattgtcaggtctagggtggtgtggtagggcactcagggggtgacagtgtcaggcatttttttttttattattatactttaagttttagggtacatgtgcacaatgtgcag

SEQ ID NO: 119379 - DNA, 120 bp, synthetic construct; identical to SEQ ID NO: 26518
  source 1..120: mol_type = other DNA

SEQ ID NO: 119380 - DNA, 120 bp, synthetic construct
  source 1..120: mol_type = other DNA
ggaggcagaggttgctgtgagccaagataacaccattgtgctccagcctggctgacagagtgagactgtgtgtctcaaaagaaaaaaaaaagtaaaatgacatcctagaaaaatcagaaa

SEQ ID NO: 119381 - DNA, 120 bp, synthetic construct
  source 1..120: mol_type = other DNA
gctcctcacgtcccagacggagtggctgccgggcggaggggctcctcacttctcagacggtgtggctgccgggcggaggggctcctcacttctcagatggggcggttgccaggcagaggg

SEQ ID NO: 119382 - DNA, 120 bp, synthetic construct
  source 1..120: mol_type = other DNA
gagatctgagaacgggcagactgcctcctcaagtgggtccctgacccctgacccccgagcagcctaactgggaggcaccccccagcaggggcacactgatacctcacaaggcaaggtatt

SEQ ID NO: 119383 - DNA, 120 bp, synthetic construct
  source 1..120: mol_type = other DNA
cataagtgaaggagaaataaaatactttacagacaagcaaatgctgagagattttgtcaccaccaggcctgccctaaaagagctcctgaaggaagcgctaaacatggaaaggaacaaccg

SEQ ID NO: 119384 - DNA, 120 bp, synthetic construct
  source 1..120: mol_type = other DNA
ctcactcaaaaccgctcaactacatggaaactgaacaacctgctcctgaatgacttctgggtacataagaaaatgaaggtagaaaggaagatgttctttgaaaccaacgagaacaaagac

SEQ ID NO: 119385 - DNA, 120 bp, synthetic construct
  source 1..120: mol_type = other DNA
ggttcaatatacgcaaatcaataaatgtaatccagcatataaacagagccaaagacaaaaaccacatgattatctcaatagatgcagaaaaggcctttgacaaaattcaacaacccttca

SEQ ID NO: 119386 - DNA, 120 bp, synthetic construct
  source 1..120: mol_type = other DNA
aaaagaacaaagctggaggcatcacactacctgacttcaaactatactacaaggctacagtaaccaaaacagcatggtactggtaccgaaacagagatatagatcaatggaacagaacag

SEQ ID NO: 119387 - DNA, 120 bp, synthetic construct
  source 1..120: mol_type = other DNA
cgcacacgtatgtttattgcggcattattcacaatagcaaagacttggaaccaacccagatgtccaacagtgatagactggattaagaaaatgttgcacgtatacaccatggaatactat

SEQ ID NO: 119388 - DNA, 120 bp, synthetic construct
  source 1..120: mol_type = other DNA
aactgggtggagcccaccacagctcaaggaggcctgcctgcctctgtaggctccacctctgggggcagggcacagacaaacaaaaaagacagcagtaacctctgcagacttaaatgtccc

SEQ ID NO: 119389 - DNA, 120 bp, synthetic construct
  source 1..120: mol_type = other DNA
ggatattatccaggagaacttccccaatctagcaaggcaggccaacattcagattcaggaaatacagagaacaccgcaaagatactcctcgagaagaccaactccaagacacataattgt

SEQ ID NO: 119390 - DNA, 120 bp, synthetic construct
  source 1..120: mol_type = other DNA
aagaaggccattacataatggtaaagggatcaattcaacaagaagagctaactatcctaaatatatatgcactcaacacaagagcacccagattcataaagcaagtcctgagtgacctac

SEQ ID NO: 119391 - DNA, 120 bp, synthetic construct
  source 1..120: mol_type = other DNA
gataaattccttgacacatacactcttccaagactaaaccaggaagaagttgaatctctgaatagaccaataacaggatctgaaattgtggcaataatcaatagcttaccaaccaaaaag

SEQ ID NO: 119392 - DNA, 120 bp, synthetic construct
  source 1..120: mol_type = other DNA
actcccattcacaattgcttcaaagagaataaaatacctaggaatccaacttgcaagggaagtcaaggacctcttcaaggagaactacaaaccactgctcgaggaaataaaagaggatac

SEQ ID NO: 119393 - DNA, 120 bp, synthetic construct
  source 1..120: mol_type = other DNA
atgcagccaaaaaacacatgaaaaaatgctcatcatctctggccatcagagaaatgcaaatcaaaaccacaatgagataccatctcacaccagttagaatggcaatcattaaaaagtcag

SEQ ID NO: 119394 - DNA, 120 bp, synthetic construct; identical to SEQ ID NO: 15313
  source 1..120: mol_type = other DNA

SEQ ID NO: 119395 - DNA, 120 bp, synthetic construct
  source 1..120: mol_type = other DNA
ataatggatacaccaacctggctaacaggacgaacctcgtatctattaaaaatataaaaattagccaggagtggtagtatgtgccttaatcccagctacttgggaggctgaggcagtaga

SEQ ID NO: 119396 - DNA, 120 bp, synthetic construct
  source 1..120: mol_type = other DNA
agctcatgccactgcactccagactgggtgacagagtgagatcccatctcaagaaaaaacaaacacccaattttaaaaatatgacactaagggctaattcccctatctcatgtgtgaaag

SEQ ID NO: 119397 - DNA, 120 bp, synthetic construct; identical to SEQ ID NO: 15315
  source 1..120: mol_type = other DNA

SEQ ID NO: 119398 - DNA, 120 bp, synthetic construct
  source 1..120: mol_type = other DNA
gggattgtcaccctacgaaaggaagagactgaagaacatatcagaaaacgcagacttttttgcttctcttcagttgtctgaggtttgtgtggagtctatttaaaagcaagatgcagggcc

SEQ ID NO: 119399 - DNA, 120 bp, synthetic construct; identical to SEQ ID NO: 30301
  source 1..120: mol_type = other DNA

SEQ ID NO: 119400 - DNA, 120 bp, synthetic construct
  source 1..120: mol_type = other DNA
cgtctccaccccaaggccaggacctggtggcaaatgagcgccagccatcagtgtggggctctgttctcccggtagcgcctcctggcgctccagccgaggtcctgtgaagcactttggcta

SEQ ID NO: 119401 - DNA, 120 bp, synthetic construct; identical to SEQ ID NO: 7405
  source 1..120: mol_type = other DNA

SEQ ID NO: 119402 - DNA, 120 bp, synthetic construct
  source 1..120: mol_type = other DNA
gcagaggcgcccctcacctcccggacggggcggctggccgggcagaggggctcctcacttcccagacggggtggttgccgggcggagaggctcctcacttctcagacggggcggctgccg

SEQ ID NO: 119403 - DNA, 120 bp, synthetic construct
  source 1..120: mol_type = other DNA
atacctgggactacagacacgctccaccatgcttggctaatttttctattttttttgtagagatggggtttctctgtgttgcccaggcaggtctcaaactcctgggctcaagtgatcctc

SEQ ID NO: 119404 - DNA, 120 bp, synthetic construct
  source 1..120: mol_type = other DNA
gcgttcctatttctccacaacctcaacagcatctgtagtttcttgactttttaataacctccattgtaactggcgtaagatggtatctcatcgtggttttgatttgcattactctgatgt

SEQ ID NO: 119405 - DNA, 120 bp, synthetic construct
  source 1..120: mol_type = other DNA
ttctccacatcctctccagcacctgttgtttcttgactttttaattattgccattctaactggtgtgagatgatatcccattgtggttttgatttgcatttctctgatggccagtgatgg

SEQ ID NO: 119406 - DNA, 120 bp, synthetic construct
  source 1..120: mol_type = other DNA
cttcctagccatgagcatggaatgttcttccatttgtttgtatcctcttttatttcattgagcagtggtttgtagttctccttgaagaggtccttcacgtcccttttaagttggattcct

SEQ ID NO: 119407 - DNA, 120 bp, synthetic construct
  source 1..120: mol_type = other DNA
atgatgctggtctcataaaatgagttagggaggattccctctttttctattggttggaatagtttcagaaggaatggtaccagttcctccttgtacctctggtagaattcggctgtgaat

SEQ ID NO: 119408 - DNA, 120 bp, synthetic construct
  source 1..120: mol_type = other DNA
gattgcactgtgatctgagagatagtttgttataatttctgttcttttacatttgctaaggagagctttacctccaactatgtggtcaattttggaataggtgtgttgtggtgctgaaaa

SEQ ID NO: 119409 - DNA, 120 bp, synthetic construct
  source 1..120: mol_type = other DNA
gggtaacccgacctttctctctggctgcccttaacattttttccttgatttcaactttggtgaatctgacaattatgtgtcttggagttgctcttctcgaggagtatctttgtggcattc

SEQ ID NO: 119410 - DNA, 120 bp, synthetic construct
  source 1..120: mol_type = other DNA
aggaaacccatctcacatgcagagacacacatacgctcaaaataaagggatggaggaagatccaccaagcaaatggaaaacaaaaaaagtcaggggttgcaatcctagtctctgataaaa

SEQ ID NO: 119411 - DNA, 120 bp, synthetic construct
  source 1..120: mol_type = other DNA
cataaaaaacccttcaaaaaatcaatgaatccaggagctggttttttgaaaagatcaacaaaactgatagactgctagcaagactaataaagaagcaaagagagaagaatcaaatagatg

SEQ ID NO: 119412 - DNA, 120 bp, synthetic construct
  source 1..120: mol_type = other DNA
catgctgctataaagacacatgcacacgtatgtttattgaggcactattcacaatagcaaggacttggaaccaagccaaatgtccaacaatggtagactgaattaagaaaatgtggcaca

SEQ ID NO: 119413 - DNA, 120 bp, synthetic construct
  source 1..120: mol_type = other DNA
ccaatttcacccatgtccctacaaaggacatgaactcaccattttttatggctgcatagtattccatggtgtatatgtgccacattttcttaatccagtctatcattgttggacatttgg

SEQ ID NO: 119414 - DNA, 120 bp, synthetic construct
  source 1..120: mol_type = other DNA
accagtaccatgctgttttggttactgtagccttgtagtatagtttgaagtcaggtagtgtgatgcctccagctttgttcttttggcttaggattgtcttggtgatgcgggctctttttt

SEQ ID NO: 119415 - DNA, 120 bp, synthetic construct
  source 1..120: mol_type = other DNA
gccccttaaggggcccagagacacccccatcgttgccctcatttgtcttaagaataagagccctccccactccagctttcatgctccccatgtgcctccaccctggggcaccatcatcct

SEQ ID NO: 119416 - DNA, 120 bp, synthetic construct; identical to SEQ ID NO: 18288
  source 1..120: mol_type = other DNA

SEQ ID NO: 119417 - DNA, 120 bp, synthetic construct; identical to SEQ ID NO: 25239
  source 1..120: mol_type = other DNA

SEQ ID NO: 119418 - DNA, 120 bp, synthetic construct; identical to SEQ ID NO: 32954
  source 1..120: mol_type = other DNA

SEQ ID NO: 119419 - DNA, 120 bp, synthetic construct
  source 1..120: mol_type = other DNA
tgcatagaagtgatctctgaaaatgagattgagatattgatatttaaaagacatacaatggtgcacctgcctgtaatcccagctacttgggaggctgaggcaggaggattgcttgagtct

SEQ ID NO: 119420 - DNA, 120 bp, synthetic construct
  source 1..120: mol_type = other DNA
cctgtctcttaaaggaaaacaaggctgggcgcgctggctcatgcctataatcccaacgctttgggaggccaaggtggtggatcacctgagattgcagtgagctgagatcgcgccattgca

SEQ ID NO: 119421 - DNA, 120 bp, synthetic construct
  source 1..120: mol_type = other DNA
tttttagtagagacagggttttgccatgttggccaggctggtcatttactaattccacctcacacttgatactagagtagtgtttaccctagctggtactgataagttatgtgatagcac

SEQ ID NO: 119422 - DNA, 120 bp, synthetic construct; identical to SEQ ID NO: 28987
  source 1..120: mol_type = other DNA

SEQ ID NO: 119423 - DNA, 120 bp, synthetic construct; identical to SEQ ID NO: 28988
  source 1..120: mol_type = other DNA

SEQ ID NO: 119424 - DNA, 120 bp, synthetic construct; identical to SEQ ID NO: 18481
  source 1..120: mol_type = other DNA

SEQ ID NO: 119425 - DNA, 120 bp, synthetic construct; identical to SEQ ID NO: 19604
  source 1..120: mol_type = other DNA

SEQ ID NO: 119426 - DNA, 120 bp, synthetic construct; identical to SEQ ID NO: 7708
  source 1..120: mol_type = other DNA

SEQ ID NO: 119427 - DNA, 120 bp, synthetic construct; identical to SEQ ID NO: 7709
  source 1..120: mol_type = other DNA

SEQ ID NO: 119428 - DNA, 120 bp, synthetic construct; identical to SEQ ID NO: 12556
  source 1..120: mol_type = other DNA

SEQ ID NO: 119429 - DNA, 120 bp, synthetic construct; identical to SEQ ID NO: 12557
  source 1..120: mol_type = other DNA

SEQ ID NO: 119430 - DNA, 120 bp, synthetic construct
  source 1..120: mol_type = other DNA
gctgcatagtattccatggtgtatatgtgccacattttcttaatccagtctatcattgttggacatttggattagttccaagtctttgctattgtgaatactgccacaataaacatacat

SEQ ID NO: 119431 - DNA, 120 bp, synthetic construct
  source 1..120: mol_type = other DNA
ctgttccattggtctatatctctgttttggtaccagtaccatgctgttttggttactagccttgtagtaatactgttgatttttaaaaaatgttctgtgaaagagtagtaaagtagtcta

SEQ ID NO: 119432 - DNA, 120 bp, synthetic construct; identical to SEQ ID NO: 12558
  source 1..120: mol_type = other DNA

SEQ ID NO: 119433 - DNA, 120 bp, synthetic construct; identical to SEQ ID NO: 12559
  source 1..120: mol_type = other DNA

SEQ ID NO: 119434 - DNA, 120 bp, synthetic construct; identical to SEQ ID NO: 32762
  source 1..120: mol_type = other DNA

SEQ ID NO: 119435 - DNA, 120 bp, synthetic construct; identical to SEQ ID NO: 32763
  source 1..120: mol_type = other DNA

SEQ ID NO: 119436 - DNA, 120 bp, synthetic construct; identical to SEQ ID NO: 32764
  source 1..120: mol_type = other DNA

SEQ ID NO: 119437 - DNA, 120 bp, synthetic construct
  source 1..120: mol_type = other DNA
tgttccagataagctgactttccccgccattgccgacgtgctggttgtcctttggtgccattaatgttcttgggttttgctcagctatggaggttctgatgtcacttctggaaaagagct

SEQ ID NO: 119438 - DNA, 120 bp, synthetic construct; identical to SEQ ID NO: 32765
  source 1..120: mol_type = other DNA

SEQ ID NO: 119439 - DNA, 120 bp, synthetic construct; identical to SEQ ID NO: 32766
  source 1..120: mol_type = other DNA

SEQ ID NO: 119440 - DNA, 120 bp, synthetic construct; identical to SEQ ID NO: 33987
  source 1..120: mol_type = other DNA

SEQ ID NO: 119441 - DNA, 120 bp, synthetic construct; identical to SEQ ID NO: 33988
  source 1..120: mol_type = other DNA

SEQ ID NO: 119442 - DNA, 120 bp, synthetic construct
  source 1..120: mol_type = other DNA
aggatatttgctctcaactcctactcaacattatactagaagttccagcaagaataattttttaaaaaataaacatctaggccgggcgtagtggctcacgcctgtaaatcccagcacttc

SEQ ID NO: 119443 - DNA, 120 bp, synthetic construct
  source 1..120: mol_type = other DNA
ttttaagactaaaatgagatgtgtgttttggtgttttttttttttttttttgggacggagtgcagtcgcgtgatcttggctcactgcaacctccacctcccaggttcaagcaattttcct

SEQ ID NO: 119444 - DNA, 120 bp, synthetic construct; identical to SEQ ID NO: 33989
  source 1..120: mol_type = other DNA

SEQ ID NO: 119445 - DNA, 120 bp, synthetic construct
  source 1..120: mol_type = other DNA
tcaggcaatctgcctgccttagcctcccaaagtgctgggattacaggcgtaagccactgcgcccagccataaacaaatacttttttgaaatcagaaaataattaatgctattttaaaaaa

SEQ ID NO: 119446 - DNA, 120 bp, synthetic construct
  source 1..120: mol_type = other DNA
aatttcataatatcctgtctaatgtttcaaccttgttttcctccttttttgatgtacattaacattgccactttggggccaggtgtggtggcttacacctgtaatcccagcactttggga

SEQ ID NO: 119447 - DNA, 120 bp, synthetic construct
  source 1..120: mol_type = other DNA
aatatgggactgcttaaataacctagaagaaccttataatgaaatagtaggcatctattttaaaaaaattatgtaggccaggcacagtggctgacgcctgtaatcccagcaccgtgggag

SEQ ID NO: 119448 - DNA, 120 bp, synthetic construct; identical to SEQ ID NO: 33991
  source 1..120: mol_type = other DNA

SEQ ID NO: 119449 - DNA, 120 bp, synthetic construct; identical to SEQ ID NO: 33992
  source 1..120: mol_type = other DNA

SEQ ID NO: 119450 - DNA, 120 bp, synthetic construct
  source 1..120: mol_type = other DNA
tagcctgggagcggcgctgacagccccgctgtgccttccccgtccggcggggcccgctgggccgctcaatccgcctttgttcgcgcggtgtcacaccgcattacccgcataatgcggccg

SEQ ID NO: 119451 - DNA, 120 bp, synthetic construct
  source 1..120: mol_type = other DNA
gcaagataaagaaataattgttttatcgtgcatcagactatgtcatgggacgtcacaatggcaaagagcctagtataaaaattggaggatggggtggggcagcagagtgggttagcagca

SEQ ID NO: 119452 - DNA, 120 bp, synthetic construct
  source 1..120: mol_type = other DNA
caagggtgttgaccctcttttcatgagggagccaacactaggaggcacaaaccacaatgcctggagaagagtttctgcaggctggagcccatattccgaatctcggacgttgaattcagc

SEQ ID NO: 119453 - DNA, 120 bp, synthetic construct
  source 1..120: mol_type = other DNA
gtagtatttgctcaataaattgtgttgagtaagataatgggagaggactttattgcacagccctttcctccctccctctcgcaggtgtgtgtgtgtgtgttttcctttttcagtttcatg

SEQ ID NO: 119454 - DNA, 120 bp, synthetic construct
  source 1..120: mol_type = other DNA
caataaataacatgaggacccaaaaaccaaaccagaacaaaaaatacaaccagtatctcttggggtaggtggtgggagactgtttaaattatcggccttccctgggccactaggtggttg

SEQ ID NO: 119455 - DNA, 120 bp, synthetic construct
  source 1..120: mol_type = other DNA
ggtggcattacagttaggcacatgatcttcgtggtgatggagagaaaggttcacatctagctctgctgctcttttggggaatgagtgtgtgtgagagacagggatggacacatatatgta

SEQ ID NO: 119456 - DNA, 120 bp, synthetic construct
  source 1..120: mol_type = other DNA
tatcacaccaatagctgaatctgcttcctttaccaggcgtggcttagggcttttcaaacgtgcagatgctgtcatcctcacaaccaccccaggaggcaagtactgttaccatctccattt

SEQ ID NO: 119457 - DNA, 120 bp, synthetic construct
  source 1..120: mol_type = other DNA
tggttggcaattacctctgtgacatccaggcctgtgctctcggctgccccagggagcagtcaccgtggtcagatggaaacaatcaccttctctgtgcccctgtctgtggacagaggcagt

SEQ ID NO: 119458 - DNA, 120 bp, synthetic construct
  source 1..120: mol_type = other DNA
atgtgctgggctctgtctaaggacttcacatgtgttatatacttgtcccaacaaccctatgaagtagatacttttcatccttctttgacagatgaggaaactgaggcactgagtggtaaa

SEQ ID NO: 119459 - DNA, 120 bp, synthetic construct
  source 1..120: mol_type = other DNA
ttagaaccaaggcttgtcggactccaggcctgtgcttttcagagcgtatcacttgtgaagtctttcccagatacaggagaaggaaggatattcaagcagttaggagtgtttggagaactg

SEQ ID NO: 119460 - DNA, 120 bp, synthetic construct
  source 1..120: mol_type = other DNA
aagaccacagagcatttgcttcttaggtccaggtggtgccacagtcaggaaggtgtcctagatggtttagacatggggaatggacagacaggcctgggtttggaccctcactttgctatg

SEQ ID NO: 119461 - DNA, 120 bp, synthetic construct
  source 1..120: mol_type = other DNA
agttggcaggcccagggctggggatgttaccaccctctgcttgccaagtctcctttctcagctgtgatgtgggagaacagcactgtaaactcagtgtcacgaggatgacctgacgtgata

SEQ ID NO: 119462 - DNA, 120 bp, synthetic construct
  source 1..120: mol_type = other DNA
tagtgatgggggagtggagtcgggtgaggagatacgcatttcaatctaaaaggtgtgctagaagcagtgtgaacacaaatggcttagacaaaaatgtgtgtctatatatagaaatagaga

SEQ ID NO: 119463 - DNA, 120 bp, synthetic construct
  source 1..120: mol_type = other DNA
ttgatcacagcgtctcctcatcgaggataagaccacagacctgggagcgggacggcctggggttgagtcccggctctaccactttctactttttttttcttttttttttttgagacggag

SEQ ID NO: 119464 - DNA, 120 bp, synthetic construct
  source 1..120: mol_type = other DNA
caacgctctgcatcctttatgccctcacttgggtcctgtgctggttttgcttcagaaatgacctgcaatagtcccgttgctcacgagcgtctcatttcctgctgggcccatgccctggca

SEQ ID NO: 119465 - DNA, 120 bp, synthetic construct
  source 1..120: mol_type = other DNA
ttggctgtgaagaagctgttgcatcttataaaggaagctgcacaaatttcttgttgaagaaggataaagggaaggtaactgctctttgggcctcagtttcctcatctgtagtaagagaag

SEQ ID NO: 119466 - DNA, 120 bp, synthetic construct
  source 1..120: mol_type = other DNA
ctggagaacagtctgcataagtatgggtaatgtttccttctcagccatagggagctctgactcagggatgccactgtcctcctcactgtggcattgatccccaggatgtttccttttccc

SEQ ID NO: 119467 - DNA, 120 bp, synthetic construct
  source 1..120: mol_type = other DNA
accatgaccttgggcaagtccctgccatacttggagcctgtctccttatgggtacagtaaaccggtgggtccatatggcctttcccactgtcggagttggtgggcctccttctactggca

SEQ ID NO: 119468 - DNA, 120 bp, synthetic construct
  source 1..120: mol_type = other DNA
ttttgatctgctgagagcctggagacccatcagggcgaggcctgattagtactggacacctcaggattcccagtgccctagggtggctcaaccccagagacacgtgtgccatccgctgac

SEQ ID NO: 119469 - DNA, 120 bp, synthetic construct
  source 1..120: mol_type = other DNA
cccatctaggactgtgttcttagggggatggtacctggtttcccaagatcctaaccataccccccactcacttttacatctttgaatgtttctataaccacagtcttggtatcctgctgt

SEQ ID NO: 119470 - DNA, 120 bp, synthetic construct
  source 1..120: mol_type = other DNA
acttatactctgcaatcaatagtcacgtgcttcagtatgtccttagtgcaacagcacagggctggctaggcaggtgtcttcccctctgtttcgcagatgaggaaactgaagctcagagaa

SEQ ID NO: 119471 - DNA, 120 bp, synthetic construct
  source 1..120: mol_type = other DNA
caggtgagaacttgccttctctccctgaggcaggtgtgttgttggggggagtgggtatcaaatttaaggctggtctgacctcaccttgtcccccaatttgccagcagagagctcttcctt

SEQ ID NO: 119472 - DNA, 120 bp, synthetic construct
  source 1..120: mol_type = other DNA
agctggtggggtcacggcagggagcgagccgtcccgagtttggctgaatcacagaagatgcagttcaggactcagagataaaacctggcaactcctgtggaaatctggagagcaaccctg

SEQ ID NO: 119473 - DNA, 120 bp, synthetic construct
  source 1..120: mol_type = other DNA
atgattagactagagttatatataatatgaaacggttctataggcaggggatgaaagctgtaaaatctggacatgggagagcagttccagtcctgcttctgatttgcaggatgaccttgg

SEQ ID NO: 119474 - DNA, 120 bp, synthetic construct
  source 1..120: mol_type = other DNA
cagcctaggatcctacctgtgttaaatcagtggatctgggtgggacagcctgggataaacagggcttgggagcagcagcctgaaggcccgttttctccaccacccctatcaatagggacg

SEQ ID NO: 119475 - DNA, 120 bp, synthetic construct
  source 1..120: mol_type = other DNA
ccagggtattgggaggcgagcggaacctagaccttgctccttggcaggtgctgtcagctatcctctcggggccaggcctcctcatacctcacacttgaaaagacacagtgccagccatca

SEQ ID NO: 119476 - DNA, 120 bp, synthetic construct
  source 1..120: mol_type = other DNA
agtcaaagatgagatgttcctgaaggactttccactgcagatgtcgctgtcttccatgtaggcctgggccagacgcttggactgccacttttttttctttgttttttgtttgtttgtttg

SEQ ID NO: 119477 - DNA, 120 bp, synthetic construct
  source 1..120: mol_type = other DNA
cgcagatccagtcaaggagaaacagacaggtcaccagcggttaccaccccttcctccttaggctagacacggggagctggggggccgttgtcttctttaaggtctggacggagtttcttc

SEQ ID NO: 119478 - DNA, 120 bp, synthetic construct; identical to SEQ ID NO: 24345
  source 1..120: mol_type = other DNA

SEQ ID NO: 119479 - DNA, 120 bp, synthetic construct
  source 1..120: mol_type = other DNA
agaaagaaagagagagagagagaaagaaagaaagagagaggagaaagaaaaaaaggagggagggagtgggagagagggggagagagagagagaaagaaagaaagaaagaaagaaagaaag

SEQ ID NO: 119480 - DNA, 120 bp, synthetic construct; identical to SEQ ID NO: 5013
  source 1..120: mol_type = other DNA

SEQ ID NO: 119481 - DNA, 120 bp, synthetic construct
  source 1..120: mol_type = other DNA
gaaaagaaaaaattaagtctaaagacctgcaagacaacgttagatactgttttttttcccatatgaatatactcctaggctgggcgcagtggctcacacctgtaatcccagcactttggg

SEQ ID NO: 119482 - DNA, 120 bp, synthetic construct
  source 1..120: mol_type = other DNA
aacagcagagactgcaaagtacaagcccctataaatcaactttacactgcacagcaagcaatgtggtgtttagacacatctgtacagtgagactcaagaacagtgaggatgtgattcacg

SEQ ID NO: 119483 - DNA, 120 bp, synthetic construct
  source 1..120: mol_type = other DNA
gctgagccccggacatggggtcgcgccttcagaaggggacctagtggccccgctaatcctcgaacgggtctggtccttgctcttgtgaatgagactgatggacggtgcccgcagctcact

SEQ ID NO: 119484 - DNA, 120 bp, synthetic construct; identical to SEQ ID NO: 13208
  source 1..120: mol_type = other DNA

SEQ ID NO: 119485 - DNA, 120 bp, synthetic construct
  source 1..120: mol_type = other DNA
acacaacacaacacacacacacacacacacacacacacacacacgaccatctttaaacaatggatttcctcacccagtaagtctcatttttttcacatatacttgtagacccaaaggtcc

SEQ ID NO: 119486 - DNA, 120 bp, synthetic construct
  source 1..120: mol_type = other DNA
agtttggtcatgtttctctgatgcatgttgtgatggcggactaattcatctgaccgggcaaactttttctgacaacttggccaccgacagctgaagggcttttcacctgttgacacaatt

SEQ ID NO: 119487 - DNA, 120 bp, synthetic construct
  source 1..120: mol_type = other DNA
atcttaaggaagaatgcacagaagctaaaccctgtgccacctgacggatcttctcagatactgctggtcccacttggccttctctgagaactactggtttggacaagcactgagaaatgt

SEQ ID NO: 119488 - DNA, 120 bp, synthetic construct
  source 1..120: mol_type = other DNA
aataaaacatgcctacctcatttttttttgtttgttttgttttgttttgttttgagacagggtcttgctctgttgcttgggttggagtacagtggtgggatcacagctcactgcagcctc

SEQ ID NO: 119489 - DNA, 120 bp, synthetic construct
  source 1..120: mol_type = other DNA
atgcaacaaactggaaacagtagggacctggcttatctcttcattttcattctgcacactccagccattcttttcccatctttctccttctctgtatttccaccctccccttctttaaaa

SEQ ID NO: 119490 - DNA, 120 bp, synthetic construct
  source 1..120: mol_type = other DNA
ttcgttcacagtccttgaagtcacactggtatggtttctcaccttggggaagacacatattctatttgaaaatgatactggaaaaggggatctcattaaaggcaacctctcctactagga

SEQ ID NO: 119491 - DNA, 120 bp, synthetic construct
  source 1..120: mol_type = other DNA
ccctcattacgacatttattccaggctgtctaatgtggtgagctgtgtctgggtctacaattctacaattcttcaatgggttggaaaatcctaagggctggagcctttttatttttattt

SEQ ID NO: 119492 - DNA, 120 bp, synthetic construct
  source 1..120: mol_type = other DNA
tcactgccttcccttcacacagttgtctaaccctcactgcattctaagtgcttctctctcactaaaagtttctacaaccatattgccttcatttattcccttgcatttttcaggcaggac

SEQ ID NO: 119493 - DNA, 120 bp, synthetic construct
  source 1..120: mol_type = other DNA
ctcctaaaaccatctgatgactatattcccaggccagctcctctctccttagaaatgctaatagtattctaacaccaacacgattcctacacaggtctctttaattctgtggcactttct

SEQ ID NO: 119494 - DNA, 120 bp, synthetic construct
  source 1..120: mol_type = other DNA
accacatgacctagagccagtctgcaatgggtggggacatccttattagaaaaaagtgggataatgaatgagcccctaactgaccagatcgtccaagtataagtaaataacaaggaagaa

SEQ ID NO: 119495 - DNA, 120 bp, synthetic construct
  source 1..120: mol_type = other DNA
accacttctgaatataaccaactccttgccctgtgcattttccactctaccccatgcttatgttctagtccctatttcacattgccctgcactgaaaggtcattttcttttttggaagaa

SEQ ID NO: 119496 - DNA, 120 bp, synthetic construct
  source 1..120: mol_type = other DNA
caaggagaaaccttacatgcatattgctaagagaaagaagtcagcctgaaaatgctacatctagtatgattccaactatatgacattctgaaaaaagaccgagccgggcacagtggctca

SEQ ID NO: 119497 - DNA, 120 bp, synthetic construct
  source 1..120: mol_type = other DNA
tttacgatgtagaccaaatcttagaagtcaaaggtccaagcggttaattcaagcccaattagcttaaatacaaaagctgcacagcccgccctggagaagtcaaatggagcagtaaaggca

SEQ ID NO: 119498 - DNA, 120 bp, synthetic construct
  source 1..120: mol_type = other DNA
tgactcagtttttaccagatagcaccaaaaaagtgatgacgcaagaagagatgtcatgtcctcagaagtggggattacatatctgtggcctcactctgcttaaatgacaggtcagttttc

SEQ ID NO: 119499 - DNA, 120 bp, synthetic construct
  source 1..120: mol_type = other DNA
gtagggacagaaactagattagtggttgggtgccttgaactgggggagttgggaaggcaaagaaaatgactgctgaaaacgtcctaaaattgtggtaatggtcatacaactgtgaatata

SEQ ID NO: 119500 - DNA, 120 bp, synthetic construct
  source 1..120: mol_type = other DNA
acatttacttctggctctaagcattttagaaagaactgcctgcccctctaacctaccatatcttgtctccacatccttcaagtaatttttgacttatctagggcagggggaatgtctcaa

SEQ ID NO: 119501 - DNA, 120 bp, synthetic construct
  source 1..120: mol_type = other DNA
agactttcctgaagacaactgtctcatgaaattaagtggtgtgacactcaaagggaacagcaatttgcacagctggatgcaaaccacaaacaaaagaagcaacaagcaacaagactgtac

SEQ ID NO: 119502 - DNA, 120 bp, synthetic construct
  source 1..120: mol_type = other DNA
gccgcaaatattactattttacagccatctgtgtgtatctcctctgccccattgtaaacttggccttgaatacaaagactctctgctcttctctgcatcctctaaactcagtgactgagg

SEQ ID NO: 119503 - DNA, 120 bp, synthetic construct
  source 1..120: mol_type = other DNA
tcttttgcaatgaagagccacaatattagtgaacttccactattggactggtaattctacccaaaaagaaacggacttgggcacgtgtcttgcataccactaaccaaccttggtcatgat

SEQ ID NO: 119504 - DNA, 120 bp, synthetic construct
  source 1..120: mol_type = other DNA
cctggcctcagcttcatgtaaaatgaaaattacagcacttcccgcatcagactgatgcaataggtcaggtaagtaaatcacagtgcttggtatgcactcaataagtgttaaactgttgct

SEQ ID NO: 119505 - DNA, 120 bp, synthetic construct
  source 1..120: mol_type = other DNA
cagttatcagcagagcatgcactttggcgcttcacttctggcagtggcctggactgtacattttgctaaacagctttaagatgcataaaaatgtatcctgagaaaatttgcttttcctag

SEQ ID NO: 119506 - DNA, 120 bp, synthetic construct
  source 1..120: mol_type = other DNA
cttgtgtctctaaaacatggaatttacccatcaacccctcttctctccccaccctcgatactcagggctcatacgtgagatgctgaaatgcctgattcttttcagtgttgacaataaacc

SEQ ID NO: 119507 - DNA, 120 bp, synthetic construct
  source 1..120: mol_type = other DNA
gaaggaaggcagaggaagggagggaaagaatgagagagagagaggaagaaagagaaagaacagaaaaaaagaaacacaggggagagaggaccaagtttaaaagactgtaagataaaacaa

SEQ ID NO: 119508 - DNA, 120 bp, synthetic construct
  source 1..120: mol_type = other DNA
ataactcttataaagaaagcactttttctttattattattatttttagagagatggtctctgttgcccaggctggagtgcagtggcatcatcatagctcactgcagcctcaaactcctgg

SEQ ID NO: 119509 - DNA, 120 bp, synthetic construct
  source 1..120: mol_type = other DNA
aaataaaagcagaacaatttaaaacaaaaccactccttctcccgaccttctttccccagccagctagaaccccatttttttgctcccttttgcagcagaactccatgaaagcatgatctt

SEQ ID NO: 119510 - DNA, 120 bp, synthetic construct
  source 1..120: mol_type = other DNA
atgacacaaatgtacatgcatggacaggaaagggtctaaaattttgtgcaacatcattatcatcatagtttcatctaggcttttggggggagttttaatttccttctctgcgtagttgta

SEQ ID NO: 119511 - DNA, 120 bp, synthetic construct
  source 1..120: mol_type = other DNA
ctaccaaaacgcacagctttgttttcaccacacatcactcattgttgagtcttttttgtttttcctctcaagcatccacaggttgaatactgtgtgttcccaacagcctgtgaacttctt

SEQ ID NO: 119512 - DNA, 120 bp, synthetic construct
  source 1..120: mol_type = other DNA
cctattctttgtgaagccacttttttgaaacgaaacattttcaaggaaagaagacccgaaccagcatttagtggggtttagtctgaggtgcatgatcttttaataaaaaattgataatgc

SEQ ID NO: 119513 - DNA, 120 bp, synthetic construct
  source 1..120: mol_type = other DNA
ctaaaaaattggatgtggccatagtgtcctgggggtgttgtaagatcagatcagaagaggaaacatgtacagcccctcacacggcacccaatactgtttatatacatccttagataaatg

SEQ ID NO: 119514 - DNA, 120 bp, synthetic construct
  source 1..120: mol_type = other DNA
cacactttgtgcttcatccttataatacagcttctgcctcctcagcaagtgactaacagtacatgtctaaagaccttaaaaagtatcgaaattatcttaaccatggaaatatccagctgc

SEQ ID NO: 119515 - DNA, 120 bp, synthetic construct
  source 1..120: mol_type = other DNA
atacaactctgttgattactgaaggatgaaccaaataacaggactgggcccacacaataaagaagaaaagagggcggctggttgtggagttaaagcagagagaagaaaaagaaacagcta

SEQ ID NO: 119516 - DNA, 120 bp, synthetic construct
  source 1..120: mol_type = other DNA
ctctagcacttagtaggatgtgaacctgggaagtaacttaaccctctgagcttggtttacttatctgtaaaccaagcagtacttagctctcatgagagtgttgggaagataagatgaggt

SEQ ID NO: 119517 - DNA, 120 bp, synthetic construct
  source 1..120: mol_type = other DNA
tctaaagaagtattaaacctttgaggggaaaaggctaaggggagtgaaactttgaaaggcaacacaggctggataactcaacattaaagttaaaagcctggagctgaaagtaaagacagc

SEQ ID NO: 119518 - DNA, 120 bp, synthetic construct
  source 1..120: mol_type = other DNA
aattctgtgctctctgtccgcatagcgtgataaatcatggcagagtccatctgactctcatataataactctgaaaattatttggaactccttagtggtgggtacacaggataaggagga

SEQ ID NO: 119519 - DNA, 120 bp, synthetic construct
  source 1..120: mol_type = other DNA
acttaaagaatagtctggttgattcctaaggtctctgtaaggaagtaccccaaagagaaaataaacatttttttccgttagacggagtctcactctgtcgcccaggttagagtgcagtgg

SEQ ID NO: 119520 - DNA, 120 bp, synthetic construct
  source 1..120: mol_type = other DNA
cccccaccctcactctgccctgcccctatgaaggcatcctgagcctcatcctctcattaccatttatataataataataataacaataatacagacaagagtctggaggtgaaagagaat

SEQ ID NO: 119521 - DNA, 120 bp, synthetic construct
  source 1..120: mol_type = other DNA
ttgttttggcctgaactgcagtattattaagttctcgacctctgcacaaaaagaaaggaagaaaaaaagcctcagctgttatctagatgagaactcctccactcttcaaacgcatgtgtg

SEQ ID NO: 119522 - DNA, 120 bp, synthetic construct
  source 1..120: mol_type = other DNA
gtagatcggcacttcccactgagttatggaacccaagatttcccagaaactctatggctgctgaggaagtttctctcatatgaaaaataatctacttgtaacaggctccactgtcaatgt

SEQ ID NO: 119523 - DNA, 120 bp, synthetic construct
  source 1..120: mol_type = other DNA
taaaactaatggataactgacttctttcacaactgtgggaaataggagaccatccttgagtgagactgaggacagatgccaccttcacaaagagaatggcacttatccatctagagagaa

SEQ ID NO: 119524 - DNA, 120 bp, synthetic construct
  source 1..120: mol_type = other DNA
tcagcatgcaataaattccagttattacattataaggactcatgctgtcatccaacaatgatcactgggttccgtaagggcagacacctggtttcagaaaccctagtgacctttacacaa

SEQ ID NO: 119525 - DNA, 120 bp, synthetic construct
  source 1..120: mol_type = other DNA
agagggaaaccatataactgtagtaatgttggtgcacagacccaggtttaaaacattcctacacctgcccattcatctttagactgcaagggaagcacatgatctttgaaaactgaatgg

SEQ ID NO: 119526 - DNA, 120 bp, synthetic construct
  source 1..120: mol_type = other DNA
tggctactagaataacagcaatgacaccctggcaatgggcaggagcagctacacaagaagaatggcaatggccccgctgccagttttgctagggaaggagattcacctcagagaataggt

SEQ ID NO: 119527 - DNA, 120 bp, synthetic construct
  source 1..120: mol_type = other DNA
agttgaagaaaaaatttgggggagagaaggtggagcgagaggcgagaagaggaagcacggagcggggaaaagcttggaagggaatgaagctggccttgggcctcccgctcacaggaagaa

SEQ ID NO: 119528 - DNA, 120 bp, synthetic construct
  source 1..120: mol_type = other DNA
atagacttagttggatggcgatgtccctaacgtacttgggatggagggagacccagtcttgtcctttaaatacagtgccattggggtaatgatttctaaggtccttttagatgtcctcct

SEQ ID NO: 119529 - DNA, 120 bp, synthetic construct
  source 1..120: mol_type = other DNA
tcctttgcctcagtttccccctagggaaatcctagcattcccccccccccccaaagtgagaaaaagagcgtggagcctcagttggaaaacatagtcttttataatttttgttattaaatt

SEQ ID NO: 119530 - DNA, 120 bp, synthetic construct
  source 1..120: mol_type = other DNA
atttctgaaaggacactaaaaagagagagagagaaagagagacagacacagagagagagagagagagggagggagagagagagagagagagagagagagagagagagacgaaatagaagc

SEQ ID NO: 119531 - DNA, 120 bp, synthetic construct
  source 1..120: mol_type = other DNA
ctgatgatcccaggcctaatcatgccttagggttctgcgagcctgcggggctgcgggatcagtggactagcaggcaacctcttttttttttttttttttccgagacggagtttcgctctg

SEQ ID NO: 119532 - DNA, 120 bp, synthetic construct
  source 1..120: mol_type = other DNA
tgcaagacaaaacttaaacctggagatggtgcttccaggctatatgacttgaatctagggccctctctccattgggctttttctccagggtggagaagaaggatacattcacctactagt

SEQ ID NO: 119533 - DNA, 120 bp, synthetic construct
  source 1..120: mol_type = other DNA
caaaagatacactctgcttcccacgcattccaaaaacatcccggtccctaggccctcgagtaattttgctccaggaaaagcatccgccattgtattagtaaagcgtttactaaattaccg

SEQ ID NO: 119534 - DNA, 120 bp, synthetic construct
  source 1..120: mol_type = other DNA
tgggtaagagctgcggtcaaaaggggtaggagaggggggtgtcctagagcggagagtccctggcgccactgccccgcgcgtagggggcgctccccggcctacttaccctgattgcgaata

SEQ ID NO: 119535 - DNA, 120 bp, synthetic construct; identical to SEQ ID NO: 27169
  source 1..120: mol_type = other DNA

SEQ ID NO: 119536 - DNA, 120 bp, synthetic construct; identical to SEQ ID NO: 27170
  source 1..120: mol_type = other DNA

SEQ ID NO: 119537 - DNA, 120 bp, synthetic construct; identical to SEQ ID NO: 25993
  source 1..120: mol_type = other DNA

SEQ ID NO: 119538 - DNA, 120 bp, synthetic construct; identical to SEQ ID NO: 25994
  source 1..120: mol_type = other DNA

SEQ ID NO: 119539 - DNA, 120 bp, synthetic construct; identical to SEQ ID NO: 25995
  source 1..120: mol_type = other DNA

SEQ ID NO: 119540 - DNA, 120 bp, synthetic construct
  source 1..120: mol_type = other DNA
gtagattctggatattagccctttgtcagatgagtaggttgcaaaaattttctcccattttgtaggttgcctgttcactctgatggtagtttcttttgctatgcagaagctctttagttt

SEQ ID NO: 119541 - DNA, 120 bp, synthetic construct
  source 1..120: mol_type = other DNA
atttttgtacattgattttgtatgctgagactttgctgaagttgcttatcagcttaaggaggttttgggctgagacagtggggttttctagatatacaatcatgtcgtctgcaaacaggg

SEQ ID NO: 119542 - DNA, 120 bp, synthetic construct; identical to SEQ ID NO: 25996
  source 1..120: mol_type = other DNA

SEQ ID NO: 119543 - DNA, 120 bp, synthetic construct; identical to SEQ ID NO: 33446
  source 1..120: mol_type = other DNA

SEQ ID NO: 119544 - DNA, 120 bp, synthetic construct; identical to SEQ ID NO: 33447
  source 1..120: mol_type = other DNA

SEQ ID NO: 119545 - DNA, 120 bp, synthetic construct; identical to SEQ ID NO: 33448
  source 1..120: mol_type = other DNA

SEQ ID NO: 119546 - DNA, 120 bp, synthetic construct
  source 1..120: mol_type = other DNA
ggattctattatttaccctttttcttcaatgttaaataccatttcctttaataaagatttaaaaaagattccttccttccttcccccctccctccttcccccctccctccttcccccctc

SEQ ID NO: 119547 - DNA, 120 bp, synthetic construct; identical to SEQ ID NO: 16977
  source 1..120: mol_type = other DNA

SEQ ID NO: 119548 - DNA, 120 bp, synthetic construct; identical to SEQ ID NO: 16978
  source 1..120: mol_type = other DNA

SEQ ID NO: 119549 - DNA, 120 bp, synthetic construct; identical to SEQ ID NO: 16979
  source 1..120: mol_type = other DNA

SEQ ID NO: 119550 - DNA, 120 bp, synthetic construct; identical to SEQ ID NO: 16980
  source 1..120: mol_type = other DNA

SEQ ID NO: 119551 - DNA, 120 bp, synthetic construct
  source 1..120: mol_type = other DNA
gcaggttcagggactgaggccggaagcaaaacaatgtactggagtgcttatagtttttgaggaatcagtgagaaatgtcatctgaatgtctcttctcaatctttctgaaagataacttgc

SEQ ID NO: 119552 - DNA, 120 bp, synthetic construct
  source 1..120: mol_type = other DNA
tcttatgccatcatgcacgtttctacacatctgcctgtagatacactctgtaggacaaaccaggtggctctgtccttcaggcaaagagctccttaattgaaaatgatgtgtgaaatttca

SEQ ID NO: 119553 - DNA, 120 bp, synthetic construct; identical to SEQ ID NO: 16968
  source 1..120: mol_type = other DNA

SEQ ID NO: 119554 - DNA, 120 bp, synthetic construct; identical to SEQ ID NO: 16969
  source 1..120: mol_type = other DNA

SEQ ID NO: 119555 - DNA, 120 bp, synthetic construct; identical to SEQ ID NO: 16970
  source 1..120: mol_type = other DNA

SEQ ID NO: 119556 - DNA, 120 bp, synthetic construct
  source 1..120: mol_type = other DNA
ggactacaggcgcccaccaccgagcccggctaatttttttgtatttttggtagagacggggtttcactgaagtagccgggatggtctcgatctcctgacctcgtgatccgtccgcctcgg

SEQ ID NO: 119557 - DNA, 120 bp, synthetic construct; identical to SEQ ID NO: 16971
  source 1..120: mol_type = other DNA

SEQ ID NO: 119558 - DNA, 120 bp, synthetic construct; identical to SEQ ID NO: 16972
  source 1..120: mol_type = other DNA

SEQ ID NO: 119559 - DNA, 120 bp, synthetic construct; identical to SEQ ID NO: 16973
  source 1..120: mol_type = other DNA

SEQ ID NO: 119560 - DNA, 120 bp, synthetic construct
  source 1..120: mol_type = other DNA
atgtgaaaagtgtcttttttttgatttggaaacagagtcttgctctgatgcctgtagtggtatgatcatagctcattgcagcccttgaactcctgggctcaagtaatcctcctatctcag

SEQ ID NO: 119561 - DNA, 120 bp, synthetic construct; identical to SEQ ID NO: 16974
  source 1..120: mol_type = other DNA

SEQ ID NO: 119562 - DNA, 120 bp, synthetic construct; identical to SEQ ID NO: 16975
  source 1..120: mol_type = other DNA

SEQ ID NO: 119563 - DNA, 120 bp, synthetic construct; identical to SEQ ID NO: 16976
  source 1..120: mol_type = other DNA

SEQ ID NO: 119564 - DNA, 120 bp, synthetic construct
  source 1..120: mol_type = other DNA
aaagcacatcttgcactgcccttaatccatttaaccctgagtggacacagcacatgtttcagagagcacagggttgggggcaaggtcatagatcaacagcatcccaaggcagaagagtct

SEQ ID NO: 119565 - DNA, 120 bp, synthetic construct
  source 1..120: mol_type = other DNA
accattgagcactgagtgaacgagactccgtctgcaatcccggcacctcgggaggctgaggctggcagatcactcgccgttaggagctggagaccagcccggccaacacagtgaaacccc

SEQ ID NO: 119566 - DNA, 120 bp, synthetic construct; identical to SEQ ID NO: 31641
  source 1..120: mol_type = other DNA

SEQ ID NO: 119567 - DNA, 120 bp, synthetic construct; identical to SEQ ID NO: 16549
  source 1..120: mol_type = other DNA

SEQ ID NO: 119568 - DNA, 120 bp, synthetic construct; identical to SEQ ID NO: 16550
  source 1..120: mol_type = other DNA

SEQ ID NO: 119569 - DNA, 120 bp, synthetic construct; identical to SEQ ID NO: 16551
  source 1..120: mol_type = other DNA

SEQ ID NO: 119570 - DNA, 120 bp, synthetic construct; identical to SEQ ID NO: 16552
  source 1..120: mol_type = other DNA

SEQ ID NO: 119571 - DNA, 120 bp, synthetic construct
  source 1..120: mol_type = other DNA
agtgacctgccctcctcggcctcccaaagtgctgggattacaagcatgagccaccatccccgaccacatttaaattttcttttcttttcttatttcttttttttaagatggagttttgct

SEQ ID NO: 119572 - DNA, 120 bp, synthetic construct
  source 1..120: mol_type = other DNA
aggatcagctcccattgattctgattttattaggttggtgcaaaagtaattgtggtttttgccacgactcttttttttttttgagacggagtctcgctctgttgcccaggttagagtgca

SEQ ID NO: 119573 - DNA, 120 bp, synthetic construct; identical to SEQ ID NO: 16554
  source 1..120: mol_type = other DNA

SEQ ID NO: 119574 - DNA, 120 bp, synthetic construct; identical to SEQ ID NO: 24791
  source 1..120: mol_type = other DNA

SEQ ID NO: 119575 - DNA, 120 bp, synthetic construct; identical to SEQ ID NO: 24792
  source 1..120: mol_type = other DNA

SEQ ID NO: 119576 - DNA, 120 bp, synthetic construct; identical to SEQ ID NO: 17396
  source 1..120: mol_type = other DNA

SEQ ID NO: 119577 - DNA, 120 bp, synthetic construct; identical to SEQ ID NO: 17397
  source 1..120: mol_type = other DNA

SEQ ID NO: 119578 - DNA, 120 bp, synthetic construct; identical to SEQ ID NO: 33917
  source 1..120: mol_type = other DNA

SEQ ID NO: 119579 - DNA, 120 bp, synthetic construct; identical to SEQ ID NO: 33918
  source 1..120: mol_type = other DNA

SEQ ID NO: 119580 - DNA, 120 bp, synthetic construct; identical to SEQ ID NO: 33919
  source 1..120: mol_type = other DNA

SEQ ID NO: 119581 - DNA, 120 bp, synthetic construct
  source 1..120: mol_type = other DNA
tgtatgtttgtgtattgacctgatccctgggacaagtttcccagactgaaatcatggtatcataaagctggacgctttcttgaggggatagagtaacatccatattttcaatccgtgtgt

SEQ ID NO: 119582 - DNA, 120 bp, synthetic construct; identical to SEQ ID NO: 33920
  source 1..120: mol_type = other DNA

SEQ ID NO: 119583 - DNA, 120 bp, synthetic construct; identical to SEQ ID NO: 33928
  source 1..120: mol_type = other DNA

SEQ ID NO: 119584 - DNA, 120 bp, synthetic construct; identical to SEQ ID NO: 33921
  source 1..120: mol_type = other DNA

SEQ ID NO: 119585 - DNA, 120 bp, synthetic construct
  source 1..120: mol_type = other DNA
ctgtgtaaatgagaaagcacataactttgcatcttgctggataacatacctgcttctggcattttacagtgttcctctttaggtattatcttcaccttgacgccggaacccaaatccaga

SEQ ID NO: 119586 - DNA, 120 bp, synthetic construct; identical to SEQ ID NO: 33922
  source 1..120: mol_type = other DNA

SEQ ID NO: 119587 - DNA, 120 bp, synthetic construct
  source 1..120: mol_type = other DNA
caaacactcttttaatattctggcttgaatctgtggtctgcatgccaaacgggctcctggaaatggtctgaatactatcttggaagaaaacggttactgtcaccttaggaactgaataag

SEQ ID NO: 119588 - DNA, 120 bp, synthetic construct
  source 1..120: mol_type = other DNA
cctattccccaaactagagctacctaggtgctgccagccatgagtcaactcactagcatataaaaagacaccactttgtggagattttaaaaattgtagtagttgtatgccaggaagcag

SEQ ID NO: 119589 - DNA, 120 bp, synthetic construct; identical to SEQ ID NO: 33923
  source 1..120: mol_type = other DNA

SEQ ID NO: 119590 - DNA, 120 bp, synthetic construct
  source 1..120: mol_type = other DNA
cccttctctttctctttttctcttttcctgtctgccttccttcctttcttccttcctttttttttttgacagagtttcactctttattttccagactggagtgcaatggcacgatctccg

SEQ ID NO: 119591 - DNA, 120 bp, synthetic construct
  source 1..120: mol_type = other DNA
aggttaatttgatccccagtggcaggacaacagtttaatcagtcacgcctacagaatgaaaacctccatcaaaaccaaaaggacaggattcagacggcttctggctagctgaacatatgg

SEQ ID NO: 119592 - DNA, 120 bp, synthetic construct; identical to SEQ ID NO: 33924
  source 1..120: mol_type = other DNA

SEQ ID NO: 119593 - DNA, 120 bp, synthetic construct
  source 1..120: mol_type = other DNA
cacaacatggaatatgaacaagacagagtgatttaatacagggctttattgaaagtgaatacagtcttgaacgctaagattttcagagcatggatgaaatggttggtaagctaggaaggc

SEQ ID NO: 119594 - DNA, 120 bp, synthetic construct; identical to SEQ ID NO: 33925
  source 1..120: mol_type = other DNA

SEQ ID NO: 119595 - DNA, 120 bp, synthetic construct; identical to SEQ ID NO: 33926
  source 1..120: mol_type = other DNA

SEQ ID NO: 119596 - DNA, 120 bp, synthetic construct; identical to SEQ ID NO: 33927
  source 1..120: mol_type = other DNA

SEQ ID NO: 119597 - DNA, 120 bp, synthetic construct; identical to SEQ ID NO: 33928
  source 1..120: mol_type = other DNA

SEQ ID NO: 119598 - DNA, 120 bp, synthetic construct; identical to SEQ ID NO: 33920
  source 1..120: mol_type = other DNA

SEQ ID NO: 119599 - DNA, 120 bp, synthetic construct
  source 1..120: mol_type = other DNA
tttcatccattaattaatttatttacacacggattgaaaatatggatgttactctatcccctcaagaaagcgtccagctttatgataccatgatttcagtctgggaaacttgtcccaggg

SEQ ID NO: 119600 - DNA, 120 bp, synthetic construct; identical to SEQ ID NO: 33919
  source 1..120: mol_type = other DNA

SEQ ID NO: 119601 - DNA, 120 bp, synthetic construct; identical to SEQ ID NO: 33929
  source 1..120: mol_type = other DNA

SEQ ID NO: 119602 - DNA, 120 bp, synthetic construct; identical to SEQ ID NO: 33917
  source 1..120: mol_type = other DNA

SEQ ID NO: 119603 - DNA, 120 bp, synthetic construct
  source 1..120: mol_type = other DNA
atcaaacaaccccatcaaaatttggcaaaggatatgaacaggcacttctcaaaagaagatgtttatgcagactggattttgttctcccttattctataaatagaattctattatagagac

SEQ ID NO: 119604 - DNA, 120 bp, synthetic construct; identical to SEQ ID NO: 20443
  source 1..120: mol_type = other DNA

SEQ ID NO: 119605 - DNA, 120 bp, synthetic construct; identical to SEQ ID NO: 20444
  source 1..120: mol_type = other DNA

SEQ ID NO: 119606 - DNA, 120 bp, synthetic construct; identical to SEQ ID NO: 33370
  source 1..120: mol_type = other DNA

SEQ ID NO: 119607 - DNA, 120 bp, synthetic construct; identical to SEQ ID NO: 33371
  source 1..120: mol_type = other DNA

SEQ ID NO: 119608 - DNA, 120 bp, synthetic construct
  source 1..120: mol_type = other DNA
catacaacttttcttttttttttttgagatgtcgtgtcgtttcattctgttgcccaggctggagtgcagtgacacaatctgagctcactgcaacctccacctcctacgttcaagcaattc

SEQ ID NO: 119609 - DNA, 120 bp, synthetic construct
  source 1..120: mol_type = other DNA
ctaggtctttatgacctgtatcttgtgcagaccttcagtctcatcctgtgactcagaatgccttaatcatctgggaatgcagcccagtaggtttcagccttctattgcccagcccctatt

SEQ ID NO: 119610 - DNA, 120 bp, synthetic construct; identical to SEQ ID NO: 33372
  source 1..120: mol_type = other DNA

SEQ ID NO: 119611 - DNA, 120 bp, synthetic construct; identical to SEQ ID NO: 33373
  source 1..120: mol_type = other DNA

SEQ ID NO: 119612 - DNA, 120 bp, synthetic construct; identical to SEQ ID NO: 33374
  source 1..120: mol_type = other DNA

SEQ ID NO: 119613 - DNA, 120 bp, synthetic construct; identical to SEQ ID NO: 33375
  source 1..120: mol_type = other DNA

SEQ ID NO: 119614 - DNA, 120 bp, synthetic construct; identical to SEQ ID NO: 33376
  source 1..120: mol_type = other DNA

SEQ ID NO: 119615 - DNA, 120 bp, synthetic construct; identical to SEQ ID NO: 33377
  source 1..120: mol_type = other DNA

SEQ ID NO: 119616 - DNA, 120 bp, synthetic construct
  source 1..120: mol_type = other DNA
caggaagactggaagcagggagagggttttcaggtcacaaacaggtgagagacaaaacagttgccttcttttgagtttctgattagcctttccaaaggaggcgatcagatacgaatctgc

SEQ ID NO: 119617 - DNA, 120 bp, synthetic construct
  source 1..120: mol_type = other DNA
tgacctcgtgatccacctgcctcagcctctcaaagcgttgggattacaggcgtgagccactgtacctggtctatatgtatatcttctaatgtatctttatatatatctttaatatatctt

SEQ ID NO: 119618 - DNA, 120 bp, synthetic construct; identical to SEQ ID NO: 33378
  source 1..120: mol_type = other DNA

SEQ ID NO: 119619 - DNA, 120 bp, synthetic construct
  source 1..120: mol_type = other DNA
cacccacatcagcctcccaaagtgctgggattacaagcatgctccaccttgcttggcctctagattatccaatttttaaatacagattaggaaatgtgtgcttttttgttgttggaagta

SEQ ID NO: 119620 - DNA, 120 bp, synthetic construct; identical to SEQ ID NO: 35247
  source 1..120: mol_type = other DNA

SEQ ID NO: 119621 - DNA, 120 bp, synthetic construct
  source 1..120: mol_type = other DNA
acaggtgaggcaactgagactcaaaggtgatgtaatttgtgcaaagattatagctaattagtagcagagccctgactgggacatagtttgaaggtgaaaaacttcaccaagctacctttc

SEQ ID NO: 119622 - DNA, 120 bp, synthetic construct; identical to SEQ ID NO: 21768
  source 1..120: mol_type = other DNA

SEQ ID NO: 119623 - DNA, 120 bp, synthetic construct; identical to SEQ ID NO: 21769
  source 1..120: mol_type = other DNA

SEQ ID NO: 119624 - DNA, 120 bp, synthetic construct
  source 1..120: mol_type = other DNA
agtaaactatcacaagaagaaaaaaccgaacaccgcatattctcactcataggtgggaattgaacaatgagatcacatggtcacaggaaggggaatatcacactctggggactgtggtgg

SEQ ID NO: 119625 - DNA, 120 bp, synthetic construct; identical to SEQ ID NO: 21764
  source 1..120: mol_type = other DNA

SEQ ID NO: 119626 - DNA, 120 bp, synthetic construct
  source 1..120: mol_type = other DNA
aacgcagttcctcaccagcaacagaacaaagctggatggagaatgattttgacgagctgagagaagaaggcttcagacgatcaaattactctgagctacaggaggacattcaaaccaaag

SEQ ID NO: 119627 - DNA, 120 bp, synthetic construct
  source 1..120: mol_type = other DNA
gccctaaacatggaaaggaacaaccggtaccagccgctgcaaaatcatgccaaaatgtaaagaccatcgagactaggaagaaactgcatcaactaatgagcaaaatcaccagctaacatc

SEQ ID NO: 119628 - DNA, 120 bp, synthetic construct
  source 1..120: mol_type = other DNA
ataacgaaatgaaggcagaaataaagatgttctttgaaaccaatgagaacaaagacaccacataccagaatctctgggacgcattcaaagcagtgtgtagagggaaatttatagcactaa

SEQ ID NO: 119629 - DNA, 120 bp, synthetic construct
  source 1..120: mol_type = other DNA
caacccttcatgctaaaaactctcaataaattaggtattgatgggacgtatttcaaaataataagagctatctatgacaaacccacagccaatatcattctgaatgggcaaaaactggaa

SEQ ID NO: 119630 - DNA, 120 bp, synthetic construct
  source 1..120: mol_type = other DNA
tttaaacgttagacctaaaaccataaaaaccctagaagaaaacctaggcattaccattcaggacataggcgtgggcaaggacttcatgtccaaaacaccaaaagcaatggcaacaaaaga

SEQ ID NO: 119631 - DNA, 120 bp, synthetic construct; identical to SEQ ID NO: 21765
  source 1..120: mol_type = other DNA

SEQ ID NO: 119632 - DNA, 120 bp, synthetic construct; identical to SEQ ID NO: 21763
  source 1..120: mol_type = other DNA

SEQ ID NO: 119633 - DNA, 120 bp, synthetic construct
  source 1..120: mol_type = other DNA
gctgcatagtattccatggtgtatatgtgccacattttattaatccagtatatcattgatggacatttgggttggttaaaagtctttgctgttgtgaatagtgccgcaataaacatacgt

SEQ ID NO: 119634 - DNA, 120 bp, synthetic construct; identical to SEQ ID NO: 21766
  source 1..120: mol_type = other DNA

SEQ ID NO: 119635 - DNA, 120 bp, synthetic construct
  source 1..120: mol_type = other DNA
ttacagtcctttgggtatatacccagtaatgggatggctgggtcaaatggtatttctagttctagatccctgaggaatcgccacactgacttccacaatggttgaactagtttacagtcc

SEQ ID NO: 119636 - DNA, 120 bp, synthetic construct
  source 1..120: mol_type = other DNA
cgttatttctgagggctctgttctgttccattgatctatatctctgttttggtaccagtaccatgctgttttggttactgtagccttgtagtatggtttgaagtcaggtagcgtgatgcc

SEQ ID NO: 119637 - DNA, 120 bp, synthetic construct
  source 1..120: mol_type = other DNA
caatattcatcaaggatattggtctaaaatgctctgttttggttgtgtctctgccaggctttggtatcaggatgatgctggcctcataacatgagttagggaggattccctctttttcta

SEQ ID NO: 119638 - DNA, 120 bp, synthetic construct
  source 1..120: mol_type = other DNA
cattttcttaatacagtccatcattgttggacatttgggttggttccaagtctttgctattgtgaatagtgccgcaataaacatatgtgtgcatgtgtctttatagcagcatgatttata

SEQ ID NO: 119639 - DNA, 120 bp, synthetic construct
  source 1..120: mol_type = other DNA
ccatcttgaattaatttttgtataaggtgtaaggaagggatctggtttcagctttctacttatggccagccagttttcccagcaccatttattaaatagggaatcctttccccattgctt

SEQ ID NO: 119640 - DNA, 120 bp, synthetic construct
  source 1..120: mol_type = other DNA
ttttctattgattggaatagtttcagaaggaatggtaccagttcctccttgtacctctggtagaattcggctgtgaatccatctggtcctggactctttacggttggtaagctattgatt

SEQ ID NO: 119641 - DNA, 120 bp, synthetic construct
  source 1..120: mol_type = other DNA
tcgttgatctgtctaatgttgagtgtggggtgttaaagtctcccattattattgtgtgggagtctaagtctctttgaaggtcactcaggacttgctttatgaatctgggtgctcctgtat

SEQ ID NO: 119642 - DNA, 120 bp, synthetic construct
  source 1..120: mol_type = other DNA
atgagaaagcatagaaggctagaagtagtagaatcatacacttatatccacttaaccatgtattttctttttttttattattatactttaagttttagggtacatgtgcacagtgtgcag

SEQ ID NO: 119643 - DNA, 120 bp, synthetic construct
  source 1..120: mol_type = other DNA
ttcatgtgttttttggctgcataaatgtcttcttttgagaagtgtctgttcatgtccttcacccactttttgatggggttgtttgtttttttcttgtaaatctgtttcagttcattgtag

SEQ ID NO: 119644 - DNA, 120 bp, synthetic construct
  source 1..120: mol_type = other DNA
aagttgcttgtcagcttaaggagattttgggctgagacaatgtggttttctagatatacaatcatgtcgtctgcaaacagggacaatttgacttcctcttttcctaattgaatacccttt

SEQ ID NO: 119645 - DNA, 120 bp, synthetic construct
  source 1..120: mol_type = other DNA
gtgttgaggaatttatccatttctgctagattttctagtttatttgcgtagaggtgtttgtagtattctctgatggtagtttgtatttctgtgggatcggtggtgatatcccctttatca

SEQ ID NO: 119646 - DNA, 120 bp, synthetic construct
  source 1..120: mol_type = other DNA
gggtgttaaagtctcccattattaatatgtgtgagtctaagtctctttgtaggtcactcaggacttgctttatgaatctgggtgctcctgtattgggtgcatatatatttaggatagtta

SEQ ID NO: 119647 - DNA, 120 bp, synthetic construct
  source 1..120: mol_type = other DNA
ctaaacttcccttctcgcttcatttcattcatttcatcttccattgctgataccctttctcccagttgatcgcatcagctcctgaggcttctgcattcttcacgtagttctcaagccttg

SEQ ID NO: 119648 - DNA, 120 bp, synthetic construct
  source 1..120: mol_type = other DNA
accctccgagccaggtgcgggatataatctcgtggtgtgccgttttttaagccggtcggaaaagcgcagtatttgggtggcagtgacccgattttccaggtgcgtctgtcacccctttct

SEQ ID NO: 119649 - DNA, 120 bp, synthetic construct
  source 1..120: mol_type = other DNA
actttaagttttagggtacatgtgcacaatgtgcaggttagttacatatgtatacatgtgccgtgctgctgtgctgcatccattaactcgtcatttagcattaggtatatctcctaaagc

SEQ ID NO: 119650 - DNA, 120 bp, synthetic construct
  source 1..120: mol_type = other DNA
gatggggttgtttgtttttttcttgtaaatttgtttgagttcattgtagattctggatattagccctttgtcagatgagtaggttgtgaaaattttcttccattttgtaggttgcctgtt

SEQ ID NO: 119651 - DNA, 120 bp, synthetic construct
  source 1..120: mol_type = other DNA
aaactattccaatcaatagaaaaagagggaatcctccctaactcattttatgaggccagcatcatcctgataccaaagctgggcagagacacaaccaaaaaggagaattttagaccaata

SEQ ID NO: 119652 - DNA, 120 bp, synthetic construct
  source 1..120: mol_type = other DNA
ccatccccatcaagctaccaatgactttcttcacagaattggaaaaaactactttaaagttcatatggaaccaaaaaagagcccgcattgccaagtcaatcctaagctaaaatagtaaag

SEQ ID NO: 119653 - DNA, 120 bp, synthetic construct
  source 1..120: mol_type = other DNA
cttgcaccccccttaatccatttaaccctgagtggacacagcacatgtttcagagagcacagggttgggggtaaggtcatagaccaacagcatcccaaggcagaagaatttttcttagta

SEQ ID NO: 119654 - DNA, 120 bp, synthetic construct
  source 1..120: mol_type = other DNA
ttcccagacgggatggcggccaggcagaggctgcaatctcggcactttgggaggccaaggcaggcggctgggaggtggaggttgtagcaagccgagatcacgccactgcactccagcctg

SEQ ID NO: 119655 - DNA, 120 bp, synthetic construct; identical to SEQ ID NO: 31540
  source 1..120: mol_type = other DNA

SEQ ID NO: 119656 - DNA, 120 bp, synthetic construct; identical to SEQ ID NO: 31534
  source 1..120: mol_type = other DNA

SEQ ID NO: 119657 - DNA, 120 bp, synthetic construct
  source 1..120: mol_type = other DNA
tgccattgccttccagcctgggaggcagagtgagattctgtctcaaaaaaaaaaaaagaaaagaaagaaagaaggaaggaaggaaggaaggaaggaaggagagagaaaggaagaaagaaa

SEQ ID NO: 119658 - DNA, 120 bp, synthetic construct; identical to SEQ ID NO: 31536
  source 1..120: mol_type = other DNA

SEQ ID NO: 119659 - DNA, 120 bp, synthetic construct
  source 1..120: mol_type = other DNA
gtttttttcttgtaaattgtttgagttcatcgtagattctggatattagccctttgtcagataagcagtttgcaaaaattttctcccattttgtaggttgcctgttcactctgatggtag

SEQ ID NO: 119660 - DNA, 120 bp, synthetic construct
  source 1..120: mol_type = other DNA
ctgagatgatgggattttctaaatatacaatcatgccatctgcaaacagggacaatttgacttcctcttttcctaattgaataccctttatttccttctcctgcctgattgccctggcca

SEQ ID NO: 119661 - DNA, 120 bp, synthetic construct
  source 1..120: mol_type = other DNA
tgccttctgctagcttttgaatgtgtttgcttcttgcttttctagttcttttaattgtgacgttagggtgtcgattttggatctttcctgctttctcttgtgggcatttagtgctataaa

SEQ ID NO: 119662 - DNA, 120 bp, synthetic construct
  source 1..120: mol_type = other DNA
aaatagaaaacccaagtatgcatgaaggagaaggtataaatcaccttcctgccactcagaaatgaaaatcttggctggttatggtggctcacacctataatcctagcactttgggagtcc

SEQ ID NO: 119663 - DNA, 120 bp, synthetic construct; identical to SEQ ID NO: 31537
  source 1..120: mol_type = other DNA

SEQ ID NO: 119664 - DNA, 120 bp, synthetic construct; identical to SEQ ID NO: 31538
  source 1..120: mol_type = other DNA

SEQ ID NO: 119665 - DNA, 120 bp, synthetic construct
  source 1..120: mol_type = other DNA
acaggagcacccagattcataaagcaagtccttagtgacctacaaagagacttacactcccacactataataatgcgagactttaacaccccactgtcaacattagacagatcaacgaga

SEQ ID NO: 119666 - DNA, 120 bp, synthetic construct
  source 1..120: mol_type = other DNA
atacactctcccaagactaaaccaggaggaagttgaatctctgaatagaccaataacaggctctgaaattgaggcaataattaatagcttaccaaccaaaaaaagtccaggaccagatgg

SEQ ID NO: 119667 - DNA, 120 bp, synthetic construct
  source 1..120: mol_type = other DNA
acaaacaaatggaagaacattccatgctcatgggtaggaagaatcaataacatgaaaatggccatactgcccaaggtaatttatagtttcagtgccatccccatcaagctaccaatgact

SEQ ID NO: 119668 - DNA, 120 bp, synthetic construct
  source 1..120: mol_type = other DNA
acaaccccatcaaaaagtgggcaaaggatatgaacagacacttctcaaaagaaaacatttatgcagccaaaagacacatgaaaaaatgctcatcatcactggccatcagagaaatgcaaa

SEQ ID NO: 119669 - DNA, 120 bp, synthetic construct
  source 1..120: mol_type = other DNA
aaaccagaagagagtgggggccaatattcaacattcttaaaaaaagaattttcaacccagaatttcatatccagccaaactaagcttcataagtgaaggagaaataaaatactttacaga

SEQ ID NO: 119670 - DNA, 120 bp, synthetic construct
  source 1..120: mol_type = other DNA
agtcaagacccatcagtgtgctgtattcaggaaaaccatctcatgtgcagagacacacataggctcaaaataaaaggatggaggaagatctaccaagcaaatggaaaacaaaaaaaggca

SEQ ID NO: 119671 - DNA, 120 bp, synthetic construct
  source 1..120: mol_type = other DNA
ctaaaacatcaaaagcaatggcaacaaaagccaaaattgacaatgggatctaattaaactaaagagcttctgcacagcaaaagaaactaccatcagagtgaacaggcaacctacagaatg

SEQ ID NO: 119672 - DNA, 120 bp, synthetic construct; identical to SEQ ID NO: 6220
  source 1..120: mol_type = other DNA

SEQ ID NO: 119673 - DNA, 120 bp, synthetic construct; identical to SEQ ID NO: 31269
  source 1..120: mol_type = other DNA

SEQ ID NO: 119674 - DNA, 120 bp, synthetic construct
  source 1..120: mol_type = other DNA
tgttcatgtccctcgcccactttttgatggggttgtttctttttttcttgtaaatttgtttgagttcattgtagattctggatattagccctttgtcagatgagtaggttgcgaaaattt

SEQ ID NO: 119675 - DNA, 120 bp, synthetic construct
  source 1..120: mol_type = other DNA
gattttgggctgagacgatggggttttctagataaacaatcatgtcgtctgcaaacagggacaatttgacttcctcttttcctaattgaataccctttatttccttctcctgcctgattg

SEQ ID NO: 119676 - DNA, 120 bp, synthetic construct
  source 1..120: mol_type = other DNA
ttttttctttattagtcttgctagcggtcattcaattttgttgatcctttcaaaaaaccagctcctggattcattgattttttgaagggttttttgtgtctctatttccttcagttctgc

SEQ ID NO: 119677 - DNA, 120 bp, synthetic construct
  source 1..120: mol_type = other DNA
gtaggattgcaacccctgcctttttttgttttccatttgcttggtagatctttctccatccttttattttgagcctatgtgtgtctctgcacgtgagatgggtttcctgaatacagcaca

SEQ ID NO: 119678 - DNA, 120 bp, synthetic construct
  source 1..120: mol_type = other DNA
atcagctcctttaagcacttctctgtattggttattctagttatacatacttctaaatttttttcaaagttttcaacttctttgcctttggtttgaatgtcctcccgtagctcagagtaa

SEQ ID NO: 119679 - DNA, 120 bp, synthetic construct
  source 1..120: mol_type = other DNA
gcgcgcacccactggcctgcgcccactgtctggcactccctagtgagatgaacccggtacctcagatggaaatgcagaaatcccccgtcttctgcatcgctcacgctgggagctgtagag

SEQ ID NO: 119680 - DNA, 120 bp, synthetic construct; identical to SEQ ID NO: 31270
  source 1..120: mol_type = other DNA

SEQ ID NO: 119681 - DNA, 120 bp, synthetic construct; identical to SEQ ID NO: 31271
  source 1..120: mol_type = other DNA

SEQ ID NO: 119682 - DNA, 120 bp, synthetic construct; identical to SEQ ID NO: 31272
  source 1..120: mol_type = other DNA

SEQ ID NO: 119683 - DNA, 120 bp, synthetic construct; identical to SEQ ID NO: 6178
  source 1..120: mol_type = other DNA

SEQ ID NO: 119684 - DNA, 120 bp, synthetic construct; identical to SEQ ID NO: 22442
  source 1..120: mol_type = other DNA

SEQ ID NO: 119685 - DNA, 120 bp, synthetic construct; identical to SEQ ID NO: 22443
  source 1..120: mol_type = other DNA

SEQ ID NO: 119686 - DNA, 120 bp, synthetic construct; identical to SEQ ID NO: 22444
  source 1..120: mol_type = other DNA

SEQ ID NO: 119687 - DNA, 120 bp, synthetic construct; identical to SEQ ID NO: 22445
  source 1..120: mol_type = other DNA

SEQ ID NO: 119688 - DNA, 120 bp, synthetic construct; identical to SEQ ID NO: 22446
  source 1..120: mol_type = other DNA

SEQ ID NO: 119689 - DNA, 120 bp, synthetic construct; identical to SEQ ID NO: 31592
  source 1..120: mol_type = other DNA

SEQ ID NO: 119690 - DNA, 120 bp, synthetic construct
  source 1..120: mol_type = other DNA
atcattgttggacatttgggttggttccaagtctttgctattgtgaatagtgccgcaataaacatacgtgtgattgtttatctagaaaaccccatcgtctcagcccaaaatctccttaag

SEQ ID NO: 119691 - DNA, 120 bp, synthetic construct
  source 1..120: mol_type = other DNA
catgtcctttgtagggacatgggtgaaattggaaatcatcattctcagtaaactatcacaagaacaaaaaaccaaacaccgcatattctcactcgtaggtgggaattgaacaatgagaac

SEQ ID NO: 119692 - DNA, 120 bp, synthetic construct; identical to SEQ ID NO: 31593
  source 1..120: mol_type = other DNA

SEQ ID NO: 119693 - DNA, 120 bp, synthetic construct; identical to SEQ ID NO: 31594
  source 1..120: mol_type = other DNA

SEQ ID NO: 119694 - DNA, 120 bp, synthetic construct
  source 1..120: mol_type = other DNA
tctgatggccagtgatggtgagcattttttcatgtgttttttggttgcataaataaatgtcttcttttgagaagtgtctgttcatgtccttcgcccactttttgatggggttgtttgttt

SEQ ID NO: 119695 - DNA, 120 bp, synthetic construct
  source 1..120: mol_type = other DNA
ttcttcctatccatgagcatggaatgttcttccgtttgtttgtatcctcttttatttcattgagcagtggtttgtagttctccttgaagaggtccttcacatcccttgtaagttggattc

SEQ ID NO: 119696 - DNA, 120 bp, synthetic construct
  source 1..120: mol_type = other DNA
tagattttctagtttatttgtgtagaggtgtttgtagtattctctgatggtagtttgtatttctgtgggatcggtggtgatatcccctttatcattttttatttcgtctatttgattctt

SEQ ID NO: 119697 - DNA, 120 bp, synthetic construct
  source 1..120: mol_type = other DNA
caggacttgctttatgaatctgggtgctcctgtattgggtgtatatatatttaggatagtgagctcttcttgttgaattgatccctttaccattaagtaatggccttctttgtctctttt

SEQ ID NO: 119698 - DNA, 120 bp, synthetic construct
  source 1..120: mol_type = other DNA
aacagaaaaccaaataccacagtgttctcacttataagagggagctaaacattgagtacacataaacacaaagaggggaacaatagacatcagggcttacttgaggatgcagggtgggaa

SEQ ID NO: 119699 - DNA, 120 bp, synthetic construct; identical to SEQ ID NO: 31595
  source 1..120: mol_type = other DNA

SEQ ID NO: 119700 - DNA, 120 bp, synthetic construct; identical to SEQ ID NO: 31596
  source 1..120: mol_type = other DNA

SEQ ID NO: 119701 - DNA, 120 bp, synthetic construct
  source 1..120: mol_type = other DNA
ttggttgcataaataaatgtcttcttttgagaagtgtctgttcatgtccttcgcccactttttgatggggttgtttgttttttcttgtaaatttgtttgagttcattgtagattctggat

SEQ ID NO: 119702 - DNA, 120 bp, synthetic construct
  source 1..120: mol_type = other DNA
cctgtgatttttgtacattgattttgtatcctgagactttgccgaagttgcttatcagcttaaggagattttgggctgagacaatggggttttctagatatacaatcatgtcatctgcaa

SEQ ID NO: 119703 - DNA, 120 bp, synthetic construct
  source 1..120: mol_type = other DNA
tttctgtgggatcggtggtgatgtcccctttatcattttttattgtgtctatttgattcttttctcttttcttctttattagtcttgctagcggtctatcaattttgttgatcctttcaa

SEQ ID NO: 119704 - DNA, 120 bp, synthetic construct; identical to SEQ ID NO: 119697
  source 1..120: mol_type = other DNA

SEQ ID NO: 119705 - DNA, 120 bp, synthetic construct
  source 1..120: mol_type = other DNA
atgattttcagtatctcctggcaatactttgcccgaccaccttggttgcaaatactgacagaagcggagcttaaagccaaaggctaatatgtaggttttgatgaactacacggcaattat

SEQ ID NO: 119706 - DNA, 120 bp, synthetic construct
  source 1..120: mol_type = other DNA
tggaactcatgaaattggatagagacatttgtatctgacgttacaaggtgtgacagcacctagaaagaagtctcaattaagaacaaataaaattgcgtgaattagatcttgaaaaggtag

SEQ ID NO: 119707 - DNA, 120 bp, synthetic construct
  source 1..120: mol_type = other DNA
aaacgttaacaagctctctgaggacattcagggtaaagaagaaagtccaacacaattctacgagagactgtgggaggcctatcgtatgtatactccctttgatcctgatagccctgaaaa

SEQ ID NO: 119708 - DNA, 120 bp, synthetic construct
  source 1..120: mol_type = other DNA
tcagaaacttactgaaggccataggctaaataaccaagcaaagcagaatttccaggtttcggaaagcagagctctttttttttttttttttgagacagagtcttgctctgtcgcccaggc

SEQ ID NO: 119709 - DNA, 120 bp, synthetic construct; identical to SEQ ID NO: 11148
  source 1..120: mol_type = other DNA

SEQ ID NO: 119710 - DNA, 120 bp, synthetic construct; identical to SEQ ID NO: 11149
  source 1..120: mol_type = other DNA

SEQ ID NO: 119711 - DNA, 120 bp, synthetic construct; identical to SEQ ID NO: 35274
  source 1..120: mol_type = other DNA

SEQ ID NO: 119712 - DNA, 120 bp, synthetic construct
  source 1..120: mol_type = other DNA
gggggagaggggacgaatcaaggtgggtttcagttttcccacctcaaaaaaggaaattaaaaaaacggacaggaaaagggcaaaaagagctcaataatatttactatttcagggacgctt

SEQ ID NO: 119713 - DNA, 120 bp, synthetic construct; identical to SEQ ID NO: 13030
  source 1..120: mol_type = other DNA

SEQ ID NO: 119714 - DNA, 120 bp, synthetic construct; identical to SEQ ID NO: 9083
  source 1..120: mol_type = other DNA

SEQ ID NO: 119715 - DNA, 120 bp, synthetic construct; identical to SEQ ID NO: 9084
  source 1..120: mol_type = other DNA

SEQ ID NO: 119716 - DNA, 120 bp, synthetic construct; identical to SEQ ID NO: 9087
  source 1..120: mol_type = other DNA

SEQ ID NO: 119717 - DNA, 120 bp, synthetic construct; identical to SEQ ID NO: 9079
  source 1..120: mol_type = other DNA

SEQ ID NO: 119718 - DNA, 120 bp, synthetic construct
  source 1..120: mol_type = other DNA
tacagtcccaccaacagtgtaaaagtgttcctatttctccacatcctctccagcacctgttgtttcctgagtttttaatgattgccattctaactggtgtgagatgatatctcatagtgg

SEQ ID NO: 119719 - DNA, 120 bp, synthetic construct
  source 1..120: mol_type = other DNA
gttctccttgaagaggtccttcacatcccttgtaagttggattcctaggtattttattctctttgaagcagttgtgaatgggagttcactcatgatttggctctctgtttgtctgttgtt

SEQ ID NO: 119720 - DNA, 120 bp, synthetic construct
  source 1..120: mol_type = other DNA
ccttctgctagcttttgaatgtgtttgctcttgcttttctagttcttttaattgtgatgttagggtgtcaattttggatctttcctgctttctcttgtaggcatttagtgctataaattt

SEQ ID NO: 119721 - DNA, 120 bp, synthetic construct; identical to SEQ ID NO: 9085
  source 1..120: mol_type = other DNA

SEQ ID NO: 119722 - DNA, 120 bp, synthetic construct
  source 1..120: mol_type = other DNA
aggaatcgccacactgacttccacaatggttgaactagtttacagtcccaccaacagtgtaaaagtgttcctatttctccacatcctctccagcacctgttgtttcctgagtttttaatg

SEQ ID NO: 119723 - DNA, 120 bp, synthetic construct
  source 1..120: mol_type = other DNA
tggcattgaatctgtaaattaccttgggcagtatggccattttcacgatattgattcttcctacccatgagcatggaatgttcttccatttgtttgtgtcctcttttatttccttgagca

SEQ ID NO: 119724 - DNA, 120 bp, synthetic construct
  source 1..120: mol_type = other DNA
attccctctttttctattgattggaatagtttcagaaggaatggtaccagctcctccttgtacctctggtagaattcggctgtgaatccatctggtcctggactctttttggttggtaaa

SEQ ID NO: 119725 - DNA, 120 bp, synthetic construct
  source 1..120: mol_type = other DNA
ctcctgtattgggtgcataaatatttaggatagttagctcttcttgttgaattgatccctttaccattatgtaatggccttctttgtctcttttgatctttgttggtttaaagtctgttt

SEQ ID NO: 119726 - DNA, 120 bp, synthetic construct
  source 1..120: mol_type = other DNA
ttggaggctttgctcatttctttttattcttttttctctaaacttcccttctcgcttcatttcattcatttcatcttccatcgctgataccctttcttccagttgatcacatcggctcct

SEQ ID NO: 119727 - DNA, 120 bp, synthetic construct
  source 1..120: mol_type = other DNA
tcccccagcctcgttgccgccttgccgtttgatctcagactgctgtgctagcaatcagcgagattccgtgggcgtaggaccctctgagccaggtgtgggatatagtctcgtggtgcgccg

SEQ ID NO: 119728 - DNA, 120 bp, synthetic construct; identical to SEQ ID NO: 9086
  source 1..120: mol_type = other DNA

SEQ ID NO: 119729 - DNA, 120 bp, synthetic construct
  source 1..120: mol_type = other DNA
gtgttgttgaatttggtttgctagtattttgttgaggatttttacatcaatgttcattagggatattggcctgtagccagtcttccttccttccttccttcctccctccctccctccctt

SEQ ID NO: 119730 - DNA, 120 bp, synthetic construct
  source 1..120: mol_type = other DNA
gccaccacgcccagcctagttttctttttttgatggggtctttttctggttttggtgtcaggataataactgacctcatagaatgagttttggaagtattccctcttcctctattttttg

SEQ ID NO: 119731 - DNA, 120 bp, synthetic construct
  source 1..120: mol_type = other DNA
tggctgggtcaaatggtatttctagttgtagatccctgaggaatcaccacaccgacttccacaatggttgaactagtttatggtcccaccgacagtgtaaaagtgttcctatttctccac

SEQ ID NO: 119732 - DNA, 120 bp, synthetic construct
  source 1..120: mol_type = other DNA
tacccatgagcatggaatgttcttccatttttttgtatcctcttttatttgattgagcagtggtttgtagttctccctgaagaggtccttcacatcccttttaagttggattcctaggta

SEQ ID NO: 119733 - DNA, 120 bp, synthetic construct
  source 1..120: mol_type = other DNA
gaagaagttgaatctctgaatagaccaataacaggctctgaaattgaggcaataatcaatagcttaccaaccaaaaaaagtccaggaccagatggattcacagccgagttctaccagagg

SEQ ID NO: 119734 - DNA, 120 bp, synthetic construct
  source 1..120: mol_type = other DNA
ctgccgggcggagacgctcctcacttcccagacagggcggctgctgggcggaggggctcctcacttcccagacggggtggctgccgggcggaggggctcctcacttctcagacgggtggc

SEQ ID NO: 119735 - DNA, 120 bp, synthetic construct
  source 1..120: mol_type = other DNA
atgcagcccagtaggtttcagtctcattttacccagcccttattcaagatggagttgctctggttcacacgcctctgatatcaccagtctttctgtaaagcaaaaggatttacatttaat

SEQ ID NO: 119736 - DNA, 120 bp, synthetic construct
  source 1..120: mol_type = other DNA
actaaaattggaacgatacagagaagattagcatgaggatgacacgcaaattcgtgaagcgttccatttcttttttcagcaccacaccccacctattccaaaattgaccacgtagttgga

SEQ ID NO: 119737 - DNA, 120 bp, synthetic construct
  source 1..120: mol_type = other DNA
atcatcctgataccaaagcctggcagagacacaaccaaaaaagagaatttagaccaatatccttcatgaacattgatgcaaaaatcctcaataaaatactgacaaaccgaatccagcagc

SEQ ID NO: 119738 - DNA, 120 bp, synthetic construct
  source 1..120: mol_type = other DNA
taccatcagagtgaacaggcaacctacaaagtgggagaaaattttcgcaacctactcgtctgacaaagggctaatatccagaatctacgatgaactcaaacaaatttacaagaaaaaaac

SEQ ID NO: 119739 - DNA, 120 bp, synthetic construct; identical to SEQ ID NO: 9081
  source 1..120: mol_type = other DNA

SEQ ID NO: 119740 - DNA, 120 bp, synthetic construct
  source 1..120: mol_type = other DNA
gtcttcaaaccatgttctaaatgtatttacttctcaccaccttggccagtgccactcttgtctaagcagccatttctttttttttttttttttgacacggggtctcacactgtcgccagg

SEQ ID NO: 119741 - DNA, 120 bp, synthetic construct
  source 1..120: mol_type = other DNA
caaagtgctgggattacaggcatgaaccacagtacccagaattcccctccctcttggggaagaaatgtctcaattcagaaaggaatgaaaaatcagaactttctcctttaagaatcaaag

SEQ ID NO: 119742 - DNA, 120 bp, synthetic construct
  source 1..120: mol_type = other DNA
aaaaaaaaaaaaaaaaaacacaacagtagcaggttgacacttacatgggacttcctacatgccaggtagcacgtgacaaatactgagtcactgaatcctggggtaggtcctatttttggc

SEQ ID NO: 119743 - DNA, 120 bp, synthetic construct; identical to SEQ ID NO: 19820
  source 1..120: mol_type = other DNA

SEQ ID NO: 119744 - DNA, 120 bp, synthetic construct; identical to SEQ ID NO: 19821
  source 1..120: mol_type = other DNA

SEQ ID NO: 119745 - DNA, 120 bp, synthetic construct; identical to SEQ ID NO: 30386
  source 1..120: mol_type = other DNA

SEQ ID NO: 119746 - DNA, 120 bp, synthetic construct; identical to SEQ ID NO: 26881
  source 1..120: mol_type = other DNA

SEQ ID NO: 119747 - DNA, 120 bp, synthetic construct
  source 1..120: mol_type = other DNA
cataaatgtcttcttttgagaagtgtctgttcatatcctttgcccactttttgatggggttgtttgatttttttcttgtaaatctgtttaaattctgtgtagattctggatattagcctt

SEQ ID NO: 119748 - DNA, 120 bp, synthetic construct
  source 1..120: mol_type = other DNA
accctttatttccttctcctgcctaattgccctggccagaacatccaacactgtgttgaataggggtggtaagagagggcatccctgtcttgtgccagttttcaaagggaatgcttccag

SEQ ID NO: 119749 - DNA, 120 bp, synthetic construct; identical to SEQ ID NO: 26882
  source 1..120: mol_type = other DNA

SEQ ID NO: 119750 - DNA, 120 bp, synthetic construct; identical to SEQ ID NO: 26883
  source 1..120: mol_type = other DNA

SEQ ID NO: 119751 - DNA, 120 bp, synthetic construct; identical to SEQ ID NO: 26884
  source 1..120: mol_type = other DNA

SEQ ID NO: 119752 - DNA, 120 bp, synthetic construct; identical to SEQ ID NO: 26885
  source 1..120: mol_type = other DNA

SEQ ID NO: 119753 - DNA, 120 bp, synthetic construct
  source 1..120: mol_type = other DNA
ttgagttcattgtagattctagatattagccctttgtcagatgagtaggttgcgaaaattttctcccattttgtaggttgcctgttcactctgatggtagtttcttttgctgtgcagaag

SEQ ID NO: 119754 - DNA, 120 bp, synthetic construct; identical to SEQ ID NO: 26886
  source 1..120: mol_type = other DNA

SEQ ID NO: 119755 - DNA, 120 bp, synthetic construct
  source 1..120: mol_type = other DNA
ggattaataatctcactcaaagccgctcaactacatggaaactgaacaacctgctcctgaatgactactgggtacataacgaaatgaaggcagaaataaagatgttctttgaaaccaacg

SEQ ID NO: 119756 - DNA, 120 bp, synthetic construct
  source 1..120: mol_type = other DNA
gagccaaagacaaaaaccacatgattatctcaatagttgcagaaaaagcctttgacaaaattcaacaacgcttcatgctaaaaactctcaatgaattaggtgttgatgggacgtatttca

SEQ ID NO: 119757 - DNA, 120 bp, synthetic construct
  source 1..120: mol_type = other DNA
tcagaaataatgccgcatatctacaactatctgatctttgacaaacctgagaaaaacaggcaatggggaaaggattccctatttaataaatggtgctgggaaaactggctagccatatgt

SEQ ID NO: 119758 - DNA, 120 bp, synthetic construct
  source 1..120: mol_type = other DNA
acaaaaaaccaaacaccgcatattctcactcataggtgggaattgaacaatgagatcacatggacacaggaaggggaatatcacactctggggactgttgtggggtcgggggagggggga

SEQ ID NO: 119759 - DNA, 120 bp, synthetic construct
  source 1..120: mol_type = other DNA
cacccacctcagcctcctgtgtggctggggttaaggcatgtgccactatgcctggcacattgtgaatgtattaaatacctcttaattgttcacttagaaaatctaaatttcagcttaatt

SEQ ID NO: 119760 - DNA, 120 bp, synthetic construct
  source 1..120: mol_type = other DNA
gggtggctgccgggcggaggggctcctcacttctcagacggggcggctcccggacagaggggctcctcacttctccgacggggcggttgccgggtggagggtctcctcccttctcagatg

SEQ ID NO: 119761 - DNA, 120 bp, synthetic construct
  source 1..120: mol_type = other DNA
attttagaatttggaactgaacagaaacttttcatgttctaatttgtgtacaaatagttcttggtaggcagggtgtggtggctcacgcctgtaatcccagcactttgggaggctgaggtg

SEQ ID NO: 119762 - DNA, 120 bp, synthetic construct
  source 1..120: mol_type = other DNA
gctgggattataggtgtgaaccaccacacctaacccaagatgctttcttactgaattttctccaactgaagagttaactaggaggagagacattgatcaggctgaccagttaaataactt

SEQ ID NO: 119763 - DNA, 120 bp, synthetic construct
  source 1..120: mol_type = other DNA
taatcctagcactttgggaagccaaggtgggaggactgcttgaagccagcctgggcaacaaaatgacaccccatctctttaaaaaaaaaattcgagtaatatcactcttctaactaaatt

SEQ ID NO: 119764 - DNA, 120 bp, synthetic construct
  source 1..120: mol_type = other DNA
agtaatgggatggctgggtcaaatggtatttctagttctagatccctgaggaaatgccacactgacttccacaatggttgaactagtttacagtcccaacaacagtgtaaaagtgttcct

SEQ ID NO: 119765 - DNA, 120 bp, synthetic construct; identical to SEQ ID NO: 24774
  source 1..120: mol_type = other DNA

SEQ ID NO: 119766 - DNA, 120 bp, synthetic construct
  source 1..120: mol_type = other DNA
tgtcagatgagtaggttgcaaaaattttctcccattttgtaggtcgcctgttcactctgatggtagtttcttttgctgtgcagaagctctttagtttaattagatcccatttgtcaattt

SEQ ID NO: 119767 - DNA, 120 bp, synthetic construct; identical to SEQ ID NO: 12106
  source 1..120: mol_type = other DNA

SEQ ID NO: 119768 - DNA, 120 bp, synthetic construct
  source 1..120: mol_type = other DNA
aggttgtgaaaattttctcccattttgtaggttgcctgttcactctgatggtagtttcttttgctgtgcagaagctctttagtttaatcagatcccatttgtcagttttggcttttgttg

SEQ ID NO: 119769 - DNA, 120 bp, synthetic construct
  source 1..120: mol_type = other DNA
aaggagattttgggctgagacaatggggttttctagatatacaattatgttgtctgcaaagagggacaatttgacttcctcttttcctaattgaataccctttatttccttctcctgcct

SEQ ID NO: 119770 - DNA, 120 bp, synthetic construct
  source 1..120: mol_type = other DNA
agtttgtatttctgtgggatcggtggtgatatcccctttatcattttttattgcatctattcgattcttctttttttctttattagtcttgctagcggtctatcaattttgttgatcctt

SEQ ID NO: 119771 - DNA, 120 bp, synthetic construct
  source 1..120: mol_type = other DNA
cttctttgtctcttttgatctttgttggtttaaagtctgttttatccgagactaggattgcaacccctgccttttttttgttttccatttgcttggtagatcttcctccatccttttatt

SEQ ID NO: 119772 - DNA, 120 bp, synthetic construct
  source 1..120: mol_type = other DNA
tttcctgaatctgaacgttggcctgccttgctagattggggaagttctcctggataatatcctgcagagtgttttccaacttggttccattctccccatcactttcaggtacaccaaatc

SEQ ID NO: 119773 - DNA, 120 bp, synthetic construct
  source 1..120: mol_type = other DNA
tcccccagcctcgctgccgccttgcagtttgatctcagactgctgtgctagcaatctgtgagactccgtgggcgtaggaccctccgagccaggtgcaggatataatctcgtggtgtgccg

SEQ ID NO: 119774 - DNA, 120 bp, synthetic construct
  source 1..120: mol_type = other DNA
cacctgtaattccagctactcagggggctgaggcaggagaatcacttgaacccactgcactccatcctgggtgacaaagcattactctgtctcaaaaaaaaaattatttttttccaacaa

SEQ ID NO: 119775 - DNA, 120 bp, synthetic construct
  source 1..120: mol_type = other DNA
gaaataaagatgttctttaaaaccaatgagaacaaagacacaacataccagaatccctgggacacattcaaagcagtgtgtagagggaaatttatagcactaaatgcccacaagagaaag

SEQ ID NO: 119776 - DNA, 120 bp, synthetic construct
  source 1..120: mol_type = other DNA
attttatgaggccagcatcatcctgataccaaagcctggcagagacacaacaaaaaaagagtattttagaccaatatccctgatgaacattgatgcaaaaatcctcaataaaatactggc

SEQ ID NO: 119777 - DNA, 120 bp, synthetic construct
  source 1..120: mol_type = other DNA
tgccatctgcatcaagctaccaatgactttcttcacagaattggaaaaaactactttaaagttcatatggaaccaaaaaagagcccgcatcgccaagtcaatcctaagccaaaagaacaa

SEQ ID NO: 119778 - DNA, 120 bp, synthetic construct
  source 1..120: mol_type = other DNA
ttcctcagggatctagaactagaaataccatttgacccagaaatcccattactgggtatatacccaaaggattataagtcatgctgctgtaaagacacatgcacatgtatgtttattgtg

SEQ ID NO: 119779 - DNA, 120 bp, synthetic construct; identical to SEQ ID NO: 24988
  source 1..120: mol_type = other DNA

SEQ ID NO: 119780 - DNA, 120 bp, synthetic construct
  source 1..120: mol_type = other DNA
cggggcacctcacagggccgggtactccaacagacctgcagctgagggtcctgtctgttagaaggaaaactaacaaacagaaaggacatccacaccaaaaacccatctgtacatcaccat

SEQ ID NO: 119781 - DNA, 120 bp, synthetic construct
  source 1..120: mol_type = other DNA
catcagactaacagtggatctctcggcagaaaccctacaagccagaagagagtgggggccaatattcaacattcttaaagaaaaggattttcaacgcagaatttcatatccagccaaact

SEQ ID NO: 119782 - DNA, 120 bp, synthetic construct
  source 1..120: mol_type = other DNA
accacaccacacctactccaaaattgaccacatacttggaagtaaagctctcctcagcaaatgtaaaagaacagaaattataacaaactatctctcagaccacagtgcaatcaaactaga

SEQ ID NO: 119783 - DNA, 120 bp, synthetic construct
  source 1..120: mol_type = other DNA
taaatgtaatccagcaggtaaacagagccaaagacaaaaaccacatgattatctcaatagatgcagaaaaagcctttgacaaaattcaacaacccttcatgctaaaaactctcaataaat

SEQ ID NO: 119784 - DNA, 120 bp, synthetic construct
  source 1..120: mol_type = other DNA
caagtaatggggaacggattccctatttaataaatggtgctgggaaaactggctagccatatgtagaaagctgaaactggatcccttccttacaccttatacaaaaatcaattcaagatg

SEQ ID NO: 119785 - DNA, 120 bp, synthetic construct
  source 1..120: mol_type = other DNA
aatgatgagttactgtcctttgtagggacatggatgaaattggaaatcatcattctcagtaaactatcgcaagtacaaaaaaccaaacaccgcatattctcactcataggtgggaattga

SEQ ID NO: 119786 - DNA, 120 bp, synthetic construct; identical to SEQ ID NO: 24989
  source 1..120: mol_type = other DNA

SEQ ID NO: 119787 - DNA, 120 bp, synthetic construct; identical to SEQ ID NO: 24990
  source 1..120: mol_type = other DNA

SEQ ID NO: 119788 - DNA, 120 bp, synthetic construct; identical to SEQ ID NO: 24991
  source 1..120: mol_type = other DNA

SEQ ID NO: 119789 - DNA, 120 bp, synthetic construct; identical to SEQ ID NO: 24992
  source 1..120: mol_type = other DNA

SEQ ID NO: 119790 - DNA, 120 bp, synthetic construct; identical to SEQ ID NO: 24993
  source 1..120: mol_type = other DNA

SEQ ID NO: 119791 - DNA, 120 bp, synthetic construct
  source 1..120: mol_type = other DNA
atgtgtgcatgtgtgtggtgtgtgtggtgtgtgtgtgtgtgctgtatgtgtgcatgtgtgtggtgtataagtgtgtgtggtgtgtgtgtggtgtataagtgtatgtggtgtatgtgtgcg

SEQ ID NO: 119792 - DNA, 120 bp, synthetic construct; identical to SEQ ID NO: 24994
  source 1..120: mol_type = other DNA

SEQ ID NO: 119793 - DNA, 120 bp, synthetic construct
  source 1..120: mol_type = other DNA
cctgcaggaaccctccccttagaaacatgtctgcctcatgacggctaattaaacattgattactggtgctcgcttcggcagcacatatactaaaattggaacgatacagagaagattagc

SEQ ID NO: 119794 - DNA, 120 bp, synthetic construct
  source 1..120: mol_type = other DNA
agacagatcaaagagacagaaagtcaacaaggatacccacgaattgaactcagctctgcaccaagcggacctaatagacatctacagaactctccaccccaaatcaacagaatatacatt

SEQ ID NO: 119795 - DNA, 120 bp, synthetic construct
  source 1..120: mol_type = other DNA
aataatcaatagcttaccaatcaaaaagagtccagcaccagatggattcacagccgaattctaccagaggtacaaggaggaactggtaccattccttctgaaactattccaatcaataga

SEQ ID NO: 119796 - DNA, 120 bp, synthetic construct
  source 1..120: mol_type = other DNA
tgctcatgggtaggaagaatcaatatcatgaaaatagccatactgcccaaggtaatttacagattcaatgccatccccatcaagctaccaatgactttcttcacagaattggaaaaaact

SEQ ID NO: 119797 - DNA, 120 bp, synthetic construct
  source 1..120: mol_type = other DNA
ctcaaaagaagacatttatgcagccaaaaaacacatgaaaaaatgctcatcatcactggccatcagagaaatgcaaatcaaaaccacaatgagataccatctcacaccggttcgaatggc

SEQ ID NO: 119798 - DNA, 120 bp, synthetic construct; identical to SEQ ID NO: 24995
  source 1..120: mol_type = other DNA

SEQ ID NO: 119799 - DNA, 120 bp, synthetic construct; identical to SEQ ID NO: 24204
  source 1..120: mol_type = other DNA

SEQ ID NO: 119800 - DNA, 120 bp, synthetic construct
  source 1..120: mol_type = other DNA
tcccaaagcactgggattataggtatgagccaccgtgcccagccgaaatgccagttttaagttgttaaatacatggcagaatgtctggttacagtttttatctgttttgtgaaggcaaca

SEQ ID NO: 119801 - DNA, 120 bp, synthetic construct; identical to SEQ ID NO: 24205
  source 1..120: mol_type = other DNA

SEQ ID NO: 119802 - DNA, 120 bp, synthetic construct; identical to SEQ ID NO: 24206
  source 1..120: mol_type = other DNA

SEQ ID NO: 119803 - DNA, 120 bp, synthetic construct; identical to SEQ ID NO: 24207
  source 1..120: mol_type = other DNA

SEQ ID NO: 119804 - DNA, 120 bp, synthetic construct
  source 1..120: mol_type = other DNA
aatctgctgttctgcagccaccactgctgatacccaggcaaacagggtctggagtggaccgctagcaaactccaacagacctgcagctgagggtcctgtctgttagaaggaaaactaaca

SEQ ID NO: 119805 - DNA, 120 bp, synthetic construct
  source 1..120: mol_type = other DNA
actttacagacaagcaaatgctgagagattttgtcaccaccaggcctgccctaaaagagctcctgaaggaagcactaaacatggaaaggaacaacctgtaccagccactgcaaaatcatg

SEQ ID NO: 119806 - DNA, 120 bp, synthetic construct
  source 1..120: mol_type = other DNA
atcaaactagaactcaggattaagaaactcactcaaaaccactcagctgcatggaaactgaacaacctgctcctgaatgactactgggtacataacgaaatgaaggcagaaataaagatg

SEQ ID NO: 119807 - DNA, 120 bp, synthetic construct
  source 1..120: mol_type = other DNA
accaaatccagcagcacatccaaaagcttatccaccatgatcaagtgggcctcatccctgagatgcaaggctggttcaatatatgcaaatcaataaatgtaatccaacatataaacagaa

SEQ ID NO: 119808 - DNA, 120 bp, synthetic construct
  source 1..120: mol_type = other DNA
agattcaatgccatccccatcaagctaccaatgactttcttcacagaattggaaaatactactttaaagttcatatggaaccaaaaaagagcccgcatcgccaagtcaatcctaagccaa

SEQ ID NO: 119809 - DNA, 120 bp, synthetic construct
  source 1..120: mol_type = other DNA
gtgattcctcaaggatctagaactagaaataccatttgacccagccatcccattactaggtatatacccaaaggactataaatcatgctgctataaagacacatgcagacatatgtttat

SEQ ID NO: 119810 - DNA, 120 bp, synthetic construct; identical to SEQ ID NO: 16208
  source 1..120: mol_type = other DNA

SEQ ID NO: 119811 - DNA, 120 bp, synthetic construct; identical to SEQ ID NO: 16209
  source 1..120: mol_type = other DNA

SEQ ID NO: 119812 - DNA, 120 bp, synthetic construct
  source 1..120: mol_type = other DNA
cagccatactcgggttgaatgattaaaaacgagcaacaacttccttttcttttcttttttctttttttttttttttttttgagatagagtctcgctctgtttcccaggctggagtgcagt

SEQ ID NO: 119813 - DNA, 120 bp, synthetic construct; identical to SEQ ID NO: 16211
  source 1..120: mol_type = other DNA

SEQ ID NO: 119814 - DNA, 120 bp, synthetic construct; identical to SEQ ID NO: 16212
  source 1..120: mol_type = other DNA

SEQ ID NO: 119815 - DNA, 120 bp, synthetic construct; identical to SEQ ID NO: 16213
  source 1..120: mol_type = other DNA

SEQ ID NO: 119816 - DNA, 120 bp, synthetic construct
  source 1..120: mol_type = other DNA
gctgctgaaattccacacgaccagcgtctgcagcagcagcaccgtgagcgccgcgagcagcgccgagtgcgagcgccgggccagcctccgggcgcacggcgccgccaccatcttcggagc

SEQ ID NO: 119817 - DNA, 120 bp, synthetic construct
  source 1..120: mol_type = other DNA
tcaacctgggaggttgaggctgcagtaagctatatccacaccactgcactccaccctgggcaacagactgaaaccctgtctcagaaaataaataaataaataatgctaaaacgatttata

SEQ ID NO: 119818 - DNA, 120 bp, synthetic construct
  source 1..120: mol_type = other DNA
gcaaccaccccgtctgagaagttaggagcccctccgcccagcagctgccccgtctgagaagtgaggagcctctccgcccggcagccaccccatctgggaagtgaggagcgtctccgcccg

SEQ ID NO: 119819 - DNA, 120 bp, synthetic construct
  source 1..120: mol_type = other DNA
atgacggatatgttctgaaaaatgcatcgttaggtgatttcattgtcagaacatcatagaatgtatttatacaaacctagatggtacagcctactacatacctaggctatatggtagagc

SEQ ID NO: 119820 - DNA, 120 bp, synthetic construct
  source 1..120: mol_type = other DNA
ttgtgttgctataaaggaataactgaaactgagtaatttataaagaaaggtttaatttggctcacagttctgcaggctgtacaggaagcatggtgccagcgtctgcttctggtgaggacc

SEQ ID NO: 119821 - DNA, 120 bp, synthetic construct
  source 1..120: mol_type = other DNA
atcgcttgaacccgggaggtggaggttgcagtgagccgagagtgagccattgcactccagcctgggtgacaatagcgaaactcagtctcaaaaaaaaaaaaaaaaaaaaaaaaaaaaaaa

SEQ ID NO: 119822 - DNA, 120 bp, synthetic construct; identical to SEQ ID NO: 7428
  source 1..120: mol_type = other DNA

SEQ ID NO: 119823 - DNA, 120 bp, synthetic construct
  source 1..120: mol_type = other DNA
acgctcctcacctcccagacggggtggcggtcgggcagagacactcctcagttcccagaccgggtcgcggccggacagaggcgctcctcacatcccagacggggcggcggggcagaggtg

SEQ ID NO: 119824 - DNA, 120 bp, synthetic construct
  source 1..120: mol_type = other DNA
gaaacttatgtctgtttctatttttcaggtgttcactggagtagcactttgaatttccttcaagaactttccctatggattcacaacctggctatttggtgcaagaggccgagctttccg

SEQ ID NO: 119825 - DNA, 120 bp, synthetic construct; identical to SEQ ID NO: 23389
  source 1..120: mol_type = other DNA

SEQ ID NO: 119826 - DNA, 120 bp, synthetic construct; identical to SEQ ID NO: 23390
  source 1..120: mol_type = other DNA

SEQ ID NO: 119827 - DNA, 120 bp, synthetic construct
  source 1..120: mol_type = other DNA
gattaaattcctcccgcggttagcctgacccgtgcccgggactcagtggggacagccacacaagttaaactctagattaaattcctcccgcggttagcctgacctgtgcccgggactcag

SEQ ID NO: 119828 - DNA, 120 bp, synthetic construct; identical to SEQ ID NO: 7518
  source 1..120: mol_type = other DNA

SEQ ID NO: 119829 - DNA, 120 bp, synthetic construct; identical to SEQ ID NO: 24928
  source 1..120: mol_type = other DNA

SEQ ID NO: 119830 - DNA, 120 bp, synthetic construct
  source 1..120: mol_type = other DNA
tttctccacatcctctccagcacctgttgtttcctgactttttaatgattgccattctaactggtgtgagatgatatctcatagtggttttgatttgcatttctctgattaggaaaagag

SEQ ID NO: 119831 - DNA, 120 bp, synthetic construct
  source 1..120: mol_type = other DNA
taggcgtgggcaaggacttcatgtccaaaacaccaaaagcaatggcaacaaaagccaaaattgacaaatgggatctaattaaactaaagagcttctgcacagcaaaagaaactaccatca

SEQ ID NO: 119832 - DNA, 120 bp, synthetic construct
  source 1..120: mol_type = other DNA
tggttaattcctagttatttaatttgtagctgtggtaaatgagattactttctttttttttatttaattttttagtatttattgatcattcttgggtgtttctcggagagggggatttgg

SEQ ID NO: 119833 - DNA, 120 bp, synthetic construct
  source 1..120: mol_type = other DNA
cagatggggtcgcggccgggcagaggcgctcttcacatctcagatggggcggcggggcagaggcgctccccacatcccagaggatgggcggccggacagagacgctcctcacttcctaga

SEQ ID NO: 119834 - DNA, 120 bp, synthetic construct
  source 1..120: mol_type = other DNA
atgactcttaacgagcatgctgccttcaagcatctgtttaacaaagcacatcttgcaccgcccttaacccatttaaccctgagtggacacagcacatgtttcagagagcacaggtttggg

SEQ ID NO: 119835 - DNA, 120 bp, synthetic construct
  source 1..120: mol_type = other DNA
gcgtggcggcgtgcgcctgcaatggcaggcactcggcaggctgaggcaggagaatcaggcagggaggttgcagtgagccgagatggcagcagtacagtccagcttcggctcggcatcaga

SEQ ID NO: 119836 - DNA, 120 bp, synthetic construct; identical to SEQ ID NO: 34071
  source 1..120: mol_type = other DNA

SEQ ID NO: 119837 - DNA, 120 bp, synthetic construct; identical to SEQ ID NO: 34072
  source 1..120: mol_type = other DNA

SEQ ID NO: 119838 - DNA, 120 bp, synthetic construct
  source 1..120: mol_type = other DNA
gagactccgtctcaaaaaaaaaaaaaataaaaaaaataaaaaaataaaactcctggcctcaagcagtctgcccacctcagcctcctaaagtgctgggattacaggcaagagccactgccc

SEQ ID NO: 119839 - DNA, 120 bp, synthetic construct; identical to SEQ ID NO: 19427
  source 1..120: mol_type = other DNA

SEQ ID NO: 119840 - DNA, 120 bp, synthetic construct; identical to SEQ ID NO: 14490
  source 1..120: mol_type = other DNA

SEQ ID NO: 119841 - DNA, 120 bp, synthetic construct
  source 1..120: mol_type = other DNA
tttttgtatttttttttttttttgtagagatgaggtttttgtcatgtttcccaggctggtctcaaaccggcctcaagcagtcttcctgcctcagcctctcaaagggttaggattatgggt

SEQ ID NO: 119842 - DNA, 120 bp, synthetic construct
  source 1..120: mol_type = other DNA
cagggtggctgccgggcggagacactcctcacttcccacacggggtggctgctgggcggagggtctcctcacttctcagatggggcggccgggcagagacggctcctcacttcccagacg

SEQ ID NO: 119843 - DNA, 120 bp, synthetic construct; identical to SEQ ID NO: 25482
  source 1..120: mol_type = other DNA

SEQ ID NO: 119844 - DNA, 120 bp, synthetic construct
  source 1..120: mol_type = other DNA
gtatgggtgagtcaagaattactcgttggcttttgcttatacaattgttccagtaccgtttgttaaaaccatttgtttttttccattgagttacactgacacctttgtcaaaaatcaact

SEQ ID NO: 119845 - DNA, 120 bp, synthetic construct; identical to SEQ ID NO: 26958
  source 1..120: mol_type = other DNA

SEQ ID NO: 119846 - DNA, 120 bp, synthetic construct; identical to SEQ ID NO: 26959
  source 1..120: mol_type = other DNA

SEQ ID NO: 119847 - DNA, 120 bp, synthetic construct
  source 1..120: mol_type = other DNA
cctttttgatagtcctttaaactcctctcttccccacagtttaatagtttaacttaaagtcttccatattaagcctggcgtcatggctcacgcctataatcccagcactttgggaggctg

SEQ ID NO: 119848 - DNA, 120 bp, synthetic construct; identical to SEQ ID NO: 31560
  source 1..120: mol_type = other DNA

SEQ ID NO: 119849 - DNA, 120 bp, synthetic construct
  source 1..120: mol_type = other DNA
ggacgaggtggctgctgggcggagatgctcctcacttctcaaatggggtggctgctgggcggaggggctcctcacttctcagacggggcggcttccgggcggaggggcgcctcacttctc

SEQ ID NO: 119850 - DNA, 120 bp, synthetic construct
  source 1..120: mol_type = other DNA
taccgtccagcttcggctcggcatcagagggagaccgtggaaagagggagagggagagggtccttcatttcttaaaattagttctttatagttcttcagaataattttatgactaaatag

SEQ ID NO: 119851 - DNA, 120 bp, synthetic construct
  source 1..120: mol_type = other DNA
tcgctttgtgtggggtgaagagaaagttttcaaatagtggtgattacacaacactgtcaatgtattcggtgccactaaattgttgtgtgtgtgtgtgtgtgtgtgtgtgtgtgtgtgtgt

SEQ ID NO: 119852 - DNA, 120 bp, synthetic construct; identical to SEQ ID NO: 29530
  source 1..120: mol_type = other DNA

SEQ ID NO: 119853 - DNA, 120 bp, synthetic construct; identical to SEQ ID NO: 20345
  source 1..120: mol_type = other DNA

SEQ ID NO: 119854 - DNA, 120 bp, synthetic construct; identical to SEQ ID NO: 20346
  source 1..120: mol_type = other DNA

SEQ ID NO: 119855 - DNA, 120 bp, synthetic construct
  source 1..120: mol_type = other DNA
atcatcttgcacagactggtaactcctaggctcaagtggtcctcctgcctcagcctcccaaaatgctgggattacaggtgtgaaccaccatgcctaatttaaaaaaaaaaaaaaaaaaaa

SEQ ID NO: 119856 - DNA, 120 bp, synthetic construct; identical to SEQ ID NO: 8862
  source 1..120: mol_type = other DNA

SEQ ID NO: 119857 - DNA, 120 bp, synthetic construct; identical to SEQ ID NO: 8863
  source 1..120: mol_type = other DNA

SEQ ID NO: 119858 - DNA, 120 bp, synthetic construct; identical to SEQ ID NO: 8864
  source 1..120: mol_type = other DNA

SEQ ID NO: 119859 - DNA, 120 bp, synthetic construct
  source 1..120: mol_type = other DNA
cactgtactctagcctgggtgacagagaccctgtctctaaaaaagaagaaaacattatatcttcccttctttctttcctctcagtctgtatgatgcaaacatgcagctttgacattccaa

SEQ ID NO: 119860 - DNA, 120 bp, synthetic construct
  source 1..120: mol_type = other DNA
tcctaggcacttaaaatacaccagtgcagaaaacagacaaggaagagtagggtgtggtagcgggggggcagttaccgacacaaagtaaatatagttataaagtgagcgatgctactggga

SEQ ID NO: 119861 - DNA, 120 bp, synthetic construct
  source 1..120: mol_type = other DNA
tccgcagtgtttgtgtccctgattacttgagattagggattggtgatgactcttaacgagcatgctgccttcaagcatctgtttaacaaagcacatcttgcaccgcccttaatccattta

SEQ ID NO: 119862 - DNA, 120 bp, synthetic construct
  source 1..120: mol_type = other DNA
ccgggcagaggggctcctcacatcccagacgatgggcggccaggcagagacactcctcacttcccagacggggtggcggccgggcagaggctgcaatctcggcactttgggaggccaagg

SEQ ID NO: 119863 - DNA, 120 bp, synthetic construct
  source 1..120: mol_type = other DNA
tatccctagcttctttccaccacctccctgtgcactcagctgagcttctttctctttctactgttgacttcttccttttctctctcacacaacattcactttctctcttaatcttctcac

SEQ ID NO: 119864 - DNA, 120 bp, synthetic construct; identical to SEQ ID NO: 29754
  source 1..120: mol_type = other DNA

SEQ ID NO: 119865 - DNA, 120 bp, synthetic construct; identical to SEQ ID NO: 29755
  source 1..120: mol_type = other DNA

SEQ ID NO: 119866 - DNA, 120 bp, synthetic construct
  source 1..120: mol_type = other DNA
cagggaggcagaggctgcagtgagccaagatcattcctgggtgtcagagagagactccgtccctgcccgtcccccgcaaaaaaaaaaaaaaaaaaaaaaaaaaaaaaatatatatatata

SEQ ID NO: 119867 - DNA, 120 bp, synthetic construct
  source 1..120: mol_type = other DNA
cccctgacccccaagcagcctaactgggaggcaccccccagcaggggcagactgacacctcacacggccgggtactccaacagacctgcagctgagggtcctgtctgttacaaggaaaac

SEQ ID NO: 119868 - DNA, 120 bp, synthetic construct
  source 1..120: mol_type = other DNA
agaagcctcaggagccgatgcaatcaactggaagaaagggtatcagtgatggaagatgaaatgaataaaatgaagtgagaagggaagtttagagaaaaaagaataaaaagaaacgagcaa

SEQ ID NO: 119869 - DNA, 120 bp, synthetic construct
  source 1..120: mol_type = other DNA
ctttaaaccaacaaagatcaaaagagacaaagaaggccattacataatggtaaagggatcaattcaacaagaagagctaactatcctaaatatatatgcacccaatacaggagcaagcag

SEQ ID NO: 119870 - DNA, 120 bp, synthetic construct
  source 1..120: mol_type = other DNA
caagaaatggataaattcctcgacacatacactctcccaagactaaaccaggaagaagttgaatctctgaatagaccaataacaggatctgaaattgtggcaataatcaatagcttatca

SEQ ID NO: 119871 - DNA, 120 bp, synthetic construct
  source 1..120: mol_type = other DNA
aatggaagaactttccatgctcatgggtaggaagaatcaatatcatgaaaatggccatactgcccaaggtaatttatagattcaatgccatccccatcaagctaccaatgactttcttca

SEQ ID NO: 119872 - DNA, 120 bp, synthetic construct
  source 1..120: mol_type = other DNA
gttcaaccattgtggaagtcagtgtggcgattcctcagtgatctagaactagaaataccatttgacccagccatcccattactgggtatatacccaaaggactataaatcatgctgctat

SEQ ID NO: 119873 - DNA, 120 bp, synthetic construct; identical to SEQ ID NO: 23983
  source 1..120: mol_type = other DNA

SEQ ID NO: 119874 - DNA, 120 bp, synthetic construct; identical to SEQ ID NO: 12365
  source 1..120: mol_type = other DNA

SEQ ID NO: 119875 - DNA, 120 bp, synthetic construct
  source 1..120: mol_type = other DNA
ggcaactgttttttactggtgtgtgtgtgtgtgtgtgtgtgtgtgtgtgtgtgtgtatccgcatgtgtgtgtagacaaggtgagtttttttccacctctacatttttctcttccgattct

SEQ ID NO: 119876 - DNA, 120 bp, synthetic construct
  source 1..120: mol_type = other DNA
cctataatcccaggactttgggaggccgaggcaggcagatcacttgaagtcaggagttcaagtccagcccggccaacatggtgaaaccctgtctgtactaaaaatacaaaaattagccgg

SEQ ID NO: 119877 - DNA, 120 bp, synthetic construct; identical to SEQ ID NO: 12366
  source 1..120: mol_type = other DNA

SEQ ID NO: 119878 - DNA, 120 bp, synthetic construct; identical to SEQ ID NO: 12367
  source 1..120: mol_type = other DNA

SEQ ID NO: 119879 - DNA, 120 bp, synthetic construct; identical to SEQ ID NO: 12368
  source 1..120: mol_type = other DNA

SEQ ID NO: 119880 - DNA, 120 bp, synthetic construct; identical to SEQ ID NO: 24553
  source 1..120: mol_type = other DNA

SEQ ID NO: 119881 - DNA, 120 bp, synthetic construct; identical to SEQ ID NO: 24544
  source 1..120: mol_type = other DNA

SEQ ID NO: 119882 - DNA, 120 bp, synthetic construct; identical to SEQ ID NO: 5150
  source 1..120: mol_type = other DNA

SEQ ID NO: 119883 - DNA, 120 bp, synthetic construct; identical to SEQ ID NO: 24546
  source 1..120: mol_type = other DNA

SEQ ID NO: 119884 - DNA, 120 bp, synthetic construct; identical to SEQ ID NO: 24547
  source 1..120: mol_type = other DNA

SEQ ID NO: 119885 - DNA, 120 bp, synthetic construct; identical to SEQ ID NO: 24548
  source 1..120: mol_type = other DNA

SEQ ID NO: 119886 - DNA, 120 bp, synthetic construct
  source 1..120: mol_type = other DNA
tccctgaggaatcgccacactcacttccacaatggttgaactagtttacagtcccaccaacagtgtaaaagtgttcctatttctccacatcctctccagcacctgttgtttcctgacttt

SEQ ID NO: 119887 - DNA, 120 bp, synthetic construct
  source 1..120: mol_type = other DNA
tcatgccaaaatgtaaagaccatcgagactaggaagaaactgcatcaactaacgagcaaaatcaccagctaacatcataatgacaggatcaaatccacacataacaatattaactttaaa

SEQ ID NO: 119888 - DNA, 120 bp, synthetic construct; identical to SEQ ID NO: 24549
  source 1..120: mol_type = other DNA

SEQ ID NO: 119889 - DNA, 120 bp, synthetic construct
  source 1..120: mol_type = other DNA
attgcttgaacccaggagatggaggttgcagtgagcaaagactgagccactacactccagcctgggtgacagagcaagattctgtctcaataaaataaaataaaatgacgttcatatttt

SEQ ID NO: 119890 - DNA, 120 bp, synthetic construct; identical to SEQ ID NO: 24550
  source 1..120: mol_type = other DNA

SEQ ID NO: 119891 - DNA, 120 bp, synthetic construct; identical to SEQ ID NO: 24551
  source 1..120: mol_type = other DNA

SEQ ID NO: 119892 - DNA, 120 bp, synthetic construct; identical to SEQ ID NO: 24552
  source 1..120: mol_type = other DNA

SEQ ID NO: 119893 - DNA, 120 bp, synthetic construct
  source 1..120: mol_type = other DNA
tgttcgtgatttttgcacattgattttgtatcctgagactttgctgaagttgcttatcagcttaaggagattttgggctgagatgatggggttttctaaatatacaatcatgtcatctgc

SEQ ID NO: 119894 - DNA, 120 bp, synthetic construct; identical to SEQ ID NO: 33015
  source 1..120: mol_type = other DNA

SEQ ID NO: 119895 - DNA, 120 bp, synthetic construct
  source 1..120: mol_type = other DNA
aagtgagagtcgtgatggcagataaccttgtatatcttcccaggcactgatgggaatgactgcactaaagttttaccaaagtgtgctccagggaacactcattcttgggaatattaatat

SEQ ID NO: 119896 - DNA, 120 bp, synthetic construct; identical to SEQ ID NO: 14679
  source 1..120: mol_type = other DNA

SEQ ID NO: 119897 - DNA, 120 bp, synthetic construct; identical to SEQ ID NO: 33014
  source 1..120: mol_type = other DNA

SEQ ID NO: 119898 - DNA, 120 bp, synthetic construct
  source 1..120: mol_type = other DNA
cctgagcccaggagttcgaagctgcagtgagctatgacttagccactatactccagcctgggcaacagagtgagatgccattcttttaaaaaaaaagaaaaaaaaaaagaatgtagcctc

SEQ ID NO: 119899 - DNA, 120 bp, synthetic construct
  source 1..120: mol_type = other DNA
acttcttcctctttttctgccagcccaccaagagaccccaagggaaaagtgctttcacaattctgggttgaggagacctgtgaaatgacaggcatttgaacagaggagttgctttcaaaa

SEQ ID NO: 119900 - DNA, 120 bp, synthetic construct
  source 1..120: mol_type = other DNA
ttacaagaaaaaaacaaacaacaacaaccccatcagaaagtgggagaaggatatgaacagacacttctctaaagaagacatttatgtagccaaaagacacatgaaaaaatgcttatcatc

SEQ ID NO: 119901 - DNA, 120 bp, synthetic construct
  source 1..120: mol_type = other DNA
aggcagaaataacgaagttctctgaaaccaatgagaacaaagagacaaggtaccagaatctccgggacatgctaaagcacagttgagagggaaatttatagcactaaatgctcacatcag

SEQ ID NO: 119902 - DNA, 120 bp, synthetic construct; identical to SEQ ID NO: 22728
  source 1..120: mol_type = other DNA

SEQ ID NO: 119903 - DNA, 120 bp, synthetic construct
  source 1..120: mol_type = other DNA
caggagattcgcttgaacccgggaggcagaggttgtaatgagccgagatctcgtcactgcactccagcctgggggacagaacaagactccgtctcaaaaaaaaaaaaaaaaaccctccct

SEQ ID NO: 119904 - DNA, 120 bp, synthetic construct; identical to SEQ ID NO: 22722
  source 1..120: mol_type = other DNA

SEQ ID NO: 119905 - DNA, 120 bp, synthetic construct; identical to SEQ ID NO: 22723
  source 1..120: mol_type = other DNA

SEQ ID NO: 119906 - DNA, 120 bp, synthetic construct; identical to SEQ ID NO: 22724
  source 1..120: mol_type = other DNA

SEQ ID NO: 119907 - DNA, 120 bp, synthetic construct; identical to SEQ ID NO: 22725
  source 1..120: mol_type = other DNA

SEQ ID NO: 119908 - DNA, 120 bp, synthetic construct; identical to SEQ ID NO: 22726
  source 1..120: mol_type = other DNA

SEQ ID NO: 119909 - DNA, 120 bp, synthetic construct
  source 1..120: mol_type = other DNA
agattgcgccactacactccagcctggatgacagagcaagaccctgtctcaaaataaacaaacaaaacatgctattctgaaaaggggccacagctcaccagctgctgagaagacacaaaa

SEQ ID NO: 119910 - DNA, 120 bp, synthetic construct; identical to SEQ ID NO: 22727
  source 1..120: mol_type = other DNA

SEQ ID NO: 119911 - DNA, 120 bp, synthetic construct
  source 1..120: mol_type = other DNA
ggggcgccaagacgcccccgggctgcctcggggccaggcgttgacgcagcagaaattaccagctggaaaattcccctctcggaggtgccggggagggagcgcggcggcggcgggaggtgc

SEQ ID NO: 119912 - DNA, 120 bp, synthetic construct
  source 1..120: mol_type = other DNA
catttttatcagttttttttttttttaaatctcccacactttataaagactctcaatacagtctctggaatgtctatctgtctgtgctctgtaccctgagggcgccgccccgccccccat

SEQ ID NO: 119913 - DNA, 120 bp, synthetic construct
  source 1..120: mol_type = other DNA
tagtccaagccgcttgccacctgccggctgcaaacggcggagggactacgaagcccagaggtccctgcggccctgcccgcccacccggacaccccaccccttccccctcctttccgaagc

SEQ ID NO: 119914 - DNA, 120 bp, synthetic construct; identical to SEQ ID NO: 18993
  source 1..120: mol_type = other DNA

SEQ ID NO: 119915 - DNA, 120 bp, synthetic construct
  source 1..120: mol_type = other DNA
gaactagtttacagtcccaccaacagtgtaaaagtgttcctatttctccacatcctctccagcacctgttgtttcctgactttttaatgattgccattctaactggtgtgagatggattt

SEQ ID NO: 119916 - DNA, 120 bp, synthetic construct
  source 1..120: mol_type = other DNA
aacctcatacaaaaattaattcaagatggattaaagacttaaacattagacctaaaaccataaaaaccctagaagaaaacctaggcattaccattcaggacataggcatgggcaaggact

SEQ ID NO: 119917 - DNA, 120 bp, synthetic construct; identical to SEQ ID NO: 18994
  source 1..120: mol_type = other DNA

SEQ ID NO: 119918 - DNA, 120 bp, synthetic construct; identical to SEQ ID NO: 18995
  source 1..120: mol_type = other DNA

SEQ ID NO: 119919 - DNA, 120 bp, synthetic construct
  source 1..120: mol_type = other DNA
agatcctagaaatccagcccttctgccctccggaggcgcctttcccaacgtaaagtacaattttaaatttcagctcctgactaaaatcatgatccgcagtcaactgctagagaatctggg

SEQ ID NO: 119920 - DNA, 120 bp, synthetic construct
  source 1..120: mol_type = other DNA
atgcttgtcttagtccgtttctgttgctataacagaataccacagactgggtaatttataaagagcagaagtttatttggctcacagatctcatgccagcatctggcaaggatcatcgga

SEQ ID NO: 119921 - DNA, 120 bp, synthetic construct
  source 1..120: mol_type = other DNA
ttccagcctgggtgacagagcgagactctgtctcaaaaaaaaaaagaaaaaaaaagaaatggcccggcaaagctgttctttctgggggagaatttgcatccgtaaagaatctctattaac

SEQ ID NO: 119922 - DNA, 120 bp, synthetic construct
  source 1..120: mol_type = other DNA
ttcatgtgtcttttggccgcataaatgtcttcttttgagaagtgtctgttcatatcctttgcccactttttgatggggttgtttgtttttttcttgtaaatttgttggagttcattgtag

SEQ ID NO: 119923 - DNA, 120 bp, synthetic construct
  source 1..120: mol_type = other DNA
tcaaagtgctgggattacaggcatgagccaccacacccagccaagagtttgtatagtccagtgcaatgggagggacctgaaggggttagagcaagatagtattgtgatccagtgcatact

SEQ ID NO: 119924 - DNA, 120 bp, synthetic construct; identical to SEQ ID NO: 9363
  source 1..120: mol_type = other DNA

SEQ ID NO: 119925 - DNA, 120 bp, synthetic construct; identical to SEQ ID NO: 9364
  source 1..120: mol_type = other DNA

SEQ ID NO: 119926 - DNA, 120 bp, synthetic construct; identical to SEQ ID NO: 9365
  source 1..120: mol_type = other DNA

SEQ ID NO: 119927 - DNA, 120 bp, synthetic construct; identical to SEQ ID NO: 9366
  source 1..120: mol_type = other DNA

SEQ ID NO: 119928 - DNA, 120 bp, synthetic construct; identical to SEQ ID NO: 9367
  source 1..120: mol_type = other DNA

SEQ ID NO: 119929 - DNA, 120 bp, synthetic construct; identical to SEQ ID NO: 9368
  source 1..120: mol_type = other DNA

SEQ ID NO: 119930 - DNA, 120 bp, synthetic construct; identical to SEQ ID NO: 9369
  source 1..120: mol_type = other DNA

SEQ ID NO: 119931 - DNA, 120 bp, synthetic construct; identical to SEQ ID NO: 9370
  source 1..120: mol_type = other DNA

SEQ ID NO: 119932 - DNA, 120 bp, synthetic construct; identical to SEQ ID NO: 9371
  source 1..120: mol_type = other DNA

SEQ ID NO: 119933 - DNA, 120 bp, synthetic construct
  source 1..120: mol_type = other DNA
acgagttaatgagtgcagcacaccaacaacatggcacatgcatacatatataacaaacctacgcgttctgcacatgtaccctagaacttaaagtatagtaatatatatatatagttatat

SEQ ID NO: 119934 - DNA, 120 bp, synthetic construct
  source 1..120: mol_type = other DNA
accaaaaaagagcctgcattgccaagtcatcctgagccaaaagaacagagttggaggcatcaccctacctgacttccaacaatactacaaggctacagtaaccaaaacagcatggtactg

SEQ ID NO: 119935 - DNA, 120 bp, synthetic construct
  source 1..120: mol_type = other DNA
tcatcattctcagtaaactatcacaagaacaaaaaaccaaacaccgcatattctcactcataggtgggaattgaacaataagaacacatggacacaggaaggagaacatcacactccggg

SEQ ID NO: 119936 - DNA, 120 bp, synthetic construct; identical to SEQ ID NO: 34041
  source 1..120: mol_type = other DNA

SEQ ID NO: 119937 - DNA, 120 bp, synthetic construct
  source 1..120: mol_type = other DNA
ttcatgtaaccaaaagccacttgtaccccaaaagctattgaaataaaaaatatatatttttaggctgggcgtggtaactcacgcctgtaatcccaacactttgggaggctgaggagggta

SEQ ID NO: 119938 - DNA, 120 bp, synthetic construct
  source 1..120: mol_type = other DNA
ttttgtcaccaccaggccttccctaaaagagctactgaaggaagcattaaacatgggaaggaacaaatggtatgagccactgcaaaaacataccaaattgtaaagaccatcgaggctagg

SEQ ID NO: 119939 - DNA, 120 bp, synthetic construct
  source 1..120: mol_type = other DNA
tctggaaagtgaggagcgtctctgcctggccgccatcccatctaggaagcgaggagcgcctcttccccgctgccatcccatctaggaagtgaggagcgtctctgcccggccgcccatcgt

SEQ ID NO: 119940 - DNA, 120 bp, synthetic construct
  source 1..120: mol_type = other DNA
tctgcgagaaacacccaagaatgatcaataaaaaaaaaaaaaaaaaaaaattaaaaaaaaaaaaaaaagagacaaagaaggccattacataatggtaaagggatcaattcaacaagaaga

SEQ ID NO: 119941 - DNA, 120 bp, synthetic construct
  source 1..120: mol_type = other DNA
tagcacacaaacatggcccatgtatatatatgtaacaaacctgcacgttgtgcacatgtaccctaaaagcataataaaaaaaataaaataataaaaaaaaatttatactcaaataattca

SEQ ID NO: 119942 - DNA, 120 bp, synthetic construct
  source 1..120: mol_type = other DNA
ccaaatgtgattcctaaagtaagcatgcagttatgcatagcattcttcaaaccattagaggtttttcttgtttgtagaaacagaattgaggcagggtgtggtggctcacgcctgtaatcc

SEQ ID NO: 119943 - DNA, 120 bp, synthetic construct
  source 1..120: mol_type = other DNA
tgatgatgagcattttttcatgtgtcttttggctgcataaatgtcttcttttgagaagtgtctgttcatatccttcacccactttttgatggggttgtttgcttttttcttgtaaattta

SEQ ID NO: 119944 - DNA, 120 bp, synthetic construct
  source 1..120: mol_type = other DNA
gacatttgggttggttccaagtctttgctattgtgaatagtgccgcaataaacatacgtgtgattgtttatctagaaaaccccatcgtctcagcccaaaatctccttaagctgataagca

SEQ ID NO: 119945 - DNA, 120 bp, synthetic construct; identical to SEQ ID NO: 34038
  source 1..120: mol_type = other DNA

SEQ ID NO: 119946 - DNA, 120 bp, synthetic construct
  source 1..120: mol_type = other DNA
agatactcctgctcatttttggtgtccatttgcgtggaatatctttttccacccctttatcttaagtttatgtgaattcttacaggttaggggagtttcctgaaagtagcataaacttgg

SEQ ID NO: 119947 - DNA, 120 bp, synthetic construct
  source 1..120: mol_type = other DNA
aggaaacaacaggtgctggagaggatgtggagaaataggaacacttttacactgttggtgggactgtaaactagttcaaccattgtggaagtcaatgtggtgattcctcagggatctaca

SEQ ID NO: 119948 - DNA, 120 bp, synthetic construct
  source 1..120: mol_type = other DNA
tctcactaacagtgtacaacgtttccctttcctccatattgttgctggtatttgttattgcctgtcttttgaatataggccattttaactggggtgagattatgtcttattacagtttgg

SEQ ID NO: 119949 - DNA, 120 bp, synthetic construct
  source 1..120: mol_type = other DNA
cgtttgggtatatacccagtaatggaatggctgggtcaaatggtatttctagttctagatccctgaggaattgccacactgacttccacaatggttgaactagtttacagtcccaccaac

SEQ ID NO: 119950 - DNA, 120 bp, synthetic construct
  source 1..120: mol_type = other DNA
gtagtatagtttgaagtcaggtagtgtgatgcctccagctttgttcttttggcttaggattgacttggcaatgcgggctcttttttggttccatatgaactttaaagtatttttttctaa

SEQ ID NO: 119951 - DNA, 120 bp, synthetic construct
  source 1..120: mol_type = other DNA
ggctctgtttatatgctggactacatttattgatttgcgtatattgaaccagccttgcatcccagggatgaagcccacttgatcatggtggataagctttttgatgtgctgctggattcg

SEQ ID NO: 119952 - DNA, 120 bp, synthetic construct
  source 1..120: mol_type = other DNA
atgtagttgagcggctttgagtgagattcttaatcctgagttctagtttgattacactgtggtctgagagatagtttgttataatttctgttcttttacatttgctgaggagagctttac

SEQ ID NO: 119953 - DNA, 120 bp, synthetic construct
  source 1..120: mol_type = other DNA
agcttctgcacagcaacagaaacaatcagcagagttaacagacaacccgcagagtgggaaaaaatctttgcaatctgtacatctgacaaaggactaatatctacaatctacaaggaactc

SEQ ID NO: 119954 - DNA, 120 bp, synthetic construct; identical to SEQ ID NO: 69571
  source 1..120: mol_type = other DNA

SEQ ID NO: 119955 - DNA, 120 bp, synthetic construct
  source 1..120: mol_type = other DNA
gattcgttttgccagtattttattgaggatttttgcatcaatgttcatcaaggatattggtctaaaattctcttttttggttgtgtctctgcccggctttggtatcagaatgatgctggc

SEQ ID NO: 119956 - DNA, 120 bp, synthetic construct
  source 1..120: mol_type = other DNA
gagagatagtttgctataatttctgttcttttacatttgctgaggagagctttacttccaactatgtggtcaattttggaataggtgtggtgtggtgctgaaaaaaatgtatattctgtt

SEQ ID NO: 119957 - DNA, 120 bp, synthetic construct
  source 1..120: mol_type = other DNA
ggtatatacccaaaggactataaatcatgctgctataaagacacatgcacacgtatgtttattgcggcactattcacaatagcaaagacttggaaccaacccaaatgtccaacaatgata

SEQ ID NO: 119958 - DNA, 120 bp, synthetic construct; identical to SEQ ID NO: 34040
  source 1..120: mol_type = other DNA

SEQ ID NO: 119959 - DNA, 120 bp, synthetic construct
  source 1..120: mol_type = other DNA
aataagtatcatgaaaatggccatactgcctaaggtaatttgtagattccatgccatccccatcaagctaccaatgactttcttcacagaattggaaaaaactactttaaagttcatatg

SEQ ID NO: 119960 - DNA, 120 bp, synthetic construct
  source 1..120: mol_type = other DNA
acagtaaactagttcaaccattgtggaagtcagtgtggtgattcctctgggatctagaactagaaataccatttgacccagccatcccattactgggtatatacccaaaggactataaat

SEQ ID NO: 119961 - DNA, 120 bp, synthetic construct; identical to SEQ ID NO: 13698
  source 1..120: mol_type = other DNA

SEQ ID NO: 119962 - DNA, 120 bp, synthetic construct; identical to SEQ ID NO: 14566
  source 1..120: mol_type = other DNA

SEQ ID NO: 119963 - DNA, 120 bp, synthetic construct; identical to SEQ ID NO: 14567
  source 1..120: mol_type = other DNA

SEQ ID NO: 119964 - DNA, 120 bp, synthetic construct; identical to SEQ ID NO: 17075
  source 1..120: mol_type = other DNA

SEQ ID NO: 119965 - DNA, 120 bp, synthetic construct; identical to SEQ ID NO: 17076
  source 1..120: mol_type = other DNA

SEQ ID NO: 119966 - DNA, 120 bp, synthetic construct
  source 1..120: mol_type = other DNA
aagcgacaggcgtccccaatgtgaactgtgacaagctccaagagtggagctcaaatctgtcacggcactagagtggccggagtgcttccagctcgtggggtgccacagccttgaacccac

SEQ ID NO: 119967 - DNA, 120 bp, synthetic construct; identical to SEQ ID NO: 31915
  source 1..120: mol_type = other DNA

SEQ ID NO: 119968 - DNA, 120 bp, synthetic construct
  source 1..120: mol_type = other DNA
tatattttatgaatattgatgcaaaaatcctcagcataacattcagcaacacattaaaaggattacacatcaagggccaggtgcaatggctcacgcctataatcccagcactttgggagg

SEQ ID NO: 119969 - DNA, 120 bp, synthetic construct; identical to SEQ ID NO: 31916
  source 1..120: mol_type = other DNA

SEQ ID NO: 119970 - DNA, 120 bp, synthetic construct; identical to SEQ ID NO: 31917
  source 1..120: mol_type = other DNA

SEQ ID NO: 119971 - DNA, 120 bp, synthetic construct; identical to SEQ ID NO: 31918
  source 1..120: mol_type = other DNA

SEQ ID NO: 119972 - DNA, 120 bp, synthetic construct; identical to SEQ ID NO: 31919
  source 1..120: mol_type = other DNA

SEQ ID NO: 119973 - DNA, 120 bp, synthetic construct; identical to SEQ ID NO: 31920
  source 1..120: mol_type = other DNA

SEQ ID NO: 119974 - DNA, 120 bp, synthetic construct; identical to SEQ ID NO: 21316
  source 1..120: mol_type = other DNA

SEQ ID NO: 119975 - DNA, 120 bp, synthetic construct; identical to SEQ ID NO: 21317
  source 1..120: mol_type = other DNA

SEQ ID NO: 119976 - DNA, 120 bp, synthetic construct; identical to SEQ ID NO: 21318
  source 1..120: mol_type = other DNA

SEQ ID NO: 119977 - DNA, 120 bp, synthetic construct; identical to SEQ ID NO: 21319
  source 1..120: mol_type = other DNA

SEQ ID NO: 119978 - DNA, 120 bp, synthetic construct
  source 1..120: mol_type = other DNA
atcttccatggctggctacctatctctcttaaatgtcagcttcctcctaagggccttccctaaactcccagtctgctttttttttttttttttttttgagacggagtttcgctctgtcgc

SEQ ID NO: 119979 - DNA, 120 bp, synthetic construct
  source 1..120: mol_type = other DNA
tgggattacaggcatgagtcaccatgtgcggcccataatcatcattattatttttttattttattttattttttgagacggagtcttgctttgtcacccaggctggagtgcagtggcacg

SEQ ID NO: 119980 - DNA, 120 bp, synthetic construct
  source 1..120: mol_type = other DNA
tcctcccacctcagcctcccaaagtacaggaattacaggtctaagctaccatgcctggccacagtcatttaattaattatgtaagataattatgcaaaatgtgtttggggccatgtctaa

SEQ ID NO: 119981 - DNA, 120 bp, synthetic construct
  source 1..120: mol_type = other DNA
caggagcagtggctcatgcctgaaatcccagcactttggcaggccaaggtaggcggattatttgagctcaggagttgagaccagccttggcaacatggcgaaaccctgtctctataaaaa

SEQ ID NO: 119982 - DNA, 120 bp, synthetic construct
  source 1..120: mol_type = other DNA
aggctgcagtgagccatgatcacaccactgcactctaacctgcatgcagagtgagactctttctcaaagaaaaaaaaaatttagaggtgatggtagtaacaatattgttaccactactac

SEQ ID NO: 119983 - DNA, 120 bp, synthetic construct; identical to SEQ ID NO: 30104
  source 1..120: mol_type = other DNA

SEQ ID NO: 119984 - DNA, 120 bp, synthetic construct; identical to SEQ ID NO: 30105
  source 1..120: mol_type = other DNA

SEQ ID NO: 119985 - DNA, 120 bp, synthetic construct
  source 1..120: mol_type = other DNA
cgggccatgatgacgatggcggttttgtggaatagaaaagggggaaaggtggggaaatgatagagaaatcggattgttactgtgtctgtgtagaaagtagacatgggagacttcattttg

SEQ ID NO: 119986 - DNA, 120 bp, synthetic construct
  source 1..120: mol_type = other DNA
ttaggtatatctcctaatgccatagctccccactctccccaccccacaacagtccccagagtgtgatgttccccttcctgtgtccatgtgttctcattgttcaattcccacctatgagtg

SEQ ID NO: 119987 - DNA, 120 bp, synthetic construct
  source 1..120: mol_type = other DNA
atctatatctctgttttggtaccagtaccatgctgttttggttactgtagccttgaagtatagtttgaagtcaggtagtgtgatgcctccagctttgttcttttggcttaggattgactt

SEQ ID NO: 119988 - DNA, 120 bp, synthetic construct
  source 1..120: mol_type = other DNA
agccaaaagaacaaagctggaaccatcacgctacctgacttcaaactatactacaaggctacagtaaccaaaacagcatggtactggtaccaaaacagagatatagaccaatggaacaga

SEQ ID NO: 119989 - DNA, 120 bp, synthetic construct; identical to SEQ ID NO: 17042
  source 1..120: mol_type = other DNA

SEQ ID NO: 119990 - DNA, 120 bp, synthetic construct
  source 1..120: mol_type = other DNA
aagagttaaggtaccaatgcttctgaactatttaattagaaaataaaatggagcagctatgaagttgtttcttgcagactttaaacaatgacatcaactgacttgcattctaacacagat

SEQ ID NO: 119991 - DNA, 120 bp, synthetic construct
  source 1..120: mol_type = other DNA
agcgacaccagcagcttgctgcgcaccacctcgtccgtcaggttggtgaggctgcccaggtcggccgggttgttggccttgatctccgagtcgcgcagcgagtggtagtccttgcgggcc

SEQ ID NO: 119992 - DNA, 120 bp, synthetic construct; identical to SEQ ID NO: 19099
  source 1..120: mol_type = other DNA

SEQ ID NO: 119993 - DNA, 120 bp, synthetic construct; identical to SEQ ID NO: 19100
  source 1..120: mol_type = other DNA

SEQ ID NO: 119994 - DNA, 120 bp, synthetic construct; identical to SEQ ID NO: 25356
  source 1..120: mol_type = other DNA

SEQ ID NO: 119995 - DNA, 120 bp, synthetic construct
  source 1..120: mol_type = other DNA
tgatcacaactcactgctgcctcaaaattggctcaagcaatcctcctgcctccaccttcagaatagctggaactacagatgtgtgccatcatgcctgactaattttttttatcttatttt

SEQ ID NO: 119996 - DNA, 120 bp, synthetic construct
  source 1..120: mol_type = other DNA
gctttccatctttgttcatccaagagtgtttgcccttgttggaacatttttataatagtggctttaaagtcttggtcagataaatccatcatctgcattatttcagtgttggcatctgtt

SEQ ID NO: 119997 - DNA, 120 bp, synthetic construct; identical to SEQ ID NO: 32212
  source 1..120: mol_type = other DNA

SEQ ID NO: 119998 - DNA, 120 bp, synthetic construct
  source 1..120: mol_type = other DNA
acctacctttataagattgttatgagagttaaattagaaatacaggctgggcatagtggcttatgcctataattccagcactttgggaggccagggtggatcacttgaaatcaggagctt

SEQ ID NO: 119999 - DNA, 120 bp, synthetic construct
  source 1..120: mol_type = other DNA
cagcctcccaagtagctaggactacaggcatgagccaccatgcccagccatgattttctttctctagaaaagtctgttagtggggatttgaacattctttttgtattatacatattttct

SEQ ID NO: 120000 - DNA, 120 bp, synthetic construct; identical to SEQ ID NO: 32213
  source 1..120: mol_type = other DNA

SEQ ID NO: 120001 - DNA, 120 bp, synthetic construct
  source 1..120: mol_type = other DNA
ttgaacccaggaggtggaggttgcagtgagccaagaccgtgctactgcactccagcctgggcaaaatgagtgagactctgtctcaaaaaaaaaaaaaaaaaaaagtatatttcaaatctt

SEQ ID NO: 120002 - DNA, 120 bp, synthetic construct
  source 1..120: mol_type = other DNA
ggccaacatggagaaaccccgtctctactaaaaatacaaaattagccgggcacagtggcgggcgcctgtagtcccagctcctcgggaggctgaggcaggggaatcgcttgaacccaggag

SEQ ID NO: 120003 - DNA, 120 bp, synthetic construct
  source 1..120: mol_type = other DNA
tcaaatctttttctctttcttttaattttaattttaggttccgggatacatgtgcaggtttgttgtatagggaaactcgtttcatgggggtttgttgtgaagattatttcatcaaccagg

SEQ ID NO: 120004 - DNA, 120 bp, synthetic construct
  source 1..120: mol_type = other DNA
aagaaaccaccatcagagtgaacaggcaacctacagaatgggagaaaatttttgcaacctactcatctgacaaagggctaatacccagaatctacaatgaactccaacaaatttacaaga

SEQ ID NO: 120005 - DNA, 120 bp, synthetic construct
  source 1..120: mol_type = other DNA
ttggaagttctggccagggcaatcaggcaggagagggaaataacgggtattcaattaggaaaagaggaagtcaaattgtccctgtttgcagatgacatgattgtatatctagaaaacccc

SEQ ID NO: 120006 - DNA, 120 bp, synthetic construct
  source 1..120: mol_type = other DNA
tgaggatttctgcatcgatgttcatcaaggatattggtctaaaattctctttttttgttgtgtctctgtcaggctttggtatcaggatgatgctggcctcataaaatgagttaggcagga

SEQ ID NO: 120007 - DNA, 120 bp, synthetic construct
  source 1..120: mol_type = other DNA
tctatatctctgttttggtaccagtaccatgctgttttggttactgtagccttgtagtatagtttgaagtcaggtagcgtgatggttccagctttgttcttttggcttaggattgacttg

SEQ ID NO: 120008 - DNA, 120 bp, synthetic construct
  source 1..120: mol_type = other DNA
cttccacaatggttgaactagtttacagtcccagcaacagttcctatttctccacatcctctccagcacctgttgtttcctgactttttaatgatcgccattctaactggtgtgagatgg

SEQ ID NO: 120009 - DNA, 120 bp, synthetic construct
  source 1..120: mol_type = other DNA
ttatttttcctgatcctctccctcctcccaccttccaccctctagtaggccctgtgtcttttattcccttctacatgtccatgtgttctcatcatcaaatatttttctctaatcactttc

SEQ ID NO: 120010 - DNA, 120 bp, synthetic construct; identical to SEQ ID NO: 24164
  source 1..120: mol_type = other DNA

SEQ ID NO: 120011 - DNA, 120 bp, synthetic construct
  source 1..120: mol_type = other DNA
tacaaggaatgtgaaggacctcttcaaggagaattacaaaccactgctcaacaaaataaaagaggacgcaaataaatggaggaacattccatgctcatggataggaagaatcaatattgt

SEQ ID NO: 120012 - DNA, 120 bp, synthetic construct
  source 1..120: mol_type = other DNA
taggattgacttggcaatgcgggctcttctttggttccatatgaactttaaagtagttttctccaattctgtgaagaaagtcattggtagcttgatggggatgacattgaatctataaat

SEQ ID NO: 120013 - DNA, 120 bp, synthetic construct
  source 1..120: mol_type = other DNA
aagaggagctggtaccattccttctgaaactattccaatcaatagaaaaagagggaatcctccctaactcattttatgaggccagcatcatcctgataccaaagtgtggcagagacacaa

SEQ ID NO: 120014 - DNA, 120 bp, synthetic construct; identical to SEQ ID NO: 24165
  source 1..120: mol_type = other DNA

SEQ ID NO: 120015 - DNA, 120 bp, synthetic construct
  source 1..120: mol_type = other DNA
gatatctcatagtggttttgatttgcatttctctgatggccagtgatgatgagcattttttcatgtgttttttggctgcataaatgtcttcttttgagaagtgtctgttcatgtccttcg

SEQ ID NO: 120016 - DNA, 120 bp, synthetic construct
  source 1..120: mol_type = other DNA
atggaagaacagtacacgctcatgggtaggaagattcaatattgtgaaaatggccatactgcccagggtaatttatagattcaatgccatccccatcaagctaccaatgaatttcttcac

SEQ ID NO: 120017 - DNA, 120 bp, synthetic construct; identical to SEQ ID NO: 16536
  source 1..120: mol_type = other DNA

SEQ ID NO: 120018 - DNA, 120 bp, synthetic construct; identical to SEQ ID NO: 16537
  source 1..120: mol_type = other DNA

SEQ ID NO: 120019 - DNA, 120 bp, synthetic construct
  source 1..120: mol_type = other DNA
aacttacccgtgccgtcgaatccccatcctggtttactgaagtgcagaagtgacataagtgcttgtgaatcagcagggagctcttggctttgactctggtgggacagaaaggaggagaga

SEQ ID NO: 120020 - DNA, 120 bp, synthetic construct; identical to SEQ ID NO: 26157
  source 1..120: mol_type = other DNA

SEQ ID NO: 120021 - DNA, 120 bp, synthetic construct; identical to SEQ ID NO: 1344
  source 1..120: mol_type = other DNA

SEQ ID NO: 120022 - DNA, 120 bp, synthetic construct
  source 1..120: mol_type = other DNA
tctattccacaaaaccgccattgtcatcatggcccgttctcagtgagctgttgggtacaccttccagacggggtggtggccgggcagaggggctcctcacttcccagaaggggcggccgg

SEQ ID NO: 120023 - DNA, 120 bp, synthetic construct
  source 1..120: mol_type = other DNA
tgagagatagcacaactgataccacaggaatacaaaagatcatttaaggccaatatgaacaccgttatgcacacaaactagaaaatccagaggagatggataacttcctggaaatataca

SEQ ID NO: 120024 - DNA, 120 bp, synthetic construct
  source 1..120: mol_type = other DNA
cgcaaataaatggaaacacatcccaggctcatagatgggtagaattactattgtgaaaatgaccatactgccaaagcaatccacaaattcaatgcaattcccctcaaagcagaatcatct

SEQ ID NO: 120025 - DNA, 120 bp, synthetic construct
  source 1..120: mol_type = other DNA
aggcttcagcgagccaagatcatgcccctgcactccagcctgggtgacagagtgagactctgtctcaaacaaacaaacaaacaaacaacaaaaccaatcccatcaaaaagtgggcaacat

SEQ ID NO: 120026 - DNA, 120 bp, synthetic construct
  source 1..120: mol_type = other DNA
accaaacaccttgttccccaaaactattgaaataaaataaaaataaaaattataactaggactggtgcggtggctcacgtctgtaatcccagcactttgggaggccaaggcaggcagatc

SEQ ID NO: 120027 - DNA, 120 bp, synthetic construct
  source 1..120: mol_type = other DNA
ccagtgctcccatttacttagcaccttgactcaggaatgggttggactctcagagcttacaatgtctatgaaacactattagagatcataagaaatacattcagactcacaactacccac

SEQ ID NO: 120028 - DNA, 120 bp, synthetic construct
  source 1..120: mol_type = other DNA
gatgctcaggctggtcttgaactcctggcctcaagcaatcctcttgcttggcctcccaaagcactgagattataggtgcttcccattgtgtccagccctcttgcccatttgaaaaactga

SEQ ID NO: 120029 - DNA, 120 bp, synthetic construct
  source 1..120: mol_type = other DNA
ttatagtaacatttaaagtctggttgtgtaagttctccaattttattttttctcaaaatcatttggctagtacagtagcctaggtcttttgaatttgcatatacattttaggaccacctt

SEQ ID NO: 120030 - DNA, 120 bp, synthetic construct; identical to SEQ ID NO: 2560
  source 1..120: mol_type = other DNA

SEQ ID NO: 120031 - DNA, 120 bp, synthetic construct; identical to SEQ ID NO: 2561
  source 1..120: mol_type = other DNA

SEQ ID NO: 120032 - DNA, 120 bp, synthetic construct; identical to SEQ ID NO: 26191
  source 1..120: mol_type = other DNA

SEQ ID NO: 120033 - DNA, 120 bp, synthetic construct
  source 1..120: mol_type = other DNA
tccttttgaaagataacccatcttttatcactagatattttaaaaaatattttctttggccaggtgtggtggctcacacctgtaatcccagcactttgggagtccgaggcgggtggatca

SEQ ID NO: 120034 - DNA, 120 bp, synthetic construct; identical to SEQ ID NO: 26192
  source 1..120: mol_type = other DNA

SEQ ID NO: 120035 - DNA, 120 bp, synthetic construct; identical to SEQ ID NO: 26193
  source 1..120: mol_type = other DNA

SEQ ID NO: 120036 - DNA, 120 bp, synthetic construct; identical to SEQ ID NO: 26194
  source 1..120: mol_type = other DNA

SEQ ID NO: 120037 - DNA, 120 bp, synthetic construct
  source 1..120: mol_type = other DNA
tcaatctatacattgtttactgcctagaaaataaagatgaattgatactctcacagctcggctgccatgcactacttctaaagatggacacacggttcctgttctggggttactgttgac

SEQ ID NO: 120038 - DNA, 120 bp, synthetic construct; identical to SEQ ID NO: 26195
  source 1..120: mol_type = other DNA

SEQ ID NO: 120039 - DNA, 120 bp, synthetic construct; identical to SEQ ID NO: 26149
  source 1..120: mol_type = other DNA

SEQ ID NO: 120040 - DNA, 120 bp, synthetic construct; identical to SEQ ID NO: 26150
  source 1..120: mol_type = other DNA

SEQ ID NO: 120041 - DNA, 120 bp, synthetic construct; identical to SEQ ID NO: 26151
  source 1..120: mol_type = other DNA

SEQ ID NO: 120042 - DNA, 120 bp, synthetic construct; identical to SEQ ID NO: 26152
  source 1..120: mol_type = other DNA

SEQ ID NO: 120043 - DNA, 120 bp, synthetic construct; identical to SEQ ID NO: 26153
  source 1..120: mol_type = other DNA

SEQ ID NO: 120044 - DNA, 120 bp, synthetic construct; identical to SEQ ID NO: 26196
  source 1..120: mol_type = other DNA

SEQ ID NO: 120045 - DNA, 120 bp, synthetic construct
  source 1..120: mol_type = other DNA
ggcaaaggttgtagtgacctgagattgtgccactgcactgcagcctgggtgacagagtaagaccctgtctcaaaaaaataaaaaaataaaaaaataaatgttcctccatgatccagggca

SEQ ID NO: 120046 - DNA, 120 bp, synthetic construct; identical to SEQ ID NO: 26197
  source 1..120: mol_type = other DNA

SEQ ID NO: 120047 - DNA, 120 bp, synthetic construct
  source 1..120: mol_type = other DNA
tatgtgagaaaatacatttcttgttccaacgccccatgtgtggttcctgcttgtggaagctctagcaaagaaaaacacctgctatgtgtgcacacacatgttgttctcagtgctcttggt

SEQ ID NO: 120048 - DNA, 120 bp, synthetic construct; identical to SEQ ID NO: 26198
  source 1..120: mol_type = other DNA

SEQ ID NO: 120049 - DNA, 120 bp, synthetic construct
  source 1..120: mol_type = other DNA
ccaaactcttcaccaacacttgatattgatcacctttttttatttatattttttagaggcagggtcttgctatgttgcccatagtggtctcaaactcctggcctcaagggatcctcctgc

SEQ ID NO: 120050 - DNA, 120 bp, synthetic construct; identical to SEQ ID NO: 26199
  source 1..120: mol_type = other DNA

SEQ ID NO: 120051 - DNA, 120 bp, synthetic construct; identical to SEQ ID NO: 26204
  source 1..120: mol_type = other DNA

SEQ ID NO: 120052 - DNA, 120 bp, synthetic construct; identical to SEQ ID NO: 26166
  source 1..120: mol_type = other DNA

SEQ ID NO: 120053 - DNA, 120 bp, synthetic construct; identical to SEQ ID NO: 26205
  source 1..120: mol_type = other DNA

SEQ ID NO: 120054 - DNA, 120 bp, synthetic construct; identical to SEQ ID NO: 26206
  source 1..120: mol_type = other DNA

SEQ ID NO: 120055 - DNA, 120 bp, synthetic construct; identical to SEQ ID NO: 26207
  source 1..120: mol_type = other DNA

SEQ ID NO: 120056 - DNA, 120 bp, synthetic construct
  source 1..120: mol_type = other DNA
ggacacgcagggcatctgaggcaggggcgggggcatgcagggcaggtggggggtgcagaggcaggggcagggacacgcagggcatctggggcaggggtgggggcatgcagggcaggtggg

SEQ ID NO: 120057 - DNA, 120 bp, synthetic construct
  source 1..120: mol_type = other DNA
ctgccatgatgatattttttttaaagtatcctttaacctcctttaatcctttccattgtattatgttcacctaagcttgtttaaatccctttttctattttcaactggaggccagagcat

SEQ ID NO: 120058 - DNA, 120 bp, synthetic construct; identical to SEQ ID NO: 26208
  source 1..120: mol_type = other DNA

SEQ ID NO: 120059 - DNA, 120 bp, synthetic construct; identical to SEQ ID NO: 26209
  source 1..120: mol_type = other DNA

SEQ ID NO: 120060 - DNA, 120 bp, synthetic construct; identical to SEQ ID NO: 26172
  source 1..120: mol_type = other DNA

SEQ ID NO: 120061 - DNA, 120 bp, synthetic construct; identical to SEQ ID NO: 26210
  source 1..120: mol_type = other DNA

SEQ ID NO: 120062 - DNA, 120 bp, synthetic construct; identical to SEQ ID NO: 26182
  source 1..120: mol_type = other DNA

SEQ ID NO: 120063 - DNA, 120 bp, synthetic construct; identical to SEQ ID NO: 26183
  source 1..120: mol_type = other DNA

SEQ ID NO: 120064 - DNA, 120 bp, synthetic construct; identical to SEQ ID NO: 26156
  source 1..120: mol_type = other DNA

SEQ ID NO: 120065 - DNA, 120 bp, synthetic construct; identical to SEQ ID NO: 26157
  source 1..120: mol_type = other DNA

SEQ ID NO: 120066 - DNA, 120 bp, synthetic construct; identical to SEQ ID NO: 1344
  source 1..120: mol_type = other DNA

SEQ ID NO: 120067 - DNA, 120 bp, synthetic construct; identical to SEQ ID NO: 26158
  source 1..120: mol_type = other DNA

SEQ ID NO: 120068 - DNA, 120 bp, synthetic construct
  source 1..120: mol_type = other DNA
tcatcaaaatcagcacagaagggacatacctcaaggtaataaaagccctctatgacaaacccacagccaacattatactgaatggggaaaagttgaaaacattgcccctcagaactggaa

SEQ ID NO: 120069 - DNA, 120 bp, synthetic construct; identical to SEQ ID NO: 26159
  source 1..120: mol_type = other DNA

SEQ ID NO: 120070 - DNA, 120 bp, synthetic construct; identical to SEQ ID NO: 26160
  source 1..120: mol_type = other DNA

SEQ ID NO: 120071 - DNA, 120 bp, synthetic construct; identical to SEQ ID NO: 26161
  source 1..120: mol_type = other DNA

SEQ ID NO: 120072 - DNA, 120 bp, synthetic construct; identical to SEQ ID NO: 26162
  source 1..120: mol_type = other DNA

SEQ ID NO: 120073 - DNA, 120 bp, synthetic construct; identical to SEQ ID NO: 26163
  source 1..120: mol_type = other DNA

SEQ ID NO: 120074 - DNA, 120 bp, synthetic construct; identical to SEQ ID NO: 26164
  source 1..120: mol_type = other DNA

SEQ ID NO: 120075 - DNA, 120 bp, synthetic construct
  source 1..120: mol_type = other DNA
gtttcaccacttcactccaccctgggcaacagagcgagactctgtctcaaaaaaaaaaaaagatgcaaaaagcacatttcaactttggaagatgtatagtgcagtatagaaatgtccagg

SEQ ID NO: 120076 - DNA, 120 bp, synthetic construct; identical to SEQ ID NO: 26175
  source 1..120: mol_type = other DNA

SEQ ID NO: 120077 - DNA, 120 bp, synthetic construct; identical to SEQ ID NO: 26176
  source 1..120: mol_type = other DNA

SEQ ID NO: 120078 - DNA, 120 bp, synthetic construct; identical to SEQ ID NO: 26177
  source 1..120: mol_type = other DNA

SEQ ID NO: 120079 - DNA, 120 bp, synthetic construct; identical to SEQ ID NO: 26178
  source 1..120: mol_type = other DNA

SEQ ID NO: 120080 - DNA, 120 bp, synthetic construct; identical to SEQ ID NO: 26179
  source 1..120: mol_type = other DNA

SEQ ID NO: 120081 - DNA, 120 bp, synthetic construct; identical to SEQ ID NO: 26180
  source 1..120: mol_type = other DNA

SEQ ID NO: 120082 - DNA, 120 bp, synthetic construct; identical to SEQ ID NO: 26181
  source 1..120: mol_type = other DNA

SEQ ID NO: 120083 - DNA, 120 bp, synthetic construct; identical to SEQ ID NO: 26184
  source 1..120: mol_type = other DNA

SEQ ID NO: 120084 - DNA, 120 bp, synthetic construct; identical to SEQ ID NO: 26185
  source 1..120: mol_type = other DNA

SEQ ID NO: 120085 - DNA, 120 bp, synthetic construct; identical to SEQ ID NO: 26186
  source 1..120: mol_type = other DNA

SEQ ID NO: 120086 - DNA, 120 bp, synthetic construct; identical to SEQ ID NO: 26187
  source 1..120: mol_type = other DNA

SEQ ID NO: 120087 - DNA, 120 bp, synthetic construct; identical to SEQ ID NO: 26188
  source 1..120: mol_type = other DNA

SEQ ID NO: 120088 - DNA, 120 bp, synthetic construct; identical to SEQ ID NO: 26189
  source 1..120: mol_type = other DNA

SEQ ID NO: 120089 - DNA, 120 bp, synthetic construct; identical to SEQ ID NO: 26190
  source 1..120: mol_type = other DNA

SEQ ID NO: 120090 - DNA, 120 bp, synthetic construct
  source 1..120: mol_type = other DNA
tctcagtactgtgctcccatttcccagcactatgctcccatttcccaggactgtgagcttccatttcccagtactgtgctcccatttcccaatgctatgctccatttcccagtgctgtga

SEQ ID NO: 120091 - DNA, 120 bp, synthetic construct
  source 1..120: mol_type = other DNA
tatactcctatttcccagtgccatgtgcttccatttcccagtactgtgctcatatttcccagtactgtgctcccatttcccaaaactgtgctctcatttcctagcactgtgctcccattt

SEQ ID NO: 120092 - DNA, 120 bp, synthetic construct; identical to SEQ ID NO: 120033
  source 1..120: mol_type = other DNA

SEQ ID NO: 120093 - DNA, 120 bp, synthetic construct; identical to SEQ ID NO: 26192
  source 1..120: mol_type = other DNA

SEQ ID NO: 120094 - DNA, 120 bp, synthetic construct; identical to SEQ ID NO: 26193
  source 1..120: mol_type = other DNA

SEQ ID NO: 120095 - DNA, 120 bp, synthetic construct; identical to SEQ ID NO: 26194
  source 1..120: mol_type = other DNA

SEQ ID NO: 120096 - DNA, 120 bp, synthetic construct; identical to SEQ ID NO: 120037
  source 1..120: mol_type = other DNA

SEQ ID NO: 120097 - DNA, 120 bp, synthetic construct
  source 1..120: mol_type = other DNA
gtgggaggatcatgtgagaccaggagttcaagtccagcctggcaacatactgaaaccctatttccacaaaaaataatttaaaattagccaagtgtggtgatgtgtgcctgtagtcctagt

SEQ ID NO: 120098 - DNA, 120 bp, synthetic construct; identical to SEQ ID NO: 26148
  source 1..120: mol_type = other DNA

SEQ ID NO: 120099 - DNA, 120 bp, synthetic construct; identical to SEQ ID NO: 26149
  source 1..120: mol_type = other DNA

SEQ ID NO: 120100 - DNA, 120 bp, synthetic construct; identical to SEQ ID NO: 26150
  source 1..120: mol_type = other DNA

SEQ ID NO: 120101 - DNA, 120 bp, synthetic construct; identical to SEQ ID NO: 26151
  source 1..120: mol_type = other DNA

SEQ ID NO: 120102 - DNA, 120 bp, synthetic construct; identical to SEQ ID NO: 26152
  source 1..120: mol_type = other DNA

SEQ ID NO: 120103 - DNA, 120 bp, synthetic construct; identical to SEQ ID NO: 26153
  source 1..120: mol_type = other DNA

SEQ ID NO: 120104 - DNA, 120 bp, synthetic construct
  source 1..120: mol_type = other DNA
tatgaacttcacgttgcaaaagacacgataaacacaaaattttaaaagacagactgaaagaaatacgttggaaacacacagatcagagaattactatccctaacgtgcagagagcactta

SEQ ID NO: 120105 - DNA, 120 bp, synthetic construct
  source 1..120: mol_type = other DNA
caagaatccaagtggcaaaggttgtagtgagctgagattgtgccactgcactgcagcctgggtgacagagaaagaccctgtctcaaaaaaaaaaaaaaatgttgctccatgatccagggc

SEQ ID NO: 120106 - DNA, 120 bp, synthetic construct; identical to SEQ ID NO: 26197
  source 1..120: mol_type = other DNA

SEQ ID NO: 120107 - DNA, 120 bp, synthetic construct
  source 1..120: mol_type = other DNA
atttcttgttgcaacaccccatccatggttcctgcttgtggaagctctagcaaagaaaaacacctgctatgtgtgcacacacatgttgttctcagtgctcttgggtaagaacctgggagt

SEQ ID NO: 120108 - DNA, 120 bp, synthetic construct
  source 1..120: mol_type = other DNA
agctgctgcagcacagtcattacaaacccttccatgtctccccattgcctcaccttggcaccttccatttaggccaaacaccagaaatgtaaagaagggcttgtttctggagtttccagt

SEQ ID NO: 120109 - DNA, 120 bp, synthetic construct; identical to SEQ ID NO: 26165
  source 1..120: mol_type = other DNA

SEQ ID NO: 120110 - DNA, 120 bp, synthetic construct; identical to SEQ ID NO: 26166
  source 1..120: mol_type = other DNA

SEQ ID NO: 120111 - DNA, 120 bp, synthetic construct; identical to SEQ ID NO: 26167
  source 1..120: mol_type = other DNA

SEQ ID NO: 120112 - DNA, 120 bp, synthetic construct; identical to SEQ ID NO: 26168
  source 1..120: mol_type = other DNA

SEQ ID NO: 120113 - DNA, 120 bp, synthetic construct
  source 1..120: mol_type = other DNA
cagcgcaccgcagcctacagcccagcaccctcagcgctgcctccactctccctccccatgggctgctcctgcaggatgggcacccccaccctcccacaactacatggccccacaggatgg

SEQ ID NO: 120114 - DNA, 120 bp, synthetic construct; identical to SEQ ID NO: 26169
  source 1..120: mol_type = other DNA

SEQ ID NO: 120115 - DNA, 120 bp, synthetic construct
  source 1..120: mol_type = other DNA
ctggataatccaggggtgacgggtggctccaggcatgagcggctccctgactgctgctccctcatactgccttccctctcacagcttaggtttcccaagcagcagcccctccaggcagcg

SEQ ID NO: 120116 - DNA, 120 bp, synthetic construct; identical to SEQ ID NO: 26170
  source 1..120: mol_type = other DNA

SEQ ID NO: 120117 - DNA, 120 bp, synthetic construct; identical to SEQ ID NO: 26171
  source 1..120: mol_type = other DNA

SEQ ID NO: 120118 - DNA, 120 bp, synthetic construct; identical to SEQ ID NO: 26172
  source 1..120: mol_type = other DNA

SEQ ID NO: 120119 - DNA, 120 bp, synthetic construct; identical to SEQ ID NO: 26173
  source 1..120: mol_type = other DNA

SEQ ID NO: 120120 - DNA, 120 bp, synthetic construct; identical to SEQ ID NO: 26174
  source 1..120: mol_type = other DNA

SEQ ID NO: 120121 - DNA, 120 bp, synthetic construct
  source 1..120: mol_type = other DNA
cagataagggaataaaagcaggctgctcaagccagtagcagcaaactgcttgggttctcttccacattgtggaagttttgttcttttgctctttgcaatacatcttgctgctgctcactc

SEQ ID NO: 120122 - DNA, 120 bp, synthetic construct
  source 1..120: mol_type = other DNA
caacagaggaagaccccctcccaataaataaatacatcttttaaaaaaagtggtaggagccaagatggccgaataggaacagctctggtctacagctcccagcgcgagcgacgcagaaga

SEQ ID NO: 120123 - DNA, 120 bp, synthetic construct
  source 1..120: mol_type = other DNA
agataaaaccacaaagatggggaaaaaacagagcagaaaaactggaaactctgaaaagcagagcgcctctcctcctccaaaggaacgcagttcctcaccagcaacggaacaaagctggac

SEQ ID NO: 120124 - DNA, 120 bp, synthetic construct
  source 1..120: mol_type = other DNA
ctgaaagcgctaaacatggaaaggaacaacagataccagccgctgcaaaatcatgccaaaatgtaaagaccatcgagactaggaagaaactgcatgaactaacgagcaaaataaccagct

SEQ ID NO: 120125 - DNA, 120 bp, synthetic construct
  source 1..120: mol_type = other DNA
tggaaactgaacaacctgctcctgaatgactattgggtacataacaaaatgaaggcagaaataaagatgttctttgaaaccaacgagaacaaagacacaacataccagaatctctgggac

SEQ ID NO: 120126 - DNA, 120 bp, synthetic construct
  source 1..120: mol_type = other DNA
tggttcaatatacgcaaatcaataaatgtaatccagcatataaacagaaccaaagacaaaaaccacatgattatctcaatagatgcagaaaaggcctttgagaaaattcaacaacccttc

SEQ ID NO: 120127 - DNA, 120 bp, synthetic construct
  source 1..120: mol_type = other DNA
cagcatggtactggtaccaaaacagagatatagatcaatggaacagaacagagccctcagaaataacgccgcatatctacaactatctgatctttgacaaacctgagaaaaacaagcaat

SEQ ID NO: 120128 - DNA, 120 bp, synthetic construct
  source 1..120: mol_type = other DNA
gttcacgtcctttgtggggacatggatgaaatcggaaatcatcattctcagtaaactattgcaagaacaaaaaaccaaacactgcatattctcactcataggtgggaattgaacaatgag

SEQ ID NO: 120129 - DNA, 120 bp, synthetic construct; identical to SEQ ID NO: 28453
  source 1..120: mol_type = other DNA

SEQ ID NO: 120130 - DNA, 120 bp, synthetic construct; identical to SEQ ID NO: 28454
  source 1..120: mol_type = other DNA

SEQ ID NO: 120131 - DNA, 120 bp, synthetic construct; identical to SEQ ID NO: 28455
  source 1..120: mol_type = other DNA

SEQ ID NO: 120132 - DNA, 120 bp, synthetic construct; identical to SEQ ID NO: 28456
  source 1..120: mol_type = other DNA

SEQ ID NO: 120133 - DNA, 120 bp, synthetic construct; identical to SEQ ID NO: 28457
  source 1..120: mol_type = other DNA

SEQ ID NO: 120134 - DNA, 120 bp, synthetic construct
  source 1..120: mol_type = other DNA
agtgctgggattacaggcctgagccaccgcgccaagcccctgtaaatatctgttaagtctatttgttctagtgtgtagtttaagtctactgtttctttgttgtttctttgttgactttct

SEQ ID NO: 120135 - DNA, 120 bp, synthetic construct
  source 1..120: mol_type = other DNA
ataaaaaccctacaagaaaacctaggcaataacattcaggacataggcatggtcaaagacctcatgtctaaaacaccaaaagcaatggcacaaaagccaaaattgacaaatgggatctaa

SEQ ID NO: 120136 - DNA, 120 bp, synthetic construct
  source 1..120: mol_type = other DNA
aacatggcacatgtatacatatgtagcaaacctgcacgttatgcacatgtaccgtacaacttaaagtataataaaaaaagaaaaaagcaacactgtatatatatatatatatatatatat

SEQ ID NO: 120137 - DNA, 120 bp, synthetic construct; identical to SEQ ID NO: 34241
  source 1..120: mol_type = other DNA

SEQ ID NO: 120138 - DNA, 120 bp, synthetic construct; identical to SEQ ID NO: 34242
  source 1..120: mol_type = other DNA

SEQ ID NO: 120139 - DNA, 120 bp, synthetic construct
  source 1..120: mol_type = other DNA
aagaatgcttgtgatttttgtacattgattttgtatcctgaggctttgctgaagcttatgaaaaaatgctcaccatcactggccatcagaaaaatgcaaaacaaaaccacaatgagatac

SEQ ID NO: 120140 - DNA, 120 bp, synthetic construct; identical to SEQ ID NO: 34243
  source 1..120: mol_type = other DNA

SEQ ID NO: 120141 - DNA, 120 bp, synthetic construct
  source 1..120: mol_type = other DNA
cgcaataaacatacgtgtgcatgtgtctttatagcagcatgatttatagtcatttgggtatatacccagtaatgggatggctgggtcaaatggtatttctagttctagatacctgaggaa

SEQ ID NO: 120142 - DNA, 120 bp, synthetic construct
  source 1..120: mol_type = other DNA
accctttatttccttctcctgcctgattgccctggccagaacttccaacactatgttgaataggagcggtgagagagggcatccctgtcttgtgccagttttcaaagggaatgcttccag

SEQ ID NO: 120143 - DNA, 120 bp, synthetic construct
  source 1..120: mol_type = other DNA
acctaggcattaccattcaggacataggcgtgggcaaggacttcatgtctcttcggaaaatttctacctttcaagtagaattatatcatagctatttttattttttaatctcagaatgga

SEQ ID NO: 120144 - DNA, 120 bp, synthetic construct
  source 1..120: mol_type = other DNA
agtgtaaactagttcaaccattgtggcagacagtgtggtgattcctcaaggatctagaactagaaatactaattgacccagagatcccattactgggaatatacccaaaggattataaat

SEQ ID NO: 120145 - DNA, 120 bp, synthetic construct; identical to SEQ ID NO: 34244
  source 1..120: mol_type = other DNA

SEQ ID NO: 120146 - DNA, 120 bp, synthetic construct
  source 1..120: mol_type = other DNA
tgtagccttactcacctctattcccatcgctcaaagaatccaaaccgcctagcacacagtaggcccccaggaaggacagggaccactgagctcccggaggaggcgagattggagcctctt

SEQ ID NO: 120147 - DNA, 120 bp, synthetic construct; identical to SEQ ID NO: 31367
  source 1..120: mol_type = other DNA

SEQ ID NO: 120148 - DNA, 120 bp, synthetic construct; identical to SEQ ID NO: 13553
  source 1..120: mol_type = other DNA

SEQ ID NO: 120149 - DNA, 120 bp, synthetic construct; identical to SEQ ID NO: 13554
  source 1..120: mol_type = other DNA

SEQ ID NO: 120150 - DNA, 120 bp, synthetic construct; identical to SEQ ID NO: 13555
  source 1..120: mol_type = other DNA

SEQ ID NO: 120151 - DNA, 120 bp, synthetic construct
  source 1..120: mol_type = other DNA
ccgtctgaaaagtgaggagcccctccgcccggcagccgccccgtctgggaggtgaggagcctctccgcccggcagccaccccatctgggaggtgaggagcgtctctgcccggcagccacc

SEQ ID NO: 120152 - DNA, 120 bp, synthetic construct; identical to SEQ ID NO: 13556
  source 1..120: mol_type = other DNA

SEQ ID NO: 120153 - DNA, 120 bp, synthetic construct
  source 1..120: mol_type = other DNA
cacacactgttgggaatattgtaccgaaagacttactcaatgcatcattgccacaaaccttcaactagttaaaacacacacaaacacacacacacacacacacacacactatctacaaag

SEQ ID NO: 120154 - DNA, 120 bp, synthetic construct; identical to SEQ ID NO: 32091
  source 1..120: mol_type = other DNA

SEQ ID NO: 120155 - DNA, 120 bp, synthetic construct; identical to SEQ ID NO: 32092
  source 1..120: mol_type = other DNA

SEQ ID NO: 120156 - DNA, 120 bp, synthetic construct
  source 1..120: mol_type = other DNA
catcaaagaccaaaagtagataaaatcacaaagatggggaaaaaacagaacagaaaaactggaaactctaaaatgcagagcgtctctcctcctccaaaggaacgcagttcctcaccagca

SEQ ID NO: 120157 - DNA, 120 bp, synthetic construct
  source 1..120: mol_type = other DNA
atttcatatccagccaaactaagcttcataagtgaaggagaaataaaatcctttacagacaagcaaatgctgaccaattttgtcaccaccaggcctgccctaaaagagctcctgaaggaa

SEQ ID NO: 120158 - DNA, 120 bp, synthetic construct
  source 1..120: mol_type = other DNA
tcaaactagaactcaggattaagaatcccactcaaagccgctcaactacatggaaactgaacaacctgctcctgaatgactactgggtacataacgaaatgaaggcagaaataaagatgt

SEQ ID NO: 120159 - DNA, 120 bp, synthetic construct
  source 1..120: mol_type = other DNA
aggcctttgacaaaattcaacaacccttcatgctaaaaactctcaataaattaggtattgatgggacgtatttcaaaataataagagctatctatgacaaacccacagccaatatcatac

SEQ ID NO: 120160 - DNA, 120 bp, synthetic construct
  source 1..120: mol_type = other DNA
agcatggtactggtaccaaaacagagatatagaccaatggaacagaacagagccctcagaaataatgccgcataactacaactatctgatctttgacaaacctgagaaaaacaagcaatg

SEQ ID NO: 120161 - DNA, 120 bp, synthetic construct
  source 1..120: mol_type = other DNA
ggaatactatgcagccataaaaaatgatgagttcatgtcctttgtagggacgtggatgaaattggaaatcatcattctcagtaaactatcgcaagaacaaaaaaccaaacactccatatt

SEQ ID NO: 120162 - DNA, 120 bp, synthetic construct
  source 1..120: mol_type = other DNA
cagaaccaaagacaaaaaccacacggttatctcaatagatgcagaaaaggcctttgacaaaattcaacagcccttcatgctataaactcttaataaattaggtattgaagggacgtacct

SEQ ID NO: 120163 - DNA, 120 bp, synthetic construct
  source 1..120: mol_type = other DNA
aatggtgttgggaaaactggatagccatatgtagaaagctgaaactggatcccttccttaagccttatacaaaaattaattcaagatggattaaagacttacatgttagacctaaaacca

SEQ ID NO: 120164 - DNA, 120 bp, synthetic construct; identical to SEQ ID NO: 35275
  source 1..120: mol_type = other DNA

SEQ ID NO: 120165 - DNA, 120 bp, synthetic construct
  source 1..120: mol_type = other DNA
aatctccttttgtgtgtatttgagtcttccagacagacacagagttatacagaatttcaggttcttggagttgcaagaggcttagtgaatatttggccaaatttctactcggtgacagcg

SEQ ID NO: 120166 - DNA, 120 bp, synthetic construct
  source 1..120: mol_type = other DNA
gccattgcttttggtgttttgttcatgaagtgtttgctcatgtctgtgtcctgaatggtattgcctagtttttcttctagagttttttatggttttaggtcttatgtttaagtgtttaat

SEQ ID NO: 120167 - DNA, 120 bp, synthetic construct
  source 1..120: mol_type = other DNA
caacaacacttcatgctaaaaattctcaataaattaggtattgatgggacgtatctcaaaataataagagctatctatgacaaacccacagccaatatcatactgaatgggcaaaaactg

SEQ ID NO: 120168 - DNA, 120 bp, synthetic construct
  source 1..120: mol_type = other DNA
tatagatcaatggaactgaacagagccctcagaaataacgccgcatatctacaactatctgatctttgacaaacctgagaaaaacaagcaatggggaaaggattccctatttaataaatg

SEQ ID NO: 120169 - DNA, 120 bp, synthetic construct; identical to SEQ ID NO: 10191
  source 1..120: mol_type = other DNA

SEQ ID NO: 120170 - DNA, 120 bp, synthetic construct
  source 1..120: mol_type = other DNA
cgccacactgtcttccacaatggttgaactagtttacagtcccaccaacagtgtaaaagtgttcctatttctccacatcctctccagcacctgttgtttcctgactttttaatgactgcc

SEQ ID NO: 120171 - DNA, 120 bp, synthetic construct
  source 1..120: mol_type = other DNA
aaattaccttgggcagtatggccattttcgcgatattgattcttcctatccatgagcatggaatgttcttccatttgtttgtatcctcttttatttccttgaccagtggtttgtagttct

SEQ ID NO: 120172 - DNA, 120 bp, synthetic construct
  source 1..120: mol_type = other DNA
ttggtctattcagagattcaacttcttcctggtttagtcttgggagagtgtatgtgtcgaggaatgtatccatctctcctagattttctagtttatttgcatagagctgtttgtagtatt

SEQ ID NO: 120173 - DNA, 120 bp, synthetic construct
  source 1..120: mol_type = other DNA
cctttaccattatgtaatggccttctttgtctcttttgatctttattggtttaaaggctgttttatcagagactaggattgcaacccctgccttttttaattttccatttgcttggtaga

SEQ ID NO: 120174 - DNA, 120 bp, synthetic construct
  source 1..120: mol_type = other DNA
acagagaagtgcttaaaggagctgatggagctgaaaaccaaggctcgagaactacgtgaagaatgcagaagcctcaggagccaatgcgatcaactggaagaaagggtatcagcgatggaa

SEQ ID NO: 120175 - DNA, 120 bp, synthetic construct
  source 1..120: mol_type = other DNA
atggtgcgccattttttaagccagtctgaaaagcgcaatattcgggtgggagtgacccgattttccaggtgcgtctgtcacccctttctttgactcggaaagggaactccctgacccctt

SEQ ID NO: 120176 - DNA, 120 bp, synthetic construct; identical to SEQ ID NO: 10192
  source 1..120: mol_type = other DNA

SEQ ID NO: 120177 - DNA, 120 bp, synthetic construct
  source 1..120: mol_type = other DNA
gaacgcaattcctcaccagcaatggaacaaagctggacggagaacgactttgacgagctgagagaagaaggcttcagacgatcaaattactctgagctacgggaggacattcaaaccaaa

SEQ ID NO: 120178 - DNA, 120 bp, synthetic construct
  source 1..120: mol_type = other DNA
acatttaaagttaatattgttatgtgtgaatttgatcctgtcattatgatgttagcaggtgattttgctcgttagttcatgcagtttcttcctagtctcgatggtctttacattttggca

SEQ ID NO: 120179 - DNA, 120 bp, synthetic construct
  source 1..120: mol_type = other DNA
agagcagaactgaaggaaatagagacacaaaaaacccttcaaaaaattaattaatcccagagctggttttttgaaagggtcaagaaaatagatagaccactagcaagactaataaaaaaa

SEQ ID NO: 120180 - DNA, 120 bp, synthetic construct
  source 1..120: mol_type = other DNA
tcaacaacccttcatgctaaaaactctcaataaattaggtattgatgggacgtatttcaaaataataagagctatctatgacagacccacagccaatatcatactgaatgggcaaaaact

SEQ ID NO: 120181 - DNA, 120 bp, synthetic construct
  source 1..120: mol_type = other DNA
tgatctttgacaaacctgagaaaaacaagcaatggggaaaggattccctatttaataaatggttctgggaaaaccggctagccatatgtacaaagctgaaactggatcccttccttacac

SEQ ID NO: 120182 - DNA, 120 bp, synthetic construct
  source 1..120: mol_type = other DNA
atcgcaagaacaaaaaatcaaacaccgcatattctcactcataggtgggaattgaacaatgagatcacatggacacaggaaggggaacatcacactctggggactgttgtggggtggggc

SEQ ID NO: 120183 - DNA, 120 bp, synthetic construct; identical to SEQ ID NO: 21646
  source 1..120: mol_type = other DNA

SEQ ID NO: 120184 - DNA, 120 bp, synthetic construct; identical to SEQ ID NO: 21647
  source 1..120: mol_type = other DNA

SEQ ID NO: 120185 - DNA, 120 bp, synthetic construct
  source 1..120: mol_type = other DNA
aaggacttaaaaaataccaatctagtgctgggacaggcatgtagtccaggccttttctgacaatcttgatgaccctgtaagagtacagagatgatacttggtggagggagcttgtataaa

SEQ ID NO: 120186 - DNA, 120 bp, synthetic construct; identical to SEQ ID NO: 21648
  source 1..120: mol_type = other DNA

SEQ ID NO: 120187 - DNA, 120 bp, synthetic construct; identical to SEQ ID NO: 21649
  source 1..120: mol_type = other DNA

SEQ ID NO: 120188 - DNA, 120 bp, synthetic construct; identical to SEQ ID NO: 21650
  source 1..120: mol_type = other DNA

SEQ ID NO: 120189 - DNA, 120 bp, synthetic construct
  source 1..120: mol_type = other DNA
cagccccatgggtgggagttctgcgtccatgtaggggaggcaagaggtgactccttggtttgaagttgctgcatttatttccagagctcattcttttttttaaaaaaaaattatatatat

SEQ ID NO: 120190 - DNA, 120 bp, synthetic construct
  source 1..120: mol_type = other DNA
agtcagtcacaaaacagtaggaattgatgccagcttgacttaaagtaatgaaatctgtgcatagaaacactgctggaaggagacacaccaaaatgtcaacaggagttctctttcagggag

SEQ ID NO: 120191 - DNA, 120 bp, synthetic construct
  source 1..120: mol_type = other DNA
caccattctcctgcctcagcctcccgagtagctgggactacaggcgcatgccaccacgcccggctaattttttgtatttttagtagaggtggggtttcactgcgttagccaagatggtct

SEQ ID NO: 120192 - DNA, 120 bp, synthetic construct; identical to SEQ ID NO: 28739
  source 1..120: mol_type = other DNA

SEQ ID NO: 120193 - DNA, 120 bp, synthetic construct; identical to SEQ ID NO: 28740
  source 1..120: mol_type = other DNA

SEQ ID NO: 120194 - DNA, 120 bp, synthetic construct; identical to SEQ ID NO: 28741
  source 1..120: mol_type = other DNA

SEQ ID NO: 120195 - DNA, 120 bp, synthetic construct; identical to SEQ ID NO: 28742
  source 1..120: mol_type = other DNA

SEQ ID NO: 120196 - DNA, 120 bp, synthetic construct; identical to SEQ ID NO: 27727
  source 1..120: mol_type = other DNA

SEQ ID NO: 120197 - DNA, 120 bp, synthetic construct; identical to SEQ ID NO: 27728
  source 1..120: mol_type = other DNA

SEQ ID NO: 120198 - DNA, 120 bp, synthetic construct; identical to SEQ ID NO: 27729
  source 1..120: mol_type = other DNA

SEQ ID NO: 120199 - DNA, 120 bp, synthetic construct; identical to SEQ ID NO: 27730
  source 1..120: mol_type = other DNA

SEQ ID NO: 120200 - DNA, 120 bp, synthetic construct; identical to SEQ ID NO: 27731
  source 1..120: mol_type = other DNA

SEQ ID NO: 120201 - DNA, 120 bp, synthetic construct
  source 1..120: mol_type = other DNA
aattaagaaatagagccaggatttgaactcaggcagtctggttacacacaccctactgggacagaggatatgtaggttagttgtgcatgagcttttctcactagtggagaaagcttttgt

SEQ ID NO: 120202 - DNA, 120 bp, synthetic construct; identical to SEQ ID NO: 31796
  source 1..120: mol_type = other DNA

SEQ ID NO: 120203 - DNA, 120 bp, synthetic construct; identical to SEQ ID NO: 31797
  source 1..120: mol_type = other DNA

SEQ ID NO: 120204 - DNA, 120 bp, synthetic construct; identical to SEQ ID NO: 31798
  source 1..120: mol_type = other DNA

SEQ ID NO: 120205 - DNA, 120 bp, synthetic construct; identical to SEQ ID NO: 31799
  source 1..120: mol_type = other DNA

SEQ ID NO: 120206 - DNA, 120 bp, synthetic construct; identical to SEQ ID NO: 4054
  source 1..120: mol_type = other DNA

SEQ ID NO: 120207 - DNA, 120 bp, synthetic construct; identical to SEQ ID NO: 16923
  source 1..120: mol_type = other DNA

SEQ ID NO: 120208 - DNA, 120 bp, synthetic construct; identical to SEQ ID NO: 16924
  source 1..120: mol_type = other DNA

SEQ ID NO: 120209 - DNA, 120 bp, synthetic construct
  source 1..120: mol_type = other DNA
gggactggaatgcgccgggtctctccttccttctacttctatccacccccaacccccttctcgctcctcttttctatcagaaaaaaataataaaatctctcatggaattgtataaagttt

SEQ ID NO: 120210 - DNA, 120 bp, synthetic construct; identical to SEQ ID NO: 31613
  source 1..120: mol_type = other DNA

SEQ ID NO: 120211 - DNA, 120 bp, synthetic construct; identical to SEQ ID NO: 31614
  source 1..120: mol_type = other DNA

SEQ ID NO: 120212 - DNA, 120 bp, synthetic construct; identical to SEQ ID NO: 16952
  source 1..120: mol_type = other DNA

SEQ ID NO: 120213 - DNA, 120 bp, synthetic construct; identical to SEQ ID NO: 27351
  source 1..120: mol_type = other DNA

SEQ ID NO: 120214 - DNA, 120 bp, synthetic construct; identical to SEQ ID NO: 27352
  source 1..120: mol_type = other DNA

SEQ ID NO: 120215 - DNA, 120 bp, synthetic construct; identical to SEQ ID NO: 32935
  source 1..120: mol_type = other DNA

SEQ ID NO: 120216 - DNA, 120 bp, synthetic construct; identical to SEQ ID NO: 31905
  source 1..120: mol_type = other DNA

SEQ ID NO: 120217 - DNA, 120 bp, synthetic construct; identical to SEQ ID NO: 31906
  source 1..120: mol_type = other DNA

SEQ ID NO: 120218 - DNA, 120 bp, synthetic construct; identical to SEQ ID NO: 31907
  source 1..120: mol_type = other DNA

SEQ ID NO: 120219 - DNA, 120 bp, synthetic construct; identical to SEQ ID NO: 31908
  source 1..120: mol_type = other DNA

SEQ ID NO: 120220 - DNA, 120 bp, synthetic construct; identical to SEQ ID NO: 17066
  source 1..120: mol_type = other DNA

SEQ ID NO: 120221 - DNA, 120 bp, synthetic construct; identical to SEQ ID NO: 17067
  source 1..120: mol_type = other DNA

SEQ ID NO: 120222 - DNA, 120 bp, synthetic construct; identical to SEQ ID NO: 17068
  source 1..120: mol_type = other DNA

SEQ ID NO: 120223 - DNA, 120 bp, synthetic construct; identical to SEQ ID NO: 17069
  source 1..120: mol_type = other DNA

SEQ ID NO: 120224 - DNA, 120 bp, synthetic construct; identical to SEQ ID NO: 17070
  source 1..120: mol_type = other DNA

SEQ ID NO: 120225 - DNA, 120 bp, synthetic construct; identical to SEQ ID NO: 17071
  source 1..120: mol_type = other DNA

SEQ ID NO: 120226 - DNA, 120 bp, synthetic construct; identical to SEQ ID NO: 17072
  source 1..120: mol_type = other DNA

SEQ ID NO: 120227 - DNA, 120 bp, synthetic construct; identical to SEQ ID NO: 17073
  source 1..120: mol_type = other DNA

SEQ ID NO: 120228 - DNA, 120 bp, synthetic construct; identical to SEQ ID NO: 17074
  source 1..120: mol_type = other DNA

SEQ ID NO: 120229 - DNA, 120 bp, synthetic construct
  source 1..120: mol_type = other DNA
gatggatggatagatatatgggtggatggatgagtgggtgggtggatggatgggtggattgatggacggatggatggatggatggatggctgagagggtggatggatggatggatggatg

SEQ ID NO: 120230 - DNA, 120 bp, synthetic construct
  source 1..120: mol_type = other DNA
tgaaggagtggatagatggatgagtggatagatgaatggatgagtggatggatgaatggatggatagatggataggtggatggataagtgagtgggtgaatgggtggatagatggatgga

SEQ ID NO: 120231 - DNA, 120 bp, synthetic construct
  source 1..120: mol_type = other DNA
tgagtggatagatgaatagatgggtggatggatgagtggatggatagatggataggtggatggataaatgagtgggtgaatgggtggatagatggatggataggtgggtagatggatggt

SEQ ID NO: 120232 - DNA, 120 bp, synthetic construct
  source 1..120: mol_type = other DNA
gctgtggcttcatctccaccacaagggacatcctctacagccacttggtcaccaaccacatggtctgccagcctggctccaagggtgagatctactcgccaggggccggacacccagcaa

SEQ ID NO: 120233 - DNA, 120 bp, synthetic construct
  source 1..120: mol_type = other DNA
gcgcagaccgggctcttccccggggcccccaagggcgctacgtgcttcgagtgcgagatcaccttcagcaacgtcaacaactactacgtgcacaagcgcctctactgttcaggccgccgt

SEQ ID NO: 120234 - DNA, 120 bp, synthetic construct; identical to SEQ ID NO: 31704
  source 1..120: mol_type = other DNA

SEQ ID NO: 120235 - DNA, 120 bp, synthetic construct
  source 1..120: mol_type = other DNA
ttaatccagtctatcattgttggacatttgggttggttccaagtctttgctattgtgaatagtgccgcagtaaacataggtgtgcatgtgtctttatagcagcatgatttatagtccttt

SEQ ID NO: 120236 - DNA, 120 bp, synthetic construct; identical to SEQ ID NO: 31705
  source 1..120: mol_type = other DNA

SEQ ID NO: 120237 - DNA, 120 bp, synthetic construct; identical to SEQ ID NO: 31706
  source 1..120: mol_type = other DNA

SEQ ID NO: 120238 - DNA, 120 bp, synthetic construct
  source 1..120: mol_type = other DNA
tctgagggctctgttctgttccattgatctatatctctgttttggtaccagtaccatgctgttttggttactgtagccttgtattatagtttgaagtcaggtagcgtgatgcctccagct

SEQ ID NO: 120239 - DNA, 120 bp, synthetic construct
  source 1..120: mol_type = other DNA
gctggattcggtttgccagtattttattgaggatttttgcatcaatgttcatcaaggatattggtctaaaattctcttttttggttgtgtctctgcccagctttggtatcagaatgatgc

SEQ ID NO: 120240 - DNA, 120 bp, synthetic construct
  source 1..120: mol_type = other DNA
gcctggtgggctgtggtgttcttctcttgaacactgaatctcactcacgatcaacattacataaggaccctaggtgatcataattggctagacaaaaatgatactactacatatgcacac

SEQ ID NO: 120241 - DNA, 120 bp, synthetic construct; identical to SEQ ID NO: 31707
  source 1..120: mol_type = other DNA

SEQ ID NO: 120242 - DNA, 120 bp, synthetic construct; identical to SEQ ID NO: 31708
  source 1..120: mol_type = other DNA

SEQ ID NO: 120243 - DNA, 120 bp, synthetic construct; identical to SEQ ID NO: 31709
  source 1..120: mol_type = other DNA

SEQ ID NO: 120244 - DNA, 120 bp, synthetic construct; identical to SEQ ID NO: 31710
  source 1..120: mol_type = other DNA

SEQ ID NO: 120245 - DNA, 120 bp, synthetic construct; identical to SEQ ID NO: 31711
  source 1..120: mol_type = other DNA

SEQ ID NO: 120246 - DNA, 120 bp, synthetic construct; identical to SEQ ID NO: 31712
  source 1..120: mol_type = other DNA

SEQ ID NO: 120247 - DNA, 120 bp, synthetic construct
  source 1..120: mol_type = other DNA
ctttaagttttaggatacatgtgcacaatgtgcaggttagttacatatgtatacatgtgacatgctggtgcgcggcacccactaactcgtcatctagcattgggtatatctcccaatgct

SEQ ID NO: 120248 - DNA, 120 bp, synthetic construct
  source 1..120: mol_type = other DNA
gcttgcgaaaattttctcccattttgtaggttgcctgttcactctgatggtagtttcttttgctgtgcagaagctctttagtttaattagatcccatttgtcaattttggcttttgtagc

SEQ ID NO: 120249 - DNA, 120 bp, synthetic construct
  source 1..120: mol_type = other DNA
gttttctagatatacaatcatgtcgtctgcaaacagggacaatttgacttcctcttttcctaattgaataatctttatttccttctcctgcctaattgccctggccagaacttccaacac

SEQ ID NO: 120250 - DNA, 120 bp, synthetic construct
  source 1..120: mol_type = other DNA
cctggattcattaatttttgaagggttttttgtgtctctatttccttcagttctgctctgattttagttatttcttgccttctgctagtttttgagtgtgtttgctcttgcttttctagt

SEQ ID NO: 120251 - DNA, 120 bp, synthetic construct
  source 1..120: mol_type = other DNA
attatgatgttagctggttattttgctcgttagttgatgcagtttcttcctagtctcgatggtctttacgttttggcatgattttgcagcagctggtaccagttgttcctttccatgttt

SEQ ID NO: 120252 - DNA, 120 bp, synthetic construct
  source 1..120: mol_type = other DNA
tgattgtctgaagccttcttctctcaactcgtcgaagtccttctccgtccagctttgttccattgctggtgaggaactgtgatcctttggaggaggagaggtgctctgctttttagagtt

SEQ ID NO: 120253 - DNA, 120 bp, synthetic construct
  source 1..120: mol_type = other DNA
caacattaatcaatacagtggcagattttttttttttttttttttttgagatagggtctcacgatgtgcccaggctggcctcaaaatcctgggctcaagagatcctcttgcctcagtctc

SEQ ID NO: 120254 - DNA, 120 bp, synthetic construct
  source 1..120: mol_type = other DNA
gattgcgccactgcaccccagcctgggcaacagagtgagatgctgtctcaaaaaaaaaaaaaaaaattgagggggggcggggaatagaaaatataatacaaaactcagtacagcttaaca

SEQ ID NO: 120255 - DNA, 120 bp, synthetic construct; identical to SEQ ID NO: 26480
  source 1..120: mol_type = other DNA

SEQ ID NO: 120256 - DNA, 120 bp, synthetic construct; identical to SEQ ID NO: 33602
  source 1..120: mol_type = other DNA

SEQ ID NO: 120257 - DNA, 120 bp, synthetic construct; identical to SEQ ID NO: 33603
  source 1..120: mol_type = other DNA

SEQ ID NO: 120258 - DNA, 120 bp, synthetic construct
  source 1..120: mol_type = other DNA
tcccaaagtgctgggattacagatgtgagccaccacgtccagccaatgcttagaagattaatttacgtttatcatttttaaaagggggaaaaggtattctatagccagaggtggttttgc

SEQ ID NO: 120259 - DNA, 120 bp, synthetic construct
  source 1..120: mol_type = other DNA
gtgagctgagatcgcaccactgcactccagtctgggtgatagcacgagacgcagtctcaaaagagaaaaaaaataaaaataaaaaataaaagggttttatatcacaccaggtagctaccc

SEQ ID NO: 120260 - DNA, 120 bp, synthetic construct
  source 1..120: mol_type = other DNA
aaggagatctggaaaaagggcaggttaggttttaaacgaagaacaattagaactttttttttttttgagatggagttttgctcttgttgcccaggctggagtgcactggcacgatcttgg

SEQ ID NO: 120261 - DNA, 120 bp, synthetic construct
  source 1..120: mol_type = other DNA
agaggttgcagtgagtcaagatggtgccactgcactccagctgggtgacagagtgagactccatctgaaggaaggaaggaaggaaggaaggaaggaaggaaggaaggaaggaaggaagga

SEQ ID NO: 120262 - DNA, 120 bp, synthetic construct
  source 1..120: mol_type = other DNA
cggacgtaatagacatctaccgaactctccaccccaaatcaacagaatatacattcttctcaccaccacattgcacttattccaaaattgaccacatagttagaagtaaagcactcctca

SEQ ID NO: 120263 - DNA, 120 bp, synthetic construct
  source 1..120: mol_type = other DNA
accaatcaaaaaagtccaggacaggacggattcacagccgaattctaccagaggtacaaggaggagctggtaccattccttctgaaactattccaatcaatagaaaaagagggaatcctc

SEQ ID NO: 120264 - DNA, 120 bp, synthetic construct; identical to SEQ ID NO: 15148
  source 1..120: mol_type = other DNA

SEQ ID NO: 120265 - DNA, 120 bp, synthetic construct
  source 1..120: mol_type = other DNA
gggtaatcagctctttctggaaagcagtttgacagtgagtggcagagctttaaaaggcttcatacctttgctgtggtgattctacttctaaggaccaattctaaagaaataatccaaggc

SEQ ID NO: 120266 - DNA, 120 bp, synthetic construct
  source 1..120: mol_type = other DNA
ccaaagtgctgggaatacaagcataagccaccagacccagactttccttcttatgttttccaaagtttctacaatgaacagggaccacatctataattagcaaacagggagtcagtgtta

SEQ ID NO: 120267 - DNA, 120 bp, synthetic construct
  source 1..120: mol_type = other DNA
atggcctcagtgaggtctctccagcctgagcctggaccagtcgtggcctctgtgcccaccccccactccccgaccacttcactgacatccacatctccacgggcatctctctcaagggct

SEQ ID NO: 120268 - DNA, 120 bp, synthetic construct; identical to SEQ ID NO: 25175
  source 1..120: mol_type = other DNA

SEQ ID NO: 120269 - DNA, 120 bp, synthetic construct; identical to SEQ ID NO: 25176
  source 1..120: mol_type = other DNA

SEQ ID NO: 120270 - DNA, 120 bp, synthetic construct; identical to SEQ ID NO: 25177
  source 1..120: mol_type = other DNA

SEQ ID NO: 120271 - DNA, 120 bp, synthetic construct; identical to SEQ ID NO: 25178
  source 1..120: mol_type = other DNA

SEQ ID NO: 120272 - DNA, 120 bp, synthetic construct; identical to SEQ ID NO: 25179
  source 1..120: mol_type = other DNA

SEQ ID NO: 120273 - DNA, 120 bp, synthetic construct
  source 1..120: mol_type = other DNA
tttcctgactttttaatgatcgccattctaactggtatgagatggtatctcattgtagttttgatttgcatttctctgatggccagtgatgatgagcattttttcatgtgtcttttggct

SEQ ID NO: 120274 - DNA, 120 bp, synthetic construct
  source 1..120: mol_type = other DNA
tcacggtattgattgttcctacccatgagcatggaatgttcttccatttgtttgtatcctcttttatttcattgagcagtggtttgtagttctccttgaagaggtccttcacgtcccttg

SEQ ID NO: 120275 - DNA, 120 bp, synthetic construct
  source 1..120: mol_type = other DNA
ttattggtctattcagagattcaacttcttcctggtttagtcttgggagagtgtatgtgtcgaggaatttatccatttcttctagattttctagtttatttgtgtagaggtgtttatagt

SEQ ID NO: 120276 - DNA, 120 bp, synthetic construct
  source 1..120: mol_type = other DNA
tctaatgttgacagtggggtgttaaagtctcccattattattgtgtgggagtctgagtctctttgtaggtcactcaggacttgctttatgaatctgggtgctcctgtattgggtgcatat

SEQ ID NO: 120277 - DNA, 120 bp, synthetic construct
  source 1..120: mol_type = other DNA
ggggaagttctcctggataatatcctgcagagtgtttgccaacttggttccattctccccgtcactttcaggtacaccattcagatgtagatttggtcttttcacatagtcccatttttc

SEQ ID NO: 120278 - DNA, 120 bp, synthetic construct
  source 1..120: mol_type = other DNA
attgcagcctctgcccggccgccaccccgtctgggaagggagaagcgtctctgcctggccgcccatcgtctgggatgtgaggagcccctctgcctggctgcccagtctggaaagtgagga

SEQ ID NO: 120279 - DNA, 120 bp, synthetic construct
  source 1..120: mol_type = other DNA
caaagtgctagaattacaggcatgagccactgtgcctggcccaggtcttatttattgatgcattccgacagtctgtgtcttttcattggtgcatttagaccattgaccttcaaagcaatt

SEQ ID NO: 120280 - DNA, 120 bp, synthetic construct
  source 1..120: mol_type = other DNA
catgcaccaccatgcctggctaatttttgtatttttagtagagacagggtttcgccacatgggccaggttggtctcgaactcctgaccttaggtgatccccccatcttggcctcccaaag

SEQ ID NO: 120281 - DNA, 120 bp, synthetic construct; identical to SEQ ID NO: 4893
  source 1..120: mol_type = other DNA

SEQ ID NO: 120282 - DNA, 120 bp, synthetic construct
  source 1..120: mol_type = other DNA
tataacttcagctcttcagcgttataattattgcttcaaaagtattttgaaagaagttgcctggaggcagtggcttatgcctttaactccagcacttttgggggctgaggtgggcagatc

SEQ ID NO: 120283 - DNA, 120 bp, synthetic construct
  source 1..120: mol_type = other DNA
atatgctaacgaaatattctttgcttaaccttcaagcacattagttttatttatttaaaaatgtaaagatggccgggcgcggtggctcacgcctgtaatcccagcactttgggaggccga

SEQ ID NO: 120284 - DNA, 120 bp, synthetic construct
  source 1..120: mol_type = other DNA
acacttttacactgttggtgggactgtaaactagttcaaccctgtggaagtcagtgtggtgattcctcagggatctagaactagaaataccatttgacccagccatcccattactgggta

SEQ ID NO: 120285 - DNA, 120 bp, synthetic construct; identical to SEQ ID NO: 25753
  source 1..120: mol_type = other DNA

SEQ ID NO: 120286 - DNA, 120 bp, synthetic construct
  source 1..120: mol_type = other DNA
cctacaactatctgatctttgacaaacctgacaaaaacaagcaaatgggaaaggattccctatttaacaaatgttgctgggaaaactggctagccatatgtagaaagctgaaactggatc

SEQ ID NO: 120287 - DNA, 120 bp, synthetic construct
  source 1..120: mol_type = other DNA
gcacatatacaccacggagtactatgcagccataaaaaaggatgagttcatgtcctctgtagggacatggatgaagctggaaaccatcattctcagcaaactatcgcaaggacaaaaaac

SEQ ID NO: 120288 - DNA, 120 bp, synthetic construct; identical to SEQ ID NO: 31757
  source 1..120: mol_type = other DNA

SEQ ID NO: 120289 - DNA, 120 bp, synthetic construct; identical to SEQ ID NO: 31758
  source 1..120: mol_type = other DNA

SEQ ID NO: 120290 - DNA, 120 bp, synthetic construct
  source 1..120: mol_type = other DNA
ggtttatcctggagagtattccatgtgaatttgagaagactgtgtattctgctgttgttgggtggtattctgcttatgtctatttggtctaatttgcttagagtgttgttgaaatcctct

SEQ ID NO: 120291 - DNA, 120 bp, synthetic construct
  source 1..120: mol_type = other DNA
atgtaaatgggctaaatgcaccaagcagacctaactgacatctacagaactctccaccccaaatgaacagaatatacatttgtctcagcaccacagcacacttactccaaaattgaccac

SEQ ID NO: 120292 - DNA, 120 bp, synthetic construct
  source 1..120: mol_type = other DNA
ccacagaaaaagagggaatcctccctaattcattttatgaggccaacatcgtcctgataccaaagcctggcagagacacaacaaaaaaagagaattttagaccaatatccctgatgaaca

SEQ ID NO: 120293 - DNA, 120 bp, synthetic construct
  source 1..120: mol_type = other DNA
atcaatatcgtgataatggccatactgtccaaggtaatttacagattcaatgccaaccccatcaagctaccaatgactttcttcacagaattggaaaaaactactttaaaggtcatatgg

SEQ ID NO: 120294 - DNA, 120 bp, synthetic construct
  source 1..120: mol_type = other DNA
ttttagaccaatatccctgatgaacatcgatgcaaaaatcctcaataaaatactggcaaaccgaatccagcagcacatcaaaaagcttatctaccatgaccaagttggcttcatacctag

SEQ ID NO: 120295 - DNA, 120 bp, synthetic construct; identical to SEQ ID NO: 22504
  source 1..120: mol_type = other DNA

SEQ ID NO: 120296 - DNA, 120 bp, synthetic construct
  source 1..120: mol_type = other DNA
ttcttgtaaatacagaattattagcttaaaactgtactgttgaattctgtaaatagttatatctcggttggagcgggtgggtgggattgtggcgttgtggtctttgcattgggggagggg

SEQ ID NO: 120297 - DNA, 120 bp, synthetic construct
  source 1..120: mol_type = other DNA
ttttttcctcaaacattaactacgactacccaggctttttaatatcgggcttagccaaaccgctgcatttgaaagaggcaaataaaaaggtacaaagaggctgaacgggattgtcctgtc

SEQ ID NO: 120298 - DNA, 120 bp, synthetic construct
  source 1..120: mol_type = other DNA
cgagactgtctccaaaaaaaaaaaatactacagtgagctatgattgcaccactgcactccagcctcggtgacacagccagaccctgttaggagaaaggagataaagaaagagagaggaat

SEQ ID NO: 120299 - DNA, 120 bp, synthetic construct
  source 1..120: mol_type = other DNA
tgcagggtctagaagcagggaaaggccagggacctggagttgagtccctggtgttcaatgaaagccattcctagaatggctaggaattacaccagcttctttttttttcttttatttatt

SEQ ID NO: 120300 - DNA, 120 bp, synthetic construct; identical to SEQ ID NO: 24257
  source 1..120: mol_type = other DNA

SEQ ID NO: 120301 - DNA, 120 bp, synthetic construct; identical to SEQ ID NO: 24258
  source 1..120: mol_type = other DNA

SEQ ID NO: 120302 - DNA, 120 bp, synthetic construct; identical to SEQ ID NO: 24908
  source 1..120: mol_type = other DNA

SEQ ID NO: 120303 - DNA, 120 bp, synthetic construct
  source 1..120: mol_type = other DNA
tttctgggaaagacaagagaacacagccaaaggaaattaatttcctgtatgtttcttaaaaagtatcacattggctgggtgcggtggctcatgcctgtatctcagcactttgggaggcca

SEQ ID NO: 120304 - DNA, 120 bp, synthetic construct
  source 1..120: mol_type = other DNA
ccaacagtgcagcctctgcccggccgccaccccgtctaggaagtgaggagcgtctctgcctggccgcccatcgtctgggatgtgaggagcccctctgcccggccgcccagtctgggaagt

SEQ ID NO: 120305 - DNA, 120 bp, synthetic construct
  source 1..120: mol_type = other DNA
gagctctgggagcaaggaccccccagtaacattttggcaaccacaaagggacctccaaagcgatgggaaacattccccccaaggcaaaaacgcccctaagatgtattctggagaattggg

SEQ ID NO: 120306 - DNA, 120 bp, synthetic construct
  source 1..120: mol_type = other DNA
ctcccagcggctcctctgcccaccccaaataaggagaatcatggtgtaccctacacccagatgcactctatccacctaatacacctgactatattccagtaatgtctgcggcatcaaaat

SEQ ID NO: 120307 - DNA, 120 bp, synthetic construct; identical to SEQ ID NO: 31479
  source 1..120: mol_type = other DNA

SEQ ID NO: 120308 - DNA, 120 bp, synthetic construct; identical to SEQ ID NO: 31480
  source 1..120: mol_type = other DNA

SEQ ID NO: 120309 - DNA, 120 bp, synthetic construct; identical to SEQ ID NO: 31481
  source 1..120: mol_type = other DNA

SEQ ID NO: 120310 - DNA, 120 bp, synthetic construct
  source 1..120: mol_type = other DNA
agcctaactgggaggcacccccaagcaggggcacactgacacctcacacgcagggtattccaacagacctgcagctgagggtcctgtctgttagaaggaaaactaacaaacagaaaggac

SEQ ID NO: 120311 - DNA, 120 bp, synthetic construct
  source 1..120: mol_type = other DNA
gaatttcatatccagccaaactaagcttcataagtgaaggagaaataaaatactttacagacaagcaaatgctgagagattttgtcaccaccaggcctgccctaaaacagctcctgaagg

SEQ ID NO: 120312 - DNA, 120 bp, synthetic construct
  source 1..120: mol_type = other DNA
gttctttgaaaccaacgagaacaaagacacaacataccagaatctctgggacgcattcaaagcagtgtgtagagggaaatttatagcactaaatgcccacaggagaaagcaggaaagatc

SEQ ID NO: 120313 - DNA, 120 bp, synthetic construct
  source 1..120: mol_type = other DNA
caggctgaaaactctcaataaattaggtattgatgggacgtatctcaaaataataagagctatctatgacaaacccacagccaatatcatactgaatgggcaaaaactggaagcattccc

SEQ ID NO: 120314 - DNA, 120 bp, synthetic construct
  source 1..120: mol_type = other DNA
ttattaaatagggaatcctttccccattgcttgtttttgtcaggtttgtcaaagatcagatagttgtagatatgcggcgttatttctgagggctctgttctgttccattgatctatatct

SEQ ID NO: 120315 - DNA, 120 bp, synthetic construct
  source 1..120: mol_type = other DNA
acccagccatcccattactgggtatatacccaaatgactataaatcatgctgctataaagacacatgcacacgtatgtttatagcggcattattcatgatagcaaagacttggaaccaac

SEQ ID NO: 120316 - DNA, 120 bp, synthetic construct; identical to SEQ ID NO: 31483
  source 1..120: mol_type = other DNA

SEQ ID NO: 120317 - DNA, 120 bp, synthetic construct; identical to SEQ ID NO: 31484
  source 1..120: mol_type = other DNA

SEQ ID NO: 120318 - DNA, 120 bp, synthetic construct
  source 1..120: mol_type = other DNA
aaggattccctatttaataaattgtgctgggaaaactggctagccatatgtaggaagctgaaactggatcccttccttacaccttatacaaaaatcaattcaagatagattaaagattta

SEQ ID NO: 120319 - DNA, 120 bp, synthetic construct
  source 1..120: mol_type = other DNA
tgccattagcaaccaagatatccttcaatagattagtaggtaaaccatggcacatccatacaatggaatagtattcaggaaggaaggaaggaaggaaggaaggaaggaaggaaggaagga

SEQ ID NO: 120320 - DNA, 120 bp, synthetic construct
  source 1..120: mol_type = other DNA
aggctcagatatactataatatcgtttaaaccaatatttctcaagtgtaagcaaaaaaaaaaaattctagagcttctgcacagcaaaacaaactaccatcagagtgaacaggcaacctac

SEQ ID NO: 120321 - DNA, 120 bp, synthetic construct
  source 1..120: mol_type = other DNA
cctgcacattgcgcacatgtaccctaaaacttaaagtataattaaaaaaaaaagttttcacaagaacaaaattctcaaagatctgatgaaccttgtctgagaaaaaataacaataatctc

SEQ ID NO: 120322 - DNA, 120 bp, synthetic construct; identical to SEQ ID NO: 31486
  source 1..120: mol_type = other DNA

SEQ ID NO: 120323 - DNA, 120 bp, synthetic construct; identical to SEQ ID NO: 31487
  source 1..120: mol_type = other DNA

SEQ ID NO: 120324 - DNA, 120 bp, synthetic construct
  source 1..120: mol_type = other DNA
gacacaggaaggggaatatcacactctggggactgtggtggggtcgggggaggggggagggatagcattgggagatatacctaatgctagacgacacgttagtgggtgcagcacaccagc

SEQ ID NO: 120325 - DNA, 120 bp, synthetic construct; identical to SEQ ID NO: 9879
  source 1..120: mol_type = other DNA

SEQ ID NO: 120326 - DNA, 120 bp, synthetic construct; identical to SEQ ID NO: 3012
  source 1..120: mol_type = other DNA

SEQ ID NO: 120327 - DNA, 120 bp, synthetic construct
  source 1..120: mol_type = other DNA
agaccagcctggccaacatggcgaaaccccatctctactaaaaatacaaaaattacccagctgtggtggcgcacgcctgtaatcctagctacaacgggaggctgatgcaggagaatcact

SEQ ID NO: 120328 - DNA, 120 bp, synthetic construct; identical to SEQ ID NO: 9881
  source 1..120: mol_type = other DNA

SEQ ID NO: 120329 - DNA, 120 bp, synthetic construct
  source 1..120: mol_type = other DNA
atacaaacaaatggaagaacattccatgctcatggagaggaagaatcaatatcgtgaaaatggccatactgcccaaggtaatttatagattcaatgccatccccatcaagctaccaatga

SEQ ID NO: 120330 - DNA, 120 bp, synthetic construct; identical to SEQ ID NO: 22544
  source 1..120: mol_type = other DNA

SEQ ID NO: 120331 - DNA, 120 bp, synthetic construct
  source 1..120: mol_type = other DNA
gaggctgaggcatgaaaatcacttgaacctgggaggcagaggctgcagtcagctgagattacatcactgtactccaacatgggaaacaagagtgagactctgtcttaaaaaaaaaaaaaa

SEQ ID NO: 120332 - DNA, 120 bp, synthetic construct
  source 1..120: mol_type = other DNA
gcggaggtggcgagtgagccgagattacaccactacactccagcctgggtgacagagactccatctcaaaaaaaaagaaaaagaaacaatgacaaccagataaaacctttttcatacaaa

SEQ ID NO: 120333 - DNA, 120 bp, synthetic construct; identical to SEQ ID NO: 29178
  source 1..120: mol_type = other DNA

SEQ ID NO: 120334 - DNA, 120 bp, synthetic construct; identical to SEQ ID NO: 28876
  source 1..120: mol_type = other DNA

SEQ ID NO: 120335 - DNA, 120 bp, synthetic construct; identical to SEQ ID NO: 28877
  source 1..120: mol_type = other DNA

SEQ ID NO: 120336 - DNA, 120 bp, synthetic construct; identical to SEQ ID NO: 9766
  source 1..120: mol_type = other DNA

SEQ ID NO: 120337 - DNA, 120 bp, synthetic construct; identical to SEQ ID NO: 9767
  source 1..120: mol_type = other DNA

SEQ ID NO: 120338 - DNA, 120 bp, synthetic construct; identical to SEQ ID NO: 9768
  source 1..120: mol_type = other DNA

SEQ ID NO: 120339 - DNA, 120 bp, synthetic construct; identical to SEQ ID NO: 9769
  source 1..120: mol_type = other DNA

SEQ ID NO: 120340 - DNA, 120 bp, synthetic construct; identical to SEQ ID NO: 29179
  source 1..120: mol_type = other DNA

SEQ ID NO: 120341 - DNA, 120 bp, synthetic construct
  source 1..120: mol_type = other DNA
gcctggcagaggggctcctcacttcccagtaggggcagccggttagaggcgcccctcacctcccggacggggcagctgggccgggttgggggctaaccccctgaacctccctcccggatg

SEQ ID NO: 120342 - DNA, 120 bp, synthetic construct; identical to SEQ ID NO: 29180
  source 1..120: mol_type = other DNA

SEQ ID NO: 120343 - DNA, 120 bp, synthetic construct; identical to SEQ ID NO: 29181
  source 1..120: mol_type = other DNA

SEQ ID NO: 120344 - DNA, 120 bp, synthetic construct; identical to SEQ ID NO: 29182
  source 1..120: mol_type = other DNA

SEQ ID NO: 120345 - DNA, 120 bp, synthetic construct
  source 1..120: mol_type = other DNA
tggctgtgggtttgtcatagatagctcttattattttgagatacatccaatcaatacctagtttattgggagtttttagcatgaaggaagggctgttgaattttgttgaaggccttttct

SEQ ID NO: 120346 - DNA, 120 bp, synthetic construct
  source 1..120: mol_type = other DNA
ttcttcctttgaatttaatttgctctttttaaaatttcctgacatagaacgtagatgattgatttatgaaggggtggcctgcccctccacacctgtgggtatttctagtcgggtgggaca

SEQ ID NO: 120347 - DNA, 120 bp, synthetic construct
  source 1..120: mol_type = other DNA
ggcatcagcataccaaggacctgcaccagcaccggcctctgagttccctcagtttttattattattttcattatttcagcaaaaaggaatgtagtaggagagcagggtgataataaggag

SEQ ID NO: 120348 - DNA, 120 bp, synthetic construct
  source 1..120: mol_type = other DNA
gaggagctgtgggagaagctgtggtctggggatcccgtccctgctttaccctgttcggaatgagatcgaggccccatcaaaacagagttcatgtgagcaaatggggactcattaatggga

SEQ ID NO: 120349 - DNA, 120 bp, synthetic construct
  source 1..120: mol_type = other DNA
accctcaggaattgtgcccatggcagctttgctcctaggtttttctcccaagaacacacacagtgcccagaagactcctggttcattttaaccccagatctgtagcaggaatctgttttc

SEQ ID NO: 120350 - DNA, 120 bp, synthetic construct
  source 1..120: mol_type = other DNA
acagttgtgcagcaaagtgcacgaagtgcagcaaagtgctccccaaagctgcaaacaaaatgatctctctatttgggatctacaatcccttctatagcagtttgactagatttctacaaa

SEQ ID NO: 120351 - DNA, 120 bp, synthetic construct
  source 1..120: mol_type = other DNA
gttcaagcaattctcctgcctccgagtagctgggattacaggcgcacgccaccatgcccggcggattttttatattttgtagtagagatggggtttcaccatattggccaggctggtctt

SEQ ID NO: 120352 - DNA, 120 bp, synthetic construct
  source 1..120: mol_type = other DNA
gtttttcagatacagacttactcagacattgccaccgtctccaacttctgtaaccttatagggtctgcagagaatgccatgtttgaagatgatgattggtggtcttgggatgaaaagtat

SEQ ID NO: 120353 - DNA, 120 bp, synthetic construct
  source 1..120: mol_type = other DNA
gcatgattaaaaaagtccttatgttttaaaatcagttccttgcatgattctacagcaaggccagggtgaagcatgagggcttccagatactttagtgaaaggtgagttcaccctttgttc

SEQ ID NO: 120354 - DNA, 120 bp, synthetic construct
  source 1..120: mol_type = other DNA
gaactacaggaacctggtctccctgggtgaggataacttcaatacataattcctaatttttctcagagctttattttattcctttgaagaatttctcctgggaacttttatgttttatct

SEQ ID NO: 120355 - DNA, 120 bp, synthetic construct
  source 1..120: mol_type = other DNA
ctttagtgatctccctttaagtttacagggagagctaatgtccactttatcgcttataaggggctgcatgatgtgactgctgttccattgcttttggagacactggaatatttgtgttac

SEQ ID NO: 120356 - DNA, 120 bp, synthetic construct
  source 1..120: mol_type = other DNA
ctgtagctatataaaaatgtgtgtctcacacacacacctatataacttatttaagtgtgtagtaaattctcacttaacattgttgataggttcttggaaactgagggaagcaacatatta

SEQ ID NO: 120357 - DNA, 120 bp, synthetic construct
  source 1..120: mol_type = other DNA
aagtagctggaattacaggcatgtaccaccatgcctggctaattttgtatttttaatagagacggagtttctccacgttggtcaggctagtctcgaactcccgacctcaggtgatccacc

SEQ ID NO: 120358 - DNA, 120 bp, synthetic construct
  source 1..120: mol_type = other DNA
acacattttggatattaacttttttttttttttggagacagaatttctgtcgcccgagctgaagtgcagtggcacgatctttgctcactgcaacctctgtctctcgggttcaagcgattc

SEQ ID NO: 120359 - DNA, 120 bp, synthetic construct
  source 1..120: mol_type = other DNA
atgcccccagctttgttctttctcaagattgattgctcaggttattaaaagtcgtttaaggttacacctaaattttacaattgtgttttctattagtgtgaaaaatgccaataaaatttt

SEQ ID NO: 120360 - DNA, 120 bp, synthetic construct
  source 1..120: mol_type = other DNA
cctggagagattagatttccttgaggatattaatctatatggcaggcagtagactagggttttgaagtttgtctgcatatgatgggccaaataccaggtgtatgaatgggtttggcttct

SEQ ID NO: 120361 - DNA, 120 bp, synthetic construct
  source 1..120: mol_type = other DNA
tagtttagtaccagcccctttggtactgtctttgccatagtgagtgagttctcccgagatcttattttttatttatttattttttgagatggagtctcgctctgtggctcaggctggagt

SEQ ID NO: 120362 - DNA, 120 bp, synthetic construct
  source 1..120: mol_type = other DNA
aagcactgagtttgaggcattttcctggatttttcaaccactgagttctttttatataaaactaagtgaataaccttgactgggaatccgagacctaagcctgttgactgcagggtaagg

SEQ ID NO: 120363 - DNA, 120 bp, synthetic construct
  source 1..120: mol_type = other DNA
actgaaggtggagcagagtccaggggcctgggggaatgtagagtttgtgaatttgtgatatctaagagggagcatcttcaaaatcatagtgaaaagggtatttctttgcaataagcgttt

SEQ ID NO: 120364 - DNA, 120 bp, synthetic construct
  source 1..120: mol_type = other DNA
tggagagtttattaatttattattattattattatttttttttttttggagacagagtctcactctcgtccaggctggagtgcagtggcgagatctcggctcactgcaacctccacctcc

SEQ ID NO: 120365 - DNA, 120 bp, synthetic construct
  source 1..120: mol_type = other DNA
taagaggcttaatcctcacattggaaaataaagagtatttactctcctcccttttcttaaaacctttgatttagaaaacttttatatgtaaattctttctgtgccttttatcttttttgt

SEQ ID NO: 120366 - DNA, 120 bp, synthetic construct
  source 1..120: mol_type = other DNA
tgattctgctgcctgggcctcccaaagtgttgggattacaggtatgagccatcgtgcccagctatgacagatttttttctagatgtctatttagtctcatataaatataggcattcctac

SEQ ID NO: 120367 - DNA, 120 bp, synthetic construct
  source 1..120: mol_type = other DNA
aagtagagccctcatgacctaataacttcttaaaggcctcacttcttatttgtttgtttgttttttgagacagagtcttgttctgtcacccaggctggagtacagtggagtacagtgatc

SEQ ID NO: 120368 - DNA, 120 bp, synthetic construct
  source 1..120: mol_type = other DNA
ggtcttgaactcctgacctcaagcacttgatttgacctcccaatgtactaggattacaggcatgagccatcaggcccagtcatttctttttttaaaagattgaatagctttctgagatct

SEQ ID NO: 120369 - DNA, 120 bp, synthetic construct
  source 1..120: mol_type = other DNA
ctccagcatatgtatttggttcttttttaagtttctcgttcttttttttttttttttttttaaagatggagtttcgctcttgtcacccagactggagtgcaatggcacgatcttggctga

SEQ ID NO: 120370 - DNA, 120 bp, synthetic construct
  source 1..120: mol_type = other DNA
agtcattacagactagtttagggaggtaaatatcttctattggttttctgggctgatgagattttcactaggatcacagtcaactgcattggatcctggtcacgtaactactactgggtc

SEQ ID NO: 120371 - DNA, 120 bp, synthetic construct
  source 1..120: mol_type = other DNA
ttggcagatggtgctagtggcataaacaaaaccaaatgatagctatgtttacaatgagaattaattacatttcattctgtattgtgggcaagcatgccactcaagcaagggcacaccctc

SEQ ID NO: 120372 - DNA, 120 bp, synthetic construct
  source 1..120: mol_type = other DNA
gggtagtcatcagtatttccttgtgtagatgagcagtcaaagaaactgtaaatttaccatctatttattgtttgattatatattattctgtgagagaagcacttgttatttgaaggtgat

SEQ ID NO: 120373 - DNA, 120 bp, synthetic construct
  source 1..120: mol_type = other DNA
catgatttatagtcctttgggtatatacccattaataggatggctgggtcaaatggtatttctagttctaaatccttgaggaattgccacactgtcttccacaatggttgaactagttta

SEQ ID NO: 120374 - DNA, 120 bp, synthetic construct
  source 1..120: mol_type = other DNA
ttggcttaggattgtcttggcaatgcaggctcttttttggttccatatgaactttaaagtagttttttccagttctgtgaagaaagtcattggtagcttgatgaggatggcattgaatct

SEQ ID NO: 120375 - DNA, 120 bp, synthetic construct
  source 1..120: mol_type = other DNA
ttattgatttgtgtatgttgaaccagccttgcatccctgggatgaagccgagttgatcatggtagatgagctttttgaagtgctgctggatttggtttgccagtattttattgaggattt

SEQ ID NO: 120376 - DNA, 120 bp, synthetic construct
  source 1..120: mol_type = other DNA
aggcagtctgcccattctcagatctcaaacaccatgctgggagaaccacgattctcttcagagccatcatacaggacgattaaatctgcagaagtttctgctgccttttgttcagctatg

SEQ ID NO: 120377 - DNA, 120 bp, synthetic construct
  source 1..120: mol_type = other DNA
tcactggatagtttgatctgtctgtttttatgccagtatcatgttgttttgcttattatagctttatagcatatttcggagtcaggtagtgtaatgcctccagcttgattctttttgccc

SEQ ID NO: 120378 - DNA, 120 bp, synthetic construct
  source 1..120: mol_type = other DNA
caggcgtgagccactgaacctggccaactggtggatgtagaagcaacactggcaaaattgaacatggctttgtgatttaagaaactcaacgaattaggtatagatcatatgtacctcaat

SEQ ID NO: 120379 - DNA, 120 bp, synthetic construct
  source 1..120: mol_type = other DNA
tggggtacacgtgcagaacatccagattttgttacataggtatacacgtgccataaatacttttaagtatttaccttagtcatattatatcgatattcttatgcactctgtctggaatat

SEQ ID NO: 120380 - DNA, 120 bp, synthetic construct
  source 1..120: mol_type = other DNA
agattgttgagtgcttcattgtttcttgaaattccatataatttgggggttgctgtttctttttctggaagaatttaattagaaatttgacagggattgcatttaatctggagattgcat

SEQ ID NO: 120381 - DNA, 120 bp, synthetic construct
  source 1..120: mol_type = other DNA
tatatatatatattttttttttttttttttttgagagggagtctcactgtgtcgcccaggctgaagtgcaatggcatgatctcagctcactgcaacttctgcctcttgggttcaagcgat

SEQ ID NO: 120382 - DNA, 120 bp, synthetic construct
  source 1..120: mol_type = other DNA
cgtgttagccaggatggtctcactctcctgacctcctgatccaccagcctcggcctctcaaagtgctgggattacaggcatgagccaccatgcctggccacatctttttttaacttttga

SEQ ID NO: 120383 - DNA, 120 bp, synthetic construct
  source 1..120: mol_type = other DNA
acccgcctcagcctcccaaagtgctgggattacaggtgtgagccaccatgcccgttcccttttctgaaaatttttaaattgttggactgtgttgttctaatattttgtatacattgtcat

SEQ ID NO: 120384 - DNA, 120 bp, synthetic construct
  source 1..120: mol_type = other DNA
ggctgtaaaagtttgaatgagtgtaagttgcagaaaggaggttataatgaatttaatgaatgcttgtcaactacccagagcaaaatacttcagtgtaaagcaagtgtcaaagttgttagt

SEQ ID NO: 120385 - DNA, 120 bp, synthetic construct
  source 1..120: mol_type = other DNA
agaatgtggcaaacctttggatgatccacaaaccttaatgaacatgagaaaatttatactgtagagaaaccctggaaatgtgaagaacgtggcaaagttctttacctcattctcaaacct

SEQ ID NO: 120386 - DNA, 120 bp, synthetic construct
  source 1..120: mol_type = other DNA
acaaatgtgaagaatgtggcagtctttaaatcttcctcagtcttttctaatcataagataattcacactgaagagaaactgcaaacgtggaaagtgtgacaaagcttgcaaccacactca

SEQ ID NO: 120387 - DNA, 120 bp, synthetic construct
  source 1..120: mol_type = other DNA
gaggacagaaatgaaagatccatgatgaaaatctagcagagaggcttttttgtagttgacaatattgagtgatgcatgaggtaggtgttcagagtaatattcttctgcattatagtgaga

SEQ ID NO: 120388 - DNA, 120 bp, synthetic construct
  source 1..120: mol_type = other DNA
tgactctagaatctaatggattgtcgttgagaatctccccatacaaactccttgtttttatttgtctggtgctcatgctagagctataatttctttgattctcttttttgttttcacttc

SEQ ID NO: 120389 - DNA, 120 bp, synthetic construct
  source 1..120: mol_type = other DNA
agaattttgaaatttcttaagaggaaatatatcttagaaataaaatttttaggccaggtggcggtggttcacacctgtaatcccagcactttgggaggccgagatgggtgggtcatgaag

SEQ ID NO: 120390 - DNA, 120 bp, synthetic construct
  source 1..120: mol_type = other DNA
tgcatttcatgggctacagttttcatttttactcacctaactttatccaagtccttggtcaccttctctggaaaaaaatttgaagattatggcagctgttgaatccaaacagtttctcag

SEQ ID NO: 120391 - DNA, 120 bp, synthetic construct
  source 1..120: mol_type = other DNA
tcctgccaccttggcctcccaaagttctggaattacaggcgtgagccactgcgcccagcctctatggttattatattacaaaaacagcacaaaaactatatattttttataatactcaag

SEQ ID NO: 120392 - DNA, 120 bp, synthetic construct
  source 1..120: mol_type = other DNA
agtgagccaagatcatgccattgcactccagcctgggtgacaagagcaaaactccatcccccctgcccaaaaaaaaaaattaattttcacagaaaattaatagcataggtattattatcc

SEQ ID NO: 120393 - DNA, 120 bp, synthetic construct
  source 1..120: mol_type = other DNA
atctgggaagaaaggagactttttacaacagagaatacccctattaaatatgggtcacagatttttaccctagtccagcctatccacctaccacagaaagtagctgtagttcattgctgg

SEQ ID NO: 120394 - DNA, 120 bp, synthetic construct
  source 1..120: mol_type = other DNA
catgagattctcaaaaaaatcttgctcctatttcagaagtgtcactccagccccttgaaggtccaggaaacctggctgagtagtgtggtctatggaggtgcatgggcttcagaatcaggc

SEQ ID NO: 120395 - DNA, 120 bp, synthetic construct
  source 1..120: mol_type = other DNA
aggatcgaaggcgactgtcgctacaaccctcccccttgtaccagttctctgatagaaaaggacagtgccttggagtggccgtgggccaagcacaggccatgccttcatctgcatagggta

SEQ ID NO: 120396 - DNA, 120 bp, synthetic construct
  source 1..120: mol_type = other DNA
cttgacccagctccttataatgttactaacatgacataaatattttggttttagcttcactctttccacctgctgtcggttttgcttgggcactcatgggtaataaccaagatggagtca

SEQ ID NO: 120397 - DNA, 120 bp, synthetic construct; identical to SEQ ID NO: 19713
  source 1..120: mol_type = other DNA

SEQ ID NO: 120398 - DNA, 120 bp, synthetic construct
  source 1..120: mol_type = other DNA
gtttattaaaaagctttagagcaaggatgaaaggaagcaaactacacttggaagagggccaagcaggcgacttcagagatcaaatgtgcggtttgactttgacttggggttttatgcttc

SEQ ID NO: 120399 - DNA, 120 bp, synthetic construct
  source 1..120: mol_type = other DNA
agaaagagaaggaggaagagcagaaggagaaagagcaggaggaggagaagcagcaggaggaggagcagcaggaggaagaggagcaggaggaggagcagggagcaattattattttagaga

SEQ ID NO: 120400 - DNA, 120 bp, synthetic construct; identical to SEQ ID NO: 31971
  source 1..120: mol_type = other DNA

SEQ ID NO: 120401 - DNA, 120 bp, synthetic construct; identical to SEQ ID NO: 31972
  source 1..120: mol_type = other DNA

SEQ ID NO: 120402 - DNA, 120 bp, synthetic construct; identical to SEQ ID NO: 19952
  source 1..120: mol_type = other DNA

SEQ ID NO: 120403 - DNA, 120 bp, synthetic construct; identical to SEQ ID NO: 19953
  source 1..120: mol_type = other DNA

SEQ ID NO: 120404 - DNA, 120 bp, synthetic construct
  source 1..120: mol_type = other DNA
tgagatgagacatacttttcatgttcttgatctcagggaaatcattcaatattttgctattaagtatggtattagtgctatgtttttgtagatgcttattaaattgaggaagtttccttc

SEQ ID NO: 120405 - DNA, 120 bp, synthetic construct
  source 1..120: mol_type = other DNA
tgcttatggagtagccattccttattcttttacttttttgtttgtttgtttgttttggttttggttttgagacagagtctcgcgctgtccccaggctggagtgcagtggcatgatctcaa

SEQ ID NO: 120406 - DNA, 120 bp, synthetic construct
  source 1..120: mol_type = other DNA
cctctgcccagctgccaccccgtctgggaagtgaggagcgtctctgcctggctgcccattgtctgggatgtgaggagcccctctgcctggctgcccagtctggaaagtgaggagcgtctc

SEQ ID NO: 120407 - DNA, 120 bp, synthetic construct; identical to SEQ ID NO: 19828
  source 1..120: mol_type = other DNA

SEQ ID NO: 120408 - DNA, 120 bp, synthetic construct; identical to SEQ ID NO: 35547
  source 1..120: mol_type = other DNA

SEQ ID NO: 120409 - DNA, 120 bp, synthetic construct; identical to SEQ ID NO: 11639
  source 1..120: mol_type = other DNA

SEQ ID NO: 120410 - DNA, 120 bp, synthetic construct
  source 1..120: mol_type = other DNA
tgaatgctttcatgtacagtcaggtgtgagaactgggtgaaggctttgccacacttttcacacttgtagggtttctctccagtatgaattctcttatgtacaataaggtttgaggactgg

SEQ ID NO: 120411 - DNA, 120 bp, synthetic construct
  source 1..120: mol_type = other DNA
tagtaaggatggagaacatactaaaacctttgccacattcttcacatttgtagggtttctctccagtatgaattttcttatgataactaagggttgagggccatttataggctttgccac

SEQ ID NO: 120412 - DNA, 120 bp, synthetic construct
  source 1..120: mol_type = other DNA
cacatttgtagggtttctctccagtatgaattaccttatgtttagtaaggattgagaatgtactgaagcttttgccacattcttcacatttgtagggtttctctccagtatgaattctct

SEQ ID NO: 120413 - DNA, 120 bp, synthetic construct; identical to SEQ ID NO: 19649
  source 1..120: mol_type = other DNA

SEQ ID NO: 120414 - DNA, 120 bp, synthetic construct
  source 1..120: mol_type = other DNA
tttcttaatccagtctgtcattgttggtcatttgggttggttccaagtctttgctattgtgaatagtgccgcaataaacatacgtgtgcatgtgtctttatagcagcatgatttatagtc

SEQ ID NO: 120415 - DNA, 120 bp, synthetic construct
  source 1..120: mol_type = other DNA
aaataaggaatcctttccccattacttctttttctcaggtttgtcaaagatcagatagttgtagatatccagcattatttctgagggctctgttctattccattgatctatatctctgat

SEQ ID NO: 120416 - DNA, 120 bp, synthetic construct
  source 1..120: mol_type = other DNA
tgatccaccccccttggcctcccaaaatgctgggattacaggcatgagccacagcgcccagctctcagcagaattttaaaagatttatcttccatctctgctgttctcttatttcctaac

SEQ ID NO: 120417 - DNA, 120 bp, synthetic construct; identical to SEQ ID NO: 11659
  source 1..120: mol_type = other DNA

SEQ ID NO: 120418 - DNA, 120 bp, synthetic construct
  source 1..120: mol_type = other DNA
taacttccacaatggttgaactagtttacagtcccaccaacagtataaaagtgttcctgtttctccacatcctctccagcacctgttgtttcctgactttttaatgatcgccattctaac

SEQ ID NO: 120419 - DNA, 120 bp, synthetic construct
  source 1..120: mol_type = other DNA
attgagcagtggtttgtagttctccttgaagaggtccttcacgtcccttgtaaagtggattcctaggtattttattctctttgaagcaattgtgaatgggagttcactcatgatttggtt

SEQ ID NO: 120420 - DNA, 120 bp, synthetic construct
  source 1..120: mol_type = other DNA
actctttttggttggtaagctattgattgttgccataatttcagagcctgttattggtctgttcagagattcagcttcttccttgtttagtcttgggagggtgtatgtgtcgaggaattt

SEQ ID NO: 120421 - DNA, 120 bp, synthetic construct
  source 1..120: mol_type = other DNA
ttgctggttagttgatgcagtttcttcgtagcctcgatggtctttacaatttggcatgattttgcagtggctggtaccggttgttcctttccatgtttagtgcttccttcaggagctctt

SEQ ID NO: 120422 - DNA, 120 bp, synthetic construct; identical to SEQ ID NO: 22580
  source 1..120: mol_type = other DNA

SEQ ID NO: 120423 - DNA, 120 bp, synthetic construct; identical to SEQ ID NO: 22581
  source 1..120: mol_type = other DNA

SEQ ID NO: 120424 - DNA, 120 bp, synthetic construct
  source 1..120: mol_type = other DNA
aaaacactgaacgtgtgtatacacacatctatctatatatatatatatatatatatatatatatacacacacacacacaactatgcccactactagaccactacaccataccacttcttc

SEQ ID NO: 120425 - DNA, 120 bp, synthetic construct; identical to SEQ ID NO: 22582
  source 1..120: mol_type = other DNA

SEQ ID NO: 120426 - DNA, 120 bp, synthetic construct; identical to SEQ ID NO: 14217
  source 1..120: mol_type = other DNA

SEQ ID NO: 120427 - DNA, 120 bp, synthetic construct
  source 1..120: mol_type = other DNA
tgggagatagggaggccaaggctcagctacccccggccaggagaacaaaagctgagttacagccgcctccgctgctgccgcgggccgagctctttgtgacactttgtttgggacgcaaag

SEQ ID NO: 120428 - DNA, 120 bp, synthetic construct
  source 1..120: mol_type = other DNA
caaaaattttctcccattttgtaggttgcctgtccactctgatggtagtttcttttgctgtgcagaagctctttagtttaattagatcccatttgtcaattttggcttttgttgccattg

SEQ ID NO: 120429 - DNA, 120 bp, synthetic construct
  source 1..120: mol_type = other DNA
catggaatgttcttccatttgtttgtatcctcttttatttcatcgagcagtggtttgtagttctccttgaagaggtccttcacatcccttgtaagttggattcctaggtattttattctc

SEQ ID NO: 120430 - DNA, 120 bp, synthetic construct
  source 1..120: mol_type = other DNA
tattcagagattcaacttcttcctggtttagtcttgggagggtgtatgtgttgaggaatttatccatttcttctagattttctaatttatttgcgtagaggtgtttgtagtattctctga

SEQ ID NO: 120431 - DNA, 120 bp, synthetic construct
  source 1..120: mol_type = other DNA
ggtgctcctgtattaggtgcatatatatttaggatagttagctcttgttgaattgatccctttaccattatgtaatggccttctttgtctcttttgatctttgttggtttaaagtctgtt

SEQ ID NO: 120432 - DNA, 120 bp, synthetic construct
  source 1..120: mol_type = other DNA
gatctggtcttttcacatagtcccatatttcttggaggctttgttcgtttctttttattcttttttctctgaacttccgttctcgcttcatttcattcatttcatcttccatcactgata

SEQ ID NO: 120433 - DNA, 120 bp, synthetic construct
  source 1..120: mol_type = other DNA
ccaaagtgctgggattacaggtgtgagccaccacccccggcctgcttgaagtgattttgtttataatgatggatttggtcagaaatagaagggaaaaatccaacttaatgagttgaaatt

SEQ ID NO: 120434 - DNA, 120 bp, synthetic construct; identical to SEQ ID NO: 19161
  source 1..120: mol_type = other DNA

SEQ ID NO: 120435 - DNA, 120 bp, synthetic construct; identical to SEQ ID NO: 19162
  source 1..120: mol_type = other DNA

SEQ ID NO: 120436 - DNA, 120 bp, synthetic construct; identical to SEQ ID NO: 19163
  source 1..120: mol_type = other DNA

SEQ ID NO: 120437 - DNA, 120 bp, synthetic construct; identical to SEQ ID NO: 19164
  source 1..120: mol_type = other DNA

SEQ ID NO: 120438 - DNA, 120 bp, synthetic construct; identical to SEQ ID NO: 19165
  source 1..120: mol_type = other DNA

SEQ ID NO: 120439 - DNA, 120 bp, synthetic construct; identical to SEQ ID NO: 19166
  source 1..120: mol_type = other DNA

SEQ ID NO: 120440 - DNA, 120 bp, synthetic construct; identical to SEQ ID NO: 19167
  source 1..120: mol_type = other DNA

SEQ ID NO: 120441 - DNA, 120 bp, synthetic construct; identical to SEQ ID NO: 19168
  source 1..120: mol_type = other DNA

SEQ ID NO: 120442 - DNA, 120 bp, synthetic construct; identical to SEQ ID NO: 10240
  source 1..120: mol_type = other DNA

SEQ ID NO: 120443 - DNA, 120 bp, synthetic construct; identical to SEQ ID NO: 31968
  source 1..120: mol_type = other DNA

SEQ ID NO: 120444 - DNA, 120 bp, synthetic construct; identical to SEQ ID NO: 31969
  source 1..120: mol_type = other DNA

SEQ ID NO: 120445 - DNA, 120 bp, synthetic construct; identical to SEQ ID NO: 19643
  source 1..120: mol_type = other DNA

SEQ ID NO: 120446 - DNA, 120 bp, synthetic construct
  source 1..120: mol_type = other DNA
ggacatttgggttggttccaagtctttgctattgtgaatactgccacaataaacatacttgtgcatgtgtctttatagcagcatgatttatagtcctttgggtatctacccagtaatggg

SEQ ID NO: 120447 - DNA, 120 bp, synthetic construct
  source 1..120: mol_type = other DNA
atggccatactgcccaaggtaatttatagattcaatgccatccccatcaagctaccaatgattttcttcagagaattggaaaaaactactttaaagttcacatggaaccaaaaaagagcc

SEQ ID NO: 120448 - DNA, 120 bp, synthetic construct
  source 1..120: mol_type = other DNA
tgacaaaattcaatgacacttcatgctaaaaactctcaataaattaggtattgatgtgacgtatctcaaaataataagagctatctatgccaaacccacagccaatatcatactgaatgg

SEQ ID NO: 120449 - DNA, 120 bp, synthetic construct
  source 1..120: mol_type = other DNA
agccgtatgtagaaagctgaaactggatcccttccttacaccttgtacaaaaatcaattcaagatggattaaagacttaaacgttagacctaaaaccataaaaaccctagaagaaaacct

SEQ ID NO: 120450 - DNA, 120 bp, synthetic construct
  source 1..120: mol_type = other DNA
aaaaccaaacaccgcatattcccactcatggggggaattgaacaatgagaacacatggacacaggaaggggaaaatcacactctggggattgatgtgggatggggggatgggggagggat

SEQ ID NO: 120451 - DNA, 120 bp, synthetic construct
  source 1..120: mol_type = other DNA
gtgatccgccagcctcggcctcccaaagtgctgggattacaggcgtgagccaccacgcctggccagaatgattacattttaaagaaaataacttacatgctagttttttttttttttttt

SEQ ID NO: 120452 - DNA, 120 bp, synthetic construct
  source 1..120: mol_type = other DNA
tcccaaagtgctgggattacaagcgtgagtcaccgcgcctggcctagaaatcatttttatgtcattgggcagtttaaagatgttatgtgatacattaatgcataaaactggatagtttct

SEQ ID NO: 120453 - DNA, 120 bp, synthetic construct; identical to SEQ ID NO: 20109
  source 1..120: mol_type = other DNA

SEQ ID NO: 120454 - DNA, 120 bp, synthetic construct
  source 1..120: mol_type = other DNA
aaatggtatttctagttctagatccctgaggaatcgccacaccaactttcacaatggttgaactagtttacagtcccaccaacagtgtaaaagtgttcctatttctccacatcctctcca

SEQ ID NO: 120455 - DNA, 120 bp, synthetic construct
  source 1..120: mol_type = other DNA
ttgatggggatggcattgaatctgtaaattaccttgggcagtatggccattttcacaatattgattcttcctacccatgagcatggaatgttcttccatttgtttgtatactcttatttc

SEQ ID NO: 120456 - DNA, 120 bp, synthetic construct
  source 1..120: mol_type = other DNA
atgagatgggtttcctgaatacagcacactgatgggtcttgactctttatccaatttgccagtctgtgtcttttaattggagcatttagcccgtttacatttaaggttaatattcttatg

SEQ ID NO: 120457 - DNA, 120 bp, synthetic construct
  source 1..120: mol_type = other DNA
cactggtaccctttcttccagttgatcgaatcggctactgaggcttgtgcattcgtcacgtagttcgtgtgccttggttttcagctccatcaggtcctttaaggacttctctgcattggt

SEQ ID NO: 120458 - DNA, 120 bp, synthetic construct; identical to SEQ ID NO: 13523
  source 1..120: mol_type = other DNA

SEQ ID NO: 120459 - DNA, 120 bp, synthetic construct
  source 1..120: mol_type = other DNA
tggtatttctagttctagatccctgaggaattgccacactgacttccacaatggttgaactagtttacagtcccaccaacagtgtaaaggtgttcctgtttctccacgtcctctccagca

SEQ ID NO: 120460 - DNA, 120 bp, synthetic construct
  source 1..120: mol_type = other DNA
gggctcttttttggttccatatgaactttaaagtagtttttttcaattctatgaagaaagtcattggtagcttgatggggatggcattaaatctataaattaccttgggcagtatggcca

SEQ ID NO: 120461 - DNA, 120 bp, synthetic construct
  source 1..120: mol_type = other DNA
tcttttttggttgtgtctctgcccggctttggtatcaggatgatgctggcctcagaaaatgagttagggaggattccctctttttctattgattggaatagtttcagaaggaatagtacc

SEQ ID NO: 120462 - DNA, 120 bp, synthetic construct; identical to SEQ ID NO: 19946
  source 1..120: mol_type = other DNA

SEQ ID NO: 120463 - DNA, 120 bp, synthetic construct
  source 1..120: mol_type = other DNA
gtctgagaagtgaggaaaccctctgcctggcaaccgccccgtctgagaagtgaggagcccctccgtccggcaaccaccccgtctgggaagtgaggagcgtctccgcccggcagccgcccc

SEQ ID NO: 120464 - DNA, 120 bp, synthetic construct; identical to SEQ ID NO: 19947
  source 1..120: mol_type = other DNA

SEQ ID NO: 120465 - DNA, 120 bp, synthetic construct; identical to SEQ ID NO: 19948
  source 1..120: mol_type = other DNA

SEQ ID NO: 120466 - DNA, 120 bp, synthetic construct
  source 1..120: mol_type = other DNA
aagacataagcaaattatttcaatcaagaatacatgggtggacagctgaggtggttcacacctgtaattccagcactttgggaggtggaggtgggtggattacctgaggtcaggagtttg

SEQ ID NO: 120467 - DNA, 120 bp, synthetic construct; identical to SEQ ID NO: 19949
  source 1..120: mol_type = other DNA

SEQ ID NO: 120468 - DNA, 120 bp, synthetic construct; identical to SEQ ID NO: 6738
  source 1..120: mol_type = other DNA

SEQ ID NO: 120469 - DNA, 120 bp, synthetic construct
  source 1..120: mol_type = other DNA
ggagaggatcaggaaaaataactcatgagtactaggcttaatacctgagtgatgaaataacctatacaacaaacccccaagacatgagtgtacccataacaaacctgcacatgtatccct

SEQ ID NO: 120470 - DNA, 120 bp, synthetic construct
  source 1..120: mol_type = other DNA
attattctacagatgggaaatgggacccaaaaaaatgctaaggcacttccccatagctagttactgacattaccagggccctgatccagtgttctttctactacagattatcaactgcaa

SEQ ID NO: 120471 - DNA, 120 bp, synthetic construct; identical to SEQ ID NO: 15337
  source 1..120: mol_type = other DNA

SEQ ID NO: 120472 - DNA, 120 bp, synthetic construct; identical to SEQ ID NO: 15338
  source 1..120: mol_type = other DNA

SEQ ID NO: 120473 - DNA, 120 bp, synthetic construct
  source 1..120: mol_type = other DNA
tttaagttatcaggtaagtatctactggcttcagaattttcttggtaaagcacagaattctatgaaagatacctgacttcaaactatactacaaggctacagtaaccaaaacagcatggt

SEQ ID NO: 120474 - DNA, 120 bp, synthetic construct
  source 1..120: mol_type = other DNA
gattcctcaaggatctagtactagaaataccatttgacccagcccttccactactgggtatatactcaaaggattataaatcatgttgctataaagacacatgcacacgtatgtttattg

SEQ ID NO: 120475 - DNA, 120 bp, synthetic construct; identical to SEQ ID NO: 15339
  source 1..120: mol_type = other DNA

SEQ ID NO: 120476 - DNA, 120 bp, synthetic construct
  source 1..120: mol_type = other DNA
actctggggactattgtggggtggggggaggggggagggatagcactgggagatacacctactgctagatgacgagttagtgggtgcagcacaccagcatggcacatgtatacgtatgta

SEQ ID NO: 120477 - DNA, 120 bp, synthetic construct
  source 1..120: mol_type = other DNA
aagattgtgccactgcattccagcctgggtgacagagcaagacctttccacccccacaccgcaaaaaggaataaaaggaaatcttaggaaaattttatgaaggaagaaattcacctccct

SEQ ID NO: 120478 - DNA, 120 bp, synthetic construct; identical to SEQ ID NO: 19825
  source 1..120: mol_type = other DNA

SEQ ID NO: 120479 - DNA, 120 bp, synthetic construct
  source 1..120: mol_type = other DNA
aataaaaggatgcgggtaatcatctggtattaataaccatctcctcatgtgtcttttggcagcacaaatgtcttctttcgagaagtgtctgttcatatccttcacccactttttgatggg

SEQ ID NO: 120480 - DNA, 120 bp, synthetic construct
  source 1..120: mol_type = other DNA
taatgttaaatgatgagttaatgggtgcagcacaccaacatggcacatgtatacatatgtaactaacctgcaggttgtgcacatgtaccctaaaacttaaagtataataaaaaaaaaaga

SEQ ID NO: 120481 - DNA, 120 bp, synthetic construct; identical to SEQ ID NO: 19826
  source 1..120: mol_type = other DNA

SEQ ID NO: 120482 - DNA, 120 bp, synthetic construct; identical to SEQ ID NO: 19827
  source 1..120: mol_type = other DNA

SEQ ID NO: 120483 - DNA, 120 bp, synthetic construct
  source 1..120: mol_type = other DNA
acagagtctggctctgtcgcccaggctggagtgcagtggcgtgatctcagctcactgcaagctccgcctcccgggttcacgccattctcctgcctcagcctcccgagtagctgggactac

SEQ ID NO: 120484 - DNA, 120 bp, synthetic construct; identical to SEQ ID NO: 17537
  source 1..120: mol_type = other DNA

SEQ ID NO: 120485 - DNA, 120 bp, synthetic construct; identical to SEQ ID NO: 17538
  source 1..120: mol_type = other DNA

SEQ ID NO: 120486 - DNA, 120 bp, synthetic construct; identical to SEQ ID NO: 17539
  source 1..120: mol_type = other DNA

SEQ ID NO: 120487 - DNA, 120 bp, synthetic construct; identical to SEQ ID NO: 17540
  source 1..120: mol_type = other DNA

SEQ ID NO: 120488 - DNA, 120 bp, synthetic construct
  source 1..120: mol_type = other DNA
accaacatggtgaaacctcgtctttacttaaaatacaaaaattagctgggcttggtggtgcgcacttgtaatcccagctactccggagactgaggcatgagaatcacttgaacccaggag

SEQ ID NO: 120489 - DNA, 120 bp, synthetic construct; identical to SEQ ID NO: 17541
  source 1..120: mol_type = other DNA

SEQ ID NO: 120490 - DNA, 120 bp, synthetic construct; identical to SEQ ID NO: 17542
  source 1..120: mol_type = other DNA

SEQ ID NO: 120491 - DNA, 120 bp, synthetic construct; identical to SEQ ID NO: 17543
  source 1..120: mol_type = other DNA

SEQ ID NO: 120492 - DNA, 120 bp, synthetic construct; identical to SEQ ID NO: 17544
  source 1..120: mol_type = other DNA

SEQ ID NO: 120493 - DNA, 120 bp, synthetic construct
  source 1..120: mol_type = other DNA
gttcagtacgcttccagtttttttcaagagagaaactctaaatttgcatttatctgtaatctgccccccccccggcttttttttttttttttgagatggagtctcgctctattgcccagg

SEQ ID NO: 120494 - DNA, 120 bp, synthetic construct; identical to SEQ ID NO: 17545
  source 1..120: mol_type = other DNA

SEQ ID NO: 120495 - DNA, 120 bp, synthetic construct; identical to SEQ ID NO: 17546
  source 1..120: mol_type = other DNA

SEQ ID NO: 120496 - DNA, 120 bp, synthetic construct; identical to SEQ ID NO: 17547
  source 1..120: mol_type = other DNA

SEQ ID NO: 120497 - DNA, 120 bp, synthetic construct; identical to SEQ ID NO: 17548
  source 1..120: mol_type = other DNA

SEQ ID NO: 120498 - DNA, 120 bp, synthetic construct; identical to SEQ ID NO: 17549
  source 1..120: mol_type = other DNA

SEQ ID NO: 120499 - DNA, 120 bp, synthetic construct
  source 1..120: mol_type = other DNA
atctcggctcactgcaacctccacctcccaggttcatgccattctcttgtctcagcctcccaagtagctgggactacaggcacctgccagtacgcctggctaattttttttgtattttta

SEQ ID NO: 120500 - DNA, 120 bp, synthetic construct
  source 1..120: mol_type = other DNA
aactacctgcgtggtccagtcaccttgcaccaggccccacctcccacattggggattacaattaaacatgagatttgggtggggatacagatctaaactgtatcattactcaaaaaaaaa

SEQ ID NO: 120501 - DNA, 120 bp, synthetic construct; identical to SEQ ID NO: 17550
  source 1..120: mol_type = other DNA

SEQ ID NO: 120502 - DNA, 120 bp, synthetic construct; identical to SEQ ID NO: 17551
  source 1..120: mol_type = other DNA

SEQ ID NO: 120503 - DNA, 120 bp, synthetic construct
  source 1..120: mol_type = other DNA
tggaggttgcggtgagtcgagatcgcaccattgcactccagcctgggtgattgagcgagtctccatctcaaaaaaaaaaaaaaagtaagctaatgatagtaataacattggggaagtaaa

SEQ ID NO: 120504 - DNA, 120 bp, synthetic construct
  source 1..120: mol_type = other DNA
cggctgccgggcggagacgctcctcacttcccagacggggcggctgctggacggaggggctcctcacttctcagacggggcggctgccgggcggaggggctcctcacttctcagacgggg

SEQ ID NO: 120505 - DNA, 120 bp, synthetic construct
  source 1..120: mol_type = other DNA
tttattcctaaatactccagaaggtactaagaattaaggatatgattcttgatagtcaaacacacgaaaacccatttcacctgcagtgcccaccggaggttcatcttaggctcaactgcg

SEQ ID NO: 120506 - DNA, 120 bp, synthetic construct
  source 1..120: mol_type = other DNA
ctttagtagagatggggtttcaccatgttggccaggctggtctcaaattcctgacctcaattgatctaccctccttggcttcccaaagggctgggattacaggtgtaagccaccatgccc

SEQ ID NO: 120507 - DNA, 120 bp, synthetic construct; identical to SEQ ID NO: 20113
  source 1..120: mol_type = other DNA

SEQ ID NO: 120508 - DNA, 120 bp, synthetic construct; identical to SEQ ID NO: 19951
  source 1..120: mol_type = other DNA

SEQ ID NO: 120509 - DNA, 120 bp, synthetic construct
  source 1..120: mol_type = other DNA
gtgtgtatgtgtgtggggatgtgtatgcatatacatatataggttttacaaatataaaaagtagcaagttttgcagggcgcagtggctcacgtctgtaatcccaacactttgggaggctg

SEQ ID NO: 120510 - DNA, 120 bp, synthetic construct; identical to SEQ ID NO: 27542
  source 1..120: mol_type = other DNA

SEQ ID NO: 120511 - DNA, 120 bp, synthetic construct; identical to SEQ ID NO: 27543
  source 1..120: mol_type = other DNA

SEQ ID NO: 120512 - DNA, 120 bp, synthetic construct; identical to SEQ ID NO: 27544
  source 1..120: mol_type = other DNA

SEQ ID NO: 120513 - DNA, 120 bp, synthetic construct; identical to SEQ ID NO: 27545
  source 1..120: mol_type = other DNA

SEQ ID NO: 120514 - DNA, 120 bp, synthetic construct; identical to SEQ ID NO: 27546
  source 1..120: mol_type = other DNA

SEQ ID NO: 120515 - DNA, 120 bp, synthetic construct; identical to SEQ ID NO: 27547
  source 1..120: mol_type = other DNA

SEQ ID NO: 120516 - DNA, 120 bp, synthetic construct; identical to SEQ ID NO: 20149
  source 1..120: mol_type = other DNA

SEQ ID NO: 120517 - DNA, 120 bp, synthetic construct; identical to SEQ ID NO: 20150
  source 1..120: mol_type = other DNA

SEQ ID NO: 120518 - DNA, 120 bp, synthetic construct; identical to SEQ ID NO: 20145
  source 1..120: mol_type = other DNA

SEQ ID NO: 120519 - DNA, 120 bp, synthetic construct; identical to SEQ ID NO: 20146
  source 1..120: mol_type = other DNA

SEQ ID NO: 120520 - DNA, 120 bp, synthetic construct
  source 1..120: mol_type = other DNA
aggttttcgtccaagtctcagcttggccaaggcctgtcgctcactcatttacaaaagtcgatgtgaggaggagcctttacacctgtggagacagtgatagctttggagcagataaggtgg

SEQ ID NO: 120521 - DNA, 120 bp, synthetic construct
  source 1..120: mol_type = other DNA
aaatacccaaaaaccatacaaactgtatcagctgcatacaaactatatcagacaggaattctgtatcaataataaagtatctggggccaggcgcagtggctcacacctgtaatcccagca

SEQ ID NO: 120522 - DNA, 120 bp, synthetic construct
  source 1..120: mol_type = other DNA
ctctgcccagccgccccgtctgagaagtgaggagaccctccgcctggcaaccgccccgtctgagaagtgaggagcccctccgccaggcagccgccccgtctgagaagtgaggagcccctc

SEQ ID NO: 120523 - DNA, 120 bp, synthetic construct; identical to SEQ ID NO: 20140
  source 1..120: mol_type = other DNA

SEQ ID NO: 120524 - DNA, 120 bp, synthetic construct; identical to SEQ ID NO: 22441
  source 1..120: mol_type = other DNA

SEQ ID NO: 120525 - DNA, 120 bp, synthetic construct
  source 1..120: mol_type = other DNA
catttttaattgtatttggaaaattcatcacttcactgttagcaattggtagaattactagccatgaggtcaggaattcaagagtagcctggataacatggtgaaaccctgtctctacta

SEQ ID NO: 120526 - DNA, 120 bp, synthetic construct; identical to SEQ ID NO: 22456
  source 1..120: mol_type = other DNA

SEQ ID NO: 120527 - DNA, 120 bp, synthetic construct; identical to SEQ ID NO: 22306
  source 1..120: mol_type = other DNA

SEQ ID NO: 120528 - DNA, 120 bp, synthetic construct
  source 1..120: mol_type = other DNA
aacactgaaattcaggaaatacagagaacgccacaaagatactcctcgagaagagcaactccaagacacataattgtcagattcaccaaagttgaaatgaaggaaaaaatgttaagggca

SEQ ID NO: 120529 - DNA, 120 bp, synthetic construct
  source 1..120: mol_type = other DNA
acagaaagttaacaaggatatccaggaattgaactcagctctgcaccaagcagacctaatagacatctacagaactctctaccccaaatcaacagaatatacattcttctcagcaccaca

SEQ ID NO: 120530 - DNA, 120 bp, synthetic construct; identical to SEQ ID NO: 4486
  source 1..120: mol_type = other DNA

SEQ ID NO: 120531 - DNA, 120 bp, synthetic construct; identical to SEQ ID NO: 5666
  source 1..120: mol_type = other DNA

SEQ ID NO: 120532 - DNA, 120 bp, synthetic construct
  source 1..120: mol_type = other DNA
ctccctccatgactgcaatcgctctgcaaggcttcccgcctttttttttttttttaagacagagtctcactctgtcgccaaggctggagtgaagtggcgcaatctcggctcactgcaacc

SEQ ID NO: 120533 - DNA, 120 bp, synthetic construct; identical to SEQ ID NO: 27347
  source 1..120: mol_type = other DNA

SEQ ID NO: 120534 - DNA, 120 bp, synthetic construct
  source 1..120: mol_type = other DNA
tgcctcagtttcctgagcggtgcagtgggtgctggcagtgccagctggcgccgaggaactcagcggcgtggggcgagccctggccctggtgggctcagcgggtcgctgctgccactgcgg

SEQ ID NO: 120535 - DNA, 120 bp, synthetic construct
  source 1..120: mol_type = other DNA
ccgggaccccgagcgcagggcagaggcagccgggcccggtttctgagtcagtccccaggacggccactcctcctgcctcgggacacccagcgctttcctcttcaaagccgttttccgtgg

SEQ ID NO: 120536 - DNA, 120 bp, synthetic construct; identical to SEQ ID NO: 27348
  source 1..120: mol_type = other DNA

SEQ ID NO: 120537 - DNA, 120 bp, synthetic construct; identical to SEQ ID NO: 27349
  source 1..120: mol_type = other DNA

SEQ ID NO: 120538 - DNA, 120 bp, synthetic construct; identical to SEQ ID NO: 27350
  source 1..120: mol_type = other DNA

SEQ ID NO: 120539 - DNA, 120 bp, synthetic construct
  source 1..120: mol_type = other DNA
gcactccagccttagtgacagagcaagactccaactcaaaaaaaaaaaaaaaagaatggtgttcgtgaaggtccaaagaagtaaagccagtgaggagaaggtagagccaggcaccgaaga

SEQ ID NO: 120540 - DNA, 120 bp, synthetic construct
  source 1..120: mol_type = other DNA
tgcacccattaactcgtcatttacattaggtataaccccacaacaagccccggtgtgtgatggtccccttcctgcatcgaagtgttttcattgttcaattcccacctatgagtgagaaca

SEQ ID NO: 120541 - DNA, 120 bp, synthetic construct
  source 1..120: mol_type = other DNA
ggatccagtttcagctttctacatatggctagccagttttcccagcaccatttgttaaatagggaatcctttccccatttcttgtttttgtcaggtttgccaaagatcagatagttgtag

SEQ ID NO: 120542 - DNA, 120 bp, synthetic construct
  source 1..120: mol_type = other DNA
aggtatgtgcttggctttctgaattccctaacccatgtatgcctagtgttccattagtggaatgctaagcatgtgggagttatttatatcctactgctcagggtcatttcaaggtctgat

SEQ ID NO: 120543 - DNA, 120 bp, synthetic construct
  source 1..120: mol_type = other DNA
ttttttttttgagatggagtctcactctgtcacccaggctggagtgtggtggcacagtcttggctcactgcaatctctgcctcctgggtgcaagcaattctcctccctcagcctcccaag

SEQ ID NO: 120544 - DNA, 120 bp, synthetic construct; identical to SEQ ID NO: 4454
  source 1..120: mol_type = other DNA

SEQ ID NO: 120545 - DNA, 120 bp, synthetic construct; identical to SEQ ID NO: 21846
  source 1..120: mol_type = other DNA

SEQ ID NO: 120546 - DNA, 120 bp, synthetic construct
  source 1..120: mol_type = other DNA
ctgcacagcaaaagaaactaccatcagagcgaacaggcaacctacagaatgggagaaaatatttgcaacctactcatctgacaaagggctaatatccagaatctacaacgaactccaaca

SEQ ID NO: 120547 - DNA, 120 bp, synthetic construct; identical to SEQ ID NO: 21847
  source 1..120: mol_type = other DNA

SEQ ID NO: 120548 - DNA, 120 bp, synthetic construct; identical to SEQ ID NO: 21848
  source 1..120: mol_type = other DNA

SEQ ID NO: 120549 - DNA, 120 bp, synthetic construct
  source 1..120: mol_type = other DNA
catttacagattttaatgaatatccccttctataactatctgtgtaaatgtttaagtcttaaaaagagattgtgatgttccccttcctgtgtccaagtgttctcattgttcaattcccac

SEQ ID NO: 120550 - DNA, 120 bp, synthetic construct
  source 1..120: mol_type = other DNA
agttaatgggtgcagcacaccaacatggcacatgtatacatatgtaacaaacccgcacgttgtgcacatgtaccctaaaacttaaagtataatttaaagaaaaaaaaaaaaaccagatct

SEQ ID NO: 120551 - DNA, 120 bp, synthetic construct; identical to SEQ ID NO: 21849
  source 1..120: mol_type = other DNA

SEQ ID NO: 120552 - DNA, 120 bp, synthetic construct; identical to SEQ ID NO: 21850
  source 1..120: mol_type = other DNA

SEQ ID NO: 120553 - DNA, 120 bp, synthetic construct
  source 1..120: mol_type = other DNA
gacatggatgaaattggaaatcatcattctcagtaaactatctcaagaactaaaaaccaaacaccgcatattctcactcataggtgggaattgaacaatgagatcacatggacacaggaa

SEQ ID NO: 120554 - DNA, 120 bp, synthetic construct; identical to SEQ ID NO: 24141
  source 1..120: mol_type = other DNA

SEQ ID NO: 120555 - DNA, 120 bp, synthetic construct
  source 1..120: mol_type = other DNA
cttccttacaccttttacaaaaattaattcaagatggagtaaagacttacatgttagacctaaaagcataaaaaccctagaagaaaacctaggcaataccattcaggacataggcatggg

SEQ ID NO: 120556 - DNA, 120 bp, synthetic construct
  source 1..120: mol_type = other DNA
cacacaccggggcctgttgtggggtggggggagtaaggagggatagcattaggagatatacctaatgtaaatgacaagttaatgggtgcagtacaccaacatgtcacatgtatacatatg

SEQ ID NO: 120557 - DNA, 120 bp, synthetic construct; identical to SEQ ID NO: 24142
  source 1..120: mol_type = other DNA

SEQ ID NO: 120558 - DNA, 120 bp, synthetic construct; identical to SEQ ID NO: 24143
  source 1..120: mol_type = other DNA

SEQ ID NO: 120559 - DNA, 120 bp, synthetic construct; identical to SEQ ID NO: 24144
  source 1..120: mol_type = other DNA

SEQ ID NO: 120560 - DNA, 120 bp, synthetic construct; identical to SEQ ID NO: 24145
  source 1..120: mol_type = other DNA

SEQ ID NO: 120561 - DNA, 120 bp, synthetic construct; identical to SEQ ID NO: 24146
  source 1..120: mol_type = other DNA

SEQ ID NO: 120562 - DNA, 120 bp, synthetic construct
  source 1..120: mol_type = other DNA
tgtgagatgggtttcctgaatacagcacactgatgggtcttgactctttatccaatttgccagtctgtgtcttttaattggagcatttagtccatttacattgaaagttaatattgttac

SEQ ID NO: 120563 - DNA, 120 bp, synthetic construct
  source 1..120: mol_type = other DNA
atagtaggcataaaaactttagatctgatcctactaataagaagtcgaaaataaataacggcataaatgctgagaaataaaaatgaaatcctaaggcgcccccccccccccccccccccc

SEQ ID NO: 120564 - DNA, 120 bp, synthetic construct; identical to SEQ ID NO: 19824
  source 1..120: mol_type = other DNA

SEQ ID NO: 120565 - DNA, 120 bp, synthetic construct
  source 1..120: mol_type = other DNA
cctgttgtttcctgactttttaatgattgccattctaactggtgtgagatggtatctcattgtggttttgatttgcatttctctgatggccagtgatggtgagcattttttcatgtggtt

SEQ ID NO: 120566 - DNA, 120 bp, synthetic construct; identical to SEQ ID NO: 19139
  source 1..120: mol_type = other DNA

SEQ ID NO: 120567 - DNA, 120 bp, synthetic construct; identical to SEQ ID NO: 19140
  source 1..120: mol_type = other DNA

SEQ ID NO: 120568 - DNA, 120 bp, synthetic construct
  source 1..120: mol_type = other DNA
cctttttttgagcctatttgtgtctctgcacatgagatgggtctcctgaattaccgatgggtcttgattctttgtccagtttgcccgtctgtgtcttttaattggaggatttagcccatt

SEQ ID NO: 120569 - DNA, 120 bp, synthetic construct
  source 1..120: mol_type = other DNA
tcaggacataggcatgggcaaggacttcatgtctaaaacaccaaaagcaatggccaaaaacaaaacaaaacaccaaaaacaaaagccaaaattgacaaatgggatctaattaaactaaag

SEQ ID NO: 120570 - DNA, 120 bp, synthetic construct
  source 1..120: mol_type = other DNA
aaggggaacatcacactctgagggctgttgtggggtaaggggaagggggaggggggagggatagcattaggagatatacctaatgctaaatgacgagttaatgggtgcagcacaccagca

SEQ ID NO: 120571 - DNA, 120 bp, synthetic construct; identical to SEQ ID NO: 19141
  source 1..120: mol_type = other DNA

SEQ ID NO: 120572 - DNA, 120 bp, synthetic construct; identical to SEQ ID NO: 19142
  source 1..120: mol_type = other DNA

SEQ ID NO: 120573 - DNA, 120 bp, synthetic construct; identical to SEQ ID NO: 19143
  source 1..120: mol_type = other DNA

SEQ ID NO: 120574 - DNA, 120 bp, synthetic construct; identical to SEQ ID NO: 19144
  source 1..120: mol_type = other DNA

SEQ ID NO: 120575 - DNA, 120 bp, synthetic construct; identical to SEQ ID NO: 19145
  source 1..120: mol_type = other DNA

SEQ ID NO: 120576 - DNA, 120 bp, synthetic construct; identical to SEQ ID NO: 19146
  source 1..120: mol_type = other DNA

SEQ ID NO: 120577 - DNA, 120 bp, synthetic construct; identical to SEQ ID NO: 19147
  source 1..120: mol_type = other DNA

SEQ ID NO: 120578 - DNA, 120 bp, synthetic construct
  source 1..120: mol_type = other DNA
atgctagatgacacattagtgggtgcagcgcaccagcatggcacatgtatacatatgtaactaacctgcacaatgtgcacatgtaccctaaaacttagagtataataaaaaaaaaaaaaa

SEQ ID NO: 120579 - DNA, 120 bp, synthetic construct; identical to SEQ ID NO: 19148
  source 1..120: mol_type = other DNA

SEQ ID NO: 120580 - DNA, 120 bp, synthetic construct; identical to SEQ ID NO: 19149
  source 1..120: mol_type = other DNA

SEQ ID NO: 120581 - DNA, 120 bp, synthetic construct; identical to SEQ ID NO: 19150
  source 1..120: mol_type = other DNA

SEQ ID NO: 120582 - DNA, 120 bp, synthetic construct; identical to SEQ ID NO: 19151
  source 1..120: mol_type = other DNA

SEQ ID NO: 120583 - DNA, 120 bp, synthetic construct
  source 1..120: mol_type = other DNA
aaatttctgtggaagtgcaaatggccaggaatagctaaggcgtttaaaaaaaattattttgtatcttgttttcagagacatggtctcactttgtcacccaggctagggtgcagtggcgca

SEQ ID NO: 120584 - DNA, 120 bp, synthetic construct
  source 1..120: mol_type = other DNA
aaagatgttcatttataccacatgtaaatgtacaagatgaaactagtagtggcttaaacaaatgacactggactttaaaaaccgaggcattggccgggcgcggtggctcacgcctgtaat

SEQ ID NO: 120585 - DNA, 120 bp, synthetic construct
  source 1..120: mol_type = other DNA
attgcttgaacctgggaggcagaggttgcagtgagctaagatcacgccactgcactacagcctgggcaagagtgagactccatctcaaaaaataaaataaaataaaataaactggatatg

SEQ ID NO: 120586 - DNA, 120 bp, synthetic construct; identical to SEQ ID NO: 19953
  source 1..120: mol_type = other DNA

SEQ ID NO: 120587 - DNA, 120 bp, synthetic construct
  source 1..120: mol_type = other DNA
gttttgcctatataaactgtagtttatgaagaaaaaagttttgttttttttgaggcagggccttgctcttttgcccaggctagagtgcagtggtaccatctcagctgattgcaacctcca

SEQ ID NO: 120588 - DNA, 120 bp, synthetic construct
  source 1..120: mol_type = other DNA
ttagggataatatctaagcccatataacctgctgttataaaaggtaacatttagggattgagatttttttttttttttttttttttttttgagacggagtctcgctctgtcaccaggctg

SEQ ID NO: 120589 - DNA, 120 bp, synthetic construct; identical to SEQ ID NO: 20136
  source 1..120: mol_type = other DNA

SEQ ID NO: 120590 - DNA, 120 bp, synthetic construct; identical to SEQ ID NO: 20137
  source 1..120: mol_type = other DNA

SEQ ID NO: 120591 - DNA, 120 bp, synthetic construct; identical to SEQ ID NO: 20138
  source 1..120: mol_type = other DNA

SEQ ID NO: 120592 - DNA, 120 bp, synthetic construct; identical to SEQ ID NO: 20139
  source 1..120: mol_type = other DNA

SEQ ID NO: 120593 - DNA, 120 bp, synthetic construct; identical to SEQ ID NO: 20117
  source 1..120: mol_type = other DNA

SEQ ID NO: 120594 - DNA, 120 bp, synthetic construct; identical to SEQ ID NO: 20118
  source 1..120: mol_type = other DNA

SEQ ID NO: 120595 - DNA, 120 bp, synthetic construct; identical to SEQ ID NO: 20119
  source 1..120: mol_type = other DNA

SEQ ID NO: 120596 - DNA, 120 bp, synthetic construct
  source 1..120: mol_type = other DNA
gtgttctattagttctttcaactatggcctgtccttgggaattatagggaattcctgttgtatgtgtaattttcttggaaagctttactacagtatcctggtccattgttagttttaatt

SEQ ID NO: 120597 - DNA, 120 bp, synthetic construct
  source 1..120: mol_type = other DNA
ccaagtagtcaattttaaaaactggaggatttttgtttttgggtaatgattatcagtaattcccacaaaatcagcaagaccaatctgccatgcaccagaattgataaaggcttgtctaac

SEQ ID NO: 120598 - DNA, 120 bp, synthetic construct
  source 1..120: mol_type = other DNA
aggaacaacctgtaccagccactgcaaaaacatgccaaattgtaaagaccatcaaggctgggaagaaactgcatcaactaatgagcaaaataaccagctaacatcataatgacaggatca

SEQ ID NO: 120599 - DNA, 120 bp, synthetic construct
  source 1..120: mol_type = other DNA
ccagaatctctgggacacattcaaagcagtgtgtagagggaaatatatagcactaagtgtccacaagagaaagcaggaaagattcaaaatggacaccctaacaccacaattaaaagaact

SEQ ID NO: 120600 - DNA, 120 bp, synthetic construct
  source 1..120: mol_type = other DNA
taaaaactctcaataaattaggtattgatgggatgtatctcaaaataataagagctatctatgacaaacccacagccaatatcatactgaatgggcaaaaactggaagcactcactttga

SEQ ID NO: 120601 - DNA, 120 bp, synthetic construct
  source 1..120: mol_type = other DNA
caccttatacaaaaattaattcaagatggattaaagacttaaacgttagacctaaaaccataaaaaccctagaagaaaacctaggcaataccattcaggacataggcatgggcaaggact

SEQ ID NO: 120602 - DNA, 120 bp, synthetic construct
  source 1..120: mol_type = other DNA
tccaaacatccacccatccatcctccatctacccatccacccatctacatacacaatcacccatctacccattcatccatttacatacacacccatccatccactcattcatctatccat

SEQ ID NO: 120603 - DNA, 120 bp, synthetic construct
  source 1..120: mol_type = other DNA
cccacccatacatctacacacacacatacccatatacccattcatccatcctccatctacccatccatccatccatccatccatcttctatctacccgcccatccatctacataaacacc

SEQ ID NO: 120604 - DNA, 120 bp, synthetic construct; identical to SEQ ID NO: 16457
  source 1..120: mol_type = other DNA

SEQ ID NO: 120605 - DNA, 120 bp, synthetic construct
  source 1..120: mol_type = other DNA
aactccagtgtgggcaacagagcgagactccaacatagaaacaagaaaagagaagagaagagaagataagagaagagaagagaagagaagagaagagaagagaagagaagagaagagaag

SEQ ID NO: 120606 - DNA, 120 bp, synthetic construct
  source 1..120: mol_type = other DNA
aaagaaaagaaaaagaaagaaagaaaaggcaagaaaagaaaaaagaaactcagaatctgacctctgcttacctcctgaccttgctcccaaccccataagcttgcacctggatgagtactt

SEQ ID NO: 120607 - DNA, 120 bp, synthetic construct; identical to SEQ ID NO: 16459
  source 1..120: mol_type = other DNA

SEQ ID NO: 120608 - DNA, 120 bp, synthetic construct
  source 1..120: mol_type = other DNA
gtgttacaactgcctacggtattcagtacagtaacatgctatacaagtttgtagcctaggagaaataagctataccatctaggtttttggaagcacactctgatgtttgcacaaccacaa

SEQ ID NO: 120609 - DNA, 120 bp, synthetic construct
  source 1..120: mol_type = other DNA
aagtgattctcctgcctcagcctcacgagcagctggaactgcaggcgtgccccaccatgcccggataatttttgtatttttagtagaaatggggtttcactatgttggtcaggctggtct

SEQ ID NO: 120610 - DNA, 120 bp, synthetic construct; identical to SEQ ID NO: 19647
  source 1..120: mol_type = other DNA

SEQ ID NO: 120611 - DNA, 120 bp, synthetic construct
  source 1..120: mol_type = other DNA
ccgatttctcaatcttttccccacctttcccccttttctattccacaaaaccgccattgtcatcatgacccgttctcaatgagctgttgggtacacctcccagacggggtggtggccggg

SEQ ID NO: 120612 - DNA, 120 bp, synthetic construct
  source 1..120: mol_type = other DNA
gcagtgagctgagatggcagcagtacagtccagcttcggctcagcatcagagggagaccatggaaagagggagagggagaccgtggggagagggagagggagagcggtaatttcttgatt

SEQ ID NO: 120613 - DNA, 120 bp, synthetic construct; identical to SEQ ID NO: 4445
  source 1..120: mol_type = other DNA

SEQ ID NO: 120614 - DNA, 120 bp, synthetic construct; identical to SEQ ID NO: 19646
  source 1..120: mol_type = other DNA

SEQ ID NO: 120615 - DNA, 120 bp, synthetic construct
  source 1..120: mol_type = other DNA
cctcccggacggggcggctggccgggcgggtgctggccccaacctccctcctggacggggtggctggccgggcaggggctgccccccacctccctcccagatggggcataaaatatctta

SEQ ID NO: 120616 - DNA, 120 bp, synthetic construct
  source 1..120: mol_type = other DNA
agcatgatttataaacttttgggtatatacccagtaatgggattgctgggtcaaatggtatttctagttctagatccctgaggaatcgccacactgacttccacaatggttgaactagtt

SEQ ID NO: 120617 - DNA, 120 bp, synthetic construct; identical to SEQ ID NO: 19942
  source 1..120: mol_type = other DNA

SEQ ID NO: 120618 - DNA, 120 bp, synthetic construct; identical to SEQ ID NO: 19943
  source 1..120: mol_type = other DNA

SEQ ID NO: 120619 - DNA, 120 bp, synthetic construct; identical to SEQ ID NO: 10190
  source 1..120: mol_type = other DNA

SEQ ID NO: 120620 - DNA, 120 bp, synthetic construct
  source 1..120: mol_type = other DNA
tccagcacctgttgtttcctgactttttaatgattgccattctaactggtgtgagatggtatctcattgtggttttgatttgcatttctctgatggccagtgatgatgagcattttttac

SEQ ID NO: 120621 - DNA, 120 bp, synthetic construct
  source 1..120: mol_type = other DNA
cacgctgggagctgtagaccggagctgttcctattcggccatcttggctcctccgcagctggagatctcagtacgggcagactgcctcctcaagtgggtccctgacccctgacccctgag

SEQ ID NO: 120622 - DNA, 120 bp, synthetic construct
  source 1..120: mol_type = other DNA
ggaagaaagggtatcagcgatggaagatgaaatgaatgaaatgaagcgagaagggaagtttagacaaaaaagaataaaaagaaatgagcaaagcctccaagaaatatgggactatgtgaa

SEQ ID NO: 120623 - DNA, 120 bp, synthetic construct
  source 1..120: mol_type = other DNA
agacccatcagtgtgctgtattcaggaaacccatctcatgtgcagagacacatataggctcaaaataaaaggatggaggaagatctaccaagcaaatggaaaacaaaaaaaggcaggggt

SEQ ID NO: 120624 - DNA, 120 bp, synthetic construct
  source 1..120: mol_type = other DNA
actgctagcaagactaataaagaaaaaaagagagaagaatcaatagatgcaataaaaaatgataaaggggatatcaccaccgatcccacagaaatacaaactaccatcagagaatactac

SEQ ID NO: 120625 - DNA, 120 bp, synthetic construct
  source 1..120: mol_type = other DNA
ctcctattcaacatagtgttggaagttctggccagggcaattaggcaggagaaggaaataaagggtattcaattaggaaaagaggaagtcaaattgtacctgtttgcagacgacatgatt

SEQ ID NO: 120626 - DNA, 120 bp, synthetic construct
  source 1..120: mol_type = other DNA
ccaaaagcaatggcaacaaaagccaaaactgacaaatgggatctaattaaattaaagagcttctgaacagcaagagaaactaccatcagagtgaacaggcaacctacaaaatgggagaaa

SEQ ID NO: 120627 - DNA, 120 bp, synthetic construct
  source 1..120: mol_type = other DNA
aaatatttctcaatactgctagtattatctcatgttttgaagtttattttattggctagtaatatagctccctccagttttcttaatgattagtatctgcatggtatctctttggattct

SEQ ID NO: 120628 - DNA, 120 bp, synthetic construct
  source 1..120: mol_type = other DNA
gccaccccgtctgggaggtaaggagcgtctctgcccggccgccccgtctgtgaagtgaggagcccctccgcccagcagccgccccgtctgggaagtgaggaatgtctccgcccggcagcc

SEQ ID NO: 120629 - DNA, 120 bp, synthetic construct
  source 1..120: mol_type = other DNA
ggatcgtttgaacccagaaggcagaggttgcagtaagctgagatcgcacaactgcattccagcctgggcaacagtgcgaagctccgtctcaaaaaaaaaaaaaaaaaaaaaaggaataga

SEQ ID NO: 120630 - DNA, 120 bp, synthetic construct; identical to SEQ ID NO: 19560
  source 1..120: mol_type = other DNA

SEQ ID NO: 120631 - DNA, 120 bp, synthetic construct; identical to SEQ ID NO: 19561
  source 1..120: mol_type = other DNA

SEQ ID NO: 120632 - DNA, 120 bp, synthetic construct; identical to SEQ ID NO: 19562
  source 1..120: mol_type = other DNA

SEQ ID NO: 120633 - DNA, 120 bp, synthetic construct; identical to SEQ ID NO: 19563
  source 1..120: mol_type = other DNA

SEQ ID NO: 120634 - DNA, 120 bp, synthetic construct
  source 1..120: mol_type = other DNA
cgtgcattctgggaaatgtagtccaaagcctgtcgcgctcagacagcccgcgacatttgcgccgtcaaggccaaataggctgcagacgacgctttcgcgtatcttgggaaatgtagttcc

SEQ ID NO: 120635 - DNA, 120 bp, synthetic construct
  source 1..120: mol_type = other DNA
agaaactctgtttattgtcaaatgaagttgacccccgccacctctaccccagtcaggatggagtcaccctcctctatatccgattttaacgcctattccaatgtatacttagtattttaa

SEQ ID NO: 120636 - DNA, 120 bp, synthetic construct; identical to SEQ ID NO: 20080
  source 1..120: mol_type = other DNA

SEQ ID NO: 120637 - DNA, 120 bp, synthetic construct
  source 1..120: mol_type = other DNA
tactttaagttctgggatacatgtgctgaacgtgcaggtttgttacatgtgccatgaaggtttgctgcacataccaacctgtcatctaggttttaagccccacatgccttaggtgtttgt

SEQ ID NO: 120638 - DNA, 120 bp, synthetic construct; identical to SEQ ID NO: 20082
  source 1..120: mol_type = other DNA

SEQ ID NO: 120639 - DNA, 120 bp, synthetic construct; identical to SEQ ID NO: 20081
  source 1..120: mol_type = other DNA

SEQ ID NO: 120640 - DNA, 120 bp, synthetic construct
  source 1..120: mol_type = other DNA
agtgctgggattacaggtgtgagccaccgtgcctggccaaaaaaataatttttttaaaaggactccaggcaatgatagactggattaagaaaatgtggcacacatacaccatggaatact

SEQ ID NO: 120641 - DNA, 120 bp, synthetic construct; identical to SEQ ID NO: 27853
  source 1..120: mol_type = other DNA

SEQ ID NO: 120642 - DNA, 120 bp, synthetic construct; identical to SEQ ID NO: 27851
  source 1..120: mol_type = other DNA

SEQ ID NO: 120643 - DNA, 120 bp, synthetic construct; identical to SEQ ID NO: 27854
  source 1..120: mol_type = other DNA

SEQ ID NO: 120644 - DNA, 120 bp, synthetic construct; identical to SEQ ID NO: 27855
  source 1..120: mol_type = other DNA

SEQ ID NO: 120645 - DNA, 120 bp, synthetic construct; identical to SEQ ID NO: 32900
  source 1..120: mol_type = other DNA

SEQ ID NO: 120646 - DNA, 120 bp, synthetic construct; identical to SEQ ID NO: 32901
  source 1..120: mol_type = other DNA

SEQ ID NO: 120647 - DNA, 120 bp, synthetic construct; identical to SEQ ID NO: 120466
  source 1..120: mol_type = other DNA

SEQ ID NO: 120648 - DNA, 120 bp, synthetic construct; identical to SEQ ID NO: 19950
  source 1..120: mol_type = other DNA

SEQ ID NO: 120649 - DNA, 120 bp, synthetic construct
  source 1..120: mol_type = other DNA
ggatggatggatacatgggtggatgaataggtagatggatggatagttgggtgagtggatggatggatggatggatggatggatacatgggtggatgggtagatggatgggtgagtgcat

SEQ ID NO: 120650 - DNA, 120 bp, synthetic construct; identical to SEQ ID NO: 17063
  source 1..120: mol_type = other DNA

SEQ ID NO: 120651 - DNA, 120 bp, synthetic construct; identical to SEQ ID NO: 17064
  source 1..120: mol_type = other DNA

SEQ ID NO: 120652 - DNA, 120 bp, synthetic construct; identical to SEQ ID NO: 17065
  source 1..120: mol_type = other DNA

SEQ ID NO: 120653 - DNA, 120 bp, synthetic construct
  source 1..120: mol_type = other DNA
tggatggatggatagatggatggatgggtgggtgggtagatggatggatggataggtgggtggatggatggatacatgaacagatggatgggacagtgtggcaaaggctttactgctaag

SEQ ID NO: 120654 - DNA, 120 bp, synthetic construct; identical to SEQ ID NO: 20105
  source 1..120: mol_type = other DNA

SEQ ID NO: 120655 - DNA, 120 bp, synthetic construct; identical to SEQ ID NO: 20106
  source 1..120: mol_type = other DNA

SEQ ID NO: 120656 - DNA, 120 bp, synthetic construct
  source 1..120: mol_type = other DNA
gtgcaggtctgccaccttggctcactgcaacctctgcctcccaggaccaagcgattctcctgccccagcctccctagttgctgggaatacaggcatgtaccaccacacccagctaatttt

SEQ ID NO: 120657 - DNA, 120 bp, synthetic construct
  source 1..120: mol_type = other DNA
tctactaaaaatacaaaaattagccaggcgtggtggaatgtgcatgtagtccctgctacttggcagactgaaggcaggagaatcgcttggacccaggaggtaaagtttgcagtgagccga

SEQ ID NO: 120658 - DNA, 120 bp, synthetic construct
  source 1..120: mol_type = other DNA
atgtgtacaataaaatctgtaatggaagtaaaggtacagcaatcctctttaagtttgtatgtttgtcttcagaataactggtctttactttaaaggcctatattttccaaaaggtctttt

SEQ ID NO: 120659 - DNA, 120 bp, synthetic construct; identical to SEQ ID NO: 1523
  source 1..120: mol_type = other DNA

SEQ ID NO: 120660 - DNA, 120 bp, synthetic construct
  source 1..120: mol_type = other DNA
gaggataagctaaagactttgccacactcttcacatttgtagggtctctctccagtatgaattctcttgtggatagtaagtgctgaggagcgcctaaagtcttggccacattcttcacat

SEQ ID NO: 120661 - DNA, 120 bp, synthetic construct
  source 1..120: mol_type = other DNA
atattcacccacacttttacagcattttttaaattgtaatttctcatgtccacattttccatatgttcttggtattactttttggagtgaatctttgatgccctgctctggctgaaggtc

SEQ ID NO: 120662 - DNA, 120 bp, synthetic construct; identical to SEQ ID NO: 29173
  source 1..120: mol_type = other DNA

SEQ ID NO: 120663 - DNA, 120 bp, synthetic construct; identical to SEQ ID NO: 29174
  source 1..120: mol_type = other DNA

SEQ ID NO: 120664 - DNA, 120 bp, synthetic construct; identical to SEQ ID NO: 29175
  source 1..120: mol_type = other DNA

SEQ ID NO: 120665 - DNA, 120 bp, synthetic construct; identical to SEQ ID NO: 29176
  source 1..120: mol_type = other DNA

SEQ ID NO: 120666 - DNA, 120 bp, synthetic construct
  source 1..120: mol_type = other DNA
tatttttagtagagatggggtttctccatgtggacctggcaggtcttgcactcctcacctcaggtgatccacccacctcagcctcccaaagtgctgggatggcaggcatgagccactgcg

SEQ ID NO: 120667 - DNA, 120 bp, synthetic construct
  source 1..120: mol_type = other DNA
gggagctggaagccattatcctcagcaaactaatgcaggaacagaaaaccaaacgctacatgttcttacttataagtgggagctgaacaatgtgaacacatggacacagggaagggaaca

SEQ ID NO: 120668 - DNA, 120 bp, synthetic construct
  source 1..120: mol_type = other DNA
acggcaaccatccgatttctcagtcttttccgcacctttcccccctttctattccacaaaacagccattgtcatcatggcccgttctcaatgagctgttgggtacacctcccagatgggg

SEQ ID NO: 120669 - DNA, 120 bp, synthetic construct
  source 1..120: mol_type = other DNA
gactgcttgccgccatctcggctcactgcaacctccctgcctgattctcctgcctcagcctgccgagtgcctgcgattgcaggtgtgcgccgccacgcctgactggttttcgtattttct

SEQ ID NO: 120670 - DNA, 120 bp, synthetic construct
  source 1..120: mol_type = other DNA
cctgcggccttccgcagtgtttgtgtccctgggtacttgagattagggagtggtgatgactcttgatgagcatgctgccttcaagcatctgtttaacaaagcacatcttgcaccgccctt

SEQ ID NO: 120671 - DNA, 120 bp, synthetic construct
  source 1..120: mol_type = other DNA
agcctgctgagtgcctgcgattgcaggcgcgcgctgccacgcctgactggttttcgtatttttttggtggagacggggtttcgctgggttggccgggctggtctccagctcctaactgcg

SEQ ID NO: 120672 - DNA, 120 bp, synthetic construct; identical to SEQ ID NO: 19555
  source 1..120: mol_type = other DNA

SEQ ID NO: 120673 - DNA, 120 bp, synthetic construct; identical to SEQ ID NO: 19657
  source 1..120: mol_type = other DNA

SEQ ID NO: 120674 - DNA, 120 bp, synthetic construct; identical to SEQ ID NO: 19658
  source 1..120: mol_type = other DNA

SEQ ID NO: 120675 - DNA, 120 bp, synthetic construct
  source 1..120: mol_type = other DNA
cctgggttcaagcgattcttctgcctcagcctcctgagtagctgggaatacaggcgcgagccaccatgcctgactaatttttgtatttttagtagagatggggtgtcaccatattggcca

SEQ ID NO: 120676 - DNA, 120 bp, synthetic construct
  source 1..120: mol_type = other DNA
ctgtgagtttgaaggagcaaacacctcttcaagtttttcttgttgttttttttttttttttttttttttttgagacagcgtctcactctgtcgctgagactggagtgcagtggcgcggcc

SEQ ID NO: 120677 - DNA, 120 bp, synthetic construct; identical to SEQ ID NO: 19659
  source 1..120: mol_type = other DNA

SEQ ID NO: 120678 - DNA, 120 bp, synthetic construct
  source 1..120: mol_type = other DNA
aggagggaggattacttgaacctggaagtttgaggctgcagtgagctgtaattgtgccatgcaccccagcttgggtgacagagtgagaccctgactcaaaaacactgtacatttcaggca

SEQ ID NO: 120679 - DNA, 120 bp, synthetic construct; identical to SEQ ID NO: 19660
  source 1..120: mol_type = other DNA

SEQ ID NO: 120680 - DNA, 120 bp, synthetic construct
  source 1..120: mol_type = other DNA
ggaatcataacactgtcttccacaatggttgaactagtttacagtcccaccaacagtgtaaaagcgtttctatttctccacatcctctccagcacctgttgtctcctgactttttaatga

SEQ ID NO: 120681 - DNA, 120 bp, synthetic construct; identical to SEQ ID NO: 19661
  source 1..120: mol_type = other DNA

SEQ ID NO: 120682 - DNA, 120 bp, synthetic construct
  source 1..120: mol_type = other DNA
tgaagaatgtggcaaagcttttagccagtcctcaacccttactacacataagataattcatactggagagaaattctacaaatgtgaagaatgtggtaaggcctttagccagttatccca

SEQ ID NO: 120683 - DNA, 120 bp, synthetic construct; identical to SEQ ID NO: 19662
  source 1..120: mol_type = other DNA

SEQ ID NO: 120684 - DNA, 120 bp, synthetic construct; identical to SEQ ID NO: 15935
  source 1..120: mol_type = other DNA

SEQ ID NO: 120685 - DNA, 120 bp, synthetic construct; identical to SEQ ID NO: 19672
  source 1..120: mol_type = other DNA

SEQ ID NO: 120686 - DNA, 120 bp, synthetic construct
  source 1..120: mol_type = other DNA
acacctgcagaaaggctgtcacttcacacttggaagattgcacagcggccagtcagaggtgctcctcacttcccagacagggtggcggccgggcagaggcgctcctcacatcccagatgg

SEQ ID NO: 120687 - DNA, 120 bp, synthetic construct
  source 1..120: mol_type = other DNA
tgatcttgaactcctgggctaaagtgatctgcctgctttggcctcccagaatgctgggattacaggcatgagccactgcacctggcaaaaaaggtttttatgtgaaaataaattttaatt

SEQ ID NO: 120688 - DNA, 120 bp, synthetic construct; identical to SEQ ID NO: 22737
  source 1..120: mol_type = other DNA

SEQ ID NO: 120689 - DNA, 120 bp, synthetic construct; identical to SEQ ID NO: 22738
  source 1..120: mol_type = other DNA

SEQ ID NO: 120690 - DNA, 120 bp, synthetic construct; identical to SEQ ID NO: 22739
  source 1..120: mol_type = other DNA

SEQ ID NO: 120691 - DNA, 120 bp, synthetic construct; identical to SEQ ID NO: 22740
  source 1..120: mol_type = other DNA

SEQ ID NO: 120692 - DNA, 120 bp, synthetic construct; identical to SEQ ID NO: 22741
  source 1..120: mol_type = other DNA

SEQ ID NO: 120693 - DNA, 120 bp, synthetic construct
  source 1..120: mol_type = other DNA
tcagactaccaggagacacggccacagccacgcccgcgacgcgagggcccagcgctcttcagctgcccggaaacagcagggattcggtgagagcctcacaggagcagggaccgactctat

SEQ ID NO: 120694 - DNA, 120 bp, synthetic construct; identical to SEQ ID NO: 19152
  source 1..120: mol_type = other DNA

SEQ ID NO: 120695 - DNA, 120 bp, synthetic construct; identical to SEQ ID NO: 19153
  source 1..120: mol_type = other DNA

SEQ ID NO: 120696 - DNA, 120 bp, synthetic construct; identical to SEQ ID NO: 19153
  source 1..120: mol_type = other DNA

SEQ ID NO: 120697 - DNA, 120 bp, synthetic construct; identical to SEQ ID NO: 19154
  source 1..120: mol_type = other DNA

SEQ ID NO: 120698 - DNA, 120 bp, synthetic construct; identical to SEQ ID NO: 19155
  source 1..120: mol_type = other DNA

SEQ ID NO: 120699 - DNA, 120 bp, synthetic construct; identical to SEQ ID NO: 19156
  source 1..120: mol_type = other DNA

SEQ ID NO: 120700 - DNA, 120 bp, synthetic construct; identical to SEQ ID NO: 19157
  source 1..120: mol_type = other DNA

SEQ ID NO: 120701 - DNA, 120 bp, synthetic construct; identical to SEQ ID NO: 19158
  source 1..120: mol_type = other DNA

SEQ ID NO: 120702 - DNA, 120 bp, synthetic construct; identical to SEQ ID NO: 19159
  source 1..120: mol_type = other DNA

SEQ ID NO: 120703 - DNA, 120 bp, synthetic construct; identical to SEQ ID NO: 19160
  source 1..120: mol_type = other DNA

SEQ ID NO: 120704 - DNA, 120 bp, synthetic construct; identical to SEQ ID NO: 18834
  source 1..120: mol_type = other DNA

SEQ ID NO: 120705 - DNA, 120 bp, synthetic construct; identical to SEQ ID NO: 18835
  source 1..120: mol_type = other DNA

SEQ ID NO: 120706 - DNA, 120 bp, synthetic construct; identical to SEQ ID NO: 18836
  source 1..120: mol_type = other DNA

SEQ ID NO: 120707 - DNA, 120 bp, synthetic construct; identical to SEQ ID NO: 18837
  source 1..120: mol_type = other DNA

SEQ ID NO: 120708 - DNA, 120 bp, synthetic construct; identical to SEQ ID NO: 18838
  source 1..120: mol_type = other DNA

SEQ ID NO: 120709 - DNA, 120 bp, synthetic construct; identical to SEQ ID NO: 18839
  source 1..120: mol_type = other DNA

SEQ ID NO: 120710 - DNA, 120 bp, synthetic construct; identical to SEQ ID NO: 18840
  source 1..120: mol_type = other DNA

SEQ ID NO: 120711 - DNA, 120 bp, synthetic construct; identical to SEQ ID NO: 18916
  source 1..120: mol_type = other DNA

SEQ ID NO: 120712 - DNA, 120 bp, synthetic construct
  source 1..120: mol_type = other DNA
aggcggaggttgcagtgagccaagatcacaccattgcactccagcctgagcgacaagagcgaaactctgtctccaaggaaggcaaaaaaaaaattatatatatatatatatatatatata

SEQ ID NO: 120713 - DNA, 120 bp, synthetic construct; identical to SEQ ID NO: 19084
  source 1..120: mol_type = other DNA

SEQ ID NO: 120714 - DNA, 120 bp, synthetic construct; identical to SEQ ID NO: 19085
  source 1..120: mol_type = other DNA

SEQ ID NO: 120715 - DNA, 120 bp, synthetic construct
  source 1..120: mol_type = other DNA
cacttactcctcccctttatcctctcttcttctgcccaccttccttcctttctttctctctttctctttctttcttcctttcttccttcctttctttctctctttctctttctttcttcc

SEQ ID NO: 120716 - DNA, 120 bp, synthetic construct; identical to SEQ ID NO: 19670
  source 1..120: mol_type = other DNA

SEQ ID NO: 120717 - DNA, 120 bp, synthetic construct
  source 1..120: mol_type = other DNA
atccagtgttgtcattgagaagtctgatgacagtccaattctcattcctatgtgggtaagctgttgtcttcttcctcttctttttcttcttcttttcctcctcctcctccttcttcttcc

SEQ ID NO: 120718 - DNA, 120 bp, synthetic construct; identical to SEQ ID NO: 20112
  source 1..120: mol_type = other DNA

SEQ ID NO: 120719 - DNA, 120 bp, synthetic construct
  source 1..120: mol_type = other DNA
tggcctcccaaagtgctgggattacaggtatgaatcactgtccctggcctttgttttttctataatgccatctctaataagcctttttgtgtattgtgttcgttccaggtgacaacacaa

SEQ ID NO: 120720 - DNA, 120 bp, synthetic construct
  source 1..120: mol_type = other DNA
cttcccagctagagagagtcttatttacatgagaagcaaggctaggtgattaaagagacaagcaggacaaaattcaaagtaaccagttagagtaaaaacaagcttaggcatttcagtctc

SEQ ID NO: 120721 - DNA, 120 bp, synthetic construct; identical to SEQ ID NO: 20114
  source 1..120: mol_type = other DNA

SEQ ID NO: 120722 - DNA, 120 bp, synthetic construct; identical to SEQ ID NO: 20115
  source 1..120: mol_type = other DNA

SEQ ID NO: 120723 - DNA, 120 bp, synthetic construct; identical to SEQ ID NO: 20116
  source 1..120: mol_type = other DNA

SEQ ID NO: 120724 - DNA, 120 bp, synthetic construct; identical to SEQ ID NO: 20123
  source 1..120: mol_type = other DNA

SEQ ID NO: 120725 - DNA, 120 bp, synthetic construct; identical to SEQ ID NO: 20124
  source 1..120: mol_type = other DNA

SEQ ID NO: 120726 - DNA, 120 bp, synthetic construct; identical to SEQ ID NO: 19529
  source 1..120: mol_type = other DNA

SEQ ID NO: 120727 - DNA, 120 bp, synthetic construct; identical to SEQ ID NO: 19530
  source 1..120: mol_type = other DNA

SEQ ID NO: 120728 - DNA, 120 bp, synthetic construct
  source 1..120: mol_type = other DNA
cacatgtatatatatgtaacaaacctgcacattgtacgcatgtaccttagaacttaaagtataataaaaataaggaagggaggggggaagggggagaaggaaggaaggaaggaaggaagg

SEQ ID NO: 120729 - DNA, 120 bp, synthetic construct
  source 1..120: mol_type = other DNA
cgtctgggatgtgaggagcgcctctgcccggccgcgaccccatctgggaggtgaggagcatctctgcccagccgccccgtctgagaagtgaggagcccctccgcccagcagccgccccgt

SEQ ID NO: 120730 - DNA, 120 bp, synthetic construct; identical to SEQ ID NO: 19536
  source 1..120: mol_type = other DNA

SEQ ID NO: 120731 - DNA, 120 bp, synthetic construct; identical to SEQ ID NO: 19537
  source 1..120: mol_type = other DNA

SEQ ID NO: 120732 - DNA, 120 bp, synthetic construct; identical to SEQ ID NO: 19538
  source 1..120: mol_type = other DNA

SEQ ID NO: 120733 - DNA, 120 bp, synthetic construct; identical to SEQ ID NO: 19712
  source 1..120: mol_type = other DNA

SEQ ID NO: 120734 - DNA, 120 bp, synthetic construct
  source 1..120: mol_type = other DNA
cctaattttgatttttaatattttgtttggtagagacagaatctcactatgttacccaggctggcctcaaactcctggtcttaagtgatcctcctgcctcagcctcccaaagcactggga

SEQ ID NO: 120735 - DNA, 120 bp, synthetic construct
  source 1..120: mol_type = other DNA
gctggtcttgaactctggcctcaagtgttctgcctgccttggcttccccaagtattggcattacaggtgtgagccaccatgtccggctggaatttcttttttttttttttttttattata

SEQ ID NO: 120736 - DNA, 120 bp, synthetic construct
  source 1..120: mol_type = other DNA
cctgttctctctgatggtagtttcttttgctatgcagaagctctttagtttaattagatcccatttgtcaatcttagcttttgttgccattgcttttggtgttttagtcatggagtcctt

SEQ ID NO: 120737 - DNA, 120 bp, synthetic construct
  source 1..120: mol_type = other DNA
agggcaattaggcaggagaaggaaataaagggtattcaattaggaaaagaggaagtcaaattgtccctgtttgcagacgacatgattgtatatctagaaaaccccattgtctcagcccaa

SEQ ID NO: 120738 - DNA, 120 bp, synthetic construct
  source 1..120: mol_type = other DNA
gtgatatcccatttatcatcttttattgcgtctatttgattcttttctctttttttctttattagtcttgctagcggtctatcaattttgttgatcctttcaaaaaaccagctcctggat

SEQ ID NO: 120739 - DNA, 120 bp, synthetic construct
  source 1..120: mol_type = other DNA
tatgtaatggccttctttgtctcttttgatcttcgttggtttaaagtctgttttatcagagactaggattgcaacccctgcctttttttgttttccatttgcttggtagatcttcctcca

SEQ ID NO: 120740 - DNA, 120 bp, synthetic construct
  source 1..120: mol_type = other DNA
tgcattcttcatgtagttctcgagccttggctttcagctccatcagctcctttaagcacttctctgtgttggttattctagttatacattcatctaaatttttttcaaagttttcaactt

SEQ ID NO: 120741 - DNA, 120 bp, synthetic construct
  source 1..120: mol_type = other DNA
ccaggtgcggaatataatctcctggtgccccgtttcctaagcccgtcagaaaagcgcagtatttgggtaggagtgacccgattttccaggtgccatctgtcacccctttccttgaccagg

SEQ ID NO: 120742 - DNA, 120 bp, synthetic construct
  source 1..120: mol_type = other DNA
agggaccagtttggggggacggcaagggacggtcagcaggttggggatgttacgcgtgtccgtataagaggtcacctgagcaggcttagtgtgagccacaaggctgtttactcacttggg

SEQ ID NO: 120743 - DNA, 120 bp, synthetic construct; identical to SEQ ID NO: 19406
  source 1..120: mol_type = other DNA

SEQ ID NO: 120744 - DNA, 120 bp, synthetic construct; identical to SEQ ID NO: 19722
  source 1..120: mol_type = other DNA

SEQ ID NO: 120745 - DNA, 120 bp, synthetic construct
  source 1..120: mol_type = other DNA
aaaaaagcaaacctcctccatgtgaaagagtatttatataaattgttaaaaaacataccttagccagacacggaggctcacacctgtaatcccagcactttgggactctgaggcaggaga

SEQ ID NO: 120746 - DNA, 120 bp, synthetic construct
  source 1..120: mol_type = other DNA
agtaccgtatatatactgtatatagtacatagtaccgtatatatactgtatatagtatatagtacagtatatagacagaaagactatgtgtgtatatatatacacatacacttacatata

SEQ ID NO: 120747 - DNA, 120 bp, synthetic construct
  source 1..120: mol_type = other DNA
cttggctattgtatataatgctgtgatgagcagggatttgcaaatatctctttgagggcctgctttcaagtctttaatgtgtatgtacacacacacacacacacacacacacacacacac

SEQ ID NO: 120748 - DNA, 120 bp, synthetic construct; identical to SEQ ID NO: 20144
  source 1..120: mol_type = other DNA

SEQ ID NO: 120749 - DNA, 120 bp, synthetic construct; identical to SEQ ID NO: 19715
  source 1..120: mol_type = other DNA

SEQ ID NO: 120750 - DNA, 120 bp, synthetic construct; identical to SEQ ID NO: 19716
  source 1..120: mol_type = other DNA

SEQ ID NO: 120751 - DNA, 120 bp, synthetic construct; identical to SEQ ID NO: 19717
  source 1..120: mol_type = other DNA

SEQ ID NO: 120752 - DNA, 120 bp, synthetic construct; identical to SEQ ID NO: 19718
  source 1..120: mol_type = other DNA

SEQ ID NO: 120753 - DNA, 120 bp, synthetic construct; identical to SEQ ID NO: 19719
  source 1..120: mol_type = other DNA

SEQ ID NO: 120754 - DNA, 120 bp, synthetic construct
  source 1..120: mol_type = other DNA
gaccgggtgatctgcctgcctcggcctcaaagtgctggaattgcaggcgtgagccactgtgcctggccagttgtaactatttatcactgtctggactcataaacattttgagatgacttt

SEQ ID NO: 120755 - DNA, 120 bp, synthetic construct
  source 1..120: mol_type = other DNA
atcaggaagtatggagatcgagaccatcctggctaacacagtgaaaccccgtctctactaaaaaaaaaaaaatacaaaaaattagccagctgtggtggtgggcacctgtagtcccagcta

SEQ ID NO: 120756 - DNA, 120 bp, synthetic construct
  source 1..120: mol_type = other DNA
aggaattctaagaagccccatctttttttttttttttttttttgtgattgagtctcactctgttgtccaggctggggtgcagtggcgtaatcactgctcactacaaacctctgccttctg

SEQ ID NO: 120757 - DNA, 120 bp, synthetic construct; identical to SEQ ID NO: 20129
  source 1..120: mol_type = other DNA

SEQ ID NO: 120758 - DNA, 120 bp, synthetic construct; identical to SEQ ID NO: 20130
  source 1..120: mol_type = other DNA

SEQ ID NO: 120759 - DNA, 120 bp, synthetic construct
  source 1..120: mol_type = other DNA
aggtgcactgagccaatatcacaccagtgcactccaacctggtgacagagagacacatcatctcaaaaaaaaaaaaaaaactcaatccataaatgttatactttataactttataacagc

SEQ ID NO: 120760 - DNA, 120 bp, synthetic construct; identical to SEQ ID NO: 20131
  source 1..120: mol_type = other DNA

SEQ ID NO: 120761 - DNA, 120 bp, synthetic construct
  source 1..120: mol_type = other DNA
cttggcctcccaaagtgttgggattacaggcgtgagccactgtgcccggccaattctatttaattattttaatttctttgctgaatttatctgatagaattctgaattttttctccgtgt

SEQ ID NO: 120762 - DNA, 120 bp, synthetic construct
  source 1..120: mol_type = other DNA
gatgacattgctggacctgccctgggtgagtcttgaagagtcagcctcagaccaggcaacattcaccacaagctgactgaagagctcttagcccttaatggaacctcagtggtagtctga

SEQ ID NO: 120763 - DNA, 120 bp, synthetic construct
  source 1..120: mol_type = other DNA
acctttgtaagaaccaaaaatcaaatgagcactcacagtacctggatttaattttgtattactggaaatggcactaaaaggggctgtagagtcttgagttgccaatgccactcctcccca

SEQ ID NO: 120764 - DNA, 120 bp, synthetic construct
  source 1..120: mol_type = other DNA
atcacctgaggtcaggagttcaagaccagcctgaccaatacggtgaaaaactctgtctctactaaaattacaaaaattagccgggcgtgatgccgtgtgcctcctgtggtcccagctact

SEQ ID NO: 120765 - DNA, 120 bp, synthetic construct
  source 1..120: mol_type = other DNA
atatatttaaaattttttctctcgtgtatgtatgtagaaacatggtcttgccttgtcgtccaggctgttcttgaactcctacgatcaagcagtgcttccacttcgacctctcagagtgct

SEQ ID NO: 120766 - DNA, 120 bp, synthetic construct
  source 1..120: mol_type = other DNA
gccgagattgtgccactgcactccagcctggcagcagagggagactccatctcaaacaaacaaacaaacaaaaaaagatactttaagttgtttaaaggccagagagaggccagtggtgtg

SEQ ID NO: 120767 - DNA, 120 bp, synthetic construct
  source 1..120: mol_type = other DNA
aaatactcagtttttttctctcatgggctgagttgttctgagacaatgttggctgttcccttgttctgtctttcccttagtctgtgcatcattcatgtcccatgtatttggtcatcattg

SEQ ID NO: 120768 - DNA, 120 bp, synthetic construct
  source 1..120: mol_type = other DNA
acaggatgttggcttcaggcggaagatggtgctatgtattattactggactataacggtcacagaatgtaggaggcctcataagttaaaggacacaaccatgtatgtaaaacagggagta

SEQ ID NO: 120769 - DNA, 120 bp, synthetic construct; identical to SEQ ID NO: 15610
  source 1..120: mol_type = other DNA

SEQ ID NO: 120770 - DNA, 120 bp, synthetic construct; identical to SEQ ID NO: 25076
  source 1..120: mol_type = other DNA

SEQ ID NO: 120771 - DNA, 120 bp, synthetic construct; identical to SEQ ID NO: 25077
  source 1..120: mol_type = other DNA

SEQ ID NO: 120772 - DNA, 120 bp, synthetic construct; identical to SEQ ID NO: 25078
  source 1..120: mol_type = other DNA

SEQ ID NO: 120773 - DNA, 120 bp, synthetic construct; identical to SEQ ID NO: 25079
  source 1..120: mol_type = other DNA

SEQ ID NO: 120774 - DNA, 120 bp, synthetic construct; identical to SEQ ID NO: 25080
  source 1..120: mol_type = other DNA

SEQ ID NO: 120775 - DNA, 120 bp, synthetic construct; identical to SEQ ID NO: 25081
  source 1..120: mol_type = other DNA

SEQ ID NO: 120776 - DNA, 120 bp, synthetic construct; identical to SEQ ID NO: 25082
  source 1..120: mol_type = other DNA

SEQ ID NO: 120777 - DNA, 120 bp, synthetic construct; identical to SEQ ID NO: 25083
  source 1..120: mol_type = other DNA

SEQ ID NO: 120778 - DNA, 120 bp, synthetic construct; identical to SEQ ID NO: 25084
  source 1..120: mol_type = other DNA

SEQ ID NO: 120779 - DNA, 120 bp, synthetic construct; identical to SEQ ID NO: 25085
  source 1..120: mol_type = other DNA

SEQ ID NO: 120780 - DNA, 120 bp, synthetic construct; identical to SEQ ID NO: 25086
  source 1..120: mol_type = other DNA

SEQ ID NO: 120781 - DNA, 120 bp, synthetic construct; identical to SEQ ID NO: 25087
  source 1..120: mol_type = other DNA

SEQ ID NO: 120782 - DNA, 120 bp, synthetic construct; identical to SEQ ID NO: 25088
  source 1..120: mol_type = other DNA

SEQ ID NO: 120783 - DNA, 120 bp, synthetic construct; identical to SEQ ID NO: 25089
  source 1..120: mol_type = other DNA

SEQ ID NO: 120784 - DNA, 120 bp, synthetic construct; identical to SEQ ID NO: 25090
  source 1..120: mol_type = other DNA

SEQ ID NO: 120785 - DNA, 120 bp, synthetic construct; identical to SEQ ID NO: 25091
  source 1..120: mol_type = other DNA

SEQ ID NO: 120786 - DNA, 120 bp, synthetic construct; identical to SEQ ID NO: 25092
  source 1..120: mol_type = other DNA

SEQ ID NO: 120787 - DNA, 120 bp, synthetic construct; identical to SEQ ID NO: 25093
  source 1..120: mol_type = other DNA

SEQ ID NO: 120788 - DNA, 120 bp, synthetic construct; identical to SEQ ID NO: 25094
  source 1..120: mol_type = other DNA

SEQ ID NO: 120789 - DNA, 120 bp, synthetic construct; identical to SEQ ID NO: 25095
  source 1..120: mol_type = other DNA

SEQ ID NO: 120790 - DNA, 120 bp, synthetic construct; identical to SEQ ID NO: 25096
  source 1..120: mol_type = other DNA

SEQ ID NO: 120791 - DNA, 120 bp, synthetic construct; identical to SEQ ID NO: 30800
  source 1..120: mol_type = other DNA

SEQ ID NO: 120792 - DNA, 120 bp, synthetic construct; identical to SEQ ID NO: 30801
  source 1..120: mol_type = other DNA

SEQ ID NO: 120793 - DNA, 120 bp, synthetic construct; identical to SEQ ID NO: 30802
  source 1..120: mol_type = other DNA

SEQ ID NO: 120794 - DNA, 120 bp, synthetic construct
  source 1..120: mol_type = other DNA
cactgtgacccagtgaattcgaacttgtgaagttccattcgggggatcatatgggaagggcttcacacccagacatagattatagatgggaagtgggccacatggtgtcagtgaggcaag

SEQ ID NO: 120795 - DNA, 120 bp, synthetic construct
  source 1..120: mol_type = other DNA
tgcagtgaaaccaaaatccttccttcacgccctttgattttatgttttcctcaggaaggcaggagctattgtatatgataaaatattatgttttattcagtccacttatgaaattgttta

SEQ ID NO: 120796 - DNA, 120 bp, synthetic construct
  source 1..120: mol_type = other DNA
tcgcggcacacggcgcagtagcgctgctcgcagagcacccgcatcttggtagagcagcggtagcacaccgggtggtcgcagcggccccagcgccgtggcctccaggtctccgcagcacag

SEQ ID NO: 120797 - DNA, 120 bp, synthetic construct
  source 1..120: mol_type = other DNA
tgctggcccaccggcgctgcgctcgatttctcaccgagccttagctgcctccccgcggggcagggctgggcacctgcagcccaccatgcctgagcctcccacccactccatgggctccca

SEQ ID NO: 120798 - DNA, 120 bp, synthetic construct
  source 1..120: mol_type = other DNA
agaccacgagcccaccgggaggaacgaacactccagacgcactaccttaagagctgtaacactcaccgcgaaggtctgcagcttcactcctgagccagcgagaccacgaacccaccagaa

SEQ ID NO: 120799 - DNA, 120 bp, synthetic construct; identical to SEQ ID NO: 13521
  source 1..120: mol_type = other DNA

SEQ ID NO: 120800 - DNA, 120 bp, synthetic construct; identical to SEQ ID NO: 13522
  source 1..120: mol_type = other DNA

SEQ ID NO: 120801 - DNA, 120 bp, synthetic construct
  source 1..120: mol_type = other DNA
acaaacaagctccttctcacctggttccaacaccctcaaataacaaagccaatgccagggcacgagccaataaaactgtcccccattcaacgatgtacactggaccctttattcctaatc

SEQ ID NO: 120802 - DNA, 120 bp, synthetic construct
  source 1..120: mol_type = other DNA
gccattcctaatgcttccatcataagatccccaaacacaagcacagaaacaaaccccagccactcgccagcataggccaccccatactcgcctccgctattggagacaggggttgaaaga

SEQ ID NO: 120803 - DNA, 120 bp, synthetic construct
  source 1..120: mol_type = other DNA
gggggcgtcgaggggcgcggggtgaagttcaaagcgtggccacggccggttcaggctgagggtaggggtgcccgggaggggattagggtctggctaggttatgggagcaggccagagagt

SEQ ID NO: 120804 - DNA, 120 bp, synthetic construct
  source 1..120: mol_type = other DNA
ttgcactgcctgtgctggggataatgtaagcaaaatagatttggtcctgctctttctagggcatacggtttagtaggggagatagaatggaatcaaacaatcatatgcacatctatcatt

SEQ ID NO: 120805 - DNA, 120 bp, synthetic construct
  source 1..120: mol_type = other DNA
tctacgaaaaggaagatgtgatagaggaaagatgaaattcaataaacaagaaaggttaaaggaatcctcaaaatagtggatggagccaggcgtggtggctcaagcctgtaatcccagcac

SEQ ID NO: 120806 - DNA, 120 bp, synthetic construct
  source 1..120: mol_type = other DNA
ccatttatttaaccctgagttgacacagcacgtttcagagagcacggggttgggggtagggttacacattaacagcatctcaaggcagaagaatttttcttagtacagaacaaaatagag

SEQ ID NO: 120807 - DNA, 120 bp, synthetic construct
  source 1..120: mol_type = other DNA
aggcgctcctcacttcccagacagggcagccgagcagaggggctcctcacttcctagacggggcggccaggaagagacgctcctcacttcccaaacggggtggtggctgggcagaggcgc

SEQ ID NO: 120808 - DNA, 120 bp, synthetic construct
  source 1..120: mol_type = other DNA
ggcagtagaatcgcttgatgctaggaagccaaggttgtggtgagctgagatcatgccatcgcactccagccttggcaacaagagcaaaattccctctcaaaaaaagaaaaaaaaatggcc

SEQ ID NO: 120809 - DNA, 120 bp, synthetic construct; identical to SEQ ID NO: 32940
  source 1..120: mol_type = other DNA

SEQ ID NO: 120810 - DNA, 120 bp, synthetic construct; identical to SEQ ID NO: 32941
  source 1..120: mol_type = other DNA

SEQ ID NO: 120811 - DNA, 120 bp, synthetic construct; identical to SEQ ID NO: 32942
  source 1..120: mol_type = other DNA

SEQ ID NO: 120812 - DNA, 120 bp, synthetic construct; identical to SEQ ID NO: 32943
  source 1..120: mol_type = other DNA

SEQ ID NO: 120813 - DNA, 120 bp, synthetic construct
  source 1..120: mol_type = other DNA
cccattaactcgtcatttacattaggtatatctcctaatgctatcctccccccaccccacaaccggccccggtgtgtgatgttccccttcctgtgtccaagtgttctcattgttcaattc

SEQ ID NO: 120814 - DNA, 120 bp, synthetic construct
  source 1..120: mol_type = other DNA
tccttgcccatgcctatgtcctgaatggtattgcctaggtttccttctagggtttttatagttttaggtctaacatttaagtctttaacccatcttgaattaatttttgtataaggtgta

SEQ ID NO: 120815 - DNA, 120 bp, synthetic construct; identical to SEQ ID NO: 31921
  source 1..120: mol_type = other DNA

SEQ ID NO: 120816 - DNA, 120 bp, synthetic construct
  source 1..120: mol_type = other DNA
aaccaacatagtgttggaagttctggccagggcaattaggcaggagaaggaaataaaaatcactagcattcttatacaccaataacagacaaacagagaaccaaatcatgagtgaactca

SEQ ID NO: 120817 - DNA, 120 bp, synthetic construct
  source 1..120: mol_type = other DNA
tctacaatgaactcaaacaaatttacaagaaaaaaacaaccccatcaaaaggtgggcaaaggatatgaacagacacttctcaaaagaagacatttatgcagccaaaaaacacatgaaaaa

SEQ ID NO: 120818 - DNA, 120 bp, synthetic construct; identical to SEQ ID NO: 17564
  source 1..120: mol_type = other DNA

SEQ ID NO: 120819 - DNA, 120 bp, synthetic construct
  source 1..120: mol_type = other DNA
gcctcaatttcagctcctattattggtctattcagagattcagcttcttcctggtttagtcttgggaggatgtatgtgtcgaggaatttatccatttcttctagattttctagtttattt

SEQ ID NO: 120820 - DNA, 120 bp, synthetic construct
  source 1..120: mol_type = other DNA
ttctgttcttttacatttgctgaggagtgctttacttccaactatgtggtcaattttgaagtaggtgtggtgtggtgctgaaaataatgtatattctgttgatttggggtggagagttct

SEQ ID NO: 120821 - DNA, 120 bp, synthetic construct
  source 1..120: mol_type = other DNA
tatgcagcttagtttggctggatatgaaattccgggttgaaaattcttttctttaaaaatgttgaatattgatcctcactctcttctggcttgtagagtttctgccaagagatcagctgt

SEQ ID NO: 120822 - DNA, 120 bp, synthetic construct
  source 1..120: mol_type = other DNA
caacttttatttttggttgagggagtacctgtgcaagtttgttacatgggtaaattgcgtgttactgggggttggtgtatttcatcacgcaggtagtgagcatagtatctgataggtttc

SEQ ID NO: 120823 - DNA, 120 bp, synthetic construct; identical to SEQ ID NO: 20590
  source 1..120: mol_type = other DNA

SEQ ID NO: 120824 - DNA, 120 bp, synthetic construct; identical to SEQ ID NO: 20591
  source 1..120: mol_type = other DNA

SEQ ID NO: 120825 - DNA, 120 bp, synthetic construct
  source 1..120: mol_type = other DNA
attgccattctaactggtgtgagatgatatctcatagtggttttgatttgcatttctctgatggccagtgatgatgagcatttcttcatgtgtcttttggctgcataaatgtcttctttt

SEQ ID NO: 120826 - DNA, 120 bp, synthetic construct
  source 1..120: mol_type = other DNA
tgtaagttggattcctaggtattttattctgtttgaagcaattgtgaatgggagttcactcatgatttggctctctgtttgtctgttgttggtgtataagaatgcttgtgatttttgtac

SEQ ID NO: 120827 - DNA, 120 bp, synthetic construct
  source 1..120: mol_type = other DNA
ggactctttgtttggtaaactattgattattgccacaatttcagagcctgttattggtctattcagagattcaacttcttcctggtttagtcttgggagagtgtatgtgtccaggaatgt

SEQ ID NO: 120828 - DNA, 120 bp, synthetic construct; identical to SEQ ID NO: 69865
  source 1..120: mol_type = other DNA

SEQ ID NO: 120829 - DNA, 120 bp, synthetic construct
  source 1..120: mol_type = other DNA
tttggtcttttcacatagtcccatatttcttggaggctttgctcatttctttttattcttttttctctaaacttcccttcttgcttcatttcattcatttcatcttccatcgctgatacc

SEQ ID NO: 120830 - DNA, 120 bp, synthetic construct
  source 1..120: mol_type = other DNA
tctgagccaggtgtgggatatagtctcgtggtgtgccgtttcttaagctggtctgaaaagcgcaatattcgggtgggagtgacccgattttccaggtgcgtccgtcacccctttctttga

SEQ ID NO: 120831 - DNA, 120 bp, synthetic construct
  source 1..120: mol_type = other DNA
agcctgggcgacagagtgagattccatctcaagggaagggaagggaaggggaggggaggggacaaaagaaaagaaaacaaaagaaaagaaaagaaaagaaaagaaaagaaatagtgctaa

SEQ ID NO: 120832 - DNA, 120 bp, synthetic construct
  source 1..120: mol_type = other DNA
gtaggagaattgcttgaacccgagaggcagaggttgcagtgagccaagatcacaccactacattccagtctgggtgacagagcaagactctgtctacatatatatatatatatatatata

SEQ ID NO: 120833 - DNA, 120 bp, synthetic construct; identical to SEQ ID NO: 24479
  source 1..120: mol_type = other DNA

SEQ ID NO: 120834 - DNA, 120 bp, synthetic construct; identical to SEQ ID NO: 24480
  source 1..120: mol_type = other DNA

SEQ ID NO: 120835 - DNA, 120 bp, synthetic construct; identical to SEQ ID NO: 32484
  source 1..120: mol_type = other DNA

SEQ ID NO: 120836 - DNA, 120 bp, synthetic construct; identical to SEQ ID NO: 32485
  source 1..120: mol_type = other DNA

SEQ ID NO: 120837 - DNA, 120 bp, synthetic construct; identical to SEQ ID NO: 32486
  source 1..120: mol_type = other DNA

SEQ ID NO: 120838 - DNA, 120 bp, synthetic construct; identical to SEQ ID NO: 32487
  source 1..120: mol_type = other DNA

SEQ ID NO: 120839 - DNA, 120 bp, synthetic construct
  source 1..120: mol_type = other DNA
agcttgagcccggagacggaggttgcagtgggccgagacagcgccactgcactccagcctgggcggcagagcaaaacccatctcaaaaaaataaaataaaataaaataaaataagaaaag

SEQ ID NO: 120840 - DNA, 120 bp, synthetic construct; identical to SEQ ID NO: 32488
  source 1..120: mol_type = other DNA

SEQ ID NO: 120841 - DNA, 120 bp, synthetic construct; identical to SEQ ID NO: 32489
  source 1..120: mol_type = other DNA

SEQ ID NO: 120842 - DNA, 120 bp, synthetic construct; identical to SEQ ID NO: 32490
  source 1..120: mol_type = other DNA

SEQ ID NO: 120843 - DNA, 120 bp, synthetic construct; identical to SEQ ID NO: 32491
  source 1..120: mol_type = other DNA

SEQ ID NO: 120844 - DNA, 120 bp, synthetic construct; identical to SEQ ID NO: 32492
  source 1..120: mol_type = other DNA

SEQ ID NO: 120845 - DNA, 120 bp, synthetic construct; identical to SEQ ID NO: 32493
  source 1..120: mol_type = other DNA

SEQ ID NO: 120846 - DNA, 120 bp, synthetic construct; identical to SEQ ID NO: 32494
  source 1..120: mol_type = other DNA

SEQ ID NO: 120847 - DNA, 120 bp, synthetic construct; identical to SEQ ID NO: 32495
  source 1..120: mol_type = other DNA

SEQ ID NO: 120848 - DNA, 120 bp, synthetic construct; identical to SEQ ID NO: 32496
  source 1..120: mol_type = other DNA

SEQ ID NO: 120849 - DNA, 120 bp, synthetic construct; identical to SEQ ID NO: 32497
  source 1..120: mol_type = other DNA

SEQ ID NO: 120850 - DNA, 120 bp, synthetic construct
  source 1..120: mol_type = other DNA
ttgattgtctaaaaaggatatccctaaataagtaacatagaaagatcattataaaagatcagtaaagttgggccaggcgtggtggctcatgcctgtaatcccagcactttgggaggccaa

SEQ ID NO: 120851 - DNA, 120 bp, synthetic construct; identical to SEQ ID NO: 32498
  source 1..120: mol_type = other DNA

SEQ ID NO: 120852 - DNA, 120 bp, synthetic construct; identical to SEQ ID NO: 32499
  source 1..120: mol_type = other DNA

SEQ ID NO: 120853 - DNA, 120 bp, synthetic construct
  source 1..120: mol_type = other DNA
ggtggatcacctgaggtcaggaattcaagaccagcctgaccaacgttgcaaaaccccatctctaccaaaagtacaaaaattagccaggcgtggtggcaggtgcctgtaatcccaggtact

SEQ ID NO: 120854 - DNA, 120 bp, synthetic construct; identical to SEQ ID NO: 32500
  source 1..120: mol_type = other DNA

SEQ ID NO: 120855 - DNA, 120 bp, synthetic construct
  source 1..120: mol_type = other DNA
acacacacacacacacacacacacacatacacatatatagaggaagatttcattacattcttaagccttatttacatatgcaaacatagttaaaatttgagtaaattagacattcagtta

SEQ ID NO: 120856 - DNA, 120 bp, synthetic construct
  source 1..120: mol_type = other DNA
agcatctgactggagatctttcttttcaaatataatttttttaaagacagagtctcactctgtcacccaggctggagtaccgtggctcactgcacctccacatcccgagttcaagcaatt

SEQ ID NO: 120857 - DNA, 120 bp, synthetic construct; identical to SEQ ID NO: 32501
  source 1..120: mol_type = other DNA

SEQ ID NO: 120858 - DNA, 120 bp, synthetic construct; identical to SEQ ID NO: 32502
  source 1..120: mol_type = other DNA

SEQ ID NO: 120859 - DNA, 120 bp, synthetic construct; identical to SEQ ID NO: 32503
  source 1..120: mol_type = other DNA

SEQ ID NO: 120860 - DNA, 120 bp, synthetic construct; identical to SEQ ID NO: 32504
  source 1..120: mol_type = other DNA

SEQ ID NO: 120861 - DNA, 120 bp, synthetic construct; identical to SEQ ID NO: 32505
  source 1..120: mol_type = other DNA

SEQ ID NO: 120862 - DNA, 120 bp, synthetic construct
  source 1..120: mol_type = other DNA
agtttctgctgccttttgttcagctatgctctgcccctagaggtgcagtctacagaggcaggcaggcctccttgatctgtggtgggctccacccagttcgagcttcctggcctctttgtt

SEQ ID NO: 120863 - DNA, 120 bp, synthetic construct; identical to SEQ ID NO: 32506
  source 1..120: mol_type = other DNA

SEQ ID NO: 120864 - DNA, 120 bp, synthetic construct
  source 1..120: mol_type = other DNA
aaaatatgtttaagaaatttagccaggcacgttagctcatgcctataatcctagcactttgggaggctgaagcaggtagatcacttgaggtcaggagtttgagaccaacctggccaacat

SEQ ID NO: 120865 - DNA, 120 bp, synthetic construct; identical to SEQ ID NO: 32507
  source 1..120: mol_type = other DNA

SEQ ID NO: 120866 - DNA, 120 bp, synthetic construct; identical to SEQ ID NO: 32508
  source 1..120: mol_type = other DNA

SEQ ID NO: 120867 - DNA, 120 bp, synthetic construct
  source 1..120: mol_type = other DNA
tacacactaacagttaaatatttcagttacctagaaacatttttattttttttgagatggagtcacactctgtcacccagcctgcggtgcagtggtgtgatcgtggctcactgcaacttc

SEQ ID NO: 120868 - DNA, 120 bp, synthetic construct
  source 1..120: mol_type = other DNA
aaagtgagggggagaatggaaccaacttggaaaacactctgcaggatattatccaggagaacttccccaatctagcaaggcaggccaacattcagattcaggaaatacagagaacgccac

SEQ ID NO: 120869 - DNA, 120 bp, synthetic construct; identical to SEQ ID NO: 24245
  source 1..120: mol_type = other DNA

SEQ ID NO: 120870 - DNA, 120 bp, synthetic construct
  source 1..120: mol_type = other DNA
ccacatcccagaggatgggcggccgggcagagacgctcctcacttcctagacggggtggcggccgggcagacgctgcaatctcggcactttgggaggccaaggaaggtggctgggaggtg

SEQ ID NO: 120871 - DNA, 120 bp, synthetic construct; identical to SEQ ID NO: 19958
  source 1..120: mol_type = other DNA

SEQ ID NO: 120872 - DNA, 120 bp, synthetic construct
  source 1..120: mol_type = other DNA
tgataaggaagggcatgggttgtagggtccggccccacaggattggtgggttttctcctcgtgtgtggagacgagagagcttagaaataaagacacaagacaaagagataaaagaaaagg

SEQ ID NO: 120873 - DNA, 120 bp, synthetic construct; identical to SEQ ID NO: 19959
  source 1..120: mol_type = other DNA

SEQ ID NO: 120874 - DNA, 120 bp, synthetic construct
  source 1..120: mol_type = other DNA
gggctgacccccccaccaccctcccggacggggcggctggccaggcagaggggctcctcacttcccagtagggacggccgggcagaggcgcccctcacctcctggatagggcggctggct

SEQ ID NO: 120875 - DNA, 120 bp, synthetic construct
  source 1..120: mol_type = other DNA
agggagagggagagggagggggagggagagggagagggagagggagagggagagggagagggcccctttgtttcttataggagatgctgggtaatccagattaaatttttgaccgggttt

SEQ ID NO: 120876 - DNA, 120 bp, synthetic construct
  source 1..120: mol_type = other DNA
tttccctaatttactactgctatctagaaggcagagccaggtgtacaggatggaacatgaaggcggactaggagcgtgaccaccgaagcacagcatcacagggagacggttaggcctccg

SEQ ID NO: 120877 - DNA, 120 bp, synthetic construct; identical to SEQ ID NO: 20103
  source 1..120: mol_type = other DNA

SEQ ID NO: 120878 - DNA, 120 bp, synthetic construct
  source 1..120: mol_type = other DNA
atttggtgagaaacccacccccatgatccaatcacctcccacagaccccacctccaacactgagtattaaatttcaacatgagatttggtgagaaatccacccccatgatccaatcacct

SEQ ID NO: 120879 - DNA, 120 bp, synthetic construct; identical to SEQ ID NO: 20104
  source 1..120: mol_type = other DNA

SEQ ID NO: 120880 - DNA, 120 bp, synthetic construct
  source 1..120: mol_type = other DNA
tggggaagggacagtctcttcaataaattgtgctggaaaaactggatatccacatgcagaagacactagactccaatctcttgccatatgcaaaaatcaaataaaaatggattaaagaca

SEQ ID NO: 120881 - DNA, 120 bp, synthetic construct
  source 1..120: mol_type = other DNA
caatggaacagaacagagccctcagaaataatgccgcatatcgacaactatctgatctttgacaaacctgagaaaaacaagcaatggggaaaggattccctatttaataaatggtgctgg

SEQ ID NO: 120882 - DNA, 120 bp, synthetic construct
  source 1..120: mol_type = other DNA
acacatgcacacgtatgtttattgcgtcattattcacaatagcaaagacttggaaccaacgcaaatgtccaacaacgatagactggattaagaaaatgtggcacatatacaccatggaat

SEQ ID NO: 120883 - DNA, 120 bp, synthetic construct; identical to SEQ ID NO: 33792
  source 1..120: mol_type = other DNA

SEQ ID NO: 120884 - DNA, 120 bp, synthetic construct; identical to SEQ ID NO: 33793
  source 1..120: mol_type = other DNA

SEQ ID NO: 120885 - DNA, 120 bp, synthetic construct
  source 1..120: mol_type = other DNA
aaaataataaaataaaataaaataaattaaaaaaaataaaacatatgtatgtggccaggcgcggtggctcacgcctgtgatcccagcactttgggaagccgaggcaggcgaatcacgagg

SEQ ID NO: 120886 - DNA, 120 bp, synthetic construct; identical to SEQ ID NO: 33794
  source 1..120: mol_type = other DNA

SEQ ID NO: 120887 - DNA, 120 bp, synthetic construct; identical to SEQ ID NO: 6602
  source 1..120: mol_type = other DNA

SEQ ID NO: 120888 - DNA, 120 bp, synthetic construct
  source 1..120: mol_type = other DNA
actaacagttgaggatgacttaaaagctttgccacattcttcacatttgtagggtttctctccagtatgaattctcttgtgtctagtaaggcttgaggatctgctgaaggctttgccaca

SEQ ID NO: 120889 - DNA, 120 bp, synthetic construct
  source 1..120: mol_type = other DNA
taccttatgtttagtaaggattgagaacttactaaaggctttgccacattcttcacatttgtagggtttctctccagtatgaatactcttataataagtaagggttgaggaccagttaaa

SEQ ID NO: 120890 - DNA, 120 bp, synthetic construct; identical to SEQ ID NO: 29177
  source 1..120: mol_type = other DNA

SEQ ID NO: 120891 - DNA, 120 bp, synthetic construct
  source 1..120: mol_type = other DNA
ggggcagcccccacccggccgctgccccgtctgggaggtgggggggcgcctctgaccggctgccccgtctgggaggtgtacccaacagctcattgagaacgggccatgatgacaatggcg

SEQ ID NO: 120892 - DNA, 120 bp, synthetic construct; identical to SEQ ID NO: 19644
  source 1..120: mol_type = other DNA

SEQ ID NO: 120893 - DNA, 120 bp, synthetic construct; identical to SEQ ID NO: 19645
  source 1..120: mol_type = other DNA

SEQ ID NO: 120894 - DNA, 120 bp, synthetic construct
  source 1..120: mol_type = other DNA
agtgagccgagatcgcaccactgcactccaggctgggtgacagagcgagactccgtctcacaaaaaaaaaaaaaagaaaaaaaaaaggacatattttatcatgtaaaagtatccatgtgt

SEQ ID NO: 120895 - DNA, 120 bp, synthetic construct; identical to SEQ ID NO: 7988
  source 1..120: mol_type = other DNA

SEQ ID NO: 120896 - DNA, 120 bp, synthetic construct; identical to SEQ ID NO: 7989
  source 1..120: mol_type = other DNA

SEQ ID NO: 120897 - DNA, 120 bp, synthetic construct; identical to SEQ ID NO: 7990
  source 1..120: mol_type = other DNA

SEQ ID NO: 120898 - DNA, 120 bp, synthetic construct; identical to SEQ ID NO: 7991
  source 1..120: mol_type = other DNA

SEQ ID NO: 120899 - DNA, 120 bp, synthetic construct
  source 1..120: mol_type = other DNA
gcactccagcctgggcgacagagcgagatgacgtctcaaaaaaaaaaaaaaaaaaaaagcaggggctgtgatcttacttccattcatatgcgcctaggggctgtgaccttacttccattc

SEQ ID NO: 120900 - DNA, 120 bp, synthetic construct
  source 1..120: mol_type = other DNA
agtagtgggatggctggatcaaatggtatttctagttctagatccttgaggaatcaccacactgtcttccacaatggttgaactagtttacagtcccaccaacagtgtaaaagtgttcct

SEQ ID NO: 120901 - DNA, 120 bp, synthetic construct; identical to SEQ ID NO: 19556
  source 1..120: mol_type = other DNA

SEQ ID NO: 120902 - DNA, 120 bp, synthetic construct
  source 1..120: mol_type = other DNA
agccccccaaagtgctgggattacaggcatgagccactgtgcctggcctactttttgtatttttaaaacctttatatatatacacacaaccccatacatatacacacacatatatacata

SEQ ID NO: 120903 - DNA, 120 bp, synthetic construct
  source 1..120: mol_type = other DNA
gggttccagaagtaaagtaagcataaaagcttatggcaggccaggcgtggtggctcacacctgtcatcacagcactttgggaggctgaggcgtgtggatcacttcaggtcaggagttcaa

SEQ ID NO: 120904 - DNA, 120 bp, synthetic construct
  source 1..120: mol_type = other DNA
gtgaaaagaccaaatctatgtctgactggtgtacccgaaagtgacagggagaatggaaccaagttggaaaacactctgcaggatattatccaggagaacttccccaatctagcaaggcag

SEQ ID NO: 120905 - DNA, 120 bp, synthetic construct
  source 1..120: mol_type = other DNA
agattcataaagcaagtccttagagacctacaaagagacttagactcccacacaataataatgggagactttaacaccccactgtcaacattagacagatcaacgagacagaaaatttac

SEQ ID NO: 120906 - DNA, 120 bp, synthetic construct
  source 1..120: mol_type = other DNA
aagactaaaccaggaagaagttgaatctctgaatagaccaataataggctctgaaattcaggcaatcattaatagcttaccaaccaaaaaaagtccaggaccagatggattcacagccaa

SEQ ID NO: 120907 - DNA, 120 bp, synthetic construct
  source 1..120: mol_type = other DNA
aggatacaaaatcaatgtgcaaaaatcacaagcattcttataaccaattataagcattcttaaaaccaataacagacaaacagagagccaaatcatgagtgaactcccattcacaattgc

SEQ ID NO: 120908 - DNA, 120 bp, synthetic construct
  source 1..120: mol_type = other DNA
ccaaaattgacaaatgggatctaattaaactaaagagcttctgcacagcaaaagaaactaccatcagagtgaacaggcaacctacagaatgggagaaaatttttgcaatttactcatctg

SEQ ID NO: 120909 - DNA, 120 bp, synthetic construct; identical to SEQ ID NO: 31624
  source 1..120: mol_type = other DNA

SEQ ID NO: 120910 - DNA, 120 bp, synthetic construct
  source 1..120: mol_type = other DNA
cactgacttccacaatggttgaactagtttacagtcccaccaacagtgtaaaagtgttcctgtttctccacatcctctccagcacctgttgtttcctgactctttaatgactgccattct

SEQ ID NO: 120911 - DNA, 120 bp, synthetic construct; identical to SEQ ID NO: 31625
  source 1..120: mol_type = other DNA

SEQ ID NO: 120912 - DNA, 120 bp, synthetic construct; identical to SEQ ID NO: 12663
  source 1..120: mol_type = other DNA

SEQ ID NO: 120913 - DNA, 120 bp, synthetic construct; identical to SEQ ID NO: 12664
  source 1..120: mol_type = other DNA

SEQ ID NO: 120914 - DNA, 120 bp, synthetic construct
  source 1..120: mol_type = other DNA
agtgaatacattgacctctgttctaaatcataacatgagatctctaaaatagagcaagtgcatatacattgctcatgcccagacattgaaagatattgatatcatcacaattatgcaata

SEQ ID NO: 120915 - DNA, 120 bp, synthetic construct
  source 1..120: mol_type = other DNA
atttttccatttggttaaatgagtttggggtcccaaaatttaatttcctttcacacaagaaacattggaaagctttcaactggggtctaccactgaatgtttggtctaggattcaaaggt

SEQ ID NO: 120916 - DNA, 120 bp, synthetic construct
  source 1..120: mol_type = other DNA
tctgtgaatgaacattcagccaagcaccaggcttgatgttcacaagagaagagtgacaaaatgctgctaaaatggaaaataagagaggaaagccttcataagctaaataacaagggaaag

SEQ ID NO: 120917 - DNA, 120 bp, synthetic construct
  source 1..120: mol_type = other DNA
tcttttccaaacctgagcttttccatcatcatgagatgtgagtgaataattatgagtcataagtttctgacaaggagactggcactgctgtgatttgggggaggcttagtgacatctgtt

SEQ ID NO: 120918 - DNA, 120 bp, synthetic construct
  source 1..120: mol_type = other DNA
tcagacctagagattttttgtagatcctttaaccaggccaagaggtgagggaggcactggatgcaggtgcagaatttggggatcaaaaaattctgcactcaagataagtgatcttataat

SEQ ID NO: 120919 - DNA, 120 bp, synthetic construct
  source 1..120: mol_type = other DNA
tgtaaagtacataggaggaaatgcaaaggttatatgacaatacccatgccattttacatcaaggacttcagcatctgaggaattttatatccacagaggacctgaaaccaatcccccccg

SEQ ID NO: 120920 - DNA, 120 bp, synthetic construct
  source 1..120: mol_type = other DNA
ttcatagctggtggctgaccagccaagtgacaagccaagattgctaccttcttaagagtctgacactttctacacaaatgcagattctaagaacgtacatttttgacctcaggtttttat

SEQ ID NO: 120921 - DNA, 120 bp, synthetic construct
  source 1..120: mol_type = other DNA
gctgccatgtaagatgtgcctacttcctctttgccttctgccatgattgtaagtttcctcaggcctccccaaccctgcggaactgtgagtcaattaaacctatctttttttttttttaat

SEQ ID NO: 120922 - DNA, 120 bp, synthetic construct; identical to SEQ ID NO: 1738
  source 1..120: mol_type = other DNA

SEQ ID NO: 120923 - DNA, 120 bp, synthetic construct
  source 1..120: mol_type = other DNA
tccagacacctatgccggtgtcttgatcttggacttccaacctcgagaactgtgagaagtaaacttctgctctttataagccaccctgtttatattactttttaatagcatcccaaatgg

SEQ ID NO: 120924 - DNA, 120 bp, synthetic construct
  source 1..120: mol_type = other DNA
acagagtgatatgatggattttagagactcagaaggccgcagggctaggaatacaaaactacctattaggtacaatgtactctactcaggtgacaggtgtactaaaatctcagaattcac

SEQ ID NO: 120925 - DNA, 120 bp, synthetic construct
  source 1..120: mol_type = other DNA
ttacatgggaatatggtattatgtggtggtttggagtatggatctcattaccctggtactgaacatagtaccagataggtagttttttaacccaactcctccctccaccctctagtagtt

SEQ ID NO: 120926 - DNA, 120 bp, synthetic construct
  source 1..120: mol_type = other DNA
gttcaagaccagcctgaccaacatggagaaactccatctctactaaagacaaaattagctgggcatggaggcgcatgcctgtaatcccagctactctggaggctgaggcaggagaattgc

SEQ ID NO: 120927 - DNA, 120 bp, synthetic construct
  source 1..120: mol_type = other DNA
tgtctgggggcacgtgcagacgatccagtgccaactccttctctgggacaatgaccatcacatagactccaggcagctccctatagtagtctcagggcctgcaagggctgagagactgtc

SEQ ID NO: 120928 - DNA, 120 bp, synthetic construct
  source 1..120: mol_type = other DNA
tccattttttaggactcatgattacattgggcccacctggataatctaagataatctccctattttaaggtcaggtgattaacagccttaatttcacaggaaacctcaattcccctttgc

SEQ ID NO: 120929 - DNA, 120 bp, synthetic construct
  source 1..120: mol_type = other DNA
actgcactccagcctgggtgacagagtaagacactgtctcaaaaaaaaaaaaaaaaaaaaaaaaagtttatattacatgttatgacttgattactgtttggtttccagtatccttctatc

SEQ ID NO: 120930 - DNA, 120 bp, synthetic construct
  source 1..120: mol_type = other DNA
ggctgacatctcccatcagtgttagaagacaataaggaagaaataaactgaaacttgtatgctctagaacttgtaaagggaagcaggctactcacctccagccttttgtcatgtaggtgc

SEQ ID NO: 120931 - DNA, 120 bp, synthetic construct
  source 1..120: mol_type = other DNA
ccagtgggcttgggtactactatatgtagtagctgactacttacagataaaaggaagagatggaaagctcagggatcaaaaaactcagatttcagcttgtttctaccaagtggtcaacat

SEQ ID NO: 120932 - DNA, 120 bp, synthetic construct
  source 1..120: mol_type = other DNA
tccatgtaacaaatctgcacatgcactccctgaatctaaaataaaggttgaagttatttttaaaaattgaaattacaaaagactttttaaaattatgatgtaccattgttcatttgtaag

SEQ ID NO: 120933 - DNA, 120 bp, synthetic construct
  source 1..120: mol_type = other DNA
tcttggattggcccaaggtggttaccagatacccaaagtagattcaaaaattttctggaactcctgaacatgtgtattcaaggacgaataagcaacttattgcctctatttttgctgttt

SEQ ID NO: 120934 - DNA, 120 bp, synthetic construct
  source 1..120: mol_type = other DNA
cagtcttcccataaaagcaattttgcgtgcatagaacacctctatctatgaatatccctaaggaggtacagaaagactcttattatccaaacagagacattccactgctgctagagagcc

SEQ ID NO: 120935 - DNA, 120 bp, synthetic construct
  source 1..120: mol_type = other DNA
ccatacacaactatgaggccacctttttttcattgcttattatttcatgctatttgtcaccattgtcatcataatcagcctcatcctacattgttgaacacccatcatggaccatatggc

SEQ ID NO: 120936 - DNA, 120 bp, synthetic construct; identical to SEQ ID NO: 1739
  source 1..120: mol_type = other DNA

SEQ ID NO: 120937 - DNA, 120 bp, synthetic construct
  source 1..120: mol_type = other DNA
caagccgagatcacgccactgcactccagcctgtgtgacacaccgagactccatctcaaaaaaaaaaaaatatgcaaagatctgagtagacatttcccagaagaacagatacaaatggcc

SEQ ID NO: 120938 - DNA, 120 bp, synthetic construct
  source 1..120: mol_type = other DNA
ggtccataagcaacttcagtccttgcctcctcagaagaaataatttgactgaagggcatacagcagaaaaagagactgagcggtaagtttcagagcaggagtggaagtttatttaaaaag

SEQ ID NO: 120939 - DNA, 120 bp, synthetic construct
  source 1..120: mol_type = other DNA
actgtaaattaattataattaaataactaaatgacatatccttagtagtaatagccaaagtcttggccaaactagaaattctgtaactacatatgtgtggtagttactgcattggacaat

SEQ ID NO: 120940 - DNA, 120 bp, synthetic construct
  source 1..120: mol_type = other DNA
ctctgtggtgatctttgcttttctattttttcattgctagaatgtgagctgctgtttccctagcacctcagatgtcattcaacattgtatagcactggtgttgagaattgagagaatcta

SEQ ID NO: 120941 - DNA, 120 bp, synthetic construct; identical to SEQ ID NO: 1740
  source 1..120: mol_type = other DNA

SEQ ID NO: 120942 - DNA, 120 bp, synthetic construct; identical to SEQ ID NO: 1741
  source 1..120: mol_type = other DNA

SEQ ID NO: 120943 - DNA, 120 bp, synthetic construct; identical to SEQ ID NO: 1742
  source 1..120: mol_type = other DNA

SEQ ID NO: 120944 - DNA, 120 bp, synthetic construct
  source 1..120: mol_type = other DNA
gggctggttacaaaaaaaaaacaatgaagaggctttcttaatctttgaacaagtgaagtgagaaggtcaatttaaaagagaaacaatgataactgatgtttggactgccgagagaaagtt

SEQ ID NO: 120945 - DNA, 120 bp, synthetic construct
  source 1..120: mol_type = other DNA
agaagagattagagtgagatatggggaagctgttttaacacttattgaatgaatgagtgaatgtgtctctacatatgtacatgaatgttcagggactcaccgagggacaccaggtgactg

SEQ ID NO: 120946 - DNA, 120 bp, synthetic construct
  source 1..120: mol_type = other DNA
tcagatgttactcttgtgtcctcttgtttttcttttcttttacttttgggaaaaagacaattcatgtacttggctggggttaaactttcatatgctgaccctttccctgatacccctgtg

SEQ ID NO: 120947 - DNA, 120 bp, synthetic construct; identical to SEQ ID NO: 1743
  source 1..120: mol_type = other DNA

SEQ ID NO: 120948 - DNA, 120 bp, synthetic construct; identical to SEQ ID NO: 1744
  source 1..120: mol_type = other DNA

SEQ ID NO: 120949 - DNA, 120 bp, synthetic construct; identical to SEQ ID NO: 31310
  source 1..120: mol_type = other DNA

SEQ ID NO: 120950 - DNA, 120 bp, synthetic construct; identical to SEQ ID NO: 31311
  source 1..120: mol_type = other DNA

SEQ ID NO: 120951 - DNA, 120 bp, synthetic construct; identical to SEQ ID NO: 31312
  source 1..120: mol_type = other DNA

SEQ ID NO: 120952 - DNA, 120 bp, synthetic construct; identical to SEQ ID NO: 69555
  source 1..120: mol_type = other DNA

SEQ ID NO: 120953 - DNA, 120 bp, synthetic construct
  source 1..120: mol_type = other DNA
tgggtctccaggatagctgtgtgtgtatatgtctgtagcacatgccttgcagtcatctttagtaactgaacaccatttgtgaatggataaactatattcattgctgtacaatgatgaaaa

SEQ ID NO: 120954 - DNA, 120 bp, synthetic construct; identical to SEQ ID NO: 31104
  source 1..120: mol_type = other DNA

SEQ ID NO: 120955 - DNA, 120 bp, synthetic construct; identical to SEQ ID NO: 31105
  source 1..120: mol_type = other DNA

SEQ ID NO: 120956 - DNA, 120 bp, synthetic construct
  source 1..120: mol_type = other DNA
cttttgtatttccccttggaacttggaaataatcaagtaagaatctgttttagggtggagtgtggtggctcacgcctgtaatcccagcactttgggaggccaaggcacgtggatcacctg

SEQ ID NO: 120957 - DNA, 120 bp, synthetic construct
  source 1..120: mol_type = other DNA
tggttaggggagtaattttgtcaaaaagcaagaagaggcagtgacaggcagaatataattaaaagtattgctgggccattttctaattttgtaattttgtcatattattcaaaccctgtt

SEQ ID NO: 120958 - DNA, 120 bp, synthetic construct
  source 1..120: mol_type = other DNA
tcacgccactgcactccagcctgtgtgacacaccgagactccatctcaaaaaaaaaaaaatatgcaaagatctgagtagacatttcccagaagaacagatacaaatggccaacaaatata

SEQ ID NO: 120959 - DNA, 120 bp, synthetic construct; identical to SEQ ID NO: 1739
  source 1..120: mol_type = other DNA

SEQ ID NO: 120960 - DNA, 120 bp, synthetic construct
  source 1..120: mol_type = other DNA
cagatgcttagttccatctcatgatatttttatttttttttaaattggtcaagtatttttcattaaataatgtaaactttcttagtctacatctaacaaaactcccaccagcatacaaat

SEQ ID NO: 120961 - DNA, 120 bp, synthetic construct; identical to SEQ ID NO: 31106
  source 1..120: mol_type = other DNA

SEQ ID NO: 120962 - DNA, 120 bp, synthetic construct; identical to SEQ ID NO: 31107
  source 1..120: mol_type = other DNA

SEQ ID NO: 120963 - DNA, 120 bp, synthetic construct; identical to SEQ ID NO: 31108
  source 1..120: mol_type = other DNA

SEQ ID NO: 120964 - DNA, 120 bp, synthetic construct; identical to SEQ ID NO: 31109
  source 1..120: mol_type = other DNA

SEQ ID NO: 120965 - DNA, 120 bp, synthetic construct; identical to SEQ ID NO: 31110
  source 1..120: mol_type = other DNA

SEQ ID NO: 120966 - DNA, 120 bp, synthetic construct; identical to SEQ ID NO: 31111
  source 1..120: mol_type = other DNA

SEQ ID NO: 120967 - DNA, 120 bp, synthetic construct; identical to SEQ ID NO: 31112
  source 1..120: mol_type = other DNA

SEQ ID NO: 120968 - DNA, 120 bp, synthetic construct; identical to SEQ ID NO: 31296
  source 1..120: mol_type = other DNA

SEQ ID NO: 120969 - DNA, 120 bp, synthetic construct; identical to SEQ ID NO: 31113
  source 1..120: mol_type = other DNA

SEQ ID NO: 120970 - DNA, 120 bp, synthetic construct; identical to SEQ ID NO: 31236
  source 1..120: mol_type = other DNA

SEQ ID NO: 120971 - DNA, 120 bp, synthetic construct; identical to SEQ ID NO: 31235
  source 1..120: mol_type = other DNA

SEQ ID NO: 120972 - DNA, 120 bp, synthetic construct; identical to SEQ ID NO: 31114
  source 1..120: mol_type = other DNA

SEQ ID NO: 120973 - DNA, 120 bp, synthetic construct; identical to SEQ ID NO: 31115
  source 1..120: mol_type = other DNA

SEQ ID NO: 120974 - DNA, 120 bp, synthetic construct
  source 1..120: mol_type = other DNA
gttaaaaaaaaaaaaagacagggcactgaaagagagagagagagaaagaatggtaagaaaagacagaagggatggaaaaaggaagaaggaaagggagggggaaaggagagggaggaaagc

SEQ ID NO: 120975 - DNA, 120 bp, synthetic construct; identical to SEQ ID NO: 31233
  source 1..120: mol_type = other DNA

SEQ ID NO: 120976 - DNA, 120 bp, synthetic construct; identical to SEQ ID NO: 31232
  source 1..120: mol_type = other DNA

SEQ ID NO: 120977 - DNA, 120 bp, synthetic construct; identical to SEQ ID NO: 31231
  source 1..120: mol_type = other DNA

SEQ ID NO: 120978 - DNA, 120 bp, synthetic construct; identical to SEQ ID NO: 31922
  source 1..120: mol_type = other DNA

SEQ ID NO: 120979 - DNA, 120 bp, synthetic construct; identical to SEQ ID NO: 31923
  source 1..120: mol_type = other DNA

SEQ ID NO: 120980 - DNA, 120 bp, synthetic construct
  source 1..120: mol_type = other DNA
gggaggtgaggagtgcctctgcccggccgcaaccccgtctgagaagtgaggagaccctcctcctggcagccaccctgtctgggaagtgaggagcatctccgcccggcagccaccccatcc

SEQ ID NO: 120981 - DNA, 120 bp, synthetic construct; identical to SEQ ID NO: 19564
  source 1..120: mol_type = other DNA

SEQ ID NO: 120982 - DNA, 120 bp, synthetic construct
  source 1..120: mol_type = other DNA
tcggcctcccaaagtgctgggattacaggcatgagccactgcgcccggccagttatttttaaatgtatcattaaattattattgatcatagtcaccctgttgtgctgtcaaatagtaggt

SEQ ID NO: 120983 - DNA, 120 bp, synthetic construct; identical to SEQ ID NO: 15646
  source 1..120: mol_type = other DNA

SEQ ID NO: 120984 - DNA, 120 bp, synthetic construct; identical to SEQ ID NO: 15647
  source 1..120: mol_type = other DNA

SEQ ID NO: 120985 - DNA, 120 bp, synthetic construct; identical to SEQ ID NO: 34274
  source 1..120: mol_type = other DNA

SEQ ID NO: 120986 - DNA, 120 bp, synthetic construct; identical to SEQ ID NO: 34275
  source 1..120: mol_type = other DNA

SEQ ID NO: 120987 - DNA, 120 bp, synthetic construct
  source 1..120: mol_type = other DNA
catagtcccgatgaaaaacagacccgggaaagctggtgggagtcaggagccccggcgatgaggattgcgatgaaggaagcaggctcggagcgccgccagcgcatgcgtattggggatctg

SEQ ID NO: 120988 - DNA, 120 bp, synthetic construct
  source 1..120: mol_type = other DNA
gctaattttttgtatttttagtaaagatggggtttcaccatgttagcaaggagggtctccatctcctgacctcatgatccacctgtctcagcctcccaaagtgttgggattacaggcttg

SEQ ID NO: 120989 - DNA, 120 bp, synthetic construct; identical to SEQ ID NO: 24437
  source 1..120: mol_type = other DNA

SEQ ID NO: 120990 - DNA, 120 bp, synthetic construct; identical to SEQ ID NO: 24438
  source 1..120: mol_type = other DNA

SEQ ID NO: 120991 - DNA, 120 bp, synthetic construct
  source 1..120: mol_type = other DNA
gcttgagtccaggagtttgacagtgcagtgagttatgatcacaccactgcactccagcctgaccaacagagagcctacctctcaaaaaaaaaaaaaaaaaagaataaaattctactcctc

SEQ ID NO: 120992 - DNA, 120 bp, synthetic construct; identical to SEQ ID NO: 24440
  source 1..120: mol_type = other DNA

SEQ ID NO: 120993 - DNA, 120 bp, synthetic construct; identical to SEQ ID NO: 24441
  source 1..120: mol_type = other DNA

SEQ ID NO: 120994 - DNA, 120 bp, synthetic construct
  source 1..120: mol_type = other DNA
tcacataggattccagaacactgctgccatggtctgaatgtccctcacataggattccagaacacttttgctggtgtctgaatgtttatacctcacataggattccagaacactgctatg

SEQ ID NO: 120995 - DNA, 120 bp, synthetic construct
  source 1..120: mol_type = other DNA
ctacaagggtctgaatgtttgtccctcacataggattccacaacacaactgctgggatctgaatgttcgtccctcacataggattccagacacggctacgagggtctgaatgtttttccc

SEQ ID NO: 120996 - DNA, 120 bp, synthetic construct
  source 1..120: mol_type = other DNA
ccatgtctgagaacttccagtattaatgtcagacaccaaaccaaagatccaggaagccccgagaacaccaggcaggataaatgccaacaacctacacttggacataaaattttcaaacta

SEQ ID NO: 120997 - DNA, 120 bp, synthetic construct
  source 1..120: mol_type = other DNA
gtcatctaaaatcatcaatgaaaactgcaaagggcagaaaaagagtggtagacaagagaatgaagactaaggagaatgaatagaaaacagtaacaaacacagtagatattaatccaatga

SEQ ID NO: 120998 - DNA, 120 bp, synthetic construct
  source 1..120: mol_type = other DNA
aggacgtcgaggcaacatggcaaaacaccatctctacaaaaaaaaaaaaattagctgcacatggtggcacgcacctgtagtcccagctagtcaggagtctgaggtgggggtttgattgag

SEQ ID NO: 120999 - DNA, 120 bp, synthetic construct
  source 1..120: mol_type = other DNA
tgcctcccaggttcaagcaattctcccgcctcaggctcctgagtagctgggactacagatgcatactatcacacctggctaattttttgatttttaatagagatgggatttcaccatgtt

SEQ ID NO: 121000 - DNA, 120 bp, synthetic construct
  source 1..120: mol_type = other DNA
gatctcaaacccatgctaaagggaagcttacagctgcagatgcttaaattgaaaagaagcgagatctcaaacccatgctaaagggaagcttatagctgcaggtgcttaaattaaaaagaa

SEQ ID NO: 121001 - DNA, 120 bp, synthetic construct
  source 1..120: mol_type = other DNA
aagtcagttgcatttctgtaaactaacaatgaacaatctgcaaataaaattttaaaaacagaggccaggtgcagtggctcacgcttataatcccagcacttcgggaggccaaggcgggtg

SEQ ID NO: 121002 - DNA, 120 bp, synthetic construct
  source 1..120: mol_type = other DNA
tatatatatatatatatatgtatatgtgtgtgtgtgtgtgtgtgtgtatatgtacaaagaaatgttattcagccatagaaaggaagaaaatcctgacacatctgacacataacatgaaac

SEQ ID NO: 121003 - DNA, 120 bp, synthetic construct
  source 1..120: mol_type = other DNA
cacctcttcaccttgtcaccttctacttgcccacgtacctcattcttcctggatgcaggagaagaactcgggacctgccaaccagcagcgctgaaagaggtgtaacataaacagggctga

SEQ ID NO: 121004 - DNA, 120 bp, synthetic construct
  source 1..120: mol_type = other DNA
gggatttttgtgttctaccccattgtttcatttttctcgcatgcttaggtaggaaaaaaaaaatcattggctaagttaatcaagggaacctaggagtaaagccaatattttaggtaaaaa

SEQ ID NO: 121005 - DNA, 120 bp, synthetic construct
  source 1..120: mol_type = other DNA
ctactcaggaggctggggcaggagaatctcttgaacccaggaggcagggggttgcagtgaaccaagatcacaccattgcactccagcctgggcaacaagagggaaaatccatctcaaaaa

SEQ ID NO: 121006 - DNA, 120 bp, synthetic construct
  source 1..120: mol_type = other DNA
acgcaggaggcagaggttgcagtgagccaagatcgtgccactgcactacagcctaggtaacagagtgagactctgtctcaaaaaaaaaaaaaaaaaaattcccaaaagtttaataaaaag

SEQ ID NO: 121007 - DNA, 120 bp, synthetic construct; identical to SEQ ID NO: 24442
  source 1..120: mol_type = other DNA

SEQ ID NO: 121008 - DNA, 120 bp, synthetic construct; identical to SEQ ID NO: 24443
  source 1..120: mol_type = other DNA

SEQ ID NO: 121009 - DNA, 120 bp, synthetic construct
  source 1..120: mol_type = other DNA
gtgatgcgcaaaaaccggaacccaaaacaatgggagtgacctgctaaactaggaacccaaaacaatgggattgacgtgctaaaaccagaacacaaaacaatgggagtgacgtgcgaaaac

SEQ ID NO: 121010 - DNA, 120 bp, synthetic construct
  source 1..120: mol_type = other DNA
aaaccagaaacccaaaacaatgggagtgatgtgctaaaaccggaacccaaaacaatgggagtgtcctgctaaaccagaaacccaaaacaacgggagtgatgtgctaaaactggaacccaa

SEQ ID NO: 121011 - DNA, 120 bp, synthetic construct
  source 1..120: mol_type = other DNA
agccaccacgcccagccaaaaggaggaattttttaagcaaaattatgcgaggccattgttttaaactaagctcatgcaataggtcccaacagaccaaaccaaaccaaaatggagttactc

SEQ ID NO: 121012 - DNA, 120 bp, synthetic construct
  source 1..120: mol_type = other DNA
ttagcagaagatgaccgtttccactgcacaacactacaagtatttactgccaggctggtgtgaaatatgttccagcacataacctatgtcaccaccgaaggtggtggttcagacttggtg

SEQ ID NO: 121013 - DNA, 120 bp, synthetic construct
  source 1..120: mol_type = other DNA
cccagcaattttggcctacaattacttttttttaaatgtacataatatgtatttcctgcagtacaccattctactcatgtttcccaataacacctttccctgtatccaagccctcatatt

SEQ ID NO: 121014 - DNA, 120 bp, synthetic construct
  source 1..120: mol_type = other DNA
tcaaaccttataacacacggttaagactgaagtacccttaaggctgaagaccatcatccagtaccccatctccctcgcggcatcagtgagttcttccctggaaactaggtctcgtataaa

SEQ ID NO: 121015 - DNA, 120 bp, synthetic construct
  source 1..120: mol_type = other DNA
ttctcctgcctcagcctcctgagtagctgggattacaggtgcgcgccaccacactcacctaatttttgtatttttagtagagacggggtttcaccatgttggtcaggctggtctcgaact

SEQ ID NO: 121016 - DNA, 120 bp, synthetic construct; identical to SEQ ID NO: 25097
  source 1..120: mol_type = other DNA

SEQ ID NO: 121017 - DNA, 120 bp, synthetic construct; identical to SEQ ID NO: 25098
  source 1..120: mol_type = other DNA

SEQ ID NO: 121018 - DNA, 120 bp, synthetic construct
  source 1..120: mol_type = other DNA
tgcaagttttcaaattatttaaagcatgggtttccaaccttttggcttccttggaccacattggaggaaaaattgtcttggccacacataaaatacagtaacgtggccggacacggtggc

SEQ ID NO: 121019 - DNA, 120 bp, synthetic construct
  source 1..120: mol_type = other DNA
ccagtttggcctcccaaagtgctaggattacaggcatgagccaccaagcccaggcagtcttttcaattacagtcttttcaataacagtcattctcactggagtaatgtttttttgttttg

SEQ ID NO: 121020 - DNA, 120 bp, synthetic construct
  source 1..120: mol_type = other DNA
cttcaagcatctgtttaacaaagcacatcttgcaccgcccttaatccattcaactctgagttgacacagcacatgtttcagagagcacggggttgggggtaaggttatagattaacaaaa

SEQ ID NO: 121021 - DNA, 120 bp, synthetic construct; identical to SEQ ID NO: 25102
  source 1..120: mol_type = other DNA

SEQ ID NO: 121022 - DNA, 120 bp, synthetic construct
  source 1..120: mol_type = other DNA
tgtcttgtgccagttttcaaagggaatgctgccagtttttgcccgttcagtatgatactttctgtgggtttgtcataaatagctcttattattttgagatacattctgtcaatacctagt

SEQ ID NO: 121023 - DNA, 120 bp, synthetic construct
  source 1..120: mol_type = other DNA
ctgcactccagcctgggtgacagagcgagactctgtctcaaaaacaaaacaaaaacactcatgtaccctttgaaaacctgcagaatcacattacataaagagggactaaaattactgagt

SEQ ID NO: 121024 - DNA, 120 bp, synthetic construct; identical to SEQ ID NO: 19666
  source 1..120: mol_type = other DNA

SEQ ID NO: 121025 - DNA, 120 bp, synthetic construct
  source 1..120: mol_type = other DNA
tcaagcgattctcctgcctcggcctcttgagtagctgggactacaggcgtgtgccaccacacctagctaattttttcgtatttttagtagagacagggtttcactatgttggccaggctg

SEQ ID NO: 121026 - DNA, 120 bp, synthetic construct; identical to SEQ ID NO: 25101
  source 1..120: mol_type = other DNA

SEQ ID NO: 121027 - DNA, 120 bp, synthetic construct
  source 1..120: mol_type = other DNA
ccaaagtgctgggtttacaggcatgagccaccacacttagcctaaaataaaatatcccttaatcgaactcttcttaagcttatctccctccctcaggctcctgaactttgagctaccctc

SEQ ID NO: 121028 - DNA, 120 bp, synthetic construct; identical to SEQ ID NO: 35331
  source 1..120: mol_type = other DNA

SEQ ID NO: 121029 - DNA, 120 bp, synthetic construct
  source 1..120: mol_type = other DNA
cactgtctccagcatttggaagtgtcagtgtttgggatttaggctaccccaccaggtgtttgctggtgcctcattgttttctttctttctttctttccttctttcttttctttctttctt

SEQ ID NO: 121030 - DNA, 120 bp, synthetic construct; identical to SEQ ID NO: 19407
  source 1..120: mol_type = other DNA

SEQ ID NO: 121031 - DNA, 120 bp, synthetic construct; identical to SEQ ID NO: 19408
  source 1..120: mol_type = other DNA

SEQ ID NO: 121032 - DNA, 120 bp, synthetic construct
  source 1..120: mol_type = other DNA
tatccctatttttctctctccttctctagccaggatttttttttttttttttttttttggtttttgtttttgagacggagtctttctctgtcgccaggctggagtgcagcggcgccatgt

SEQ ID NO: 121033 - DNA, 120 bp, synthetic construct
  source 1..120: mol_type = other DNA
tgccccttaaacctctactgtccacttaaattgcctcaagcccctgaccacctctgctgtccccacaagctctccccaaactcctgacctgtactgtccccagaaactacccctcgagcc

SEQ ID NO: 121034 - DNA, 120 bp, synthetic construct
  source 1..120: mol_type = other DNA
gcgggtcctgagcttctgatccagctccccgcctcaggacaccaagatgcctggcgaacagcaggcagaggaagaggaggaggaagagatgcaggaggagatggtgctgctggtgaaggg

SEQ ID NO: 121035 - DNA, 120 bp, synthetic construct; identical to SEQ ID NO: 20120
  source 1..120: mol_type = other DNA

SEQ ID NO: 121036 - DNA, 120 bp, synthetic construct; identical to SEQ ID NO: 20121
  source 1..120: mol_type = other DNA

SEQ ID NO: 121037 - DNA, 120 bp, synthetic construct; identical to SEQ ID NO: 20122
  source 1..120: mol_type = other DNA

SEQ ID NO: 121038 - DNA, 120 bp, synthetic construct
  source 1..120: mol_type = other DNA
agtggctttcactgaatgtgtggtgaggtggggcgcttattcttgcatagtccttggacaccaactatttcattccagttgttttttttttttttttttgacagagtcttgctctgtcgc

SEQ ID NO: 121039 - DNA, 120 bp, synthetic construct; identical to SEQ ID NO: 17120
  source 1..120: mol_type = other DNA

SEQ ID NO: 121040 - DNA, 120 bp, synthetic construct; identical to SEQ ID NO: 17121
  source 1..120: mol_type = other DNA

SEQ ID NO: 121041 - DNA, 120 bp, synthetic construct; identical to SEQ ID NO: 17122
  source 1..120: mol_type = other DNA

SEQ ID NO: 121042 - DNA, 120 bp, synthetic construct; identical to SEQ ID NO: 17123
  source 1..120: mol_type = other DNA

SEQ ID NO: 121043 - DNA, 120 bp, synthetic construct; identical to SEQ ID NO: 17124
  source 1..120: mol_type = other DNA

SEQ ID NO: 121044 - DNA, 120 bp, synthetic construct; identical to SEQ ID NO: 17125
  source 1..120: mol_type = other DNA

SEQ ID NO: 121045 - DNA, 120 bp, synthetic construct; identical to SEQ ID NO: 19769
  source 1..120: mol_type = other DNA

SEQ ID NO: 121046 - DNA, 120 bp, synthetic construct
  source 1..120: mol_type = other DNA
atggtatctcattgtggttttgatttgcatttctctgatggccagtgatgatgagcattttttcatgtgttttttggctgcataaatgtcttcttttgagaagcgtctgttcacatcctt

SEQ ID NO: 121047 - DNA, 120 bp, synthetic construct
  source 1..120: mol_type = other DNA
ggtctgttattggtgtataagaatgcttgtgatttttgtacattgattttgtatcctgaaactttgctgaagttgcttatcagcttaaggagattttgggctgagacaatggggttttct

SEQ ID NO: 121048 - DNA, 120 bp, synthetic construct
  source 1..120: mol_type = other DNA
gtgaatccatctggtcctggatcttttttggttggtaagctattgattattgccacaatttcagagcctgttattggtctattcagagattcaacttcttcctggtttagtcttgggagg

SEQ ID NO: 121049 - DNA, 120 bp, synthetic construct
  source 1..120: mol_type = other DNA
tatgaatctgggtgctcctgtattgggtgcatatatatttaggatagttagcgcttcttgttgaattgatccctttaccattatgtaatggccttctttgtctcttttgatctttgttgg

SEQ ID NO: 121050 - DNA, 120 bp, synthetic construct
  source 1..120: mol_type = other DNA
ttcatagtttttaacttttttgccattggtttgaatttcctcctgtagctcggagtagtttgattgtctgaagacttcttctctcaacttgtcaaagtcattctctgtccagctttgttc

SEQ ID NO: 121051 - DNA, 120 bp, synthetic construct; identical to SEQ ID NO: 32842
  source 1..120: mol_type = other DNA

SEQ ID NO: 121052 - DNA, 120 bp, synthetic construct
  source 1..120: mol_type = other DNA
catgagtgaactcccattcacaactgcttcaaagagaataaaatacctaggaatccaacttacaagggatgtgaaggacctcttcaaggagaactacaaaccactgctcaaggaaataaa

SEQ ID NO: 121053 - DNA, 120 bp, synthetic construct
  source 1..120: mol_type = other DNA
tcgcaacctactcatctgacaaagggctaatatccagaatctacaaagaactcaaatttacaagaaaaaaacaaccccatcaaaaagtgggcaaaggacatgaacagacacttctcaaaa

SEQ ID NO: 121054 - DNA, 120 bp, synthetic construct; identical to SEQ ID NO: 32843
  source 1..120: mol_type = other DNA

SEQ ID NO: 121055 - DNA, 120 bp, synthetic construct
  source 1..120: mol_type = other DNA
cctttgtcagatgcatagtttccagatattttctcccattctgtaggttgtcagcttactctgttggtagtttcttttgctctgcagaagctctttagtttaattaggtcccacttgtca

SEQ ID NO: 121056 - DNA, 120 bp, synthetic construct; identical to SEQ ID NO: 30266
  source 1..120: mol_type = other DNA

SEQ ID NO: 121057 - DNA, 120 bp, synthetic construct
  source 1..120: mol_type = other DNA
gtccagcagccggtgttgggagaggccctcgccgagtctttctcacgtggccgccagctagcaccagcattttatctttgttttttttttttttttttttttaatttttttttttttatt

SEQ ID NO: 121058 - DNA, 120 bp, synthetic construct; identical to SEQ ID NO: 30267
  source 1..120: mol_type = other DNA

SEQ ID NO: 121059 - DNA, 120 bp, synthetic construct
  source 1..120: mol_type = other DNA
ttcctcactggcaagatggagaacatgttactgtcaagcgtacacaagacagtgtacatgtggtgctcatgccaaacagggactggagttcccacacccctggcagatacttacccatca

SEQ ID NO: 121060 - DNA, 120 bp, synthetic construct
  source 1..120: mol_type = other DNA
ggttctctacgcacaccaccaagcggtgccacgcacacacacagctaaagtggagagcagagcctttgccacgcgcccgagttgttgaagggttcatacccagatctctcttttaaaaca

SEQ ID NO: 121061 - DNA, 120 bp, synthetic construct
  source 1..120: mol_type = other DNA
ctctctcgggctgaaccccactccactgtacggcggccacagtggtccatgcacccacccatcgctggaggacaactgtgagctgcttccacagcgggcattgtgtatactccagcttca

SEQ ID NO: 121062 - DNA, 120 bp, synthetic construct; identical to SEQ ID NO: 20079
  source 1..120: mol_type = other DNA

SEQ ID NO: 121063 - DNA, 120 bp, synthetic construct; identical to SEQ ID NO: 19565
  source 1..120: mol_type = other DNA

SEQ ID NO: 121064 - DNA, 120 bp, synthetic construct; identical to SEQ ID NO: 19566
  source 1..120: mol_type = other DNA

SEQ ID NO: 121065 - DNA, 120 bp, synthetic construct; identical to SEQ ID NO: 19557
  source 1..120: mol_type = other DNA

SEQ ID NO: 121066 - DNA, 120 bp, synthetic construct; identical to SEQ ID NO: 19558
  source 1..120: mol_type = other DNA

SEQ ID NO: 121067 - DNA, 120 bp, synthetic construct; identical to SEQ ID NO: 19559
  source 1..120: mol_type = other DNA

SEQ ID NO: 121068 - DNA, 120 bp, synthetic construct
  source 1..120: mol_type = other DNA
atatttattctcaataaacatccaaaaaaaagtatttgcctctaaccttaactaatcaatcttaattatcaatcacaaatgcttccccttacccttgccacccccccacccccccacccc

SEQ ID NO: 121069 - DNA, 120 bp, synthetic construct; identical to SEQ ID NO: 30009
  source 1..120: mol_type = other DNA

SEQ ID NO: 121070 - DNA, 120 bp, synthetic construct; identical to SEQ ID NO: 21861
  source 1..120: mol_type = other DNA

SEQ ID NO: 121071 - DNA, 120 bp, synthetic construct; identical to SEQ ID NO: 29706
  source 1..120: mol_type = other DNA

SEQ ID NO: 121072 - DNA, 120 bp, synthetic construct
  source 1..120: mol_type = other DNA
gttcttatttctccacatcctctccagcacctgttgtttcctgactttgtaatgattgccattctaactggtgtaagatgatatctcattgtggttttgatttgcatttctctgatggcc

SEQ ID NO: 121073 - DNA, 120 bp, synthetic construct
  source 1..120: mol_type = other DNA
tgcaggctcttttttggttccatatgaactttaaagtagtattttccaattctgtgaagaaagtcattggtagcttgatggggatggcattgaatctgtaaattaccttgggcagtatgg

SEQ ID NO: 121074 - DNA, 120 bp, synthetic construct
  source 1..120: mol_type = other DNA
tggtctaaaattctcttttttggttgtgtctctgccaggctttggtatcagggtgatgcgggcctcataggatacccaggaattgaactcagctctgcaccaagcagacctaatagacat

SEQ ID NO: 121075 - DNA, 120 bp, synthetic construct; identical to SEQ ID NO: 29701
  source 1..120: mol_type = other DNA

SEQ ID NO: 121076 - DNA, 120 bp, synthetic construct
  source 1..120: mol_type = other DNA
ttccaaatcccctttgctgtgccttcttcctgtgtggatgcttcattcaccttgcttagacctaaaaccataaaagctgcagaagaaaacctaggcaataccattcaggatataggcatg

SEQ ID NO: 121077 - DNA, 120 bp, synthetic construct
  source 1..120: mol_type = other DNA
gcacatgtacgctagaacttaaagtataataaaaaaattaaaaaaaaattccaccatcccttaaaaggctgctctctccataggcagttagcgctaccaacctaatggctctatggtgga

SEQ ID NO: 121078 - DNA, 120 bp, synthetic construct
  source 1..120: mol_type = other DNA
ttctttctttctttctttctttctttctttctctttcctttcctttcctttcctttcctttcctttcctttcctttccttcctttccttccttccttccttccttccttccttccttcct

SEQ ID NO: 121079 - DNA, 120 bp, synthetic construct
  source 1..120: mol_type = other DNA
tttacagtctcaccaacattgtaaaagtgttcctatttctccacatcctctccagcacctgttgtttcctgactttttaatgatcgccattctaactggtgtgagatggtatctcattgt

SEQ ID NO: 121080 - DNA, 120 bp, synthetic construct
  source 1..120: mol_type = other DNA
atttccttgagcagtggtttgtagttctccttgaagaggtccttcacatcccttgtaagttgtattcataggtattttattctctttgaagcaactgtgaatgggagttcactcatgatt

SEQ ID NO: 121081 - DNA, 120 bp, synthetic construct; identical to SEQ ID NO: 29702
  source 1..120: mol_type = other DNA

SEQ ID NO: 121082 - DNA, 120 bp, synthetic construct; identical to SEQ ID NO: 29703
  source 1..120: mol_type = other DNA

SEQ ID NO: 121083 - DNA, 120 bp, synthetic construct
  source 1..120: mol_type = other DNA
cccattctgtaggttgcctgttcactctgatggtagtttcttttgctgtgcagaagctctttagtttaattagatcccatttgtcaattttggcttttgttgccattccttttggtgttt

SEQ ID NO: 121084 - DNA, 120 bp, synthetic construct
  source 1..120: mol_type = other DNA
gatttggctttctgtttgtctgttgttggtgtataagaatgcttttgatttttgtacattgattttgtatcctgagactttgctgaagttgcttatcagcttaaggagattttgggctga

SEQ ID NO: 121085 - DNA, 120 bp, synthetic construct
  source 1..120: mol_type = other DNA
caggaaacatccaaaattgacaccctaatatcacaattaaaagaactagaaaagcaagagcaaacacattcaaaagctagctgaaggcaagaaataactaaaatcagagcagaactgaag

SEQ ID NO: 121086 - DNA, 120 bp, synthetic construct; identical to SEQ ID NO: 29704
  source 1..120: mol_type = other DNA

SEQ ID NO: 121087 - DNA, 120 bp, synthetic construct; identical to SEQ ID NO: 29705
  source 1..120: mol_type = other DNA

SEQ ID NO: 121088 - DNA, 120 bp, synthetic construct
  source 1..120: mol_type = other DNA
ggaatcgccacactgacttccacaatggttgaactagtttacagtcccaccaacagtgtaaaagtgttcctatttctccacatcctctccagcacctgttgtttcctggctttgtaatga

SEQ ID NO: 121089 - DNA, 120 bp, synthetic construct
  source 1..120: mol_type = other DNA
gattgacttggcgatgcgggctcctttttggttccgtatgaactttaaagtaatattttccaattctgtgaagaaagtcattggtagcttgatggggatggcattgaatctataaattac

SEQ ID NO: 121090 - DNA, 120 bp, synthetic construct
  source 1..120: mol_type = other DNA
agcattttttcatatgttttttggctgcataaatgtcttcttttcagaagtgtctgttcttgtcctttgcccactttttgatggggttgtttgtttttttcttgtaaatttgtttgagtt

SEQ ID NO: 121091 - DNA, 120 bp, synthetic construct
  source 1..120: mol_type = other DNA
cagatagttgtagatatgcggtgttatttctgagggctctgtcctgttccattgatctatatctctgttttggtaccagtaccatgctgttttggttactgtagccttgtagtatagttt

SEQ ID NO: 121092 - DNA, 120 bp, synthetic construct
  source 1..120: mol_type = other DNA
cctaggaatccaacttacaggggatgtgaaggacctcttcaaggagaactacaaaccaaaagcttcttaagctgataagaaacttcagcaaatcttaggatgcaaaatcaatgtgcaaaa

SEQ ID NO: 121093 - DNA, 120 bp, synthetic construct; identical to SEQ ID NO: 20110
  source 1..120: mol_type = other DNA

SEQ ID NO: 121094 - DNA, 120 bp, synthetic construct; identical to SEQ ID NO: 20111
  source 1..120: mol_type = other DNA

SEQ ID NO: 121095 - DNA, 120 bp, synthetic construct; identical to SEQ ID NO: 33808
  source 1..120: mol_type = other DNA

SEQ ID NO: 121096 - DNA, 120 bp, synthetic construct
  source 1..120: mol_type = other DNA
cacaggcacgcgcgcacacacacacacacacacacacacacacacacacacacacacaacccaacacccctatatccatttttaaactgaaatattagcatacaaaatttccagcacttg

SEQ ID NO: 121097 - DNA, 120 bp, synthetic construct; identical to SEQ ID NO: 33809
  source 1..120: mol_type = other DNA

SEQ ID NO: 121098 - DNA, 120 bp, synthetic construct; identical to SEQ ID NO: 33810
  source 1..120: mol_type = other DNA

SEQ ID NO: 121099 - DNA, 120 bp, synthetic construct; identical to SEQ ID NO: 33811
  source 1..120: mol_type = other DNA

SEQ ID NO: 121100 - DNA, 120 bp, synthetic construct
  source 1..120: mol_type = other DNA
ttccatgctcatgggtgggaagaatcaatatcgtgaaaatggccatactgcccaaggtaatttatagattcaatgccatccccatcaagctaccaatgactttcttcacagaattggaaa

SEQ ID NO: 121101 - DNA, 120 bp, synthetic construct
  source 1..120: mol_type = other DNA
cacaatgagataccatctcacaccagttagaatggcaatcattaaaaagtcaggaaacaacaggtgctggagaggatatggagaaataggaacatttttacactgttggtgggactgtaa

SEQ ID NO: 121102 - DNA, 120 bp, synthetic construct
  source 1..120: mol_type = other DNA
gaggcagaggttgcagtgagccaagatggcaccactgcactccaggctgggcaatggagtgagactccatctaaaaaaaaaaaaaaaaaaaaaaaagaacttgtgagatgaaactgaagc

SEQ ID NO: 121103 - DNA, 120 bp, synthetic construct; identical to SEQ ID NO: 33812
  source 1..120: mol_type = other DNA

SEQ ID NO: 121104 - DNA, 120 bp, synthetic construct; identical to SEQ ID NO: 33813
  source 1..120: mol_type = other DNA

SEQ ID NO: 121105 - DNA, 120 bp, synthetic construct; identical to SEQ ID NO: 20132
  source 1..120: mol_type = other DNA

SEQ ID NO: 121106 - DNA, 120 bp, synthetic construct
  source 1..120: mol_type = other DNA
attttgcatgtggcagatcatcagggaacacatcacaagcagaaactgcacaggtgtgaggcctgggggaataaattgtatgacagtggaaactttcatcagcaccagaatgagcacatt

SEQ ID NO: 121107 - DNA, 120 bp, synthetic construct
  source 1..120: mol_type = other DNA
gcaattctctgcctcagcctcccgagtcactgggattacaggcatgtaccaccaggcctgactactttttgtattttagtagagacagggtttcaccatcttggccaggctggtcttgaa

SEQ ID NO: 121108 - DNA, 120 bp, synthetic construct
  source 1..120: mol_type = other DNA
ctgtaccccatgaccagtgggcctagtttctcctatgtttgaggaccttgagaggaggatgtgcgagagtagatgtgtgggagagatggattgtgatacctcagcataggggtggtttgt

SEQ ID NO: 121109 - DNA, 120 bp, synthetic construct
  source 1..120: mol_type = other DNA
taaggactgcttgattccaggagttcaagagcagcctggacaacacagcaaggtctttttctacatacatgcacacacacacacgcacacatacacatgcacacaagggaaaaaaattta

SEQ ID NO: 121110 - DNA, 120 bp, synthetic construct; identical to SEQ ID NO: 120764
  source 1..120: mol_type = other DNA

SEQ ID NO: 121111 - DNA, 120 bp, synthetic construct; identical to SEQ ID NO: 120763
  source 1..120: mol_type = other DNA

SEQ ID NO: 121112 - DNA, 120 bp, synthetic construct; identical to SEQ ID NO: 120762
  source 1..120: mol_type = other DNA

SEQ ID NO: 121113 - DNA, 120 bp, synthetic construct
  source 1..120: mol_type = other DNA
cacggagaaagaattcagaattctatcagataaatttggcaaagaaattaaaataattaaacagaactggccgggtgtggtggctcacacctgtaatcccagcactttgggaggccgagg

SEQ ID NO: 121114 - DNA, 120 bp, synthetic construct
  source 1..120: mol_type = other DNA
tcccaaagtactgggattacaagcatgagccaccgtacctggcctaaagatgtacattataaaccccaagtaactggagagctagactttattcctggttcaagagacttaagaatgtta

SEQ ID NO: 121115 - DNA, 120 bp, synthetic construct
  source 1..120: mol_type = other DNA
ctgttctttgctccgtgagaaagatccacctacgacctcaggtcctcagaccgaccagcccaagaaacatctcaccaatttcaaatccggtaagcggcctctttttactctcttctccaa

SEQ ID NO: 121116 - DNA, 120 bp, synthetic construct
  source 1..120: mol_type = other DNA
ggcaaacggtctgaggtgcctgacatccaggcattcttttacacatcagtcccttcctagtctctgtgcccagtgcaacttgtcccaaatcttccttctttccctcccgcctgtcccctc

SEQ ID NO: 121117 - DNA, 120 bp, synthetic construct
  source 1..120: mol_type = other DNA
attcggaggctacccactctacattaccttcttttcaagggcctgtttcccttgcctccataactgttgtgggtattgacagccaggcttctaaacctcttaaaactccccaactctggt

SEQ ID NO: 121118 - DNA, 120 bp, synthetic construct
  source 1..120: mol_type = other DNA
agaattcttacacaagagccaggaccacaccctgtagcctttctggccaaacaacttgaccttactgttttagcctagccctcgtgtctgcgtgcagtggctgctgctgctttaatactt

SEQ ID NO: 121119 - DNA, 120 bp, synthetic construct
  source 1..120: mol_type = other DNA
cagaccaacttagactgtgccccccaccaaaaaaaaacttgtcatccctactattttctgtctagtcatactcctattcaccgttctcaactactcatacatgccctgctcttgtttaca

SEQ ID NO: 121120 - DNA, 120 bp, synthetic construct
  source 1..120: mol_type = other DNA
ttcttttacctacccaaaacctataaaacggccccacccttaactcccttcgctgactcttttcggactcagcccacctgcacccaggtgaaataaacagccatgtcgctcacacaaagc

SEQ ID NO: 121121 - DNA, 120 bp, synthetic construct; identical to SEQ ID NO: 25845
  source 1..120: mol_type = other DNA

SEQ ID NO: 121122 - DNA, 120 bp, synthetic construct
  source 1..120: mol_type = other DNA
agaattgcttgaacctaggaggtggagggtgtagtgagccaagactgtgccactgcactccagcctgggcgacagagtgtaactctgtctcaaaaaaataaaaaaaaaaaagaaaagtaa

SEQ ID NO: 121123 - DNA, 120 bp, synthetic construct
  source 1..120: mol_type = other DNA
tccgctcctccaccctgtaatctttttatcacctcacctgctcacacccggtccggcttacagttttgttccgtgactagccctcccccacctgcccagcaatttactcttaaaaaggtg

SEQ ID NO: 121124 - DNA, 120 bp, synthetic construct
  source 1..120: mol_type = other DNA
cattttacctgtcctaaaaccagataagacttaataggttagttcaggatctgcaccttatcaaccaaattgttttgcctatccaccccatggtgccaaacccatatactctcctatcct

SEQ ID NO: 121125 - DNA, 120 bp, synthetic construct
  source 1..120: mol_type = other DNA
tatctctctgatccatctgacattcacaccatttccccatatttccttctttcctgttcttcacctgatcacgcttgatttattgatggcggttccaccaggcctaatcgccacacacca

SEQ ID NO: 121126 - DNA, 120 bp, synthetic construct
  source 1..120: mol_type = other DNA
aaatggtaaaatattgaccagaggttaactatacaaattacaatatgggcaaaggacaagaatgaacgacattcaggccaggtgcagtggctcatgcttgtaatcccaccactttgggag

SEQ ID NO: 121127 - DNA, 120 bp, synthetic construct
  source 1..120: mol_type = other DNA
cggtgctctctgaaacatgtgctgtgtccactcagggttaaatggattaagggtggtgcaagatgtgctttgttaaacagatgcttgaaggcagcatgctccttaagagtcatcaccact

SEQ ID NO: 121128 - DNA, 120 bp, synthetic construct; identical to SEQ ID NO: 20107
  source 1..120: mol_type = other DNA

SEQ ID NO: 121129 - DNA, 120 bp, synthetic construct; identical to SEQ ID NO: 20108
  source 1..120: mol_type = other DNA

SEQ ID NO: 121130 - DNA, 120 bp, synthetic construct; identical to SEQ ID NO: 24255
  source 1..120: mol_type = other DNA

SEQ ID NO: 121131 - DNA, 120 bp, synthetic construct; identical to SEQ ID NO: 24256
  source 1..120: mol_type = other DNA

SEQ ID NO: 121132 - DNA, 120 bp, synthetic construct; identical to SEQ ID NO: 30268
  source 1..120: mol_type = other DNA

SEQ ID NO: 121133 - DNA, 120 bp, synthetic construct
  source 1..120: mol_type = other DNA
attcactaatctttcttctttttctgtttgctattaaacctgtctagtgaatttttaaatttcagttgtttttttctttccccctcccctcctctcccctcctctcccctcccctcccct

SEQ ID NO: 121134 - DNA, 120 bp, synthetic construct; identical to SEQ ID NO: 19944
  source 1..120: mol_type = other DNA

SEQ ID NO: 121135 - DNA, 120 bp, synthetic construct
  source 1..120: mol_type = other DNA
gaggctgaggttggaggatcacttgaacctgggatgtgaaggttgcagtgagccaagatcacaccattgcactccagcgtgagtgacagaataagactctaaaataaaataaaatacaaa

SEQ ID NO: 121136 - DNA, 120 bp, synthetic construct
  source 1..120: mol_type = other DNA
ccagccgcctgccttggccccccaaagtgccgagattgcaggctctgcccagccgccaccccatctgggaagtgaggagcgtctctgcctggctgcccagtctggaaagtgaggagcgtc

SEQ ID NO: 121137 - DNA, 120 bp, synthetic construct
  source 1..120: mol_type = other DNA
cttaacctgaacatttcctttctatggatcccaggtttttagacaaactcaaccaattgtcaaccagaaaatgtttaaatttacctatagcctggaggcctgcccaccacccctttgagt

SEQ ID NO: 121138 - DNA, 120 bp, synthetic construct
  source 1..120: mol_type = other DNA
aagggctgaggagtgcttaaaagctttgccacattctttacatttgtagggtttctctccagtatgaattgtcttatgcttagtaagggttgaggaacggctaaaagctttgccacattc

SEQ ID NO: 121139 - DNA, 120 bp, synthetic construct
  source 1..120: mol_type = other DNA
aagctttgccacattctttacatttgtagggtttctctctactatgaattatcttatgtttattaagggttaaggattgtctaaaagctttgccacattcttcaaatttgtagggtttct

SEQ ID NO: 121140 - DNA, 120 bp, synthetic construct
  source 1..120: mol_type = other DNA
tgagagctgcttaaaagctttgccacattcttcacatttgtagggtttatcttcagtatgaatttccttatgattagtaagggttgaggaccaatgaaaggttttttcacattctttaca

SEQ ID NO: 121141 - DNA, 120 bp, synthetic construct
  source 1..120: mol_type = other DNA
tctacacactgctttaaatgtgtcccagagattctggtatgttttgtctttgttctcattggtttcaaagaacatgtttatttctgccttcatttccttatgtacccagtagtcattctg

SEQ ID NO: 121142 - DNA, 120 bp, synthetic construct; identical to SEQ ID NO: 19651
  source 1..120: mol_type = other DNA

SEQ ID NO: 121143 - DNA, 120 bp, synthetic construct
  source 1..120: mol_type = other DNA
ccacattcttcacatttgtagggtttctctccagtatgaattctcttatgtgtagtaaggtttgcagattggttaaaagctttgccacactcctcacatttgtagggtttctttccagta

SEQ ID NO: 121144 - DNA, 120 bp, synthetic construct; identical to SEQ ID NO: 19652
  source 1..120: mol_type = other DNA

SEQ ID NO: 121145 - DNA, 120 bp, synthetic construct
  source 1..120: mol_type = other DNA
ggaaccaacccaaatgtccatcaatgatagaatggattaagaaaatgtggcacgtatatactacagaatactatgtattcatgaaaaaggatgagttcatgtcctttgcaggcacatgga

SEQ ID NO: 121146 - DNA, 120 bp, synthetic construct
  source 1..120: mol_type = other DNA
cagtgagccgagatcacaccactgcactccagcctgggacacagagtgagactctgtctcaaaaaaaaacaacaaaaaaaaaccacttcagatttactcactgggaacctatgacaaatc

SEQ ID NO: 121147 - DNA, 120 bp, synthetic construct
  source 1..120: mol_type = other DNA
aatatacttaacatgcctgaaatgtacagtgtttttgagtcagggtctcactctgtcacccaagctggggtgcatggcacaattacagctcactgcagcctcaaacttccaggttcaagt

SEQ ID NO: 121148 - DNA, 120 bp, synthetic construct; identical to SEQ ID NO: 19655
  source 1..120: mol_type = other DNA

SEQ ID NO: 121149 - DNA, 120 bp, synthetic construct; identical to SEQ ID NO: 19656
  source 1..120: mol_type = other DNA

SEQ ID NO: 121150 - DNA, 120 bp, synthetic construct
  source 1..120: mol_type = other DNA
ttcgagaccagcctggccaatatggtgacaccccgtctctactaaaaatataaaaattagccaggcatggtggctcgcgcctgtattcccagctactcaggaggctgaggcagaagaatc

SEQ ID NO: 121151 - DNA, 120 bp, synthetic construct
  source 1..120: mol_type = other DNA
acccgccttaaagtgctggggttacaggtgtgagccactgcaacttgcctttaaaaagcattttctttttttttttttttttttttttttttgaggcagagtcttgctctgtcgcccagg

SEQ ID NO: 121152 - DNA, 120 bp, synthetic construct; identical to SEQ ID NO: 19663
  source 1..120: mol_type = other DNA

SEQ ID NO: 121153 - DNA, 120 bp, synthetic construct; identical to SEQ ID NO: 4448
  source 1..120: mol_type = other DNA

SEQ ID NO: 121154 - DNA, 120 bp, synthetic construct
  source 1..120: mol_type = other DNA
gagaattgcttgaatccaaaagccagaggttgcaatgagctgaaattgcgcgactgcactctagcctgggcaacagagtgagactcattcactcactctctctttcaaaaaaaaaaaaaa

SEQ ID NO: 121155 - DNA, 120 bp, synthetic construct; identical to SEQ ID NO: 28991
  source 1..120: mol_type = other DNA

SEQ ID NO: 121156 - DNA, 120 bp, synthetic construct; identical to SEQ ID NO: 23711
  source 1..120: mol_type = other DNA

SEQ ID NO: 121157 - DNA, 120 bp, synthetic construct; identical to SEQ ID NO: 29531
  source 1..120: mol_type = other DNA

SEQ ID NO: 121158 - DNA, 120 bp, synthetic construct; identical to SEQ ID NO: 29532
  source 1..120: mol_type = other DNA

SEQ ID NO: 121159 - DNA, 120 bp, synthetic construct; identical to SEQ ID NO: 29533
  source 1..120: mol_type = other DNA

SEQ ID NO: 121160 - DNA, 120 bp, synthetic construct; identical to SEQ ID NO: 29534
  source 1..120: mol_type = other DNA

SEQ ID NO: 121161 - DNA, 120 bp, synthetic construct
  source 1..120: mol_type = other DNA
ctcagctcactgcaacttcccatctcccaggttcaagcaattcttccattccagcctcccaagtagctgggattataggcacctgccaccatgcccagctaatttctgtatttttttttt

SEQ ID NO: 121162 - DNA, 120 bp, synthetic construct; identical to SEQ ID NO: 29535
  source 1..120: mol_type = other DNA

SEQ ID NO: 121163 - DNA, 120 bp, synthetic construct
  source 1..120: mol_type = other DNA
tttgaggccagcttgggcaacatggcaaaacctcatctctgcaaaaaatccaaaattagccaggtgtagtggcttgtacccgtaattccagctgctcatgaggctgaggtgggaggatcc

SEQ ID NO: 121164 - DNA, 120 bp, synthetic construct; identical to SEQ ID NO: 29536
  source 1..120: mol_type = other DNA

SEQ ID NO: 121165 - DNA, 120 bp, synthetic construct; identical to SEQ ID NO: 29537
  source 1..120: mol_type = other DNA

SEQ ID NO: 121166 - DNA, 120 bp, synthetic construct; identical to SEQ ID NO: 29538
  source 1..120: mol_type = other DNA

SEQ ID NO: 121167 - DNA, 120 bp, synthetic construct; identical to SEQ ID NO: 29539
  source 1..120: mol_type = other DNA

SEQ ID NO: 121168 - DNA, 120 bp, synthetic construct
  source 1..120: mol_type = other DNA
ggttcaggcctgtaatgccagcactttgggagaccgaagtgggaagatggcttgagcctaggagctcaagaccagcctgagcaacgtggtgagaccccatctctacaaaatataaaaatt

SEQ ID NO: 121169 - DNA, 120 bp, synthetic construct
  source 1..120: mol_type = other DNA
tttttttttgaaacgaggtcttgctatgttgcccaggctggactccaactcctgggctcaagcattcctcctgcctcagcctcccaagcagccacaaaccacacctggcttcttcctgcc

SEQ ID NO: 121170 - DNA, 120 bp, synthetic construct; identical to SEQ ID NO: 29540
  source 1..120: mol_type = other DNA

SEQ ID NO: 121171 - DNA, 120 bp, synthetic construct
  source 1..120: mol_type = other DNA
cctgcctcggcctcccggagttctgggattacaggtgtgagccactgtgcctggccagagaacagattctttttgaatctatgcaaataaccatgttgctgtaaacataagaataatcgt

SEQ ID NO: 121172 - DNA, 120 bp, synthetic construct
  source 1..120: mol_type = other DNA
gttttctgtatcctatgttttattaagaaagatggcaagatggcaaatggaagagtgggaaacaaaggacacacctgcaggtggacagtgaggaaaaaaagctttctggagtttgagacc

SEQ ID NO: 121173 - DNA, 120 bp, synthetic construct
  source 1..120: mol_type = other DNA
caacgaactagagaccacattctaggtccagtcattctacttatagatctttaggctgcattgccagacctgtcaagcaggtacagacatgtttctcaactattcaggtgtatcttgtta

SEQ ID NO: 121174 - DNA, 120 bp, synthetic construct
  source 1..120: mol_type = other DNA
aaatgtctgatgaatacgcacgtttctgtagtctcaaactactttctaacaagactttaagacaaaggaataaaatagcaccagatctgatgggggtcagggagcagttctcaggtccct

SEQ ID NO: 121175 - DNA, 120 bp, synthetic construct
  source 1..120: mol_type = other DNA
tatgtgtaattctgacattcaaaactactacttcacttgaaagagctatgtttgacaatttcaaaatacttataattgaggagatgcaaatattttaacaattttagtttaagtcttctt

SEQ ID NO: 121176 - DNA, 120 bp, synthetic construct
  source 1..120: mol_type = other DNA
cctaaggtaaaggttaaagaatggatccaaaaagcagaaagaaaaaacaaataacatacaatggagttccaatacatctggcagcagacttttcagtggaaaccttacaggccaggagag

SEQ ID NO: 121177 - DNA, 120 bp, synthetic construct; identical to SEQ ID NO: 29143
  source 1..120: mol_type = other DNA

SEQ ID NO: 121178 - DNA, 120 bp, synthetic construct; identical to SEQ ID NO: 21592
  source 1..120: mol_type = other DNA

SEQ ID NO: 121179 - DNA, 120 bp, synthetic construct
  source 1..120: mol_type = other DNA
agtaagttgcgaaaattttctcccattttgtaggttgcctgttcactctgatggtagtttcttttgctgtgcagaagctctttagtttaattagatcccatttgtcaattttggcttttg

SEQ ID NO: 121180 - DNA, 120 bp, synthetic construct
  source 1..120: mol_type = other DNA
aatgtacaaaaatcacaagcattcttatacaccatcaacagacaaacagagagccaaatcatgagtgaactcccattcacaattgcttcaaagagaataaaatacctaggaatccaactt

SEQ ID NO: 121181 - DNA, 120 bp, synthetic construct
  source 1..120: mol_type = other DNA
cctggtctagtcttgggagagtgtatttgtcgaggaatttatccatttcttctagattttctagtttatttgcgtagaggtgtttgtagtattctctgatggtagtttgtatttctgtgg

SEQ ID NO: 121182 - DNA, 120 bp, synthetic construct
  source 1..120: mol_type = other DNA
aagtaaagcactcctcagcaaatgtaaaagaacagaaattataacaaactgtctctcagaccacagtgcaatcaaactagaactcaggattaagaaactcactcaaaaccgcataactac

SEQ ID NO: 121183 - DNA, 120 bp, synthetic construct
  source 1..120: mol_type = other DNA
tttattgattttcgtatgttgaaccagccttgcttcccagggatgaagcccacttgatcatggtggataagctttttgatgtgctgctggattcggtttgccagtattttattgaggatt

SEQ ID NO: 121184 - DNA, 120 bp, synthetic construct
  source 1..120: mol_type = other DNA
agctacagtaaccaaaacagcatggtactggtaccaaaacagagatatagaccaatgggacagaacagagccctcagaaataatgccgcatatctacaactatctgatctttgacaaacc

SEQ ID NO: 121185 - DNA, 120 bp, synthetic construct
  source 1..120: mol_type = other DNA
ttatcaaacatgctgctataaagacacatgcacacgtatgtttattgcggcattattcacaatagcaaagacttggaaccaacccaaatgtccaacaatgatagactggattaagaaaat

SEQ ID NO: 121186 - DNA, 120 bp, synthetic construct; identical to SEQ ID NO: 21587
  source 1..120: mol_type = other DNA

SEQ ID NO: 121187 - DNA, 120 bp, synthetic construct; identical to SEQ ID NO: 21588
  source 1..120: mol_type = other DNA

SEQ ID NO: 121188 - DNA, 120 bp, synthetic construct
  source 1..120: mol_type = other DNA
tgtaaggaagggacccacttccagctttctacatatggctagccagttttcccagcaccatttattaaatagggaatcctttccccattgcttgtttttctcaggtttgtcaaagatcag

SEQ ID NO: 121189 - DNA, 120 bp, synthetic construct
  source 1..120: mol_type = other DNA
tgagataaatcccatcaatacctaatttattgagagtgtttagcatgaagggttgttgaattttgtcaaaggccttttctgcatctattgagataatcatgtggtttttgtctttggttc

SEQ ID NO: 121190 - DNA, 120 bp, synthetic construct
  source 1..120: mol_type = other DNA
cacattcaaagcagtgtgtagagggaaatttatagcactaaatgcccacaagagaaagcaggaaagatctaaaattgacaccctaacatcacaattaaaagaactagagaagcaagagca

SEQ ID NO: 121191 - DNA, 120 bp, synthetic construct
  source 1..120: mol_type = other DNA
ttcttcctagcctcgatggtctttacaatttggcatgtttttgcagtggcttgtactggtttttcctttccatgtttagtgcttccttcaggagctctggtagggcaggtctggtggtga

SEQ ID NO: 121192 - DNA, 120 bp, synthetic construct; identical to SEQ ID NO: 21589
  source 1..120: mol_type = other DNA

SEQ ID NO: 121193 - DNA, 120 bp, synthetic construct; identical to SEQ ID NO: 21590
  source 1..120: mol_type = other DNA

SEQ ID NO: 121194 - DNA, 120 bp, synthetic construct
  source 1..120: mol_type = other DNA
tgggatgcaaggttggttcaacatacgaaaatcaatgaatgtaatccagcatataaacagaaccaaagacaaaaaccacatgattatctcaatagatgcagaaaaggcctttgacaaaat

SEQ ID NO: 121195 - DNA, 120 bp, synthetic construct
  source 1..120: mol_type = other DNA
tgcaaaaatcacaagcattcttatacaccaataacagacaaacagagagccaaatcatgagtgaactcccattcacaattgcttcaataagaataaaatacctaggaatccaacttacaa

SEQ ID NO: 121196 - DNA, 120 bp, synthetic construct
  source 1..120: mol_type = other DNA
cactgctcatcagagaaatgcagatcaaaaccacaatgagataccatctcacaccagttagaatggcgatcattaaaaagtcaggaaacaacaggtgctggagaggatgtggagaaatag

SEQ ID NO: 121197 - DNA, 120 bp, synthetic construct; identical to SEQ ID NO: 21591
  source 1..120: mol_type = other DNA

SEQ ID NO: 121198 - DNA, 120 bp, synthetic construct
  source 1..120: mol_type = other DNA
actagacagctcaatgagacagaaagttaacaaggatacccagggattgaactcagctctgcaccaagtggacctaatagacagctacagaactctccatcccaaatcaacagaatatac

SEQ ID NO: 121199 - DNA, 120 bp, synthetic construct
  source 1..120: mol_type = other DNA
atcaatagcttaccaaccaaaaagagtccaggaccagatggattcacagccgaattctaccagaggtacaaggaggaactggtaccatgccttctgaaactattccaatcaataaaaaaa

SEQ ID NO: 121200 - DNA, 120 bp, synthetic construct
  source 1..120: mol_type = other DNA
ataaaaaaggatacaaacaaatcgaagaacattccatgctcatgggtaggaagaatcaatatcgtgaaaatggccatactgcccaaggtaatttatagattcaatgccatccccatcaag

SEQ ID NO: 121201 - DNA, 120 bp, synthetic construct
  source 1..120: mol_type = other DNA
gaacacttttacactgttggtgggactgtaaactagttcagccattgtggaaatcagcgtggcgattcctaagggatctacaactagaaataacgtttgacccagccatcccattactgg

SEQ ID NO: 121202 - DNA, 120 bp, synthetic construct
  source 1..120: mol_type = other DNA
tgacaaaatactagcaaacagaatccagcagcacatcaaaagctaatctaccatgatcaagtaggctttatccttgggatgcaagattggttcaatatatgcaaattggccgggcacggt

SEQ ID NO: 121203 - DNA, 120 bp, synthetic construct; identical to SEQ ID NO: 20142
  source 1..120: mol_type = other DNA

SEQ ID NO: 121204 - DNA, 120 bp, synthetic construct; identical to SEQ ID NO: 20143
  source 1..120: mol_type = other DNA

SEQ ID NO: 121205 - DNA, 120 bp, synthetic construct; identical to SEQ ID NO: 15164
  source 1..120: mol_type = other DNA

SEQ ID NO: 121206 - DNA, 120 bp, synthetic construct; identical to SEQ ID NO: 15165
  source 1..120: mol_type = other DNA

SEQ ID NO: 121207 - DNA, 120 bp, synthetic construct
  source 1..120: mol_type = other DNA
gtgagctgagattgtgccactgcactccagcctgatgacagagagagaatgccatgctcatgggtaggaaaaatcaatatcgtgaaaatggccatactgctcaaggtaatttatagattc

SEQ ID NO: 121208 - DNA, 120 bp, synthetic construct
  source 1..120: mol_type = other DNA
tcaaccattgtggaagtcagtgtcgcgattcctcagggatctagaaccagaaataccatttgacccagcaatcccattactaggtgtatacccaaaggattataaatcatgctgctataa

SEQ ID NO: 121209 - DNA, 120 bp, synthetic construct; identical to SEQ ID NO: 15924
  source 1..120: mol_type = other DNA

SEQ ID NO: 121210 - DNA, 120 bp, synthetic construct; identical to SEQ ID NO: 20089
  source 1..120: mol_type = other DNA

SEQ ID NO: 121211 - DNA, 120 bp, synthetic construct; identical to SEQ ID NO: 20090
  source 1..120: mol_type = other DNA

SEQ ID NO: 121212 - DNA, 120 bp, synthetic construct
  source 1..120: mol_type = other DNA
cgagaaaacacataacccactagaagggcttaaggcgcctgtgtggacatctcagatgaagacatgtgaatggccagcaggtctaggaaaaggtgctcattatcactcatcatcagggac

SEQ ID NO: 121213 - DNA, 120 bp, synthetic construct
  source 1..120: mol_type = other DNA
aatgctcccagctgaataaagcccttccttctacaactcggtgtctgagaggtttcgtctgtggctcgtcctactacaagggaattagggtaaccaggggttaaggtagaagcaaaagaa

SEQ ID NO: 121214 - DNA, 120 bp, synthetic construct
  source 1..120: mol_type = other DNA
gatggacagtgggccaagtctccactccagcctctgatggacggtgggccaagcctccactccagcctctgatggacggtgggccaagcctccattccagcctctgatggacggtgggcc

SEQ ID NO: 121215 - DNA, 120 bp, synthetic construct
  source 1..120: mol_type = other DNA
gatggatggtgggccaagcctccactccagcctctgacggacggtgggccaagtctccacgtcagcctctgactggtcgcaggtcagtccttcacggggtgtagccaatgggaggcctgt

SEQ ID NO: 121216 - DNA, 120 bp, synthetic construct
  source 1..120: mol_type = other DNA
ggttgcagtgacctgagattgtgccactgtgctccagcctgggtggcagagtgaggttctgtctcaaaaataaaaaaaatttaaaaaatgatagatcataagtgtttcaccacagacaca

SEQ ID NO: 121217 - DNA, 120 bp, synthetic construct; identical to SEQ ID NO: 20097
  source 1..120: mol_type = other DNA

SEQ ID NO: 121218 - DNA, 120 bp, synthetic construct; identical to SEQ ID NO: 20098
  source 1..120: mol_type = other DNA

SEQ ID NO: 121219 - DNA, 120 bp, synthetic construct; identical to SEQ ID NO: 20099
  source 1..120: mol_type = other DNA

SEQ ID NO: 121220 - DNA, 120 bp, synthetic construct; identical to SEQ ID NO: 20100
  source 1..120: mol_type = other DNA

SEQ ID NO: 121221 - DNA, 120 bp, synthetic construct; identical to SEQ ID NO: 20085
  source 1..120: mol_type = other DNA

SEQ ID NO: 121222 - DNA, 120 bp, synthetic construct; identical to SEQ ID NO: 20086
  source 1..120: mol_type = other DNA

SEQ ID NO: 121223 - DNA, 120 bp, synthetic construct
  source 1..120: mol_type = other DNA
aaagacctggaggacctgctacgaaataacagaagacccaagaaatgggtgagtgggaccctcgtgactggtgcagggaaggggagctgggatgggggctgcacggtgcagctggactcg

SEQ ID NO: 121224 - DNA, 120 bp, synthetic construct
  source 1..120: mol_type = other DNA
acgggcttaggaaacggcacaccaggagattatatcctgcacctggctcggagggtcctacccacggagtctcactgattgctagcacagcagtctgagatcaaactgcaaggcagcagc

SEQ ID NO: 121225 - DNA, 120 bp, synthetic construct
  source 1..120: mol_type = other DNA
gaaattcaaaccaaaggcaaagaagttgaaaaccttgaaaaaaatttagacgaatgaataactagaataaccaatacagagaagtgcttaaaggagctgatggagctgaaagccaaggct

SEQ ID NO: 121226 - DNA, 120 bp, synthetic construct
  source 1..120: mol_type = other DNA
tgcaaaaacatgccaaaatgtaaagaccatcgagactaggaagaagctgcatcaactaatgagcaaaataaccagctaacatcataatgacaggatcaaattcacacataacaatattaa

SEQ ID NO: 121227 - DNA, 120 bp, synthetic construct
  source 1..120: mol_type = other DNA
agacttagactcccacacaataataagggagactttaacaccccactgtcaacattagacagatcaacgagacagaaagttaacaaggttacccaggaattgaactcagctctgcaccaa

SEQ ID NO: 121228 - DNA, 120 bp, synthetic construct
  source 1..120: mol_type = other DNA
gtacaaggataaactggtaccattccttctgaaactattccaatcaatagaaaaagagggaatcctccctaactcattttatgaggccagcatcatcctgataccaaagccgggcagaga

SEQ ID NO: 121229 - DNA, 120 bp, synthetic construct
  source 1..120: mol_type = other DNA
cttcaaggagaactaccaaccactgctcaatgaaataaaagaggatacaaacaaatggaagaacattccatgctcatgggtaggaagaatcaatatcatgaaaatggccatactgcccaa

SEQ ID NO: 121230 - DNA, 120 bp, synthetic construct
  source 1..120: mol_type = other DNA
atgcaaatcaaaaccacaatgagataccatctcacaccagttagaatggtgatcattagaagtcaggaaacaacaggtgctggagaggatgtggagaaacaggaacacttttccactgtt

SEQ ID NO: 121231 - DNA, 120 bp, synthetic construct
  source 1..120: mol_type = other DNA
tctgtatattcaggtacctttattacactgatatctgcaggcttacagtcttctttcccaataagaaaaaactgatgaggccaggtgtgatgactcgcacctgttatcccagcactttgg

SEQ ID NO: 121232 - DNA, 120 bp, synthetic construct
  source 1..120: mol_type = other DNA
ttagggaggatcatggaaatgatatttaaggtaataagaaaccatgagggagtcatttaactgatgctttgccagattaatggcaatttaaactattttgggatcaagaactgaagtatt

SEQ ID NO: 121233 - DNA, 120 bp, synthetic construct; identical to SEQ ID NO: 7539
  source 1..120: mol_type = other DNA

SEQ ID NO: 121234 - DNA, 120 bp, synthetic construct; identical to SEQ ID NO: 7540
  source 1..120: mol_type = other DNA

SEQ ID NO: 121235 - DNA, 120 bp, synthetic construct; identical to SEQ ID NO: 7541
  source 1..120: mol_type = other DNA

SEQ ID NO: 121236 - DNA, 120 bp, synthetic construct
  source 1..120: mol_type = other DNA
gaggtgtacccaacagctcattgagaacgggccaggatgacaatggcggctttgtggaatagaaaggggggaaaggtggggaaaagattgagaaatcggatggttgccgtgtctgtgtag

SEQ ID NO: 121237 - DNA, 120 bp, synthetic construct
  source 1..120: mol_type = other DNA
ttcacttgtgcccctacaaggaaattagatgtgtattttaaaagactgagatcttcggctcgccgcaacctccctgccttgggctccggtgattctcctgccttggcctgccgagtgcct

SEQ ID NO: 121238 - DNA, 120 bp, synthetic construct
  source 1..120: mol_type = other DNA
gaagtgaggagcgcctctgcccagttgccccaaatgggaagtgaggagcgcctctgcccggttgccccgaatgggaagtgaggagcgcctctgcccggccgccccgtctgggaggtgagg

SEQ ID NO: 121239 - DNA, 120 bp, synthetic construct
  source 1..120: mol_type = other DNA
ctgtgtctgtgtagaaagaagtagacataggagactccattttgttctgtactaagaaaaattcttctgccttgggatgctgttaatctataaccttacccccaaccccctgctctctga

SEQ ID NO: 121240 - DNA, 120 bp, synthetic construct
  source 1..120: mol_type = other DNA
ggcgggggcgggggctgccccccacctccctcctggatggggcggctggccgggtggagacgctcctcatttcccagacggggtggctgccgggcggaggggctcctcacttcccagact

SEQ ID NO: 121241 - DNA, 120 bp, synthetic construct; identical to SEQ ID NO: 7542
  source 1..120: mol_type = other DNA

SEQ ID NO: 121242 - DNA, 120 bp, synthetic construct
  source 1..120: mol_type = other DNA
acagcaaaagaaactaccatcagggtgaacaggcaacctacagaatgagagaaaatttttgcaatctacccatctgacaaagggctaatatccagaatctacaaagaactcaaacaaatt

SEQ ID NO: 121243 - DNA, 120 bp, synthetic construct; identical to SEQ ID NO: 7543
  source 1..120: mol_type = other DNA

SEQ ID NO: 121244 - DNA, 120 bp, synthetic construct
  source 1..120: mol_type = other DNA
aagatcagaagagacaaagaaggccattacataatggtaaagggatcaatccaacaagaagagctaactatcctaaatatatatgcacccaatacaggagcacccagattcataaagcaa

SEQ ID NO: 121245 - DNA, 120 bp, synthetic construct
  source 1..120: mol_type = other DNA
aaactagaaaatctagaaaaaatggataaattcctgaacacatacaccctcccaagactaaaccaggaagaagttgaatccctgaatagaccaataacaggctctgaaattgaggcaata

SEQ ID NO: 121246 - DNA, 120 bp, synthetic construct
  source 1..120: mol_type = other DNA
ttgcttcaaagagaataaaatacctaggaatccaacttacaagggatgtgaaggacctcttcaaggagaactacaaaccactgctcaacaaaataaaaaaggacacaaacaaatggaaga

SEQ ID NO: 121247 - DNA, 120 bp, synthetic construct
  source 1..120: mol_type = other DNA
aaagtgggcgaaggatatgaactgacacttctcaaaagaagacatttatgcagccaacagacacatgaaaaaatgctcatcatcactggccatcagagaaatgcaaatcaaaaccacaat

SEQ ID NO: 121248 - DNA, 120 bp, synthetic construct
  source 1..120: mol_type = other DNA
tggccgttccagcgcgtggaggagcgctttgagcgcatcccggagccggtgcagcgccgcatagtctattggtccttcccccgcagcgagcgggagatctgcatgtactcgtccttcaac

SEQ ID NO: 121249 - DNA, 120 bp, synthetic construct; identical to SEQ ID NO: 26600
  source 1..120: mol_type = other DNA

SEQ ID NO: 121250 - DNA, 120 bp, synthetic construct; identical to SEQ ID NO: 26601
  source 1..120: mol_type = other DNA

SEQ ID NO: 121251 - DNA, 120 bp, synthetic construct; identical to SEQ ID NO: 26602
  source 1..120: mol_type = other DNA

SEQ ID NO: 121252 - DNA, 120 bp, synthetic construct; identical to SEQ ID NO: 26603
  source 1..120: mol_type = other DNA

SEQ ID NO: 121253 - DNA, 120 bp, synthetic construct
  source 1..120: mol_type = other DNA
atacccagtaatggaatggctgggtcaaatggtatttctagttctagatccctgagaaatcgccacactgacttccacaatggttgaactagtttacagtcccaccaacagtgtaaaaat

SEQ ID NO: 121254 - DNA, 120 bp, synthetic construct; identical to SEQ ID NO: 26604
  source 1..120: mol_type = other DNA

SEQ ID NO: 121255 - DNA, 120 bp, synthetic construct
  source 1..120: mol_type = other DNA
gtaatgggattgctgggtcaaatggtatttctagttctagatccctgagaaatcgccacactgacttccacaatggttgaactagtttacagtcccaaggtaagactttcataaaccttt

SEQ ID NO: 121256 - DNA, 120 bp, synthetic construct; identical to SEQ ID NO: 26605
  source 1..120: mol_type = other DNA

SEQ ID NO: 121257 - DNA, 120 bp, synthetic construct
  source 1..120: mol_type = other DNA
atcctctccagcacctgttgtttcctgactttttaatgattgccattctaactggtgtgaaatggtatctcattgtggttttgatttgcatttctctgatggccagtgatggtgagcatt

SEQ ID NO: 121258 - DNA, 120 bp, synthetic construct; identical to SEQ ID NO: 26606
  source 1..120: mol_type = other DNA

SEQ ID NO: 121259 - DNA, 120 bp, synthetic construct; identical to SEQ ID NO: 2173
  source 1..120: mol_type = other DNA

SEQ ID NO: 121260 - DNA, 120 bp, synthetic construct
  source 1..120: mol_type = other DNA
acctccctcccggacggggggctgaaccccccacctccctcccggacggggcggctggccgggcagaggggctcctcacttcccagtaggggcagccgggcagaggtgcccctcatctcc

SEQ ID NO: 121261 - DNA, 120 bp, synthetic construct; identical to SEQ ID NO: 3120
  source 1..120: mol_type = other DNA

SEQ ID NO: 121262 - DNA, 120 bp, synthetic construct
  source 1..120: mol_type = other DNA
agccaaggctcgagaactacgtgaagaatgcagaagcctcaggagccaatgtgatcagctggaagaaagggtatcagcgatggaagatgaaatgaatgaaatgaagcgagaagggaagtt

SEQ ID NO: 121263 - DNA, 120 bp, synthetic construct
  source 1..120: mol_type = other DNA
aacatcataatgacaggatcaaattcacacacaacaatattaactttaaatgtaaatggactaaatgctccaattaaaagacacagactggcaaattggataaagagtcaagacccatca

SEQ ID NO: 121264 - DNA, 120 bp, synthetic construct
  source 1..120: mol_type = other DNA
cgaaatgaaggcagaaataaagatgctctttgaaaccaacgagaacaaagacacaacataacacaatctctgggacacattcaaagcagtgtgtagagggaaatttatagcactaaatgc

SEQ ID NO: 121265 - DNA, 120 bp, synthetic construct
  source 1..120: mol_type = other DNA
tagatgcagaaaaggcctttgccaaaattcaacaacacttcatgctaaaaactctcaataaattaggtattcatgggacgtatctcaaaataataagagctatctatgacaaacccacag

SEQ ID NO: 121266 - DNA, 120 bp, synthetic construct
  source 1..120: mol_type = other DNA
cgcatatctacaactatctgatctttgacaaacctgagaaaaacaagcaatggggaaaggatttcctatttaataaatggtgctgggaaaactggctggccatatgtagaaagctgaaac

SEQ ID NO: 121267 - DNA, 120 bp, synthetic construct; identical to SEQ ID NO: 34031
  source 1..120: mol_type = other DNA

SEQ ID NO: 121268 - DNA, 120 bp, synthetic construct
  source 1..120: mol_type = other DNA
ctctacattcactccaagaaacacctgcaggatgtggacacttggaaaagccgttgcccgatctcctcttgtaataaactcttcacatccaagcacagcatgaagacgcacatggttaaa

SEQ ID NO: 121269 - DNA, 120 bp, synthetic construct
  source 1..120: mol_type = other DNA
cccccgcggaccgctgggctccggcccaggcgtggtgctgtacttgtgccccgaggcgcagtgcgggcaaaccttcgccaagaagcaccagctgaaggtgcacctgctgacgcacagcag

SEQ ID NO: 121270 - DNA, 120 bp, synthetic construct; identical to SEQ ID NO: 34029
  source 1..120: mol_type = other DNA

SEQ ID NO: 121271 - DNA, 120 bp, synthetic construct; identical to SEQ ID NO: 34030
  source 1..120: mol_type = other DNA

SEQ ID NO: 121272 - DNA, 120 bp, synthetic construct
  source 1..120: mol_type = other DNA
attttcattttattatatgaattttttttttctcgttgctcatgctagcgtgcaatggtgcaatctcggctcactgtaatctctgcttcctgggttcaagcggttatcctgcctcagcct

SEQ ID NO: 121273 - DNA, 120 bp, synthetic construct
  source 1..120: mol_type = other DNA
caatcttttccccacctttcctccttttctattccacaaaaccgccattgtcatcatggcccgttctcaatgagctgttgggtacacctcccagacggggtggtggctgggcagaggggc

SEQ ID NO: 121274 - DNA, 120 bp, synthetic construct
  source 1..120: mol_type = other DNA
caatctcggcactttgggaggccaaggcacgcggctgggaggtggaggttgtagtgagccgagatcacgccactgcaccccagcctgggcaccattgagcgctgagtgaacgagactcca

SEQ ID NO: 121275 - DNA, 120 bp, synthetic construct
  source 1..120: mol_type = other DNA
ctcggcctcccaaagtgttgggattacaagtgtgagccactgcacctggccctctgctatattttcttctagtagttttatagttttgggtcttacatttaggtctttgattcattttga

SEQ ID NO: 121276 - DNA, 120 bp, synthetic construct
  source 1..120: mol_type = other DNA
ttgcttgcagctttctacagaacaaactgcacagcttggtactgagctcttcattgtcagggtaagtctataatctcctccattcaggccactagatattcatgtttattgttttcaggc

SEQ ID NO: 121277 - DNA, 120 bp, synthetic construct
  source 1..120: mol_type = other DNA
ctgggattataggcatgagctgcctggtcagcagtggcaatttttgacaatttctaggcgaatgaacaaaaaaagaaagagagagagagagagagaaagaaagaaagttgctgctgtgat

SEQ ID NO: 121278 - DNA, 120 bp, synthetic construct; identical to SEQ ID NO: 17368
  source 1..120: mol_type = other DNA

SEQ ID NO: 121279 - DNA, 120 bp, synthetic construct; identical to SEQ ID NO: 17369
  source 1..120: mol_type = other DNA

SEQ ID NO: 121280 - DNA, 120 bp, synthetic construct
  source 1..120: mol_type = other DNA
gagaggagatgcccaggccaggcggccggcgcacgcgggttctctgtggccagcaggcggtgctgcaggagaggagatgcccaggcctggcggccggcgcacgcgggttctctgtggcca

SEQ ID NO: 121281 - DNA, 120 bp, synthetic construct
  source 1..120: mol_type = other DNA
taggtacataccatcatgcctggctatatttattttattttattaaatttattttttttatttttgtagagaggaggtcttgctgtgttgcccaggctgctctcaaactcatggccttaa

SEQ ID NO: 121282 - DNA, 120 bp, synthetic construct
  source 1..120: mol_type = other DNA
gatcttggctcactgcaatgtctgccttttgggttcaagtgattctctgcctcccaagtagctgggattacaggcacccaccaccacacctggctaatgtttgtatttttagtagagatg

SEQ ID NO: 121283 - DNA, 120 bp, synthetic construct; identical to SEQ ID NO: 35712
  source 1..120: mol_type = other DNA

SEQ ID NO: 121284 - DNA, 120 bp, synthetic construct; identical to SEQ ID NO: 35713
  source 1..120: mol_type = other DNA

SEQ ID NO: 121285 - DNA, 120 bp, synthetic construct; identical to SEQ ID NO: 35714
  source 1..120: mol_type = other DNA

SEQ ID NO: 121286 - DNA, 120 bp, synthetic construct
  source 1..120: mol_type = other DNA
ttgtgtgattggttcaaggccacaaaatctttaaagcctctttactgcatctttcagcagacaacctcatctctgggccagaggagcccagtgggagatgtgcacaaagaactcaactga

SEQ ID NO: 121287 - DNA, 120 bp, synthetic construct
  source 1..120: mol_type = other DNA
acctcccaaattcaagtgattcttctgcctcagcctcctgcgtagctgagattacaggtgcgagccaacacacccagctaatttttgtatttttagtagggttggggtttcaccatattg

SEQ ID NO: 121288 - DNA, 120 bp, synthetic construct
  source 1..120: mol_type = other DNA
tcctcagtttctcagaactttttggtgagccagacaggaggagtggagatgacaggtttactttctccttttcttgtggggctggagcccagggtcaagggaaagaaacctgtgacccca

SEQ ID NO: 121289 - DNA, 120 bp, synthetic construct
  source 1..120: mol_type = other DNA
gagttacgctaacctcctagaggttgagaactctctgtgaattcaaatggccttcttttggtgttggatggccaaccaaaggaactatagatagggaaataattgaccgtgtatttaagg

SEQ ID NO: 121290 - DNA, 120 bp, synthetic construct
  source 1..120: mol_type = other DNA
agagcccctcctttgggaaactaatcaggaaatagcattcaaacagctcaaggaagctttaggtcaggcccaaccttaggactaccagatataattaagcctctctttctatgtattcat

SEQ ID NO: 121291 - DNA, 120 bp, synthetic construct
  source 1..120: mol_type = other DNA
ccaagttctactccaaatgaaagagcctggtttgctcaagaagctggaaaatatattaaaggagggtggtggaaattcttcaatgggacattagccattccagaaatgttagctcctacg

SEQ ID NO: 121292 - DNA, 120 bp, synthetic construct
  source 1..120: mol_type = other DNA
cagacttgcaaagtgtccatgggtgggtacaggaaagaatgcctgtaagcctgacagaccagacacacccctttaaacctagtgactctgagttaaaaagttgaattaaattctctagga

SEQ ID NO: 121293 - DNA, 120 bp, synthetic construct
  source 1..120: mol_type = other DNA
taatttttctatttttactagagatgaggtttcaccatattggccaggctggtctcaaattcctaacctcatgatccacatgcctcagcctcccaaagtcctgggattacaggtgtgagc

SEQ ID NO: 121294 - DNA, 120 bp, synthetic construct
  source 1..120: mol_type = other DNA
gactggggcactctcatggagacaaatgcatggggctttagaaaaggctgggttggagggagcagaggagggcatggatggaatgcaggggtccctggaagcttcaggccagaggcactt

SEQ ID NO: 121295 - DNA, 120 bp, synthetic construct
  source 1..120: mol_type = other DNA
cattttttttcttccacaggtgtctctacctcccctttctagccttatcttccatcctgggacttcttaccactttggggtgccccccatgggtgtgacatgcaccttgggtgtgaatca

SEQ ID NO: 121296 - DNA, 120 bp, synthetic construct
  source 1..120: mol_type = other DNA
accatttttttttttccttccacaggttcctctacctcccctttctagcattaactgccattatgggccttcttggaagtgctgggaactgcagaaccacaaaaagggaatcacagccct

SEQ ID NO: 121297 - DNA, 120 bp, synthetic construct
  source 1..120: mol_type = other DNA
aataagaaaagaggaaaataacttgcacctacatactagattttagtgtccaagggcctagaagagaacattggatttctctaccccgctaggcacgccttccctagcagcaaagatgga

SEQ ID NO: 121298 - DNA, 120 bp, synthetic construct
  source 1..120: mol_type = other DNA
ttgagttctttgtgcacatctcccactgggctcctctggcccagagatgaggttgtctgctgaaagatgcagtaaagaggctttaaagattttgtggccttgaaccaatcacacaagcaa

SEQ ID NO: 121299 - DNA, 120 bp, synthetic construct; identical to SEQ ID NO: 35715
  source 1..120: mol_type = other DNA

SEQ ID NO: 121300 - DNA, 120 bp, synthetic construct
  source 1..120: mol_type = other DNA
ccaccatgcccggcctgtatttactaatcctgattgcagatgtgtactatgctcaaactttttaaattatacactttaattatgtgcagttttttgcatgtaagttatatatcaatataa

SEQ ID NO: 121301 - DNA, 120 bp, synthetic construct
  source 1..120: mol_type = other DNA
caatggtgaatgaattcactacctatttccagatttactatacagctatggaaatcaagaccatgtgtattgttgaaaaaaatagaacatatatcaatggaagagaaaagagaactcaga

SEQ ID NO: 121302 - DNA, 120 bp, synthetic construct
  source 1..120: mol_type = other DNA
tcaagagattgagaccagcctggctaacgtggtgaaaacccgtctctactaaaaatatgaaaaattagcgtatgtttcacagcatctgtaatcccagctactcaggaggctggggcagga

SEQ ID NO: 121303 - DNA, 120 bp, synthetic construct
  source 1..120: mol_type = other DNA
tgacttgcccaagatcatgtagctagaaacggcaggttaagaattcaggtttccttagagttcaaaacttttatcacaacatttttgataaccccccaagatactcatccttctctaata

SEQ ID NO: 121304 - DNA, 120 bp, synthetic construct
  source 1..120: mol_type = other DNA
ggcatcacttgagcccaagagttggtggctgcagtgctatgatggtgacactgcactccagcctgagcaaagggcaagacctgtttctaaaataaataaattttaaaaatgcaaatatcc

SEQ ID NO: 121305 - DNA, 120 bp, synthetic construct
  source 1..120: mol_type = other DNA
tgccttgctgccttcacttattaagttaggattttcttccttttagccctttagggatacagtagtttaaaagagcagtagccacatatgaaaggatcagatttagcttagagggaattc

SEQ ID NO: 121306 - DNA, 120 bp, synthetic construct
  source 1..120: mol_type = other DNA
aagggataatgttttcttttgtcactgatttaaatgtacctggatgtttctcagccatgtggctaagatcgaacacaagtaatacctgggccttttatatctaatctaatgtagaccagc

SEQ ID NO: 121307 - DNA, 120 bp, synthetic construct
  source 1..120: mol_type = other DNA
ccttgcttttggatgtgcaaactgaggctcagagagtttaagacacatagtcactttcaccaattaaatgatgaagctgccatgtaaacgtatttcatcacactcccgagaccttcttct

SEQ ID NO: 121308 - DNA, 120 bp, synthetic construct
  source 1..120: mol_type = other DNA
atgtaaaatatatatgcatccccaaattgtattatactcttttgagacctcacatttttttcacccaagaatataacattaatttctttcctttagaaaagacatgagactaaagaatgt

SEQ ID NO: 121309 - DNA, 120 bp, synthetic construct
  source 1..120: mol_type = other DNA
tggagcagtccatctttatgggaaaaccagcctagaatggtgatttcagtttcaggtgatttcgatagaattgtatttggctcagaaatgataagactggggccaagaaaaattttaaac

SEQ ID NO: 121310 - DNA, 120 bp, synthetic construct
  source 1..120: mol_type = other DNA
tcataagatacaattgagcaattgagatttgttctcccagtatctgaagatttttttggtcttgttttgttttttgggtttttggccctaaaattaggtgaattcagctttgggtctatt

SEQ ID NO: 121311 - DNA, 120 bp, synthetic construct
  source 1..120: mol_type = other DNA
accagacgtgcaaagaagagctggtaccaatcttactaaaactattccaaaaaattggggatgagggattcctaactcattctatgaaaccagtatcatcctgataccaaaatctggcag

SEQ ID NO: 121312 - DNA, 120 bp, synthetic construct
  source 1..120: mol_type = other DNA
acacacacaaataaacaaaacacctaggaatatatttaaccaaggaggtgaaagatctctactgggagaactacaaaacactgatgaaagaaataatagacaacacaaacaaatgggaaa

SEQ ID NO: 121313 - DNA, 120 bp, synthetic construct
  source 1..120: mol_type = other DNA
agctcactgtagcctcaatctcccaggctcaagtgatcctcccacttcagcctcccaaagcaattgggaccacaggtgcatgccactgtgcctggctaatattttatttttttgtagaga

SEQ ID NO: 121314 - DNA, 120 bp, synthetic construct
  source 1..120: mol_type = other DNA
tgttgactttgctcttggtcttgcttcataaagtgttaccactgggcatcaaattgggtgtttaaaggagaatatacctctcttggagagtagacacgatttttaggcctagatcgtctc

SEQ ID NO: 121315 - DNA, 120 bp, synthetic construct
  source 1..120: mol_type = other DNA
cgctttcagcaccgaatcctagccactagacaaccatgcagatgcggaaagctgctttctctcccttcttcgacctgaagcgacactttcctgtgctctaggaggacttgggtcttgtga

SEQ ID NO: 121316 - DNA, 120 bp, synthetic construct
  source 1..120: mol_type = other DNA
catctctgtcttagttcgggcttccataactatataccataaactgggtggctaattcacgacagaaatttatttctcacagttctggaggttggaagtccgagatcaaggtgccaacat

SEQ ID NO: 121317 - DNA, 120 bp, synthetic construct
  source 1..120: mol_type = other DNA
caatggtgcgattggtgcaatcttgagtcactgcaacctccccctcctgagtagctgggactacaggtgcatgccaccatgcctggctaatttttatattttcagtagagacggggtttc

SEQ ID NO: 121318 - DNA, 120 bp, synthetic construct
  source 1..120: mol_type = other DNA
aggaaactgatggttcttgggtttgcaggaatccgcccagagaacagatgaaagtaacaggtaccaatatcaaaactgcagtgactcaccagaaacactacgtgcttgccactttgctta

SEQ ID NO: 121319 - DNA, 120 bp, synthetic construct
  source 1..120: mol_type = other DNA
tagctatgtaaggagtagactagtttaaggaaatattgatggtcaaaatattaacatattagtcttttgatgaagttcaaatagagagatttcttttctcaattttccctggagagatta

SEQ ID NO: 121320 - DNA, 120 bp, synthetic construct
  source 1..120: mol_type = other DNA
caatactcaaatccaggagcagcaaactacttcacatgtcacaaacttttcacaggttcacaccagtggattccccagtgaaccagctgtcttaactcaggcttccataacaaaatacca

SEQ ID NO: 121321 - DNA, 120 bp, synthetic construct
  source 1..120: mol_type = other DNA
ccagaaggcaaagcgagagtcggtggctatggcctggaacccatttaggcaaaacagagggcgcgcggggacaaagcaatagagaagggtgggcaatacaggatctgtacaccatacatt

SEQ ID NO: 121322 - DNA, 120 bp, synthetic construct
  source 1..120: mol_type = other DNA
ttcagtaagttccttaactttgctgagcctcagtgtcctccactataaaagcagaacaccactacctatttgaggggatcactgtgtcaattaaatgaggaaatatatgtatagtggtca

SEQ ID NO: 121323 - DNA, 120 bp, synthetic construct; identical to SEQ ID NO: 35716
  source 1..120: mol_type = other DNA

SEQ ID NO: 121324 - DNA, 120 bp, synthetic construct; identical to SEQ ID NO: 35717
  source 1..120: mol_type = other DNA

SEQ ID NO: 121325 - DNA, 120 bp, synthetic construct; identical to SEQ ID NO: 35718
  source 1..120: mol_type = other DNA

SEQ ID NO: 121326 - DNA, 120 bp, synthetic construct; identical to SEQ ID NO: 35719
  source 1..120: mol_type = other DNA

SEQ ID NO: 121327 - DNA, 120 bp, synthetic construct; identical to SEQ ID NO: 35720
  source 1..120: mol_type = other DNA

SEQ ID NO: 121328 - DNA, 120 bp, synthetic construct; identical to SEQ ID NO: 35721
  source 1..120: mol_type = other DNA

SEQ ID NO: 121329 - DNA, 120 bp, synthetic construct; identical to SEQ ID NO: 35722
  source 1..120: mol_type = other DNA

SEQ ID NO: 121330 - DNA, 120 bp, synthetic construct; identical to SEQ ID NO: 35723
  source 1..120: mol_type = other DNA

SEQ ID NO: 121331 - DNA, 120 bp, synthetic construct; identical to SEQ ID NO: 35724
  source 1..120: mol_type = other DNA

SEQ ID NO: 121332 - DNA, 120 bp, synthetic construct; identical to SEQ ID NO: 35725
  source 1..120: mol_type = other DNA

SEQ ID NO: 121333 - DNA, 120 bp, synthetic construct
  source 1..120: mol_type = other DNA
ttactgtattttattttatttttttttgaaatggggtctagctatgttgcaaactcctggcctcaaactcctgggcgcaagcaatcctcctgccttagcctcccaaaatgctaggattac

SEQ ID NO: 121334 - DNA, 120 bp, synthetic construct
  source 1..120: mol_type = other DNA
caggagaattgcttgaacctgagaggcggaggttgcaatgagctgagatcgcacccttgcactccagcctgggcaacaacagcaaaaactccacctcaaaaaaaaaaaaaaaaaagaaaa

SEQ ID NO: 121335 - DNA, 120 bp, synthetic construct
  source 1..120: mol_type = other DNA
tcatcagtgcactccagcatgggtgacagagcaagactgtctcaaaatgaaagaaaaaacaagagagagagagagatacaccagggctctctctatgtcctgtgaggacacagcaagaag

SEQ ID NO: 121336 - DNA, 120 bp, synthetic construct
  source 1..120: mol_type = other DNA
tgcagtttgaatgcaaaggcagacagagtacactttgcacaagggacaaagaactgatagggaaacaaggacagtctccttttacaccttaaaaatcctcaaataagaacctggcttctg

SEQ ID NO: 121337 - DNA, 120 bp, synthetic construct
  source 1..120: mol_type = other DNA
agtacatgacagaagtaattgccagagatcccaaaccagccatcacctagcattagagatgtatctaatatcagacagaaagcctagtttcaactctgcagcagaggcctttgaaaagtc

SEQ ID NO: 121338 - DNA, 120 bp, synthetic construct; identical to SEQ ID NO: 91255
  source 1..120: mol_type = other DNA

SEQ ID NO: 121339 - DNA, 120 bp, synthetic construct
  source 1..120: mol_type = other DNA
cgggaggcgaaggttgcagtgagccgagatcacaccactgcactccagtctgggcgacagagtgagaccctgtctcagagggggaaaaaaaaagtgaatgtacacatattcacaaatctt

SEQ ID NO: 121340 - DNA, 120 bp, synthetic construct
  source 1..120: mol_type = other DNA
actcaaaatccaaatgagaacctatagagtatctattttttaggatttttgccatactggttccttgtgtttgcatgaaaaactgaaaattgactgtggagcttttaggcttgggttgga

SEQ ID NO: 121341 - DNA, 120 bp, synthetic construct
  source 1..120: mol_type = other DNA
tatgtatttccactaggttactatttccgagtgtgagtctctatttggaacttcagagagggagcctgtggcccagctactcctgtgtcactcagctctggagtggaattcttctaggta

SEQ ID NO: 121342 - DNA, 120 bp, synthetic construct
  source 1..120: mol_type = other DNA
tgacaactgttaacttggtgaacagcatgttcttgtttatgttaactgtgtactttgactgttcaagatccccattacttttcacttgtcatgccacatcattgctgcaagttagcctcc

SEQ ID NO: 121343 - DNA, 120 bp, synthetic construct
  source 1..120: mol_type = other DNA
atactcggttttctgcttctgtattttgtacattgtcagtctctgtgggttaagaactttgggactctcaagggtcatcttgacagaggagcttctgcagttgggaattgttacctttct

SEQ ID NO: 121344 - DNA, 120 bp, synthetic construct
  source 1..120: mol_type = other DNA
ctttctcctcttaataaacactgggctcatggtgtttcctttaacatgccaggcatgcttgaccctgtcctgtctcagggccctgctgttccctctgcctggaacattcttcccatagtg

SEQ ID NO: 121345 - DNA, 120 bp, synthetic construct
  source 1..120: mol_type = other DNA
aggttttgagaaatatttaggaggtaaaaaatcagtgcagcttattgttgacaaggtgaatagaaataggagtaggacagaaggaggactgtagatgcccttcaggcttctggttcaggg

SEQ ID NO: 121346 - DNA, 120 bp, synthetic construct
  source 1..120: mol_type = other DNA
agcagcatgtgggaaaacataaatgcacgcaataacctggctcacatgttaagagaactttctgactataatgagggatgtgttgctgccccaagcttcattatctaaggagtttgttga

SEQ ID NO: 121347 - DNA, 120 bp, synthetic construct
  source 1..120: mol_type = other DNA
gcagatcaccggaggtcaggagttcgaggccaacctggccaaagtggtgaaaccccgtctctactaaaaatacaaagagatttagccgtgcgtggtggcatgtgcctgtaatcccagctg

SEQ ID NO: 121348 - DNA, 120 bp, synthetic construct
  source 1..120: mol_type = other DNA
ggaacaccaaatccctcgcagctgcacggggctgagccagggccacgggcggggtcggccatcccagagtcctgacagctccgtggtgtatgccaaggggcctgggccgctgaccgaggg

SEQ ID NO: 121349 - DNA, 120 bp, synthetic construct
  source 1..120: mol_type = other DNA
gaggagcttgggctccatctcatgccccaggcccaaggacacacaccccagctgagaccttgctcacatggaggggctgggacatgggaacatggggagcaacatggccaggcttctcct

SEQ ID NO: 121350 - DNA, 120 bp, synthetic construct
  source 1..120: mol_type = other DNA
aaggctgtgttgtccgagtggaggtggatggcacctttattcctttccctgcttcttccactgggatcgcacagaaaaagttttggtaggcagatcccaggccccctggccaggtaaggc

SEQ ID NO: 121351 - DNA, 120 bp, synthetic construct
  source 1..120: mol_type = other DNA
cctggaggacgtggcttcaggaagggctgctacaagccagtggcagaacaagggcaaccagggtcagacacggtggaaggagggaagtcccagagccgagcatgggtggacatcagaggg

SEQ ID NO: 121352 - DNA, 120 bp, synthetic construct; identical to SEQ ID NO: 35726
  source 1..120: mol_type = other DNA

SEQ ID NO: 121353 - DNA, 120 bp, synthetic construct; identical to SEQ ID NO: 35727
  source 1..120: mol_type = other DNA

SEQ ID NO: 121354 - DNA, 120 bp, synthetic construct; identical to SEQ ID NO: 35728
  source 1..120: mol_type = other DNA

SEQ ID NO: 121355 - DNA, 120 bp, synthetic construct; identical to SEQ ID NO: 35729
  source 1..120: mol_type = other DNA

SEQ ID NO: 121356 - DNA, 120 bp, synthetic construct; identical to SEQ ID NO: 35730
  source 1..120: mol_type = other DNA

SEQ ID NO: 121357 - DNA, 120 bp, synthetic construct; identical to SEQ ID NO: 35731
  source 1..120: mol_type = other DNA

SEQ ID NO: 121358 - DNA, 120 bp, synthetic construct; identical to SEQ ID NO: 35732
  source 1..120: mol_type = other DNA

SEQ ID NO: 121359 - DNA, 120 bp, synthetic construct; identical to SEQ ID NO: 35733
  source 1..120: mol_type = other DNA

SEQ ID NO: 121360 - DNA, 120 bp, synthetic construct; identical to SEQ ID NO: 35734
  source 1..120: mol_type = other DNA

SEQ ID NO: 121361 - DNA, 120 bp, synthetic construct; identical to SEQ ID NO: 35735
  source 1..120: mol_type = other DNA

SEQ ID NO: 121362 - DNA, 120 bp, synthetic construct; identical to SEQ ID NO: 35736
  source 1..120: mol_type = other DNA

SEQ ID NO: 121363 - DNA, 120 bp, synthetic construct; identical to SEQ ID NO: 35737
  source 1..120: mol_type = other DNA

SEQ ID NO: 121364 - DNA, 120 bp, synthetic construct
  source 1..120: mol_type = other DNA
gtatttcataggatttttgttctctctctccctctttttgtgcatatgtgtgtgtgtctgattagtctttattatcttaaaatggttagtcctgatagacctgtttcttcaaaatttctc

SEQ ID NO: 121365 - DNA, 120 bp, synthetic construct; identical to SEQ ID NO: 35738
  source 1..120: mol_type = other DNA

SEQ ID NO: 121366 - DNA, 120 bp, synthetic construct; identical to SEQ ID NO: 35739
  source 1..120: mol_type = other DNA

SEQ ID NO: 121367 - DNA, 120 bp, synthetic construct; identical to SEQ ID NO: 35740
  source 1..120: mol_type = other DNA

SEQ ID NO: 121368 - DNA, 120 bp, synthetic construct; identical to SEQ ID NO: 35741
  source 1..120: mol_type = other DNA

SEQ ID NO: 121369 - DNA, 120 bp, synthetic construct
  source 1..120: mol_type = other DNA
ttctgagcttgtatctgcactcccagtttgccccctcccccaggttctgtccaggaagcttcacgttagtcaagattattacaaaattcatctgaaagcttgcttctccttgtagtcttt

SEQ ID NO: 121370 - DNA, 120 bp, synthetic construct; identical to SEQ ID NO: 35743
  source 1..120: mol_type = other DNA

SEQ ID NO: 121371 - DNA, 120 bp, synthetic construct; identical to SEQ ID NO: 35744
  source 1..120: mol_type = other DNA

SEQ ID NO: 121372 - DNA, 120 bp, synthetic construct
  source 1..120: mol_type = other DNA
ttctattttgaatagtggtaaaatacacataaaatttactaccttaaccacttctaagtggcagttggaacaggggtcaaggagagcccttgggttgggtaatgtatattcacattgcca

SEQ ID NO: 121373 - DNA, 120 bp, synthetic construct; identical to SEQ ID NO: 35745
  source 1..120: mol_type = other DNA

SEQ ID NO: 121374 - DNA, 120 bp, synthetic construct; identical to SEQ ID NO: 35746
  source 1..120: mol_type = other DNA

SEQ ID NO: 121375 - DNA, 120 bp, synthetic construct; identical to SEQ ID NO: 35747
  source 1..120: mol_type = other DNA

SEQ ID NO: 121376 - DNA, 120 bp, synthetic construct
  source 1..120: mol_type = other DNA
taacaaatccaccttggcaaaaggacataaaatacgtcttatggtcagaaaaatcaacattttgtgtatttacttagtttacgaaaagtactgaaaatgctattattagctgaatttgtg

SEQ ID NO: 121377 - DNA, 120 bp, synthetic construct
  source 1..120: mol_type = other DNA
cttggggctggtggtgctggagatactggggctgaagcatatggagtcacccagcccggtgtccatgtccttggataggccattgcttttagaggtggagatgggtgtgcaggccgatgt

SEQ ID NO: 121378 - DNA, 120 bp, synthetic construct
  source 1..120: mol_type = other DNA
ggaggcagagcctgcagtgagccaagatcgcgcgattgcactccagcctgggctacagaaagagagtccataaaaaaaaaaaaaaaaaaaaaaaagatacattttctgttgtttggatag

SEQ ID NO: 121379 - DNA, 120 bp, synthetic construct; identical to SEQ ID NO: 35748
  source 1..120: mol_type = other DNA

SEQ ID NO: 121380 - DNA, 120 bp, synthetic construct; identical to SEQ ID NO: 35749
  source 1..120: mol_type = other DNA

SEQ ID NO: 121381 - DNA, 120 bp, synthetic construct; identical to SEQ ID NO: 35750
  source 1..120: mol_type = other DNA

SEQ ID NO: 121382 - DNA, 120 bp, synthetic construct; identical to SEQ ID NO: 35751
  source 1..120: mol_type = other DNA

SEQ ID NO: 121383 - DNA, 120 bp, synthetic construct; identical to SEQ ID NO: 433
  source 1..120: mol_type = other DNA

SEQ ID NO: 121384 - DNA, 120 bp, synthetic construct; identical to SEQ ID NO: 35752
  source 1..120: mol_type = other DNA

SEQ ID NO: 121385 - DNA, 120 bp, synthetic construct; identical to SEQ ID NO: 35753
  source 1..120: mol_type = other DNA

SEQ ID NO: 121386 - DNA, 120 bp, synthetic construct; identical to SEQ ID NO: 370
  source 1..120: mol_type = other DNA

SEQ ID NO: 121387 - DNA, 120 bp, synthetic construct; identical to SEQ ID NO: 42003
  source 1..120: mol_type = other DNA

SEQ ID NO: 121388 - DNA, 120 bp, synthetic construct; identical to SEQ ID NO: 42032
  source 1..120: mol_type = other DNA

SEQ ID NO: 121389 - DNA, 120 bp, synthetic construct; identical to SEQ ID NO: 35754
  source 1..120: mol_type = other DNA

SEQ ID NO: 121390 - DNA, 120 bp, synthetic construct
  source 1..120: mol_type = other DNA
ggaactccaactttctgcgctaactctgcttttactttccaggcctgcttttactttccaggcagaaaattgggagatccttctcagaagaaactgaaatgtcttcaataaagatcccca

SEQ ID NO: 121391 - DNA, 120 bp, synthetic construct
  source 1..120: mol_type = other DNA
agatattttccatctgcaaaagcacatctgtttctttttatgtgtgtgtgtggggcaactttctttggccttttgtcatcctagttcaatatagcgtgggtttccctagatatgctcgat

SEQ ID NO: 121392 - DNA, 120 bp, synthetic construct
  source 1..120: mol_type = other DNA
actatttgagtgtttacttacatggtttgtacagttgcttcttcttatttctacaactaagaataaaaaaaaaaactggtcacttctgatacaaataccataaaataaaagtagttgtta

SEQ ID NO: 121393 - DNA, 120 bp, synthetic construct
  source 1..120: mol_type = other DNA
tttgtatactcattttaaacatcaaaatttaggccaggctctgtggcttacacctgtaatcccagctctttgggagactgaggtgggtggatcacgaggttaggagatcaagaccatcct

SEQ ID NO: 121394 - DNA, 120 bp, synthetic construct
  source 1..120: mol_type = other DNA
tataacaaaaagatgtttaactggctcaaagattttcaggctgtacaaacatggctttaacatctgcttctggtgagggcctcagcaaacttataatcatgataaaaggcaaaggggaag

SEQ ID NO: 121395 - DNA, 120 bp, synthetic construct; identical to SEQ ID NO: 35755
  source 1..120: mol_type = other DNA

SEQ ID NO: 121396 - DNA, 120 bp, synthetic construct
  source 1..120: mol_type = other DNA
ttaaaaattaagagcccaaccaaagtttaaatagaagagctataagacatttcctctacagtaatgaaatctctggcatttaaatgaaaccaataagccaactggatttaatatgtttat

SEQ ID NO: 121397 - DNA, 120 bp, synthetic construct; identical to SEQ ID NO: 10660
  source 1..120: mol_type = other DNA

SEQ ID NO: 121398 - DNA, 120 bp, synthetic construct
  source 1..120: mol_type = other DNA
cacctccttaccttcaggcatctcctggtcacgaatgtggtgcatgtggaggtcctcaccaacttcaacggtcacctcagcaggctgcacagcagcagccatgggcgctcctgccatcct

SEQ ID NO: 121399 - DNA, 120 bp, synthetic construct; identical to SEQ ID NO: 35756
  source 1..120: mol_type = other DNA

SEQ ID NO: 121400 - DNA, 120 bp, synthetic construct; identical to SEQ ID NO: 35757
  source 1..120: mol_type = other DNA

SEQ ID NO: 121401 - DNA, 120 bp, synthetic construct
  source 1..120: mol_type = other DNA
gtattttagtagagatggggtttcaccatgttgctcaggttgatctcgaactcctgacctcaggtgatccacctgccttggcctcccaaagtgctgggattgcaggcgtgagccaccact

SEQ ID NO: 121402 - DNA, 120 bp, synthetic construct; identical to SEQ ID NO: 35758
  source 1..120: mol_type = other DNA

SEQ ID NO: 121403 - DNA, 120 bp, synthetic construct; identical to SEQ ID NO: 35759
  source 1..120: mol_type = other DNA

SEQ ID NO: 121404 - DNA, 120 bp, synthetic construct
  source 1..120: mol_type = other DNA
ctaagaagacatgattaaataaatgtcaggttctgaacaattaaactggttacttctgttacattgaaggagagaataccttggagtctaacacagttttccaaataaaaagataataag

SEQ ID NO: 121405 - DNA, 120 bp, synthetic construct
  source 1..120: mol_type = other DNA
tcaccaattttgaggggcaaatatccagtctttcaccattagctatgctgtaaaatgtagtgtttttggttgttgttgttgttgatgtcctctatcaggttgaagaatttccattctttt

SEQ ID NO: 121406 - DNA, 120 bp, synthetic construct; identical to SEQ ID NO: 35760
  source 1..120: mol_type = other DNA

SEQ ID NO: 121407 - DNA, 120 bp, synthetic construct; identical to SEQ ID NO: 35761
  source 1..120: mol_type = other DNA

SEQ ID NO: 121408 - DNA, 120 bp, synthetic construct; identical to SEQ ID NO: 35762
  source 1..120: mol_type = other DNA

SEQ ID NO: 121409 - DNA, 120 bp, synthetic construct; identical to SEQ ID NO: 35763
  source 1..120: mol_type = other DNA

SEQ ID NO: 121410 - DNA, 120 bp, synthetic construct; identical to SEQ ID NO: 35764
  source 1..120: mol_type = other DNA

SEQ ID NO: 121411 - DNA, 120 bp, synthetic construct; identical to SEQ ID NO: 35765
  source 1..120: mol_type = other DNA

SEQ ID NO: 121412 - DNA, 120 bp, synthetic construct; identical to SEQ ID NO: 35766
  source 1..120: mol_type = other DNA

SEQ ID NO: 121413 - DNA, 120 bp, synthetic construct; identical to SEQ ID NO: 35767
  source 1..120: mol_type = other DNA

SEQ ID NO: 121414 - DNA, 120 bp, synthetic construct; identical to SEQ ID NO: 35768
  source 1..120: mol_type = other DNA

SEQ ID NO: 121415 - DNA, 120 bp, synthetic construct; identical to SEQ ID NO: 35769
  source 1..120: mol_type = other DNA

SEQ ID NO: 121416 - DNA, 120 bp, synthetic construct; identical to SEQ ID NO: 35770
  source 1..120: mol_type = other DNA

SEQ ID NO: 121417 - DNA, 120 bp, synthetic construct; identical to SEQ ID NO: 35771
  source 1..120: mol_type = other DNA

SEQ ID NO: 121418 - DNA, 120 bp, synthetic construct; identical to SEQ ID NO: 35772
  source 1..120: mol_type = other DNA

SEQ ID NO: 121419 - DNA, 120 bp, synthetic construct; identical to SEQ ID NO: 35773
  source 1..120: mol_type = other DNA

SEQ ID NO: 121420 - DNA, 120 bp, synthetic construct; identical to SEQ ID NO: 35774
  source 1..120: mol_type = other DNA

SEQ ID NO: 121421 - DNA, 120 bp, synthetic construct; identical to SEQ ID NO: 35775
  source 1..120: mol_type = other DNA

SEQ ID NO: 121422 - DNA, 120 bp, synthetic construct; identical to SEQ ID NO: 35776
  source 1..120: mol_type = other DNA

SEQ ID NO: 121423 - DNA, 120 bp, synthetic construct; identical to SEQ ID NO: 35777
  source 1..120: mol_type = other DNA

SEQ ID NO: 121424 - DNA, 120 bp, synthetic construct; identical to SEQ ID NO: 35778
  source 1..120: mol_type = other DNA

SEQ ID NO: 121425 - DNA, 120 bp, synthetic construct; identical to SEQ ID NO: 35779
  source 1..120: mol_type = other DNA

SEQ ID NO: 121426 - DNA, 120 bp, synthetic construct; identical to SEQ ID NO: 35780
  source 1..120: mol_type = other DNA

SEQ ID NO: 121427 - DNA, 120 bp, synthetic construct
  source 1..120: mol_type = other DNA
tcactgtatttgtctgatgctgttagagccttctctgtagtggctgcaagtctgctaataatcagaatcacttgggaagcaattagaagtatacagagatgagtcctaacccagactcat

SEQ ID NO: 121428 - DNA, 120 bp, synthetic construct
  source 1..120: mol_type = other DNA
tgaaaaacatactttctcatgttctaaagggcccaattcatactgcccactgtatcactctgacaaggtaacaaagtgacctcagaaacctggctaacaagagatcaaggcataacccta

SEQ ID NO: 121429 - DNA, 120 bp, synthetic construct
  source 1..120: mol_type = other DNA
ttgcccattaggagtgtacaagcatatttacacaacgccatggagcatgggtgaaggatgagcccaggacaagattaaatcagcagactgaacgataaatgaacagtaatgcattcatat

SEQ ID NO: 121430 - DNA, 120 bp, synthetic construct
  source 1..120: mol_type = other DNA
taagacttatattccatacgtgtgtgtttttctctggttagtctgtcttttgttacaggagcctctgccatgaacccggggataagtgaggaaagaaatttttcctccttcacagtatca

SEQ ID NO: 121431 - DNA, 120 bp, synthetic construct
  source 1..120: mol_type = other DNA
gcagaaagaaagaaaaaaaaaaaagcttggattaagtgatgagctgcccgcctctaaaaggaccaggaggcgtatcaagcctgagtgccggaaaacccacggcaatcttcagcagccacc

SEQ ID NO: 121432 - DNA, 120 bp, synthetic construct
  source 1..120: mol_type = other DNA
ccactttctcctgaccttcctcgtggctgtcagcccaatgtctatcatgtgttattccctcggtttgttcaaaggcctgttttggatacttaaagacatgtggaataactatgagaattc

SEQ ID NO: 121433 - DNA, 120 bp, synthetic construct
  source 1..120: mol_type = other DNA
actgctaaccaatgtggccccttaatgaacctgggcacacctttcttcatctattaaatgatgtgtttgagccagtggatctccaggattcttcagaatcctaaaatcacattgtcttct

SEQ ID NO: 121434 - DNA, 120 bp, synthetic construct; identical to SEQ ID NO: 35781
  source 1..120: mol_type = other DNA

SEQ ID NO: 121435 - DNA, 120 bp, synthetic construct; identical to SEQ ID NO: 35782
  source 1..120: mol_type = other DNA

SEQ ID NO: 121436 - DNA, 120 bp, synthetic construct
  source 1..120: mol_type = other DNA
agattatagcttcctctcccaaagcgtaaccacaacctgacgcaggatgagttggtttgaaaataccgcatacaatatcctcttgagtagaatcataatttagaactctaaaaatgaccg

SEQ ID NO: 121437 - DNA, 120 bp, synthetic construct; identical to SEQ ID NO: 35783
  source 1..120: mol_type = other DNA

SEQ ID NO: 121438 - DNA, 120 bp, synthetic construct; identical to SEQ ID NO: 35784
  source 1..120: mol_type = other DNA

SEQ ID NO: 121439 - DNA, 120 bp, synthetic construct; identical to SEQ ID NO: 35785
  source 1..120: mol_type = other DNA

SEQ ID NO: 121440 - DNA, 120 bp, synthetic construct; identical to SEQ ID NO: 35786
  source 1..120: mol_type = other DNA

SEQ ID NO: 121441 - DNA, 120 bp, synthetic construct; identical to SEQ ID NO: 35787
  source 1..120: mol_type = other DNA

SEQ ID NO: 121442 - DNA, 120 bp, synthetic construct; identical to SEQ ID NO: 35788
  source 1..120: mol_type = other DNA

SEQ ID NO: 121443 - DNA, 120 bp, synthetic construct
  source 1..120: mol_type = other DNA
tttatttgtgctttcaaactgttttcttaaaaaaaaaaaaactacagagtagtgagtgggggcgggggggtaaggggtggaatactcaaaacgtgttcaaaatcaaacgagccagaaact

SEQ ID NO: 121444 - DNA, 120 bp, synthetic construct
  source 1..120: mol_type = other DNA
actggctagccatatgcagaaaactgaaactgggccccttccttacacctgatacaaaaattaactcaagattgattaaagtcttaaatgttagacctaaaaccataaaaacccaagaag

SEQ ID NO: 121445 - DNA, 120 bp, synthetic construct
  source 1..120: mol_type = other DNA
agtgtctgcgtgaccgggcataactggagggacagtaaatgactcttgtgtgagaggatgagggaggggtgagaggggctgactacccccaggacttgaggtgcagtgagactccttagc

SEQ ID NO: 121446 - DNA, 120 bp, synthetic construct
  source 1..120: mol_type = other DNA
gtagtggggtgaatgttcctttcagtttgttcagcttctaaaaaaaataatcaaaataacaaattatattggcagccccagcctcttggatggtcttaccaagcccagccatgtgaagct

SEQ ID NO: 121447 - DNA, 120 bp, synthetic construct
  source 1..120: mol_type = other DNA
ttggcctaggcctggaggaggcccatcctgacaaagcccaagtagagatcagttaggagggtgcgtgccttgccctggtccttccatggctcccagcagacctcagttaggcgggtgcgt
